United States Patent Application Publication US 2026/0103690 A1 - sequence listing, part 43

SEQ ID NO: 203650 - protein, 385 aa, unidentified
MKKNNIPEQSPSKRANKMNRKVNRTGQKSRRQTGPVTIGLDLGDKSSRYCVLNEEGEVVLERSVGSTKKAITQVFGAIPRCRIAMEVGTHSPWVSRLLERLGHEVIVANARQVKLISHSSRKNDRLDAQMLARLARVDPQLLRPIRHRSEQAQGHLMVIRVRAALVDARTGLVNAARGLAKSMGERLPKCDTDQMGEERLATLPQGLRETLKPLLKEVESLTEKIKECDVKIEQIARTKYPETSLLRQVSGVGTLIALTFVLTVEDKKRFAKSREVGCFVGLRPSQSDSGESKPQLPITKEGDQYLRKMLVQGAHCILSKRGPDTDLKRWGVALSDRGGKNAKKRAIVAVARKLGILLHRLWVTGEVYEPLRNSQAAAKQKKTAA

SEQ ID NO: 203651 - protein, 323 aa, unidentified
MQGKIERSAPAKIYVGIDASKAWLDVASTPISTSFRVANDKRGHKALMKKLSGLEVAAVVIEATGKYHRGVHIFLHERGLPVCVVNPYRSRKFADALGELAKTDKIDAMVLARYAELVEPEAQAPAPKAVAEMAELVHARNTAVAAQTALRNRLGAAHSSLLKRELRIQLRSSAAHIKRLEKAIRVVITDNAELARRFKILTSIPGIGPIAAAGLVGLMAELGTLSSKQVAALVGVAPMNWDSGQMRGRRAIKGGRPAVRRLIYMAALSAAVRGANPDLKAFYEQLRRRGKASKVAIVATMRKLVILANTLIAQDRQWCPKPT

SEQ ID NO: 203652 - protein, 394 aa, unidentified
MFSFFVGIDVGKWNHQAAFVNHIGTQVAPGLAFTNTSEGFQLLLSSLNSFDKTLTVIGLEATGHYWLALFSFLVDNAWTVKVINPMQSDALRNINIRKTKTDRTDSVLIADVLRFGRYTETVLPEEPIIQLRELSRCRTGLVESSGNLKRKILGILDRIFPEFASCFSTVFGTAPTELLQEFADPEELANCDIEKLVKLLEKESRGRHSDKKAQELKDKAAQSIGIRLGLDALKFELRLLLQQLDFIKKQIKDIDKFLKKLMKRHEILLSIPGISSVLGAAILGEIGDVNRFATPQQLQAFAGMDPSVSQSGNFTGTQGKISKRGSPYLRRALYLAANVARRFDTVFKDHYEKLVARGKHPKQAMGAVATKLLRVIHAVLKSQKPYDPKKLAHV

SEQ ID NO: 203653 - protein, 411 aa, unidentified
MERIVERPGALDVHKASVTACVRVWQGRELQEQMAEFATTVHGLLALRDWLEALGVKQVAMEATGVYWKPVWAVLEDRFELMLVNARAVKQVPGRKTDIKDAQWLCQLLEAGLLRASFVPPKPIRTLRNLTRYRKTQISDRQREANRLHKILEDTGIKLGCVASDILGKSGRDMLDALVAGTTDPNVLADLARGQLRKKLPALREALVGRFADEHALIVGQILAHIDFLDEAIDRLSAEIEEQIAPFAAQRDLLMTIPGVKQRAAEVLISEIGVDMSAFPTPKHLASWAKVSPGNDQSAGKRRSGKTGKGNKWLRATLNESANAAARTKNSYLAAQYQRLRGRRGHSKAVTAVGHSILTAAWHMLQTGELYRDLGGDYFIRQNPERLTKRLIRQLEALGHTVTLQPREAAA

SEQ ID NO: 203654 - protein, 327 aa, unidentified
MNFIGVDVDSKYLVCRIQRGEKRFPIAQFDNNPVGFRKFSKWATKRQVPARVTMEATGVYSLPFALSLHETPSIEVSVMNPKAIKNFIIAQMQRGKTDALDATAILEYNLRMKFKPWQPPREEVLELQHITRRIVQLNTELTRERNRHKAASRLGVIGRVVTNDTAVNMRHLQRRIDTMEQAAIDIVKHDPQLNPRLEQLVSVTGIAMKTGPRLLAELASLPGDMSGPQWVAHAGLDPRPHESGSSTNKPRRVSKAGNRYIRGALFYPALVASQKDKHVKAFYEKLLNKGKKPMQALVAIMRKLLLAIWGMFKSNTNWDGEKFYKIA

SEQ ID NO: 203655 - protein, 342 aa, unidentified
MDYYAGIDVSLEFSSVCVVDATGQIIREAKVASEPGALATFLAGLGLPLTRVGLEAGPLSQWLHAGLQTAGYDVVLLETRHVKAALSAMIVKTDRKDARGIAQLLRMGWFRPVHCKSPPAQEVRALLVARKQLQAKMRDVEFSLRGLLRGFGLKVGEVSKGQFAARVRLLTAGHAMLEQIAEAMLRAREALHTEFNKLHRSMLAIVRSDEVCRRLMSVPGVGALIAVTFTSAVDQPERFSRSRAVGAHFGLTPKKYQSGETDITGAVSRVGDPMVRTALYEGAHIMLTRAVRFSSLKRWALEVAKRRGMKRAKVALARKLAVLLHRMWVDGSTFRWNREVTA

SEQ ID NO: 203656 - protein, 353 aa, unidentified
MAHPAPPRVTIGAGTHLDVHAAHAGDQLGRRLATVSIPTTPAGYQGLLAWARGLGEVEAFGIEGTGSYGAALARFLRAHRQVVLEGNRPDRQARRRRGKSDPLDAEAAARAVQAGEATVVPKAADGVVEMLRCLRVARSTAVKARTQASNAIKALVVTAPPELREQLRGLQTATLVPTAAAFPPGKPTTPAAAATLALRLLAMRHQALSAEITTLDSDLERLTTKAAPGLVALFGVGPASAGACRPPPATTPTGCARKACFAMRCGACPVEASSGTAVRHRRNRGGDRQANAALHRIVVVRLRWHQPTKDDLARRLAEGKTTKEVIRCLKRYVAREVFAALNQMGKDNLTKAA

SEQ ID NO: 203657 - protein, 264 aa, unidentified
MKYIALDCHKAYDHATMIDSDTGEIKNKRLNHFKGEFSEFIGDGAGTRMVIEACRDWSRSYELCKDLVEEVILAHPLKVKAIASAKIKTDKIDSQILARLLMADLIPQAHLRKDENREKQRVIRHRAFMVAMRTQVKCRIHNLVDNQLLTKDVLDAKPSGLFLKKGRKWLDSIDWSADDRALLDSHLRVLDILNGEIAATDEIVKEIYEKDPDAKLLATIPGIGVTLGTLLSIEIDGIERFSSVSKLCSYAGLVPSTHSSGGKT

SEQ ID NO: 203658 - protein, 343 aa, unidentified
MQAITTIGLDIAKSVFQVHGIDAEGHVVIRRQLKRRYVLAFFQKLPPCLVGIEACASSHHWSREFQALGHTVRLMPPAYVKPYVKRHKNDAVDAEAICEAVTRANMRFVATKSCEQQSCLTLHRTRHLFIRQQTSVINVVRALFAEFGIVAPVGRNGVEQLLGVAADSSDKRLPDIARACVAALGAQLRILKAQILEFDRMIMAWHRSSEASRRLDDIPGIGPALATALVASVADPKVFRSGRDFSAWIGLVPKQNSSGGKDRFGGISKRGDRYLRSLFTTGALAVIRHAKIHGTRHRPWLTALLARRPTKVAAIALANKIARIAWAIMAKGQCYKEPAALAA

SEQ ID NO: 203659 - protein, 317 aa, unidentified
MRTPTASFVGIDVSKQQLDVAVRPSGETWVVAHDEAGLSALVARLRDLAPTLIVLEATGGLEVTLAGALAAALLPVVVVNPRQVRDFARSTGILAKTDRLDAQLLAQFAEAVRPALRPLPDAQAQELTALLQRRRQLVEMLTAEKNRLTVASRRIRPQLQAHIEWLHKQIAQFDEDLRQVIRASPLWREKDDLLRSTPGVGPVLATTLVAALPELGLLTRRQIAALVGVAPFNRDSGTLRGRRAVWGGRAQVCAVLYMSTVVAVRHNPVLIAFYQRLRAAGKAPKLALTACMRKLLTILNAMLKHHRRWAPVRAQHA

SEQ ID NO: 203660 - protein, 355 aa, unidentified
MKQLCAGVDVSAASLEVAWRGKDGRIVRRTVRNDVTGHRALIKELRRAGSGAPVRVAMEATGIYGLDLAVALDGAEGVEVMVANPRVIANFGKALLQRSKTDVLDAETILMFVERMPFIAWHSPSAAALQLRAIARRIAALTKMASGEKTRRRHAAASEVIGTLLERSARQTAALLEREIAKLRKAALALIAADTQLARRMSLLTSIKGIGEVSAVPILAELMLLPADMTDRQWVAHAGLDPRLFESGSSVRARTRISKAGNHYLRASLYLPALVASRYEPNVKAFREHLSARGKRPKSIIVAVMRKLLHAIHAMFRNDALFDGTKFYRSTPARVQATSGIPPSAIFEVSSALSS

SEQ ID NO: 203661 - protein, 338 aa, unidentified
MIHVGVDLHQRFCYMTALEARGKILQAGTVTNEKLALRRYFRQFRGKEVQVAVEACGFWPAFREVVEPEVKRLVLVHPQRVKAIASAKLKNDRVDSATVAHLLRCDLLPESWKADRGTQARRQQVRLRATLVRHRTRLKNQVHAVLHQQGLRSPVTDLFGKRGRLWLAEVKLPVQARESVNVCLRLLDGYSEEIQKQNLQLSEKAKQDKRAEWLMTIPGIGECSAMMLLAEIGDIGRFQDKEALCSYAGLVPRVRESAGKAARGGITRQGSPWMRWILVEAAQVATRCSPAAKRYYERLARKKHKHVARVALARKLLIAVYALLRDGVVFDEQKFATV

SEQ ID NO: 203662 - protein, 317 aa, unidentified
MNPTTPVHVGIDVAKAKLDVCLLPGGQTLSVGNDDDGIAQIIALLKQHSVALVLLEATGRYERRVASELLEADLPVAVVNPRQTRDFARALGKLAKTDTIDARTLAQFAQLGHARLCEKQPQNRTLLDDLVTRRRQVTAMMAMEKTRAQIPQDKRTRAMIAKVIRVLEQQREDLDRRIAQLIESDDDWKNKRDLLSSVPGVGPVTASGLVADLPELGTLNRQQIAALVGVAPINRDSGTLRGKRSIFGGRASVRCALYMAAFCAMKFNPVIRRFAERLRAAGKPFKVIVVAAMRKLLTILNVMLKENRPWDPKLQTA

SEQ ID NO: 203663 - protein, 317 aa, unidentified
MQQRKTSTKCAGIDVGKHWLDGALHGHAETVRVGRDAAGIDALIAWLQGHGIERVGLEASGGYERMVIEALEAAGLEVVLHQPLEVRLFARLKRLRAKNDRLDAALIAAATAQVDAAKAAADPRLRDLADRLTAYEQISDQLAELKGFLEHVASKDVMRQLKAQVASLARLKARLAAGVLERLRSYPDLAARYELLISLPGVGPIVAASLVVRMPELGQMKRGQAAALLGVAPFDHDSGQLKGKRFIAGGRRRPRRLVYLAALSAKRWDPNQKAFAQRLAERGKPAKLIIVAVMRRLIEAANLVLARQTPWVKATST

SEQ ID NO: 203664 - protein, 367 aa, unidentified
MRKSITVAEGQTRDFAERKYTVGLDLGDRWSWYCVLDERGEVVFEHKLSTTPKALGEVFGVMPHSRVALETGTHSPWISRLMKELGHEVIVAQASKVRLIGESRKKDDRLDARTLARLARIDPELLGPIQHRSARAQADLIMIRARAGLVRARTALINAARGLTKSYGERLQGCNPRNMDAEKRKGLSAELQLALEPLLRAIESLSQQILDYNERIEQMAGDGYPEVARLRQVKGVGTLIALTYVLTLEDPQRFTKSREAGCYVGLQPGRRNSGSSTPQLHISKEGDPYLRTLLVQGAQHILGPFGEDSDLRRWGLKLAERGGKNGKKRAVIAVARKLAVLLHRLWVSGEAYEPLRNQRAVELPAAA

SEQ ID NO: 203665 - protein, 393 aa, unidentified
MFNPLKVRLMRAVCGLDVHKDSVYLCILTGEGELIEKVFGVLTFQLQQMRDLLLAHNVDEVSMESTSVYWIPIWRVLAPHFHMRLVNPYFIKQLPGHKSDVADAQWIAECTLKNLVSGSFVPPEDIQQLRQYDRRIFDLDEEIVRKLSKLDAVMQRCNFRLSNYVSNVDCKSYKDVVRKISEGVTDPESLIGEIHGRIIKHHGRETILASLAGVISQAEIDVLRQLREELALAEVHKRECLERMLEICQEKYPDELRRLQTIPGVKERTATSLIAEIGTDMSKFETANHLSAWSGMRPRNDESNKKFKSRRITHGNIYLRKNIIQCAWAASRTKGCFFSRFSYHQTQVRKKNKMKVIVAVARKLLVAAWHVIHDKTDYADFQKQDRQAPASNG

SEQ ID NO: 203666 - protein, 359 aa, unidentified
MLHLGIDQHRKQLTVNLRNENGDVVLKRQVSTEWERVMLSFEQLVEMARDQDGFVAVVEVCGFNDWLLDMLHEYGCCDVVVVQPERRSRKKTDRRDASQLSQLLWINRKRFLEGKRVCGLRRVILPSREDAETRQLTALRQRLGRVATRTKNKVQRILLKHNLQQECPTKGIRTKTARRWLRELELDPIDRMEMDLLLEQWELWDKQYEEVEKEIARRYEKDETAQLLATIRGLNAYSGLAIASRIGDITRFPRPGSLANYWGLTPGCRNSGDAKDRLGSITKAGSPIVRHFLGQAVVHLLRRDVEMKGWFQKIKKRRGAKIARVAVMRRLATIIWHMVKKQQPYRPGRMLRPTDDQAA

SEQ ID NO: 203667 - protein, 409 aa, unidentified
MDVLHAHCCGIDVHAKFVVACCRQIGSTGSVTKTSRTFGTMTADLQALAAWLTSEAVTHVAIESTGVLWQPVWNILEPHVTIVLVNPRDVRQVPGRKTDVTDAEWLAQLLQYGLLRSSFVPPVAIRALRDLTRGRAKLVDQTTAVTNRIHAVLHDANIKLGSVATDILGVSGRAMLQAIVDGETDPSRLADLARHRLRSKLPALRRALEGRVTDHHRFLLRRLLGQLAFLEAEIAIYDARIAEASAPFVAILARLDTIPGVDRRTAENLFAELGAEMSVFPTAAHLASWAAICPGNHETGGKPLKGTTRHGNRWARRALTEAAWGAKHTRGTYAAAQFRRLAARRGAKRAIVAVAHSLLVAAYYIIRDEVVYTDLGAAHFDRLAPTQLTRYFVKRLESLGHKVTLETAA

SEQ ID NO: 203668 - protein, 321 aa, unidentified
MQFIGIDAAKATFDIALPLSHGKYRTKAKLPNTPKGFDELLAWRAKHAPNAAVGMEATGIYHEALARALVEAGVVVHVANPARVKAFGQAEGIRTKTDRSDAKLIARFFEAQRPEKLHPYVPPTPSEVKLRALVRRRDDLQEMLQMEHNRLDVADISVQQGIKDVIQTLEGQIKQVQKAIEDHIDNDPDLRRRHQLLTSIPGIGNTSSAQLLAMLGDLSKYSDVRQVVAHAGLNPAQRQSGNYEGKCRISRVGDAVFRKKLYMPALTGKTHNPTLKSFADRLSAKGKPFKVVMCAVMRKLIHLVWGVLRSGRPFEPDVALA

SEQ ID NO: 203669 - protein, 436 aa, unidentified
MDENYANRLKWFRQFKEHVNASTSTLIVGIDIGKDTHHAFLGTPAGRTIHRRLIFENSSEGFANLLFYTRRYLSEEQLAEVVFGVEPTSVYHKPLAEYLITSGYSVVYVTNSAIKKNRAILDGRWDKNDTKDAANVADLVSRGRCHFYDLPDMQLRDVRNLLSLRKRLKKQQHRLITRIRNNLVAQYFPELDSAWYGCQQENLAIVRFCLSPQQIAELSFDDFCRMVTTRRRGLRQYKRLRHIHEVAANSIGCQPGSSVGFEAQLLVEDLQRVGQQIGEVEQHLYGLCDHYKEYALLQTIPGFGPFVSAAVLGAIGFAQRFENAKQLLRLAGLDLNASRSGKRSQSAVPVISKVGKADLRYALYQAAKVATSLTAEFKAYFKRLLKGRQKEKGIKTKMRVKVSAKMLVIAWTLMKTGRPYKAGLLLIDEPDQQRGR

SEQ ID NO: 203670 - protein, 420 aa, unidentified
MGKIIQRCAGIDIGKRFLMCCILAGAADEEPSSKTLRFDTTVPALERLRQWLRDEQVTHVAMESTGSYWIPVFNLLEGYFSVVLANPEEVKNRKGHKTDRRDAKHLADLLRHEHIRPSYIPPKAIRELRDLSRRRVQLTQDATRERNRVQKLLEQANVKIAGVLSDIFGVSGQHMILALLDGRATAEQIAKLARGQARQKIPQLVEALEGNRMSEHGRLVIRSCLRHLAGMEEEIERLDAEILSRMQTPPFQNALHLLQSLPGIGELSAAAILAEIGTDLTPFPTPEQLASWAGLCPGNRESAGIHKGRYTTHGNPYLRTVLVQCAWAATRKQGSVFEARFHNLAPRRGQKRAIVAIAHLMLIILYHMLKQGLPFRGVQTACQQRRRQRRAHHHLKSLRRLGLAVQVIDTIDSPPSNATP

SEQ ID NO: 203671 - protein, 376 aa, unidentified
MAKAKTLVGLDVHATKIVAAVLDADTGELKTFAMSGDTAAVAGFCAGLPRPVRVAYEAGPTGYGLARELARRGVACVVAAPSKIPRASGDRVKTDRRDAEKLARCYRAGELTAVWVPDAAHEALRDLVRAREAAKKDQLRARHRLGKFLLRRGQRPTEAGKAWTKKYLEWIKTHVRFDQPAQEATLAHYLHEVDHAAEQILKLEKAIDEAVAQASPEIRSVIEALQALRGVAQMTAATIVCELGSLSRFQSPRQLMGYSGLVSREHSSGNRIQRGAITKTGNAHLRRVLVEAAWAYQHRPNVTGFLLRRQKSLALSDEVKQMAWKAQYRLHKRYQAFAVRGKNKNQIVTALGRELLGFVWAIAVHTEAQLKLTKAA

SEQ ID NO: 203672 - protein, 369 aa, unidentified
MEKDTTYVALDDSKQKIVAGMLRPGDAQPELREIANDPRQIRRLFERLKREGPVAACYEAGVSGYDLYRQITALGVACSVMAPALTPRRPGQRIKTDRRDAAKLVRLFRAGELTAIHVPAEAEEAVRDLVRCRDDIRRDVLRWRHRVLKLLARHGRAYLAGKNWSQAHWRWVREQRFDLPPLQRAFEATLFALEQALARQAELDKEIEALAATAPYREPVGGLRCFRGIDTLSAMILLAEVIDFQRFRRPRELMAYLGLVPSEYSSGETQRRGALTKAGNSHARRVLIEAAWHYRHRPTLGRALANRSQGQPDEIVSHAWRAQQRLHRRYRHLVGHGKRTPVAVAAIARELVGFIWAALTRHESRRQAA

SEQ ID NO: 203673 - protein, 456 aa, unidentified
MRVRWDREQLIGGKPERLVSRVLRVLIWVPDQRTTRIDGGAGLNCFCGIDWAEGHHDVAIIDGDGKLVAKKRIIDDPAGFTALTGMLADAGDSAQDPIAVAIETPRGLLVAALRGTGRPVFAINPMAVARYRERSSVARAKSDHADAMTLANILRVDAHIHRRLPADSELAKAIAVLARAQQDAVWRRSKATNELRSILREYYPAFLDTFAGKSDTNLAKPQARVILAIAPTPAHAARLSKARVAAALRRAGRKRGIDGLAAEIVERLRVPQLRQPELVEKAMGRQAMALLAMLDAACAGADDLEHAATEEFRKHPDHAVITSFPGLAELTGARILAEIGDDRDRFADDRALKAYAGSAPVTRAFGKVTSITHRRIKNDRLAAVGWVWATYASINPGPAREHYRRRRDHGDRHAAALRHLFNKMLGQLHHCLQIRQTFDPIKAFGQPCTAPEPAAA

SEQ ID NO: 203674 - protein, 380 aa, unidentified
MTTATHNAHDTTTERVLFVAFELSEKTWKLGFTTGHGQQPRERSIAACNQARLLQEVAQAKKRFGLPDTAPVVSCYEAGREGFWLHRFLQAQGITNYVVDSSSIEVNRRQRRAKSDGLDVRKLVSMLIRYAQGERAVWHVVHVPSVDAEDQRHLHRDLETLKQERASTTTRIKGFLSSQGVRLTSLSKLPEQLEALRLWDGSPLPSGLRRRVLRVYAHHQFLSQQIAELEAERRALLQTSQEAALEKVRQLMHLRGIGINGAWLLVMEFFGWRAFKNRREVGGLAGVTPTPYHSGESTREQGITKSGNRHVRWMTMELAWSWVRYQPGSALSCWFRERFGGGGKRLRRIGIVAVARKLLIALWRFLETGVLPEGAVLKEA

SEQ ID NO: 203675 - protein, 360 aa, unidentified
MQTQNSELTFKGQRIFVGIDVHLKSWTVTVLSESLPHKTFTQPASHLALHKYLTGNFPQAEYYSVYEAGFCGFMPHYRLQELGIKNIVINPADVPTTQKEHLQKDDPTDSRKLARSLRSGELTSIYIPLLANLGDRTLVRIRASLVSDMVRFKQRIKSFLYFYGITYPEEFKKTHTHWSNRFMKWLRESVVLEHEKDRQSLEVLLQQADQQRKLLLEVTKKIKELSSSQKYEKNMKLLRSVPGIGLITAITLLTEIEDISRFPNTDQFAGFIGLVPNRHSSGESTRVGEMTFRGQTKLKKLLIESSWVAARLDPALLKCFNQYVMRMDKNKAIVKIARKVLNRIYFVLKNKMEYVPSVVK

SEQ ID NO: 203676 - protein, 442 aa, unidentified
MAMRKREDSPEVFPNAAGIDIGGSSHWVAVPRTADDEPVREFGTMTDDLNAMADWLLACGVDTVALESTGAYWIPVYEVLERRGLAVWLVDARQMKYVPGRKSDVLDCQWLQKLMSLGLLRAAWRPGDKVCVVRAVARQREVLLTEQGSWVQRMQKTLVQMNIQHTEVLSDIMGTTGQAIIRAIVAGERDPKVLARYRHGRIRRSADDIARALTGNWRDEHLFVLKQALSMYDDIARHLGECDARLQTLVDESGRHHVDLGTGPRAGTRLRGNFDQRQRLANWAGVDLTRINGLGVSTVLTLLSEIGPDLSRFASVKHFCSWLGLTPGTKISGGKVLSSGTKRSANRARQALKMAAMTLSHSDSALGAFYRRLCARMDKPRANTAVAHKLARMVYFMLTRGEAFVDQGQQRYEEQQRQRSIAALKRRAARLGFRIESVPATP

SEQ ID NO: 203677 - protein, 400 aa, unidentified
MKIIGMDIHRSFAQVAILDDGTITKQLRVELTHEPLVAFAKTLSLEDEVVIEVTGNSAAVERLMRPHVKRIVVANPRLVRAIAYARVKTDKIDAATLAKLHAAGFVPEVWVADEDTYSRRRQAAERAGVLAQLVRTKGRMKAILHANLIGPYRGHLFGKAGQRWLDSLPLPDEERGMLRRLIAEMERVSAQLAEIDKTLAKQTLADPRALKLMTIPGIGSVVASVVLASIGDIARFPSPDKLSSYFGLTPRVRQSGDHPARHGRISKQGNADARKMLVEAAWSAKTAPGPLRAFFNRVQKKRGAASAAVATARKLAVMIWHVLSSGREYAYARPSFTAMKLRKVELTAGAPRAYGKAGSARDYWIKEIRDREANYVARAEQAYERMVAAWKPKPEKSAAG

SEQ ID NO: 203678 - protein, 358 aa, unidentified
MSKHSENQEVKVMGIDLAKRQFQVHGVDIGGRKVISKKFSRQKLKEYLVTLLPCTVAMEACAGAHYWGRLLRSYGHDVRLIAPQFVKPFVKSNKNDAADAEAICEAAQRPTMRFVAVKEVEQQDIQSIHRMRSLAVERRTAQINQIRGLVLEYGIEIPTGRFNLLKRLPEILEDAENGLTEFFRKELFGLYEELRHLDARIEHYDEKLKQIAQADERLQRLQTIPGIGPVIATALLAAIGDIQAFKNGRELAAWLGLVPRQHSTGGKATLLGISKRGDVYLRQLIIHGARAVLRWAERKTDRTSRWAAVLTVRRHKNIAIVAMANKMVRVAFALLKKGENYRVQPLVAHNTPLGPIEA

SEQ ID NO: 203679 - protein, 367 aa, unidentified
MLGWTPPRRPWCARVVVFVTTDQEASVSEVSTIGLDLAKHVFQVHGADASGKVVFRKRLRREKVLEFFAGKPACVVAMEACSSAHHWARELTRLGHIVRLIPPAYVKPFVKRQKNDAADAEAICEAAQRPTMRFVAVKSETAQANAVVFRARDLLVRQRTQAINALRGHLGEYGLVVAKGPGHVIKLVEHVEDPDSNVPDAARLVLRTLVEALRFLRERIDLLDREIARRARENNEVRRLMSIPGVGPITATALAALAPPADAFRKGRDFAAWVGLTPSQHSTGGKQKLGTTSKMGERTLRRLLIIGASSVVRKALRQGTAAGSWLGRMLARKPRMLVIVALANKMARIAWAVQAKGEVYRAPVVAA

SEQ ID NO: 203680 - protein, 414 aa, unidentified
MDLVHPRCAGLDVSKRDAKVCVRIAGAGRAAATSTVTTWQSVTNQVLALREHLIEQRVTLVVLEATGDYWKPFYYLLEDAPFEVELVNARHVKNLPGRKTDVSDAAWLAQLGAHGLVRGSFVPPEPIRQLRDLTRTRTTMVRARAKEFQRLEKLLEDAGIKLSSVATDISGVSGRAMLQALIDGEREPAALADLAKQRLRKKIPELTEALTGRFSEHHAFLARLHLDIIDQHTRVIDELTSRIEAVITPFRGARDLMVSIPGISVGVADVIIAETGADMSRFPTAGHLASWAGTCPGSHESAGRIKSTKTRPGNPYLKGALGIAAMSAARGKDTYLAAKYRRIAARRGPIKAIVALEHAMLIAIWHMLTNGVFYEDLGGDYYTKRNPDKTKTRALEQLRQMGYEVTLQPRQAAG

SEQ ID NO: 203681 - protein, 346 aa, unidentified
MKHSVGLDVSVKETAICIVDEAGKVVRESKVATEPQAIIAFLNGAEFEYARIGLEAGPLSQWLVNGLAEAGLPVICVETRHMKAVLKAQQVNKSDRNDARGIAQMMRVGLYKPVHVKTLASQQKRMLLTSRQLLCDKLQDMENELRGTLRNFGLKVGVVSAGHFEARIKELVAGQPPLEMIVVPLLTVRRVVREQLAKLDKMVLDQVRDDKLCRRLMTVPGVGPIVALTFRATVDQAQRFARSKTVGAHFGLAPRRFQSGERDYDGRVSKCGDAMMRTALYEAAQVLLTRTRTWSWLKAWGMQVARRRGAKKAIVALARRLAIVMHRMWVDGTEFRWRKEADTAAT

SEQ ID NO: 203682 - protein, 414 aa, unidentified
MKKRTCRAKNVNKINWDKVTEQLSGEAGVFAIDVAKAKQYALLTNADNSVSELIWWNHPEQTYEVLTALKCLACPLDVVMESTGTYGDALRYQFKQSGFRIYQMNAKRVSDAQEIYDGVPSMHDAKSATVITRLHAEGLSKPWVELTDEERNMNALRREYDMHHTQYQRNQNRLEAFLSRHWPEVGKFLDLDSVTLESLLIAYGSPEHIAADAKDAAKKMRGWGRSLLSDEKIESVIKSARHSLGQPCTDIEVRYLQALAEEMRHGRLQQKRAKNALEGFIERDDKLKELSNLIGMITTAILLSCHLDPRKHDCTRSFQKALGLNLKEKSSGRHVGQLKISKRGSSTARSYLYFATLRLIKNNPVAKAWYLNKVDPRAKNKTVIAVMRKLVKALWYVGRGERFDANKLFTLAKA

SEQ ID NO: 203683 - protein, 361 aa, unidentified
MAKVRSWAGLDVHARSVLAVTLDATTGEIRRQRLAADTATVVGYLAELPGPTRAAYEAGPTGYGLARALRAAGIGCTVAAPGKIERPAQDKIKTDVRDAERVLRLLMIDALVAVRVPTVEEEAIRDLVRAREDVRGDLMRSRQRLSKLLLRHGIVYEDTGSTWTTKHRAWIRAQDLGGGAQATLLDYTGAIDTLEHRRGQLETTIAELVPASPYAHTVARLRCLRGIDTLSASGLAAEIGDLTRFDRPGKLMSYLGLVPSENSSGETRRQGRITKTGSKHARRLLVEASWHYKKTPARGVTLTRRQEGQPASVVAISWQAQQRLHRVWTRLVDQRGKRSTIVAVAVARELAGFCWALAHAD

SEQ ID NO: 203684 - protein, 412 aa, unidentified
MKALRTHVAGVDVHKDMLAITVMIGKGDEDPRLEHFECSTMTDDLRAMGIVLKGKGVCDIAMESTGVYWKPVYNVWAPLGLNPIIGNASHMKNVPGRKTDQKDAEWIARLHRFGLIRPSFVPDGIYQRLRLLSRHRTNLTEDHARVKNRVQKVLEDGNIKWSSIVSDTFGVAGIKILDLIADGVTNAQTLSNSVTTKIKAEHIFVIKELMIQYRDLESRILEVDNELVEKMKPFAHLIEELKKIPGIDRVLAMGLLAEATADMSSFADERRFAAWAGVAPGNNESAGKKKRSRCRKGNPALRKILIQAAHGAKMKRGSFYRAKYNKLVYRLGSKNKAKVAIANRLARTIYKVLGGSPFKDIGYMRGDPHEEKVKRLVAQLKSLGVNISHQNHQMIVSSTRKVTVDDTGIVLQ

SEQ ID NO: 203685 - protein, 404 aa, unidentified
MSATNQPVTSSTIVVAVDVGKSVAAISATTADRHRLFGPVEITMTVTAVADLTTHIQSRIPADAQVKLGIEAAGHYHHPMLDHSWPTGWEVLEVNPARVGEQRRINGKRRVKTDAIDLEAITDLVLAGQGQPASARPLVIEQITALTAHRTRRVLARTAVKNQLISQLDRSFPGLTLALPRVLDTKIGRLIIAEFADPARLRHLGTAKLIRFAGNRGLQLRQPVAERLIAAAREAMPTHAAPMARQILAQDAALLADLDAQIGTAEAQLAALLPDSDFATLTTVPGWGVVRVANYGGALGDPDRWPGPRQVYRASGLSPMQYESAGRRRDGKISREGSVRLRRALIDLGLGLWLIEPAARARGAELRARGMKGKVIACTMANRANRIAFAMVRDHTAYEPARWA

SEQ ID NO: 203686 - protein, 356 aa, unidentified
MKYLGMDVHGKATVYCLLDGQGEVVERGSVDTTVPKLTALVRRLLSTDTLLCGQEVGTMSHFVHDVVTEAGGKILSFNAQHLRMIASSRKKTDKRDAYWIAKCLQTGMMPHPVHIPTTEVRRLRSLLAQRRAIAGERKRWMLRARSHLRAVGTPVARGAGKITKRLEQVLACSEGLDAHRAEALELCARQEQQLRTELRRIEKTLFGEARRIDAVRRLRTMPAVGAWVGLAIYAGVGDIGRFRNARLLTAYAGLVPSVHQSGESTRLGAITKEGSSALRSVLVQAGHVLLFRCASEEARPLRQLAQRVHTARVRRKIAVVAAARFILRTAFYILRDGTSYEPQRLRGAVQEEANVA

SEQ ID NO: 203687 - protein, 352 aa, unidentified
MKQILRQCVGIDCGKDDLAVSFKTMDNEHDSKLVASKTFRNDKSGFTALINWSKKLRQKDMKTSFVIEATGVYHESVALFLHTQKEEISVILPNKIKNFAGTESIKTVNDKISSQTIAQFGLEKKLVLWEPPHEVYNYLRQLTRERGQLIDEQVLVGNQLHAEKAGAWPNKGSIKRMEKRLKLIDQQKEEILKEIQSLVKATDFLKEKVDHICTIKGIGLLTAVTVIAETNGFNLITNKKQLVSYAGLDVQYKDSGTSVHKKPKISKKGNKHLRKAVYFPALAAIRGDDKMKGLFVRLVSKHGIKKKAAIAVQRKLLELIYTLWKNNGDFDPNYNSNKKVRAATGAALKEIA

SEQ ID NO: 203688 - protein, 352 aa, unidentified
MEKRIRQSVGIDCSKDHLDCSFGIMHASFDEVILSNSKFTNNAAGLKKLLLWSKKLMNTDCEVVFLMEATGVYHERAALFLFESKNKVAVLLPNKVKAFAGTLKVKTVNDKECAKIIALFGLEKNVDPWSPPQEVFNQIRQLTRERDQLLLERTMKKNQLHAEKSGAWPNSGSIKRIEQVVKILNKQIKEIETEIKDLINANPFLKEKMKKLCSIKGVGMITAAIVVAETNGFNLIRNKSQLVSYAGLDVIEKQSGTSVRGKTRISKRGNKYLRKCLYFPAFTSINHYEPSKNLYTRIISKTGLKMKGAVAVQRKILVLIYVLWKKDQFFDPDYHKAKQEEPHQDAALHELA

SEQ ID NO: 203689 - protein, 423 aa, unidentified
MTNSLFIGVDVDMKGNQFCVMNFDQHVFFNLKFPNTPEGSEQFVLKLKSVYEKFNFDKLFFCLESTGMYSFHIACFLSSDEFLNKFNSIVYQENANNIKQYKKSFTDREKTDPADSWICADYVRVGRCKNLHPFKGSQFIALQRLTRQRFHISKNLVREKCYVMNNIYLSFSGLLVIDDKPFSNMFGATSSALFEEFTSPDMIAETSLEDLLKFISVKGKNRTKNPEEKIGILNKAIQASYRLDQISYDPINSAIASSMNIIRALQKQLKEINKAILNTVLGIDSNAYHVLLSIRGIGKVYAAGILAEIGSINYFKHNSNLAKYGGLFWNRSQSGKFEKEDKSFSRSSNKYLRYYLVEATASCVRLNFPFIKDFYDLKYNEVKTHQHKRALVLSARKLVRLIFGLLHKNQYYSPISSDQFSKI

SEQ ID NO: 203690 - protein, 317 aa, unidentified
MEPPVIFVGIDVCKAQLDVAIRPTAPSLAVANDKAGIKMLVKRLEKIRPTLVVLESTGGLERAIMVALMGAEIPVAMVNPRQVRDFAKSTGQLAKTDRIDAAILAHYAEVLRPEPRALPDQVTMELRALITRRRQLIEMIGAEKNRLSTTSKAVTKRISAHIRWLEQELDRADQDLDRSIGQSPIWQENEELLRTTPSIGPVTSRTLLAELPELGGLNRKQISALVGLAPFNRDSGSLKGRRSIWGGRASVRSTLYMAALVATRRNPVIRDFYKRLTAKGKLFKVALVACMRKLLTILNSMIKHKTCWSETFLRTTT

SEQ ID NO: 203691 - protein, 339 aa, unidentified
MNKIITIGLDIAKKVFQVHGIDGAGAILVQRSLRRAQVLGWFAAQPACLIGLEACATSHYWARELSKLGHTVKLIPPAYAKAYVRRNKNDPADAAAICEAVSRPSMRFVAVKSEAQQAAAGLHKVRAMLTKQRTMLMNQLRGLMAEFGIVVGEGPQHVAKLVAILDDPADGRIPAPLHDGLVALGQGLRGLAQRIAALDRQILDWGRDNATYGHLLTIPGYGPILASAMAAMAVDPTAFRSGRGFAASLGLVPRQDGTGGKVKLGPISKRGNGYLRRLLVNGAMSVLGAKRAKQDPWLVKLLATKPRKLAAVALANKMARIGWAIMRRQEDFRALPAAS

SEQ ID NO: 203692 - protein, 409 aa, unidentified
MRYYLGVDWADQTHAVWGVDEGGTKVGMRTVPHTAEGLTEWGRELDEWRAQGIELWAAIERPEGRVVDFLLDHDVVVYAVNPKALDRARDRFRQSAAKSDPFDARVLAEFLRTDHAHLRAVQPSSEAAQELKLLTDDYQRQIRQQTRLVNQLTTTLKAYYPRGLEVAELTTTLAREFLQAYPTPAALTTLTERQWQRWARTHRLSDTRTQQLWVVLQRPQLPVPPHVVRAKARLMQSLVAQLTVVIEGVDTYREAIEDFFAQLPAAQWIRTLPIGDHGITAPTLWARLGDAPGRWQSFRHLQAQAGTVPVTIRSGKQQVVRFRFACDKSLRYIIDHVAFLSLRWSEWAQAYYARQRARGHSYRQALRALSAKWLKIIFVMWERQIPYDEQYHLAMMTRQQLRQRHEKVA

SEQ ID NO: 203693 - protein, 371 aa, unidentified
MQIQSVGIDLGKTSFHLVALGAAGKVLVRKKFTQKQLLAYTANMQISLIGMEACSGAHFLARALRKQGHDARLIPAQFVKPFVKSNKNDFIDAEAIAEAVERKNMRFVPIKTDDQLDLQAIHRVRERLISRRTAVINQIRAFLLERGLVFARTPAKLKTAMADILENAEADLTPRMRNLIDGLWSEWKLVEQQIEELNDELERISAADAGCTRIRKIPGIGPVVATAIVAAIGNGAAFRKGREFSAWLGIVPRQHSTGGNTRLFGISKRGNPYLRKILIHGARAAVLHIKRDRAPIGAWLDALDARAPKNVVIVAMANKLARIAWALLSSGNEYRPVATWWCGKGAFGLEALCAPTFPHHHDGLKSLHRSL

SEQ ID NO: 203694 - protein, 355 aa, unidentified
MNDEKYIGLDVHQATISVAVMDTTGKVVMESILETRAATILEFFAGLRGTLWVTFEEGTWSVWLYDLLHLRVDKLVVCNPRKNALLKDGNKSDRIDACKLAELLRGNQLKAVYHGETGVRMLRELSRSYLTIVKDLSRVMNRLKAVYRSWAIPCAGRDVYYRRHRAQWLAKIREAGVRRRAERLYEQLDMLQHLRQQARRELLAEGRKHAITAKLRQIPYLGPIRSVLAVALMQTPHRFRTKRQLWAYSGLALETRTSADYRYVEGQLRRSRKIVSIRGLNKDHNHDLKGLFKGAATMASVRPGPFQDFYQASLAKGIKPTMARLTLARKMAAITLTLWKKGENFDAEKLKSQAA

SEQ ID NO: 203695 - protein, 401 aa, unidentified
MKVSGLDVHKDTVFCAIYDGKKYGKVDEYRTFSENIRTMGNNLLQAGVKKVAIESTGIYWIPVWNILEEMGFSLMLVNPYLIKQMPGRKSDVKDAQWIAKLLHKGMLRGSLVPDKTTRQLRTYSRRYVKMQGMITRVTQDIEHTLELCNIRITSLVSHINSVSVRKVVEKIINREDSAEELACCIHSRITNSKGDLVRLSLEGHIEEHHRITLSLAYDQFKLYMQQSLKLEELMEQVCEAHYSQELALLMSIPGIAKQAAMQIIAETGGDMKAFENSGKLTGWTGLRPRNDESAGKYKSTATTHGNKYLRRILVQSAWAASRQKGSFYKSKFEQLCIRKSRKKALIAIARKLLTVVWHVLEEKHPFNPRFLPVYDPRKLEMKINYHRKEIEKLEQLGYAAS

SEQ ID NO: 203696 - protein, 344 aa, unidentified
MPIYCGVDFHARQQVVAWCDTSDGEIRITKLDHSELQKLREFYGSLPSQVIIGLEASGYSQWFEDLLFELKHEIRIGNAAEIRKRARSRQKNDRRDAENILDLLLKNEFPQIYRPNAESRAVLQKLRHRHRLVQLRTKAINHLHAIAISAGLSIKSKLMTNDGRKKLKALLLSQTHQQQRDEWLALVDHLTPLIEGIERELKSLAEQNPHVTRLMTHPGIGTLTGLALVHTLGPVERFATARKVTAYVGLDPLEHSSGERQRIGSISKQGSKLLRYLMVEAGHTASRHDPDLKRFYYRVLQRREKPRAKVAVARRLLVRAYILLRDEIDYVEFRRRAVKAAVKA

SEQ ID NO: 203697 - protein, 416 aa, unidentified
MSGKREIACGVDVHNKFILATILSSDGLKLQDRFGTSLEDLLKFKIWLKESGCHKVALESTGNYWLPIYHVLEGSVNFILANAYQIKHIPGRKTDTLDSEWIAEICLKNLITPSRIFTKDHRELRSLTRARESLIKVRTKIKNRVTHELEAACIKLSSVIADVFGKSGRHIVDGLLNGMDLEEILGSIPSRRVRKNKEEIRGIIQANLSPSQIFLLRSHLNTIDAVTKQIKEIDAKISDQISLRNEDMKIAMSMPGMGFISASTILAEIGEFRDFSSANKLAAYCGLVPSVYQSAGKLINGHITKHGSPHIRRIIIEVAHAIILTKRLSKLKKFFLRIKARRGAKIGIVALARKVLCILYHLLVRRELYQDDLLNKPRRIKNPRQHPIDAMDFDEMIRIITKAGYEVRKNDCLESG

SEQ ID NO: 203698 - protein, 317 aa, unidentified
MNQQLNEVVCFGVDVASTHLDIAVHGVQQVQRIPDDERSINRWLKTVARSSRLAVEATGSYHQLLARLAHEHGLQVFVLNPRDVKRYAQGLGQRGKTDRLDALVIARFIHREHQKLRVWQPPTKEAQRLDDLLRTRALLQKQYAAQKQSLVHRPELEQVIEDVLQSMQAALTRLETLIAQAARNLPEGRAGLRCIMSIPGVGVLTGAALLQLFTRAKDASCDAVVALTGLDPRPMDSGSRKGIRRLSKRGNAEMRRLLYNAAMSGARTLTWRGVYERERAKGLPATGALIALARRLVRVAFSLFKSHSMFDQTRVCA

SEQ ID NO: 203699 - protein, 324 aa, unidentified
MNKVKTIFGIDISKATFDVMDCSGKHSQFENNLTGFVKFLKLLNADSHCVMEATGYYHYQLAHYLVEHKIMVSVENPLSIKRFIQMKLSRIKTDKSDAKMICLYGQERELQPWVGYTKNQMECFQMMRLLETYTKQSTAYKNKLQAEQTLGNPSKAVVSSLTRSLKNLKKESDMIEEILLKLVKEDHQEMLTTIESISGIGRKTAMLLLVVTDGFTRFESSGQLCSFCGLTPSIRQSGTSVKGRSRITKIGNAKLRNLLFMCSFTAYKHNKACKAIYDRIVNQGKSKKLALIAVCNKLLKQAFAIAKSGVEYNPNYRSLQPKTN

SEQ ID NO: 203700 - protein, 427 aa, unidentified
MLNNDYNKQYERRQRIKKTTLAMGIDIGADFNAVGFMNKDGNVLGQLPKMDNFRAGFDKFVRITEEMKVKHGLKDVLIGLEPTGHYWRKIAYFAKDQGYAVRFIRTTSLKHERDLNESSSAKSDIKDALTLTNLTREGKYIDTVIEDGVSRQLRTLSKVREKIQKQNTGAKNMLHAVLDDYFPELKKIFWAMNSKGLWAILEACPFPEDVLKFKRAAIADMIAKASRKKAEAAQKASALCLAAQTSIGLKLIGAADRYRLMACLREVKRTEGMLKEIHKELKELLSQIPSSRYLLSIPGVGYLSAVVFLGELGNPAYFHRARQIIKYAGYDPQESDSGKRIGRKVISKKGRWLSRKFLYLMSLRAVVHSRFFQAYYQRRLETKNRFGQLLKKKEALCAVAIKLIKVIFALLRDKREFQDTVSFALAA

SEQ ID NO: 203701 - protein, 411 aa, unidentified
MGTAPEYRWYVGIDWGSEQHQVCIVDDAGRRSEQVVSHTGAGLAGLGAQLAALSPEAPAQVVVALEVPRGPVVDVLLEHGVHVYAINPKQLDRFRDRHTVAGAKDDRRDAFVLADAVRTDRPAFRRVHPDAPEVVELRELSRLDDDLREELGRLSNRLRAQLYRVAPELLALCPAADEPWFWTLLERALLPRLPRVSLKAVKAVLKVHGIRRLTAETVHATVQRPLLRSAPGTLDAVRAHLAVVLPRVRLVYDQRHRMVGRRIEALLTTLGQGPDHAEHRDVTILRSLPGVGRLVAATVLAEAAQALTTRDYQTLRAQAGVAPVTRQSGKRTVVSMRWACHPRLRYAVYHWARVSVQVDARCRAHYQHLRQAGHEHARALRGVADRLLAILMAMLARRTLYDPTRWTAHTS

SEQ ID NO: 203702 - protein, 448 aa, unidentified
MSNLPILDAHAAFVDVGSEQMHVSVAGGPPQVFGTVTSQLHALRDWLKAQRVRSVAMEATGVYWLPLYGVLEAARFEVCMVNGRQTRNLPGRKSDMQDCQWGATLHAHGLLRAGFVPSAQIRRLQDYMRLRADHIEMAATHVQHMQQALERMNIKLHDVIASLTGVSGLAVVRAILDGERDPQRLLELCAAQIQRGKAERVKQSLLGTWTDEHLFALRQALQSWEHYQGQIAECDHRVEVLLKEMNPGPPPNAPALPARRSKPGVNAPDIPDLRATLAQICGCQDLTQLPAHTEYSVLQVIAEVGTDLTKWPTEKHFTSWTGLAPGSHQSGKRHRSVKRSRNRAGRLFCMMALSLARSKDIALGGFYRRMAARRGGLVANKALARKFAALFWRVMVKGIDYVEYGLKQYEAKVLETKQRSLRRLARQLGQQLVPMPTTSPVTAHTPAA

SEQ ID NO: 203703 - protein, 344 aa, unidentified
MKCKTIGIDLAKNVFQVCGVNEHLKPQFNDKIQRKSLLKFMAKKEHTIVVMEACYSSNYWGREITKLGHEVKLIPAQHVTPFVRGNKNDRNDALAIVEASQRPYIRFVPVKTEYQQEINSLHRIRERLIRNRTAIINQIRGLLSEFGVIASAGKAELFKRLSDFIIDPKYTHQLRDMIGDLYSEHFAMSQHIEKIENRLKKFVADSPNGKILLSIPGIGFINASALLATIDKGQAFNNPREFGVWLGLTPQQYASGNTSRMGGITKRGDRYLRKQLIHGARTVVCHAKNKTDQLNQWANKLREKKSFNKTVVAMAHRLARLIWILLQRQEEYRPQYAPVLAGSA

SEQ ID NO: 203704 - protein, 400 aa, unidentified
MNAVGIDVSKGKSTVAVIQPFGVVIAEPFDVFHTDSSLKELVRFIKSLSGETKVVMEYTGTYYEPVANALHNAGIFVSVVNPLLIDDYDTNRVRKVKTDKLDALKIASYALDKWIKLRKYEPAETVRKTLQIMNRQCIKLNKILVMQKNSFIALLDCCFPNANTLFTSPHRVSDGHEKWVDFVMKFPHVDSVAKLPLSVFRTKYQSWCKKEHYNYSESKAEQIHAYARTIVSTLPMTDAVRKMVSEAAKLLNSTLEALGTLHSEMDALASQLPEYETVMNLYGVGKVFCSQLIAEIGDVTRLKSNKSLTALAGIDPPPNQSGKDDPKSRRISKRGSPALRRTLFLIMTIYLQHQPADEPVYQFLDKKRAEGKPYKVYMIAAAHKFLRIYYAGVKEVMPKE

SEQ ID NO: 203705 - protein, 345 aa, unidentified
MPVMIGVDPHKASHTAAVLDDRGRLLDQQHIPATLDGYQRLRQWASRWPQRRWAVEGAHGVGRALAQRLVGDGEQVVDVPAKLAARVRVLSVGHGRKSDPDDAVSVAVAAQSVPKLRQVSVEDQAVVLHLLTKRREDLVAGRTQTINRLHRLLVDLVPGGARRNLTAKRAAALLAAITPTGQPAVIRHQLAVELIADVRDLDRRIAVVEARIKAAVAQSNTSLVELFGVGPVLAATFLGEVGDIGRFPTKHHFATHTGTAPIEASSGQVIRHRLSRAGDRKLNHALYMMAMVQVRRPSAGQAYYRRKLAEGKSPKEALRCLKRRLSDAVYRCLVIDRRSNAVAAP

SEQ ID NO: 203706 - protein, 430 aa, unidentified
MKSNTQNAKIEAITEKTLILGIDVGNETHYARAFDYRGIEYSRKPFKFSNTEAGFVTFKEWILDLKERHEKDKVVPGMEPTGHYWFNLGKFLQDNEMKPVLVNPHHVKKSKELDDNNPTKNDRKDPKVIAGLVREGRYMIPYLPDGVYADLRTASNIRFQLQAELTRIQNRISRWFNIYFPEYKTVYGKPDAKSGMLILKAAPFPEDILTLGINGVNQIWRDAKLRAVGKARAKTLIEAAEHSVGSKEGAVSARMEIRMLLEDYESRNIRLQEVMTLIEGLVKQIPMAEKLLEIKGVGIRTVSGFLAEVGDISRFNNPKELQKLAGLALVENSSGKHKGGTTISRRGRKRLRYLLFEAAMSLVAKNPEFRELHNYYTTRRRNPLKKMQSLMAVATKLIRVFYAMLTKGVDYDPKKMVSDIRRPEAYLQAA

SEQ ID NO: 203707 - protein, 502 aa, unidentified
MAGPVLGHDRVPPVLDDPGGVFTQELVAADRGSLIEARRPNELYSGLVEGLFSNVDAEHDPPTDTNMGLAVAGLNTPLQAVEVNDQKGSAMTAFNLDQYALFIGLDVGKSEHHATALTTDGTRVYDKALPNSEPKLAQLLTKLVARHGPTLLVVDQPATIGALPVAVAQSLEGVAVAYLPGLTMRRVADLHAGNAKTDARDAYIIAETARTMPATLRAIDVSDEQIAELAVLAGFDDDLLAQTTATRNRLRGLLTQIHPGLERVVGPKLEHAGVLDALTRWPTPQALKAAGRGHVRNRIAKHNPRLAAKLTNAIFDALDAQTVVVPGTSAAATIVPMLASQLAGLYTQRANVLSQVEALVDAHPLSQVLTSMPGVGVRTAARLLTEVVGKHFKTAGHLASYAGIAPTTRRSGTSIRGEFANRGGNKRLKSALFNSAFASLKSKDPTSRTYYDKKRAEKKTHKQAVIALARRRLDTLYAMLRDGTFYQPPTPQKTDHNLAQAA

SEQ ID NO: 203708 - protein, 418 aa, unidentified
MQVETDEPEVIERVAALDVGKAEVVCCARVPGPGGQRMQEVRTISTMTAAVLALGDWLAGLGVTRVVMEATSDYWRAPFYLLEDRFETWLVNAKDVKHLPGRPKTDRLDAVWLCKVAERQMLRPSFVPPPAIRELRDLTRYRVDLLAVRTAEKQRVEKLLEDALIKLSVVVSDLFGVSGRAMMAALIAGERDPTVLAELARGSMRSKTARLSEALTGRFTEHHAFLLTQMLARVDAITADIATVQARIDAQLGELAPAVARLNAIPGIGPVAAQMILAEIGTDMTRFPTPAHLTSWARFAPGVSESAGRPKGNAGTGKGNRYLARVVGEAAVSAARTDTFLGERYRRIARRRGKKRAIVAVGRSILVIIWALLSDDEAQFVDLGPDYYASRANSERKVRNHVRELRALGYTVTLNPAA

SEQ ID NO: 203709 - protein, 393 aa, unidentified
MPVTREGPDLHGLVTVLSAHSVPAKPFMQGYGEAGMAVTGGTRRIVGGVDTHKDLHVAAVVDEQDRVIGTRSFATTRQGYRQMLAWMRSFGELQRIGIESTGSYGAGLLRFMQQAKVAVLEVTTPDKQDRRRRGKNDDLDAQNAAHAAFAGQRTVTPRSRDGMIESLRILMACRKTAVSARRVALQMIHNTIVCAPDGLRDQLRSLTRMQLVRTLASWRPDLTAYRDLDSAYRIGLKSLARRYLELHDEIADLDVMIAAIVDELAANLVARNSIGHIGAVQLLLTAGDNPERLRSEASFASLCGVSPVPASSGKTVRHRLNRGGDRAANSALHIIAIGRLRTDQRTKDYVARRIAEGHSKLDAIRALKRYLAREVFTLITQRRKEINATRIAA

SEQ ID NO: 203710 - protein, 346 aa, unidentified
MSELKEFIIGVDVSKKTLEVAILEKATQKVVGTKSFSNTPKGYSELLLHVASKTKRCISTVVLESTGVYHENFVDYCHEVGWAVSVVLPTKIKNFTKVENIKTKNDKVDAKIIARYGCMFPLKLWTPMTGNYHELRTLSRHILALKKERSRAMTRLAAYKSTKRTPKSILQSEEEHILCLGDMIEHEEAELKKLAYADHDFKRKIQKVATIKGISELVAIQIICEVNGFEMFANTRQVTSFAGFDIVERQSGDYAGRTHISKKGNRYIRRLLYMPAMTAATHGTGKFVDLYQRIAERNTGTSKLKGLVAVERKLLIIIYTIWRKNENYDPDFIHASAGIASGIAET

SEQ ID NO: 203711 - protein, 341 aa, unidentified
MGARNYFVGVDLHRNQFTYCVRYSKGEEKVGKEPIENLERFARRLGNYASVAVEATGNTWMFCQVLKKYAGRLVVVNPNQFKVISHSVKKTDKNDAKVLAEFLEKDLLPEVRMKDKLQAKVASLTQTREKLVQLRTVLKNKINNLFASRFINLKREELSSEKGLLKVLSYHFDGISDVELRVMVDQIRSLNKSIEELDKAISDDGSQMDGFDNLTSVKGIGAKGASTLLSVIGNVNDFRSAKQLAAYIGIVPRVSDSNETSHHGRITKLGSKIARTTLVQCSLIAKRYNPYLHAFHERIKARRGGAKANIALARKFLEIIYRILKYKLVFEDFTAFKLKTT

SEQ ID NO: 203712 - protein, 394 aa, unidentified
MISEVITAVGIDVSKGKSVVAARRPGGEVILPPTQVNHTAEDLAHLVARLRKIGGDIRVVMEHTGMYWRPIAHVLKEAGFFVSVVNAILIHNFSDNSLRRVKTDKADALKIANYCLTFWAELRDFSDEDETRQMLKMQCRLYERTQKTSVELRNGLISLLDQTFPGINKVLPSPYRSKRGHYKWVDFVRSFWHKDCVKKHSLHAFFNSYQRWCKKEGYRFREAEAEKIYSAAQNAVSTFPANESTKLLIVQAVDCLNAVYESMEVLRGEMQRLASLLPEYEVVMAMYGAGGITGPKLMAEIGDVRRFSSKRALVAFAGVDAPPFQSGKFEARSRHVSKRGSPHLRRTLFQIMSVVLQHGSVDDAVYLFMDKKRAEGKHFYVYMVAGAAKFLRIY

SEQ ID NO: 203713 - protein, 364 aa, unidentified
MKEEGKRRYVGIDLGKRDYTMAVISAKGKMSIHKGKTSEQGRQALYRLLEKGDKIALEAGNMAFRMAREIMQRAGSEVRVLNSAKLPFIWDAPTKTDKEDAMKLAHLVEERRDEKLPIVPLPSEEELERRETLANYSHEKKGRTRTINTLHSLFWKQGHTEVVRKNLATTEKAREAIKVLTGQVRENAEWQIKHLELYEQRIKELENKIKKEAKEDEDMKLLQNIAGVGPVVAYGFVAHVGDGSRFSKGAQVSNYLGFVPRLDYSGTIQRQGHITKRGNAYLRGLLVQAAWSMVRSRKGGSLKERYEYLTKPQGKSKKKTIVSIGRRMAELMYTILREKTKYEARPWKRAPNSPADLAGKARSA

SEQ ID NO: 203714 - protein, 338 aa, unidentified
METYAGIDLHSSNNYIGIIDGNDNRLYSKRHENRIEAVLKALDPFKKTLRGVVVESTYNWYWLVDGLQEQGFKVHLANPSAIQTYSGLKHTDDKWDSFWLAHLLRLGILAQGYIYPKEIRPVRDLLRRRLLFVKQRTAQILSLQSMISRVLGLDFSGSSIKGFNTHFIERLFDTYHQRFTAEKQLLTIHFLDGIISEIETEVKSQIQLKKEFQMLLTTPGIGNILGLTIMLEVGDITRFENVGNYSSYCRCVESKKTSNKKKKGENNRKNGNRYLAWAYVEAAHHAARVCQKAQRFFQRKMAKCNRTFAIKALANKLSKATYFIMRDQVAYNADRLFR

SEQ ID NO: 203715 - protein, 322 aa, unidentified
MHGADAQGRPVLKRRLAREKVLEFFANLPACLVGLEACAAAHHWARELAKLGHEVRLTPPQYVRPYVKTNKHDAADAEACCEAVTRPGMRFVPVKGEEQQSLLMLHRVREQLLKQRTATVNALRAHLAEFGIVAARRRTGLRALLAVVADQEDRRLPPLARELLQVLADHLRVLEERTAALDRRLVETARADAACARLAGVPGIGPVIATALVAAVADAKTFGSGRRLAAWLGLVPRQHSSGGKERLLGISKRGDAYLRRQLMHGARALVAVSKGREGGSWSWINGLPARRPFNVVVAAVANKLARVAWALLSRGEDYRAAA

SEQ ID NO: 203716 - protein, 377 aa, unidentified
MFIVGIDVAKRSHEVCMITSDGQTVQRPFSIRNNCTGYNLMLEKIRKHTNIKSQIVFAMESTAHYWLALFTRLRKDGYHVILLNPIQTSAMRDMFIRKIKTDAKDSFIIAELIRFGRYAESNVAQDRLLALKELCRNRFYLVDMAGDLKRKLIALIDRVFPEYEAQFDTIFCKSSVALLKKYPTPQKLSNAHLDKLTELLWNSSNGHFGEWKARELRELARNSFGVEDCDGAYSTLILLMLDQIQSLSGKADALEKEIFRLFQSFDTTVTTIPGVGPIIGAVILSEVGDISRFSSADKLAAYIGVDPSVNQSGEFQAAHAHMSKRGSPYLHGVSGRCTARSYVPRVLREESRRRAQIHDDHRPRDEENDRRGICHFA

SEQ ID NO: 203717 - protein, 352 aa, unidentified
MKIIGCDFHPSYQQIAMTDTETGELWEGRLEHEQGEARRFYQALQGQTVRVGMEAVGNSHWFEQMLAELGHELWIGDAAQIRRLVVRQQKTDRRDAKHILDLLLDGRFPRLWVPSPQMRDVRQLLRHRQKLVEIRTQVKNQLQHLALNQGVRRKSRLWSVQGRAVLEQLPLPPWTARRRGDLLAMLDRLQEQVGELDRAVRAEAEQRPEVRLLMTHPGVGPVVGLAYVLTIGPITRFPRGKQVASYLGLIPSEHTSGGHQKFGPISKQGNTMMRTLLVEAAQTAARFDEQLRRQYGRLKARKHSALAKVMVARKLAVRMYWMLRENKPYAQLYAQRPVARMQGSPSHSVVAS

SEQ ID NO: 203718 - protein, 363 aa, unidentified
MKDSNRSLSQPKVPSSDEGFTIGIDLGDRRSHICILDRMGEILREEEISTNPGSFETYFKAVPPAVVALEVGMHSRWASRVVRDCTHEVIVANPTKVKLIFSNDQKNDRVDARSLARLARVDRRLLCPIRHRSEDSQAALSVLRARDALVRARTRIINCVRGLVKPTGVRLPASNAEGFCVRVNEHIPTALRPAVALLLEQIQALSDTISVYDQYVEHLVETCFSQARLLQQVPGVGALTALAFVLTLDDPSRFPKSRQVGCYLGLRPRQNQSGDRDPQLGISKGGDEFLRRLLVNAAHYILGHFGPDCDLRQWGLKIAERGGRKAKKRAVAAVARKLSVLLHHLWVTGEVYDPFYRKRAEAA

SEQ ID NO: 203719 - protein, 310 aa, unidentified
MDATFVGIDVSKDRLDVHVRPSGEAFAVPRNGKGLSELVERLRSIAPALIAVEATGGFETIVAAAIAGAHLPLAVVNPAQVRYFGQAVGRRAKTDPIDAAVIAHFAEAVKPEPRELPDEAARLLAELVSRRAQLIEMVVAERQREKRASSVRVRKSLARHIAALEKELPVIDRDIDTMVRGSPLWREKEDLLVTFPGVGNTIARSVLADVPELGRLDRRKIASLIGVAPFTRRSGKWKGKSMIGGGRPAARSAIFLAALSAIRCNPVLRAFYQRLLAQGKPKMVALIAVARKIVTILNAMLRDKKQWQPA

SEQ ID NO: 203720 - protein, 392 aa, unidentified
MYIIGIDIGKNHHEASIVSPKGRQIGHSLRFATTHKGADSLISFIFKNIGDSPCVFGMEATGHYWYPIYSFLKFKGYTIYVINPIQSDSPRKMYIRQTKNDSIDSFLIAEVIRFGQFEATSMADETILAMRQLCRYRDSVVSSGTEIKLRISTIMEQIFPEYGKQFSSLWLGTSMGILEKYLTPENIQNAPIDELFEIIKDKSHNKLTIKKSVSIKDAAADTFGIKIAQDAFAFQLKQLIDRLNFLNEQLEALDHEILSYYEKFDCYLHTIPGIGMIAAATILAEIGDIHRFKNSSALVTFAGIDPTVRQSGEFNSIHNHMSKRGSPYLRHAIFLAATTCSFHNSPLNAYYKKKREQGKHHLTATGAVARKLTTVIYAVLRNGKPYEPKSFC

SEQ ID NO: 203721 - protein, 404 aa, unidentified
MIFVGDDWAEDHHDVYLMDADGARLASRRLPEGLTGIGALHELIADHVGEPSQVVIGIETDRGLWVQALGVSGYQVFAVNPLAVARYRERHQVSGAKSDAGDAKVLADLVRTDRHNHRSMAGDSPEAEAIKVLARAHQNLIWARTRHTNMLRSALREYYPAALNAFDDLHDRDALAVLSRAPTPAEGTRLSLSKIRSALKHAGRQRNIDARAHEIAVALRTEQLAAPATVTAAFAATTRATVGIIGELNRQITDLETQLATHFETHPDADIYLSLPGLGVILGARVLGEFGDDPNRYTTAKSRKNYAGTSPLTVASGKKCAVLARRVRNRRLYDAIDQWALGAINHSTGARAFYDQHRAAGDLHHQALRALGNRLVGILHGCLRHHTTYNEHTAWAHRQTAQAA

SEQ ID NO: 203722 - protein, 363 aa, unidentified
MNATAALPVVGVDLAKSVFQLAIADGSWRVVEQQRLTRTQFERWFANRAVGLVVMEACGSAHHWARWLNARGIEVRLLPAAYVRAYVKRNKTDAADACALLEAARCAEIVPVRVKSIEQQALQGLHRTRSLWMATRTSRINALRGFCREFGISIAQGSRLGVEQIGRVLADPHSAVPALIRTTMQLVVEEIRLLEVRIAQLERELTAVARQSPACTTLLSIPGVGLLTATAMVAATSGAVSHFRDARHFASWFGLTPKEHSSGGTRHLGRISKRGDRYLRMLLTHGARSVLRAASVAVRAGKTVDGLRQWALGVQHRANHNKAACALANKLARICYATLRDGEPYGAARLHKKLTRTAFALPA

SEQ ID NO: 203723 - protein, 543 aa, unidentified
MWPLGVVVPPPGFDDDLGLGEAVEDLTVEQFVAELRVEALAVAVLPRASRFDERCLCADGYDPLPYSLGDELRAVAPTEGRVGATSNGARSFFAASAHRLRWPWPVEVALECECSQLIPERPTMTSQNSIPADAVLVAIDIAKVRNEVLIEAPGHKRRRRLSVLNTRAEHDHLIAILQSYDRPVVCAFEATGNYHRPIAWRLVEAGFETRLVSSLALARTREALHNSWDKNDPKDAQVILHMLRIHSTQVYHDPLRAGINDVQELSKTHEAIANAKTEIQHRILTHYLPLYFPEIERFRGNSRSDWFFAFLDAFPTPSSITTLTKEKFVEAAWDVVGRKVSKSQILMDIYETARTSIGLPLPLDAPAIRMFRMVVAEARSLIRQRNEIEAQADDLLRNSRDYQILRQIPGIGPINALTIIAEAGDLRRFHHHRQFLKFCGLDLSTQQSGQYRGQTRLSKFGNARLRRTLWIAGQVAIRQRENGFRHKFERYIARDRDNPDLRRKAMTAITAKMARVVHAVVKSGSDYRPFVEGRVPGGRTSVS

SEQ ID NO: 203724 - protein, 355 aa, unidentified
MVVVGADSHKRTHTVVAVDDVGRRLDEKTVAATSEGHLLLVQWAAQWPEVTFALEDCRHLTRRLERDLLCAGHRAVRVPTRLMAGARRGGRQPGKSDPIDAQAVAMAALRHPDLPVASLDGPTREVKLIVDHRRDLVAERTRVHNRLRWHLHELDPTLQIPSRGLRRYCVLTELADALEGHRGVVARLAQELVERARQLTEQINALEAELRPLVRRLAPSLLAIPGCGILSAAMILGETAGAHRFRNKDAYARFTGTAPIPVWSGTSNGKVRLNRGGNRTINTALHMIAVTQSRGYGSGRAYLDKLTAAGKGRTEAVRLLRRRLSDTVFSALRIDERRHATASDNTTSEQPATAA

SEQ ID NO: 203725 - protein, 337 aa, unidentified
MIIIGCDFHPSYQQIAVLDTETGATEDHKLLHASGEAERFYRELPPPVLVGIEAVGNDQWFVQLLQKLGHEVWIGDAAQIRASYVRKQKTDHRDARHMLQLLVEGRFPRIWVPSVEMRDHRQLLIHRHKLVQIRTRVKNELQHLMLNQGMQKKQKLWSTAGRVGLESLPLEPWADRRRRDLLCLLTMLDGQLELLKDAVTQVAKQYPNVQLLMSQPGVGAVTALAFVLTIGDVRRFQRGKHVASYVGLIPREYSSGGKQRMGGISKQGNRLLRFLLVEAANIAVRCDPVFRKEYLHRCHQKHFTVAKVAAARKLAIRLYWILRTQTPYPQVLSSRVA

SEQ ID NO: 203726 - protein, 355 aa, unidentified
MDSKKYIGMDVHQATISVAVRDAAGKLVMESIVETKAATILQLIQGIHGSLWVTFEEGTSAAWLYDVLQPHVAQVVVCDPRRNALLKAGNKNDRVDPRKLSDLLRAGLLTPVYHGQAGVRTLRELARSYLTITKDGTRVMNRLKGLYRSWAIPCGGAKVYSVRHRNAWLEQLSQAGVRRRAEWLYQQLDILLDLRREARRELLTESQKHPAHQLLREIPRLGPIRVALIIALVQTPHRFRTKRQLWAYCGLALQTRSSGEYRVREGRLEYTKRPPAVRGLNVNHNHDLKNVFKSAATQVSASGDPLGDFYQNLLAGGMRPAMARLTLARKIAAITLKIWKKGERFDPGQLKRKCA

SEQ ID NO: 203727 - protein, 413 aa, unidentified
MAEITCGIDWADGHHDIALADRDGLRLAKQRISDDVAGLAALLALLAEHGDNPEDPVPIAIETSRGLLVAMLRATGRPIHVINPMAVARYRDRHSAARKKSDDFDALVLANILRTDAAAHRVLPADTELARSIAVLARAQQDAVWDRTQAANKLRSHLREYYPGFLAAYGQKEKFTTPVARTILAAAPTPAHAAKLTPAKLTALLKKAGRVRGTATETARAREIFQNPQMRQPPLVEAAMGAKTLALLRQLDAACQSAEDLEKAAVASFNQHPDAEVITSFPGLGHLLGARVLAEIGDDRNRFADARALKAYSGTAPITRASGKKTSVRVRRVKNNRLAAVTYPWTLSALTASPGARTHYDKRRETGDWHAAAQRNLANKLLGCLYHCLQTGTHYTEATAFPHPDEKILELAA

SEQ ID NO: 203728 - protein, 351 aa, unidentified
MLIVGCDYHPSVQQIAWLDTESGECGERRLLHSNGEAETFYRKLKEQGVSVRVGIEATGHARWFERLLAELEYELWVGDPAQIKAKRVRKQKYDQEDARLLLKLMMEDRFPRVWVPGVENRDLRQLLWHRHRMVQARTRIMNQLQGVALNEGLRCKKRLWRAWGREQLEAFRLAPWASRRRHDLLELLDRLTPTIAELTQAIEQEVEKCPEAQRLQTHPGVGALTALAFVLIIGKAERFQCGKQIASYLGLVPLEKSSGNQRRLGHITKQGSSLLRFLLVEAAQVTARSLPEWRSKYYHLTMRRGRKIAKVAMARKLAVRLYWMMRKEWDYGQLTKFGSHAGKLGTGDGVQ

SEQ ID NO: 203729 - protein, 413 aa, unidentified
MTEENFAWFAGIDWGSERHQACLVDAQGRIVGEREFPHGGKGLADLCDWLLSMCGAADTVAVGIEVPHGPVVDTLIDRGFVVHAINPKQLDRLRDRHSVAGAKDDRRDAYVVGDGVRTDRRLFRRVHVTDPRLVELRAWSRLAEELTEERVRLSNRVHHELWRYYPQMLKIADGDVAATWVLDLWDLAPTPARAHRLRAAPVEKLLKHHHIRRIDADAVLRNLQEPAIKVGKGVAEAASVHLRSLFTRLRVVNRELRQADAKLDALCAAIGETDADSGKGLQRQDVMILRSMPGIGRINLATLLCEGSGPLSRRDYPALRTLCGAAPVTKRSGKSHIVIMRYASHVRLRNVVYHWARVATQHDPKSRERYAALRRRGKSHGRALRGVADRLLGLACVLLQRQTPFDPNFAQAK

SEQ ID NO: 203730 - protein, 389 aa, unidentified
MSHSTPESDRIMIGIDPHKASWTAAAVGPGLQPLATVRVPVGPHGYRDLRRFVARWPDAMWAIEGAGGLGAPLAARLSADGIAAVDVPAKLAARVRVLSTGHGRKNDDADAISVAVAALSDAGLRTVTVDEEVTALRALVEHRDDVVKTRTQTVNRLHVLLTQLIPAGAPRQLTADTAAQLLRTVRPRSLGPRTLRRLAADLITEIRRLDRRITVANTEIAAAVQASRSTLSELRGIGNLTTGKILARVGDVHRFRSAAAFASYTGTAPIEVSSGDVVRHRLSRAGDRQLNCCLHTMAITQLQRDSPGRVYYLRKRADGKSHKEALRCLKRRLSDVVYRCLIRDADPQNGAGPRGHQGATTNSSATGSTPTAGSSDKSLPGPATTDSTT

SEQ ID NO: 203731 - protein, 396 aa, unidentified
MSHRHLDHPDTTFVGLDVHKSSITSAVLVPGAEVAVVDRLFPDEASIRRFVAGLGDPALVSVCYEAGPTGYHLARLLWRLGASCEVIAPSLIPVAAGARVKTDRRDARRLVELHRVGQLTPVRVPTEAEEAIRDLCRARADLVTDRTRARHRLLKFLLRHGVVFGDGAHWTMRHEAWLAKVRFDDEALSCTYARYRSVLAGLDAELGAIEADLRCYLETGPFAETVARLSAYRGMTELGALSLGAEVGDWRRFPRATSFMGFCGLTPSEYSSGERVRRGKKNKNGKGHPRTAPLQAARAHQHPPGAGAVHARPQRPGPPENNAPARGAHGPPCAGGVRVLAAETLQVLLAAVVVVVDGVMRVVGATGGLLPVLGGERPDVAQCGSQGARAQLVGAN

SEQ ID NO: 203732 - protein, 325 aa, unidentified
MTNETREPVYVGIDVSKDSLEVALADKAASVRFANDEQGVKALLEHLAGHNVAVVLLEATGGLEKRCAHALYLAGMTVVVANPRQAHEFAKSMGYLAKTDGIDARILSHFARTLHGSERFDKLLFKMATPQQEQLQALVTRRSQLVQMRVAESNRLNLAHALLAKSIQAVIKLLDKQIKTLDEDIGNRLKQHFAQKLKLLEGFKGIGEGTKAVLMAALPELGRLNRREISKLVGVAPLNHDSGKMRGKRSVWGGRADVRSALYMAALSAVRFDPTIKAFYERLRAAGKPPKVALVACMRKILSILNAVIKSNTAWEQRCPQASTA

SEQ ID NO: 203733 - protein, 313 aa, unidentified
MSQEKYIGMDVHQATISVAVMDAGGKLIMECLLETKAATIVEFIRGLHGTLSLTFEEGTSAAWLHDLLKPHVSRLVVCDPRKNALLKDGNKSDRIDARKLAELLRGNQLHPVYHGEHGVRTLKELGRSYLTITQDVTRVMNRIKALYRSWAIPCAGTTVYAPRHRAEWMAKIAEPGVRVRAERLYQQLDLLQPVRLEARRQLLLESHKHSAVSLLRQIPSIGPIRSALLVALLQTPHRFRTKRQLWAYCGFAVETHDSGEYRSVRGKLQRNRERMTVRGLNDNHNRDLKNLFKSAAISASTRPGRRACWSWAR

SEQ ID NO: 203734 - protein, 350 aa, unidentified
MEKIVKQVVGIDVAQKELVVCLGRMYDDWTPELHANKTFANTANGFAALILWVKKLTEESSPVRYVMEATGVYHESLAYFLEGKGFEVSIVLPNKISNYFRTLEVKTITDKTASEGIAQFGLERKLDRWKRPAEIFRRLKQKTRERDQLVGERTLVKNQLHAEQTEAYPSKESIGRMKTRIKLLNKQVIEIKEELSALVKQDEAVKGSIAVISSIPGVGVLTAVTVLAETNGFELIRNKRQLTSYAGLDVKEKLSGTSVKGKPRISKKGNRHLRKAMYMPALSVIRREGRFKTLFVRLVSRHGIKMKAAVAVQRKLLEMIYTVYKTNKAFDKDYLKDEFYSHNNLMLECG

SEQ ID NO: 203735 - protein, 419 aa, unidentified
MKNMTSEKSFAAFIGIDWADQEHTYSLAVAGSSRIERGRLQHTPEALHAWAEQLHKRFAGRPVAILLEQKRGALVWALQEHPFITLFPINPLTSAKLRQAFFPSGAKSDPLDSDLLLDILRHHRDRLRPFQLDEVQTRLLERLTQDRRGAVEQRKSCVQQITAALKEYFPLALEVLGKLECNLAARFLLKWATLEELQAAQPHLVRKFFHGNNGRFQIEQRLKRIKQAQPLTSDPAIIEAGRRKVQMLAQLIITLNQYIADYQKRIETLFQRHPDRHIFQSFPGAGAALAPRLIAAFGMDRSAFADALSVQNRSGIAPVRVSSGKTAIEKMRVVCPKFLRQTFHEFAATSVRYCAWARTYYQAKVAAGKKHHTIVRALAFKWIRIMWACWQNQEAYEETRYLRALTRSGSPFAVTLKKT

SEQ ID NO: 203736 - protein, 320 aa, unidentified
MMAQNSLVVVGIDVAKDKADACIRSLSQRQTFPSTTQGRRKLIAWLRRHKVDKAVMEASGGYERDWAKALREAGFLARVVDPKRVRNFARSAGRLAKNDAIDAEMIAWFAETFGEATCQVYDAEREKLVQIVYARQALIDVQTDLQNRGDHSVPDVVQRMQTRLLKKIAVELATLEAEMVAMVKATPRFAELAEIIESVPGLAEITSAGLIAAMPELGQVSNKAAASLLGVAPYDDDSGKRRGERHIRGGRRKIRNLFYMACLGAATLHNPILKAFYRHLLAKGKEKKVALVACMRKLIVIVNIMIARREKWDPSRCTSG

SEQ ID NO: 203737 - protein, 367 aa, unidentified
MKKVSIAATRQSRNISQQKLTIGLDLGDRNSWYCVLDEAGQIQLEQRVRTSAKELREVFGAMPRSRIAVEIGTHSPWISRLLSELGHEVIVANARKVRLIGESRKKDDRLDAQTLARLARIDPELLCPVKHRSAQAQADLMMIRARAGLVRARTGLVNTARGLAKSYGERLRGCNVRNMNAEKAEGLSPELQRALEPLLSAIEELSQQICEYNEGIEALAQASYPQVALLKQIKGVGTLIALTYLLTLEDAHRFGKSRDVGCYLGLQPGRRNSGQSEPQMHISKEGDPYLRTLLVQGAQHILGPFGADCDLRRWGLKLAERGGKNGKKRAIVATARKLAVLLHHLWVSGEVYEPLHNSSRMTVAAAA

SEQ ID NO: 203738 - protein, 342 aa, unidentified
MDTIGLDLHKRESQLCELTEAGEIVERRLVTSRERFAAVLGDRPRARILLEASTESEWVARHLESLGHEVVVADPNFAPMYATRRRGVKTDRRDARTLAEACRLGAYRPVHRASAPQRHVRAQLAVRDALIRTRTRYISVVKALARRDGLRLPSGKPVHTEAKLAALVLPAPLAEEVAPLRTILEPLNREITAADERLAAVAAADPVVARLRTAPGIGPVTAVAFVATLDAVTRFASAHHVEAYLGLTPREYSSGEQQHRGRITKTGSPRMRALLVEAAWRVLRSPDPAAAPLRAWAERIALRRGRGVAAVALARRLAGMLYALWRDNAAYRPPTPRPGAEA

SEQ ID NO: 203739 - protein, 352 aa, unidentified
MNEKYVAMDVHKASVAIGVRDRGGKYIMESIVETKAVTLLEFVKGLSGAIHLTFEEGTQSAWLYDLLKPHVAQCVVCNPRKNKLLDEGNKGDRIDVQKLSELLYLGALRPVYHGDHGTRALKELARNYESLVRDRTRVKNRLKAIYRGRGISCEGDEVYNLRKREQWIMRLAERGVRQRATSLYSQLESLNAMVAAAQREMLAESRKHKAAAILRSLSTLGPISVAMIIATCDTPHRFRTKRQFWTYCGFAVVTRSSSDHYFEKGELRKRRKPALTRGLNRNYNRRLKRVFKSAATSGTRQGPFKPFYEQLLAKGLKPDLAKLTLARRIAAITLAMWKKGERFDPKKLKVNS

SEQ ID NO: 203740 - protein, 402 aa, unidentified
MHKKTVVAAVSVPNPSGGWHQETRTFATMTGDLLALSDWLTQYSVTQVAMESTGEYWKPVFNILETNFEVVLVNAQHIKAVPGRKTDVNDAEWLADLLKHGLVKASFVPPEGQRDLRELTRYRTTFVRERATLVNRVHKVLESANIKLTSVATDITGASGRAILAEVIQGTASPATMADLAKGRLRAKRDQLIKALEGRVKAHHRFVLTELLCQIDNLDEAIDRFDQQIQVYCRPFEEAVQHLDTIPGVARATAEIIVAEIGIDMSRFPSAAHLAAWAGVAPGSNESAGKRRSSKTRKGDRPLGVALNQAAHGAAHTKNTYLAAQYHRLAARRGKKKAIVAVAHSILVIAYHLILRKEDYRELGGDYFDKRRPEATANHLVKRLEALGYTVNIQAQTASVAA

SEQ ID NO: 203741 - protein, 343 aa, unidentified
MKVTTIGIDLAKSVFQVHGVDERGHVGVRKQLRRDQVAVFFANLPACLVGMEACGSAHHWARKLRGFGHEVRLISPQFVKPYVKSNKNDAADAEAICEAVARPNMRFVPIKTVEQQAVLSVHRVRQGFVKARTAQANQIRGLLAEFGLVLPQGITNVLRRVPSMIDGAADLPASMRQLIERLLENMTALERQVKELEVQIKAWHQGSELSRKLEKIPGIGPLAASAVVASIADARSFKNGRQVAAWLGLVPKQDSSGGKPKLLGMSKRGDTYLRTLLIHGARSAIVAAQRKGSTNAWLSGLLTRRHPNVAAVALANKNARTIWALLAHEREFRPDYVPRPAAA

SEQ ID NO: 203742 - protein, 328 aa, unidentified
MELSAIGIDVSKETLDVNVFTGGKPLGKQFANTEQGFGQLIGWLAHRRLGRVHACLEATGRHSLGVALALHAAGHVVSIVNPAQIRDFARTRLGRNKSDAVDAGHIREYGTMFRPPAWRPPSPALRRLCELQTMRAGFVASRVEWQNRAGSLGGEAAARALAEATIAHFAAQIAAVDAAIAETIDTDDDLRGKHDLLLSIDGVGQTLAALVLAELPGSDVITSSAQAVAYAGLNPRQFQSGSSINRPTRISKVGNATLRSGLFMPAMVAIRHNPAVAALAARLRAKGRLTPKQTPKQILIAAMRKLLVICFGVLKSGRPFDAALAMPA

SEQ ID NO: 203743 - protein, 449 aa, unidentified
MENQARMIKSSDGNKLAIVNPNAAGIDIADAEMQVCVPEDRDGDNNRRFGSFTKDLNTIVEWLIGCNITTVAMEATGIYYLSLFLKLQDAGIEVLLANPADVKNMSGKKTDAADAEWLMVLHRYGLLRPCYQPGNAARQIRNLTRQRSNLIKMADKEVLYMQKAMEQMNIKLSTVLSDITGLSGRRIITAILQGQRNIYELAALAEPNCKASQEDIALSLEGTWDVDLLFMLKQSLAAYDFFLSQVGECDMEIERLLSLYGAQIEAGSAELIRCKRKNKRSKNAPKMDIENFAYQLWGVNVFEIPGLKDTAVMHLIGELGHDFVDKFGSAEKFSSWCNLTPNNKISGGKILSSKIMKRKNPVGQIFRTAVAPLARDKGEMGNYYRRIKSRSGALQANVATAHKMAKIFYTMVKTKTSYNASKVGLGERELAERKIAKLECLLMKLKNVS

SEQ ID NO: 203744 - protein, 355 aa, unidentified
MSQEKYIGMDVHQATISVAVMDAKGKLIMECVLETKAATILEFIQGLRGTLAVTFEEGTSAAWLHDLLDPHVNRLLVCDPRKNALLKDGNKNDRVDAQKLAELLRTNQVKPVYHGKHGTRALKELGRSYLTITKDGTRVMNRIKSVYRSWAIPCAGTSVYTRRHRAEWLAKLVEPGVRIRAEHLYQQLDSLEPLRLEVRRQLLLESHKHAAVKLLRQVPAIGPIRAALLVALLQTPHRFRSKRQLWAYSGFAVEVHDGGEYRRVRGKLQRNRERITVRGLNDNHNKEVKSLFKAAAISASTRPGPLHDFYVARVESGMRPTMARLTLARKIAAITLTMWKKGVSFDPKQLYRQAA

SEQ ID NO: 203745 - protein, 354 aa, unidentified
MNTTQNSTKSKIVKVIGVDLAKDHCDVIGYDENGKICLRLDGCSYAKLREILSNLPQAVVLMEACKGSMFHARSIADLGHEVRLVKGADVKALRNINHKNDLRDAAYIAKLYFVPGTTYVYIKSQQQQSLQFLQNEYKSLQELRIQAGNQIHAGLEEFGCPVRKSSKFIKTRMVAHLEKHAELIPEDVMASFKRRREIWLNLLQQEEEAKRRLEQVAATDANAKRIMTVPCVGPQTAVGLLVHIGVDIGRFKNSRQFAASLGLVPKQNSTGGNNTLNHITKCGPKRLRSNLVQCAQLVLMHTEKWKGNFGDWVRKMRDSGKKHGVIVCAIAAKLARIIYRLMKDKVDYTSVLSC

SEQ ID NO: 203746 - protein, 333 aa, unidentified
MNMHPQGGVANRDQRPNAGVDVCKQHLDVCLGTTEQRVLNDANGWNELIAKFKDAAVDVVVLEATGGYERGLVCALQGVGIAVARVNPRQARDFAKSMGVLAKTDQVDARTLRDFADVLARHKDRAKYITPMFDEHRQQLAELMTRRRQLVDMRVAEGNHLEHATAKQSVRSIKSVLKILDKQLQAIDREVDDQMDRHFKEQHALLDSVKGVGPVTILTLTAALPELGSLGRRQISKLVGVAPLADDSGPRKGKRRIWGGRANVRAVVYMAALVAIQHNPAIKVFHSRLIAAGKPKKVAIVACMRKLLTILNAMLRDQTSWSAAKHVRDPISA

SEQ ID NO: 203747 - protein, 323 aa, unidentified
MNKDIKYFGIDISKDVFDVTDSNDAYSQFENSYKGFKKFLNLLDSTSHCIMEATGYYHYKLAYFLQGHSIKVSVENPLSVKRFIQMKLSKIKTDKSDSRLICEYGKQVNLKLWEGHSKHQIECLQITRLLGVYIKQSTMIKNKIHGEKVLGDPSLLVVRSLKRSLRFIQKEMQTLENSLLELVKENHQDLLTRIETIPGIGRKTGIMLIVLTDGFKRFKSARELCSYSGLTPIIRQSGSSVKGRPRISKIGNKKLRNLLFMCSFNACKYNKSCREIYQRIVAKGKSKKLALIAVCNKLLKQAFAIAKSGLIYDETYRSTLVKN

SEQ ID NO: 203748 - protein, 475 aa, unidentified
MNLKGTKKKNQVSNANIFEQQELLKKIEVVRENLTASTWHELETKGKFDKNAKLSFICDDMLILGCDVGSETHYLRAIDTRGRELSKSDFSFSNNADGFSKAKEWAVKIAAEYDKKQIVLGLEPTGHYWFCLATWMISNGISVVQVNPYAVKQTKELEDNSQLKDDAKDPKLIANLVKDGNFGMPYLPEQLYADLRRLSMFRDQLNEDRIRSINRLHRELKIYFPEYKEALGKTEGTFSLELLKQAPFPDDLAALKEDGIRQIWHNAKLRGRGYSRAGEILEYAKASVGIREGKETGKLVVQWFVQKILELDAELALIETQINQKCLEIPHTDKVLEICGIGENTLSSMVAEMGDISRFDDVKEIQKLSGLGLVASSSGKHKGETRISHRGRKRLRYWLFQAAKSAVAHAEEFKKLHVYYTTREQNPLKKMQSLIAIACKLLRIIFTILKKGIKYDPQKMLKDVRRESRQESLAA

SEQ ID NO: 203749 - protein, 391 aa, unidentified
MQASTVSTPITDRISTIFGAIELSQKTWLVTIHSPDKDKISRHKVPGGDHVSLLALIDRVRDRAARTLGVAPAVVSCYEAGYDGFWLHRLLQAAGITNYVFDPSSIAVDQRARRVKTDRIDGEKMLRTLMAYLRGEPRVVRIVRVPAPEQEDARRDTRERDRLTKEQTAHTNRIKALLRLHGFAVGNPRRRDWLIWLAAQRDWQGQAVPPRILTEIEHEHARLMLVRKQLEALAPAPAAADLTPAAAEMARRSELLLRLKSLGPAFATTLTQEVFYKDFHNRREVASYFGLAPSPWQSGGTDRDQGISKAGNPRARCSAVELSWLWLRHQPDSELSQWFRQRTLNASKRTKRIAIVALARKLMVALWRYLTTGLVPVPAGAMLKVSGGAMI

SEQ ID NO: 203750 - protein, 374 aa, unidentified
MRADKKRRVRVNGCSMNSIVAGIDLGDRESLATVLSPIGDVMDRFTFPMNEEGYAYFANRVPREARVAFESTIMAYPIMRALRGHGYGDITVAHPKTLAWIVRSKKKNDRVDSLKIAKLHMAGMLPESHLLDRDQQIVRDLLVQRAKLGVEIGRLKNSVIGYLKREGVYDSLPKNRDSFSAARRRAISSLKFDDKRDLVLSTMMSRLEFLEKQCAPLEDKVRENARLSEDVRLLMTITGVDFYLASLISSFIGDVNRFPSDDHLASFFGIVPTSRDSADVKRRGRMTKDGSSTARWALSVTVDTVMQHNEPIKDYYQSVKKRTGSGKLAHVSTMRKLTRMLYHMLKSRERWKWENPQLTERKLSRLQVDGGDVS

SEQ ID NO: 203751 - protein, 357 aa, unidentified
MEIAYDGRQVVGVDLHRRRSVLVRMTEDGRRLGTARITNSPQELRAQIARAGKSPRVVLEATYGWYWAADTLAAAGAEVHLAHPLGVKAFTYRRVKNDERDAADLADLLRMGRLPEAWIAPQEVRELRELTRYRQKLVHLRTSCKDQVHGVLAKLGVPPACTDIFGVAGSAWLDQLGLPQPYAGKVTSLRQLTGELNSEITMLSEVIADLAAGDRGYQVIQQLPGIGPVLAAVIIAEIGDVTRFSNAAQLCSWAGLTPRHRESDTKVTRGHVTKQGSRMLRWALIEAIQRAGADTVTGAIKDAIIARRGKQARNIAKVAAARRLLTLVFYGIRDGQIRCLSTTPGGSPPTTRSARAA

SEQ ID NO: 203752 - protein, 411 aa, unidentified
MDAFCGIDWAEDHHDVAVVDRDGGLLARARISDDAAGFARLLELLAGHGDTAGNPVPVAIETPRGLLVACLRATGRDVYPVNPMAVARYRDRHSIAGRKSDHGDAVVLAGILRTDLHAHRPLPADSELAQAIAVLARAQQDAVWDRVAAHNKLRSHLREYYPGFLAAFADSKGGITRPEARAILAAAPAPGDAAKLTLAQFRALLRKAGRSRGIEAEAQRLREAFRVGQMRQLPLVEQAMGRQALALLRQLDAACASADDLEHAAIESFNQHPDAGIITSFPGLGALTGARVLAEIGDDRSRFTDAKGLKAYAGAAPITRASGKTRSVTRRHIKNNRLAQAGYIWAFSALTASPGARAHYDRRRDAGDRHAAAERNLFGRLLGCLHHCLATGQHYDETVVFPARAATLAAA

SEQ ID NO: 203753 - protein, 402 aa, unidentified
MIFINCLGIDIGKSESVVAHYKDEVLVKEMVIQNNQNGYRYLKNYIKHLDSLFILFESTGIYSRGMKRFCEIHKIDYLEMNPLEAKFKTSSLRSWKTDKSDAHKLALLAFRMKDSKVQRQSEEIYFELRERARFHLEMEINQNRLKVELVETLHQTFPGLEKLFTNRYSKIALNIAKAFPHPDFVSTLTHDELVEKVLHSTDKGISVNKAHKYVQKLIEIQTNSFPNVDKSSFLLQKVQYLCDKLLIGIEEMKEFDQEMIDLAKNTTEFENIISIPGIGELTAALLIGELGNIREFKTNKQLNAFVGIDIKRYQSGTSKSRDTINKRGNKKARRLLYLIIMNIIRGRNHYQSHIVDYYYKLREQPHGKTHKTAVIASINRLLKTIHYLIVNNKLYDYQKAPH

SEQ ID NO: 203754 - protein, 311 aa, unidentified
MKDSIGIDVSKDHLDLYCLDDGRSARFGNDAAGFRKLKAWLPDAGCIARVVYEATGPYHAALERRFGGELPLVKVNPLQARRFAQSKGSRVKTDAVDARMLAQMGAALDLAPQAPMSESLRELKELQVARQALVKDKTRLENRIKTQSVAFVVKQGKARLALIKRQLRDIDAEIQTRIGAETPRARAFEIIRSIPGLGAVSTAAVLIECPEIGTMNRKQVASLAGLAPMTRQSGHWNGQAFIQGGRNHLRAALYMPAIVAMRFNPDLKAVYDKLRSAGKPAKVAITALMRKLIELANTLVKADRLWVQKGA

SEQ ID NO: 203755 - protein, 420 aa, unidentified
MKSNTQNAKIEAITEKTLVLGIDVGSETHYARAFDYRGIEYSKKPFKFSNTEVGFATFKEWILDLKERHEKDKVVPGMEPTGHYWFNLGKFLQDNEMKPVLVNPHHVKKSKELDDNNPTKNDRKDPKVIAGLVREGRYMIPYLPDGVYADLRTASNIRFQLQAELTRIQNRISRWFNIYFPEYKTVYRKPDAKSGMLILKAAPLPEDILTLGIDGVNQIWRDAKLRAVGKARAKTLIEAAVSARMEIRMLLEDYESRNTRLQEVMVLIEELVRKIPMAEKLLEIKGVGIRTVSGFLAEVGDISRFNNPKELQKLAGLALVENSSGKHKGETTISRRGRKRLRYLLFEVAMSLVAKNPEFRELHNYYTTIRQNPLKKMQSLMAIAAKLIRVFYAMLTKGVDYDPKKMVSDIKRPAVYLQAA

SEQ ID NO: 203756 - protein, 343 aa, unidentified
MKIKKFIRIGVDLAKNYFQIHALPSEGTPPVTRKLRRSKVLEFFSQIEPCLVGMEACGSAHYWARELKKLGHEVLLMPPVYTKPYVKRGKNDAADADACCEAMSRPGMRFVPIKSAEQQATLMLHKTRELLIKQQTMSVNALRGHLSEFGIIAAKGIGRVDELLELAESDKTLPDAAKAAVKVLAKTLQGLNKAITDLEAEITGACAQTDMTRLLETAPGIGKLIASVVPAVVPDPNVFESGRDFAAWLGLTPRQNSTGGKQTLGAITKKGNQYIRKLLVLGATSLLSIVGKRKGALRDWIVSLLARKPARHVTLAIANKLARILWAMMKTGESFRTEMFAKA

SEQ ID NO: 203757 - protein, 401 aa, unidentified
MPSVRTNATRVKRFRELKTTLRTNRERLLVGLDIAQAEHVVHLRHAHTRVVVPTLTIPNSTRGFAQLWTRIQQAQRATGCREVVCGLEPTGTYHQAVATFLETQGADVVLLSSSVAYWNRRTQDGTWDKNDRKDAANCADLLEQGKVLFYSQPEGPLAELRRLVKCLRRARGELASCKARWRTTLRPALGPMGEPLPNRLRAELPAVLQGWEPAAPGRPAVAKGRLPLGLATACADLGAQITAVQARITAIEAALTPLAERLPAYALLRTIPGVGPTVGAILLAEIGDIAWFTQFSQLRKLAGLDIIRVQTGKFASQWRISKCGRGLLRWALYHAAVGLARTAAGRARLAALKAKRQGDRYAGFKAVVELAAKVLRVVWGVWRSGTPYDPRRAGGLQRQPR

SEQ ID NO: 203758 - protein, 343 aa, unidentified
MQAVTTIGFDIAKSVFQVHGVDSVGQVIIRRRLKRRQVIAFFRKLPACLVGIEACASSHYWSRELQALGHNVRLMPPAYVRPYVKRQKNDMADAEAICEAVTRGNMRFVPTKTAEQQSGLMLHRTRHLFMRQQTSVINAIRAHLAEFGIVAPVGRRGVEELLRVVADPRDKRLPEVVRACLAALGSQLLSLKKQILDFDRMIMAWHRSNQTSKRLNCIPGVGPLLSTALVASVADPKTFRSGRNFSAWIGLVPKQNSSGGRDKLGSISKQGDRYLRGLFVAGAFAVIRYAKIHGTKHRPWLTALLARRHTKVAAIALANKLARMAWAMMATGERYNYPASLKV

SEQ ID NO: 203759 - protein, 423 aa, unidentified
MMKLKYSICCGLDVHKNVIVATIVITNADGISEYRQKSFSTFNSDIRKFHSWLIENNCYHVCMESTGKYWIPIFNYLENDIEVCLTHPKYVKAIKGKKTDKKDSKWIADLYKFDLVRCSFIPPKDFRQLREIARYRFKLVCMKSSERNRIQNCMTVSNVGIASVLSDPFGKTATEIMSYLLTHTSDSIDEKAVRKLIKKGAKAKSDEIIEAIRGYNIESDQAKKLELARSHLEYLDGMITQSEVELYVRMKPYYKFVELVSTMPGMTELSSTIVLAETGVDMGIFDDAKHLCSWCGLSPTNNESAGKKKSVRISKAGDYLKPMMVQCALAAIKSKKQPYFAIKYGRVKKRRGHKKAIIAIARMMIVCIYHMVLEEKPFTPIDYEELMSPKNHIERVILNENNVFAYLESLGYDSSKLVKRNDN

SEQ ID NO: 203760 - protein, 401 aa, unidentified
MQEPLQHNSIDVFVGVDVGKGQHHAVALDRSGKRLYNKALPNDEAKLRALINELKAHGQLLFVVDQPATIGALPVAVARDEGVLVAYLPGLAMRRIADLHAGEAKTDARDAAIIAEAARSMPHTLRSLRLADEPLAELTMLCGFDDDLAAQVTQTSNRIRGLLTQIHPALERVLGPRLDHPAVLDLLERYPSPAALAATSEKTLANRLIKLAPRMGKRLAAEIVQALGEQTIVVPGTRAATVVMPRLAKQLAALLQQRDEVASEAERLVHAHPLYPVLTSMPGVGVRTAARLLTEVAHKAFASAAHLAAYAGLAPVTRRSGSSIRGEHPSRRGNKVLKRTLFLSAFAALRDPISRAYYTRKIQQGKRHNQALIALARRRCDVLFAMLRDGTFYQPKTVPNA

SEQ ID NO: 203761 - protein, 433 aa, unidentified
MQDVQDEPLFCERVAGLDIAKAEVEVTIRVPSDTTAGRRQQETRTFGTTRRELESLGDWLACWGVTRIGMEATGDYWKPVFFLLESRGFDCHLYNAAQVKALPGRPKTDRADSIWLARITERGSVCSSFVPPEPIRALRTHTRYRRHLTQARTAEKQRVEKLLEEGHLKLSSIISDIHGVSGREMLNAIAAGQRDPRVLAQLARGTMRAKIKRLEEALDCAFFTGEHAAVLAMMLATIDHYTTQIDNLTAKIEVLAEPYLHQIRQLDEIDGVGPVCAQDIIAEIGTDMTVFPTAPHLVSWAKWSPQVKQSAGKRKGSNATGRGNPYLSAALGEVSISAGRTQSFLGAKYRRLARPMPKKKALVATGNSALTIIHALLSDPAARYTDLGPDYYEQRMHARRQARNHVRSLERLGYKVTIQAINPDTGELLAAAG

SEQ ID NO: 203762 - protein, 405 aa, unidentified
MPYILALDVSMGHSYSVLYKDDTCLFEDEIEHTQRGFHALLEEIQHLPERPLIVFEATGIYSRPVEKFFQDHHFSYCLLNPLEAKKQMEESTLRSWKTDKSDAHRLAQTHLKSQRQPKEVQSNFYLEMRDLARFYQEIEKKITRLRMDLHNCLQLTFPELEQFFSNRLTPYALTLIRLFPHPDFVLASTRTKIKNKLINETRKKISANRAEQKADQIIHYAQCAYPAVEKDSIQCQKTIYYAELLQDLLEQKEALATQMIKKAEGSPCFLLYQTFPGIGALTAALLLGELGDITRFKTHKQLNAFVGIDIRRYQSGKYTGQDRINKHGNPKARKIIFFTIRNMIRQQRAAPNHIVDYYYKLKKQPIPKKEKVATVACMNKLLKCMHAMVRAHTEYDYAYAVSVDH

SEQ ID NO: 203763 - protein, 343 aa, unidentified
MQEITTIGLDIAKSVFQVHGIDASGEGVVRRQLRRRQVLSFFRKLPVCIIGIEACATSHHWARELEKLGHEVRLMPARYVKPYVKRNKNDAADAEAICEAVTRPTMRFVPIKTPEQQSVLMLHRTRQLFVRQRTALINAIRAHLAEFGIVAGVGRNGVDKLLELITEGEDERIPSAAHECLIALAAQLAMVKRQILEADRRVLAWHRASKTSKRLEAIPGVGPLIASALVASVPDPSVFRSGRDLSAWIGLVPKQNSTGGKERLGSISKAGNRYLRSLLVVGALSVIRRAKQLGYTRHPWLVRLMERRSVKIAAVALANKIARIAWAMMARNESYRTPLPASV

SEQ ID NO: 203764 - protein, 356 aa, unidentified
MFIVGIDVAKRSHEATIITSDGEIVQSAFSFRNNCSGYNALLERVRKLTNQRNQIVFAVESTAHYWLALYARLTKDGYRVLVLNPIQPHALRDLYIRPLKTDARDSLIIADVVRFGRCKPSSIPQDKLLALRELCRSRSYLMGMASDLKRKLIALLDQVFPEYETLFDSLFCRSSVAVLHRYPTPEKLKYAHIEKLSELLRQHSGGHFGEWKARQLKDAAVSSFGIDDCCGVYSTLIATFLRQIEELTRDVTRFASAGKLLGYAGMDPSVRQSGEFTGTRNRMSKRGSPYLRRAIWMATNTAVHFGPMFRAYYEKKLSEGLHHMNAVGHATRKMTAVIFAVLRDGKPYQPMLPCAN

SEQ ID NO: 203765 - protein, 397 aa, unidentified
MSAVVGIDVGAYKHAAAVCRPGEREAERGVFRLSADRTGFDELDRWLKRQGPVERVVLESSGHYYWPLASHLYRRGYRVAVVNPLQAKYFAKSRLQRSKSDPADARTLAALGMSEEPRVKDPLLGAEAKEAARFWGGLVKEQAQIRNKLLRLVEIGFPELKECFEDPLCETALAVLREAPTARAASHKRVSTLAETSRPGGRRRLGAGKASRLHELAKQTIAPPELDAQMSFEVGMLIQQFDLLDKQIEIAEQRVAEVLDSELARRLQTIPGVGPALAATFIGEIGDIWRFEDFDQLASYAGVHPKELSSGTKGQNPETSWHMAKTGNAYLRSAAYKMAVVGTQHNTVIRAHYLRKRAQGKSAMNAIGHCMSKALAIVWGVWRSGLDFDPTLGGPRC

SEQ ID NO: 203766 - protein, 341 aa, unidentified
MGGSRIYVGVDVHKNFSFVCAMKENGEVILEKKVRTEELEKFLEDIENKTIILEPTTTGINLARKLRKNNEVLLSHPYKTKLIAESKKKTDKVDARVLADLARTNFLPTAYLPPDETMKLREIIRERIRLKKLSTSIKNRIHSILAKNGIKYEGNLFNTEGREFLNSLNNECIRYLRILSSIENEIKEIDREIRQKCRENEETMLLTTIPGIGFFSALLIYAEIGDIKRFPNSKKLCSYAGLVPSIRQSGNKVITGKITKEGNKLLRWVLVQCAFVAIRNDEKFRNFYERVKQRKGPQKAIVATARKLLTVVYAVLRDKKPYISHTQPYYGEECTPVTNWA

SEQ ID NO: 203767 - protein, 375 aa, unidentified
MKEKVRFLGLDVHAETIAVAVAEPNGEVRSLETISNRPESIRKLVKKLGGLEHLRACYEAGPTGYVLYWQLSELGVQCEVVAPTLVPVKVGDRVKTDRRDAKKLARSHRSGDLTAVWVPDAGSEALRDLVRAREAAKQDQLRARHRLSKFLLRTGQRPGAGIKAWTQRYLVWVRQLRYAQPAQTATLLDYLHEVDHMGARVGRLEQAITEAVKLASPQMQAVVRDLQALRGIAEISAVTIASEWGRISRFESARQLMGYSGTVPGEDSSGKRMRRGPITKTGNAHLRRIVVEAAWSYRLRPAVGPGLRQRQQEVPQPIKEIAWKAQIRLYKRYARLTAAGKDKRKIVTAVGRELLGFIWAIGIKSEAPGQSQIAA

SEQ ID NO: 203768 - protein, 370 aa, unidentified
MKTSVQYVGLDVHKESMEVGLAESGVHGEVRHYGKIGGDLGALDQVIRKLESKGAELRFAYEAGPCGYQIYRHLTAKGYPCLVAAPALIPRRPGDRVKTDRRDALSLARLFRAGELSPVKVPDADDEAMRDLTRAREDAKAAERRAKQHTAAFLLRHGQRFPGKTTWGRGYWRWLRQISMPYPAQQIVLQEYLDAVQEATARVQRLLAQIAELLPQWRWCPVVQGLMALRGVSLIVATTVVAEVGDLSRFNKPQELMAYLGLAPSEHSSGGKVRRGAITKTGNGHARRVLVEAAWAYRLQARVSRHLWRRLAGLPKPICDLAWKAQIRLCGRYRRLLARGKHRNAVVTAIARELAGFMWAIGQLVPPPAA

SEQ ID NO: 203769 - protein, 342 aa, unidentified
MERVYVGLDLGSSSFQQVGLNEGGAIREQREFRTSEANLIKAFVDLEGELHVHLEAGELAPWAVSIVTPLVHRVVCSHPQTNAWIAKDADKCDRLDAFKLADLLRLNRFKEVHYPPQQSRREFKTLVQHYDELTQQQARLKTKIKARLRMQGVIVRGEQPFSATGRKAVLAAVKSVAVRTAISQLYAVLDQSLESQTEARLLMRRAAQAFPEIRIFETAPGVGPIGACRFSAYIHTPQRFSSTRKLWKYCRLSVSHRSSNGKPLRRPRLDRNGCGRLKDVSRKAFDAAMRSKTDNAFKRAYQRAFATTHDATHARLTVQRKIVSTLRAMWINQTPYREELMR

SEQ ID NO: 203770 - protein, 370 aa, unidentified
MQKSIMYVGMDQHKESIEIATADEGRDGEVRRYGRIDGELDSLDRVVRKLVASGKELRFVYEAGPCGYHLYRHLRSRGLECKVVAPSLIPKKSSDRVKTDRRDAVNLARLERAGELTAVYVPQVEDEAMRDLSRAREDAKRAETRARQQLLALLLRHGLKYSGKTAWSQPHLRWLARIKLPQPAQQIAFQEYVEAISEAAARVERLTTQIRMLLPEWRMAPVVEALQALRGVSLVTSVITVAEIGDLTRFTNPRQLMAYLGLVPSEHSSGSRRRLGAITKAGNSHLRRVLVESAWAYRLPARVTPIIRRRQEQLPKPVCDIAWRAQLRLCARYRRLTLKGKTKQVVVTAIARELAAFMWAIAVEVKVTNS

SEQ ID NO: 203771 - protein, 379 aa, unidentified
MAAERRFGTSLKRLNCAKTGHSPTAWRTRQIDPERTKCTQQGTALDLNTGLLCAERLDSRNEWPGRTCVLNRLPSLRMPLDAARFGVPLGELAKAPTCRRIVFETGRMAPILFHGLSHLGLPVVCVESRQAYHALKSLATHKTDRNDARGLAHLARTGFFKPVHVKSLQARALRSLIIARKKLVGQRVTLENQIRGLAVVFGVRLPRALTVAFIDNALKASEGIAGLSVAMRGLIAARTAVMTAVAAIDADMRRMTRASAACRRLMTIPGAGQLTALAFVAAIDDPSRIRRSRDIGAYLGLVPRRYQSGEVDYVGGISKCGDRRVRTLLYEPITYRYKGQLKLKDWAFAIAKQSAASQAFGRPMWTLIPGGPDWALTHF

SEQ ID NO: 203772 - protein, 310 aa, unidentified
MDACVVGIDVSKDRLDVHVAPSGEAFTVGNDHAGVEGLAARLGPLGPKAVALEATGGFETLAVAALTGAGLPVMVVNTAQVRAFAGALGRRAKTDPIDAGVIAAFVSATGAELRPLPDAETRMLGELVARRRQVVTMIVAEENRGRMLNAREARQSIKRLLAALRRELESLDADLDDRIRKSPVWQVRQKLLTSAPGVGPTVARTLIAELPELGRLDRRQIASLAGLAPWTRQSGKWRGRSFIGGGRSRVRAALFMAALVASRHNPVLKAFRDRLVAAGKPKIVAIVATMRKLLTILNAMIRDQKPWQTA

SEQ ID NO: 203773 - protein, 346 aa, unidentified
MNNDNSKGKVTVLGIDLAKSSFQLHGVDENGKTVLKKKLSRSKLTAFIATLPPCLIGLEACGGAHHWVRVFSEFGHTVKMIAPQFVKPYVKSNKNDAVDAEAICEAVQRPNMRFVPSKSIEQQDIQCVHRIRSLLVGRRTAQANQIRGLLMEYGIIIPQGINQLRKAIPCILEDADNKLSAYFRELLRELYEEIVHFDKRIDAVELKLKGISEQNEDCKRLLTIPGIGLLTATALIAAIGDISVFKNGRELAAWLGLVPRQHSTGGKQTLLGISKRGDTYLRTLLIHGGRSVVRVAHKHQDKRNQWIGEIKQRRGENISNVAVANKNARIVWALLTKKQDYCAIGA

SEQ ID NO: 203774 - protein, 344 aa, unidentified
MPSYAALDVAQETTAICVVDDEGRIWAEKKVPTCPDAITDFLAHGAPGLVRVGMETGPLAVWLWNELAEREVPIICLDARHANAALKMRPVKTDRNDAAGLAQIVRTGWFKQVRIKSRSNYQIRSLLTAREMLVRTRVRIENELRGLLRTFGVLFGKRVGSFTQRAGEIVAGELAGAPEMRLVAETLMKARASILDQIKVLDRRLSSVARASPVVRLFMTAPGVGAITALSVASVFDDASRFRRSSSAGAHLGLTPRRYESGETSRNGRISKQGNQLTRKHLYEAATTLLTRNLRFSTLKAWGMKLAKASGFKKARAAVARRLAVVLHAMWKTNTPFHWSQIDG

SEQ ID NO: 203775 - protein, 347 aa, unidentified
MRFYNRQHRHYCGIDLHVKTMYICILDSAGQVLVHRNVKSTPEAFLETIVPYRDDLVVAAECMFTWYWLADLCAAEGIAFVLGHALAMKAIHGGKAKNDKIDSHKIASLLRGGLLPQAYVYPAGMRSTRDLIRRRLHLVRKRGQLLAHIQNTRAQYNLPAFERRLAYPANRDGVSAQFADPSVRKSIDVDLALIDQYDTLIVDLELTIVREAKRHDADAFHRLRSVPGIGKVLALTILYEIHDITRFDRVQEFASYARLVKCVHQSAGKKLGTGGAKMGNVHLKWAFSEAAVLFLRHTKDGKKLLAGIEKKHGKGKALSILAHKIGRAVFYMLSRGTVFSMEKFRAA

SEQ ID NO: 203776 - protein, 393 aa, unidentified
MIKACIAKGPLNKPPKIEIRTYSTMTSDLEKLCEWLKENKVEAVAMESTGVYWKPIFNILEADFPVSIANPKYLKKVPGKKTDVSDSEWIANLLRCGLIPKSFIPQKPIRELRDLNRTRRKMVENMASEKNRLQKVLEDANIKLTSVVSKVDGVSSMNMIQALLKQDEISREDIAAMVRGKLKNKIDQLVQALNGRLTDHHRYLLRLHLKQIAFLAEQIKELDDVIQKKMKPFTKESDLIQTIPGIGKTTAPAIIAEIGTDMSQFPDEAHLSSWAGICPGNNESAGVKKSGKIRKGDKFLKATLCEAAWSASKKKGSAYSAFYNNIAKRRGKKRALVALAHRILMDIFRTLKTGEPYVDEGAEAVYQRNSSGRQKSAIRFLEKSGYVVTKASA

SEQ ID NO: 203777 - protein, 428 aa, unidentified
MQAVVASERTQAVWEAVIERCCGLDVHQKTVTACLLAGALNQQPSELLHTFSTTTKGLLELRDWLEENGCSHVAIESTGIYWRPVFHILEDTVTVLLVNAYHMKQVPGRKTDLKDAQWIARLLRWGLLKPSLIPPRHIRELRDLCRYRKKLTEQASAEKNRIQKVLEDANIKLASVASNVFGVSGRAMLEALTQGKMSPEETADLARGKLRPKIPQLVEALEGHVNEHHRFLIQKQMEHMAYLEKSIAQLHQRIDEKIKPYQHEVDLICTTPGIDTISAQHIFAEIGGDISLFPSEGHLASWIGICPGNNESAGKRKSGQTTRGNRWLKALLVQTAHAASRTKGTYLKAFYHRVAARRGKKRAAIAVAHKQTTIIFHELSEDKPYQELGENFFDRRNQKALEQRLVRRLRSLGYQVDLHPEPVTVHSS

SEQ ID NO: 203778 - protein, 337 aa, unidentified
MSIVPVFVGLDYHDSGIEVNVMATGGEVLATRHCPNDWQAVAAVVPAGCRVVGAAIEACCGAADFAEELIQRAGWSVDLAHPGFVARMKQNPDQHDFGDARMLADLERVGYLPRVWLAPHELRQLRRLVRYRQQLAGERRNLKLRIQASLREDRVPRPEARPWTQAWFHWLTKEADLGEQSRWVIERQLRRLEQTNQELALTERRLARTTAKDQVVRKLMEQKGVGLITAVTLRAKIGRFDRFRTGKQLARFCGVTPRNASSGKRQADAGLIKAGNPQLRVVLIETAHRLMRFDARWVVLGASLRHRTRSGSIAAAAVANRWVRWLFHPMQTIGEAA

SEQ ID NO: 203779 - protein, 340 aa, unidentified
MRRLYAGCDLHGNSNFWGIIDEQGERIFRRKLPNDLGLILPTLEPFMEELVGIAVESTYNWYWVADGLMGEGYEVHLANPSAIKQYSGLKHVDDKHDAFWLAEMLRLGILPEGYIYPKDERPIRDLLRKRSHLVRLRTSLVVSLQNILSRNLGRRVNVHDVKTVKEDRISPLLEMNEDLALAGRVSKEAIDHLTRQIYKIEWAVQKKITLREGYRYLLTLPGVGKILALTIMLETGPISRFETVGDYVSYCRKVPSRWMSNGKWKGSGNRKNGNKYLSWAYAEASEFARRFYPEPRAYYHRKMHKTNAAVAHSALSNKLARAGYYVIRDQVPFRPEKLFG

SEQ ID NO: 203780 - protein, 337 aa, unidentified
MDRQYVGIDFHRRRSVIVRVSATGEKLSTTRVANDPLAIAAAVAEAGPNPEVVVEATYGWYWVVDLLQANGARVHLANPQGLNWGQRRVKNDERDAIDLADMLRLGRLPEAWIAPPATRELRELVRYRAKLVALRSGLKAQVHAVMAKEGVLPTVADMFGGKGNAQLDAIAMTENYRTRVESLRDLIELYDRQVTMLEGQIHQQLRLHRGYRAIQAIDGVGRTIAAVLVAEIGDVDRFRSAEALCSWAGLTPKHRESDTTVRRGRITKQGSRLVRWALIEAVSRYHGGPTLAPGFRRLAERRGTNKARVAVARKVLTLVYYGLRDGEIRCLAQAQAA

SEQ ID NO: 203781 - protein, 347 aa, unidentified
MNFIKRKEPYMQNTKNNLYRHYIALDWSQKIAAMAVMKDNGGKVEVQMVQPDPGIIRKKLKKYTGSKIMTIEETTTSHWLYVELKESVDKLVICNPYTNRLMLDGPQTDKIDARNLCLLLRNGMLKEVYHSMDKDYEIRKLVSGYTDTVKALVRIKNQRSAVYRALGKNHKKMDEVLPKGTESEFVGQKQNELIEHHSEIIREYEQSFNKIYRGNKTLQRLKKISGIGIKTAVMIYSAVIDASRFENKYKYWSYSGLVRQYKESGGRVYRSKPVRYSRQLKTCYKTAATGAISGKNDIREYYEYLLQQGISPEKARHQIARYISKVSYVVMKNKTDYRAYQWRESKN

SEQ ID NO: 203782 - protein, 342 aa, unidentified
MNLPVRIGMDTSKSVFQLHGVDENEVVVVRRQFRRAEMIRYFERLPPVLVAIESCGSSHHWARLLQSFGHQVKLIPPQYVKAYVKRGKNDAADAEALCEAVIRPNMRFVPVKSKDRQAACMLMTVRERLVSVKSQLSNAFRSYAAEFGIVGPAGRQNVAQLIKRVLEDNSLPEMAKDLFRLQAEEYAAVEARLAKIEAKLMRWHRDDDVSRRIATIPGVGPIGSSMLSMKAPPPETFRSGRDFAAWLGLTPKDHSTGGRQRYGGITKAGDSMLRSTLIVGATALLRHIRKGRHKPTPWLASLLERKPPKLVAVALANKFARIAWRLMISGGVYNRPVAAMPA

SEQ ID NO: 203783 - protein, 392 aa, unidentified
MYIVGIDIGKNHHEASIVSPEGKQIGRSLRFATTHKGADSLMSFIFKNIGNSPCVFGMEATGHYWYPIYSFLKAKGYTIYVINPIQSDSLRKMYIRQTKNDSIDSFLIAEVIRFGQFGTTSMADENILAMRQLCRYRDSVISSRTEIKLRIGTIMEQIFPEYEKQFSSLWVSTSIGILEKYLTPENIENAPIDELFEIIKDKSHNRLTKAKAISIKEAAADTFGIKIAQDAFSFQLKQLIDRMNFLDKQIEALDIEIMKYYEQFDCYLHTIPGIGIIGAATILAEIGDISRFKNSSALVAFAGIDPTVRQSGEFNSTHNHMSKRGSPYLRHAIFLAATTCSFHNSPLNAYYKKKRDQGKHHLTATGAVARKLTTIIYAVLRDSKPYEPKKFC

SEQ ID NO: 203784 - protein, 250 aa, unidentified
MEQIYTGIDMAKDSFVVATRLEGKEITTLYNNDKKGIAGFLKSLPSNSWCIMEATGVYNLQLAIALFEKGIKVSVVNPLQIKRFAQTKLKRTKTDKVDAALIAEYGERMQPKLYEPPAPFMRQLQQQRMSLKLLFKTKRSFLNQLHALTQLEAADKVALKACKTVLKSIEKQIKELQNQMQQQAEEHCRDLFTLLQTIPGISKKSALELIIVSGGFKNFTSAKQFSSFIGICPCINESGTSIRGYRGLAE

SEQ ID NO: 203785 - protein, 355 aa, unidentified
MYYYVGADLHKEQTWFYVMDHNGTKIDSKSIANSPDSLKSYFASIPTPFTLAVEATYNWYFFMDIAEQFAQTAYLANSYELKAFAKRHKKTDKIDARLIADILRKGFLPMVFIPSREIRNLKELLHYRINLVRDRCRNIFRLKNTLDKLGADSSGDFTTEKRLRTIPTDSLSERYRYIISGYIDRIVTLSQRLHSMKTYLKKELLEDKEIQNLITIDGLDYFSAALIKSEIADINRFASFNRLCAYAGLAPRVSQSGNKEAHHGALMVNRRKNLQWILLETVFHFIKATSKRHARYEELKIRKGANTAKVIMARQYLKIIYHVLKEQRPYYREESERPEMVYQIQPVAAAALYGV

SEQ ID NO: 203786 - protein, 423 aa, unidentified
MKLTYPICCGVDVHKTFLVATIITSEYTMPHYHQKRFSTFYSGLVAFKKWLLENNCKDVCMESTGKYWVPVWNVLEDSIHVVIANPKWVSAVKGNKDDKKDSKWIGDLFRMGLVPGSYIPSKDIRILREFTRYRSKLVSMRSSEKNRFQNAFTVCNLTLDAVVSDMFGKSATDIENYLLKTDIVDPAQCVSLLRGSLKKKSSDVVEAVSGFNMTPEQKERVRIVQGHFDDIDHRITQLDEVIGNLVAGYEGQITLLCTVPGIGRRTAITILSEIGTDMTGFGSSKRLCSWAGLTPANNQSAGKKKTVRISRAGVYLKPALVEAAHAAVKATEKQPYYRIKFERLMKRRGKKRAIIAIARMILTAIYAMLSTGEVFNPCDLEKFDMPEELKKKRMLASAKEAVKLLVSLGVVSDGSISLDALAS

SEQ ID NO: 203787 - protein, 393 aa, unidentified
MSIIDRPNTLAATAVDNGIVAVSLELSRSKWLVTSLLPGSEKMSKHMVGAGDVAALLALLGRRRRQAEERVGGPVRVVAIEEAGLDGFWLHRLLEANGIESHVVDAASVAVPRRRRRGKSDGIDGETLLRTLLAWRRGEPRVCSMVRPPSPQEEDRRRVVRERAVLIRERIAITNRIRGLLMSQGITDYQPLRRDRRQRLETLVTGDGRALPAQMKRELIRALDRLDLLLEQLKAVEAERDAMQEVAAKATASEAAAIDDQARLLLRLRAIGPQTAAVLVLEAFYRRFDNRRQVAAFAGLAPSPWQSGAVVHDQGISKAGQPQLRKAMVELAWLWRRHQPGSALSRWYAQRARGQDARRRRALIVALARKLLVALWRYVSAGVVPEGAAFKAA

SEQ ID NO: 203788 - protein, 365 aa, unidentified
MTTIAQPGVERSVLGGVDTHKEVHVAAVIDDLGRVLATAEFPATRNGYRRLLAWLKNFGELVAVGVEGCGSWGAGLARYLAARGARVVEVNRPNRQHRRRRGKSDTVDAEAAARAVLAGEASVTPKTGTGPVEALRQLRVARAGAMKARTAAANQLHSLIDTAPDRVRAQLRDLTFKNKIAVASAWRPTVTVTPEGASRYALASVARRWRALALEIAELDRRIKTILDDVAAPLIAVHGVGYDTAGQLLVTAGDNPERLRHERSYAALCGSSPVQVSSGKTDRHRLNRGGDRHANSALWRIVIVRMTSHQPTKDYIARRTAEGRSKQEIIRCLKRYIVRELFPHINNVITPIDIQPAPTAREIAA

SEQ ID NO: 203789 - protein, 430 aa, unidentified
MEVLHPRCAALDVHKDTVVAGVRIADGGPAKTEVRTFDTTTPGLLALSAWLAEQGVTHVAMEATGIYWRPVWHVLSDGEVTLILANAAHVKNVPGRKTDVADAVWLADLLAHGLIRPSFVPEAATQEMRALLRTRKQLVREQASHVQRLQKTLEDANIKLTSVLTNIMGKSGRAIIEALVDKQADPEALLALVQKGVKAPAEKIKAALTGRVTDRHRFLLRLHLQQIDALDAAIAAIDAEVDRGLDPFRQAVELLRSIPGVSDLTAQVIVSEIGTDMSRFPTAGHLVSWAGLCPRNDESAGKRRSSRLRHGAPGTASPCLPPADRFAMAQDDAGAVRLGRHTQEGQLPASPVPAAATPARTQEGHLRRRSLPPHRRLPHVARRHPLYDLGPDHLRRTSPETHAKRLAQQITKLGFTCTIEPASTGTEVSI

SEQ ID NO: 203790 - protein, 387 aa, unidentified
MIKKRGRVVGLDVHPDSFAGAVVEGSDPASAQVLSTSTRVELERLEQWALRHTRTDDTLVLEASGNAFAVAERLRAIGRKAEILDSHRAGKVGKVYCANDRVDAVKIARIYLSALSPIVWQPDQKTLERREVFSAYQAVVKESTRAKQQLRSMLNEHCVRLEKGFRLCHPNAITRLLRLREWTPARTMLLQQLHGSLVSARARRTLLRRHMAQEIVTDEALLRLTRLCGINLITLYGVIAAVGDVRRFSHSKKLVAYLGLNPSVSQSGNFEGGGALKRHGRGALRALLIQSGKKLLEVTNPLQKWGLAVAARRGRNKAAVAVARKLCVAVWHVLMGHIVGALERLDTLETKLSKFATEMGPAALSALGYHNKADFVEKKLYVLRSYP

SEQ ID NO: 203791 - protein, 537 aa, unidentified
MATRQSRSRGGRRFVVNVHKPHGIIQPRVQKVGPEHFGILSVDCAKARFKWMLCDFYGKVLVPPTTVEHNRPELDLALAQLQAARKEHDLRDLIVAIERTGRYHHIPQRLFAAHGDEVRLVHPFTSKQHRTTTDPGIKTDDIDLAAIHRAAISGCALVQAPIDPLYRELQLLIRQRRDWVRKTSMLCCQIREYLHSAYPGYVACFATPWHSDVMITLVRRFESAAAMVQAGMSGLADALHEQKIRFQQSSLHAVLAWARQAPPPDPAAPLQRRIALALEEDRQRKTLEIQALEREIAGYLSKTPYILLLSFPGLNVVSAADFAGEMGPIENYLTAKAITGRAGLFPSRYQSDKVDRPNGSLVRCANHLLRATIMNIADNLIGCNQYFRTLSAHWKAMGKDPRANHVRVAQRFCRIAFHIVAGRQVFHHPGMQQRHYIVDKLNAFHREHHTPMTQVMADLLATVGQVPSTAHAEEARPLLEEHERINAGRRRGPQLLGDILPIVLARLGVLGVQLNPSGEVASAPPEPVCEPRTPSNR

SEQ ID NO: 203792 - protein, 298 aa, unidentified
MEYYAGIDVSLEFSSVCVIDAKGKIVKETKVESHPHTIALLFQGFEFSVERIGIEAGPLSQWLFGGLTRAGLNVILVETRHVKAALSATMVKTDRKDARGIAQLIRMGWFRPVHCKSPSSQELRALLVARKQLLAKLLDVKLSIRGILRGFGLKLGLVTRKSFEARVRELCAAHAILEAIATAMLAARASLQKEFAKLDKTMVTIARCDEVCHRLMTAPGGGPLVAIAFKSGVDDPARIKKSKAVGALFGLTPKKYQSGETDVNGAITRAGDETVRTALYEAANVMLSRVTRFSALKR

SEQ ID NO: 203793 - protein, 303 aa, unidentified
MVDIGMDVSKAWLDVAVHGQVQVRRFANTANGIGKLVAWVSTLAQARVVLEATGGYERAVLQALFDAGVWVCRINPRQARDFAKATGRLAKTDAIDALALAHMMAALHERMRPWVPLEPWRVELAQWVQRRSQVVGLIQQQRQHLDTTGDKTLQRLMSKTLRALLGEMKILDQTIERQSQPHVTPALRSMKGTGPVFQATTLALLPELGHLDRQQIAKLVGVAPLNCDSGKHQGRRRTWGGRAGVRRALYMAALSAIRWEPIIKSFFQRLRAQGKPGKLALVACMRKMLTILNARVRDELATI

SEQ ID NO: 203794 - protein, 329 aa, unidentified
MNYLGIDVAKAKLDCCLLLEGKRHKSKVVPNTEEGFKSLIAWCGKQGFLPAQLHGVMESTGCYHEPAACALVRAGMRVSVLNPARVREFAKSQGILSKNDGLDAFAIARFGAACEPELWQPPSPEVSHLQALLSRRDAIEQDLQRETNRREKMAFTPAPAAVLASLMEHIAYLERARDKLTEEIDRHIDQHPDLKKDRALLQSIPGVGPKVSALMLVSLRQGQFACAEQSAAYLGLVPVERQSGSSVKGRARLSKNGHAKVRATLYMAAVVARTYNPHIRDMAQRMAQRGKCNMSILGAAMRKLVHLCFGVLKNQTPYQPLYSSKGLTG

SEQ ID NO: 203795 - protein, 339 aa, unidentified
MELYSGLDLHSTNTYIGILDTDFKRVFKKRISNNLDLILETLEPFKDQLKGLVVESTYNWYWLVDGLMDADYGSIHLANPSAIRQYEGLKHSDDKHDAFFLAQLLILGILPQGYIYPKKDRPVRDLARKRMFLVKHKTAHILSLQSLIARCSGQRISSNQLRTFTSEDLQQLLKEDHLVLSAQANLDSISFLKKQIHGLEKVIKNKLKLSQAFNGLLTVPGIGNILAMTIMLEVGDIGRFAKVGNFTSYCRCAPTQRLSDGKSKGSGNRKNGNRYLSWAFSEAAQMSRRYNQRFRRYHDRKAAQTNTIVAARALSNKLARVCYYIMRDQVVFNEELILH

SEQ ID NO: 203796 - protein, 292 aa, unidentified
MYAAIDIHKHAFQAAVLDPESGELVEERFAADRESLARWAEQWRGRVQAVAIEATTGWRWVWRELVEHGFEVRLAEPLQARALLGRRRSAKTDRLDARWLARLLAKEMLPQSWIPPEQIQQLRDRTRLRKALAEDRRRWGQRLHAYLLHEGWPCSRSNLLRPPGLRWAAALRLSADARLQVDSLLAVIAALEAQVDTLDAELRRFARADERCQALQSIYGIGPILACHLLAEIGEARRFRRAEQITRLAGLDPVVDESGESRRRGHPRQGGLPASALGPRRGCRARAPDRRS

SEQ ID NO: 203797 - protein, 345 aa, unidentified
MTTMNYIGLDVHKKTISYCVKDASGRIQQEGKIGSTRRELDCWMRTLPQPWTVAMEATIFSGWIYDHLLPHAAQIKVAHPLMLRAIAAAKKKNDQIDASKLADCLRCDFLPECHMMPRAIRDRRRTLRYRHLLVRQMVQMKNRVSGLLMETGVEYNKQRLHKVSYFRELLSANGEVPPSIRPLLKLSRETIERCQKTEYALVSSLRRDPALADRIKRLRTVPGVGPITALTWALESGDVSRFRSIKQAISYCGLCGDERSSADKAMRMPLSKQRNKHIQRALVEAAKLAPRQSHEMAVIYDQERQKGNSNRATLAVARKMVAYLLAVDRQQRDFVPAEERRTTAA

SEQ ID NO: 203798 - protein, 323 aa, unidentified
MGVPTVSIDSTTIIVGLDVSKEYVDFFVLNSKGDPSGRRPRRAEDLTMLAAELAALKPRLVVMEATGGLETVVWEVLEAAGLSVAVVNPKRVRDFARSLGLLAKTDRLDARVLARFGELLGPAPTRLPNRAAREGRELVRHLNALVGMRAQQRTRKWQLEGEGALASAERVIASLSEEIALLEQQVAQALIEGPGQCQRAAQLRTAPGVGPKTSWALLAELPELGQLSGRQVAALAGLAPMARDSGRFRGRRRIAGGRARVRTALYMAARAAVRCDPHLAAFRARLLAAGKPKQVALIAVARKLLVALNAMIRDQRPWIPLPA

SEQ ID NO: 203799 - protein, 360 aa, unidentified
MNHCTPRPSGMTNGMTIGLDVSDRYSYLYVLDQGGECTEEGRIATTVEALGNRFRSMPRARVALETGTHSPWISRLLAECGHEVLVANARELRFIFGKNKKTDPTDAEDLARTARLDPKLLHPVEHRSRQAQSSLAVLRARTNLVAARTQLVQHVRGAVKSFGTRIRSCTSEAFHNVALGALPAELHPALLPLLEAIEVLTKKIREHDKIIEADLCAVKHPVTTVLRQVEGVGAITALAFVLTLGDPRRFRNSRRVGAYLGLTPRKADSGDSEPQLRISKAGDGFVRRLLVGSAQYILGPFGSDSDLRRFGLAISKRGGRNAKKRAVIAVARKLAVLLHRLWITGEVYEPIRNKRSKKPS

SEQ ID NO: 203800 - protein, 400 aa, unidentified
MRTVFGIDVSKASSEVAILVNGEKIHGYTMLNDAIGFNRLLNDLKTVHNPEIIFEATGVYSRRLRAFLEEYGYAYTQLNPLEAKKQLDSLRVRKTDKIDAEKLAHSQFILNRKPTYAQEEVYQHLRDLSRFYQNLTEDIVRAKNRLHKVLQVTFPELENLLSTPTGEQYGNLVMAFPCKEFVVNLSQNELCKIIRQSTSKRISEKRIAYLTDKLIKLAKQSFCAVKKISPMLEEVRYYAQELLRLSEHRQVVLDDMVALAQPLPEYDILRSIPGIAETTATSIIGELGDIRRFQSTNQINAFIGIDLRHYESGNFLAKEHITKRGNPYARKILFKCIHNIASASHTNPCHIADFYEKRKRQSTIASTKPHAIASIHRLIRTMYYLITHNKLYDYSLTQNR

SEQ ID NO: 203801 - protein, 337 aa, unidentified
MSEISILAIDLAKNSFQVCGVRADGVVVFNRSVSRPRLYQLLSEQDVCVVAMEACATSHHWGRVAQSYGHEARLIPANYVKPFVKRQKNDHADAEAIAEAASRPSMRFVAVKSAEKQARAVAFRTHQCFVRQRTQLINSLRGHLAEFGIVAAKGPASLKLLTSVLAKPDVDLPGPVREMGALYLEQIGRLTEIIEQLADDLESATKTDEDLRRLCTVPGIGPVTAGAIAAFAPDLETFESGRNFAAWLGLVPRQRSTGGKTRLGAVSKMGRCDIRRLLIVGAMSVIRWVVRKGGSANRWLASLVARKPRMVAAVALANKMARMIWAMTTKGENYRMA

SEQ ID NO: 203802 - protein, 411 aa, unidentified
MLKIVFKICCGIDVHKDFVVACIAKTDDKNVTTYQTKRFSTFTNGLRELSEWLCSNSCKDVCMESTGKYWYPVFNILEDSCKVIVAHPKYVKAIRGKKTDKKDAKWIADLFKHDLVVSSFIPAKTIRQLRDLCRYYCKLTYLTSSETQRTQNCLTVSNIQLANVVSDINGKSAQKILAKILENPDDTSFDIEPLLHKSMLPKLDDIALAIDGVITTEQASKLKIIKKHFDNLNTCKSDLENLIYELAKPYEHEIALLQTIPGINSKLTAIRIIAEVSNDVSSFPTSKHLCSWAGLTPTNNESAGKKKSVRISKAGCYIKPLLVQCGLAALKSKDNPEIGNRYKNLKMRRGHKKAIIAIARFLMTVIYHILQDKVCYDEKLYSHYNQLPTSKEITTEQAISLAKRQGYKVVC

SEQ ID NO: 203803 - protein, 412 aa, unidentified
MEGETVIAGVDTHKDVHVLCLLDGLGRKIWSGSFRADPEGYDRLAEAIGDPGSCAVVGVEGTASYGAGLTRRLAELGYNVVEVLRPKRDKARPGEGKSDPLDAERAARKAASGRGCSVPKSQDGWVEAVRQLYVARRLAVATSTSCVACAKSMLTTAPGALRERFRGCERPKDLMPLLARRRKAGDALEESVLASLRSVATVWKEARSQVESCDARIRALLEANAPALLGVEGCGTTTAAALVVAAGDNPGRLKGEAAFSMLCGVSPIPASSGKTERHRLNRGGNRQANWALYEIAIKRMAYDERTKRYVAKRTSEGKSRREAIRCLKRYIAREVYRVLMDPNPDGAAPEGPELAKMRKAMRVTQKQAAAGLGMSAASLGHLEHGRRRSTKLERRYYELLCELKGALPQTAY

SEQ ID NO: 203804 - protein, 489 aa, unidentified
MKGQPAKRAQKDEKRGKQSSSKSTARKWDEMNRAQRREMMRKMQSEDLNLEVVHPQAAGIDIGNESHYVAVPPNLDPQPVRCFGCTTAELKKMAEWLTQCGIRTVALQSTGVYWIAVYDILEAAGLEVYLVNARETKNLPGRKTDVQESQWLMKLHTYGLLRNSFRPSQQIRTLRTYWRQRHDLVRSIGRHIQRMQKALTQMNVQLANVISDITGVTGQAILKAILDGERDPRELAAYRDCRIESSEEEIAQALEGNWQQDQLFLLRQEQAGYEFCQKQIAECDQQLAHYLAGLEDRTQGATLPEETRKWRRNKKKGNPQFNLRKELFRMTGTDLTQIDGIDVTAAMTVISEVGWDMSKWKTENHFVSWLKLSPDNKISGGKIIGKGRLPTNNRATTVLRMAATTLRESDSYLGAQFRRLRTRLGPPVATKAMAAKLARLLYRMLRYGMKYADQGAELYDAQYRKQQVIHLKRKAAQLGLQIIELAPAA

SEQ ID NO: 203805 - protein, 318 aa, unidentified
MSDSVFVGIDVSSQTLEVASSSQAKTWQVSNDAAGLDSLVSRLLDLKPALTVLEATGGYEFEAACALQAAGLAVAVVNPRTARDFARAMGALAKTDALDARMLAAFARVLHQHPERERFVKPLADAELQRLQALVLRRRQLVQMITAERQRMRISHAAARPSIERVIEFLKAELADSDAEVAAHIQRHHADLAAALASVPGLGAASVAVLLAELPELGKLDRRRVAALVGVAPLNRDSGQMRGQRSIWGGRADVRRTLYMATLTAVRHNAVLKAHYEHLLAAGKRKKVALVACMRKLLTMLNAMAKHGSTWDPTLHIA

SEQ ID NO: 203806 - protein, 387 aa, unidentified
MSRNARVPVPATTLDQDSTLVVVLELSARSWLVGARVPGIGRMSRYALAPSAEVLAAWLGTAKARAGAAGRTVVRVVLAYEAGRDGFWLARYLEARGVEVYVIQPSSVLVDRRARRAKTDALDVEMLMRTLLAWLRGEPGVCSMVPIPDVAEEDGRRPVRERQGLIGERLALLNEIDGLLATFGITGYRPLRRDRRAQLAALRTPEGDPLATNAAARIGRILDRLELVMQQIAELEQARDAVLAKEAASGEAETMIRGLARLKGIGAELATVLVWEAYVRSFPNRKALGAYAGLTGTPFASGSTTREQGISKAGNRRLRSSLVELAWLWLRYQPDSKLAAWFRGRTGSAGSRMRKVMIVALARKLLVALWRFCRDGVLPEGAALKAT

SEQ ID NO: 203807 - protein, 430 aa, unidentified
MKYNTQNAKIASITEETLVLGIDVGSATHYVRAFDWRNYEFSDKPLAFRNDEAGFLTFMAWVEDIKEKAGKTAVIPGMEPTGHYWFNLGKFLQDSGMRPVHVNPHHVKKSKEMDDNNPDKNDRKDPKTIAALVNEGRFSYPYIPTGVYAEIRSLSNLRFQTQEEITRIRNRIARWISIYFPEYKDVYGKLDAVSGMMVLKEAPLPVQIKELGAEGINQIWRDAKLRGAGMKRAKTLLSAAEHSVGSQEAPEAASMEIWNLLEDYEKYSSRMDDLMARIEEKIKEVPYVDKLLEIKGIGLKTVCGFIAEVGDLSRFDDPKQLQKLAGYAIVKNSSGKHAGESHISYRGRKRLRYVLYEAAISVIGKNGEFREIHRYYQTREKNPLKKMQSVVAIACKVLRVFYAILTKGVDYDGEKMLGDIRRPAMSVQAA

SEQ ID NO: 203808 - protein, 280 aa, unidentified
MAVASIAEAHGAEVTSLGTIGTRQCDIDHRIRKMPSRAQHLVFVYDAGPCGSWLERDLTKQGHVCGVVAPSLMPQTAGDRITPDRRDAVPLARLRRSGDRTPVDVPTVEDEAMRDLTRARDDALRDLKSATFRLKAFLLRQDIRYTGRATWGPAHLRWLAEVVGATPAQQMVCQAYVRAGHEHTERLQRLAQALPDQVNTWRLQPVVEARQALRGVQFTVAVTLVAARGDLTRVENPRQLMQSLGLIPAAYASGERRRQGSMTTAGHTHARRTLVEGAWA

SEQ ID NO: 203809 - protein, 345 aa, unidentified
MKITTVGIDLAKNLFQVHAVDERGRAVLRKQLRRDQMARFFANLPPCLIGMEACASAHYWARTLQKFGHTVRLMAPQFVKPYVKTNKNDVADAEAICEAVSRPNMRFVPIKSVEQQAVLSLHRVRQGFVRARTAQGNQIRGLLGEVGLLIPKGIVNVVKRVPALLEDAGDEVPVSFRQLIERLTEHLKELDRQVDELEAQIKAWHRGSELSCKLEKIPGIGPLGASALVASIADATSFDNGRQLSAWLGLVPRQDSSGGKPKLLGISKRGDVYLRTLLIHGARSAILAAQRKAVNTNVWLASLLNRRHPNIAAVALANKNARTVWALLAHGREFRTDYAPEASAA

SEQ ID NO: 203810 - protein, 425 aa, unidentified
MGTSKVPTFTQGGDLMIYVGIDWADDHHDVAITDDSAQTLSTFQISHDSSGFALLQAKLASFHQPPDQILVALETNRGLLIHELLRSGYSVYAINPKAVNRYKDRYVLSQAKSDSLDALALAHLLRTDRQRFKVLKPFPEDYRLLDRLCQDLRKLVDEKSRISNQITSVLKEFYPQALELFSVDSNIGIAFLRAFPDPQALSTCKKKSFEAFSKKHHYSRPQKVEELWKLVQSPALQSDPVVLKAGRFRLLALLDQLVPLREHLIRYEKEVKAILDKLPEAKSVSSLPGVGDRLAPELTAALGPKASDSETRFQSAEEIMRLSGCVPVTRQSGKWKAVSLRYACVKSLRRTFRDWAFASLSQSIWARAYYDFYKAMNMPHSTILRNLGKKWARILFAVWVKGIPYDEALYIQSLKNHNVRWALAL

SEQ ID NO: 203811 - protein, 414 aa, unidentified
MNNDERLWFAGVDWASESHQVRLSDARGNKVGERSFTHGGEGLAELANWMLRLSNAPPDGIHIAIEVPHGPVVESLMERGFHVYAINPKQLDRFRDRFSPAGAKDDSRDAWVLCDALRTDPRCFRALSTLDPVLIELREWSRITEELRHERNRLGSRVRELLWRYYPQLLELTDDVAAPWFLDLWRLTPTPAKAARVREATVAKLLKRHRIRRLNASQVVNALRVTAIPVAPGTINAATAHLDAVATRLDLINKQLSRAELKLDALTQQLASKENVEGQETEQRDVTILRSLPGVGRIVLATLLAEASDALQRRDYHALRCLSGVAPITKRSGKSRIVIMRRAVHVRLRNSVYHWARVAVQHDPLSRAKYAALRARGHGHGRALRSVADRLIAVACKMLANQTMFDPARAAPAN

SEQ ID NO: 203812 - protein, 381 aa, unidentified
MPDGIRWVGLDVHARESTFAVFDQATSEVVTRRVVGRPHELLPWLRGVERPARMVYEAGPTGYGLARRALAEGIEIAVCAPGKTERPPADRVKTDKRDAIRLARLLAAGELTLVRIPSVEREQLRDLVRCREDIRVDLMRARHRIGKFLLRREIYYEGPGETWSRKHRSWLTSVKFADQASRATLADYLHAHDVLIARRDQVEAELAKLAFTVPCAHTVARLRCLRGIDTLSALGLCAEIGEWERFDHPDQLSAYLGVVPSEHTSGAQRRLGSITKAGSTHARRLLVEASYHYRRGPAVGEALERRQRGQAPEIINISWRAQRRLNARWRQLKDTRRKPGGIVAVAIARELAAYCWEIATCPTALEPTPTPTTRRRLTNSR

SEQ ID NO: 203813 - protein, 385 aa, unidentified
MTATTRSFDPTALDDTLCLALELGEGRWKLGFARGFGGKVLHRTVIARDGKGLLAAIAWVKAKLALPEGARGVSLYEAGRDGFWLHRFLVAHSVENLVIDSSSLEVNRRRRRAKTDRLDLDGLLDLLVRHLAGSAKKVFSVVRVPSVEQEDRRHLHRELSSAKRDRTRVTNRMKGLLANQGLTLDLKKDVSAQLAALRQWNGKVLPAGLRARLAREWERVAFYDGLVDRLEAERREQLRTASDPVMKQVRQMNTLRGIGINSAWLYGIEFFGWRQFRNGKQVGALAGLAPTPFQSGESEREQGMSKAGNRHVRAMAIEIAWGWLRFQPQSALTKWYEHRFGHGSKRLRKIGIVALARKLLIALWRYLETGELPEGALLKTEARIR

SEQ ID NO: 203814 - protein, 353 aa, unidentified
MSEDKYIAFDVHQATTVVSVMNAAGREVKTAVLPTQAQPLLGFLESLRGRLHLTLEEGTYAAWLYDLLQGRVAELVVCDPRHNALLKEGSKTDHQDAHRLADLLRTGMLRPVYHGNRSLRNLRELAHAYQALVQDTTRVMNRIKAYYRSYGIDCAGRGVYSRKQRESWLGRLPAGASRVRGELLHEQLEQLRSLRRRARRELLGESRKYLVAARLCGLPGFGPLRVALLIAGMQTPHRFRTRGKLWSYSGLGLVQKGSSEYRLVEGRAVRRPGALQLRGLNRSHRPGLKALFKSAALVAIRQPGPFQDYYQSRLQQGVDPAILRVTVARKLAALVLSLWKKGGRYRAEGVKQA

SEQ ID NO: 203815 - protein, 333 aa, unidentified
MDTETGELGEQRLIHPKEAEQFYGELKERNIAVRVGMEASGHARWFERLLRQLQFELWIGDAAEIRTKGVRKQKTDRQDAQLLLRLIMEDRFPRIWVADAENRDLRQLLWHRHRLVQMRTRVMNQLHVVALNEGLRRRKALWRPRGRKELELIALAPWAGRRRQDLLDLFDQLTPKIQELTRALEQEVEKRPVTRRLMTHPGVGPLTALAYELVIGTPERFHNGKQIASYVGLVPEEKSSGDRRRLGHISKQGNALLRFLLVEAAQVTIRSQAQWRSKFFHLAHAARTEDRQGSHGPQTGGASVLDVAAGLGLRQFKRFGSYAGEPGHPDGKQ

SEQ ID NO: 203816 - protein, 320 aa, unidentified
MTTADRDVSLGAGIDVSKARLDVDFSDDRPGFGAANDPAGHAQIVQTLKSTSALRIVIEATGGYERTIVAELAAAGLPVVVVNPRQVRDFAKATGRLAKTDAIDAKVLALFAIAIQPPLRPVEDAQSQVFTELLTRRRQLVQMRVAESNRLAQARDRRVRKSIEGVIKLLDRQIDSIDGEIDQHIQNSDIWKEKEELLLAVEGIGPTTARTLLADLPELGSASRQQIAALVGLAPFNRDSGTLRGQRTIVGGRAPVRSVLYMATLTATMRNPVIRAHYQHLLAKGKRKKVALVACMRKLLTILNAILREKKPWRSPRVVS

SEQ ID NO: 203817 - protein, 328 aa, unidentified
MMPLLEKVAGVDVHKDQITITTLVRSSLDSGGKTETWESKTFTSDLERCGQKLLRDGIREVAMESTGIYWRPIFNVWSKMGLNITLGNATHIKNVPGRKTDVKDSEWIAELHSCGLIRKSYIPNEEFQQLRTLTRHRKSITGDIATVKNRIQKILEDGNVKLSSVLSDIFGVSGMSVLKAISAGETDPDRLVMQVTTKVQCTKEVLKKSLTHRLNQKQIFVLQSLMTQMFYLQQLHDETDKVIKECLMPHQELLELLDTIPGVDEKLAEDILAEATTNMAVFKDERHFAAWAGVAPGNNESAGKKKVQMSQRQPHIEEMPGPSGKRGN

SEQ ID NO: 203818 - protein, 359 aa, unidentified
MREQRNKISFRGQKIYVGIDVHLKSWSVTVLSETFVLKKFSQHPSPEALYGFLTRSYPGAEYHSVYEAGFCGFWIHERLTALGIDNIVVNPADVPTKSSEKLRKTDTVDSGKLARSLRANELKGIYTPDSVSLEMRSLIRLKNSITKDTTRQKNRLKSQLRYLGIEIPQEFLTPFSNWSKRFFAWLKEIETLTPSGRQALDIHIRHLEELRRQKLEMTRALRTLAKTDRFREPLRLIMSVPGFGQATGMAFLSEICDITRFRNAEQLAAYIGMIPMCHSSGEKDGTGDITIRKHAVMRCNLIEAAWVAVRQDPAMNLFYTEQCKRMPKSKAIVKVARKLVNRLFFVLKHQTEYVNSIVS

SEQ ID NO: 203819 - protein, 342 aa, unidentified
MTQPAPARITVGVDTHAEVHVAVAKDNFGRRLDAISVPTTPAGYGELLGWARRLGQIEGWGIEGTGSFGAGLTRFLHRHGQVVVEVNRPDRQTRRRRGKSDPLDAEAAARAVQAREGVIPKAGDGQVEMIRSLRVARATAMKARTQAINALKGLLVTAPDELREQLRALSAVRLVQTAAELEPGPVTTPAAAARLGLRSLARRYQALSAELTILDTELDRLTVTAAPKLLALFGVGSDSAGALLVAAGDNPDRLRSNACFSMLCGASPIQASSGKTQRHRLNRGGDRQANAALYRIVIARLRHDQQTRDYLDRRIREGKSKKEAIRCLKRYVAREVFAVLRP

SEQ ID NO: 203820 - protein, 382 aa, unidentified
MRSVKRDGYWSHPEIDTLYSEGYLTMNSIERNVENIVAIDLGKFNSAVCIFKKSTFKSSFRTIKTNGQDFHDLFVELEPDIVLIEAGSSAGWVADLLQILEIPFEVANTNHEAWKWNKSKKKTDKRDAKKLAMMYAYGGLPTVHMPTKAVRQKRSLINYRQSIVKRVTQSKNVIRALLQTVDVKMLSGKNAWTQKGIDYLASMARPFDQIQDSEQFWRGQLHTELEILASINEKLKTITKKLDSLAQADKKISLVQTIPGVGARVAEAVVAIIDDPGRFKNAKHISSYAGLVPEKHDSGQTKRNGRITGHGSGMLRALLVQVSWLGLRNKWIRDIYDRIRRGSKTRSKIAIVAVARHILVRCWAMLRDNSTWNGSVELVVKK

SEQ ID NO: 203821 - protein, 346 aa, unidentified
MKNTVAGVDLAKEVIQVCLCTNNKVHSNIEMSHRKFLTWLFKSKSMSIIFEACGTSNYWKQRAIEAGHDARLISAKLVASIRQNQKTDKNDALAIVQASQLADIQFIKGKSVEQQQLQSMVRLRELAIKQKTASSNQIKALLLEFNIRVSPKQGGLKGVVESLLEDAENGFSFEFKHALNAAWGLHLETLESIRVYDRCLETTIDKHDDCRRLLKLEGVGTLNAINLYIALGCADLGVFSKGKDASACIGLTPLQHSSGGVTKLGHIGKYVKNSTLRSQLITGAMSVVNQIVKRTAITKKEAWVQGLVARRGKKCAAVALANKTVRTAYVMLTQGTEYKAELVAVK

SEQ ID NO: 203822 - protein, 411 aa, unidentified
MVIDAVGEQLLSARITNDEGTLDALIDKVLALADDGEVLWAVDINRGGAALLVGLLAARHQPVAFLTGLMMHRAAAGYRGEGKTDARDAFMIADQARVRRDINLLRPENEIAADLRILTARRLDVVYDRTRQINRLRAQLLEVCPALERALTVTNTGPLVLLTRYQTPAQIRRAGPVRIEAWLRKQHVRGAESLAQRAKTAAAAQRIVLAGEAAAAKVVARIAQGIIALDAEIAELDAAIEARFLEHSAAPAILSLPGFGPKIGVEFIAATGGDMSVFTGVNQLAGLAGLAPRPRDSGKISGNLHRPKRYHRTLLRTMYISAQVSIRHSAASHAFYQRKRSEGKSHKQAVIALARRRLNVLWAMLRDGTTYQDPRPAREPGFVPGRSDSTTVGSYECEHRPGGRPLGCAAS

SEQ ID NO: 203823 - protein, 363 aa, unidentified
MRAVFGIDVSKTSSEVAILVNGEKVHGYTILNDAIGFNRLLGDLKTVHSPEIIFEATGVYSRRLQAFLEEYSYAYTRLNPLEAKKQLDSLRVRKTDKIDAEKLAKSQLVHNRKPTYVQEEVYQHLRDLSRFYQNMTEDLVRTKNRLHKVLQVTFPELENLLSTPTGEQYWNLVMAFPCKEFVLSLSQSNLCEIIRQSTSKRISEKRVTYLVDKLTKLANQSYCEVKKTSPMLEEVRYYAQELLRLSERRQVVLSDMVALAQPLPEYDILRSIPGIAETTATSIIGELEDIRRFQSTNQINAFIGIDLRHYESGNFSPRNTSLNEEIPMSEKSCSSAFTTSLQLVIPIPAISLTFMRNEKDNRQ

SEQ ID NO: 203824 - protein, 319 aa, unidentified
MRDACMVGIDVAQATLAVAVLPAGRTWEVAYTEEGLATLVAALQPLAPARVVLEGTGGLQAPAVAALALAGLPVVVVNPRQVRDFAKATGQLAKHDRLDALVLAQFAAAVQPPARALADDDTTRLSEFVTRRRQLVEMRRAEEQRLTRLEHRRTTPRVRADVVDHIAWLSRRIERLDEELHAAIQASPVWCVRAQLYQSVRGVGPVVARTLLAELPELGTVSAKVIAALVGVAPYVRESGVWRGRRHIGGGRAEVRRVLYLAAMSGVRTNPVLRAYYARLVAAGKPRKVALIACAHKLLTILNAMARDQRPWTPTLGST

SEQ ID NO: 203825 - protein, 404 aa, unidentified
MSVVGWDWASQAHDVTVLDDAGGVLDRWAFPHTEAGWVMALARLRRRGEPGDLPVIIEKTSGLIVDRLLAAGHPVVPVHPNSFHAARPRWGASGAKSDPGDSYKLADYLRTDGHRLRRLEPADPGLRELQALVRLREDQVRARTAATNQLWAMLGNHWPGPRDLFCSLASGIALAFLTAYPTPQSAARLGEARMAAFLRRNSYRGGKSPALLLARLRAAPQAPVALPAATLAAMVGAHVQQLRSLQAAITGIERLIAERVAAYPRTRLLARLPGAGTINLAQLLAEVGPILDRATSAEQAASETGTAPVTRASGKTTGVYFRWAASTRARKAITAFAHNARMQSPWAAKLYADARARGKRNPHATRIVARAWIRVIWACWHTGTPYDPATHRAARQPSPAEDLT

SEQ ID NO: 203826 - protein, 347 aa, unidentified
MNRNQPQECAVFGIDIGKNLFHVVGLDCSGAIIQRVKFRRETLLQFFERAHRTLVGMEACPGSQWLARKLQTMGHSVRIIPAQFVKPYVKSNKNDIIDAAAIAEAATRPTMRFVGVKQADQVDLQMLHRVRSRLVSARTNLICQMRAYCLEHGVAMRQGAGVFKVDICRVMDDLDNDLTPMARSVLRDLHDDFRRLEARIRQVSDDIEKIADTDERARRLMTIPGIGPLGATAILSAIGDPTRFSKARDIAAWLGLVPRQYSTGGKQNLLGISKRGNNYLRRLIIHGARSCMLHLDRGKDRLGVWIDTLRLRMHVNKVTVALAAKLARIVWVVLTKPGATYMRQVAA

SEQ ID NO: 203827 - protein, 382 aa, unidentified
MNAPETALQAKHTEDTGSLYMAFELSDKKWQLVLSDGRRRPSCHTVEAGNTNAVLEVIDKAKARCGLTGKVVVHSCYEAGRDGFWLHRWLRAQGIDNIVVDSASIEVNRRARRAKTDRLDAQKLLSMLLRYHAGERRVWAVVRVPTVEQEDARRLTRELGRLEHEHTAHRNRIGSLLVLHNLRAQVRVGGRGWPRWWHGHAAQLPPCVRGEIEREVARLVLVKAQLRELQAAQRQAVASGEQAQVAQLAAVGGVGLGSAWLLSKEMFGWRRFSNRREVGGCLGFAPMPYASGESRLEQGIAKTGIKRGRRLMVELAWSHLRYQPHSALSQWFKQRFAHGGKRLRRVGIVALARRLAIALWRYLEQGVLPAGVRLKSNALANA

SEQ ID NO: 203828 - protein, 396 aa, unidentified
MTAIWAGIDAGKTHHHCVVIDDTGKRLLSRRVANDETELLKLLGDVLDLGDDAVWGIDLADGGAALVIAVLLNHGQQLLYIPGRTVNRASEGYRGDGKTDAKDAAVIADQARIRRDLTPLRPGDELVSELKVLTRHRRDLSDDRTRTINRLRGHLTEIFPGLERELDLGNVGPLVLLTGYQTPAAIRRTGRRRLVTWLRNRKVRGADELAARAVQAAEAQHTSVPGEDMTAHVVHSLAREVMALNEKIAETDKLIEGRFRRHRNAEVIASMPGIGSLLGAEFLAATGGDMDAFASADRLAAFAGVSPTPRDSGKISGNLHRPTRYSRRLQRVFYTSALISIRCCDESRRFYDRKRAEGKRHSQAVMALARRRVNVLWALLRDGRCYNPIPPVTPAP

SEQ ID NO: 203829 - protein, 454 aa, unidentified
MARNGKKKTKKQESLPFIQPDAAGIDIGATEIYVAVPEERDIRRVRKFATFTEDLHALADWLIACQIKTVAMESTGVYWIALFQILERRGLEVCLVNARHVKGVPGRKTDIQDCQWLQYLHSVGLLRGSFRPAQAVCAVRSILRHRDIQLKSASRQVLLMQKALTQMNLQLHNVISDITGVSGLAIIDAILMGEREPSKLSCLCDGRIKASRQVVAKSLVGDYRPEHLFCLQQALESYRHFQNQIAACDEHIEQMLARFDSQEQCAEAPSTKYKAQGNQPTFDVPSEMHRILGVDLSAIPGMSAQTALTFFCEVGPQITRFPSSRHFASWLGLCPDNRISGGKILSSKTRNVRCRLANALRMAATTLYRSRSALGDYFRRLRARLGSPAAITAAAHKLARVLFAMLRDRRSFDPQLLGILNEKHLRRRQNSLRKYAASLGFELVPIQNLAHSVS

SEQ ID NO: 203830 - protein, 335 aa, unidentified
MEFSYFIGIDVSKKELDFAIMRGKTLLFHQQIINTQEAIACLIKELVKLPGFTISGTLFCMEHTGIYTNHLLAILHKKKANIWLEAAIQIKNSSGKLRGKNDKVDSIRIADYAYTQRDKVRLWSPKREIIQQLAHLASVRTRLIEARKMLKTPLDEQQEFGVKRTFAVAVSVCSHSLKAIEADLEKANQAIDCIIASDPELKHLFGLVTSVSGVGKTTATQILITTNEFKDIRDPKQYACYAGVAPFTEESGKIKKKARVSAMANKKVKTLLHMSALIAIQHNQDIKVYYNRKVNEEKKNKMSVINAVRNKLILRIFACVNHNSPYQNNYQKLLA

SEQ ID NO: 203831 - protein, 455 aa, unidentified
MPIKRGSQGFSVVHPHAAGIDIGATFHIVAVSPDCDPSPVRRFQSFTTDLHKLSKWLHEVGVTSVAMESTGVYWIPVFEILESDGFEVILVNAREVKQVPGRKTDYNDAQWLQKLHQFGLLKASFRPSERLASLRAYLRHRERLIEYSAAHIQHMQKALMQMNVQLHHVVSDITGATGMKIIRDMINGERCAATLAAHRDIRCKQSEETITAALTGNYRDEHVFALKQAVELWDFYQERIRECDAQIEKVMAKLNQNKTSSDVPIPKARHRTKQPHEPDFAVRSALYTLTGVDLTQINGFGPYTALRLIGECGDDMAKWPTEKHFVSWLSLSPGNKKSGGKILSNKTGRTKNRATTLLRIAAVNVGKTETALGAFYRRLAARVGKAKAVTATARKMAVLFYSIMKHGKEYVEPGAAYYETLYRNRVLANLKKRAKRLGYELVANPVPERLYAEVS

SEQ ID NO: 203832 - protein, 445 aa, unidentified
MHYKRLLALIDSVSSHLSVGLDVGADFTWMSIALPNGSFTGKPFKIVHSDPGSRDLAVAKIKEAQETYSLKSRCFLESTGIYHIPLLCFLRDKGFDCSVINPIITKNSTNINIRKLHNDKFDSKKAALVGLNVSLKTSILPDDSVVDLRNLVRDYYYFKDLQSAVALKLTAELKVSFPAYAKVFSKITTQSSLKLLSAYPLAKDMLAASKDDIVEIIRSTARFGEAYALRKYNAIIAAAQDAAVFGRALPSNAVRIRLYIDTYQEYQKHLDALLKALHETVDRLQDTLVYDQICLLQSLRGIGFLSAVVLIAEMGDFKLFSSPKKLYAYFGLDPAVKQSGKLNGDKVHMSKRGSSLARRVLHMAALNNVKVDKRSGTPVNPVVYDYYARKCSGKKKPVAMGAVMHKICNIIFAMLRDNKPFEVIPPEEHCRRFAAEHPDKIRKAA

SEQ ID NO: 203833 - protein, 341 aa, unidentified
MEIDVLGIDLAKHVFQLHGADRRGRAVHRAKVSRSALFETVRTLGPRLVVMEACSTAHHWARRFQTLGIQVRLISPQYVAPFVKTNKNDRNDAEAIVEAASRPAMRFVTVKSIEQQDIQAAHRIRAILLRQRTALINQMRGLLGERGLAIARSPEAFKRAMPQLLSTSADELTSFCQTLLTELLQHLKAIEERIRLIEASIQSFMRQSSLCKKIAAIPGIGPITATAIVAAVGDARQFRNGRHLAAWLGLVPRQYSSGGKPRLQGISRRGDTYLQTLLIHGARAVLRYVKAKTDPQSLWLQELIARRGYNCTAVALANKNARIVQTLLSDDEPYQRSDAAA

SEQ ID NO: 203834 - protein, 402 aa, unidentified
MIYVGIDIASTKHDCFITNEHGEVFSDSFTIENNYDGFTQLREAIKAFSKQTNDSKISIGLESTGHYSQNILLHLVKFDYSVFYINPLFIDGYKKGKTIRKTKTDKLDCQLIASYLQQNIDDLEPYKPTDTIYDELKILTRHRAFLVSERSKIKVNLKRLITIVFPEYIDVFSSLYNETSLAILYRFPLPSQISKLEAEDINVYVKKKFPHCRIDYTKFEQIIELAKKTVGSKLSSYALEIKSLVNLINYFSDEIENIESQIDKFVSKIDSDIFNIPGVSNVSGASLLGEIGSISKFRRADQLVAYAGYDPAIYESGKYSSSSGKMAKRGSKYLRTMIWHIALVIANHDEKYHLYYLKKKAEGLHHNKILGHIGKKFLRLLYSILKNNSKYQKSYQMPLTTI

SEQ ID NO: 203835 - protein, 440 aa, unidentified
MNQEDRSRLEEFRQFRKEVRGSTEYLLVGIDVAKDKHHAFFGTATGKTLFRRLVFENSIEGFRKLLAQAEAMKVQGGLTKVVFGMEPTGNYHKPLGEHLIRCGHGVVLVSGVAAHENRKTLDGRWDTNDSRDAANVADLVSQGKCLFYEFPVGALQDLRNLLSLKRRLKRMEHGHRVRIRNHLVAKYFPELDRYYEQSESTALAIVRWCLDPSEIAGLEYQRFVQMVSSARGRSSQEKRLQTIWKMAVDSVGCEAGPTVEFEAQVMVEGLKQIRESVRQIDEKIQEVCSRFPEYEFLLSIPGFGPDVSSKVLGAIGDPFRFQNGRQVLKMAGLDLSAERSGKTSQSAIPVISKRGKADLRYALYQAALIASIRNQDFIVYYTDKLRGREREPGIRTKMRVKLAAKLLLIAWTLMKKKEPFHPSYLRSACQSFSAGAGRER

SEQ ID NO: 203836 - protein, 349 aa, unidentified
MLADQLDYIVGVDTHLDEHVLAVVASPSGAVVAKRSVRASARGYASALQFALEAGNGARVWAIEGTGSYGAGLARYLVGRGETVLETSRLPQSERRLRGKDDALDAVRTARAILASDTLALPRAGERREALRLLLVARRSAVDVRREALGQLRGVIVTAPDSLREQLRTLPVGKLLQRCIRLRRSSAMSTDEVAVRLVLRSLARRIEAATVEAAELERELLVHVHALAPQLLDEPGIGPIVAAQLLVAWSHRGRLRSEACFARLAGVAPVPASSGKTARHRLSRGGDRQLNRAIHTIVLHRRQHDPATRDYIERRIAEGKTRRDATRLLKRYLARHLYRLLEQQQPLMT

SEQ ID NO: 203837 - protein, 365 aa, unidentified
MNATAALPIVGVDLAKSVFQLAVADGNWRVVEQQRLTRTQFERWFANRAVGLVVMEACGSAHHWARWLNGLGIEVRLLPPPYVRAYVKRNKTDAADACALLEAARCADIVPVRVKSVEQQALQGLHRTRSLWMATRTSRINALRGFCREFGIAIAQGARLGVEQIGRVLADPHSAVPELIRQTMKLLVEEIRLLEARVSQLERELTLLARQAPACTRLLSIPGVGLLTATAMVAATSGSVSHFRDARHFASWFGLTPKEYSSGGTRRLGRISKRGDRYLRMLLTHGARSVLQAATKAVQAGRAVDELRQWALALQRRSNHNKATCALANKLARICYATLRDEQAYGRPAPRPNKKIERTAFAIAA

SEQ ID NO: 203838 - protein, 339 aa, unidentified
MQVTTVGLDLGKDVFQVHGITADGTVVFNRSIRRRQVLAFFEKLPSCLVGIEACGSAHHWARELRVIGHDVRLMPAAYVKPYVKRGKTDAVDAEAICEAVTRPTMRFVAVKEKEQQALLTMHRVRQLIVRQKTQSLNVIRGLLREFGHVIGSGPVAAMRFVKDCQAGDFPDIPDLVKSALKTLCDQVVSLDDRVVFYDKLIDHHSRIDERAKRIRTVPGVGPITASAIVATVGDARQFKNGREFAAWLGLTPLNKSSGGKERLGGISKKGDRYIRRLLVIGMTSQVQRARRFPGRVHPWIMQLLERKPVRLATIAMANKTARIIWAVLTSGAEYRQSAA

SEQ ID NO: 203839 - protein, 452 aa, unidentified
MLDKPQEIVDEEHEQVCERVAAIDVAKAAGMVCVRVPDDARPGRRVSRVWEVQATTRAVIELGDHLACEGIEKVTLESTSDYWRIWFYLLEAAGLDVQLVNSRDVRNVPGRPKSDKLDCVWQAKLTERGMLRPSFVPPAEIRQLRDYTRLRTDLIQERTRHWSRLEKLLEDALIKVTAVASKIDTKSVRAMLEALIAGERSPRVLADLALGKMKARRAALIEALTGRFDDHHAELARMLLDQVDQLDRQVDRLTGRIEELIAAIPAARGVDADGTAGPGAGAGPDAAVRSAVARLDEIDGIGPRGAQVVLAEIGLDMSRFPTAGHLVSWAKLSPRTIQSGARSRSGRTGKGNPYLKGILGEAAAAAAKTGTFLGERYRRLVKRIGKLKALVAVARSILVIIWHLLADPTARYQDLGAGYYASRTGKDRKLNNHIRQIEALGYTVTLMPAQAA

SEQ ID NO: 203840 - protein, 419 aa, unidentified
MFKIFRKNCCGLDVHKTWIFACIGITDERGLTQYKRARFSSFSKGLRDLATWLAKYDCKEVCMESASKYWIPVFNILEQSCFVTLAHPKYTKPQKGNKTDLKDAKWICDLFMCDMIKPSFIPPPDIRHMRDLHRYRFKLTNILTGEKNRAQNCLTVSNLKLDDVFADVFGKSARSITDYILKHPGEKFDVAPFVHKGCKHPIEEIQDAVDGSISPEQAAKLREILAHIDELKAHKQNIEAEILRLAEPYSEALKLIRTVPGFSADPMTAIAVLSEIGADLSVFPTAKHLSSWAGVCPRNDQSGGKRKSTRISRAGCYLKPLLVQVANAVVKSDKHPECKERYRRLKAHRGHKKAIIAICRMLLTAIWSILTKLEPYSSKGYLSEHQPRDTMVITKAQALKLLQSKGFIFKDDFLLEAPP

SEQ ID NO: 203841 - protein, 352 aa, unidentified
MVTVPVFVGLDYHTVSVQVCVLDSGGEMLANRSVANDSEAIGQLVHDHGNKVYAAVEACNGSADLADELIQRFGWSVDLAHAGYVARIKQNPDKTDYSDARLVADLERVGYLPKVWLAPEEVRELRRLVRYRQQLAKERRDVKLRIDALLREQRLSSPTTCTKWTVAWLKWLEETKELSVQGRWIVDQQLRRLRELDLSLRTVEARLSQVTADDPQVQALMAMRGVGLITAVTIRAEIGRFDRFRTGKQLSRFCGLSPRNASSGQRQADAGMIKAGNPQLRTVIIEAAHRLMRHDPHYRAMGQRLRQHGKPGSVVAAAVANRWMRSLYHIMIPYGKGRPATETAPIAGPGSC

SEQ ID NO: 203842 - protein, 344 aa, unidentified
MTKVSMIGLDLGKNAFQVHGIDARGNVVVRKQLRRSQIEKFFATLPPVIVGMEACGGAHHWGRVLGTLGHEVRMMPPAYVKAYRKRNKTDGRDAEAICDAMDRPTMRFVPVKSPENQAIAVLHSTRRLLVRQRTMSANGLRSGLAEFGIVAAQGLKGLQALMQLLADPATAIPDNARLGLQLVAEQWEVQNAQICKLDAAIVGAARSDAQARRLMQIPGVGPIGATAIAAMVPDARVFKSARDFAAWLGFTPRQFGTGGKQRSGSISKQGNRTLRTLLILGATAYLRHERTRRRDPWLQALLLRRPVKVVAVALAAKIARIIWAMLVSGENYRPRRHAVAAQAA

SEQ ID NO: 203843 - protein, 462 aa, unidentified
MQDSGDHGDSSGRARPIEGLPVVRRNVAGIDLGSERHWVCAPAVDGTGREVADFGATTPELIRMARWIKERTVESVAMESTGVYWVAPHEVLEAAGLEVRLVDTRQLARVPGRNKKTDPTDCEWIQRLHSCGLLTGSFRPKEQVCMLRTLIRDKANLVAEAGDWVRRMQKSLDQMNVRVHRAVSDLDGVTGMAIVRAIVEGERDARKLAQLRDRRCRKSEEEIAEQLSGHWREDHLFSLRQGLKMYDAVQEQIAAYDQEILRKLAEMEPEELRGQPAPPVRNPQKAKAIKKRGQEPMRQALYRMSGVDGTQIDAIGVETIEVVYSEYGPDLSRFTTEKQFVSHATLAPRVPKSGGKPVKKKKRNSASTRVAAALRMAALSLRHSETALGAYYRSIARRIGGDVAVFATARKLATLIYRLLRWGQPYADEGAEAFEKRYQQQRIKSLAAKATELGYQLTPANA

SEQ ID NO: 203844 - protein, 370 aa, unidentified
MRKDMLYVGLDTDKKHIDIGLAEPLPKGEVRYWGKIANEATALERVRKRLQKDGRQLVVCYEAGPCGYGLYRWLNGKPGVSCQVVAPSLTPRRAGVRVKTNRRDCLTLAKLLRAEELTAVWVPDPAHEAMRDLVRARGAAKEDLNRCRQRLGGFLLRQDIRYAGKPWTKKHRAWLGRLAFAEPAHRLLVGELLDALDQAMARRDRLTDHIAALVPNWSLAWLVEALQVLRGYQLINAASVVAEVGDPRRFDNPRRLMGYLGMGVSEYSTGERVRRGGITKTGNKRARTALIEAAWTYARPAKRPKTAAARQPAAVRAIADKARHRLSARYRKLIARGKLPAVAVTAIARESLGFIWAIAQAAAPDALRQR

SEQ ID NO: 203845 - protein, 344 aa, unidentified
MDHYAGIDVSLECSSVCVVDASGKIVREAKVASEPEALIGWFASLGLELARIGVEAGPLSQWLYAAMKDAGLAVELLETRHVSDAFKAMPVKSDRNDARKIAQLMRLGWFRPVHCKSIAAQEIRAMLTARKLVQSKLLDLENSLRGILRGFGLKVGKTTRTKFSERIEELVHEHPNLQTIGQALLRVRAVLLTEFNALEKRVRAMSRLHEKARLLMSTPAVGTIISLTFACAIDDPSRFTSTKQVGPYLGLTPKKYQSGETNYTGRISKHGDASAREALYEAAHLILTKPIKGCSELKSWAMRVSRRAGANKAKVALARKLAVIMLRMLKDNVPFNPAAKAAAV

SEQ ID NO: 203846 - protein, 342 aa, unidentified
MNRNVYGIDVGKQCFHVVTLNAAGTRTERQKLNRAQIVAYFAKLQPGIVAMETCPGAHYLGRHLERFGHDVRLLACQFVSPYRKSQKNDFNDAEAIAEAASRPTMRFQRIRPTEQLDLQAIHRVRQRLISERTGVINQVRAFLLENGVAVATGKLQLARQLPRILAEAENCVSPRMQRLILQLVQRWRQIDAMIDELTRDLAAAAKSDSLAKRLLTVPGIGPIVASALVATVGNAANFRRARDLAAWVGLVPRQYTTGGKPRLLGLRYTGQVYLRCLIIHGARSVARVRSHYHDPLGKWVEQLVRRVHINIAICAVANKIVRIAWAVLRKSSVYGTPTVATA

SEQ ID NO: 203847 - protein, 445 aa, unidentified
MARKSKKQRLTVVHPHCAGIDIGSREHWVAVDPECCDEPVRRFTTFSDDLYELADWLQSLQVDMVAMEATGVYWIPLYEVLDARGFQVHLVNSRSTRQVSGRKSDVLDCQWIWQLMSYGLLKGAFRPADAVCTLRSLVRQQDGKVQEQSRCIQHMQKALTQMNVQLDNVVSDLMGKTGAGILRAIVAGERDAHELAKLRDQRLRADEETVARSLHGNWREEHLFALSQALAHYDFLTEQIEACSEAIDRTLASLPTLSEEEAPKPVKRLCSKRRTAQQQTRLHQALHAVMGVDLCAIPTIGIDTALVLAGEIGPDLSRFPTQANFCSWLGLAPPTNISGGKPLPGRKPKTFNRAGQALRQAASNARRSDSFIGACHRARLARMDSAKAIKATAHQLARLIYSMLTNGQSYVEQGIDAFEARTKDRQLRALERKARKLGLALVEAA

SEQ ID NO: 203848 - protein, 346 aa, unidentified
MKVKTIGIDLAKETFGLHGVDGRGRVVVHKRITRKHLVGFLVKLEPCLVGMEACGSAHYWAREIEKLGHTVRLMSPQFVVPYRKGNKNDPNDAAAICEAVTRPSMRFVPIKCEEQQDLQALHRVREQLVKNRTALANQIRGLLRERGIVVAQAIARLRAALPMILEDQSNRLSALMRVLLGEMAERLRMLDDRLRQYDRRIERLCQQDERCRRLVKVEGVGPLVPTAVVAAIGNARQFTNGRELSAWLGLVPREYSSGNRTVMLGISKRGNRYLRTLLIHGARAAARVAERKRDARSIWLSRLKLRGGPNVAAVALANKNARVMWALLARGDSYRVRTSMHSAAAA

SEQ ID NO: 203849 - protein, 418 aa, unidentified
MTATHSIAPTLLVAIDISKHRHEVLIGVPGKKRRRRMTIMNSLEDFHRLSAALVGYDMPVRIGFEATGNYHRPLAHHLGQAGFDLKLVSSVGLARTREALHNSWDKNDPKDAQVILHLLEIGAVQFFHDPLVVGTADIQELSKTHEIVSRSKTELWHRILTHYLPLYFPEAERFHRSSRTDWFLAFLEKYPTPAMITAMSQDAFIADAWQVVGKKVSKERLLSDIYATPVYSVGLPVDPDSDAVRMFRLVLAEGRSLVRQRNEIEARAVELLSDLPDYRLLTTIPGIGPINAMTILAEAGDLRRFRHHRQFLKFCGMDLATVQSGMFRGQSRISKYGNARLRRTLWMAGQTAVLKRTNSFRDKFERYISKDRHNAHLRRKAYTAIAAKMARTVHAVVNHGEPYRPFFEGVSPGGRTSL

SEQ ID NO: 203850 - protein, 323 aa, unidentified
MQDLENSRHSTDVASYIGIDVSKSQLDIFVHPHEIIFKVSNDKQGHKQLNRRLKSIGPLLVVMEATGKYHRAAHRALVANAIDVAIVNPYRTHAFTHSLGQWAKTDAIDAKMLALYGAMIQPQAVKPAPRVLECLRELVSARRNAKVDRARLSNQFSESIISFVRTRLKARICQLERHIASLDGEIRRLIKADPAMAQRFAIITSVPGLGPVNATTMIAEMPELGSCDEKQIAALVGVAPMAHESGSFKGKRRIRGGRKAVRDPLYMAALSAIKAYPAMKAFQNRLLANGKEFKRAITAVMRKLIVLINALIRENRKWTPIAP

SEQ ID NO: 203851 - protein, 341 aa, unidentified
MSERLYCGIDLHGNNAMYVILDEQDRTVFQKRLPNDLPRVLAALAPYRDRLEVVAVESTYNWYWLVDGLQDNGYPVCLANPAKIEQYHGIKEANDLTDAAFLAHLARLGVLPTGYIYPAADRPVRDLLRRRMLLVRYRTGLKLSLQNMVMRQTGQSFGWREVRQLDEEARAELLGENDCLPFVATHQVELIEALDEKIRQFEEKVLARVQLRSAYRCLLTLPGVGVILALTIMLETGEIGRFETVGDYTSYCRCVRARHLSNGKKKGSNNSRNGNAYLSWAFVEAVHHAIRSCPAAQKFYEKKAGQRNGALATKALAAKWTKAAYYMLTRQERFDPKRVFG

SEQ ID NO: 203852 - protein, 318 aa, unidentified
MSQPNQHCIGIDIAKLSLDIAGTGEFTSFTTNNDDDGFTIILKALQEVKISLILMEATGGLEASVACILQTAGYEVVVINPRQARDFARSMGYLAKTDKLDATMLAQLAQVIDRHPDRSRYIRALPDEARAVLTAIVVRRRQLNNMLVAERNRRYPSHPQSRKSINNIIDALENELDRINEEMKQHVKVFFMEQAELIGSVKGVGEVTVACLIAELPELGKLNRREISALTGVAPLNRDSGKMRGRRTTFGGRAGVRATLYMAALVATQFNPAIKMFYQRLLTAGKPKKLALVACMRKLITILNSMIRKGEKWDASLI

SEQ ID NO: 203853 - protein, 342 aa, unidentified
MSNIQTIGVDLAKNVFSIHGVDAYGKCVLRKTVKRNKLLDTFANLPPCIIGMEACSGAHHWARELLKLGHNPKIMASKFVIPYRQNEKNDANDAEAICEAVSRPKTRFVSIKSDEQQAVLCLHRIRQGLIKTRTATINQLRGLLSEFGLVMPQGRYSAQHTIGSILEDAENGLPLLARELLQDLSNKIQSLNLEILHYDRRVSALVREMASAKALLDIPSVGEHSASAIVATVNDAKQFGSSRQFAAWIGLVPRQYSTGGHVHLGRISKRGEKHIRTLLIHGARAVIARCKEKTDRNSLWLQQLVERRGYKRAAVALAAKNVRIIWALLTTGNEYKANYING

SEQ ID NO: 203854 - protein, 346 aa, unidentified
MEKLYLGVDLHKRSCWVTVLDADGHLLESRKLGTEKWELVGFFGKVQKPAAVAVEATFNWYYFLNVVEPLGLELHLVHPWKTRAIASARIKHDKLDSRVLAELLRTGFLAEAWIAPREVREQRQLLRHRARSVQWATRAKNGVHGVVNRQGIRPPMEALFGPKGRAFLAELELAAMDRWEVDDYLLRLDVLKGQIGELDREIRQRGRENRVAQALETIPGIGPFIALLLVAEVGDVRRFPTAKHLASYTGLVPSLYASGEHRWGGAITKQGSTLLRWALVQAAHQAARSARFNAYYQGQRERLGAAKAIVALARKLAVISFYRWRAAESSGVHLGWRMVGASTQHV

SEQ ID NO: 203855 - protein, 409 aa, unidentified
MERVIERGAGLDVHKKTVTACVRVPGPAGGRRQEVQTFGTTAAALLALRDWLHAHGVTHVAMESTGVYWKPVYYVLEELFTCLLVNAAHVSKVPGRKTDVRDCEWLAQWLAHGLLRGSFVPPVAIRELRDLTRYRAVLVQDRSREANRLHKVLTDAGIQLASVATNVLGKSGRAMLAALVEGTTDPGVLADLAQGKLRRKLPALREALVGRFRKHHSLLVSHLLAHLDYLDEALEDLTAQIEEALRPFAAEAARLDTIPGIGPRTAEVVIAELGVDMRQFPTARHLASWAGLCPGTHESAGKRRAVRTTKGNRWLRATLIQAALAAVNVRDSALAGRYRRLVPRCGPKKAIVAIAHKLLTTAYLLLADERTYHDLGAGYYDARRKDRDVRRALHALERHGYRVSLEPAA

SEQ ID NO: 203856 - protein, 310 aa, unidentified
MEQTFVGIDVSKDRLDVHVRPSGEAFAVSRDGTGLEELVDRLRTLAPMLIAVEATGGFETIVAAAIGGARLPLVVLNPAQVRHFAQAVGQRAKTDPIDAEIIARFAEAVKPAPRPVPDEAARLLGELVARRRQIIDMLVAERQREKRAGNMRVRKSLARHIKVLERELQELTDEIGGLIRGSPAWRETEDLLVSVPGVANKTSSSLLAEVPELGHLTRRRIASLVGVAPYTRRSGRWKGKSMIAGGRAAARSAVFMAALTASQHNPLLKAFYRRLLAAGKPKMVALIAVARKLLTILNAMIRDKKPWQYA

SEQ ID NO: 203857 - protein, 355 aa, unidentified
MESVKYLGFDVHQTTISVAVVNADGKLVMQSVIATHAATILDFIQGLRGTLHLTFEEGTHSAWLYDLLVRRVARVVVCNPRQNALLKAGNKSDRSDARKLAELLRAGLLSPVYHGESSTRTLQELVRSYAALTEDTTRVMGRVKALYRSQAIACAGKKPYGRRHRPEWLSKLCEPGLHRRAERLYEELDALQGLRRVAKRELVMESRKHAAAKLLRTVPLLGAIRAALLIGRVQTPHRFRSKRQFWAYCGLALETRSSADYRFEDGQLVRAKKPVFIRGLNRNHNHDLKNLFKSAATTASAIHGPFREFYEGLLAKGMQPAMARLTLARKIAAITLSVWKKGESFDAEQLKPQAA

SEQ ID NO: 203858 - protein, 353 aa, unidentified
MRAVLSPAAPLKYVVGIDIAKDTFVACFGRIEASQHLSFGKETTFANSFAGFTALLDWTAKQHTTAAPLWFVVEATGVYYEELAYFLTDKEQVLSVLLPNKVKHFAQSTEQKSKTDQLDARLLCRLGLERALPSWQPPTLALRQLRALSRERQSLTQQAARLKTQRHAYHHSYQPDARTLERLSARQQLLDQQMKAVDQDLAALLKAEPELARKMAHLTSVPGIGLTTAIAVVAETNGFVLVENERQLASYAGLDVVQRQSGLSAGATRISRRGNVRLRTALYLPAVSSLRFNPQQMAFYARLRARQPSGKPGVIAVMRKLLLLCYSLWKNDCAYDPHYHPAHCLEKEVAPTS

SEQ ID NO: 203859 - protein, 307 aa, unidentified
MLSIGIDISKGKLDCCIAGKCIQIANDEKAIKQLFKSVTRDSQIVMEATGKYHRLAHRTLELMGFVVMVINPYQSKHFANAMNLKCKTDKVDAQMLMCYAKRMEFIPTPCASPKEQALQELTRYLDDLKELKIELEARIRDNTGFIKSSLERNLKSIKRELEKTREKLKKEISESEPHTRKLNLLLSIPGVGETSAIYLISCLRELGQVNKREIASLSGLAPMNHDSGNSQGKRRVMGGRRDIRKRLYMPVLASATLNNNPRLRELYLRLVATNKPKKVALIACMRKLVIWANAVIATDKPWDDSYA

SEQ ID NO: 203860 - protein, 413 aa, unidentified
MEVIHTRCAGIDISKKDAKVCVRVQGSGSRATASTVTTWGSMTGQILELKEHLLAEHVSLVVMEATGDYWRPFYYVFEEELNVILVNAHDAKNVPGRKTDVSDSAWLADLGAHGLVKASFVPPPPIRELRDLTRARTVITRERSREIQRLEKLLEDAGIKLSSVATDITGVSARAMLQALIEGQNDPAVLADLAVRSLRSKIPQLTQALTGRFSDHHRFMTALFLHRIDAHSADIGLLGEQIDEVMEPFRAAGELLVSIPGFSNRIAEVFVAETGADMSVFPTAAHLASWAGVAPGSNESAGRVKSTKTRPGNCYLKGALGIAALSAIRSKDTYLSAKYRRIASRRGPMKALVAVEHSMVVAAWHMLTTGEFYRDPGADYFTQRTPTKTKTRAISQLESLGYHVTIEPFKEAG

SEQ ID NO: 203861 - protein, 338 aa, unidentified
MALYSGIDLHSTNCWITIIDKERKVIRETKVGNDLETILRFLAPDRAEIEGIAVESTFNWYWLVDGLMDAGYQLHLTNTWAIKQYEGLKYTDDRHDARWLAHLLSLGILPEGFIYPKQERVVRDLLRRRTFLVHKRASFLLSMRGAFECRTGMRTTSDDVKKWTSADVEQYIDDPLAALGITCLLEPMAVLSDQIKILEKEALKRAKVRNEFRRLQSVWGIGKILGLTIMYEVGDVGRFAKVGNFASYCRLVKSDRFSNGKRKGSGNSKNGNPYLSWAFSEAAHFAVRYYEPAKKFVQRKRAKTNGIVAIRALAHKLARASYYVMKDQVDFDPDKTFS

SEQ ID NO: 203862 - protein, 377 aa, unidentified
MTGRLFEALVGMLAEWFGHHPKEKRMSAYAGLDVSLNETSICIVDSQGSLLLESRVASEPEAIAQSLNSHAENLRSVGIEASALGGWLQRELTALGFEAIVIEARHTHVSLSSMRNKTDRNDARGIAQLMRLGWDKVVHVKSPEAQRLRVLLGCRQLASRKLVDVENEIRGVLRAFGLKVGSVSRGRFAARVLSLAEQAGALIEEVVQRMLAIRGTLLIEYRRLHQLVVKATVLDPVCRRLRTVPGIGPVAALAFRCGVDDPHRFKRSRTVAAHFGMTPRRHQSGEVDYTGRISKCGDREVRQALYNAAGSLLRRSRKASPLRTWGLRIRKRSGMKKATVAVSRKMAVIMHRMWLDGTDFRCSNDPAAAALAPAASA

SEQ ID NO: 203863 - protein, 346 aa, unidentified
MDHFAGLDVSVKETSVCIVNDTGRIVREVKVASEPEALLAVLKNPAYHFERIGLEAGPLSQWLFSALAEAELPVVCVETRHMQAVLKAQINKTDRNDARGIAQMIRVGLYRPVHVKTLRSQKLRMLLTHRKLLQSKAIAIENDLRGTLRNFGLKVGMVGKVRFEARIQELVENLPDLAELVEPLLIVRRALREQIVILHRRLLAIVRDDEVCRRLMTTPGVGPVVALTYRATVDVPARFRKSKSVGAVFGLTCSKYQSGEIDRSGSISRCGDEMMRVMLYEAAQSMLRSKKWSWLKAWAMQIARRRGMKKAIVALARRLAVIMHRIWVDGTEFRWTREQAAVAAAA

SEQ ID NO: 203864 - protein, 403 aa, unidentified
MVTQIENYDQVDVFVGLDVGKGEHHAVALDRAGKKLYDRPLPNDERRLRAVLADLQGHGVVLLIVDQPATIGALPVAVAQAAGALVGYLPGLAMRRIADLHPGEAKTDARDAAIIAETARTMPHTLRSIQVTDEQVAELSMLCGFDDDLAAQITQVGNRVRGLLTQIHPALERAIGPRLDHPAILDLLQRYPSPAAMRAAGEKRVATRMLKHAPRKGRDWAHEIIAALGEQTVVVTGTNAAAMVVPRLAAQLATLRKQRDDVAAEVEKMVDAHPFQPVLTSMPGVGVRTAARVLTEVAGKHFPTAGHLAAYAGLAPVTRRSGSSIRGEYSSRRGNKILKNAMFLSAFAALRDPESRAYYDRKISQGKRHNQALLALARRRCDVLYAMLRDGSLYQPSPTRLVA

SEQ ID NO: 203865 - protein, 350 aa, unidentified
MLHAGLDLSRNRLDVCLLSEHCEVLAQFAAPTDADGLRGLVRRVGGYGLPVRGVIESMTGARFVHDTLEQFGWEVLIADAQKVKGLAPLACKTDKIDARVLAVLSHRDLVPAIWLPDPRVRAEREQARFRLHLVKHRSMLKHRIHSTLITFGHPCPVSDLFGVAGRELLDRIAIPPPWRGTVDASLGLIEDLERQIDDINHQLRSSGVDQRYVPLLLTVPGIAWVLAFTIAAEIGDIERFATAKKLVGYTGLCPKVNQSGDKDRRGPLSKHGPKYLRWAMLEATMHALRHPVYSERYQHNKQRLGRQRGAKVAQIDIARRLTEAIWHMLTTNQPFNPTAAAGGAALRLAA

SEQ ID NO: 203866 - protein, 415 aa, unidentified
MHQQQFAAYVGIDWGDRRHSVHLQVAGDHNTESFELEQKPEALHEWVARPLERFQGRPIAIAIEQRKGAVIHALMMYAFLVLFPINPKALARYREAFLTSGAKDDPIDSELLLDFLSHHSDRLRAWIPDSEPTRKLQTLCEQRRKLVNRRVALTNRITSLLKQYFPQALDWIGDIASIQTCDFLESWSTLDAIQRVSPEIVQSFYRRHNCRKASVISERLAQIARARPLTTDSAIVEPYSLIVETSAGHLRCLLHAIQRLDKRIAELFAQHPEHDLFDSFPGAGPVCGPRLLTVFGTDRSRWTSAVELQSHSGIAPVTEKSGNSCWIHHRLACAKFVKQAFHEFADQSIRYSAWARAYYDLQRSRGKDHQAAVRALAYKWIRIIFRCWKDSKPYDEATYIRSLRRRGSPAVEKLP

SEQ ID NO: 203867 - protein, 449 aa, unidentified
MKTLPVLNPNAAGIDVGSEQFHLSIAGDAPVVFGTFTDEVYRLRDYLKAQQVTTVAMEATGVYWLYAYAVLEAAGLEVVMVNGRHVRHLPGRKTDMADCQWLATLHAHGLLRGGFVPPAAIRRLQDYQRLRSDHIMGAGSQVQKMQQALERMNIKFHDVISDLDGVSGLKVVRAILAGEREPLTLLLLCDPQIQRKKRERVLQSLKGTWAPEHLFALGQGLAAWEFYQKLLGECDQQIQVVLRELAGPEPPRSGRGETGPTAGKKPGKNAPHIDQLHQLLVRRCGGRDATAIGGIGDDLLLQLLAETGPDLKAWSSEKHFVGWAGLAPGSRQSGQRKGSVKVQRNRTGRLFCAGARSLVNSVDQALGGFYRRLAARKGGLVAMKALARKLAELYYRVLRYGLAYAEKGLPVYEQKYAESQRRLLAKLATKQGFKLVALQIEANPIGVSV

SEQ ID NO: 203868 - protein, 369 aa, unidentified
MAKSITYVGLDVHKDTIAVALAEAGLRGDVREHGKIPNTPAALKALTVKLAAAGRELRFCYEAGPCGYGIQRQLTAAGHECAVVAPSLIPRKPGERIKTDRRDAINLAKLHRAGELTPVWVPDQAHEAIRDLVRARQAAVRTLRQARQQLSGFLLRHGRHYHRPAWTQLHRRWLAGLKFDQAVHHIVLEDCIAAVEAAMARRDRLEAHIEAVLPEWSLAPVVDALQALRGVRLVAAATLVAELGDITRFTNPRQLMAYLGLVPSEHSSGRTRRQGGITKAGNGAARRMLIEAAWSYRFPARIAREQLLRQERLAKPIRDIAWKAQERLCRRYRKLARAGKQPTVITAAIARELAGFIWAIAKRVQPMAT

SEQ ID NO: 203869 - protein, 341 aa, unidentified
MKKFIRIAVDLGKRYFQVHCLESEGGLSISRKLKRSKMLEFFSQIERCRIGMEACGSAHYWARELVAMGYEVVLIPPAYIKPYVKRGKNDAVDAAAICEAMSRPDMRFVPIKSADQQAVLMLHKTREMFVKQRTMSVNALRGHLAEFGIVVAKGIGRIDELLALAQSDAALPPVAKSAVAGLAQHLESLDQSIEAVEDEIARAHGQNPTSRLLDEVPGIGPLIASVIAASVPDPGVFKSGRDFAAWLGLTPRQNSSGGTEKLGAITKQGNRYIRKMLVTGSTSVLRVAGKRKGALADWINALRTRKPERVVAVALANKLARTCWAIMTTGESFRVDTYVKA

SEQ ID NO: 203870 - protein, 313 aa, unidentified
MAKIICGVDVSSFSLEACIGPAGPTHSFPNTAEGIVELIAFCRQHGVELAAMEATGGYEKQPFALLWAHGLPVALLNPRAVRRFAEGMGLLEKTDRLDAGVIAWFAAVKRIAPCAPLSAEQQRLKALVTRLRQLTELQSAQRNQRLLVSETMVLSSFREVLALVASQIRTLEAAIAALIAADPLWQKLDEAFRSIKGVADRTVARLMAEMPEIGTASNKAVSKLAGLAPLARDSGKHQGKRMVRGGRRDVRAILFVVAGVVRRYDADFAAFHQRLTAAGKPKKVIRIALAHKLLVRLNAKARQVRNEFAALTA

SEQ ID NO: 203871 - protein, 498 aa, unidentified
MGECHFCGFRAAAAANDKPESGMAKRTGPASGRRKTARNAERRKRAKKEVRAVLGLPVLHADTAGIDIGATEIYVAVPADRDEEPVRCFEAYTGDLRGIAEWLGKCEVKRVAMESTGVYWIPLWQILADAGFEVCLVNARHFKNVPGKKTDVEDCQWLQFLHSVGLLRGSYRPEQAICGVRTLLRYRLELIRFAAEHIQHMQKALEQMNVKLSHVISDLMGVSGLAIVDAILSGERDLQKLAQLRDPRVRASEETIMKSLEGDYRPEHLITLQHSLDLYRHYQTKIGELDQKMETFMSELPDRIDIRKFPMPPRRKKSRAHKAHNAPAFGLRTHCYRILGVDLTAIDGIDEITAHTVVTEVGPDLSAFPTESDFAGWLRLCPNNGISGGKVLSRATRKGKGRLAVALRNAAATLYSSQSPLGEYFRRMKAKMGPAQAITAAAHKLARIIYHMITKGEAFDPEILARQDEKQQQKKEAKLRRQAKECGFELVRMQAAQA

SEQ ID NO: 203872 - protein, 370 aa, unidentified
MQFIGIDLHTNKFTCSYRDENSSVDAKKGKRTETFDLSERGLAAFYQTLTDETYILVEATITTFSFVRLIQPLVKEVVVANTYELKQISLARTNTDKIDANILSRIIKMQVLSGEQAVSPVVMPPEGIQELRSLFSTYRLYRKQTTQMKNRIHSLLKEKLYGFTQEEIFDKKSREKIRKIEHNTTLSFQLNELFTILEFMEAHLEPMKEQILAQAEPYMKEIEILTSMKGISVFIAIAIIADIITVNRFKNSKTFTSYLRSAPRVSNSNTSKSVLGTNKKGRKLSATLIVQPLHHMRAASPKINRWYNELIQYKKPGLVRTGLRRKVFTEIFYMLKKGEYHYWRDKQNHELKMSQYRIFLKKRKILLEIA

SEQ ID NO: 203873 - protein, 456 aa, unidentified
MPRSKKPRGRSQRQLSTINPDAAGIDVGSTSHVVAVPSDRDDMPVRTFRTFSGDLHQLADWLKEVGIQTVAMESTGVYWIPVFEILEARGFEVLLVNARDVKHVPGRKTDVNDAQWLQQLHQHGLLRGSFRPRDGVVRLRAYLRHRERLVDYAAAHIQHMQKALMQMNVQLHHVVTDITGLTGMRIIRAIVSGNHAPELLAAFRDRRCHASEDTIRQALIGNYRPEHVFALRQALELYDFHQAKVAECDVEIEAVLCRLNEQRVTPGAPLPSVRHSKGRNEPKFDPRPALYTLLGADLSQIHGFGPYTVLRLVAECGDDMSKWPTAKQFTSWLSLAPGNKISGGRLLSSKTRRSSNRAAALLRIAAVNIGKTQTALGAFYRRLAARIGKAKAVTATARKLAILFYKALRFGMVYADPGVSYYEERYRQRVIHNLHRRAKSLGFTLVANTPVSEGVS

SEQ ID NO: 203874 - protein, 370 aa, unidentified
MTRMPTSTDRSQDRTVVFAGVDTHKELHVAAVIDTTETVLGTKSFATTRSGYRALVAWVAGHGDLVRIGVEGTGSYGAGLTRSLAKAGITVLEVDRPDRSDRRRKGKDDDLDAISAARAALHNHRTTIPKSKDGAVEALRILRVTRAHAVRERRSALQLLRMSIISSPDELREQVRSLTRMQLIRTLAAWRPDVSNATDPVTAYRVSLKTLARRYLELTDEIVGLDELINPIVEALAPTLLERTGIGIEVAGQMLVTAGDNPERMKSEAAFAMLCGVAPLPASSGMTQRHRLNRGGDRQANRALHLAVISRIRLDPTTQAYVAKKTAEGHSKMEIIRCLKRYVAREIYFLLNPGRQHIRPNTHRQRHITT

SEQ ID NO: 203875 - protein, 347 aa, unidentified
MKRIAIDLAKSVYQVAESIHVGRVDRRRRLDPEAFWRYVQEQPAPVEWVMEACGTAHHWGRLMQAAGHRVVLLHPRYVRAYRRRSKTDRNDCDAILEAARCEGIRPVPVKSVQQQQVQHLHKMREAWKKTRVQRINLLRGILREMGVAAPNGTQAFLRQACELIERPEVCALRGALQVLLAEISLYEQSMRECEEQLARWHAEDEIVHRLDEVSGIGLLTASALKTAVGKPERFASGRHLSAWLGMTPNEYSSGERRRLGRISCKGNVYVRTLLIHGARAALLAAKRCQARTPQRLTQLQRWALQTAERIGHNKAAVALANKLVRICWAVWCHERRFSGDWQSARPA

SEQ ID NO: 203876 - protein, 384 aa, unidentified
MKTLHQRCAGLDVHKQDVVACLRLATKGRVHREVRRFPTTTRGLLELAAWLEAARCTIVAMEATGVYWKPVWHLLDGSFELVLANAAHIKGVPGRKSDVNDATWIADLLAHGLIRASFVPPQPIQDLRDLTRTRKQLSREIVRHTQRLQAVLEEANVKLASVITDILGASGRRILKAMITGETDPSHLAELGSRRLGCSRDTLVEALDGRVRDHHRFLLDQHLKTIEQLEETMAAFDARIEAALAPFRDTVERLTQVPGLSTRAAEVVIAEIGLDMSRFPTAGHLLSWAGLVPALDESAGKRRSTRVTKGAPWLEPVLVQCAWAGGGRRAATSRLSSCAAPRQRADASCSQSQAAIGRRRKRANRSAVSALRNRNSISVAERNP

SEQ ID NO: 203877 - protein, 404 aa, unidentified
MEKIYVGIDWADDHHDIHVTDDTATVLGSFTIPHSCEGMAKLENRVGKCCTNREAVLVAIESHQGLLIYALLEAGYTVYPINPKAIDRYRDRYRMSLSKSDPKDAMVLANILRTDLHLYKPLPRETAADARLRQLTRAHKSLGQQKVKILNQLTAQLKSYYPVALRLFSRLDHNITLAFLEQFPTPDKATAASLEDLRGFFHEQRYSHQWRADSIYESLQQPSLRAPTELEEIHQAIVLSLISILRSLVGEIEKLASKISEEFKHNPSHEVFSSLPTGELTAARITGELGSDGARYPSREYMQTAAGTAPVTRRSGKIVMVFFRWQCNKHLRAALQDLARDSVKRCAWAREYFAGQMRLGHKPSRAYRALANRWAAIIWKMLQTGQCFDQSRLDKHRAKPVSTN

SEQ ID NO: 203878 - protein, 411 aa, unidentified
MKRIYRRCCGIDVHKATLSACVRVRRHGKLTEEIRTFGTTGEELLALRDWLSSHRVSHVAMEATGVYWKPVYYVLESDVTVLLVNPVDVKRVPGRKTDASDCAWLAELLEYGMLEPSFVPPPAIRELRDLVRHRTELKHDHTRIANRLHKVLQDADLKLSSVMTDILGVSGRQILSQLAAGHSDPAALADLARGRLRAKLPALRQALGGRFSEHHAFRLSHLLADLDYLEESMSTLAERIEQKLAPFAEELDRLSTIPGVKRNNAAVFIAEIGIDMSRFPTDAHLASWGGMAPGNNESAGKRRRAKARRGNRWLRAALVESGHAAGRTRDTALAAIYRRMTVHKGRKHAAFVVGRHILTIAYHLLAQHTTYREAGAAYLQQRRAEHAKRRCLDQLRALGFQVTLTPLPKAA

SEQ ID NO: 203879 - protein, 384 aa, unidentified
MEEIPQPIGKAEAEPEFAAFMAIDWADQKHYWSLQVVGQKGLQRGTLDNTPEAVEAWIAELRMRLGERPLAMALEQRRGALVVMLSKYAHVHLYPVHPTTLAKFREAWYPSRSKSDPSDADLLLEILTTHRSRLRRLDPDTVEIRLLQNLVENRRKLVDERTALSNRLTDLLKLYFPQILGWFFDVTSVVVGDLLEQWPSLQDLQQAKRAKLEKFLRDHHCSDMEERLLQIRQALPATHDRALLDSAPYQVAAWVRQMAVLRDSIRQLEKRIAELAAQQQDWHIFQSLPGAGAALAPRLMVALGTQRDRYSSASELQCFCGIAPVKEASGKTQWVHFRWAAPKFLRQSFHEWAACSIAQCEWAAAYYQQQKARGKSHGSGANWP

SEQ ID NO: 203880 - protein, 312 aa, unidentified
MDAIVIVGIDVSKDRLDVAVRPGGEAFFVRRDGNGIAALIERLGPLGPAAIAVEATGGFETVVAAGLAGAGLPVIVVNPAQVRAFANALGKRAKTDPIDAGVIAHFVEATKPAIRPLPDEETQLLADLVARRRQIVAMIGAERQRQKRAPARIARSIVRLVKALEKELASLDDDIDDAVRGSPTWCDKEDLLASVPGIGKTIARTLIAELPELGSLDRRQVAALVGLAPWTRQSGQWRGKSFIGGGRAAIRTALFMGALVAARHNPTLKAFRDKLVAAGKPKLVAIIATARKLVTILNAVIRDRQPWREQTA

SEQ ID NO: 203881 - protein, 368 aa, unidentified
MGQKSSKLYIGLDVHKESIDIAVAEEGGEVRHYGQIAGDTNALARTVRKLESSGRRLVFIYEAGPCGFGIYRGLIARGHVCWVVAPSNTPRRVRDRIKTDRRDSVKLAGLARAGELTPIYVPDVCDEAMRDLVRAREDAVVMQRQARQRLVALLLRNDVRYPGKTAWTAAHRRWIADVRLPQPAQRLAFEEYVQAVEEATVRVERLSGYIAQEVAQWRWQPVVHALQACRGIQLIHAVRIVAELGDLSRFNHPRQLMSYLGLIPSEDSSGERRRQGSITKAGNGSARRALVEAAWAYQYMAKVSGLIARRQVKVPKAALDIAWKAQVRLCARFRRLAARGVSRNKIVVAIARELAGFVWAIGQQVKPV

SEQ ID NO: 203882 - protein, 352 aa, unidentified
MTRITTIGLDLAKKVFQVHGVDAEGKIVVARKLRRKEVLAFFGKLPPCLVGMEACGSAHYWAREITKLGHTVKLMPPRYVKPYVKRGKTDPGDAAAICEAVARPTMSFVPIKGVEQQGLSMMHSARSQLVGQRTQLINAARGHLSELGIVAERGLLGFAELAAIVRDESDRRLPVTARSALIVLVRQIEMISTEIAALDSIVRKENKASELGPRLETIPSVGPVIASAFRARVTDAKLFKNGRHLSAWIGIVPENDSTGGKVKQKGLSKKGDRYLRSLLVNGAMAVVQQTQKRPDKHPWVAKLLGRMSAKQAAIAIANKTARIAWAIMVHGGVYEAGHRAPLYRAQACAAAG

SEQ ID NO: 203883 - protein, 440 aa, unidentified
MTAVMMIGIDPHKGSHTAVAVSTGEQPLGRIRVKACPSQAAQLVAWAAAWPERAWAVEGAAGLGHLLAQQLIAAGERVLDVPPKLAARVRLLDAGDTNKNDPNDALSVAVAALRSKAPRLVLAEDYAVVLKIWSKRHRDLARARNQAACRLHAVLCDLVPGGIGRQITAAKASRILGQVTPPDAVSEARCQLAADFLADIRCLDAQLREVNKKLTAAVKACGTSLTEVFGVGPVSTGTIIGDVRHVWRFPSRHHFAACNGTAPVEVSSGGRKVYRLSLRGNRRLNHAIHMAAITQIRHKHSDGRAYYDKKIAEGKTCKEALRALKRRISDAIYARLVADARQAAAATRPEGPGGQPGNHAVSRAAGSHPARRLFGQATPRPRHHTTATARIPGRAGHSSIAATLPSAKPQVQVERPQRSEDERPGGAARRRPYSAARKAR

SEQ ID NO: 203884 - protein, 353 aa, unidentified
MTSLTDLREVVDVVIGVDTHVHTHSAAAVNATTGGVLGEITVDATAEGYAALVEFAGEHATLRAWAIEGTGGHGAGLARHLAHRQEIVVELDRPKRAKRRNGAKSDPLDAIRAAREALARPRLGTPRSGGDRQALSVLLAARRSAVNASTEAQLQVFSLVIAAPEPIRARFRGQKLPGMLTTAARLRVQSSWDVETTTTVLALRSLARRFRALTKEAAEHEKAIRAIVRSWRPDLLEEFGVGPIVAATVLCAWSHRGRIHSEAAFAMLAGVAPIPANSGQVTNRYRLNRYGDRQLNRALHIIVQSRIRYDGPTRDYVARRTTEGKTGREIKRCLSRYIARDLYRLLESGPITA

SEQ ID NO: 203885 - protein, 348 aa, unidentified
MTLVGCDLHARKQQVAVLDTTTGEVLEQELVHDGDAVERFYRALRPPVTIGIETTGYTQWVHTLMQRLGHTVIVGEAAKIRAMVVRKTKTDRRDARHLLDLLKHDRFPSVWIPDGDTRDRRTLVAHRVRLVRMRTMVKNGLQAIALSQRLALRSKLWTRPGLAQLQALPLPAHTARRRDDSLQLLAWLTARIDQLDDQIATIARHDPRAQLLLTHPGIGPLTALTTVLILGPIARFPDSKHVVSYVGLAPAVAASADKQRLGKITKQGSALLRWVLGQAAPLAARADEDLRRRYFSVLHRRGRPKARVALARKLLVRLYVMLRDHIDYAEFRRRGRSPRPVQATASAM

SEQ ID NO: 203886 - protein, 337 aa, unidentified
MKSMKSMKMDDIIQKLYIGMDIHEDYITGTAMGKDGVLEFSGNFRNTKEAAQCFLSGIPSPQVIIAVEACGLWRGVYNMLTDLGYCVVLANPYKTHQIVGAKDIDKVNSETLADLLRTGYLPQVYIPTEDVFLLRDAARHRKRLVDVRTQLKCMTRSYLMREGTKCPKGWSKESMEFFRNANPYTAHFINIIETINEQVKQINKVIKGIACNTSLSNLLQTVPGIGAFSSVMILGEIGDIKRFSHPKKLVKYAGLCPGIYQSGSKSYSVKDKACNKYLKWIMYECSGIAARMDTKYQKHYWRVKRRKSQQVARRSTARRMLTDVWFMLTHEKEFTPS

SEQ ID NO: 203887 - protein, 344 aa, unidentified
MNKYAGLDVSLEETAIAVVDESGRVVREGKVASEIEAIDGWLRASGAVIVRLGLEAGPLSSWLYAGLRACGWPVVCIETRRLRAVTQAMPVKSDRKDAEAIAQVMRTSWYRPVHVKSDDSQRLRVLLRHRQILQAKRQDIDNELRGTLKAFGLKLGKVGQAGFAARVMELVAGEPWLERLTQPMLAARAALRQSFAELHKLLLTIVREDTVCRRLMTAPGIGAVNALAYKTAIDDPTRFRHSADVGPHFGLTPRLYQSGETEYSGRISKCGDAMVRSLLFEAATALLHRVKAASPLKLWARRLAKKIGVRKATVALARRLAVIMHRMWVDGTDFDPELGRAAAH

SEQ ID NO: 203888 - protein, 426 aa, unidentified
MNCTQNYKIDQVTEQTLVVGIDIAKRTHYACFVDDRGRVLRKSFPIFQSKEGFQQLYKAIQGAMQAFGKSEVIVAVEPTGHYWLNLAYFLEEHGIPLVMVNPAHVCRSKELDDNLPTKHDAKDALVIARLAKDGRFLVPRLLHEIEADLRVGSTLKEKLRKEQTAVKNAIVRWTDRYFPEFWTVFRDLGKTALSVLEWTPLPADMAGRTVEELLEVYRQSEGMKCPQKAKIQALINTAKDSIGVTEGTAMARFEIAALVRRYRQLEAEIAALDAELKALVQTTMEYQWLKTVDGLGDATIIDLLAEIGSFAHYRDPRQLVKLAGLTLKENSSGQRKGQKHISKRGRKRLRSVLFRAMIPLIRHNEAFRELHEYYTTRSVNPLTGKQSIVVLCRKLLNVLFAICTKKQAFDAERMKQDVLSQVQRAA

SEQ ID NO: 203889 - protein, 309 aa, unidentified
MFSCAGIDVSKDSLEVWINSQGIGASFPNSASGFPVLIDWLKGFEVTRVLLEATGGYERGPMKVLQRGGFDVLRINPRRAKDFAKAMGYRAKTDAIDARLLAEFATIIKDADSRITSAEQDNLRALVQQRENFVQQQSDDRRRIKTASVDSIKPLLQSHIDYLDQAIKSIEQLICQSAKDLDSEKIARLRSVKGLGLVTAASIMAYLPELGEVGRHEIAALAGIAPYNDDSGNHEGPRHISGGRFAVRRAMYMASWAVILRQPEFKARYDALRLRGKCAKVALIACMRVLLIRLNAMIRDQTEWREQAA

SEQ ID NO: 203890 - protein, 370 aa, unidentified
MLDTTTFVGLDVHARSIKAVSLDVMTGEVRAATFGYDAGAVAEWVRSVGPGARCVYESGVTGFDLQKRLSGLGVDCVVGAVSKMIKPSADRRRKNDRNDAEFLARMLSVGNVVEVWVPDDECEAARDLTRALEDARDDLSRSKQRLSKFLLRHGLVFDERTPTGRRKGNWTRAHWSWIESIGFAEGADNDVLAYYVDAVRRAAEEKARLEGLVEAEARKPRWRKRVDSLRCLKGVDTASAADLVFEAGEFSRFRNARSFAAWVGLTPSEHSSGESDRRGAITKAGNKHLRKTLVEAAWHYLTCSGRPKDLAKGQAPDPAARRHAAKGVRRLVERRGALLARGVHGNKANVATARELACWVWAVGLMAEEA

SEQ ID NO: 203891 - protein, 348 aa, unidentified
MVADSLDVVIGVDTHRDAHALALAAAPSGALLLEAVVEASTVGYRDALALAQAHAPGRRAWAIEGSGCYGAGLACFLLARGERVLEVDRPRREQRPGRGKSDALDALRAARSLLASEPLASPRRAGRREALRVLLATRESAVGARRCALNQLRALIVTCPEPLRAELRPLTRARLLGRLRGTRPRRHADSQLRGSLLAMRLLAVRIEALTLEERTLKREIRALVRELAPRLLAEPGVGPITAAHVLLAWSHKGRLRSEAAFARLAGAPPIPASSGKVVRHRLDRGGDRKLNRALHAIILTRRRTDPETIAYIQRRVSEGKSDREAVRCLKRYLARSLFRQLEAMPQAA

SEQ ID NO: 203892 - protein, 362 aa, unidentified
MSKTEERKRLCVGVDLHKTQFTVSALTEDGEVILQDVYRTTPDGYSEFIEEMHRYEEEDGCSIELAVETTGNARFFKNQMEKEFFDVTVVNTNKFKVITYSTKKTDANDALTLAMYLQKEMLPEAHLCSQTSEEIRRMLKTRRILVQSSVKIKNQIHGMLLGYGIETNAAQFQSKRKRQELMNDLANHYYSDFTASSLEVMLNILDVLAEQIKDVEAQIENMVEDNEDVELLKTIPGVGKIGAATIASYTEDLERFDGDFKRFAAYIGIVPSVHNSNETVHLGRITKHGPQELRTAFVQVALGMIRLSKQTSNWRLIEDYRRKKTDKGSGRAIIAMTRKIAKIVFVMLENREPFNPELMLSK

SEQ ID NO: 203893 - protein, 315 aa, unidentified
MEQSLSSPNFVGIDVSKDRLDVHVRPSGQSFAVTRDGKGLDRLSIDMAALSPALIVMEATGGFEITVAAALGGAGLPLAVVNPRQIRDFARATGQLAKTDALDARIIALFAERIRPEPRPIADADSQTLAELVARRRQVVEMIGMESNRLRQARHARVQRTIKVILKTLEAQLAELDRNIDDTVRGSPIWRAADDLLTSVPGIGEVTSRTLIAELPELGHIDRRRIAALVGVAPINRDSGQMRGRRMIAGGRTEVRSALYMATLSAARWNPVISQHYKALVERGLPKKVALVACMRRLPGILNAILRTQTPWQSA

SEQ ID NO: 203894 - protein, 429 aa, unidentified
MAPGAVDVERRGRKGTHMDRVVERCCGLDVHKDTVVACVRTPGKGGKRHQEVKTFGTTTASLLELRDWLTAERVTLVGMESTGVYWKCPFYILEDALECWLLNARHLRNVPGRKTDVGDAEWICQLVEHGLVRPSFVPPKPIRELRNLTRYRKAQIEERGREAQRLDKVLQDAGVKLSSVATDIQGKSSRAMLEALVDGERNPQVLAQLALGRMRKKIPDLEEALVGRFGAHHALLVRTILAKVDFLDRAIEGLSEEIDRVIAPFEAEVDLLRTIPGVDRRAAEGIIAEIGVDMSRFPNSGHLASWAGMCPGNHESAGKRRGGHSRKGSKWLGALLAETASAAGRSKSTYLGAQHRRLTGRIGYAKANKAVAHSILVACWHILSKATPYEDLGDDWFIRRRPEAHARRLAKQIEALGFDVTVTPAKAAS

SEQ ID NO: 203895 - protein, 434 aa, unidentified
MKVTRGMRRRSAKLERRAQLVTPDTLIAGVDLARKESVVVFVRARDKVRVGRLRIPTTADGVRTLARRAGELQRRHQLPRLVLGMEACSHYWKVVAKAATEIDLPYLIVQSFVLARAREFDDLTRDKTDPRDAALIADLVAELRFVDARLETGVWAELRLLAEERNERGVERRAALQVQRAFLELVWPDLLQQMPELAGTHLQATLRLGLTPLEIAALPLDEFTRRLREEHRDRRFLRWMAQRVWNAAQAATDADEMTAAILRIQFAAERVLAAERMVEIIDRRMLAAFERTGLGWLRGQIRGLGDVSLINLLALTGDLRRFDDARCLPKLAGSNPTERSSGQSHAPGGIHRRGRKGLRLLAYQAAVCLVAHHPDFRQRFLALTQREHHRLEKRQAYVAVANKLLRTLWAMATSGRAYDSQVALGLTRGEVHAA

SEQ ID NO: 203896 - protein, 355 aa, unidentified
MNCQKYIGLDVHQATISVAVMDPTGKLVMECILETKASTILEFFAGLRGSLSVAFEEGTSATWLYDLLKPHVARVVVCNPRKTALLKHGNKNDRIDAGKLANLLRLDNLEPVYHGQSGVRTLRELARSYLTIVKDLSRVKNRLKALYRSWAIPSGGRDVYYTRHRSQWLEKIPQAGTRRRAEHLYLQLDMLQHVRQQARREFLAESRKHTITAKLRQIPSFGPIRSALAVALIQTPHRFRSKRQLWKYCGLALETRVTGEYVYVHGERRRSKKQVSIRGLNKDHNHDLKGLFKAAATRASVKPGPFQDFYQRSLAKGIKPTMVRLTLARKIAAIKLTLWKKGENFDLEKLKSQAA

SEQ ID NO: 203897 - protein, 397 aa, unidentified
MKQDTKGQAVAEWDARQSDRKYVGLDVHKATIAVAVADEGRGEVRSYGTIKNTPAAVAKLVKRLGPAERLACCYEAGPCGYGLQRQLTGLGAACRVVAPSLIPTKPGDRIKTDRRDAVKLARLLRSGELTSVWVPDAEHEALRDLSRAREAARDDRQRARQRLGKLLLRLGIEEPGETQRWTQRYWAWLRAVKLEQPLQQLVLADAIETVDAGTARLKRLEGQLKGAATTGRHAPLIAALQSLRGVGVITAVTLLAELGDLRRFPTPRPLMAYLGLVPSEHSSGGSQRRGRITRAGNSHVRHVLVQAAWHYRHAPKVTRALEQRQAGQPEAVTDVAWRAQERLHARYRKLAGRKGRQKAVIAVARELAGFVWALARAHADHQAADVPQAPDAAEATA

SEQ ID NO: 203898 - protein, 391 aa, unidentified
MPQPNDLSRSLTALDQDSTLIAVVEMSQSSWLVGAIIPGVERRPAKKLEASEGMLLALLHRWRDEAAKAGCTIDRITVAFEAGRDGFWLARWLRQRGIEAHVIHATSIAVSREHRRAKTDRLDAALLQRAFLGWLRGERGHCTMVAIASLAEEDAKRPSREREALVGERTRIGNRMKSTLARLGIRGIRPGLRKAAERLEQLRTPEGAPLPPNTLAELRRDLARLRLINDQIGEIEAARLERLRQQPDEARHPMILLLARVVGIGIETADMLVQEVLSRKLRDRRAVARYGGLTGSPEESGARRREKGLARAGNARVRRGMLQLAWRFLMFQKDSALAQWYRARTADARGATRKTMIVALARKLLVALWKLVTTGELPNGVVLRPAIQAAL

SEQ ID NO: 203899 - protein, 334 aa, unidentified
MAKNVFQVHGVDRQEKALWRRRLTRENWVKVLAERAEPGCEIGMESCGGAHHWARKLRAKGFTVKLIAPQFVKPYVKSHKNDANDAEAICEAMSRPGMRFVAVKTVEQQDIQAVHRVRSELSKQRTAKANQIRGLVSEYGLVAPKEIVHLRRALPRWLEDTENGLSERFRLLLNGLWGDLRALDERMVELDREIALIAQSDPVAKRLQQLRGVGPVIATALVAAAGNGEPFANGRQMSAAFGLTPRQHSSGGKERLLGISKRGDAYLRSLLIHGARSVIRTAKGKEDRLSQWITRLAARRHPNVVVVALANKTTRMAWAMLRNETDYQPDLVRG

SEQ ID NO: 203900 - protein, 338 aa, unidentified
MKVHVLGIDLAKNVFQLHGVDRKGRSVLIRRVRRDQLLKVIGELEPCLIGIEASTGAFYWQRQFEKLGHAVKIMAPQYVKPFVRRQKNDTNDAEAICTAVQQPNMRFVPKKTLEQQDIQALHRARQRLVNHRTALISQMRGLLLDRGIAIAVSATQARRLIPKILAAPNDELTVLMREIVSSLYAFMLQIDERIRAFDRKIDAIFKASEVCQRIAKIRGIGPKTATAMIAAIGDGSDFKNGRHLAAWLGLVPRQHSSGDRRVMMGISKRGSQHLRTLLVHGARAVVRTAVRKTDSRSMWVNELRQRRGYNRATVAVANKNARIIWAVLTSGEPYRSAA

SEQ ID NO: 203901 - protein, 345 aa, unidentified
MKKVVAGVDLHSNNLVIGIMDMDGKRLASQKLDCDLRQVVKFLAPFKKRLEKMAVESTYNWYWLVDGLKALGYPVVLANPAAMEQYSGIKSAGDTHDAFFLAEQLRLKILPTGHIYDAELRPVRDLLRRRLLLVHQRTALMLSFKSLYTRTTGQEMTLSGLKELEIKEAQELYDHPANQMIAGMQIKHIDHLSESIEKIEKAVLASARELPFYSKLTSLPGVGRILGMTITMEVGDIKRFADAGNFASYCRTVAAQRTSNSKKKGENNSKCGNKYLAWAFVEAANFARRYDEQCRQWSDRKAAKTSKVIATKALACKLAKAAWYVMSQGSDYDAERMFGQPATAK

SEQ ID NO: 203902 - protein, 386 aa, unidentified
MPQHNDLSRSLLTLDQASTLIAVVEMSQSSWLVAAIVPGIARHPLKKINPDETMLLGLLRRWQDEAAKAGRIITRIAVAYEAGRDGFWLARWLRARGIEAYVIHPTSIPVSREHRRAKTDRLDTALLKRAFLGWLRGEPGHCSMAAIPTLDEEDAKRPSRERETLVSERTRLVNRIKGTLVRLGVRGFHPTLRTAPERLEAVRTPEGAALPPNTLAELRRDMARLRFVRDQIKEIEQTRIEQLEQAPAAGPQAMVRRLARVIGVGVETADMLVHEVLSRNLRDRRAVARYAGLTGAPDESGAKRRERGLAKVGNARVRRGMLQLAWRFLLFQKESALAQWYRARTADAPGGTRKTLIVALARKLLIALWRMVATGEVPAGVVVRIA

SEQ ID NO: 203903 - protein, 412 aa, unidentified
MNQDKLYVGIDVSSKNNVCYLMYSDGSKHSSFSVPNNRNGAKIIVDRVTSVLLLQDIPKVVIGMEATSVYGDNLMRFLRESGSLGRFERSLHMLNPKQVKKFRDAYSDLPKNDYVDSFVIADHLRFGRINKEVYMDDYKYQALKMYTRARHQLVQELTREKQRLLNTVFISFSGLTQEKIFSDKFGATSMALIEEFSSLDELAYMNTDELADFIRKHGKNHFENPEEIAEAVQRAAKNSYRPPQVIADAAKQMIVISMNTIRLLQKQIKEYDKAIEKMLEMIPQTLTSIKGIGNVYAAGIIAEIGDINRFPSQASVAKYAGLVWTQHQSSDFEAEDKRMIQGGNHHLKYYLCEAANALRRCDPEFKRFYSLKYKEANKHNHKRALALTARKLVRLVYTLLKTNRLYIPPEEY

SEQ ID NO: 203904 - protein, 319 aa, unidentified
MLSYCGVDVSKDRLDVAVLPQGQSWSVTNDAAGWITLIERLREFSIEAIGLEASGGYERGVARALCAAGMSVRHVNPYKLRQFARASGVLAKNDPLDARMIASFVAVMPTRSAQRAPEADQLAEILAVRRQLSAEKIAAENASRLLEDAMLQRLSRRRIARLAADIALLDKRLIEIVTANPAFDQRYRLLTSVPGVGVVLACTLIALLPELGQLGRREIAALVGVAPYAFDSGKLKGARCIWGGRAPVRGVLYMAAMSASNWNPVFKAFHDRLRATGKKPKVVIVAVMRKMLTILNAMVRDDLVWADRCCGRHSVPAAR

SEQ ID NO: 203905 - protein, 362 aa, unidentified
MSQPKSVVGLDVHATQTHSCVLTPETGELHSKRLNGPPARALDHLEGLQAPVLAVYEAGPTGYGLARGGAERGLDVRVCAPGSIPKAPSDRIKTDRRDAERLARLCLAGELSFVRVPTPEEERFRDLARAREAIRADLMRARHRLGKFLLRRELRWEGPGSAWTGAHWSWLRSIEFSDGASEAVLGDYLSAVVSLEQRRSATEAVLEKLWPESPWAQTIARLRCLRGISTLTALGLCAEAGDLRRFDRPASLVAYFGIVPSEHSSGPQRRRGPITKAGSPHARRLLVEAAHHYRHRPAVSEGLKRRQQGVDPRAVEIGWRAQRRLHQRWGRLRIDRGKPANVVRIALARELGCFVWEVGQLS

SEQ ID NO: 203906 - protein, 356 aa, unidentified
MSDGSWVGLDVHARSVVAGVIDVGSGEVRSLRLPPGCDATVAWLTTLPAPVRVVYEAGPTGYRLARACAGAGISCVVAAPSRIRPAADRVKTDRRDAERLARLLRLGEITPVRIPTLEEEAARDLVRAREDARGDLMRARHRLSKLLLRHGLVYDATAWTRTHDAWLRRQRFQGGPLAIVFDECYGRMIDAKSRRDALDKAITELAATPPYVDVVSRLVCLRGVSTLTAFALTVELGDWHRFRPESLGPFLGLTPSEHSSGERHRQGAITKTGNSHVRRLLIEAAWHQRSPSRRSVTLERRRDGKPLAVQAQAERSGRRLHTRWHALEARGKPRSIVVVAVARELAGHCWALATME

SEQ ID NO: 203907 - protein, 391 aa, unidentified
MPMYFVGIDISKYKHDCCIISAADQQIVSKFTVKNDKDGFEHLLTTLNSLSNPEDIKIGFESTAHYALNLELFLENAHHSFMEVNPVLIKEYKKSTTLRRTKTDSVDCESIARWLITVEYKPHSKGFYHAYSLKSLTRLRDRLIRQRSFYLVKITNVLDHTFPEFKPFFNERLSKTALYLLENYGSAEKMARMNSASYDKLRCISRGKFSIQQFLRLKELASNTVGVNNSIFDLELNTLLTLYKSLSDEINTLETEIIKLIEEVHPHYMSIPGIGPISAAVIYAEYGDISNFSNPGQMLAFAGIEPGINDSGTESHGGRMVKHGSSQLRYVLLNACLPLIRFDLTFATYYEKKRAEGKKHRVAITHVAKKLIRVIYALERQDVDFNAQKLR

SEQ ID NO: 203908 - protein, 408 aa, unidentified
MDAFCGIDWAEDHHDIALVDRDGQLLARARISDDAAGLARLLELLAEHGDSPEEPVPVAIETPRGLLVACLRAAGRQVYPVNPMAVARYRDRHSVAGRKSDKGDALVLANILRTDLHAHRPLPADSELAQAVAVLARAQQDSVWDRTTAHNRLRSHLREYYPGFLAAFAAAKGGIMRPEARTILAAAPTPAGAAKLTLAQLRALLKKAGRSRGIDAEAQRLREAFRAEQMRQPPLAGDAMGRQSLALLRQLDAACTSADDLEQAAIESFNQHPDAGIITSFPGIGPLTGARVIAETGDDRSRFQDARGLKAYAGAAPVTRASGKTRSVTRRHVKNNRLAQAGYIWAFSALTASPGARSHYDRRRDHGDRHAAALRNLFSRLLGCLHHCLVTGQHYDETTAFPAQAAAA

SEQ ID NO: 203909 - protein, 360 aa, unidentified
MKQAHAGMPSICPRDFDLFAGLDVDKHSVATTVLKHEALVKSMKMPYDPNAFVQYLAKHFAGKRIALVYEAGPTGFGLYDALGESGHTCLVAAPANVPREAGRRVKTNRLDSVQLATALRGGTLRGIRVPSPLYRDLRHLAHLRQAHVGEATATKFRIKALLLSEGLAFPPAPPGSQWTDRVLKVLAAMSCPLTVRFTLDSLLETLALHQQQAQKVLAQMLQFCQENPELADSIRFLRSAPGIGPVVAVVLTAHVGDWRGLTRVREMGAFIGLVPCESSTGDQVDKGAITHAGDAYLRSILIEAAWTAIRQDPELRAFYRRVCRRHPRDRAARIAIVAVARKLASRLFCLLKERRCYLYN

SEQ ID NO: 203910 - protein, 276 aa, unidentified
MNEVITIGVDLAKNIFQVHGVDAEGGVVVRRQLRRGQMLAFFKKLPPCLVGMEACASAHHWARQLIGLGHEVRLMPPHYVKPYVKRSKNDATDAAAICEAVTRPTMRFVSIKSMDQQSVLMLHRTRELLVRQRTMLINAIRAHMAEFGIVAPTGVPRIKELLTVIADEEDLRLPSLARTCLESLVRQYLSLNDEIIAAEQRITRWHRSNEVSQRLETIPGIGQIIASALAATVTDPEVFKSGRELAAWIGLVPRQNSTGGKQRLGKISKQGDQYLR

SEQ ID NO: 203911 - protein, 389 aa, unidentified
MTLVSRCGNGAIDGNGLPGWVAVPHSDGVNGVRTGRPQASRRDRCGVFAAIDVSLELSSVCVVDGTGKIICEKKVASEPEALVAWFNDTGLEFTRIGLEAGPLSQWLHAGLTAAGLSAILIETRHVKAALKAMTVKTDRNDARGMAQLMRMGWFRPVHVKTVPAQEIRALLTGRKLLLGKLRDIELGIRGLLRGFGLKVGRVSKGRYEARIRGLTAGHPMLEPVAAAMLQARMSLRAEYGKLHRMLLGTVRADATCRRLMTVPGVGPVVAMSYKTAVDDPARFRKSRELGPYFGLTPSKYQSGEVDWTGRISKVGDAMVRTALFEAANVMLSRVTRFSTLKAWALRVAKLRGMKRAKVALARKLAVVLHRMWVDGTDFRWRKMPAAAAA

SEQ ID NO: 203912 - protein, 412 aa, unidentified
MKDLLEISCGLDVHKEKIVACILTGPLGKPTRSEIREFSTLIPDMIALRNWIVSKNCHHVAMESTGIYWMPIYEILEDAFSGDITLLVVNARHMKNVPGKKTDMRDSEWISTLLRAGLLNGSFIPEKRIREFRDLNRYRKSVIRDITSQKNRIEKFLQSSGFRLSSFISDIFGASGRNIILHLIEHGQIDKTALDSCLKTKTRNRIDEILMSVNGTLSEHQKAFLRILMTHYNSLKKHLAEIETSLEEDMAPFALQVEQLNSIYGISTTASCAIIAEIGIDMNPFKTAEHICSWAGLCSGNNESAEKRKSTSVTKGNPYIKSMLCEIAWVIAGKRNTYLSAWYWRIKQKKGAKKAIVALARKLLVIIYTMLKQGTLFDESCFETRRKNCEQKQLSRYIRELKKHGYHVKAQS

SEQ ID NO: 203913 - protein, 413 aa, unidentified
MSPKIYLGIDLAKGTSRVAAVDESGDEIVSSFNIINSREGVEKLLSKLYSYKKNLVIGMEISSNYWENMYSYLNSKDIKCILLNPYQVKKYRQALGSKIKTDSIDAISIAQLLRVKNYDALCVSDDKVLELRELVRIAHSFERRVKDLKKSVLALLYLTFPEYTKIISYPFSKVSMQILSKYPTSCHMAKDATVGRLVKIFRRYQGCNYSSDKAKELIACAKDSFYSGKASKSRGMSISMQIEEIGSLSGKIKDIEAEIKSILDPDDKKDGAGLDFDILNSIKGVGLGTIAAFIAAVGDVSRFSSSDKLISYIGFYPKIFESGKYKKQNPTIVKAGPKDLRYMLYMSSVAAIKHNICLRKYYHDMVSAGMPVKKALIKVAVKIARMMYSMLKNRQYYDSCRVFLQQSPAFVAA

SEQ ID NO: 203914 - protein, 314 aa, unidentified
MSKSLYFIGIDVSKDHLDVAIRPSDQQMQFGNDDEGIDKVIEALNPVSPTLIVLEATGSYHRLVLSRLIAAGLPAIAINPRQARDFARAIGRLAKSDAIDADVLAAFGEKIRPELRAVADEATQQLEAICTRRRQLVGMLTAEKNRFHSSPSSMRSLIKKHIQWLEKHIAELEKDLDDQIRSSPAWRDKDDLLRSCKGIGPTTSHTMLACLPELGQLNRHQIAALVGVAPFNRDTGLYRGRRHIQAGRTDVRCVLYMATLAAIRSNAVIRRFHQRLIAAGKLKKVAITACMRKLLTILNAMLRSNKPWNVEFVC

SEQ ID NO: 203915 - protein, 377 aa, unidentified
MKAPSTRPAAVLGLDVGKSSHWACLIDRDGEVLDSAPVRNREAELDALFASAPAGTLVVVDQFRNIGSLAVRRARAAGLGVAYLPGLAASRAAGLFAGEAKTDERDAAVIARTALGVPDSLSGIPGRGEALEAARALSSQRDHVVACATRDKNRLRAVLLESCPALEAAVDLSDRRWLELLAGFGGAWGIARSGAEGPRAEAAGEAAAASTAPPPALVEAENRQVRFLAARISEALDEAGALEAETAALLEGDETYACLLTVPGIGPRTAAQLAVSVDIGRFPDHDHLASYCGIAPRVRSSGTSVRSVRASRRGDARLKSLLIFSCNSLVRSSGRYGEYYRACRARGMGHGRALKAVARKRLRAIYAVMRDRVPYRE

SEQ ID NO: 203916 - protein, 455 aa, unidentified
MPRKTTDDRSGLKPVNFGAAAIDIGSKMHMAAVNPACTDVPVRPFGTFTQNLHDLADWFKACGVTSVAMESTGVYWIPVYEILEQRGFNVILVNARYAKNVPGRKTDVSDAAWLRQLHSYGLLRGSFRPDAEIATLRAYLRQRERLVEYAAAHIQHMQKAMMEMNLQLHHVVTDITGATGMRIIRAIVAGERNPDVLATYRDVRCHSSTETIRAALVGNDREEHVFALSQSLELYDVYQAKMLDCDRRLEVLIAALSNKGAKPVGRLSKPRIKTKQVNTPTFDVRTALYGVLGVDLTEIHGLGPSLALKLVGECGTDLRAWPSAKHFTSWLCLAPGNKISGGKVLSSRTRRSSSRAAALLRLAATTVGRSDTALGAFYRRLSSRAGKAKAVTATARKIAVLFYNTLRHGMSYMDPGADHYEQQYRNRVLANLQRRAKSLGFVLQAVPGNTNPAVS

SEQ ID NO: 203917 - protein, 413 aa, unidentified
MEHHLGRKQSGKKARHSLSLLERIQPDAAGIDCGAKSHFVAVRPDRDPQPVREFRTFTTELKRLAEWLKQCGVTTVAMESTGVYWIPLYEILEEHGFEVLLVNAHDVHNVRGRKSDVSDCEWLRELHSVGLLRASFRPAAAMVPLRSYLRQREILVEESSTRINRMLKALGEMNLRLDAVLTDVAGSTGLKIVRAILAGERDPARLAAHRDHRCHASQAELVAALTGNYRAEHLFALKQNFAAYEFLLQQLAECDSAIEALLKSLAAQQPPPASALPPARRKTRPHHGQPRFEIRSPLQRLTGGADLSQIDSIGPHAALQLVAEIGTDMRRWNSDKHFTSWLALAPNNKVSGGRRLSSRTPPSANRAAVILRRCAMSLGKTPTALGAFYRRLAARAGKAKAITATARKLAVLV

SEQ ID NO: 203918 - protein, 347 aa, unidentified
MLVVGVDAHKRTHTAVVVDGLGRQVGQRTVKALTADHLELLRWAERLGAERLWAVEDCRHVSRRLERDLLVAGERIVRVPPQLMAGARRQVRAAGKSDPIDALAVARAALREPDLPVAGLDGAAREVRLLVDHRDDLVGERTRIINRLRWHLHELDPSWDPPAGSLDRYCTLDRIAVRLNQHDGTVARIAGDLTVRARALTVDINRLEREITALITPLAPTLLAVCGVGALTAAKIVGEVADVHRFRSKDAFARHTGTAPQPAWSGQSDRHRLSRGGNRQLNAALHRVTITQGRYHPDAVAYLARRRTGGDTKAEARRALKRRLSDVIYRCLVADTALVDQTLATAA

SEQ ID NO: 203919 - protein, 411 aa, unidentified
MLEVKVERCAGIDVGKKLLAVGGMIGLANQKPSVEVRRFGTNVKELERLRAWLQQTGCTEAVMESTGSYWKPVFNILEGSLKIILANPVQVKALRGKKTDPNDSRWMASLLRHGLVQASFIPPQDIRDLRDLTRRRRTLLSDGVAERNRIQKVLEDANVKIGDVLSDVFGMSGQSMLEALLENKRSATEIAELAHWRLAPKIPQIVEALEGHRMRDHHRMLIRQCLDHMHYIEKMIAELDTEIGERLRPYQKQIELACTVPGIGPTAAASILAETGMDMSPDGPFADCHHLASWAAICPGNNESAGVRKSGRTRKGNRWLRATLQQTAWAGVAKKNSGFQRRYQKLKLRRGGQRAVTAVAHAQLIAVYWVLRNATPYQEQICQTEEDRRKAQIRHHLRQLTKLGHELEMVI

SEQ ID NO: 203920 - protein, 360 aa, unidentified
MFIERTSVGLDVHARSVVAAAIDGVTGELFQSRLTPSYDHVLSWLAGLPGPVAVVYEAGPTGFGLFRSLTAAGIRCEVVAPSKLQRPSGDRVKTDARDAIHLARLLRLDEVTAVSVPSVEQEAARDLVRAREDARGDLMRARHRLSKLLLRRGIVYDGGLAWTEAHDAWLRRLRLDSAGVQMAFESDYEAVLAVKSRRDRLDRAIAAMAADSEFTPIVHRLGCLRGVSTLTGFALAVEIGDWHRFTGKTIGSFVGLVPSEYSSGASRVQGSITKTGNTHVRRLLVEAAWHHRTRYAIGKTMLDRWDLASPAARARGDAGNRRLHARWVRFNDRRKRHVIANVAVARELAGWCWSLAVLED

SEQ ID NO: 203921 - protein, 395 aa, unidentified
MQLWAGIDAGKAHHHCVVIDAEGNRLLSRRVPNDEPDLLVLIAAVLEIADGNEVVWATDLNHGGPALLLAMLVGHGQDVLYIPGRTVHHASKIYRGEGKTDAKDAAVIADQARMRTDLQPLRAGDEISTGLRLLTARRADKSADRVRALNRLQAQLLEYFPALERAFDYSRSKAGLVLLTKHRTPDGIRRAGQARIHTWLKKQGARSSAAVAATAVEAAKSQHTTVPAQHMGEGIVAALAQEILTFNAELAQLDELISEKVLEHQHTEVLLSMPGFGPVLAAEFLGATGGDLTVFQSADRFAGVAGLAPAPRDSGRISGNHHRPRRYDRRLLRVFYLSGLSALKSCPASRGYYDRKRLEGKSHIQAMLSLARRRLNVLWATLHFQRCPDLWLLEP

SEQ ID NO: 203922 - protein, 345 aa, unidentified
METMYYIGLDVHKKTISYCVKDGSGRIYGEGSIPATRLTLDMWMKTLPQPWTVAMEATIFTAWIYDHLKPHAAAVKVAHPLMLRAIAVAKKKNDRIDAKKIADCLRCDFLPECYMASTEIRERRRTLRYRNLLVRQAVQMKNKIAVLLMEAGVSDNKQRLHKAGYFRELLATNQDIDEGLKPLLRLCREMVVRLGKTESALVRSLERDSLLVERVERLMTIPAVGPITALTWALEVGDVQRFSSIKKAISYCGLCGAERSSANITQRTPLSKQRNKHLQTVLIEAAKMAPRNSPELAMVYEQEKQKGNANRATLAVARKMVAYLVAVDRRQKGFLVVENENRTAA

SEQ ID NO: 203923 - protein, 308 aa, unidentified
MSSYVGIDVSKRHLDVAVAGGDVFQVAYDEPGLRALGERLGALAPELIVLEATGGLQVRAAGELAAAGWPIAVVNPRQVRDFARATGQLAKTDRLDARIIAAFAAAVRPEPRPLDDETSQILKALVARRRDLIAMRTAEKNRLAQATALKVRASIAEVIAALDAQIVSLEEDLDRAVKTSSLWRQSESLLRSVPGVGPILARTLLAELPELGRLTRRQIAALVGVAPLARDSGFMRGRRTIWGGRASVRAVLYMATLAAVRVNPALAAVHQRLRAAGKPPKVAIVACMRKLLTTLNAILRDQKPYKPA

SEQ ID NO: 203924 - protein, 396 aa, unidentified
MSKLFVGIDVSKDSSTAKGLDKEGHSQFYVEFKMDLEGFLKLLKALTTHCEDLSQVTVAMESTGCYHINLFAFLTEKGIKCFVINPLLITNFARLSLRKTKTDKKDASTIAQFLLAHEDSLCKVTFSQDLQDLKALARERESLIVLISALKNDIKRMLQMTFPELESLCPIFSETMLKFLMKFPSARLIKTAKPKAMARALIHEDKRKRVSLSSEEIIKAAKDSIASPSRAKELILPEKISTLLYLMEKRDKMTKALVEACEAIRVEDLEIITSIGGIRDTLGSLFLAEIGDYKAFKSYKHLIAFAGLDPSVHQSGQFQGISKISKRGNRHLRYVIYNMTFCVIRLDNVFRAYFLRRKKEGLPFKKALLATAHKLIRVIFAMLSNKSHFRPEVFNK

SEQ ID NO: 203925 - protein, 375 aa, unidentified
MEVTTIGIDVAKDAFGLHGVDAQGRVKVRKRLVRKHLLEFLSKLPACLVGLEACASAHYWAREIERLGHRVKLMSPRFVKPYRKNDKNDANDAEAICEAVSRPSMRFVPIKSEAQQDLQAAHRAREQLLKSRTALVNQARALLAEHGIIAPRGIARARRLLAETLAPPERYPLSGLLRETLLEIAERLRFFDQRIEAYDLRIEQVFRHDERCQRLAKIAGVGPLVATAVVAALGNAQEFKSGRQLSAWLGLVPRQYSSGRRNLLLGISKRGDRYLRTILIHGARAALCRTVRQRDQRSVWASRLRLRRGTNVAAVALASKNARIIWALLTRGENYRPQLLELRHSVRPAAFHPSPPASVRRVGAESSWPSELRRN

SEQ ID NO: 203926 - protein, 344 aa, unidentified
MMNDSEMNNAELRNSEINGSNGPALRFAGIDVSKATLELALEGEGKNTVFDNDARGIRALLAKLKEAGPLGAIVLEATGGLEREAALALCAAGLPVMVVNPRQAHDFAKALGYLAKTDAIDARALTQFARTLYHSDKREALLMRMPEPQCLALEVLVTRRGQLVAMRVAEGNRLPGAAKPAQKSIRAVMNLLNREIAKLDRDIAASLGGHFAEKLKLLKGLKGVAAGTQAALMAGLPELGTLTHRAIGKIVGVAPLNRDSGKMRGARTTWGGRTGVRSALYMATLTAVRHNAVLRAFHHRLRAKGKPKKVALVACMHKLLSIMNAIFKTNTPWNPNFHNPTTIA

SEQ ID NO: 203927 - protein, 399 aa, unidentified
MTTEYAITLGLDVGKSAHHGCALTPDGQRVYDHALPQDETALRTVITDLQQHGTVLVVVDQPNTIGALPIAIARDLGANVAYLPGLAMRKAADLYPGQSKTDARDAFIIADTARTMPHTLRAVDRDSDVLSALKVLSGFDEDLARESTRAINRLRSLLVQIYPSLERVFPGVVLTRAIVLELFIRYHGPAGLQAAGRAGVKRWARNHSRKDPGRLIDQVFTALAEQTVTVPGAEAVELVIPRVAEQIKELKHQREIVAGEVEKLVDDFPLSRVLTSMPGVGVKTAAQILLAAGDMSASPTPGHLAAYAGIAPVTRRSGTSIRGEFPARAGNKRLKNALFRSAWVASCHDPLSRAYYERKRAEGKRHNAAVMCLARRRLNVMYAMMKDGTLYEPRVPAAA

SEQ ID NO: 203928 - protein, 316 aa, unidentified
MNIQDKSEINIGIDTGQAILDIHVRPQGHFQSFENNPEGIRSAIRFIKPFKPARILIEATGRLEIAFFCAAHKAGLPVCVCNPIKVRKFAEMTGILAKTDKLDAQVIAYYGETMKPALTELKPEKLRLLSDLLAVRSQCLDMSTMQKNRLRRMPKTVQKPIRNILKKITEEIAVIDRQLDQVIAEIPQFQARVDQLISAKGVGKVLAYTLLSELPELGSMNRKQIAAIVGVAPMNRDSGKHKGKRKIRGGRSKIRTVLFVSMLSAIQCHPKLKPMYQRLVAAGKPKKVAIVACMRKQLIILNTMVKNGTMWDENMI

SEQ ID NO: 203929 - protein, 404 aa, unidentified
MSVRPKIWVGIDVGKQSHHACAVDETGKTVFSQKLGNDQAAIEAVIARAVKAAPQVQWAIDLTSPMALLLITVLLATEQSVTYVPGRVVSTMTQGFRGEGKTDARDARVIAETARMRRDLNRVDMPNELVVGLTQITSYRADLMADWVAGVNRLRALLGSVFPALEAAFDYSSRTSLILVAGLCTPAEIRAAGIDGVTAHLISHGAWRPGIGKAAATAVAAAEGQSLTLSGEADTAMLVKRIAAKLLDLNREIKDTDKLISARFRQHPWAKIIESMPGMGPSLGAEFLVQTGGELTRFANSGRLASYAGLVPVPRDSGRVSGNLHRPKRYNRRLRRVFYMAALSSLKVIDGPSRRFYHKKRNERLIHTQALLALARRLVDVLWALLRDGREFTLEAPAQLATAA

SEQ ID NO: 203930 - protein, 411 aa, unidentified
MEVMYKRCSGLDVHKKSIYACVVIKEEQKREKHLARFGTMTADILQLGDWLRSWKVERVGMESTGVYWKPIWNLLEEQFSLELINAEHIKKVPGRKTDVKDSEWIAELLQHGLVRGSFVPVQPQRDLRELTRYRVGLCEDKARVANRIQKVLEDANIKLASVASDILGASGRAIVEALIEGEQDAEKLAELAKHVLRKKIPELRQALAGKVRDHHRFLLRQLLDEVKFLEGKIERIDRHIGKQMSPFQWAITLLTSIPGVSEITAWVLVAEIGVLMEQFGEAQNLASWGGLCPGNWESAGKRLRGTTHGGNPWLRRALNQAAWAATRKKGSYLAARFRRLAARRGVKRALLATAHKILIIAFYLLKKQCGFSDLGENYLQQKQSASLTRSLVRRLERLGHKVTLETLPQAA

SEQ ID NO: 203931 - protein, 439 aa, unidentified
MRSQALQEKRRFIAGKFVIGIDPGRDRHQACILNPQGEERRNFSFPVNRQGFDETLEKTLSLYVNPQDKASFVFAIETACNLWQTLAHFLGSRGYTVVLVNPLTTYHSRALPGHDYSKTDPKDALLVASNVRAGYFDWYRTYSFEINAMHQLSMVYCKIRNTLLQQRSRLRTYIGYVFPEFFEVVRLDTHTARFLLKRYFLPKHYLALDLEKVAAEIAKISGNQYGLATLKHLREKAATSIGISKSALEENVDRLAVETWLSAEEQLQKQLDLVLEKLLSLAKKTAYFNSLLSIKGVSDILASLFIAETRDLALYQHYKQIEKLAGYNLRLVDSGRYAGARRISGIGNSRLSWILYKMTEEMAKYVPEVRIKYLTRQIAKRCYRKNLVACVPKALKVTFGLAQKKSAYEPNAEALNKVKKLEQQYEKVLKGKKRTARQN

SEQ ID NO: 203932 - protein, 345 aa, unidentified
MEHYAGIDVSLESASLCVVDATGRIVREAKVASEPDVLIGWFCGLEFAVTRIGLEAGPLSQWLYAGMRDAGLAVELLETRHVRDAFKAMPVKTDRNDARGIAQLMRLGWFRSVHCKSLPAQEIRALLTARKLLQTKNHDVEMSLRGVLRGFGLKVGPTTPRTFVGRIRELAAGHGTLSTVAEALLAARSMLFEQCQKLEKRLRSLAREDGRVQLLMTAPGVGAIVALTYASAIDDPGRFRSSKAVGAHFGLTPKKYQSGETDVTGRISKIGDGGVRTALYEAANVILTRPVKGSTLKSWGMRLAARTGMRKAKVALARKLAVVLHRMLADGTEFLADKAAAAVAR

SEQ ID NO: 203933 - protein, 358 aa, unidentified
MKAQVNKIDFTDQNIYAGFDAHLKSWKVTIMADDVVYKTFTQPPRPEILFNYLREHFPGGTYHTAYEAGFCGYWIHDKLVSFGINSIVVNPADIPTTDKERVQKEDKRDSRKIARSLSSGNLTPIYIPSLKTQRDRSLLRTRAMLVRDLARYKNRIKSFLYFYGISIDSSFINPQSHWSNRFMSWLESIDMGEESGKESLNVLISECKNLRASILNITKQVRRLSQSETYSERVILLRSIPGIGLLTAMIILTELETINRFRNIDKMCGYIGLVPSTKSSGEKEKTGDITPRGHNVLRTAIIESSWTAIRNDPSLMKSYLSYIKRMDENKAIIKIAKKLLSRIRFVLTNNKPYICSIA

SEQ ID NO: 203934 - protein, 433 aa, unidentified
MKKTTMAAKVTTEPEPKFVAFVGIDWADQKHVWSLQAANSTQREQGELEHRPEVIEAWVSQLCRRFGPGPIAVAVEQVKGALVYMLRKYECLHLYPVPSTMSASMRKALYPSGAKDDPGDAELVLELLLLHRDKLRRLTPDNEATRLVQNLVEERRKLVDEKTAQLNRLIGYLKVYFPQMLEWFAKLDSKLVCDFWERWPSLEELQAVPAGEVKQFFHHRSGRHGELTGWRMKGMSQAMPAIRDRAVIEAKRTVVQVIAGLLRTLLEGIATLDRKIAEAAQAHPDFFIFQSLPGAGAALAPRLLAALGSQRDRYTSADEVQKYAGIAPVTETSGKKKWVHFRWAASKFLRQSFHEWAGHTIGHSIWARAYYQLQRERGQEHHAAIRSLAFKWIRIVFRCWQDRVAYDETRYLTVLAKRGSHLIPAFAAATGSK

SEQ ID NO: 203935 - protein, 349 aa, unidentified
MRFYNQPHAAYCGVDRHARTMYLHILDDRGRTRFDQNLPARPDAFLDAIAPFKDGLVVGCECLFAWYWLADLCEDQHLPFVLGHALYLKAIHGGKTKNDRLDAAKLAALLRGGAFPQAYVYPKALRATRDLLRRRTFFVRQRAQLLAHIQNTNSQYNLPPIPQKLSFAGNRDAGELAGRFSDNSTQHSIRADLHLTAAYDQQIRELELHLTRHAKIDDPVTYQLLRTVPGIGPVLALIVLYEVHDITRFPQPGNFLSYCRLVRCAHESAGKVKGFGPRKIGNGHLRRALGEAACLLLRCHEPAKKWLARQEKKGTKARALGILAAKLGRTVYHLWRKQVAFDAKKFLTN

SEQ ID NO: 203936 - protein, 347 aa, unidentified
MIIIGCDLHTRTQQVAMLDTETGEVVERRLEHESGEAKRFYAGLKERALVGMESTGFTRWFQEMLAELGHELVVGDAAKIRAMEPRKQKHDRRDAQHLLNLLVRGDFPRLWLPTAEERDVRVLIEHRHQLVQLRTRAKNGLQAMALSYGLRRRGRLWSEAGQQELKKLPLREGMARRREDLLRLLAQLDEWIKELDQRLQQEAEGREAARLLMTHPGVGPLTALGTVLVLGPVERFPDGRHVTSYVGLIPQEESSGQRQRFGHLTKQGNPLLRFLLVEAAQTASRFDPALRRVYRRLAFRKGAASAKVAVARKLVIRLYIMLRDQIDYAEFVRRGSHAGMLGDVALA

SEQ ID NO: 203937 - protein, 354 aa, unidentified
MNKYSIGIDISKNDFHACLSGIDLSQRVKILRTGTFKNKPDGFTDFIKWVKNTCKESTTPLVFLMEATGVYYEHCALYLFKNGFNVSVVLPNKAKKYVAALGIKTKNDKADSKALSRMGAEQCLELWQPMGAFFYELRSLTRYYQSIQESITAFNNQIEAIEHGMYQNRQITKGLNKIISHMEKQLEEIKEAINSHLSSDSEVAQKVKNICITKGLGPLTVAVILAETNGFTLFKNSRQLISYAGYDVVENQSGKRVGKTKISKKGNSRIRRALHMPALITVRYNVGSLKTFYERNVEKHGIKMKSYVAVQKKLLVLIYALWKKEEAFDDEYHLRNTTGEKEAAHSSQVSFGEA

SEQ ID NO: 203938 - protein, 338 aa, unidentified
MQDRPHSGVPSVLPDTIIGVDVAKDTLVAATYGTGTSTTLTNSPAAIKAWLRKLPTGACIAMESTGRYHLELASQARAAGLTVYVLNAMDVHHYAKAMGQRGKTDPLDAHLIAQYVAHQLIGQAGQRLSTRQRLRPWQPTPALLGELRDLLNGRVQLSNSCARLTMALAHIAPIKEEVKALQAGFRELMAQIDTKVAELLSSDEGLAQNCKRIRSIVGVGPQGAALLAVLFARIGFAHSDAVVAFSGLDPRPEDSGTKRGRRRLSKKGDPQLRRQLYLCAMAASRSALFRPEYEDLKARGLPTTAALVVLARKLLRIAFAVWKGSGTFDPMKFMPKPA

SEQ ID NO: 203939 - protein, 356 aa, unidentified
MTRIAQLEPTRVTVGVDTHRDVHVAVALDQLGRRLGEIELATTRAGYQRLLAWAERFGAVEAFGIEGTGCYGAGLARHLRARKVFVIEVLRPNRQTRRRKGKSDPADAEAAARAVLSAEAAGSPKAGDDLVEMIRVLRVARSTAIKARTQAINALRALLVTAPPELRDELRALSTSGLVARAAQVRPGEPRNTLAASKLALRHLARRCQALQAETQSLDAQLAQLTATASPHLAEAFGIGADTAGALLVAAGDNPERLRSEAAFSMLCGSSPIPASSGQTRRHRLNRGGNRQANAALYRIVLVRMRYHQPTKDYVQRRTNEGKSKREIIRCLKRYVAREVYTALKQSSEEKLARAA

SEQ ID NO: 203940 - protein, 381 aa, unidentified
MKASIQSKEGDESEGMINVGIDVHKRRCQACLKDEKGHLIGEVSFPRDEEGIRSFRRLLENHGEAKVVLESTGNLWVPIYDTLTDDPANRVILANPRKTRIIAEAKIKNDRMDARVLADLVRADLVAESYVPSKEIREQRALLRERRSLVEDTVAIKNRIHSLLDRHNLQPRYSDVFGKQGREWLRTIQIPSTEKTILDVELKQLESLEAGIRTLTEKIAVEAAEEPRVRLLMGFTGIDFYSGMLLLAEIGDIKRFSSPKKLVAYAGLAPGIRSSAGKTIRGHITKEGNKYLRWILIEAAQHASRFDPKLQGFYQRVSARRGRQRAIVGVARKLLVSIYHVLNRNETYHGQRPELLESKIRNLQRIVDSSLQEERDNQTDD

SEQ ID NO: 203941 - protein, 347 aa, unidentified
MRFYNNTHPYYCGIDLHAKTLYVCIIDQAGEVLVHREIPADPDKLLQILKPYDGNIIVGVECMHCWYWVADCCEEHGIDFILGHALYMKAIHGGKAKNDRIDSHKISKLIRGGNFPLAYTYPKTMRATRDLLRRRTKIVRHGAHLKAHVSNATSQYNLPSHGLNLKNSCAREQLRNTFPDKSVQKNINLDLSILDCYAKELSKIECYIEQQAKQHNPDHLKLLKAIHGIGPILALTIIYEIGNIDRFESVQDFASYSRLVKCKAESAGKSYGTQGNKIGNAHLKWAFSEAAVLHLRGNDKAKHYLLNLQKRMSKAKALSVLAHKLGRCIYYILKKETPFDETRFLRG

SEQ ID NO: 203942 - protein, 393 aa, unidentified
MICVGIDVAKDKHDCFILSSEGEVLADVFTIPNNAEGFDTLLQTIRRYTRPTDKIKVGLEATGHYSYNILGYLLDKGLATYVINPLHTNLYRKSLSLRKTKTDRVDARTIATMLMSDVDLKSYTDTAYHNEELKSLTRYRLDKVKERAKLKQSVSRLVTILFPELEKLVPTLHMASVYALLNEFPGAKQVAEAHLTHLKTVLSDASKGRYGRDMATELRDAARRSVGSVMPAKSLELQHTIRLIRELDTEIEDIEAAIEAMMNEMRSPITTIPGIGVRMGAMILAEIGDFSRFDSPDKILAYAGMSPSTYQSGQLSLSGTYSHMEKRGSRYLRYALYNATKYVCLWDPTFATYLAKKRTEGKHYNVAISHAAKKLVRLIYAMEISRRPYTSAV

SEQ ID NO: 203943 - protein, 361 aa, unidentified
MSNSTTWIGMDVHKESIVVAAVNGAGGMAARWETPNTSKGKERLAKRLSEFGTIRCAYEAGPCGYDLRRFLEEKGIRCDVIAPSLIPKKPGDRVKTDKKDAEKIARMHRMGELTAIHVPTPAQEALRDLLRAREDASEDLVRRRHRLQKFLLRQGRRFEGKTWTRNHWRWIRAQTFADQNSETVLSEYVAAIDQETERIGRLDAQIEQESKNPKIAPAIARLKALRGVKTLTAMTILSELIDLNRFASPRTLIGFVGLVPGEYSSGGKQWRGSITKSGNSHVRRVLVEAAWHYRHSPRKTGEAIRMRREGQSPEVIETARKAELRLYKKFTRLVMRGKKTTVAATAVARELAGFVWAIGRI

SEQ ID NO: 203944 - protein, 357 aa, unidentified
MCQDRLGKDKEDHMGEHTVVGVDIAKSVFEVAVSKQPGRVSDRRRLSRGAFLVFLAQVPQGTVVMEACGSAHYWGRKIQELGHQVVLLPPHQVRPYVTRNKTDRTDAKGILEAYRNADIHPVPVKSVAQQVLVSLHRFRSGWISSRTAQVNTLRGLLRELGFVIPEGIEKVVPQVRVLIEDADSGIPDALRAVLATACDEIQALGESIKMTERQLEAVAEQTPVVERLRSIPGIGLMTSTALVAFIGDVERFPSGRHFASYLGLTPREYSSGLKRRLGRISKRGDSYIRMLLIHGARSVLCHAKKAKEHDHLRTWALALERRAKHNKAAVALANKLARIAWAVWKRGRDFESRPKAA

SEQ ID NO: 203945 - protein, 277 aa, unidentified
MIVIGTDTHKRTHTCGAVDAATGRQAGELTAAAREPGFRELLAWGRGIDGERVWAVEDCRHVSGSLERFLVAAGERVVRVPPKLMGQSRRGERAAGRSDPIDALAVARAALREGVETLPAAHLDEEALQIKLLLDHREDLVKARTEDQCRLRWHLHDLWPDLEIPAGALDRLVWLDRVARRLSRAERSTRVIIARELVTEIRRRTRRAKELGREIAALVEARAPGLLGMEGCGPLTAARLIAETGGAARFSSDAKFARLAGVAPIPASPGSRVRHRL

SEQ ID NO: 203946 - protein, 388 aa, unidentified
MNKIIYIGMDVHSTNFTLCSFEPGYGFEADKIFGQTQIKEDIFNSTVKYINKLKSMRPDVDVVCGYEAGCLGYNLHRKLKAKEIESVILAPTTMAVSRNCSKKKNDYRDAITIAKCLASSAYKAVYIPDDKDEDIRDFIRMRDDHKTALKQIKQQLNAFCLRHGHHYDKTKWTRLHLNWLRKLELSKLQRETVEEYLVTYETLTSKITALDIRIEDIASEERYAEKVNKLKCIKGIKTHTALSFVCEIGDFNRFKSADKFAGFIGLVPGECSSGNTERMLGITKAGNRHLRRLVVEISNTYRRGTVGRKSAALKERQKDMPKDVVAYADKATNRCQRKYQRMMFKGKNSNQAVAAVARELCCFIWGMMTGHYSRTAQAEASVYRSELD

SEQ ID NO: 203947 - protein, 482 aa, unidentified
MTHRRLVGIDLGIASAHTVRVLDGEGNTLHKRKAWPTVESLCEVEEVALTGCPAGSRLEVVVEPTGPAWLPIAVFFTRRGHLVYRVSSQKAADLRRFLSRHTKTNGIDADTLARLLLFDPAGLRVLELPGSERAALDRRVRATDRLTQGAAEHKRRIKDLVRQLLPMTPLTGDLGLADMAVLERYADPNALGKLGAKRLTALIVRASSHHQGAERARQWLEAAEASLALYDGHQAVAFADLAAEVASEVRLLRATQAELARHVPERETHYRAVDPDELARSIPGLAAVGGPALVACMGEPTRFTSGKAFRSFTGLVPRASETGETDRKGQAMSKAGSSLLRTTMVRAADHARKLDPQLARIYHLQMVERGKDHLGALCVVAANLAERSWTVMHRGTPYVICDVEGRPVSSEEAKVIIAEQFTVAPEVRARRRSKKLGKAPQKVLAGQSKPCTQGAGTRGDLPRPASSSARDPRVKQLIATAP

SEQ ID NO: 203948 - protein, 404 aa, unidentified
MYYVGIDVAKEKHYVCILDDTRELACKPFWIYSDILGLRDLVKRLAELSLNNDDFIIGVESTGAFSENLYEYITDADYKVILLNSYQTAKYRDFSTMKKIKNDSIDALVIAELLASDKYKESYISNDDYQSLKVLGRLRKSLSDKIKTIQREISTVMATVNPEITKVFPNIFTKTALATIKAYPTAVDIQKATPKKLTKLFRHIKGNNFNEEKAKFLIELSKSSIYAGRAHESRALMIRTNIRILELLCQERDEIELQINTLLYSKIETVDASIENIKTIPGVSEKTISALLGECGDIKRFTSAKAFIAYLGLYPTQYQSGNSMSVGRLAKRGIPIAKHALYMAAIASVRHNPELNKLFRDKVSLGKSKKEALIIISKKLATIIYSLFKYNQPYQAKRVFIPYR

SEQ ID NO: 203949 - protein, 340 aa, unidentified
MSAITIIGVDLAKRVFQLHGAKADGSVAFRKKLSRGRFLSFLAEQPPCVVGMEACSTAHGWGREIEKLGHTVRLIPPIYVKPFVKRQKNDVADAEAIAEAASRPTMRFVAVKSEEQQARAMLFRTRDLLVRQRTQLINAVRGHLAEHGVVAAQGPAHLKRLADAVVDEPSPLPAMVRELGKLFLEQIDVLDTRIGELDKKLRTVAGQAETTRRLQTMPGVGPITAVAVETFAPAMGSFTRGRDFAAWLGLVPRQHSTGGKQRLGKVSKMGQRDIRRLLIIGAMAVVQAASRSGAPKDSWLARMLAKKPRMLVAIALANKMARGLWAMMTKQENYRNPAAV

SEQ ID NO: 203950 - protein, 415 aa, unidentified
MNSFCGIDWAESHHDIAIVDGEGKLVAKKRISDDSAGFTVLTEMLAAAGDSFDDAIPIAIETPRGLLVAALRATGRPVFAINPLAVARYRERHSVAGAKSDHADAMTLANILRVDSHLHRRMPADSELAQAIAVLARAHQDAVWRRSKASNELRSMLREYYPAFLDTFAGKSATNLAKPEARAVLAIAPTPAHAAKLIKTRVAAALRRAGRKRGIDGLAVNILEHLQAPQLRQPELVEKAMGRQALALLAMLDAACTGADELAQTAAEEFRKHPDYAVITSFPGLADLTGARVLAEIGDDRDRFADDRALKAYAGSAPITRASGKVTSITHRRIKNDRLAAVGWVWATYAYINPGPAQDHYRRRRDHGDRHAAALRHLFNKMLGQLHHCLQTRQTFDPIKAFGQPRTAPREPAAA

SEQ ID NO: 203951 - protein, 428 aa, unidentified
MNIEENIRREQFCQIKSEISGSDQYLVVGIDVAKDKHHAFMGTATGKSFLRKLVFENNLEGFRKLLERSDAVKTQNALSKVVFGLEPTGNYHKPLGAHLIRCECHVVLVTGKAVKNNRELLDGRWDKNDDKDAANIADLVSRAKCLYYDFPSGNINEVRQSLSLRRRLKKEEHSLRMRIRNNLLAQYFPELDRFYSACESESLAIVRWCLDPGRIADMDFEQFFSMVTRSRRGIAQKRRLKKIHQLAVESVGCAMGPAAEFEAVLLVDKLKEVRGQLKQVAGQIQDVCLQFADYSFLLTIPGFGPYVAARVLASIANPWRFDNSSQLLKLAGYDLGANRSGKRSDDAVAVISKRGNGELRYALYQAAHVASTRNPKFIGYFTRMLRGRERERGIKTKMKVKLAAKMLKIAWTLMRKQEVFDPDYLIIE

SEQ ID NO: 203952 - protein, 375 aa, unidentified
MKNKVRFLGLDVHAETIAVAIAEPDGEVRSLGTIANRAESIRKLIKKLGQVEQLKACYEAGPTGYVLYWQLAELGVACEVIAPTLVPMKAGDRVKTDRRDAERLARSYRSGDLTAVWVPDEGSESLRDLVRAREAAKQDQLRARHRLSKFLLRLGQRPAAGMKAWTAPYMAWVRQVHFAQVAREATMLDYLHEVDHMSERVKRLEQAITEAVKLAAPVVQEVVKGLQALRGIAEISAVTIVAELGSITRFGTARQLMGYSGAVPTEDSSGQRTRRGSITKTGNAHLRRIIVEAAWSYRYRPAIGPRLRKRQEGVPEPIKEIAWKAQVRLHKRFMKLAAAGKDQRKIITAVGRELLGFIWAIGVKAETADPQKMAA

SEQ ID NO: 203953 - protein, 311 aa, unidentified
MTETTIGIDISKATLDVHRLSDGTAAQFGNDKAGFRALKSWLKGHDIARVVYEPTGPYHRNFEIALEAHYPLVKVNPLQARRFAQSLGTKAKTDAVDARMLAMMGATFSLLPQQRTSAKQRDLKELHVTRLALIKDRTRILNRQKSLTIALLKRQAKARLKLMIAQIAQVDAKIQELLQNAPDTTRATEIICSVPGLSKVSSAAILTEMPEIGTLSRKQVASLAGLAPMTRQSGQWRGKSFIQGGRKQLRDALYMPALVAMRHNSDLKAKYSALIKAGKPAKVALVALMRRLIILVNTLIREDREWEKNRA

SEQ ID NO: 203954 - protein, 330 aa, unidentified
MLSVVAAPTGAVVAQRSVAASGHGYAQALRFANEQAQGARVWAIEGAGHYGSGLARYLSGRRETVLEAGRGPRGERRLQGKDDGLDATRAARAALGNDELAVPRAGQRREALRLLLVARRGAVEVRRRALVQLRSVIVTAPDRLREELQALPQRRLLERCSHFRRSSSLPVDELAAKLVLRTLARRIEAATAEATELEREILAHIRALAPQLLEEAGVGPIVAADVIVAWSHPGRVRSEAAFARLAGVAPVPASSGRTIRHRLSRGGDRQLNRALHTIVLQRRQHDATTQAYIARRVAEGKTRRDATRLLKRYLARHLYRLLQQTEPLMT

SEQ ID NO: 203955 - protein, 352 aa, unidentified
MAYAYHIGVDYHKAYSHLVVQDASGKTLRSGRVRNDHRSIAGFLLPFSGNAHAVMEATRNWTVMFDWLDEIVDEVVLAHPLKVKAIAEAKIKTDKIDATILAHLLRADLVPVAHAPSQRAREVRLALRERMFYVRLRTMVKNRIVTAFDRYPEQTAVLRRCADLFGTAGRKQLAALAVSPIDRLQIDRSVAFIDDINRRIKECETTIKALSKGNENVKRLKSLPGIGEFFARLIDAEIDDISRFRSACKLAVYAGLVPSTYASGGKTWHGRITKQGNKWLRWAFVEAVVPAIVSDPELKAYYERLKATKGANRAKVATARRLLTIAFQLLRDGRSYESHGPERSGATPSRLS

SEQ ID NO: 203956 - protein, 315 aa, unidentified
MFDGLYRPREEDRPTMNASKEHPPMTAGLDLGDKYSYLCLIDQESGEVVEEGRLRTTPEVLRQRFASEQQLRIAIEAGTHSPWASRVLEECGHEVLVANARKLRLIYANKRKTDETDAENLARLARLDPKLLYPLKHRSEASQAHLALIRSREALVGCRTQLVNHVRGAVKSFGARLPKCPAVSFHKKAPEHIPEALWPALGPILEQIGSLTERIRQYERKLEAISKEHYPETELLRQVEGVGGLTALAFVLTLEDPHRFEKSRSVAAYLGLVPATDRSGERDPQKRISKEGDEMLRRLLVSSAHYVLGPARTRI

SEQ ID NO: 203957 - protein, 369 aa, unidentified
MGEYSELFVAFDVAKKKHAVAIAEGGRRGEIRFVGEIENSPATIERLIKKLARRYEHLHVCFEAGPTGYELYRQILALGHDCMVVAPALIPKRAGERVKTNRRDAITLARLHRAGELTAVWVPDATHEAIRDLVRAREAAADDLRRKRQQLLSFLLRCGRIYRGGGHWTLAHRRWLAKQAFEHAAQQIVFQEGIDAIEDAAQRLHRLEQQLTLIVPGWSMAPVVAAYQAMRGASFLVAVTFAAEIGDVRRFDTPRQLMSFLGLVPAESSTGDTVRRKGLTLAGNRRARRALVEAAWTYRHPARVSETLRARLEGLPKPVRDIAWKAQLRLCTRYRRLSAAGKKLPVVVAAIAREMAAFLWAIGREVAPV

SEQ ID NO: 203958 - protein, 472 aa, unidentified
MARAPRRQGGGQPRQRRSSRGRPAQLEQLNLNAAGIDVGATEHWVAVPADRDAQPVQRFGAFTADLYALAEWLRQCQIDTVVMESTGVYWIALFAVLEERGFDVKLVDAHYARQVPGRKTDVKDCQWLQELHTYGLLRGAFRPEDEVCVLRRYLRQRRMLVAMASRTVQHMQKALEQMNLKLTEVVSDITGKTGMTIIRAMLAGERAPQLLATYRDKRCKHDQATIAKALTGHWRAEHLFALQQAVEQYDFIAQQLRACDGHIEGCLQAFVPDVEIDAPQAPSARPWRSSRSNPLSFEVQAYLEAMTGVDLTQIDGIESLTALKVLSEIGRDMTRWPTSKHFAAWLGLCPGNKLSGGKRYRMRSKPSANRAATALRLAAQGVANSHSALGAYYRRRRARLGAPKAITATAHKLARLVYSMLRYGTAYVDAGQQAYEQKYRDRVLTNLQRKAKAFGYKLVHVEDIAGGVASTL

SEQ ID NO: 203959 - protein, 338 aa, unidentified
MTNFVGVDLHRNNFTYCIRVNGEERKIGKCEITELKGFAAMLGPNTAMAVEATGNTFMFCSSLKAYVGRLVVVNPSQFKVISMSTKKTDKHDAKMLAEFLEKDMLPEVRMKDDLQAKISSLTQTREKLVQLRTVLKNKVNNLLAANFIVLKREELSTEKGLVKALSYRIDPITDTEMLVVVEQIRSLNKSIEKLDKAIEDHGSKMDGFSNLKSIKGIGTKGAAILLATIGNIHDFRSSKHLAAYIGIVPRVSNSNDTVCHGRITKNGSKTARTALVQCALIAKRYSPYLNAFHGSVKSRRGGAKANIALARKFLDIVYKTLKNNWMFEDFSQFKLVKN

SEQ ID NO: 203960 - protein, 338 aa, unidentified
MEKFSGIDLHSNNAVVVVSDETDQVVYEQRHANDLAGILAALEPYRSELVGVVVESTYNWYWLVDGLMEAGYVVHLANTAAIKKYEGLKYSGDEADAAYLAKLLRLGLLPEGYIYPREARGARDLCRKRMQLVQYRTAQVLLIENILAAQTGTRLTSTKVQRLTDEQIAALGFAPDVTLALQANAIVMRTLQQQIAVLEERLAERVQLNADFALLKSVPGIGQVLASTIMLETGTVARFAKVGNFSSYCRCVRSVRLSNGKKKGEGNAKNGNHYLSWAFVEAAHFALRNCPQAKSFYERKKRQRNGAVATKALAHKLARACYHILREHRPFELTRCFA

SEQ ID NO: 203961 - protein, 404 aa, unidentified
MIFVGIDWSEHHHDVCVLDAGGSQLASVRVPEGIEGVVRLHEVLADHAEQPEEVIVGIETDRGLLVGALVAAGYQVTAVNPMSVDRYRDRHRTSGAKSDAADARVLADLVRTDRHRHRPVAGDTELAETIKLIARTHQSFVWERRRHANRLRSALREFYPGALEVFGTDLASADALAVLAAAPTPELGRRLSRSKIAAALRRAGRTRGVEPKAEKIQRALRAERLSAPASLERTYGVIVTSLVGLIAGLNTQIARLQAQLEEAFEQHPDAEVLRSLPGLGIVLGARVLGEFGDDPNRYADARCRRNYAGTSPITKSSGKGKVVLARFARNHRLADACYLWAFASLTASPGARAYYDALRARGKTHHQALRALANRLVGILHGCLSRGEPYREEIAWASLEPRAA

SEQ ID NO: 203962 - protein, 407 aa, unidentified
MLFLGDDWAEVHHDVELQDEHGRVLARRRLPEGVIGLAQLHALIADHLNDHAEPESVLVGIETDRGGWVQALIATGYVVYAMNPLQVARYRERHTTSGAKSDPGDAHVLAEIVRVDRGHHRQVAGDSELAEVVKTLARTHQTLIWTRQRQANQLRSMLREFYPAALEAFSDDLAGRDALAVLAIAPTPATGGSLTRTRVVSVLRKAGRQRNLQARAEEIHTALHTEQLGLPEALTEAYGVSVSSMVAVLSTVVAQAARVEGEVERCFGQHPDAEIITSQPGLGMVLGARVLAEFGDDQDRFLDAKARRNYAGTSPITKTSGTRRVVLARYARNRRLADALHQQAFASLNGSPGARAFYDHHRARGATHHQALRALANRLVGILDGCLRHRTKYDEATAWGHRTTAAA

SEQ ID NO: 203963 - protein, 409 aa, unidentified
MMKQNIIFGIDVSSKSSTVCVVIDRIKQGETFKITNDSFGYQDLLDRLNQYLITPLVVFEATGVYSLSLQAFLEDYHIKYLKLNPLKAKKLMDNNLRHNKTDKVDAYRLALIQFNAPQKLRAPQPKEYHELQNASRYYEELTQALIINKNQLHRNLQSTFPQIESILSTSSGRVYWTIVSLFPHAQYVLNHNENQVFQSLLAISGIGRQRAHYLTTRLYALARQAYPYDNESSITIRAIQRNIANLLSLSAERDNVINYMEKLAMQANARSLNIYESIPGIAKTTAVRLVAELGDLRRFDTSAQIDAFVGIDPGRYQSGEKDSHLGITKHGNHLARKILYRTIIQMETVKATQPCHITDYYDKKKRSSNSRGYKKIAIASVHKLIRTMFALIKHDQLYDYNVATHNQRL

SEQ ID NO: 203964 - protein, 364 aa, unidentified
MHSISNTELSSLEETRCQFNGSKADIKLGIDVHQEFYVVVMQEGGSNPKPPQRFAKGAFLYWAAKLKQKSGAEIYAVYEACGFGFSLQRQLSALAIQCYVVCPQKLDEANKRVKTDGLDAKALCLKLDRFVQGNRCALALVRVPTEEEEQKRAIHRQREQLVGARKRLEAQGRSLMVNHGFEPVQNWWKPRPFAALDVPQWMRELLSNSQPILVALQQKIAALSVRLQCAAAPNQPRGLGKMTSVVLDREIGDWNRFHNRRQIASYTGLCPGEYSSGNTRLQRCVTKHGNPRLRAALVELAWRMVRFQPNYKAVRKWRAILAKGALSTGVARKKAIVAVARQLAVDLWRIKTGRLRAEELGLIN

SEQ ID NO: 203965 - protein, 415 aa, unidentified
MKIVFPTCCGVDVHKAFLVATIIKTPKDSLQPSYQKKRFSTFNTDLNRFADWLHKNECLDVCMESTGKYWVPVFNILEKRGIRVVIANPKWVKAVKGNKDDTKDSKWIGDLFRIGLVKSSFIPVKDIRILREFTRYRYKLTSMKSSEKNRFQNAFTVCNVALDSVVSDMFGKSATAITDYLTSDEDFDAQHCVSLLQRSLKKKADDVLASIEGYEITVEQKYRIGIVRDHLHYIEKLIERVDLCINAMVEKYDGAIGLLCTIPGIDRSSAITVISEIGVDMAQFGSSKRLCCWAGLTPGNNESAGKKKSVRISRAGVYLKPALVQVAHAAVKDKLNPYYALKYERIAKRRGKKRAIIAIARMILTAIYSMLSTGEIWNPVDLFKVDMPEHLKEQQLQKAVRQAVHFLETQGLKVS

SEQ ID NO: 203966 - protein, 424 aa, unidentified
MNLTQNDRLKQVTSDTLIVGVDVGSQTHFCRAFDWRGFELSRRVFKFSNTGMGFLTFLRWTEELMNKTEMKNVIVGCEPTGCYWLTFQKFLQDHDVQLVTVNPFTVNRSMELDDNSPEKSDLKDPKTIALLVKDGRFSTSYLPSGVYAEIREASVCRDQIMKQHVRLSNQIQGWLQKFFPEYFECYADWDSTSGLMLLREAPLPQDILKIGAGGINQIWRDAKVRAAGIKRAQTLVEAAQNSVGLEAGEAARLEIWVLVNDYILKAEQLKRLDEYLEEKVKEVPNVEKLLAIKGVGMSTVIGFIAEVGDIGRFTDPKQIQKLAGLEIVKKSSGKKKGQPRISKRGRRKLRRTMYESARALMTWNPAFQDVFLYYRNRTKKPLGGMQAKIAVACKAIRIFYVVLKTGCDFDEEKFRKDIIRPEAA

SEQ ID NO: 203967 - protein, 379 aa, unidentified
MEISSSTLPTVAAERATMFVALELSKSSWLVALHSPVADKVSLHRFVGGDVAGLLALIARKQTQAEARLGRTIRVLSCYEAGYDGFWLHRLLCARGIDNRILDAASILVDRRSRRAKTDRLDAAGLLRTLMALDRGESRVCRVVRVPSVAQEDARRRSRERTRLVVERGQHSNRIKGVLMTLGVRDFEPTRRDWQERLGALRTADGQELPACLKAEITRECRRLHQVIVMIAEVEAEQAAALDAEEGQAARLTRLRGIGLVSATVLADEVFFRDFRNRREVAGYLGLASSPWASGRVQRDQGITKSGNPRARRTAIELAWLWLRHQPGSVLTRWFRQRVGTTRGRMRRVILVALARKLIVALWRYLSDGLVPDGAELKA

SEQ ID NO: 203968 - protein, 322 aa, unidentified
MVGIDVSKATLAVTWVNGQTHQVEWEASVPNTVDGVRQLLSATPAQLPWVLEPTGRYSLAVARQAQAAQRTVLLAQPKAAKAFLSALRPRAKTDRLDSRGLALYASATPLPPYPFKSALMDELQQLLTARKGFSGALSRLHQQAGELPAAAASLRPALTALRAQRAALDRHLAARMTQSPAWALTQELRRIPGIGPVTAATVALCVQSKAFPHPDAFVAYCGLDVRVRDSGQRRGHRTLTKQGDAELRRLLYLSAQASLRATQSPFKAQYERERAKGLSTTAALCAVARKLARLCWSLARHGTSYDPQRVYRQPTHEKALDT

SEQ ID NO: 203969 - protein, 414 aa, unidentified
MKSWSEITHYAGFDWAKNHHDVVVVDGSGQIVAEFRIEHTAEGWKQWREQVAALGQGLAACVETSQGVVVEQLLESGVVVYPLSPASAKGYRERKVPSGNKTDRVDAWSLADALRVEGHNWKALAKEDPLVAELRLLCRDEVALIEERTALINQIQSALHEYYPAALEAFEDWTLPTAWAFVEAFPTPQALQSAGKRKWEKFLHSHKLARPQTYDRRMEIFARASEFASGQALTRAKSRLALARARMLRTLQNQIDTYRAEIEKLFAQHPDHDLFGSLPGAGPKIAPRLLGEIGSDRSRFEDATGLQCMAGTAPVSYQSGQIHKVYLRRHCTKPLRHVVHLWANLSRKSCPWAAVYYEALRQRGKSHACALRCLGQRWLKILWKMWQSGTRYDAELHARNQIKHGSWVLQIKPA

SEQ ID NO: 203970 - protein, 332 aa, unidentified
MLIAGVDISKDDFHVCIKEKSDDGAVKIKGSRSFPNNPKGFSELSGWVSKREHANLGTWYVMEATGTYYENLAYFLYEKGCRVSVVLPNKIKHFAKSMNLKTKTDKIDAAVIAGIGIERSLAEWKPMSKDFKELRDLSREMLALKQERSRGKCQRHAMVHSHEKTASVLKLKESQIEFYDNAILEIESEIKRIVDADPVLKGRIDNIATVKGLGVLTIVAVLCETNGFGQFNSIRQVVSYAGLDVQFKESGNFKGKTRISKKGNARIRQCLFMPALTATMHNEKIKNLYLRICERNPDIKKKGVVAGMRKLLVLIFVLWKKNEEYNPLYQWN

SEQ ID NO: 203971 - protein, 428 aa, unidentified
MDFMDISRIKEFRQFKKEIRGSEQYLIVGIDIGKVKHHAFLGTANGHTVQKGLIVKNNLSGFSYLMGRVQFHMDRDGFEDVVFGLEPTSVYHKPLAEFLIEQGHLVVFATNEAINKNRSLLDGRWDKNDTKCSANVADLLSQGKCQYYDLPDIKLRDLRNLLLFRKRLRKQLHSAKMRIRNNLVAQYFPEFDKLWKKCEEENLAIVRWCLAPAKIAAMKFEDFCCLVTRRNRGDRQKQRLFEIWDTASFSIGCFAGNGLELEAKVLVDTVNLIQTQIVEVDGAVEAICLQLEEYQYLLSIPGFGPYVSAVVPAAIGNAHRFENASQLLRLAGFDLNAKRSGKKSATAVPVISKKGKADLRYAVYQAALIASSLTTHFAGYYHSLLEGRQREKGIRTKMRVKLAAKLLVIAWTLMKKKEAFNPDYIISH

SEQ ID NO: 203972 - protein, 364 aa, unidentified
MASVTAATSGWIGQGASATVGELDPIAYVGIDWASQEHAVCVLGADGRKTKAFPVAHSRDGLDGLVNKLSQLGAAGRVPVAVEQPDGRLVDALLEAGHPVVPVSPNAIKAWRESEVVSGAKDDPGDAEVIAEYLRLRSHKLTVLAPFSAETRALRAVVRSRDDLVSQRVTAHNQLEACLDAFWPGAKAIFADICSDIALAFLERYPTPGSCRALGEKRMAAFLAKHCYSGRRPAGELLARLRGAPQGLADGPESGARGEAVLGYVRVIRALNCSIKALDRSVPVHLGRHPDGEIISSLPRSGCINAAQILAEWGDCRQAYDGPEAVAALAGQSPVTKKSGKRGTVQFRWACNKTFSTCHVHVRR

SEQ ID NO: 203973 - protein, 347 aa, unidentified
MLADQLDYVIGVDPHRDVHALAIVDVRTGGVVFETSVSASSGGYASALELARERAPGRRVFAIEGTGSFGAGLTRVLSGEGERVLEVGRLRRERRSGGKTDALDAIRAARSVLGQTRPGLPRAGGEREALRALSAAREGAVNAKRAGLCQLRGLLVSAPEPLRTELRSLSRAQLLRRLAAVRPARRQDAELRGTLLALRALARRVKALTDEERELAREIETVTRRLAPQLLEQPGVGPLAAAQLLISWSHRGRIRSEAAFARLAGCAPIPASSGQTIRYRLDRSGDRRLNRALHMILVTRRRAHPPTIAYISRRIQEGKSRREANRCLKRYLARSLYRLLENAPMPT

SEQ ID NO: 203974 - protein, 331 aa, unidentified
MNYIGMDIHKQFTVAVVKDEQGNKLAEDKFTNSEDNFGSFMQQFKPEETKIVIESTCVWEYIYEILEAKKYEVKLANPFKTKAIAFARIKTDSIDANTLCDLLRANLVAESYIPPKEIRKLREITRERMTFVKQTTQIKNRIHSILIRRGIRIPSATLCKSTLLWIKEKFKEDNVMLHYLNLLEYHSTELKLIDDGIRKLSGKNKNAILLMTIPGIAGLRALDIVAEIGEIGRFPTADKICSYAGLVPSIRQSGNTLRFGHLIKQSNKVLKNTLIETSWNLIRTKESNPLQEFYKKLAKKKGKQKAICATARKLCCVIHAMLKNQEEFRYS

SEQ ID NO: 203975 - protein, 409 aa, unidentified
MLTPIVKRCAGLDVHKMVMMATVLLEQEDGSLREETRQFGTFRKHRRQMVRWLDSFGVELVVMESTGIFWKSIFSSLEEAGITTYVVNARYVKKVPGRKTDVSDSQWLATLGRLGLLSPSFIPPKDLRELRLITRQRIKLRGMLAAETNRLHKVLDDAGIRLGGVVSDINGLSARALIRGLIEGKSPKEIVPYVHGRLKEKIPQLLDALDEPLSERHRFLLSFIEDHICYLEKEMASLDHYLFAAMSPYKRQWEILQTIPGIDAISAAMLLVEIGIEMQCFGTAHRLASWVGICPGNNESAGKQKGGRTRKGNHIVRQVLCEVSNASSKTKSQFKGQYQGLVIRRGHKRAIIAVAHKILRVIYALLKSLQPYRDPGIDYSRLVVERNAPRWLSALKRYGFLPEMVSAAA

SEQ ID NO: 203976 - protein, 337 aa, unidentified
MEYFAGLDISMEETHVCVLDREGAVVHEAKTMSTAEAIVASLAKAPTCQRVVFETGRMAPMLYHGLFERGVPVVCIESRQAYQALKSLATHKTDRNDARGLAHLARTGFFKPTHVKSLPAHAVRSLIIARKKLVGQRVMLENQIRGLAVVFGVRLPRALSPAFIKQALQSSEGIDGLSAAMRGLIGARAAVLSAVSAIDADLKRMAKASNACRRLMTIPGVGKLTALAFTAAVDDPERFRRSRDIGAYLGLVPRRYQSGEVDYTGSISKCGDRRTRTLLYEAANVMLTRYKAPLKLRDWALAIAARSTMRKARVALARRLAIIMHAMLRHGTVFRPA

SEQ ID NO: 203977 - protein, 457 aa, unidentified
MRTIGIDLAVSATHKAIVMEADGQFVTPVLRFRTRWEEIEQLVQRAREGEAPDLPLQAIMEPTGMAWFPVAVALQRLGVAPYLVNGQRVHDLRRFYKRHSSSDRISARVLAKLPVVDRESLYPLEIPSAPQLACQRGCKELDRLQTQMTAIKNRLRDVDRFAWPGLERIFRDIYSPSARFFRRTWYDPAHVVSAGADAVQRSFRAYAGSQDELDWVLELCQLATEVLQLYALTALDYALLQQQLCRELEHLEYLEQRAASLWRHTVRPLYRQLHPSRHLETIYGVGEQGAAVYVSFIGRAQRFPDQRHFRGWHGLIPDSRQSGDAESKGLHISKAGPDLIKKFGYLNANIARQYDPQIAAIYYDQMVRKGNHHHQAVCACATHLLDRVYVILKQDRPYQLRDVDHNPVTPTQARSLIAAHYTVPDEVRQRNNRRARKRRAERRLERKLTQKGSRPRK

SEQ ID NO: 203978 - protein, 337 aa, unidentified
MNVTLIGIDLAKTVFQVCGVNRSGNPAFNHQVRRNRLIEKLLQYPEATIAMEACSGSNYWGRELKKLGFEVLLVPPQHVKPFVKGNKNDRNDAFAITEAARRPRMRFVEPRSLEQTDILVLHKLINRKVQARTALINQIRGFLNEYGVIVAPGKERLLKALPELLEDAENPLTCAAREALQSLLEEWREANHQIQRHEAKLKQTAKQLEPARRLMGVKGVAEKTATAVVAYAGDGKAFKSGRHFAANLGLVPNEHSSGGKQKLGGITRRGNTYLRRLLVQGAWSVIRYTDKATDRLSRWAAGVIERRGKHKAVIAVANKLARILWAMLYHQTEYRAA

SEQ ID NO: 203979 - protein, 371 aa, unidentified
MAKRLKYIGLDVHKETIAVAVAEGERGGEVRFHGTIPNEDDAVRGMVKRLAGPGITLDFCYEAGPCGYGLQRLLTRQGQPCIVISPSMMPRRPGDQIKTDRRDAMTLARLLRAGELAPIWVPDEAHEAIRDLIRARRSAQEDTSAAKQSVRSFLLRHDRRFSGKSAWTKTYWRWLSEQRFDFAHQQLAFEEAKRRVLEAQARTARLEAALVEAVDGWRFAPLVRSLQALRGVRLIVAATLVAEVGDLTRFQNPKQLMAYLGLVPSEYSSGARVQRGRITRAGNAHARTMLVEAGWTYRLPAREERRYRDRVADLPEDIQAIGWKAQVRLCQRFRRLSATGKPQHKVNTAIARELVGFAWDIARRVQPVVAV

SEQ ID NO: 203980 - protein, 429 aa, unidentified
MEVVHPQVAGIDVHKKVIWVAVRLPGQERGQRAVTVRRFKAFWRSLQKMAGWLAELGVADAAMESTGVYWWPACHALAGAGIEVCVCNAAHMRNVPGRKTDLADCQQLAELHEYGLLRTGFIPGAQVAALRQRTRYRKKLTGQRSSEGQRLAKVLEDAGIKIDSVASDMLGKSGRAMTGALIAGERDPARLAGLALGVLRRKTGELAMACDGRFTAGHGQMCRPHLDACDHLTAKIAELDALVAEAAAPFAALIARLVTIPGIGQRTAEVIIAETGGDMARFATAARLAAWAGLAPGDNESAGKRKKAPARNGNPHLRTAMVEAAWATWRTATRPGARFRRLARRFGKGNEKKAAIAVAHTLLSTAWAVMRYDADYIDAGAGYYQRRDQRNREHLVRYHQNALARLGVQVTLTPPGNGTPPAGNPGQAA

SEQ ID NO: 203981 - protein, 418 aa, unidentified
MTKKLDTTFIQIVHPVCCGLDVHKKKISACLITIDEQGKEQYEIKEFGTFTNDLFVMRKWLTDNNCPIVAMESTGVYWRPVHNVLEGFMEVILVNARHIKNVPGRKTDISDCKWLAGLLRHGLLRGSFIPPKEIRQWRELTRLRRSYTESLADYKRRIHKLFETANIKIDSVVSDLFGVTGRNLISLLCDESELSLSNIKKNAKGTLKSKSNELHSSIHGFFEDHHRFQLIGMMEIITNFEQKITEITKRLNSLTAGHQNLLDRLDEIPGINKKSAQSIVSEIGVTLDDFICMAALASWAGLCPGNNESAGKRKSGRSSVRSHPFKTILIEVAWAAIKKKGSYYRAKYFKLKARRGAKKAIVAIAHRISKAIYNIIKHGATFKDLGEDYLTTQTKQRAIKNIKNRAKQLGYKLVPCMN

SEQ ID NO: 203982 - protein, 394 aa, unidentified
MKLVGIDVGKNSHHFCIMDKETGEFNFAPSSFSNNKEGFDFLINSLKPYSKKSILLGMEDTGHYHVALLKFLLSNGYTVALINPKTTDLTRKMEGAITKNDKLDTITICDVLDTPERKKQYRITKVDRFDLYEQRQLTRHHHNLKEELNIYCNRLQKSIDLVFPEFNTLFGSKYGVVYMNLLKTFGSAEAIASTDIRTIRKCFEIKGRGGRISLTAEKLKECAKNSIGISSEVETIQIKHLVSQIMLIKEQIAEIDKKIEEFSIKNNSPILSIPGISHFSGTSILAELGDIGNYSKPSRIIKFAGVAPYHYESSQYNAQHTAITKKGSKYLRKTLYQVILPVINNNPVFKKYYLLKISQGKGHRCAQGHCIRKLLRVIYHLLETGQSFDPALLR

SEQ ID NO: 203983 - protein, 343 aa, unidentified
MQVVTTVGLDIAKSVFQVHGVDAAGQVVIRRQLKRRCVLAFFQKLPACLVGIEACASSHHWSRELKALGHTVRLMPPAYVKPYVKRQKNDAADAEAICEAVTRTNMRFVATKTPEQQSGLTLHRTRHLFIRQQTAVINVIRAHLAEFGIVAPVGRKGVEALLNVVTDSSDKRVPVVARMCLASLGAQLRRLKEQILEFDRLIMAWHRSNEASKRLDAIPGVGPVLATALTASIADPKAFRSGRNFSAWIGLVPKQHSSGGRDRLGSISKQGDRYLRSLFMAGALAVIRYARIHGTKHRPWLTALLARRPTKIAAIALANKIARMVWAMMSRGERYKEPVALAA

SEQ ID NO: 203984 - protein, 355 aa, unidentified
MTMLAEVVDAVVGIDTHRDTHQAEIADATGRPLTVLQVSNDSDGFARLLATIAAVAPGPAVAVSVEGSRSYGIGLARALTAAGLLVIECEQPARRQRRGNGKSDQIDAHLAVLAALRLDDTRLPALRADGDREALRILLIARQEMTTASTAQASRLRALLLTGGDADRRAARKALPTTALSTLAGRELSSNASREQLIRQAEITRLALALIQARGQLKHNKAQLLAIADELAPGLTSRYGVGPVSAAQAIVSFSHPGRCRNEAAFAALGGTSPIPASSGKTIRHRLNRGGDRSLNSAIHTIAVSRIRSCPRTRAYVARRTAEGKTPREIRRCLKRYIARELHRQLTQSMKPLMSG

SEQ ID NO: 203985 - protein, 428 aa, unidentified
MNTPTSNPPVVAWVGLDWADQRHEIRLQAAGSPRLESFSVEQKPEVFQAWVAELRARFPQGRIALALEQSRGAVIYALMNYDFFLLYPLPPKTLARYREAFASSGAKSDRSDADLLLELVRTHGDRLRAWQPDDALTRQLRLLVEYRRKTVADRTRLTNRLTDLLKTYFPQALDWLGDLRSLAACEFLGAWPTLEAVQGANRPALRRFFHDHRRLSAEEREKLLDQIRHARPLTQDRAVLEASELMTQTLVEQLRAVITALARLDQALEELFGQHPDQQLFDRLPGAGQALGPRLAAAFGTDRDRYQSAEEIQQFSGIAPVTAASGKMRWVHWRWACPKFLRQTFHEFADASRKKSLWARAYYQQQRQHGVSHHAAVRALAYKWIRILYRCWKTRTPYDEALYLRALQRRHSPLWLAAASLSTQEAHP

SEQ ID NO: 203986 - protein, 274 aa, unidentified
MTNPVFVGVDVAKEQVDVAVRPSGDRWSAVNDEVGITALVARLRPLAPALIVCEATGGFERAAIAALAAAGLPVVVANPRQVRDFARATGQLAKTDALDAGMLALFAERVRPTPRPLPDAAAQLLDAVLTRRRQLLEMLVAEKNRLGFAPKPVHRGIQAHIRWLERQLDEVTKELAGLIEASPVWRAKDDLLQSVPGVGPIVSYTLLGELPELGTLSHKQIAALVGVAPLARDSARGAASDSCGAAARACVRRSLWRRCAGAAGIRRSSDSTNG

SEQ ID NO: 203987 - protein, 352 aa, unidentified
MDVTTIGIDLAKRIFHVHGVDKNGKTVLKKKLMRDKVLEFMANLPKCLVGMEACGGANYWSREISKLGHEVRLMAPQFVKPYIKTNKNDEKDAEGICEAVNRPSMRFVPVKTIDQQDVLSIHRVRERLVKNRTALSNEIRGLLHEFGIIIPQGIHKVMTHLNEALEGNRLSEMSIETFRTLKDEFLANDKRITELEKRLKFIAQNNEAHAQLMEIPGIGLITATALIASIGNAANFENGRQLSAWLGLVPRQHSTGGKQNLLGISRRGDVYLRNLLIQGARSVFTQRVAIPKKKETLKTNTSVFSDWMINLSSRRGFNTSVVAVANKLARVVYAVLSKGQTYTENKVCRGQI

SEQ ID NO: 203988 - protein, 367 aa, unidentified
MKNTIVHHEGAASLEAVASKVKPKGAQIKIGLDMHARVYVAVAQYDHLLPKAARRLSPNEFVPWVEALLGQGHSVHVVYEACGFGFSLYRQLMAAGAQCYVIAPRKLDEECSRVKTDPRDATTLCQRLSRYLEGNTRELAVIRVPTEEQEQARHVSRQRTQLVCHRQKLEAQGRSLLISHALPAPAHWWKEQTWRRLGQHLPAWMRARLEMARPALLSLQAQINALTSELEAFASFPLPRGLGKLTSVVLTREICDWHRFNNRRAISSYTGLCPGERSSGSKRVPGSVTKRGNPRVRAALVECAWRMVRFQSHYPPVQKRLAILAKGSRTLGAVRKKAIVAVARRLAVDLWRLHTGRCTAEQLGLKL

SEQ ID NO: 203989 - protein, 314 aa, unidentified
MKQNNWVGVDTHKNTIACYKNGKFKEFPTTKTGFKKALQWADNSKWAIEGAYCFGKPFAAYLIQNGCEVYEVNTLLTKTWRKIYAISNAKTDFGDAKVISLFADNAKLQKVSLETVELKEKLTARKLLVKQRTDIICSIKMLFNTRGLELPYKDLTTLKAAKWLAKQEDTIIRNFASILNALNASIKEFEREIEGLLPEKAQKLTQFKGIKTITAATIYTETKGKLISAKALASYSGVAPVDNSSGKRLKHRNNKTGNRILNSVFYQLALHQSRWDEKGKAYYERKLQEGKSPRHARKCLSRQLINIIWKILNE

SEQ ID NO: 203990 - protein, 312 aa, unidentified
MTTLAHSILAIDISKTYLDVSTLPDRRRWRVGNDAPGIARLLAQARRRAATVIFEATSVYDRALIQRLDAGGLAYHRANPRKARQYARAAGFLAKTDRVDADMLAAYAASVPLALAEPVPAERQAVRRLVDRRDQLVAMRKAELVRRQQIAEPEIQAELDDHIAELTQRIARYEARIDQAMQHHRLAPLRDWLISAPGIGALTSAALIAALPELGARSAKTIAALVGLAPLARDSGKLRGRRAIWGGRARVRRLLFLAARHAMKNPAFKPFAERLIDAGKPRKVVLVAVARKLLIVLNTMLKEQRPFRPVMT

SEQ ID NO: 203991 - protein, 426 aa, unidentified
MAAVDPACTDVPVRSFGTFTPDLYELADWFKTCGVTSVAMESTGVYWIPVYEILEQRGFKVILVNARYAKNVPGRKTDVSDAAWLRQLHSYGLLRGSFRPDAEIATLRAYLRQRERLVEYAAAHIQHMQKALMEMNLQLHHVVSDITGATGMRIIRAIIAGERNPEVLASYRDVRCHSSMETIRAALVGNNRHEHVFALTQSLELYDIYQAKMLDCDRKLEVLIAALGSRGTKPDGKLSRPRIRTKQVNTPTFDVRSALYGLLGVDLTEIHGLGPSLALKLVGECGTDLRAWPSAKHFSSWLCLAPGNKISGGKVLSSRTRRSSSRAAALLRLAATTVGRSDTALGAFYRRLSSRTGKSKAVTATARKIAVLFYNTVRHGMSYRDPGADHYEQQYRNRVLANLQRRAKSLGFVLQAIPGNANPAVS

SEQ ID NO: 203992 - protein, 391 aa, unidentified
MRMIYVGIDVAKDKHDCCILGSEADKLYPVFTIPNNKTGFDELYEKIFSVTDDKTEIKVGLEATGHYSLNLLGSLIDKGLPTCVINPLHTNLYRKGLSLRKTKTDKVDASSIAMMLMTDKTLKPYSDTSYHSEELKSLTRYRFDKVQERAKLKSSVARLVNILFPELEKLVPCLHMASVYALLSELPGASYIADCHLTHLIKILETASKGRYGRDMAVTIRDTARDSIGSVMPAKSMELKHTIHLIGVMKDEIDEIETSIKSIMDTSGSPIMTIPGINYRMGAMILAEVGDFSRFSNADQILAFAGLSPSTYQSGQLESSYSHMEKRGSHYLRYALFNATKYVCHWDEEFGKYLAKKIGEGKHYNVAVSHAAKKLIRTIYRMDLTGEAYRK

SEQ ID NO: 203993 - protein, 414 aa, unidentified
MYYVGIDVHQKSSSVEILDCNGKLFKRREVRGRWPVLIEELAKVPKPFAVCYEASCGYGYLHEQFSKLAQQVKVAHAGGLTWIYRSKRKHDRIDARKLAKLLFLDEVPSVHVPPKEVRLWRQAVEFRQKVLRSRVAAKNQARALLRERGIESPRNLFSGKGLAWLKDLKLEDLGDALRRDLIVEQIEESDEKIKRVVKHLDSLSNNHAGVALLRTIPGIGPRTAEALAAYVDDAKRFSNLRNVGAYFGLVPCQDSSADKNRLGHITRDGPPTMRKLLCEAAWTAVRESPTVRAYYERVMRQDPDRKKIAIVATAHYLVRVAVSMLKTGECWRESVKEDPGNVKEDSSPKPDRGGGETPSGPQGFSPPPVASPASDEATSPPPLSASPFSPQKGKRKRHRNKACREERGVKIQKE

SEQ ID NO: 203994 - protein, 419 aa, unidentified
MAFKILRKNCCGLDVHKTWIFACIGITDANGRTEYKQARFSSFSNGLRDLAGWLVKYGCSDVCMESTGKYWIPVLNILEKTCWVTLAHPKYTKPQKGNKTDRKDAKWICDLYMCGMVKPSFIPPPDIRQLRDLMRYRTKLTNMLTSEKNRALNCLTVSNLKLDDVFSDVFGKSSRSIIQYILEHPGEQFDVAPFLDRRCKHSVEEIQAAVDGAVSREQAAKLRECLQHIEQLTEHRENIEAEILRLVQPYPHQLELLRTVPGFAAAPLTAVALISEIGADMSVFPSAKHLVSWAGCCPRNDQSNNKVKSTRISRAGCYLKPLLVQVANAVIKSDKYPECRERYRRIKARRGHKKAIIAVCRMLLTAIWNVLSKLVPYSAKGYLEDKLTEHSVVISKAQGLELLRKRGYIFKDELVAESG

SEQ ID NO: 203995 - protein, 411 aa, unidentified
MEALYRWVAGIDVHKKMLAVVVRAPQGEYVQRKFGTTKTEIGHLAAWLQDHQVSEVVMESTAQYWRPVWYGLEAHFKLHLTHPLKTRAPRGRKADFRDARRLADRWHSGDLEDSFIPGAEQRSWRWLTRSRVHLKRMLGVIRNQVEGLLEQGGIKLSAVASDIFGVSGWAILERIAAGESDVDQLLKEARGVLNRKKSKLREALQGKLDPLYRLLLQQHLEQAQLIRQQVEELNQALAEALKEHVAVLCRLTKVPGINLYAAQELVAEIGPGAVDFPSAEQFASWVGVCPGSQETAGVNYSRRSAKGNRYLRRLLCQNAWGAIHTKNTFFAGLFARLKPKIKAKGAAWAVAHRIAKLVWLMLHEGVEYVEKGTAPLNPRTLVRKFRRLLREFDRHGIDAKSLLEQELVATS

SEQ ID NO: 203996 - protein, 349 aa, unidentified
MKIIGCDFHPSYQQIAMLDQSTGEFTEMRLSHQAQGEETRKFYAALHGPVRVGLEASGQSQWFERLLAELGQELWIGDAAKIRASTDRKQKTDRRDAELLLQLLVEDRFPRIWVPTVGERDARQLLLHRAKLVRVRTQIKNQLQALALNQGVQRKWKLWTAAGRKQLESLPLLPWTSRRREELLKLLDELDVSITELDGAVCQEANTRPEVRRLMTHPGVGPVTALAFALTLGPAKRFRRGKQVGSYFGLIPAEHSSGGKQRLGHISKQGSSFVRGLLVEAAQSAVRHEPQLRREYRRLSQRRCRAVAKVAIARKLAVRLYWMLREEVDYAQLIRGSHAGQPESFRGRG

SEQ ID NO: 203997 - protein, 338 aa, unidentified
MRVRDLGIDLAKNVFQLHGVNADGDCVFERRVRRDTLLPMLAKVPPCRIGIEACTDAFYWQREFEKLGHTVKVIAPQYVKPFLMHQKNDRNDAEAICTALRQPNMRFVPTKNELQQDIQALHRARQRLVNHRTALVSQVRGLLLDRGVAIPLAITRFRRLVPGILEDLNNPLSPMARETIADLFDFLLSIDERVKGFDRKIASVFRKSEDCQRIAKVCGVGPKTATAIIAGIGDGSEFKNGRHLAAWLGLVPRQYSSGDRQRLMGISKRGDRHLRTLLVHGARAVVRVSAHKSDPFSQWVNALRERRGAAKAIVAVANKNARIIWSMLRNNEEFRAYA

SEQ ID NO: 203998 - protein, 343 aa, unidentified
MKKFNLYVGIDIGKNVLDVAIGKNENEIVFYKFSNDVKGIGSLLSLIAEYKVRENEVLICCEHTGVYLNKLAFAVQSTECVLWVIHPLLLKHYSTEINRYKTDKADAKKIMTYALLNQSKAQQFKLLEHDSQLLRDLFTARKQLLQTRTQYLNRKDASKQKVLVHGLTDLINETIIKFLNDLISELNKEIKRTIASNPKISKLYQILISIPGIGPVIAQHFLFVTDCFEKIKDWKAFACYIGTAPNANDSGIRKGRARVSKHSYKPLKADLNQGMVSLIRPGQFFHEYYKYLISINRHHLYILNKFKNLIIKTTFVLIKKQSEFDQEIFWKNKKNLFQCLQVS

SEQ ID NO: 203999 - protein, 334 aa, unidentified
MEKITTVGIDLAKAVFSLHGVDRTGRMVLRRTVRREQLVKVVAGISPCLIGMEACSGAHEWGRRFQELGHTVRLMAPKFVVPYRKSGKNDGNDAEAICEAVGRPSMRFVPVKSAEQQALLAMHRVRQGFVVERTATINRLRGLMSEFGVVLPLRSITVRRQAATAAENLPELARRAIGDLLDQLRVLDERIGGYDREIEAQAKLCEPAQRLMKIRGIGPTTALAIVATVGNAREFKNGRQFAAWIGLVPGQYSTGGKTRLGHISKRGDAYLRNLLVQGARSVLHTAATHRDPVSRWALELQPRRGYYRTLVAIANKNARIVWALLAKNESLRTV

SEQ ID NO: 204000 - protein, 335 aa, unidentified
MEVKTIGLDLAKHIFQVHGVDASGAVSVTKRLRRNQLLEFFAGLKPCLVGIEACPTAHYWGRELKALGHDVRLIPPQYVKPYVRRSKNDAADAAAICEAVARPSMRFVPLKDEMQQAALMLHRVRDLLVRQKVQLISAIRAHAAEFGVIEAKGPQNIVRLLASLEAAGVPDLARQLISVLTEQLDAVEDQIADVDRRIISWHKSNEASRRLASIPGVGTMTATAIAATVPDPTVFRGGREFAAWLGLVPRQNSSGGKARLGKISKQGNEHVRRLLIIGAQAALLCSKEIKANAWVQGMMARRPRMVVVVALANKMARIAWALMARRTQYGVAAAA

SEQ ID NO: 204001 - protein, 306 aa, unidentified
MKSDNNSTSFFDNVLLFIGIDVHKAKWVVTVRTYDLELKTFSMKPSAEELGNFLIKNYPGADYRIVYECCFSGFWIYDYFSEKGYKIIVTPTNRIYKDGSTIKTDKIDSRKLALQLSRGLLREVVVSGKRVREYKYIFRIYDKQKMRQGQILRQIKAFLEQKNHPLKWSKWNKVLLEKLKELKFEDKLFDLKFNKLVTEYEYVVSQIKDTEKIIEQIKDDQELGKRIQIIEGINGIGIISAVRMGVYLFDRKDRFESSEKLNHYLGLTPSEKSSGEKIIRGRSGMCGNRQLRSIIIQLACLPARQG

SEQ ID NO: 204002 - protein, 344 aa, unidentified
MTKKCMAGIDLHSNNLFCAIVDMDGKRLFEKKLPCDLASVLEALKPFKKRLDKIAVESTYNWYWLVDGLQDHGYNVVLANPAAMEQYDGLKHADDKSDGFFLAEMLRLDILPTGNICDRAVRPVRDLLRRRMGLVHKRTSLILSLKSLHTRMTGRDLATGRIKAMEPPEAEKLFEHPADQLITRLDLQLVEQLGRSIEQIEAMILARVKGLPNYQVLQTMPGVGKILGLTITLETVDPQRFASPGDYASYCRCVDSRRMSNGKKKGENNGKCGNKHLAWAFVEAAQFARRYDDRCRKFHDRKSAQVNGIVATKALACKLAKAAWHMMSHNTHYDAGRMFPGAKK

SEQ ID NO: 204003 - protein, 313 aa, unidentified
MMIPLRCVGIDVSKHHLDIFDEGIGVSERVANAPHAITKLVARWRCDVLVVFEATGVYDLGLREALRAAGIRFARINPARARDFARASGQLAKTDPIDARMLAAFARAMRPAPEQVSTPARNALARLAKRRDQLVHMRAQEKNRRSEAGDRAMVERIGRLIEVLDREIAEIEADISALIKAEPEISHDAQLIRSLPGVGPVACMQLIAQMPEIGHVGPKQAAALAGLAPFNVDSGAYRGKRKIGGGRKRVRNALYMAALNAVRRADRFKAFYARLRQAGKPAKLALIAVARKLLTILNAMMRDRKAYIPAQQT

SEQ ID NO: 204004 - protein, 400 aa, unidentified
MLSIGIDVSKGKSTVCGMTPGGEIVYTPFEVQHTREGMSELVSLLRSSGEEVRAVLESTGSYHCPVVAALLENGIFVSVINSLRMKRFCSQSIRKVKTDRIDAMQIALYGLAYWQELQPARLPEDTYRELQLLARQYYQMTSMLIKAKVDFNALCDQVLPGMQELMNDHAGRHKLSDFVLRYRHTTHILEMGETRFRKDYCKWAEKKGYRNCERMAALIFATAQNGIPVLPNAPSTQIVITEAIRVLHTVEASRDAILTQMQALAKTLPEYSLVREMPCIGDALAPRLIAEIGDVRRFHSKRALIAYAGIDAPPYQSGKFCANNRHISKRGNRYLRKTGYEVMQSYVMHKPANDPIFTFIEKKRSEGKCGKLAMVAGLNKFLRIYYGKVTELYRSLPAIE

SEQ ID NO: 204005 - protein, 363 aa, unidentified
MPSMPNSTSQVNPMSTMRRVVIGGIDTHKDLHVAAVIDTAETLLGTHSFSTTRAGYRALVKWMRTFGDVAKIGIEGTGSYGAGICRHLTDAGIEVLEVDRPDRSDRRRKGKDDDLDAISAARAALHGRRVSTPKSKDGAVESLRVLRVTRQTAIRARRNALQLLRMTIVAAPEELRDQVRNLTRMQLIRTCAAWRPETSNAADPVAATRIALKSLARRILELGDEIAALDELIEPLVTALAPQLLDRVGIGIEVAGQLLVTAGDNRDRLRSEASFAMLCGVAPLPASSGMTRRHRLNRGGDRQANSALHLAVISRIRIDERTQAYLAKKTAEGHSKLETIRCLKRYLAREVYYLLNAPLTNPA

SEQ ID NO: 204006 - protein, 349 aa, unidentified
MRFYTGQHRHYCGIDLHTRTMYVCILDTAGAVLVHQNLPANPEAFLEVIAPYREDLVVACECMFTWYWLADLCAKEGIRFVLGHALFMKAIHGGKAKNDKIDSHKIAVLLRGGMLPQAYVYPAGMRETRDLLRRRLHLVRKRGQLLAHIQMTNYAYNLPAFGKRIAYPSNREGVAEHFEDRVVRKSIAVDLGLLERYDALITDLELYLVHQAKQQEPQGFQLLRSIPGIGKVLAMTILYEIHDIRRFDRVQEFASYARLVRCAKESAGKKHGTSGAKMGNVHLKWAFSEAAVLFVRHCPEGKKLLARWEKKHGKGKALSILAHKLGRAAYYVLLREKAFDLEKFVATTN

SEQ ID NO: 204007 - protein, 364 aa, unidentified
MKIIGCDFHPSFQQIAMVDTESGETTERRLLHGDGEAQQFYESLSGPVLVGIETSGNTLWFERLLEKLGHQLLIGDATAIRAAAPRHQRCDPRDARNVLQLLLEKRFPTIWVPTLAERDLRQLLKHRHTLVQMRTRAKNQLQHIAMNQGMQKKRQLWSKAGLEQLKSLALEPWTKRRRDDLLKILEQMDSHIAELSKAVAAEAQHWPQAVLLMSHPGVGPIVALATVLTLGEVSRFARGKQVASYLGLIPREDSSGEHRRLGSITKQGNSFMRFLLVQAGMSAARGDAELGRVYKRLAQRKHHGVAKVAVARRLVLRLYWMLRTNRRYPEVVRMQGSSSHPVAEVKADRLSEHPASRCCTHPGR

SEQ ID NO: 204008 - protein, 323 aa, unidentified
MSKIIGIDISKQTFDVSYLEKGKWIHKIFKNQNIGFEQFNKFIGASDWIVMEASGPYYVQLATFLHLSSFNVCVLNPLIIRRYSQTRLYRAKTDKKDAKTIAEYGAQYELKRWCPESKHGIEIRQLYTALELLKKQKHQTKRQLESFEVTGLLSSSLRKELKQVLMLLIRRIDKFEEKIEEIGKLAYKDTVERIKTIPGVGLKTAIMMSVITDNFTKFENHKQLTAFVGFSPRLYQSGTSVKGKGHICKMGKPQIRKLLYLCSWSAKRVNKNCVEMYERLKEKGKPERVIKIAIANKLIKQIFSIATNKQLYNENHQNLYFVK

SEQ ID NO: 204009 - protein, 354 aa, unidentified
MAVASIVEAHDPLRVIVGVDTHKHSHVGHAKDELGRDLGHLEVPTTGRGYATLLAWARDLGEVAAFGVEGTSSYGIGLARYLQSEGHLVLEVIRPGRQDRRFRGKSDTIDAEAAAAAVLSGKARNLPRASADKVEMIRALRIARGSATKAKTQAINAIKALVVMAPEEVREQLRELPSAKLVGTCARFRASRIVDPTSAVKASLKSLAVRHRALDAEIRELEDQLDDLTSATDPLLRSRFGVGPDTAAALLLAAGDNPARLRSEASFSMLCGSSPVPASSGQTKRHRLNRGGDRQANSALHRIVMVRLRWHETTQAYMRKRLAEGKSKREVVRCLKRYVAREIYGVLMVRSERP

SEQ ID NO: 204010 - protein, 340 aa, unidentified
MKLTAVGVDVAKRVFQLHWVEPETGEIISKQIKRAGFLEHFANRAPCLIGMEACGGAQHWARRLIEMGHQVRLMPGKAVKAFVSGNKNDVADARAIWTAVQQSSVKSVAVKSEAQQAILALHRMRQQLIKFRTMQSNGLRGLLTEYGEVMAVGRAALNKAMVDVLARLNERLPGMLVNTLREQWSRLGELDGQIAEIERRLSEWMKEDQSCKKIAEIPGVGLLTATAAVATMGDAKAFRSGREFAAWLGLVPGQVGTGGKVRLLGISKRGDTYLRTLLIHGARAVLAHAKEPGPWVEQISKRRPQNVVTVALANKMARTIWALLAHGRPYERSYVSARPV

SEQ ID NO: 204011 - protein, 346 aa, unidentified
MTIVEAARTITGGIDTHGEVHVAAVLDDVGGLLGTESFDATPDGYSALLSWLAGFGQVGMVGVEGTGSYGAGLARFLARAGVAVIEVDRHNRQARRRQGKSDPIDAVEAARAALSGRARGKAKSRDGSVEAIRVLVVAKRSARQARVKALTQMRQLTFTAPDQLQCRIKGLPAPQFIAAAKGLRPTRAADPVTAATKAALSSLAHRIGELDEEIAQLDARITPLLEAHAPELLAIYGVGIDTAATLLVTAGDNPERLRSEAAWAHLCGVSPLQASSGKVARHRLNRGGDRQANRALWIIVISRLASDPETQAYMERRVKEGRSKREVIRMLKRYVAREIYRALPRG

SEQ ID NO: 204012 - protein, 392 aa, unidentified
MKLKRIAIDTSKTVFTLHGVDEQERVVLRHDLKRHQVEPFFAGQPATEVVLEACGGSHHWARRLTALGHTARLIPPQYVTPFVKRGKTNSKDAEAINEAASRPSMRFVPVKSAEQQATAMVLSVRELLVKQRTQLVNALRGHAAEFGVVAAQGTGNVERLLAKLAAEPAVPDAAQPMLALLGEQIAHLHARIAELDRRLAVLHKANPVSRLLAEIPGVGPIGALTLALTVDAGQFRSGRHFAAWIGLTPKEHSTGDKQRLGGISREGNERLRRLLVLGATSVVRLAGPGAKPGGRPRRASAKPTDAAAGRKATAAAKQTDRAGREPGDAAVATSRGKAAGKRRNPAVTPWLTELLERRPRKVAAVALANKMARIAWAMMTSGEAYRREPIAA

SEQ ID NO: 204013 - protein, 343 aa, unidentified
MKITTVGIDLAKNVFQVHGVDERGKAGLRKALKRDQVLSFFANHAPCLIGMEACGSAHYWARKLEALGHTVKLIAPQFVKPYVKTNKNDAADAEAICEAVGRPNMRFVPVKNSEQQAVLSLHRARQGFVKARTAQANQIRGLLAEYGIIIPQGISQIARRLPEILEESENGLPGVFRQLLKRLGDHLKELERQVDELEGQIQTWHHEHEASKKLARIPGIGPLTASALIASIGDAKSFANGRQLAAWLGLVPKQHSSGGKPTLLGISKRGDTYLRTLLIHGARAVIRVAEHKPDFAESWLARLLARRNKNVAAVALANKNARTVWALLAHDRNYEAGYEPSGA

SEQ ID NO: 204014 - protein, 419 aa, unidentified
MNKIETKKQRIVNAKTLIVAIDIGKTTDTGYCRCPSGKDIKTFEFSNNAEGFKKLWDRICWMKMSHHLEEVVVGFESTGAYGEPLVYYLRQKPVKLVQVNPMHTKRMKELEGNSPGKTDRKDPKVIADIIGLGHALSVVIPEGPAAELRRLTLARERSIRRRTALYNQLQDLVYILFPEFLQVMNNIKTQSAQYLLRHYPTPQDIVACGSEALTLILKRVSRGKLGKARSQALYDAAAQSVGLPEGRRGILLEIEEILSSLEACQRFIEKLEEEMLPYLEQIPYSKSLLSVKGIGEITVAGLIGEVGDFRQFQTLREVMKLAGLNLFEISSGKHQGNRHISKRGRPLLRKLLYFAAINTIRKGGVMHTCYQRHLETGMPKTKALIAIARKLLGILFALVRDHSQYDEQYSQKEVLRLAA

SEQ ID NO: 204015 - protein, 435 aa, unidentified
MSNILFENLFISVGIDVGADFSFMSIALPNQTFVGKPFKILHSDLNSLSMAVSKIKEAEEMYSLESRIFLESTGIYHFPLFCYLRDKGFLVSIINPIITKNSTNINIRKVHNDKFDSKKAALIGLKPDLKVSLIPPDLVLDLRNLSREYYDLIDNRSAYVNKLQGELRMVFPQYLKIFSKITVNTALTLLEKYTSPDAFLNASKDEIIASIRSTARFGALYAEKKYNAIIKAANDAKAFGYSVNSNFKRILLYIRFIRQYDKEISAILSDMHELVDSNEDTDFVRQIHLIESFKGAGFLSAVSLMCEIGDFSAFQSPKQLFAYFGLDPAVNQSGNFEGNKISMSKRGSRIARRVLHTMSLISISRNKDGSAKNPVLRNYYLKKCQSKPKMVALGAIMHKVCNIVFAILRDEKEFEIITPEEHQKNYLKARCDIAA

SEQ ID NO: 204016 - protein, 449 aa, unidentified
MDEKVVDWRCGARPGDGLPPRVCVCYRTWLKVAFEYTELQGWIACIKLSLSGDRLRIYLNCAEVGMDVLLYCCCGLDVHRDMIEACIQRGIDGEPEIIRRTFGTRKAELQNLTKWLEEYDCFTVAMESTGVYWMPVYETLETKTRYLENLWVVNANHMRNLPGRKSDVADAEWIATLLRHGLLEKSFVPPIAIRDLRECSRLHRIFVQERARYVNRLEKFLQAHGFKFSSVMSDILSVTGRKFLEVLKDTGELTMQDVERNGRRLKKSAEEVASAVCGSLTKAEQRLLGQLLRKVDSCQEDVRSILEDMRLLSSHYQEELAIIDSVPGFDEESAMEIIAEISAEPPEYFSSAERLCSWAGVVPRNDESAGKVKSRKTMHGNRFVKAILCQAAWAAVRTRHSPFHEWFWSHRPKLGQKKAIIAVARKLLKLIYHLLNTRQRYRPPLVAAV

SEQ ID NO: 204017 - protein, 366 aa, unidentified
MKKSSKKQSEKTMNDGVVAIGIDLSDRTGRFYAIDDEGKKIAEGTIALRTPELEKWARSIPPTVIAIEAGTHSPWISRLLTRCGHEVIVANPVKVALITQNVQKADPVDAEYLARLARFDRELLFPIQHRGEQAQIDLQVIRTRDIAVKMRSTAISHVRGAVKSLGGRLSKCSTDAFVNTARKEVPEALKTALDPMFDQIDQLTKTINGYGREIENLVEQRYPEVERVAQIKGVGALTGLTYILVLEDAKRFADSRSVGAYLGLTSKKDQSGDSDPQRGITKAGDRLLRRVLVQSAHYIQGPFGVDSDLRRHGEKIAARGGKRAKKRATIAVARKLSVLMHRLWVSGETYEPLRNSTDSAEATKAA

SEQ ID NO: 204018 - protein, 407 aa, unidentified
MRLFVGDDWAEDHHDVEVMDEAGKVLAKARLPEGVAGMARLHELIGRNLGEDAEDAEVSVGIETDRGPWVTALVAAGYTVYPVNPLQASRYRERHGVSGAKSDGGDSHMLADMVRTDSHQLRRTAGDSPEAQGIKVVARTHKTLIWERTRHLNRLRHQLREYFPAAIGAFGDLAAADTLELLGKAPDPARAAKLTRAQVSAALKRARRHHIADKTTAILAALRSPQLGQPPALTAAYAATVRSLTAVITTLNEQVKALEEQVGDHFGRHPDAEIYRSQPGMGAILGGRVLGEFGDDPHRYVSAKARKNYAATSPITRASGKKKLVTARWIHNDRLIDALMTWAFTALNASPGARAYYDELRAQGLEHNDALRRVANRLVGILHGCLKTRTLYDEATAWSHRESSLAA

SEQ ID NO: 204019 - protein, 369 aa, unidentified
MSHAKLTVTALARPPRELREQARGRARSGAAIVESLSKPERLDGSKSRIERKEGSNNMEQQFVGIDVSKAWLDTEAIPQSQSMRYGNDAAGIAALVEAMQAATPALIVVEATGGYETAVASALSAAGLPVVVVNPKQVRDFAKAMGILAKNDRIDARVLALFGQRIRPQLRPLPGVEQRELAELLDRRSQLVLMRAQERARLATALPVAKASLVEHIHWLDERLRQLDIELTARLRTSAAWKVKVDLLKGVPGIGKVTIFTLLARLPELGQLNRGTIAALAGVAPFDDDSGKRRGQRFIRGGRAEVRNVLYMATLSASQHNAVIKAFFARLTAAGKPFKVAITACMRKLLTILNAMLKNNESWHCPATT

SEQ ID NO: 204020 - protein, 293 aa, unidentified
MTITTVGIDLAKNVFAVHGVDQNGRTVLVKPKVSRAALPELIASLPPCVIGMEACSGAHYWARLFRQYGHEPRLMAAKFVSPYRMAGKSGKNDAADAQAICEAVRRPHMRFVPVKDESQQAMQCLHRTRQGFIEEKTATYNRLRGLISEFGVIAPQSADALRHMVSVQKSSLPLQVQQCVDDLMEHVDRIEANITEYDRILSHIAKTDHRSQRLMELKGVGPTTACALVASIGNAHDFKNGRQLAAWLGLTPSQYSSGGKSKLGRITKAGDSYLRTLLVQGGSFSAYWRREKD

SEQ ID NO: 204021 - protein, 391 aa, unidentified
MISVGIDVSKDKHDCFIVNSEGEVLADVFTIHNTMDGFNFLLQRIRECTMPQDKIKVGLEATGHYSYNLLGFLLDNGLPTYVLNPLRTNLYRKSLSLRKTKTDRVDARTIATMLLSDAGLKPYTDTAYHNEELKSLTRYRFDKVKERAKLKSSVSRLVCILFPELEKLVPSLHTASVYTLLEEFSGAKQIAAAHLTRLKTLLETASKGHYKRDMALEIRDAARNSIGSWMPAKSLELQHTIRLIRELDVEIAEIEEQIQSIMDELCSPITTIPGLGFRMAAMILAEVGDFTRFDSPDKLLAYAGMSPSTYQSGQLKNCYPHMEKRGSRYLRYALYNATKYVCHWNPTFAAYLAKKRAEGKHYNVALSHAAKKLVRLIFAMEKSRQPYCSAA

SEQ ID NO: 204022 - protein, 355 aa, unidentified
MNDAKYIGLDVHQATISAAVLDSTGKVLMESILETRAATILQFVQGLRGSVQVTFEEGTCAAWLHDLLQPHVANVLVCDPRKNALLKSGNKNDRIDARKLADLFRSGLLCPVYHGENGVRALQELARSYLALNRDVTRVMNRVKAIYRSWAIPCAGQRVYAPRYRSEWLGKITEVAVRRRAEIYYQQLDGLRSLRQQVRRDLLAESGKHGATKLLRQIPSIGSIRAALLIALMQTPHRFRTKRQLWAYSGLALKTSASGEYRFEEGQLKRSKKFLAIRGLNVNHNPDLKNIFKGAAIRAAAVPGPFQQFYAALVATGMKPTMARLTLARKIAAITLIVWKKGVRFDAQYLKQQAA

SEQ ID NO: 204023 - protein, 391 aa, unidentified
MVCVGIDVAKDKHDCCILDSDGMVRADCFTIPNNMDGFKQLLQTIRNCTKKSDKIKVGLEATGHYSYNILGFLLDNGLPTYVINPLHTNLYRKSLSLRKTKTDRVDARTIATMLLSDVDLKSYTDTAYHNEELKSLTRYRFDKVRERAKLKQSVSRLVTILFPELEKLVPSLHIASVYALLSEYPGAKQISEIHLTKLTNLLATASKGRYGKDKAIQIRDAARTSIGSVMPAKFLELKHTIKLIRELTSEIDEIEVSIQKIMDELNPPILSIPGVGIQSAAMILAEIGDFSNFESPDKILAYAGCSPSTYQSGKLTNCYAHMEKRGSRYLRYALYNATKYVCHWNPVFAEYLAKKRAEGKHYNVALSHATKKLVRLIYALQKSGKAYLVAA

SEQ ID NO: 204024 - protein, 466 aa, unidentified
MGLKKYTNINNIQGKKGSQFSSQLRGMDLERVLIVPIDAAKYYQKALLCNYYGDVLERPFFFGVNQDGLNLLCSKIEDARKEIQAERIFIGIESTAHYYEDIVYELGRRGYGVTIINPATTYEERASALNWSKTDDIDLYAIAHALIQNKGMENKLPEGAYRKLMKLTRARRSEVQKRALVRIQIRTLMDHIWRDYQGFVEIENNKPKRRLIFSDFWGKSSLFFMEHFPHPSKLLEFGEERVWEIAKENKLRIKETHIQTLLYVAEKSINKAMEDVSAELLLLRLAIQDLRRLDENVAILEKEIEKVLLHTDGRLLLTVPGIGVVTAAEFYSELGDISQYDNAGQLIKKAGTNPIIIQSGGTQGFYGRISKQGNKHLRFMVYTVGKSLAQHNKDLRPYYEKLKARGKHARKAFIALGNKFIKIAFSMLKHKKPYESKQLDYRIYNEVKKKLLYTKMNTYLNIAFAA

SEQ ID NO: 204025 - protein, 386 aa, unidentified
MTVMATKDDYDRLVEELASMSRPIVIGLEATGNYHRTLAYKLLVAGFQLRLISSVALARTREALHNGWDKNDPKDAQVILHMLQIGATQVYVDPLEAGINDLQELSKTHEVISKAKTQTWHRILNHYLPLYFPEIAHFAGNSRSDWFLALIKRFPTPSSITSLGREAFVAEAWALVGRNVSKARLINDIYETACSSVALPIAEDAVAISMFRMIIGQGRSLIRERNRIEQIAQSLLADHQDYQLLCKIPGIGPINALTILAEAGDLRRFRHHRQFLKFCGLDLATSQSGTFRGRTKLSKYGNARLRRTFWMAAQVASRQRDNSFRDKLGRYMAGNANDADRRRKAMTALTAKMARVAHAVIKTQTEYRPFIERPEARWKDPSLQLP

SEQ ID NO: 204026 - protein, 339 aa, unidentified
MNEVTLIGIDLGKHSFHLHAQDATGRMVFRKKLSRQQLLRTLANVPSCRVVMEACAGSHWLARQLAGMGHEPRLISPQFVRPFVAGNKNDFGDAQAICEAACRPSMRFVSPRNEEQQTVSALHRLRERLVRERTATVNQIHGFLLEFGISLPRGAALMSRLPTVLDHETLPPRLVALVVRLRAHVHYLEEQIRQVEQDLKAALREDDKSRRLLEIPGIGPITASALAVELGDARQFANARQFSALIGLVPRQYSTGGKPTLLGISKRGDRNLRRLLVQCARAVMQHTDSRTDALSLWVKTLSTRRHSNVVACALANKLARIAWAVLARGTHYEARALTT

SEQ ID NO: 204027 - protein, 344 aa, unidentified
MEHYAAIDVSLEWSSVCVVDATGEIVREVRVPSEPEALVAFFAAAGLCIARIGLEAGPLSQWLHAGLIEAGLPAILIETRHVKAALNAMTVKTDRNDARGMAQLMRMGWFRPVHVKTLQAQEIRALLTARKLLVAKLRDVQSSIRGILRGFGLKVGAISKGKFEARIRELVSGQAMLERVAEPLLRVRAALGAEYRALHRQLLAAVRQDQVCGRLMTVPGVGAVVAMTFRSAIDQPGRFAKSKAVGAHFGLTPKKYQSGEIDRTGRISKVGDAMVRTALFEAANVMLTRTVRFSTLKAWALRVAGRHGAKKAKVALARKLAVVMHRMWVDGTTFRWGEASVSAA

SEQ ID NO: 204028 - protein, 338 aa, unidentified
MAIIAIGVDLAKNVFAVHGVDETGKAALIKPSVRREALLELIAKMPPCLIGMEACSGAHHWARQFQKFGHTVRIIAAKFVAPYRLSGRKGKNDAADAQAICEAVQRPHMRFVPIKSEDAQGRLCVHRVRQGLIEARTAMINRIRGLLSEFGYVLPLKADVVRRQAGQCLEELPGWANLAIGDCLSELHHLDERIDQYDRHIGQMAKTDERSQKLMAMPGIGEKTATALLASIGNGHDFKCGRQLAAWLGLVPGQYSSGGKQRLGRITKAGDSYLRNLLILGARAVLVASKNKTDRLSRWAQSVEQRCGYWKAVVAIAAKNARMVWAMLSKGEAFKPMS

SEQ ID NO: 204029 - protein, 385 aa, unidentified
MTNRSESFKIVPHDYDIFTGMDVDKRSMLTTFTDHGKLLSSKRMPYRSQHLLNYVQKYFPGKRIAFVYEAGPTGFGLYDELVANGHRCLVVAPSMVPSAPGKRVKTNRIDSKKLSEGLRGGQLEGIHVPTPKYRDLRHLVQLRDTQSRQLTATKCRIKALLLYEGIPFPSENGKWSLRVIAQLKQLPCSGAVRFKLNQLINTLKFHFESASTAQKEIRRFCQEDPELQESIRLLTSIPGIGSIIATHLVARLGDWREINNVRQIAGFLGLVSREDSTGDRVRRGEITRVGDSRLRNKLIQGTWVAIRRDAELRAFYRRIYQRNPKNVAAKKAIVAVARKLTTRIYAVLKERRPYEFRPDNSRAPLTAEETACLRERLAGAQSEQP

SEQ ID NO: 204030 - protein, 412 aa, unidentified
MQVLFPRCAGLDVHRDTVAAAVRIQTGSGKAVTEVRTFTTTGGSLGLLADWLTECRVTIVGMESTGVYWKPVFHLLEDRFECWLLNATHVRNVPGRKTDVADAAWISDLVAHGLVRASFVPPKPQRDLRDLTRARRIVVEEKTREIQRLEKLMQDAGVKLTSVASKLLGVSGRAILEKMIEGEQSLEYLADQARGRLRSKIPQLQEARAGTFRSGHHGFLAAQLLARIDLCDEQIDELDHRIEVMIAPFRETVDRIRTITGVGEVTATVLLAEVGLDMSRFPTAGHLASWAGICPGNNTSGGKRLSGRTRHGNKWLRTALTEAAHAAARSKDTYLASHHAQVRGRRGVLKAIGATRHDILIAYWHIIANKTVYQDLGGDWHARRRRDPERRRKNLVGELEKLGYTVTITPAA

SEQ ID NO: 204031 - protein, 352 aa, unidentified
MNSLTDLREVVDVIVGVDTHVHTHSAAVVDARTGAVLDEITVEATADGYVELVDFAEAHAVLRAWAIEGTGSHGAGLTRHLERRDEVVIELDRPERARRRNGAKSDPLDAVRAAREALARPRLGTPRTSGDRQALSVLLAARRSAVNAAGDAQRQLFNLVIAAPEPIRERFRGQKVPAMIKTAAGLRIHSSWDVEAATTVTVLRALARRTHDLTAEASAHERAIASIVRSWRPDLLEEFGVGTIVAATVRCAWSHPGRIHSEAAFAMLAGVAPVPATSGQVTNRHRLNRHGDRQLNRALHTITLCRIRYDQRTRDYFDRRTAQGKTPREIKRCLKRYIARDLYRLLEHPSTT

SEQ ID NO: 204032 - protein, 338 aa, unidentified
MIKILYAGIDVSKDKLDVAIASEREKIIASSTFDNSLSRVNGFKQLKKWVRKRAKSFDNVHFCIESTNNYHEEIVEYLQEEGFTVSVINPFQSKSFACSKLCRTKNDRVDAGILAHYCLIHQPKASVKPSEEIKKLKNYRREVEKLINTRAEFKTKLHNCKDSSVAHVLNGTILSLSESIAQLEQIIQQHIRQYPKLKEKVELLKTIPGIGDRTAWAIISEIHVEDGKNLNVKAQIAHAGLAPREFQSGKSKGRTRICKTGNSRLRRVLFMPAMNALQKNPVLFAFYHRLLSKGKLKMVALVAVMRKLLAICIGVLRNNQPFQADWIEKQKKAAAFSC

SEQ ID NO: 204033 - protein, 384 aa, unidentified
MRSVCGLDVHKDSVYLCILSEDGELIEKVFGVLTFQLHQMRDLLLAHHVETVSMESTSVYWIPIWRILAPHFHLQLVTPYFIKQLPGHKSDVADAQWIAECTLKNLVSGSFVSPEDIQQLRQYDRRIFDLDEEIVRKLSKLDAVMQRCNFRLSNYVSNVDCKSYKDVVRKISEGVTDPEILIEEIHGRIIKHHGRETILASLAGVISQAEIDVLRQLREELALAEEHKRECLERMLEICQEKYPDELRWLQTIPGVKERTATSLIAEIGTDMSKFETANHLSAWSGLRPRNDESNKKFKSRRITHGNVYLRKNIIQCAWAASRTKGCFFSRFSYHQTQVRKKNKMKVIVAVARKLLVAAWHVIHDKTDYVDFQKRDRQAPASNG

SEQ ID NO: 204034 - protein, 320 aa, unidentified
MRNAVGLDISKLTFNASAIVGNAEYSAKFDNDSKGLDQFSDRLKSLGCQNLHICMEATGNYYEEVADYFAQYYSVYVVNPLKISKYAESRFKRTKTDKQDAKLIAQYCRSAKESELVKRQKPTDEQYRLSRMTAAYAQIKSECAAMKNRHHAAKDEEAAKAYAQIIKAMNEQLEVLKEKIKEQTEKPNCKEGVKRLETIPAIGRMTAAVLFHHLTSSKFETSNKFAAFAGLSPQQKESGTSVRGKGKLTKFGNRKLRAVLFMPAMVAYRIRAFPDFIKRLEEKKKPKKVIIAALMRKLAVIAYHVHKKGGDYDPSRYKSA

SEQ ID NO: 204035 - protein, 329 aa, unidentified
MYVCITDGAGKILVHKNLRANPDSFAQVIEPYREDLVVAVECVFVWYWLADLCEQLGVTFVLGHALYMKAIHGGKVKNDRIDSEKIAQLLRSGMLPEAYAYPEAMRSTRDLLRRRMYLVRRQAELQGHIQNTRHQYNLPAYEKRLDRAVNRQGIAAHFDDPMVAASIQIDSNLLDSLHQQILLVEHLINEQAPEHDSVAVQLLRTIPGIGKVLTLTVLYQIGDITRFPQVGNFISYSRLVKCAHESAGKKVVGRNNKIGNAHLKWAFSEAACLFLRESDQAKAWHQKLVSKYGKGKALSIIAQRLGRTAYTMLKKRTAFDREAFFASLN

SEQ ID NO: 204036 - protein, 408 aa, unidentified
MNPLYVGIDVSSKNNVIYLMLPNGDKHSSFSLANSHDGSTQLVKRIFTAMTSNNIDSVLIGLEATSVYGDNLVYFLKEDTTLASFDRKIHVLNPKQVNKFKESYNDLPKNDYVDAFIIADCLRFGRINKEVYMDDYRYKALQNLTRARYFAVTNLTKEKQRFINVLFKKYSTMTQEKVFSDTFSTTALAVYEKFESAETLAKMDLQELTAFIMEKGKNRFPDPDAVAKALQKAARSSYRLPKTVNDSVNQVLAISITSIRALESQIKAFDKAITKQMELLPNVLISIPGIGPVLSAGIMAEIGDINRFQNQAALAKYAGLAWQQHQSGDFEAQTTRMIHSGNRFLKYYLCEAAFSLVRCDKEYSRFYHLKYKEVNRFQHKRALALTARKFVRLVFALLKDNRLYRPAE

SEQ ID NO: 204037 - protein, 433 aa, unidentified
MEEAEDEPLFRERAAGIDIGKQTVMVTVRVPSQTRRGGRAQETREFGTTRRQLLELADWLRSWGVERAGMESTSDYWKPVFFLLEREGFDCVLYPASKVKALPGRPKTDKLDSAWLAKVTERGSLAGSFVPPEDIRRLRTHTRYRRRLTQARTAEKQRVEKLLEDAHLKLSSVISDIHGVSGTDMLRALAAGERSPRVLAEMARGVMRRKLAALREALDCSFFTGEHAFVLSMMLDNIDHYSAQIAVLDNKIAALCEPYERQIAQLDQIPGFGVRNAQDLIGEIGVDMSVFPTAGHLCSWARVAPRVKESGGRRKGGSATGKGNPYIGAALGEAAASVGRTQTFLGAKLRRLVRHMPKKKAQGAVMRTQLVTAYALLSDPAADYREPGPGYYDQRTGTQRQARGHIRSLERLGYKVTIEPIDPDTGELTAKVG

SEQ ID NO: 204038 - protein, 428 aa, unidentified
MKKHSFSKLEAITPNMLIIGVDIAKKFHWARFTDYRGIPLGKALKVLNNKEGFENILTRIKDVCKQHGLHKIILGLEPTGHYWKPLANYLVGQGIKVVLINPYHTKKAKELDDNSPTKNDKKDALTIARLIRDGRFSQLYLPQDVFAELRVLSTTRVSLMKRQNAIKNTIRAVLDEYFPELVTVFKYPLKGKACRQILKSCPFPSLILKLGRTRVLTQIKKAVKKTIGQKRVEKLLREAKESIGVTYGIPSARLKLTLLLEELELLEKQLDQVESAMEQSLTHTGFKEIILSIPGVGIITAAGFLGNTGDPLRFTHPRQISKLAGYNLTEDSSGEHQSKTIISKRGRKQLRNVLYQMARTTVAVNSQMRELYHYLKTRPHNPLKKKQALVVISKKIITIIHSLLKKQVHYQPELVFNQFRLNQLKQVA

SEQ ID NO: 204039 - protein, 330 aa, unidentified
MSVFVGVDIAAKTFDLVNRKGGKASKVESFSQSPQGHAKAIKRLHNLKPTLITMEATGIYYFDLAVALVQAGLPVAVINPKSFHHFAKLKLAGSKTDGVDAALLAEYGERIEPSLWTPPDEVRLALRDIGRQINRLTGTRTQAKNRLHALQAKNSTRSLLVEDEQEGIAYLDRRIERLSQAALALIAECETLSRYLTHMCAAKGVGKASALIVLAELCVLPSSLKAPQVSRFAGLDVRLTQSGSSVNRPARLSKAGNAYLRAALYMPAMSAIQHDPRVKAFYDALVSRGKKKIQALCAVMRKYLTGLWACIQTETAFDSAMLFSEEHLKA

SEQ ID NO: 204040 - protein, 338 aa, unidentified
MKGFCISLDVSKGSSFYQGFKGLDEPITKPKKIEHNLEGFKELLNLKEKIKKQYNEDCVVIFESTGIYHKPLQTYLDEHDFKYTIISPLLSAKVRKSDIRGTKTDAKDCASIAKVFFLKELRIYSKIDEIYDDLKEKSRYYDFLMDEMKRWKIEFRRLFDIIYPGFDRVYDDLYGDFIQTFLLEYSHPEIIRKRRLDTIAKFLEKHTCHKEAYCIRQAQTLKEYVENCASGCSSKSYLVRQFDTVIHNLNAQIKHLEIVLEEIVELAKTLPNYDSIRSIPGIGNNLAGRILAEIGEVNRFNNASQLVAYAGIDPQIYQSGQISGLHLKISKKGNKKLR

SEQ ID NO: 204041 - protein, 429 aa, unidentified
MDTRTLCFGVDVHRDQLVLRAADKATGLERSTLLRVPNNRLGAEQAVTWLLHLAAGTDGVGYDRLEGGLEATGLLWLPFHVYLTESAPLKPFHLQLICFNPKLIADFKKGVVLADDKDDGRDAWGIAERVRFGHWPTSYVPDDFWQGLRRLTRYRFHLAQMVARESARFGTHVFLKWSDWLRLAPFSDLLGVTSATLLTQYSTADLNGLSLSQLTDVIDRLGKRRFSDPQATARKVHQALAQSYPVASQLEQAVMTVLSVQLEHIRLCEKLLKRLDRHIAHYIKDLPNPLLSLRGLGPVITAGILAEVADIARFPGDPQLAKYAGLVWRKHASADFVAQDTRLSKVGNVYLRYYLVQGANLLRQYNLDYQAYYRRKVEEAPKHKHKRALVLTARKLVRLVHALLTKNEPFVARSTATDMSEATDLSLAA

SEQ ID NO: 204042 - protein, 368 aa, unidentified
MIVRIMTYRRSTLVNDEKYIGLDVHQATIVVAVMDSTGKLAMESIVETEAATILQFFAGLRGTLSVTFEEGTWSVWLYDLLNPHIDKLVVCNPRKNALLKDGNKSDRIDARQLAELLRGNQLKSVYHGETGVRMLRELSRSYLTIVKDLSRVMNRLKAVYRSWAIPCAGRDVYYRRHRAQWLAKIREAGVRRGAERLYEQLDMLQHLRQQARRELLAEGRKHAITAKLRQIPYLGPIRSVLAVALMQTPHRFRSKRQLWAYSGLALETRISAEYRLVEGQVRRSKKMLSIRGLNKDHNHDLKGLFKGAATMASVRPGPFQDFYQAALAKGIKPTMARLTLARKIAAITLTLWKKGENFDAKKLKSQAA

SEQ ID NO: 204043 - protein, 433 aa, unidentified
MSLPGNLSLAEVHLAPLSNQQFKAFFGIDWADTKHDICLQQAGDDRREFDCIPHQVTRIDEWAKALHQRFGGPIAIALELARGPIVSVLQKHAFFTLFPINPLMLAKYREAFKPSRAKDDPTDAELALDLLLRHPERFSPLRPQSAGMRSLLSLIEQRRELVGDKTRFTNRLTNALKQYYPQALEWFDDIDTALFCDFLTRWPTLPAVRRASRKTLETFFHAHNCRRAQLIEGRLESIRCAVSLTDDPGIVAPHRLLALMLVAQLRTALAAIDVFDKEIATVARTLPDFDLFDSLPGAGPHLTPRLLAAFGEQRDRFKGAEELQKYSGIAPVTERSGKKCWVHWRWQCPTFLRQTFVEWAGQTINKSFWAGAYYRQQRAKGSSYQAAVRALAFKWIRILYRCWQTGTRYDESIYLNALRKRGSPLLRNLGLPE

SEQ ID NO: 204044 - protein, 394 aa, unidentified
MFIVGIDIAKRSHMVRVVDSDGQTVYKPFPIRNNCSGCNTLLERLRKLTNQKSDFVVAMESTAHYWLALYTRLRKEGYRVVVLDPIQTNAMREMLMQDAKTDDIDTLVIAETIRFGRYKASSVPQEKLLAMRELCRNRFYLVDMGSDLKRKIIALLDQVFPEFETQFDSIFCKSAVAVLKQYPTPEKLSRAQLGKLTEILQIASNGRFGEWKARQLKELARDSFGIQDCEGAYSTLLLLYLDQLQSLQDGAASLERRIEDIFSQFDSTLTSITGIGPVLGAVILSEIRDIASFPSADKLAAYAGLDPKVKQSGETRSSAVHMSKRGSPYLRRAIWMAGTIAVKYDPMFKAYYEKKAAEGLRYMNIIGHVSKKMTAVIFAVMRDNKLYEPVVPAA

SEQ ID NO: 204045 - protein, 423 aa, unidentified
MKVVYPICCGVDVHKKFFVATIITTEGIQPKYQKRRFSTFNNQILSFKEWLLENNCYDVCMESTGKYWIPVFNLLEDSINVTIANPKWVKTIKGNKDDAKDSKWIGDLFRIGLVPGSFIPGKDIRILREYTRYRCKLVSCKSSEKNRYQNVFTVCNVALDAVVSDMFGKSAVSITDYIINSDTFDSQYCVSLLKKSLKKKSDEVVESIEGFQMTTSQKNRAKMVKQHYDYLLTHIKKLDEMIDELAKPFEPAIQLLCTIPGIKRDSAVTIISEIGTDMSQFDSSKRLCRWTGLAPGNNESAGKKKSVKITRAGVYLKPALVEVAHAAVKSTTSPYYRLKYERICKRRGKKRAIIAIARMILTAVFNMLTTGEVWNPVDLNQIDMPPELREKEVQKSLRRAAKLLVSHGIISFDSIQFPEFASG

SEQ ID NO: 204046 - protein, 367 aa, unidentified
MHVQGRGTDEQSTFFNPFRQTHMTTIKINKNDHESKPSLQAGIDVGSEELILVVRKNSKSFDPQKFTNTPVDRARLVKKLSKLPGIIVCLEATGIYHFDLAVALHDAGVLLMVVNPKASHNFAKVLMRNSKTDAVDANTLAEYAARMDFVAWTRPANETIALRCFSRRINSLTGQKAAAKNHLHALTATQETPKAVLRDAKLAIIQLQKRIDRLTAEALVLISKYPELERVLELLTGIKGIAETSAIALMGELLLLPPDLSHREWVKFAGLDPKAFDSGKSVHKKTRVSKAGNRYIRAALYMPALSAHQHDPHVRAYFEHLVVTNGKEKMQALCAVMRKLLHAIHGMLKHDKPFDNTRFYAIPASVG

SEQ ID NO: 204047 - protein, 414 aa, unidentified
MKEHSSFSNDRELSCKEAKSVRRDAREVMSELVAQLRKQLEGQNGVSADKDKGVPDGESPNLDRLTVGVDLGDRWSHYCILGLSGETLTEGQFRTRRQEVAEFFQDLARLRVVIEVGTHSAWVREVIAELGHEVLVANARRMEGCKRRRRKNDRIDAAKLARLGRVDPQSLYPIQHRSTEVREDLLVLRAREALVESRTKLISAVRGLVKSMGTRLSSSSSDAFSKKVAAEIPQQIRDTIQPLLRLIANLSEEIKCYDQRVEQLAQEKYQHTKLLRQVTGVGPVTALAYVLTLETPLRFARSRDVGPYLGLVPRQEDSGDSQPQLSISKAGDRMLRKLLVGSAHYILGPFGPDTDLRRFGKKLCERGGKNAKKRATVAVARKLAVLLHRLWISGEVYDPLRHASFAPTAHTAAA

SEQ ID NO: 204048 - protein, 414 aa, unidentified
MALKIIYPICCGIDVHKTFVVACIASTNKGVTTYKRHRFSTFTKGLKELSQWLCENNCKDVCMESTGKYWIPVFNVLEDSCKITLAHPKYVKAIRGKKTDKKDAKWIADLFKHDLIAGSFMPPLAIRQLRDLMRYRFKLTNFMSSEKNRLQNCLTVSNIQLGHVVSDTFGKSSMNIIEKLLENPLDTSFDIEPLIHGSMKNKLPELELAIDGFITPEQAEKLKVIKQHFEDLQSRKEDLEKIILSLAKSYSEEINLILTVPSFKNIFSAIAVVSEIGVDMDVFPTAKHLCSWAGLTPTNNESAGKKKSVRISRAGCYIKPLLVQCATAVVKSEKHPEIRNRYLKLKKRRGHKRAIIAIARMLLTAIYNILKKKEPYNPALYKKSDSVPVTREITVEQAIRFAKSQGFRVLVEPT

SEQ ID NO: 204049 - protein, 384 aa, unidentified
MKVVCGLDVHKDSVFCCILCANGEKIQHKFGVLTEELVTLRDLMVSEGVEECAMESTSIYWIPIWRVLEGSVKLHLVNPYFIKQLPGKKSDVNDAEWIATCLSKELIASSFVPDDKIQRLRQYDRRIFDLNVSISRNLVKLDQCIQRCNIRISNYISTTDSKGYRSIVKLISQGVTDAEVLVKELHGRTINRHGRETLVKALTGVVSETDIDIIKQLVEEIELQQRHKDEAQEKMTALCMEWFPQEVENLQTIPGVKERSATSIIAEIGTDMTHFQTPKKLVSWVGLRPRNEESAGKIKARGITHGNRFVRKTMIECSWGAARMKESFFAEFSYRQCIERRKNKMKVQVAIARKILVAVWYVLSQGTQYIKPTDHYTAAHMTAV

SEQ ID NO: 204050 - protein, 386 aa, unidentified
MDHLTTLSVPDPTGICGDCATLFVSLELSRSTWVATSLALGSRKMSKHTLVGGDARKLLDLLARLKNKAEQRMAAPVKIVAIQEVGLDGFWIHRLLETNGVESHVVDPASIAVPRRHRRAKTDAIDGETLLRTLMAWQRGEPRVCAMTMPPSPSEEDRRRVSRERAILLRERIRHTNRIRGLLFGQGITNYNPLHKNRREDLEELRTGDGRLVPAHLKAEILREIDRLELVLRQISEVEAERDEMLRPAQASSPAALLMRLKGIGAEFAGVLYLEGLFRHFENRRQLAAYAGLAPSPWKSGSVDHEQGISKAGNPRLRTTMIELAWMWVRYQPASALSCWFRQRVGSERGRIRRISIVALARKLLIALSRYINHGEIPAGAIVKPV

SEQ ID NO: 204051 - protein, 340 aa, unidentified
MLAAIDIHKAVFQAAVLEPGSGELVEQRFPASREALLDWVGEWAGRLEAVAIEATTGWRWVARELQARGIEVRLADPGQASSLQGGRKRPKNDRLDARWLVMLLAREMLPEAWLAPAEIQRLRDKTRLRKALTDDHTRWAQRLHAVLVHEGWPCSRGSLLTAAGRRWVAAIRLDPGARAQVETMLSVMATLAQQIDLLDCELRRLAKADERLKALQGIFGIGPILACTILAEIGDATRFRRARQVVRAAGLDPVVRDSADKQRRGQLAKQGAPCLRWALVEAAQHARRKRSPDHELFLRRRGHDGANPATLTVARKIGKRAFHVLNALETQTTTQARTAA

SEQ ID NO: 204052 - protein, 398 aa, unidentified
MLSIGIDVSKGKSTVCGMKPGGEIVYTPFEVQHTREGMSELVSLLRGSGEEVRVVLESTGSYHCPVVAALLENGIFVSVVNSLRMKRFCSQSIRRVKTDQIDAMQIALYGLAYWPELQPTRLPENTYRELQLLARQYYQMTSLLIKAKVDFNALCDQVLPGMQELMSDHAGRHKLSDFVLRYRHTTHILEMGETRFRKDYCKWAEKKGYRNRERMAALIFATAQNGIPVLPNAPSTQIVITEAIRVLHTVEASRDAILTQMQALAKTLPEYSLVREMPCIGDTLAPRLIAEIGDVRRFHSKRALIAYAGIDAPPYQSGKFCANNRHISKRGNRYLRKTGYEVMQSYVMHKPANDPIFTFIEKKRSEGKSGKLAMVAGLNKFLRVYYGKVTELYRSLPQ

SEQ ID NO: 204053 - protein, 344 aa, unidentified
MITFGVDAHKRTHTMVAVDDRGQAVGQTTVGTTSKDHFGLLRWAGQFGLERRWAVEDCRHLSRRLERDLLAAGERIVRVPPKLMAHIRDSARTYGKSDPIDALAVARTAQREPDLPVARLDGPDRDLRLLVDHRESLVAERTRLICRLRWHLHELDPGWEPKARSLDPKRTLIEVQVRLEDRSGLVARLARDLAERCVGLTISITRLAQEITQLAEQLAPTLLALPGCGPLTAAKIVGETAGVDRFKSRDACARYNGTAPLPVWSANKARHRLSRTGNRQINAALHRIALTQARWHPSAQAMIQRRRSNGDSGREAVRILKRRLSDAVFQALRTDQRELTTLAA

SEQ ID NO: 204054 - protein, 321 aa, unidentified
MAMSVTPFEAGVDTAKDELVIQSAPDTKPFAIPNTPKAIRAWLKTLPSGSALAIEATSTYHMEMAEQAHAAGFTVYVVDGLRLSKYRESIALRAKTDAHDAALLARYLSKERSSLKAWTPPAAGHRKIQVLLRRRAKLVEIRGMLRMSWSGDKLFASELKRMEKAIKKAEMSLEKGLREVIKEAGLQDQLSRVQQLPGVGFLTAVGLVMSFMRGDFANSDAFVAYLGMDVTVAQSGKWSGKGRLSKRGDAEVRRLLYNASMSGSRTKTWKQFYAHHLGRGMKTTQAFVILARRLARLAFGLMRHQADWKPEVYTGGAKPVS

SEQ ID NO: 204055 - protein, 369 aa, unidentified
MADYREAFVAFDVAKIKHAVAVADSGRGGEVRFVGEIENRPVTIERTIRKLAKRYDRLHVCFEAGPTGYGLYRQVGDLGHDCMVVAPALIPKRSGERIKTNRRDAVTLARLHRAGELSAVWVPDIVHEAVRDLVRARQAGAEDLRRKRQQLLSFLLRHGRIYDAGGHWTLAHRRWLARQAFEHQAAQIVFQETSDAIEDAAQRLHRLDEQLAAIVETWSMKPVVEAYQAMRGASFLVAVIFAAEIGDVRRFETPPQLMAFLGLVPGERSTGDTVRRSGLTLAGNRRARRALVEAAWTYRYPARVSEPLRARLEGLPKAVRDIAWKAQVRLCARYRRLAAAGKKPPVIAAAIAREMAAFLWAIGREVATS

SEQ ID NO: 204056 - protein, 401 aa, unidentified
MGAWRQETSKRVAMLLIFDFIKEVKKMSHVEGLNTKTIVVGVDVHKYSHTAVAIDCFGQELGEHEFSNDYLVEFVTWLNSLGLRENLLVALEDVNGYGCHIVKYLANEKIIMRYVPGILTERHRKQSIHREKSDRVDALRVAKVILTNYEETLPAKESIANQNERTVATSLDFFLVERRSLVSEKTILKNQLHAMLHQCLGDHYTDQFTKPFNTKSIIYYLKTLKPKTATDTEQLALIMSIRRRLERLKLLTNQIKEIDQEMAKVAKSSKAINSLRSEIKGCGHITACTLLAEVTTIKRFQNKAQFARYSGIAPIHKSSGSHNRLYTSPYGNIKVYRGLHTIALYQISRTKDPTGLGRIYYDKKLKEGKTKLWALRCLKRQLANRVFQTLKQEYLTHPETN

SEQ ID NO: 204057 - protein, 418 aa, unidentified
MISVGIDVSKGKSTIAIFKPYGEIVAKPFDVKHTKEDLQSLAAMIRHLNDEVRVTMESTGIYHWPVLQTLLANDIFTVVVNPYAMKLYRKQSIRKGKTDKMDAMAIAQYGLDHWVNLESFESTQPIYDELKLLGRRYRHYMRMHIDSLQELTHILDMTMPGINKVFAGWQERSGRNKVADFAAKFWHYDNITKMSESQFVKTYEKWNKEKGYRMNETKAVEVYTLARNSIPTLPVNYSSAKMMVQEAVRVLQSVDATLYKILAQMKELAKSLPEYGVVRNMGGVGDVLAPKLIAEIGDVRRFHSGKALIAYAGLDAPPYQSGKFTGTERHISKRGSSNLRKIGYEVMRCLKCHSAPNDSQVYDFILKKEKEGKNKAVAKIAGLNKFLRIYYARVKEVYRENDYIQNRYQKNLTSKLKK

SEQ ID NO: 204058 - protein, 341 aa, unidentified
MKAVAAVGLDLAKSVFQVHAVDHAGEIVVRRTLRRAQILDFFRKLPACLVGLEACGSAHYWAREIAALGHDVRMLPPIYVKAYVMRGKTDAADAAAICEAVTRPTMRFVPIKTAEQQAAGMLLKTRELLVRQRSQLANAFRSHLSELGIVTSTGMASIDKLAGLVRNADCPLPALARTALLEMAEQLGLLSDRIEHLDDNIRAGIDIDEAGTRLTSIPGIGPLIAATVRATVYDPSGFKRGRDFAAWLGLTPRLLSSGGKEKLGSISKQGNRRLRTLLVVGASSIIKQAKRGVPLQAWLTALLVRKPYKLAAVALANKMARIIWALLTKGGIYRMPEPTPA

SEQ ID NO: 204059 - protein, 343 aa, unidentified
MARFVGLDVSQKLTSICVVDDAGRRLWCGQCHSEPEPIERAVRRHAGDDASIGIETGPMTPWLVHELRGRGLNVVCLDARHASAALKMQMNKTDQNDAEGLAHIMRTGWYRSVHVKSLDAHRTRALLGARAQLVGMTTRLSNHIRGVLKTFGMLPGAMRGVPFDRRVEALLADHGGVAAIVRPMLTAWRQLREQIAVFDKAVRTLAKNDPTCRLLMSVPGIGVVTVLAYVSMIEDPARFARSRSVGAHIGLTPRQYQSGEVDRSGHISRCGDRLARTLMYEAAVVILSRVKKASGLKDWAQAIAKRSGIGKARVALARKLCTILHSIWRSGQPFRWSAQSAGA

SEQ ID NO: 204060 - protein, 338 aa, unidentified
MQLYCGIDLHSNNSVVSLINDEDQLISEKRLDNDLEAIEQHLQPYQDVIRGVVVESTYNWYWLVDGLIEHGYPVHLANTLAIQQYNGLKYTNDETDARFLAHLLRLNILPTGYIYPKAMRQVRDLLRRRLLLVKQHTAQLLSLQSMIGRHTGLRLSSHQVKQLTQDQLAHYFDAKATLFAAQQTHQLMQQLKLQTEAIEGFVLARCKDSELYAIITSTPGIGKILGMTILLETGPIERFAQVGNYASYARCVPTDRISNGKSKGQGNAKNGNRYLAMAFVEAAHYATIWDPTIKRYYQRKCKKRPVMVAKKTVANKLTRACYHMLKDGTTFDVTRAFG

SEQ ID NO: 204061 - protein, 318 aa, unidentified
MNIRHICGKTADMKEIGFTQMVSVGCGIDVHQSLIVASIRKSAAEVETREFEAYTSSLTSLREWCKSEGVTHVAMESTGVYWKPVFNVLEEDFEVILVNARHVKNVPGHKTDKKDSRWLSKLLLSGLLRGSFIPPRDIRELRDLVRYRKKVVGQIASEKNRIIKILEDANIKLSSVLSNVDGAVGTKIVDDILAGETSADQLLRHYHGKQKVSKEEFRKALEGRITEHHKLMLSIHKNSIADKERQLQQLDESIDKATEAYCLEVDLLDTIPGVGRDSAISIISETGVDMSRFPDETHLSSWAGMSPGNCETGGKKKV

SEQ ID NO: 204062 - protein, 353 aa, unidentified
MKQHTAILPHRTLGLDLGDRQTAMCVLDRLGTVVEEVTFTTGRDELTARFEHAEASRVVLEASRQSNWISRLLRSFGHEVIVANPRELHLISKSVRKTDRNDARTLARLGRVDPELLKPVHQRSEAMLAVRALLNARRGLTLSRARLINIVRGSSKAFGQSIRPSSPACFARAARRELSADLKDTMEPLLVAFETLTEQIREYDRKIEALCEQHSNPTGLFRQVYGVGPQVALAYFAAIEDPARFERSREVGPYLGLTPKAHQSGASTPRLRITKQGDGSVRSLLVTAATLILRRSAPDSDLKRYGRRIARGKAPRDKARARIAVARKLAVLLHRMWTTGEVYEPRRGVQAKD

SEQ ID NO: 204063 - protein, 412 aa, unidentified
MLFVGDDWAEDHHDVEVQDDGGRRLARVRLPEGLVGIERLHALIGEHLSDELVDGDPREAARSVVVGIETDRGPWVQALLAAGYQVYPVNPMSVARYRERHSTSGAKSDRGDAHILADLVRLDRDRHRPLAGDSDLAEAVKIVARTHQSLIWDRQRHVLRLRSALREFFPAALQAFDDLSAAEAVELLERAPSPTAAARLSRSKIAAAFARARRRDVDAQAAKVQELLRAPALRQPAVVEDAYAAVVAAQVRLIAAVSTQIHALAAQVDEHFGKHPDAEIYLSQPGIGPVLGARVLAEFGDDEHRYLDAKARKNYAGTSPITKASGCKQVVLARYARNTRLGDALHQQAFSALRASPGARAYYDQLRARGKNHHAALRQLSNRLVGILHGCLKTRTCYDESTAWSEDLTAAA

SEQ ID NO: 204064 - protein, 426 aa, unidentified
MTEVTDPKWLAGIDWASEEHQVCVLDAAGACLGERAFAHGGKGLGELCDWLLEVTGGEPEQIAVAIEVSHGPVVEVLLERAFQVYAINPKQLDRFRDRFSVAGAKDDRRDALVLGSSLRTDRHCFRGLAVDDPLIVELREWSRMAEELQQERTRLANRLRQQLWRYYPQALELGGDLADDWFRELWTLAPTPAKAKRVRLTSIERILKTHRIRRIDAAEVLRRLRQKPLQLAPGTVEAASAHIRTLLPRLKLLNQQLRQAHRELDRLSESLDAGGEPSAGEEIGTGQQCEQRDIAILRSLPGLGRIILATLLAEAYQPLRRRSYHALRALSGVAPVTKRSGKQRLVVRRLACNQRLRNAVYHWARVAIQKDELCHARYAALRARGHSHGRALRSVADRLLAVACAMLSSQTPFDPQRAQQRLSRAA

SEQ ID NO: 204065 - protein, 434 aa, unidentified
MPAAASGLVTTAGSVLMAQVMIGVDPHKGSHTAVAIGAGEERLGELQVLACPSQAEQLLAWAQGWPERAWAIEGAAGLGCLLAQQLVAAGERVLDVPPKLAARVRLLQAGGTNKNDPNDAYSVAVAALRSVAPRPVLAEDYAVVLKVRARRHRDLARSRNQACCRLHAVLCDLVPGGVRREISAGRAARLLEQVTPPDAAARARCELAGELLDDIRRLDAQLRACHKKLAAAVRASGTSLTGLFGVGPVIAGTVIGDVRHVFRFPGRDHFAAWNGTAPVEVSSGDRKKVYRLSLRGNRRANHAIHMAAVTQIRYQHSQGRAFYEKKLAEGKTHKEALRALKRRISDAIYAALVADARRAAAQGSEGPGGQPGNHSESRAAGSHPAHRHFGQATPGPATTIRAGTRADAIPPHPNGTRPRPAHSPASSKKPRTPS

SEQ ID NO: 204066 - protein, 409 aa, unidentified
MDIMYERCCGLDVHKQTVVACVLLPGSGRQPAKEIRTFGTMTADLLELADWLSEKGVTHVALESTGVYWHPVWNLLEGHVELLLVNAQHIKQVPGRKTDVRDCEWIANLLRHGLLRASFVPESPQRELRQLTRYRTSLVRERAAEINRIQKTLEGANIKLGDVASDILGVSARRMLEALIGGNTDPKELADLAVHKLRNKLPQLERALAGQFGTHHRFLLAQQLVHLDGLDELIERLGSEIAERVRPVEPVVERIDAIPGFGRRTAEIVIAEIGTDLSRFPSFKHLASWVGLCPGNNESAGKRMSGKTRKGDVWLRTALIEAAHAASRSKDTYLAAHYHRIAARRGKKKAIVALAHTLLTIIYYLLTRDCDYKDLGPDYLNERDREQTERRLIQRLRGFGYTVTRETAA

SEQ ID NO: 204067 - protein, 450 aa, unidentified
MMREPQEIEDEEYEQVLARVAAIDVAKASGMVCTRVPHELRPGKRRTRVREVDATTNAVLELAGQLAGEGIEKVTLEATSGYWRIWFYLLESAGLDVQLVNARDVKNAPGRPKTDKLDAVWLAKLTERGMLRPSFVPPVQIRQLRDYTRLRQDLTRDRTRHWQRLEKLLEDALIKMSAVASTLTTASARDMIEALIAGERDPRVLAELARGRMRVKRPALVEALTGCFDDHHGELARMLLDQIDGLTAQVDTLTARIGELISQMPAARGVDADGTTGPGAGLGHDAAVLPAVSRLDDIPGISPHAAQVIIAEIGLDMTRFPTAGHLVSWAKLTPRTIQSGPRSQAGKTGKGNPYLKGALGEAAAAAARTDTFLGERYRRLVKRRGKLRALVAVARAILVIIWHLLADPAARYHELGAGYYASRIDTDKKTRNHIRQLEALGFTVTLAPAA

SEQ ID NO: 204068 - protein, 422 aa, unidentified
MVKNNRKENTMKEKVYVGIDLAKDSSRVAAFDETGEALVKPFSITNSKEGIKKLLSRLSGYKASQIVCGMEISSNYWENMCSHLKGMDVGIILLNPYQVNKYRQATGAKIKTDTIDAEAIADLIRGRKYDSLYISDDTTIELRELVRIKYGFQRRVKDLKKSVLALLFLVFPEYTKMISRPFSKVSMEILSKYPTSCHMAKVSPSRLVKIFRRYQGCNFDLNKAKELISAAKDSFYSGRASKSRGLSITMQLDEIRSLSQKIADIEEEIKYILCPDDPSGGSSYYNTLNSIKGVGIGTIAAFLGCVGDVSRFSSADKLVSFIGFYPTIFESGKYKKKSPTIQKAGPKELRYMLYLTSVSCIKHNSELKKYYYDKVSAGMPVKKAIIKVAVKLARMMYSMLKYDSLYDSSRVFLKPVSLKNAA

SEQ ID NO: 204069 - protein, 339 aa, unidentified
MTIVTVGIDLAKMSFAVHGVNEAGKPELVRPDVRRGKLLELIASLPPCLIGMEACSGAHHWAREFQKFGHAVRIMAPKFVAPYRMGGKHGKNDAADAAAICEAVTRPNMRFVPIKTIEQQGKLFVHRAHQGYVAERTALINRIRGLLSEVGIVLPQAFKAFHRGVHEALEDLPGYCNQVIGELMNELSHIQERIAQSERQIQLMARQDEQQAQRLMQLSGVGPATASAIVASIGNGHDFKNGRQFSAWLGLVPRQNSSGGKVKLSSITKAGDNFLRTLLVLGARSVLMNAVGKNDPVSRWALQLKERRGYGRAVVAIAAKNARMCWAALSLQDQFKVPT

SEQ ID NO: 204070 - protein, 459 aa, unidentified
MTRTRRAPEEIPDEQYEQVFERVCAIDVAKEFGQVCVRTPRADGKRASTVFAVDATTGDILKLGESLLEQGIEMITLESTSDYWRIFYYLLEGCGLPVQLVNARDVKNVPGRPKSDKHDCVWLAKLTERGMLRPSFVPPHEVRVLRDYTRTRIDLTRDRTRHWQRLEKLLEDALIKVTTVASKITTMSVRDMINALIRGERDPEALADLARGVMRDKRRDLVRALDGRFDDHHAELAKILLGQIDSLTAEIGRLTTRIEQLVDKLPTPEHPVDPDGGATPQPSPGNAQPATAPSQPRPVLQRLADIPGINLDAAEVILAEIGLDMNRFPTPEHLCSWARLTPQLIQSGNKRRGGKTSKGNPYLKGALGSAAASASRTNTFLGERYRRIIKRRGKGKALVAVARSILVIVWHLLANPNADYHDLGADYYESRIDKERRKRQLIQQLEALGLQVTLTPAAA

SEQ ID NO: 204071 - protein, 355 aa, unidentified
MSQEKYIGMDVHQATISVAVMDAQGKLIMECLLETKASTIVEFVQGLHGTLSLTFEEGTSAAWLHDLLKPHVSRLVVCDPRKNALLKDGNKSDRIDARKLAELLRGNQLHPVYHGEHGVRTLKELGRSYLTITQDVTRVMNRIQALHRSWAIPCAGTTVYAPRHRAEWLAKITEPGVRVRAERLYQQLDLLQPVRLEARRELLAESHKHSGVKLLRQIPSIGPIRSALLVALLQTPHRFRTKRQLWAYSGFAVETHDSGEYRSVRGKLQRNRERMTVRGLNDNHNRDLKNLFKSAAVSASTRPGPLRDFYMARVEKGMRPTMARLTLARKIAAISLTIWKKGVEFDAQQLQRQAA

SEQ ID NO: 204072 - protein, 417 aa, unidentified
MSDDIRWFAGVDWASEIHQVVLVDAHGTVTGEHTFPHGGEGLGAMCDWLLTATGTSAEAIAVAIEVPHGPVVETLMERGFPVHAINPKQLDRFRDRFTVAGAKDDRLDGRVLADSLRTDRHCFRPLHAADPVTVELREWSRMAEDLRQERNRLSNRVREQLWRYYPQLLKLTDDAGADWFLALWTLVPTPAKATRVHKSTIERLLKAHRIRRIGADEALTTLRQKPIQVAPGTTEAATAHIRTLAVRLKVVNRQIKDAHRQLDALCAKLAGPEEVEPGQSHEQRDVTILRSLPGVGRIVVATLLAEAWEPLRERDYHALRSLCGAAPVTRRSGKRCVVVMRQACHVRLRTAIYHWARVAIQHDELSRRRYRELRKRGHSHGRALRTVADRLLAVACAMLRTRTLFDPARASVLKEAA

SEQ ID NO: 204073 - protein, 453 aa, unidentified
MKKLKNNQKMTIVNANAAGIDVGSKSHFVAIGQRAEDVREFHCYTSNLKELCLWLKEKGITTVALESTGNYWQALFVLLQDFGLNPIMVNGKFTKNVKGRKTDVQDCQWIQKLHTLGLLEGSFIPNLFTEKLRQYCRHRQTLLENAADYIKKMQKALRLSNIRLDVAIRDIVGQSGRAIIEAIIAGETDPRKLASLAHWRVSKSEDEIAEALTGDWRHEYVFELKQSYDLYKYLHTKISECDKEIENILNQRVEEMEKIDGEQRAKYTGKVRRLKKNDPDFNLQELTFQMSGAVDLSAIEGVGRSTIMTILSETGIDMGVFPTAKHFASWLHLSPNNKISGGKIISSRTFKAKNRLADALRHAANAIGNMVKPSALHQFFKRIEYRKSRIDAITATARKLAVIIWNMLTNKQPYQPLVQHEYLIKVRNNQVKNLQRKIRQLNVKPEELSFVTS

SEQ ID NO: 204074 - protein, 423 aa, unidentified
MTVVYPICCGIDVHKTFFVATLITTEGLVPKYLKRRFSTFNNQILAFKAWLLENNCRDVCMESTGKYWVPVYNLLEDSISVTIANPKWVKAIKGNKDDTKDSKWIGDLFRIGLVPGSFIPCKDIRILREYTRYRFKLVSCKSSEKNRYQNVFTVCNVALDAVVSDMFGKSATSITDYIVNSDTFDSQHCASLLQRSLKKKATEVVESIEGFQMAAPQRERAKMVKEHYDYLMSHIQKLDSAIYELSKPFEPAINLLCTVPGIKRDSAITVLSEIGTDMSQFDSSKRLCRWAGLAPGNNESAGKKKSVRIIRAGVYLKPALVEIAQAAIKSKATPYYSLKFEWISKRRGKKRAVIAIARMILTAVFHMLTTGEVWNPTDLNKIDMPSELREQQVHKSLCRAVKLLVAHGLVLPDTIRIPESVPA

SEQ ID NO: 204075 - protein, 408 aa, unidentified
MEVLHRRCAGLDVHKKTVVACARLMEGDTIHYEVRTFGTTTSALLALGDWLRAHGCTHAVLESTGVYWQPVWHVLAEELELVLAHAAAVRNIPGRKSDVSDAQWLAELLAHGLVRPSFVPSGPQQALRELTRTRKQLVREVGAHSQRIHKLLESANLKLSSVLTDLLGVSGRAILRALAAGETDPVHLADCLHRRSHGKRAAVIAALQGRLRPHQRVLLGQHLTLVTALEASIRALEEEIATALAPFRRAVAHVLTVPGVNTTAAPVILAEIGTDMSRFPTAGHLRSWARLSPRLDESAGRHRSRRIQRGGRWLKATLIQCAWGAIQVRDSYPRALYHRLVRRHGKKPAIVAVAAALLTAIYHMLRTDQDYRDLGPAHFTDADRQRAANRLARRLRALGYEVSLRPAA

SEQ ID NO: 204076 - protein, 360 aa, unidentified
MLTQRTELDFKGQNIFVGIDVHLKSWTVTILTEELTHKTFTQPASADTLNNYLRRNFPGGTYNSVYEAGFCGFWTHYKLKAMGINNIVTNPADVPTSQKEKLQKDDPTDSRKLARSLRSNDLKAIYVPDPATLEDRSLVRMRATLVKDMTRFKQRIKSFLYFYGINYPPQFEKSGSHWSKRFMKWLNEEVILEHDTGAQALKILVQEAEQQRKLLLEVLRKVRLLSRSEKYAANMALLRTIPGIGPITSISFLVEIENIERFENTDHFAGYVGLTPNRHSSGDKTNDGEMSFRGNKTLKSLLIESSWTAARSDPALILSYHSYVRRMEPNKAVVRIARKVLNRMYYVLKNKTEYVPGVVK

SEQ ID NO: 204077 - protein, 374 aa, unidentified
MDDYSVAYVALDTSKLRNAVAVAEAGRDGEIRYLGEIDNAPAATAKLARRLAKKHAALTFAYEAGPTGYGLYRQIKSLGHDCIVVAPSLIPQKPGDRVKTNRRDALSLARQLRAGDLTAVWVPDPHHEAVRDLTRARSAAVRDQRAKRQQVSALLLRLGLHYPGKTTWGKAHMAWLAGQKLAHLEQRIALEEMLHAVRQAGERIARLEQAIGAAVPDWSLAPSATALMALRGIEFIAATTLLAEIGDLTRFRTPRELMAWLGMVPSEHSTGERIRRGAITKTGNRRARSVLVECAWSYRHPPRVSRDKLARLEAAPAAVRDIAWKAQSRLTARYRALRRAGKVDVVAITAVARELAAFIWAVGLAVGSGRTPEV

SEQ ID NO: 204078 - protein, 347 aa, unidentified
MKEQNNRSEFTIGLDLGERRHRFCALNGKGEVVEEGTLGNDRVSLGRLSARYRGALVVMEAGGHSPWISRYLEGLGGEVIVSNPRKVRAIYQHERKSDQRDALMLARIGRMDRALLYPIHHGSEEAQQDLLRFKLRDSLVRARVALINSVRFSLKSLGYAVVNPSSERFHKVALEPLPERVREMIAPSVQALAELSGRIAVLEREINLLARTKYPQTFWLQQVPGVGAITALYFVLKIEDPQRFKHVRAVGAYTGLCPRRDQSGENDPQLRISKRGDAYLRRLLVSAAQYILEPFGPRSALREYGLRLAADGTKRAKKRAVVAVARKLCVLLLSLWKNQTPYQPYPA

SEQ ID NO: 204079 - protein, 473 aa, unidentified
MSRVDDEYEDVLLLSLTGLVSHNSEEDVVVQGSDLSRGDKRRNARFARLRELVPVENAILGIDLADVKQALVVTDHDSRVLARKRVRAKAWDMGPVLDWARRVARDRGFGDVTVGCEPTGHRWRVLDQLAGQRDMSLVCVQPMLVGRAREADDYTRDKSDDKDAVLIARLVTQLNCYVPERADETWARLRQLGARRERLITEATACVAQLRDLLECAWPGVLAAAANPFDSVNWCAALSVVLDRCGGQLERLARGGLGRFETAVRRELPRWGGSRRRRTIIEAVFVALVDPTGVWTQRRGALERARWVLADWHATKSRLAEVEACMVEVLDQLELTELLTSIPGLSAVGAAAMLAETGDPARFDSPRALVKHAGLCPRENASGTFSGRSQISRRGRPGLRLAAWRAVWGALAHNPVMAARYRHLTTRQDNPLTDGQARAAIAAALLRWLHVITTRRVAWDAARAGAEVMPLAA

SEQ ID NO: 204080 - protein, 427 aa, unidentified
MSATQNEKIRQVTDTAMVIGVDIASEIHWARAFDWRGLELGKAVKFENSAEGFNFFLRWVSELTVEQKKDSVMVGLEPTGHYWFTLAAHLQGGDFKLVLVNPYHVKRSKELDDGHPSKSDKKDTKTIAKLVLEGRYVYPYIPQGLYAELRVAMNCRWRVRKELASLQNQIQRWLKIYFPEHGKVFGRFTGAGSMALLHSAPLPSDLISLGVEGISGIWKQMKLRGIGKKRAQRIYEAAQTSVGCTTGMEAVRMELQILLEDYDAKLQQYERVMQVVENLCSQIPTVAELLKIQGLGLVTVAGLFAEIGDIRRFESPHQIQKLAGLAITENSSVKHKGPTEISRRGRARLRAILFRAAIPLLAKNREFQLLHRYYTTRQDNPLQKIQSVIAICCKLLRVFYALATKGCAYSPEKMLADIQRNQPLKAA

SEQ ID NO: 204081 - protein, 430 aa, unidentified
MSLERSVEQEPLFAAFVGVDWADQKHVWSLQGAGSQKRESGELEHAPEAVEVWVAQLCQRFAQGPIAVALEQSRGSLVFMLSKYERLHLFPVASTMAGNMRDALYPSGAKDDPRDADLLLDLLLKHRDKLRRLSPDTEATRRVQNLVEERRKLVDEKTEQINRLTSHLKIYFPQMLDWFDRLDREAACTLLERWPTLEELQKVPPAKLRTFFCKHHCRDQEVIGRRIVGIRQAVPAIRDRAVMEAKSAVVKVITQMIRILVQGIAELDRKIEEGAAAHPDFFIFNSLPGAGPALAPRLLSAFGSQRARYGSAQEVQAYSGIAPVIERSGKKKWVHFRWAAPKFLRQSFHEWAGRSITQSQWARSYYEQQRQRGKGHHAAVRALAFKWIRIAFRCWKDSVAYDESRYQATLVRRASPLSASMVASTLAKTL

SEQ ID NO: 204082 - protein, 477 aa, unidentified
MQKDKYTKTRSKNNRKTSTSADSNPVLHADAAGVDIHPTAIFIAVPPGRDRNVVRKFSTFTCDLVEAVDWLKHCRIRTVAMESTGVYWIPLYQMLNDHGFQVCLVNARHVKNVPGRKTDVSDAQWLQYLHSVGLLRGSFRPPQEICALRSISRHRESLLEMGAVHIQHMQKALDQMNLHLHHVIDDIVGVTGLAIIEAILAGERDLQRLAKLRHCRIQCSEETIMKALEGDYRREHLFVLRQSLNSWRHRQQQIAECDAELESLTRQLEAKSNQEPVPLAPCPRKKVSKNQPKGEWQPLLTQAFGVDLTEIPGVKTATVQTVFMELGTDWSCFPSSGHFSSWLNLCPDVELSNGKVVHRHRRRTQKRLRCALRMASLSLHRNQSPLGYEFRRRRSQLGPAGAITAMAHKLGRIMWHMVTYKVPYDEAVFSTAEKKHQQRHQKNLIKRIESMGYRVITAQKPDPGAIPLVPQVPAQVP

SEQ ID NO: 204083 - protein, 396 aa, unidentified
MICFGIDVSKGKSTVTAISSDGVLMYPITQVEHNLNSMLELANYIKTLSQSDEVRVVCESTGYYHWPLANTLLQEGIWVSILNPIVTSKFSKNSLRNVKTDKIDACKIATYGLMYWDSLQCSPQFGEIFDELKTYSRQYYQYLALRVKARINLICILDQVMPGIQNLLKEDHNNHKLSDFADHFWHFDNITKHRLSTFSRQYQEWCKKKGYIFRSSKAETIYNLAKNSIPILPCTPSTKVLVHEAVKSLHFQEESSVLILTHMSNLAKQLPEYSVITDMPGIGDALATRFIAEIGDVRRFKNKHSLVAYAGIDAPPFQSGNYEGKNRHISKKGNKYLRKTGYEIMRCITSANTDSGTNDVYDFICRKRSEGFEYKKACIAGLNKFLRVYYGKVMAL

SEQ ID NO: 204084 - protein, 287 aa, unidentified
MNIIRVGVDLAKNVFQVHGVDRCEKVVWRKKLGRAEWLAALLEKIEPGCEIAMEACGGAHHWARQLQKRGFTVKLIAPQFVKPYVKSNKNDANDAEAICEAMSRPSMRFVAVKSVEQQDLQAIHRIRAELVSQRSAKGNQIRGLCSEYGLVAPREMIQLRAAIPLWLEDLENGLTQRFRRMLRGLWLDLLNLELRVKELDQEIEIAASTDPVATRLQQLRGVGPIIATAIVANVGDAKQFSSGRQMAASLGLTPRQNSSGGKERLLGITKRGDAQLRTLLIHGARSV

SEQ ID NO: 204085 - protein, 338 aa, unidentified
MAIKVVGLDTAKHVFQVHGADASGKTVLRKRLRRSEVAEFFRNIPACVVGMEATRGAHYWARVIGSFGHEVRLIAPQFVKPYVKGQKNDVQDAAAICEAVSRPEMRFVPQKSVEQQDLQALHRIRSRLIGCRTQLGNQIRGLLAEYGIILPLHLSQVRLQLPQLIVNDHPQLTPFSRELFLSLSEELCAIDRRIQAAEERIQRVFQEQEACQRIAAVEGVGPMIATAVVAAIADGRAFRNGRQFAAWVGLVPRQHSSGDKQRLGGISKRGDPYLRMLLIHGARSVVYRAASKTDSRSRWIAEKQRERGTTKACVAVANKNARIIWALLARNESYRRAA

SEQ ID NO: 204086 - protein, 428 aa, unidentified
MCRLLPPEIGCVVGSDVAKSAHVVCAREAPSGTVRLKSTPIPATAAGHAQWLEWLGEWGAPAPLLIGRESTGSRWEPLDDALCQAGYAVVLLNPHQTASWASRLGLRAKTDGIDAHTLARGLLARGLLAGWARARTVPDELVQALRTLTRTRRDLVHSQRAARQRRHDELVTVFPELIGHLPARADLGAPAVLRRVTVYSSAQALAQVPRDDLGRVLEEASAGRWGHPHAPALQHLAQHSAASTRAVAARAVAARAVAARAVVVRTLAQHRLDRQARIADLEAALAEVLRTDPPSQHLQAPGLGPTWTATIRAQVGDGQRVQRVDPLGAYAGLKPRTHESGRFAGQRRLSKRGPGALRHALYLATLVAGRFRPQWRARYQRLLDPGRAKQEALTILSRKRLTVISSLLRTGASYDPTCLSPAPLARQA

SEQ ID NO: 204087 - protein, 332 aa, unidentified
MSHLNSGIAVIGIDIGKNSFHLVGQDRRGAIVLRQKWSRGQVEARLANLSPCLVGMEACVGAHHLSRKLQLLGHNARLMPAKYVRPYSKGQKNDFRDAEAIAEAVQRPTMKFVATKTADQLDLQALHRVRERLVSQRTGIINQIRAFLLERGVAVRQGLRFLRVELPGILATRTDVLLPRMLRILEDLSADWRHLDARIEGLTGEIETLARQDQHCERLMTVPGIGPIISSAMVAAIGTGEVFSKGRDFGAWLGLVPKQLSTGDRTILGSISKRGNRYLRALFVQAAWVVLVKLGPKHWERYGLKSWIEAAKKRLHHNVLAIALANKLARSA

SEQ ID NO: 204088 - protein, 313 aa, unidentified
MRATRKQVAQLLAWAQELGARRWAIESAGGLGYLLAQQLVDAGEIVLDVPATLASRIRVLGTGRSDKNDPNDALSVAIAALRTPTLRKVRPADHAEVLRLLAKRNIDIGNHRTRVVCRLHSAVMELAPGGIAKELYASDAVALLDRIEPATPVEQARHDLAVELLADVQRLDAQLKESHRRIRVAVKASGTTLTDLFGVGPIIACYLIGFTGDVGRFTSRDQFAAYNGTAPVERSSGGRVVHRLSQRGNRRLNHALHLAAVCQIRQPHSDGRAYFDRKLTEGKTKKEALRSLKRQISNAVYRQLLSDADRTTP

SEQ ID NO: 204089 - protein, 372 aa, unidentified
MRDDSVAYVAFDTAKLQHAVAVAEDGRTGEVRFLGEIENTEAASVKLVKKLASRYRHLTFCYEAGPTGYELYRLIKRLGHDCIVVAPSLIPRKPGDRVKTNRRDAISLAKLLRAGELTAVWVPDARHEAMRDLTRAREAAVEDLTSKRQQVLSLLLRLGRYYTGKRNWTRMHMSWLASQKLDHAEQRIAFEEMLLAVREVQARVARLEQAIRTALPDWSLAEVVTALMAMRGFDLVSASGFLAEMGDLSRFPTARDLMGYLGLVPSEQSTGEKVKRAGITKAGNRRARRILVECSWSYRHPPRLGKDKLSRVAAAPRDVREIAWKAQHRLTGRYRTLTRNGKKPAVAVTAIARELSGFIWAINRAIRPTMTG

SEQ ID NO: 204090 - protein, 365 aa, unidentified
MCQRVIVRDESHEGAVHMQISTIGIDLAKNVFQVHGVDASDKPVLKKQFRRGQVIEFFGKLPPCLVGMEACATSHQWARELKKLGHDVRLMPPSYVKAYVKRGKNDAADAAAICEAVRRPSMRYVPIKSTEQQSALMLHRARDLLIRQRTQLINAIRAHLAELRLVAQKGREGLQQLMRTAADADDEALPSDARFACQAIAAQLQAVQMQIAGLDKRMHQAHRANPASKRLETIPGFGVIVSTAVVATMTDPKAFKTGREFAAWIGLVPRQNSTGGKDRLGSISKQGDRYLRRLLVLGALSVVRRARTRPDKYPWVVAMLGRRPAKVVAVALANKMARIAWAILAKGETYRAPMHTSSGAIAASA

SEQ ID NO: 204091 - protein, 343 aa, unidentified
MYYIGLDVHKRTISYCVKDAAGHVHQEGKIGSTRRELDAWIKTLPQPRTIAMEATIFTGWIYDHLLPHAEKVKVAHPLMLRAIAAAKKKNDRIDAGKIADCLRCDFLPECYMTSTEIRDRRRTLRYRNLVLKQMVQMKNRISGLLMETGVSYNKQRLHKLGYFTELMSGNEEVDESIRPLLKLSRETIVRSQRLDYALVSSLERDPLLGERLKRLRTIPGVGPITALTWALEIGDVSRFQSVKQAISYCGLCSAERSSADKLVRMPISKQRNKHIQQTLVEAAKLAPRYSHELALVYERERQRGNRNRATLAVARKMVAYMLAVERRKQDFVLTGEFSGTAAA

SEQ ID NO: 204092 - protein, 433 aa, unidentified
MASPCQLLLFFFEGGVMFKINLFNCCGLDVHKTWIYACIGITDANGLTQYHEQRFSAFTNGLQELVAFLVHYNCKDVCMESSGKYWIPVFNILEPHVHVVLAHPKYTKPQKGNKTDRKDARWICDLFACGMIKPSFIPPKDIRNLRDLVRYRFKLGCMVTSEKSRALNCLTVSNLKLDDCFSDVFGKSSRSILQQLLDHPGQKFDVSAFVDPRCKASLDDINAGLAGEISAPQATKLKQCLAHIDELETHRAEIEKKIEEIAAPYHEALELIRTIPGFNSTPFSAIAILSEIGTDMSVFPTAKHLCSWAGVCPHNDQSARRVKSNRISKAGNYLKPLLVQISLALTRKKKTDLEFRTRYRKLKARRGHNKAIIAVCRMLLTAIWHILSDRKPYTPDGYMKDRQTSVRKEMTIREAVKMLKARGFIIKDDPLPA

SEQ ID NO: 204093 - protein, 377 aa, unidentified
MKRIKFVGLDVHGETIAVAVAEQDGEVRSLGVIGNREESIRKLVKKLGPVEQLRFCYEAGPTGYVVYWQLTALGAKCEVVAPTLVPVKSGERVKTDRRDALKLARNYRAGELTAVWVPDAAHEALRDLVRAREAAKKDQLRAKHRLSKFLLRHGRRPASGVKAWTLNYLAWVKKEVHFEQPAQEATLLDYLHEVEHAEARIARLDLAIEEAVKSTPPKMRAVIEALQALRGIAQVAAVTIVAELGEISRFPGARQLMGYGGIVASEHSSGESTRRGGITKTGNAHLRRVVVEAAWASRHRPNVGGALRKRQELVSEEVREIAWKAQHRLHTRYRKLTARGKDKGKVVTAIGRELLGFIWAIGVKVEAAQKETERRAA

SEQ ID NO: 204094 - protein, 387 aa, unidentified
MTVLTVTNLPAAMHGETVRCLFAIELSRMSWVIAFNTPLSEKISRRTLIGCKWKRLLELIEEVRARVSRETGRAVEVISCYEAGYDGFWLHRQLSTHGIRNYVIDPASLQVDRRARRVKTDRIDTERLLRSLMAHLRGEPKVWSVVRVPSVAEEDARRLHRERDRLVCERVQHVNRIKGLCALQGIYDYNPLRPQAMAGLEQLRTTQGGALPPRLKSEIKRELQRLELVVEMIATLEAERNAIVEDEASTHINAKKIHNLHKLKAIGPEFAVVLVGEIFHRDFNNRRQLASYVGFAPSPFQSGNVAHDQGISKAGNRKGRTTGIELAWLWLRYQPDSDLSVWFQTRVGTTKGRIRRIAIVALARKLLVALWRYLETGEVPRGAVLKG

SEQ ID NO: 204095 - protein, 320 aa, unidentified
MMTQNDLVVVGIDVAKDKVDACIRTVTERRTFPTTASGRRSLIAWLRKHQVGKAVMEASGGYERVWAKALRQAGLEVRIVDPKRVRSFAESAGRLAKNDKIDAEMIAWFAETFSAAPSQVEDPAHEEIKALVKGRKSLIDLRTRLEMQKEHETPRLVQKAHAHLLKKLADEIAAIETAIGAKIKAAPAFAVRAEIIQSVPGFAKATALTLLAGLPELGQVSNEVAAALVGVAPYDDDSGKRHGQRCIKGGRRWLRNALYMPCVGAATLNNPVFKAFYQRLIAKGKAPKAALIACMRKLIVILNTMIARGEKWDPKRYQLA

SEQ ID NO: 204096 - protein, 339 aa, unidentified
MELYAGSDLHGNNNFLAIIDQQGKKVYKKKLPNDPGVILEVLAPFQKTLAGIVIESTFNWYWMVDALMDQGYRVHLANPAAIQQYSGLKHADDKHDAFWLAELLRLGILPEGYIYPKEERPTRDLLRKRGHLVRLRTSLLLSLQNIISRNCGIKLNTNKMKRLREDEVAPLLVGNEDLAWSGRVSKETIDFLTRQIKQVEQVVEGKVELKAPYRYLQTIDGVGKILSLTIMLETGPIERFTRVGHYVSYCRKVPTQWTSNQKTKGKGNKKNGNKYLAWAFSEAAELARRYQTPARTYYNKKMAKTNFMVAHSALAHKLARAAYYVMRDQVPFDPKRVFA

SEQ ID NO: 204097 - protein, 452 aa, unidentified
MGKKKIALDVVNPQAAGIDVGSRSHFVAIGQTDEEVREFGVYNEDLLALTQWLQANEIKTVAMESTGTYWQSLFTTLQGAGLEVILCNGKFTKNIKGKKTDVKDCQWIQKLHTLGLLSGSFLPDEATEELRTYCRHRANLLEQAADTSRKMQKYLRLLNLRLDVVVRDITGLTGLAIIDTICKGESNPEKLASLRHGNCKKSEKEIAKALQSNGRKDLLFALTHEYQLYQLFQCKITECDKQIKQLLHAQIDNDENKKQHFIDKKVYKRINKNTPDININMLSYQYFEGVDLLAIEGVSHSTVLTLMSEVGQGIHKFHSAKQFASWLRLAPNNKISGGRILSNKILKGSNRLKIALRQAANVVGNLKDTALSNFFKRIAFRKGRTSAISATARKLAVIIWNMITKKISYKTDSQYEFLDQKRKRKVLEMKKLIHKFDITPDDLGLQLNINNL

SEQ ID NO: 204098 - protein, 346 aa, unidentified
MTEAYDGRQVVGMDLHRRRSVLVRMTMDGRKLETARIANSPAALRAVLARCGKNPLVVLEATYGWYWAADVLAGAGAEVHLAHPLGVKAFSYRRVKNDERDAADLADLLRMGRLPEAWIAPPQVRALREVVRYRHKLVRQRTSCKDQVHAVLAKLGIPVTHSDIFGTGGGLWLDQLVLPEPYAAKVASLRALIGVLDGQIARLGQEAAGMLAADAGYAAVRELPGIGPVLAAVICAEIGDITRFGKPGQLCSWAGLTPRHHESDLKVIRGHCSKQGSRLLRWALVEAIQHQPASARPQQAREAIVARRGPEARNIAKTAAARVLLTQVFYALRDGHARSAGHPPAA

SEQ ID NO: 204099 - protein, 397 aa, unidentified
MVYLGIDIAKHKHYASIIDQTGKPITKPFPFQNHKEGGQALLNWMYQYIESPTEILIGMEATGHYWLAVYSFLLDHGFSVVVLNPIQTNAWRKGTEIRKRKTDAIDATMIADIIRFGRFVETPLVDEKMFALKQMSRFRNALVSNMSDLKRKVLVVLDQTFPEYQSIFSNVFGKTSSQLLLEYSSPSDYEQIAIDDLTQTIEQASRNRLGKKTAGKLMELASNSFGVTFCKDAFSFQLKMLMEQIRFIEDQIKECEEEMSQLLIELDTPIMTVPGIGPILGATILSEIGDIHRFDKPSKLVAYAGIDASVSQSGQFESSGTSISKRGSSHLRRALFQAAITAHKHDPVLKAFYEKKRKQGKHYYVCIGAVARKLCYIIYAILKNNKPYEIPPHTTET

SEQ ID NO: 204100 - protein, 412 aa, unidentified
MEAILERVGGVDVGQATVVATVLVGAPHERPKKETRTFRTLTRELLEMREWFLAKGVTHVALEGTGIYWRPVYVLLEDAFDIIVGNAHHIKNVPGRKTDVKDSEWLADLARHGLIKRSFVPPKPLRRVRDLLRYRRKLVESRATERNRLLKLLETANIKLASVVTDVFGVSGLLMLRALVEGRATPSETAQLARGLLRKKVGDLELALEGRLEEHHRFLLNLQLRRLDQLDSDVALLDARIDEALSPYQEQRQLLEQIPGVSHILAAVLLAELGTDMSVFPSARHVAAWAGVCPGNNESAGKRKATSARKGNVHLRTALVEAAVAASRKKGSYLRDKFHRLRARRGPKRAAMAIGHKILVAAYHMLSTGTSYKDLGASYLDGLDTRRVTRNLVRRLERLGYGVTLQPKTAAA

SEQ ID NO: 204101 - protein, 424 aa, unidentified
MDKEINPLKKNSKSPTRKEQASKRTRLQRPVQRKTKEVLAELVEKLRGKLELKATPVRLGEAGQRSELRPNLDRLTVGVDLGDQWSQYCILGLAGETLSEGQLRTTQSDVAEFFTAIMAARVVIEVGTHSAWVQEIIAGCGHEVLVANPRLMEGSKRRKRKNDRIDANKLARLGRVDPQSLHPIKHRSREVRQDLVLLRARDALVAVRTELINTTRGLVKSMGTRLPKCSSRSFGHKAGEAIPGPLREALQPLVQLAEGLNACIAGYDRRIEELASKKYGHTKMLRQVKGVGPITALADVLTLENPERFSKSREVGPYLGLVPRQEDSGESQPQLGISKAGDTMLRKLLVGSAQYILGPFGPDTDLPSYGLRLCERGGKNAKKRAAVAVARKLAVLLHRLWVTGEVYEPLGYRASGTIIQPAAA

SEQ ID NO: 204102 - protein, 346 aa, unidentified
MKKVAYLAMDLHANNFTLGHMDNDGYFRGNMEFPTSESNIIHGLKSIKAKEKYLTIEAGTLTYWAAQIANSFVSQVIVCDPRENALIYKSPYKKDKVDTRKLCRLLRLGELHHVYQPENDDRAIFKTAAQHYIDLRNQLIRFKLKIKAMYRHWGVINVFTDAVYSNSGRDKYLKQVKHLPIRSQLSRLYYLMDQTEAMRKSALKSMKHLGRKYAEIRQFVKIPGIADINAHIFDAFIQTPHRFAKKNRLWKYCRLSVTDRSSDGKPLGFQRIDPSGIGELKALSYRAFMASMKGDNEVKRFYLNSLKRTHNQKHARLNTQRKILAVMYSIWKKGAAYQPELFAGSV

SEQ ID NO: 204103 - protein, 400 aa, unidentified
MNAVGIDISKGHSTVSVLRMFGEVVMSPFEVNHTVSELKALAKTLKRLPGETKVIMECTGNYHLPVARTLQTAGLFVSTRHAELIHKFGNDTIRKGKSDPADSLKISNYGLTNWLNLKEFIPEDEIRQSLKVVTRQYTKYSKIKTTLANNFISLLDLSFPGVDKLFTSPARSSDGHEKWVNFACEFWHSDCVAKPSFKVFSERYRKWCKRSGYNAVNASGIHDFARKCVPVLPKNEATKLLITESALQINFICETLSIFAKEMKRLAESLPEFPIAMGFFGVGEILAPKIIAEVGDVRNYRKKSSTVRFAGLDPVDNDSGDFHGDKKISKQGSPHLRKVLFQVMDCLIQNAPEDDPIFSLLDRKRSEGKHYYSYMCAGSAKFLRIYYARVKEHLAKLDMI

SEQ ID NO: 204104 - protein, 343 aa, unidentified
MKLSYVGVDLAKNVYQLHGVDHHGKAIWKRRLRRGQWLQALLDNVEPGCEIGMEACTGAHHWARELQSRGYVVRLIAPQFVKPYVKSNKNDANDAEAICEAMSRPHMRFVTVKSVEQQDIQATHRVRSELKAHRNAKANQIRGLVAEYGLVAPKTLLALRRAIPEWLEEAENGLTIYFRALLHGLWDDLLTLEDRLNELDKEIEKLARSNDVAKRLQQLRGVGPIVATALLATVGDGAQYKKGRQMAAALGLTPRQYSSGDKHRLYGISKRGDAYLRTQMIHGARAVVSQAKHRDDPLSRWVTDIAKRRHPNVAAVALANKTARMAWAMLQNDTDYDPSLATS

SEQ ID NO: 204105 - protein, 387 aa, unidentified
MIYVGIDIAKLNHFASAVNSDGEVLVEPFKFSNDNDGFCLFISKLNSFSKDELIIGLESTAHYGNNLLSFLVPKGYKVVMINPIQTSTMRKNNIRKTKTDRVDTLVICKTLMLQPHRFVSLYDLGIIQLKNLGRFRQKVVKQRTRLKIQLTSYVDQVFPELQYFFKSGIHHKGCYALLKEAPSHTSIASMHLTHLTHLLSSNSHGRFKKETAVELRVLAQKSVGICDNSLSIQITQSIEQIELLDRQLELIESEMTDIVKSLDSVIMTIPGIGYVNGGIILGEIGDISRFKSPSQLVAFAGLDPTVYQSGNFEAKHTRMSKRGSKTLRFALVNAAHNVVKYNKTFKAYYDQKISEGRSHYNALGHCAGKLTRIIFKMLRDDVKFDLD

SEQ ID NO: 204106 - protein, 310 aa, unidentified
MDKFVGIDISKDSLDLCLEPENEVLHIAYDDKGIAQVVKHLAQVAPTLIVMEATGGLEMRLASELTAKGLPVAVINPRQARDFAKATGQLAKTDLVDAAVLAAFARAIRPAVRPIKDADTRELDDLVTRRRQLIDMRVQETLRLGTASKLQSKSLKAHIVWLDKRIASLDDDLTKRLRASDAWRIKDDLLQGIPGVGAITSLTMLAKCPELGDMNRREIAALVGVAPRANDSGKHRGKRFVWGGRADVRAVLYMATVSAIRFNNDIKIFADRLKKAGKPAKVVIVACMRKLLTIMNAMVKNNAQWTPKTA

SEQ ID NO: 204107 - protein, 428 aa, unidentified
MKVLHERVAGIDVHKDMIKVAIRSPGEKPWTRKTEILEYRTFYGVLQQMAADLRKRGVTHVVMEASGVYTEPVYYALAEQDFAEVAVINPAHAKALRGHKTDAKDCARLAELFECGLLRGSCIPAPELKEVRDLTRYRMKTVQARTSEIQRLAKALESAGIKLGSVVSSITGASATAMIEALIDGERRGGVLADLARGRMREAGKLADLSMALTGRFTGHHALLCRLHQDRVAGFDAAVAGLDERIAGKVTRWQREADLLTSVPGFGDVVAQAWLGEIGPAPHRHFATCEKLASWVTLCPGNNISARKRKHGRTGDAGTYIKPMLVQAAWSAIRVRGRLQARYNRLVRRFGGDKNPAAKKKAITAIAHTLLKIAYQVLKSGTPYQEPGADFYTRRESPEHKQAWLERQLQRLHPGCTVTITISPPEAA

SEQ ID NO: 204108 - protein, 347 aa, unidentified
MNWIGVDVGKVHCQICEISSTGEIWEARVPTQAERLKATFQARPQARVLVESSTESEWVARILEGLGHDVVVADPNYAPMYSHRSRRIKTDRRDARALAEACRVGAYRAAHRTSDPRRHVRALIAVRENLVRTRTRWILLTRALLRREGFRTRSGHAESFVERVLELQLSADLKDEVESLLELLGPLNDQIDDVDAQLARLATADPAACRLMTMPGVGPIVALAFVATVDRVDRFTSAHQLESYLGLVPREWSSSETQRRGPITKTGNKRTRWLLVQTARAVMRTPSRRTTRPLWEWGDRIGRRRSGRVAVVAVARRVAGILYAMWRDGTEYNATKVKGSTALLRTA

SEQ ID NO: 204109 - protein, 429 aa, unidentified
MTQDGIAVWLGIDWADEKHRWAMRINGESRIHQGELEHTPEAVEQFVSGLAIRFPGRQVAVALEQSRGALIFMLGKYAHLVLYPIHPNTVDHYRKSAFPSGAKSDPGDAVLILDLLYRHAERLRPFHPDTVETRTLQLLVEARREAVDDKTRYLNRLTAQLKMFYPQVLDWFSTPDTVVVGRFLLKWPTLEKLQRARAGSIADLLSEHRIPDSRIETLMELIAQAVPAVKDAAVLESSVLIVRRLVQQLEVLHEAIADHDKKIAALAKSHPDYGIFSSLPGAGPAMAPRLIAAFGTQRDRYATASAIQRYAGIAPVTESSGKQKWVHGRWACPKFLRQTFHEWAWMSTKKSTWARSFYDQQRNRNKSHHAAVRALSFKWIRIVFRCWKDRVPYDETRYTLSLQKRSTSKNVEIRVKNFYGFAQFDGLSC

SEQ ID NO: 204110 - protein, 387 aa, unidentified
MYFVGIDISKFKHDCAVIDEIGDTIQPSWSFRNDREGFSLLKERLDSLPGEKKIGLEATGHYGQNLKLFLEANGFAFMEFNPLLVSRFVHGKSLRNTKTDPIDAGNVAQYLMTVEYKPYPPSFYHLDQLKSLTRFRSSLVRQRSRQLVELTNVLDKMFPEFKPFFKGKFSATALYILDHYQSPERIASMNTRSYEPLRKISRGHFSLNDFVKLKTLAKNTVGCTTGFLLQEMSILLELYTQLDAKVEELDDQIEECVHGIDPPMLSIPGVGASSTAVILSEYGDFSKFKNPSKMLAFAGLEPGYFQSGQSESTGHMVKHGSPHLRCALLNCCLPLVSNEPIFAEFYAKKRAEGKTHQVAMTHVAKKLLRVIFTLQTKNIPYDPALIR

SEQ ID NO: 204111 - protein, 426 aa, unidentified
MAAVSPEAAKDPIRSFGTFTSDLHALAEWFKDCKVTSVAMESTGVYWIPVYEILEQHGFDVILVNARYAKNVPGRKTDVSDAAWLQQLHSYGLLRGSFRPQGDIAALRAYLRQRERLVEYAAGHIQHMQKALMEMNLQLHHVVSDITGVTGMQIIRAIVSGERDPEILAANRDLRCRSSAEIISAALRGNYRDEHVFALTQALELYDIYQERIVACDRRMEGLLLLLSHRSAKPAADLPKPRTKTKQVSAPSFDVRGILYRLLGVDLTQIHGIGVSLALKLVAECGTDLRAWPSAKHFTSWLCLAPGNKISGGKLLSSRTRRSSSRAAALLRLAATTLGRSDTALGAFYRRLSARVGKAKAVTATARKIAVLFYNTLRYGMVYADPGAGHYDEIHRKRVVSNLHRRAQSLGFALHPIPVATEPAVS

SEQ ID NO: 204112 - protein, 398 aa, unidentified
MLSIGIDVSKGKSTVCGMKPGGEIVYTPFEIQHTREGMSELVSLLRGSGEEVRVVLESTGSYHCPVVAALLENGIFVSVVNSLRMKRFCSQSIRRVKTDQIDAMQIALYGLAYWQELQPTRLPENTYRELQLLARQYYQMTSILIKAKVDFNALCDQVLPGMQELMNDHAGRHKLSDFVLRYRHTTHILEMGETRFRKDYCKWAEKKGYRNRERMAVLIFATAQNGIPVLPNAPSTQIVITEAIRVLHTVEASRDAILTQMQALAKTLPEYSLVREMPCIGDTLAPRLIAEIGDVRRFHSKRALIAYAGIDAPPYQSGKFSANNRHISKRGNRYLRKTGYEVMQSYVMHKPANDPIFTFIEKKRSEGKSGKLAMVAGLNKFLRVYYGKVTELYRSLPQ

SEQ ID NO: 204113 - protein, 335 aa, unidentified
MDIHKRIIAYCIKAIDGSLIGQGKIVADRQSLEAWVKDLPGPWIGAMEATMFTGWVYDFLKPHAVTLKVAHPAMLKAITAAKKKNDRADAEKIADLLRVNLLPECHMLSEEIRELRRILRYRNHIVRTAVKMQNKMSGLLMEVGVTYSKKRLHGKKYFRELLERVDEIPPSVKELLQLSRSSYEMFRSFQKRLIETLRTNQLIRDRVHRLMTIPGVGEITALTWTLEMGDPGRFSSIRKAVSYCGLCSAQKESAGKEQRGPISKKRNKHLQTMLIEAAKLAPHWNEQLAIVHERELKKGNRNRATLAVARKLVAYMLAVDKNQADFKLSSEIRAA

SEQ ID NO: 204114 - protein, 460 aa, unidentified
MSKLSKPNPSLAEVRPFAGMSQVNPHAAGVDIGAHEIMVCVSGDNNTQLVRAFGNYTVDLQAIVAWLKEQHVKTVAMESTGVYWIPLFETLEENGFHCLLISSRSLRRVPGRKSDVIDCQWIQTLHSYGLLESSFRPEAELVALRTLLRHRAQLLEHRSPHILHMQKALLQMNIQLSQALSDVTGETGQAIIRAMVAGERDAYKLAALRNYRCKKDEGEIAKALTGTWREEHVFVLRQSLEMYDFYTRQIEACDAEIERAYQVTRTQEGNEGGDDDPPPVPEHKRNSHSKNAPQGVQVRKHLKRICGVDVVAIHGFGESLAQEAVMETGTDMSKFPTHKHFCSWLGLAPKNEISGGKVIRTGTLKTRNRAGQAFRKAAASVMRSECMFGVSYRRMKARLGPAQAAVATAHKIARVYYQMLKYKVEYEPLSAQVYEQKYHEQQVKYLKRKAAKLGFQLSPV

SEQ ID NO: 204115 - protein, 346 aa, unidentified
MNQIIRIGMDTSKHIFQLHGVDAAEQPVLRKKLRRSEVLAFFAKLAPTVVGIEACGAAHYWARMLTGLGHQVKLMAPQLAKPYVKRNKNDGRDAEGLCEAMSRPTMRFVPVKTPEQQAALMLIGVRERLVARRTQLSHAIRGYAAEFGLTAAKGLDKIEPLLAEIAADKALPKLARELFAMHGKEYAHLQAELKKIEARLMVWHRANADSRHLAEIPSIGLIGATALVMKAPDPHLFPSGRHFAAWIGLTPKDHSTAGKLRLGKITRAGDEMLRSVLVAGATAVIQQAKRGRGRPSPWLLALLSRKPPKLAAVALANRTARIAWKLMVTGESYHAERTPMASANAA

SEQ ID NO: 204116 - protein, 324 aa, unidentified
MKEMFAAVAGIDVSQKTLDVTLLNKKGGKRRKRVANTTSGINSLLAWLSQQASGGVHVCMESTSVYWEEVAEALHKAGHQVSVVNPVRIKGYAMSQLRRSKTDPLDGDVIADFCQTQKPDLWQPPTAEQKKLRALVRHLEALKKSRTQQQNRLATCRDDEVRASLEMVLATLQKEIERLEKRIRDFIDQHPDLKQKKELLESIKGFGEKTAIHILAEMYDLAEYKNAKAVAADAGVTASHYRSGTSVWKRSKMSRMGKATIRSALYYPAISAIHHNPVVKKFAQRLAAKGKKKSVIRVAAMRKLMHLAFGVLKNQTPFDPTYAG

SEQ ID NO: 204117 - protein, 372 aa, unidentified
MEQHSELFVGLDVSKLKISVAVAEAGRQGEVRFLGDIEARPTTVAAMIKKLERSGAELHFCYEAGPTGYELFRQITASGHACDVIAPSLTPRRPGDRVKTNRRDALSLARSHRSGDLTSVWVPDRGHEAVRDLLRARETAVEASRTARNQLQSFLMRHGRIFPGKKMWGPSHTRWLCRQAFEHAAHHAVLEEYRRTIAEAQIRVDRLTQLVADAAAHWSLAPVVSAYQAMRGVSLVGAATFVAEIGDVRRFDSPRQLMAFLGLVPSESSTGERVQRGGITKAGNTRARRVLVEGAWTYRFPARLSESLNDRQAGLPQVVRDIAWKAQVRLCRRYQRLLARGKLKTVATTAIAREMAAFLWAIGHEVPPVKAA

SEQ ID NO: 204118 - protein, 339 aa, unidentified
MKEVTTIGLDLAKNVFQVHGVDRAGTVVVRRALRRSQVLAWFAKLPPCLVGMEACATAHYWGRELRRLGHEVRLIPPAYAKAYVRRNKNDAADAVAICEAVGRPAMRFVTIKTEQQQAAAAIHRVRDLLIKQRTMLRNQLRGLLAEFGVVAAQGRRGLNELLAVLSDPEDRRIPSPLREGLMMIMETWRGIERKLEEIDRQMVAAGRADATYRHLVTAPGYGPILSSAMAALVIDPGAFKRGCDFAASLGLVPRQDGTGGKVRLGPISKRGNGYLRRLLVNGATSLIKCQHARQDPWVAKLLASKPRKVVAVALANKLARIGWALMTRQEDFRSQPAAA

SEQ ID NO: 204119 - protein, 456 aa, unidentified
MTQKRSKPKIDRTMPMVHPNAAAIDVGATMHTAAVRADWTPEPVRSFGTFTTDLHRLVNWFKECGVETVVMESTSVYWIPIFELLDARGFSVFLVNARDAKHVPGRKTDVSDAQWLQRLHSYGLLRASFRPKGQIAELRAYVRQRERLLEYAASHIQHMQKALTEMNLQLHHVVADITGTTGMRIMRAILAGERDPNVLARLRHYSCHASIETIEKALTGSYRAEHLFALEQALALYDAYHEKVSACDMMIEAVLKELSVRRGRQSGSLPSPHRRTDQANGLAFDVRAALFSLLGKDMTQIDGLGSYLSLKLIAECGDDLSAWPTAKHFTSWLCLAPSNKISGGKVLSSRTRRGSRAAALLRLAAVTVGRTDTALGAFYRRLSARIGKAKAVTATARKIAVLFYNAIRHGMEYVDPGSSFYETRYRKRVVDNLRRRAKSFGFVLQPFEPNPSVPVS

SEQ ID NO: 204120 - protein, 448 aa, unidentified
MQQPIEVDVDESQQVVARVAGIDVAKATGMICTRVPHASIAGRRVTKVWEVKATTKGLLELSDHLVGQGIERVVLESTSDYWRAFYYILEAAGLTVWLVNATQVKNVPGRPKTDKLDAVWLAKLAERSMVSPSFVPDEPMRHVRDLARARFDLVEDRTRVKQRVEKVLEDALVKIGSVLTDIHGASGRAMIDALIAGERRPEVLAEMAKGRARARLGALAEAVDGRFTDHHACLARMLLDQADDLAARIEVVTALLDQAIAALPAPAGASRTDAATGELTSASAKFATAVERISALPGGGPGSARAVIGEIGLDMAVFGTPARLCSWAKVSPRTVQSGRTKAKAVTGKGNPYLKAALGQMATGAAKTDTFLGQRYRRLAKRMPKAKALAALQRSILVIIFHLLADPTATFEDLGADYYDKRVDKQRHTANLVRQLEALGHRVTLTTAA

SEQ ID NO: 204121 - protein, 360 aa, unidentified
MEVGQTVADRDVVGGVDTHKDLHVAAVVDELDRVLGSRCFATTRHGYKQMLTWMRSFGQLRRVGVEATGTYGAGLLRYMQNAGVEVLEVTTPDTHDRRKRGKNDDLDAQNAAHAAFAGRRTITPKSRDGMVESLRVLKACRKTAVAARRVALQMIHNTIVCAPDDLRETLRKMTRMQLIRTLAAWRPDLTDYRSVGSAYRITLKSLGRRYLELHDEIVDLDTMIVAIVDELAPALVARNSIGHGSAAQLLLTAGDNAERLQSEASFAALCGVSPVPASSGKTIRHRLNRGGDRAANSALHIIAIGRLRTDLRTKAYIAKRVAEGHSKLEAIRCLKRYIAREVFSLINQRKREINQGRNAA

SEQ ID NO: 204122 - protein, 344 aa, unidentified
MAQLNTIGVDLAKSVIQVSVVTPHGKELSNKALTRKKFSEFLVTQAESLVAFESCATAHHWARIAKHSGHEVRILPAISVTPFRQGHKTDQNDALAVAEAAKRPHIKEAPLKSLEQQALQAIQRSRELLIGERTALSNHIRGLLLEFGIVIPKGFCHLHRAVPDVLEDADNDVPDMFRSTLFLMHERLLLIKHDIDQLTEQIKVLVKSNDACKRLLDIEGIGPIGAVLLFATLGSGEAFHNGREFSAYIGLTPKQYSSGGKTNLVGISRHVANKRLRSVLIQGARSYIHHVKEPQTPKDKWMMAMVDRAGYGKASVALANKNVRTAWAMLTQGTEYNKLEGVAA

SEQ ID NO: 204123 - protein, 347 aa, unidentified
MKHYAGIDVSLNSSSVCVVDESGKVVREVKVPSEPVALISCIKSLGVRVERIGLEAGPLSQWLYGALRESGLPVELLETRHVKAALSAMPVKTDRYDARGLAQLMRLGWFRPVHCKSMAAQEVRALLTARKLVQSKLYDIEMSLRGILRGFGLKVGPTTSRSFAARINHLAAGHPSLEMVAEALLSTHAAALCAFKNLEKNVRQISRADARVRLLMSTPGVGPLVALTYVSAIDDPKRFTSSKRVGAHFGLTPKKYQSGETDISGRISKVGDSSVRAVLYEAAHIILTRPIHGGALKGWAMRLAKRAGMKKAKVALARKLAVVLHRMWVSASTFDFEKANGCTRAAA

SEQ ID NO: 204124 - protein, 310 aa, unidentified
MDVVYSHVCGLDVHKKNVVACIITPDHKEIRTFSTMTEDLLALIDWIKSHGCTHVAMESTGSYWKPIYNLLEMEQIETLVVNARHIKNVPGRKTDVKDAEWIAGLLRHGLLKGSYIPSRPQRELRELIRYRRSLMDERAREIQRIQKVLEGANIKLSSVASDIMGKSGRLMIEAIIAGETDAAVLSELAQRRLKAKKADLQKALHGLIGPHQRLMLKTQLRHIDELDKLIEQIDAEVKKRMDPFEEDLERLDTIPGVGRRSAEQILAEIGTDMDQFPSAAHLCSWAGLAPGNNESAGKRKSGRQPRETRN

SEQ ID NO: 204125 - protein, 346 aa, unidentified
MTILEDTRVITGGVDTHADMHVAAALDPLGGLLGVREFPATAAGYADLLGWLSGFGDLALVGVEGTGSYGAGLARYLAAARVRVVEVDRADRQDRHRQGKSDPLDAVSAARAAQSGRAAGAPKGRDGAVEAIRALMVAKRSARNERTQAINQARSLIVTGPDDLRARFAGLTAAALAEGIAALRPRPGDAAQYAVRIALRELGRRVEFLDGQLERLDDLIVPLVTARAPGLLSLYGVGPDTAALLLVAAGEHPERLRSEAAWAHLCGVAPIPASSGKVRRHRLNRGGNREANRALWRIVITRMSAHPATRAYIERRTKEGLSKKEIIRCLKRYVAREVYHHLRAGG

SEQ ID NO: 204126 - protein, 365 aa, unidentified
MGVPTVVQAKTFVALDVHVSGTVAAMIDRDSGELRRRRLSGRAVEVAEFVAGLAGPVCATYEAGPTGFALARRLEAAGVDCLVCAPGLIPRGPSDRVKTDQRDAERLVRLLVAGELHRVGVPSVEAESLRDMVRAREDLRGDLMSARHRVSKLLLRHDVRFEGRQRNWTQDHLRWLSTVRFDQPGTQAAFDDYRGAVEALVIRRSELERQIAEQLPLSPWAQTARRLMCLRGIDTLTAAGLCAEVGDFHRFRHPEQLMSYLGVVPSEHSSGTRRRQGSITKSGSQHARRLLVEAAWHYRQPPRVSQPLRRRQTGADAAIIALSWKTQRRLHRVWTRMERRGKRRTIIAVAAARELAGFCWAISTA

SEQ ID NO: 204127 - protein, 408 aa, unidentified
MRVIALDVHRSFAEVAVHEEGLVRPAGRIVLEHDAVVKFARSLRQGDHVVLEATGNTAAIVRLLTPHARRVAVANPRLVRLIAEAKVKTDKIDAKVLAQLYAAGFLPEVWLPDEATELRRCLVAQRAQVVAHMTRLKNRIHSVLHANLIPRYQGKLFSKAGRAWLDTQAVPQDQRLAVRRHLDELDHLATDLIALERTLAERALGDDRVRRLMTVGGINAVVAVAVLAAIGDVGRFPAPARLVAYLGLDPKVRQSGDRPAQHGRISKQGRAHARAMLVEAAWAVAVTPGPLRAFFLRVKDRRGKQVAAVATARKLAVLIWHLLTKEEDYAWARPALVEAKRRQLELMAGRPSRRGGEPGPARDYSIKAIRERERAWVEQAESAYARFVAAWSERPQGRRTGAAKEERR

SEQ ID NO: 204128 - protein, 368 aa, unidentified
MELTALYKRVIGLDVHQAQITACALIEEEDGTARIVQRQFGAFKRDRRSLAEWAAALCPDEVVMESTGIYWKSPYAALEAMGIRAKVVNARHVKSVPGRKTDVGDDAHWLATLARAGLLRGSFVPPAKWRELRLIARQQQKLTGQLASEKNRLHKHKVLTDSGIRLGVVVSDLHGQSARAMVKAIIAGQPPHEILKLASRRLKASREEIFDALQGELTESHYFALDELMQHIEEIEARIARFDTKLLDELKDERNTPVLLQTLPSVDLMGATMLLVEIGTDMDTFGTASQLSSWVGICPGNHESAGYSASSLMPPVVPDQCSNRSSSLSSSGVDVNARSWLSATKYYALHSLLHAQTARTLLGFDHRL

SEQ ID NO: 204129 - protein, 392 aa, unidentified
MIYVGIDVAKDKHDCFAMNSDGEILIENFSFQNNSDGFNLFFHSISQFNESSENIKVGLEATGHYSNNILNFLTSKGFNVFVINPLQTNLFRKGQSLRKTKTDKLDARFIATMLITDNLKPYSNLSYHISELKSLVRHRFRLVEERSKFKVSLSRLVTIVFPELEKIVWSISQNSVLYLLYELPSVKDISECNLKHLTNLLKKHSCGKYSRDKAIEIRDLAKKSIGTHSPSISFELRQVIQTILFLQSQVDDIDKELKRLVVELNSPILSIPGISYVTSAFILAEIGDINNFGSPSKLQAFAGLEPSTYQSGKFTSTHSVMVKRGSKYLRWALLTATRLVCMRDKNFNDYKNQKLAEGKHYFVALSHTAKKLIRVIYHLLKTNSTYELQKVT

SEQ ID NO: 204130 - protein, 426 aa, unidentified
MYSNTQNSKIAAITEKTLVIGIDIGSERHYARAFNWRGIEFTRKPFIFNNDDEGFEAFRVWIEELKTGHDLDKVMPGMEPTGHYWFNLGAFLQDTGMRPVHVNHHHVKKSKDLDDNNPSKNDRKDPRVIARLVIEGRYSYPYIPTGIYADVRNLSNLRLQAQGELTRIKNRIARWFAIYFPNYKDVYGKLDAVTGLAVLKVAPLPEDIVKLGAEGVNKIWRDAKMRGAGMKRATTLVAAAEHSVGCTEASEAARYEIRILLSDYDLYAERESELMGMINESIAEIPYIDKLLEIKGVGLKTAIGFVSEVGDISRFDDPKQVQKLAGYAIVENESGKHKGEHHISYRGRKRLRYVLYEAAISVVAHNAEFKEIHQHYITRDKNPLKKMQSLIVVACKLIRVFYMLATTDNHYDGQKMICDIKRPVVA

SEQ ID NO: 204131 - protein, 373 aa, unidentified
MTIVADQPGPHPSSPERPGHPGWVVGVDTHTDTHAAALVDHLGGVRAEVQITADPAGYAQLVAWATGQLPAGQPLRWSVEGTRSHGHGLTRHLRTAGHTVFEAPKPVNSRRRRGGKSDPIDAVHAARATLAIDQDPTTHHAIPRADGHREALRILLITRRHDTDHRTATISLFKSLLLGATNLPGTLPETLRGLSTARQLRAVQNLPEDPTTDLETQIRLQALRRAATTITELNRAVYANEKQLRTLVEQACPGLLDLPGVGPVTAATLLTTWSHHGRVRNDAAYAALAGISPLPASSGKIIRYRLNRGGDRTLNAALHTIVTARRRMGHPPTSDYIARRTTEGRTTNEILRCLKRYTIRQLYRYLQANTITA

SEQ ID NO: 204132 - protein, 423 aa, unidentified
MENTAARKLKQVPEGYLIIGVGPHKKRHAAVAITQDFTTRDKFKFDNTREGLETMLRRARTEMVKLDCRGVMFAIETGGHYWRNIAYFLDEQGIPFRFINQFTLKRRREGKDLNRRKNDYRDSEVAAQLLCTGEFTESKVPQGVYAELRTAHNAYRRLVKERTRITNLLKGLLDGLFPEFTLVFKDPCGLTALSVLSTCAIPGVIAGMTEEEFVATIEAKHQGRLMRKKLRELHYMARASIGIAAGARPVSSEISFLVEKLELIRGHICIIERTLVSLVDETEEGKYLLSIRGLNYIAVAGLLAELGCFKSYRTAKQMIKMAGSNPTESESAGKRGSHTPMSKQGRPVLRYCAWTSVIPMLRLNSDFRAWAKQMRERPVHANPLNGREIVGAALNRLFRLAFAMVKNQTYYHVSKPELTLVAV

SEQ ID NO: 204133 - protein, 375 aa, unidentified
MKEKLRFLGMDVHAETIAAAIAEPDGEIRSLGTIPNRMESVRKLLKKLGPVEKLRVCYEAGPTGYVLYWQLAELGVQCEVIAPSLVPVKAGDRVKTDRRDAEKLARSYRSGDLTAVWVPDAGSEALRDLVRAREAAKQDELRARHRLGKFLLRSGHRPPTGVRSWTHLHLTWVSQIRFAQAAQESTRLDYLHEVEHMRERVLRLEQAIVEAVKLASPALQEVITDLQALRGIAHISAVTIAAELGQVSRFTGARELMGYCGAVPSENSSGKRTRRGSITKTGNAHLRRIVVEAAWSYHRPPAIWAGLRKRQQSASEEAKEIAWKAQHRLHKRYARLAAKGKDKRKIVTAVGRELLGFIWAIGTKAEATVRQRIAA

SEQ ID NO: 204134 - protein, 426 aa, unidentified
MKVMHDRVAAIDVHKDMVKVAVRVPGERRGTRKTDVLEFRTFYGVLEEMGRELRRRGVTHVVMEASGVYTEPVYYALAGLGFTEVMVINPAHAKALKGHKTDAKDAIRLLDLYECGLLSGSYIPAPDLKEVRDLARYRMKTVQARASEIQRLQKTLETAGVKLSSVVSDVTGVSATAMIEALIDGERRGAVLADLAQGRLRTAGKMADLSMALAGRFTDHHALMCRLHLDRIQALGEAVAGLDAKIAPLAARYSREAALLKTLPGFGDVIVAGWLGAIGPAPHQHFATAQRLASWATVCPGNYMSAKKSKGGRTGDGGNYIKPLLVQAAWAAVRVPGRLQAKFNRLVRKFGGARNKGAVKRAIMAIAHTLLKIAYQVLKTGTPYTDLGAGFYASRETPQARQDYLIRQLQKLNPGCVITITPAEAA

SEQ ID NO: 204135 - protein, 412 aa, unidentified
MEVLYSCCCGLDVHKKSVTACVLWANGGGKKRKEKRVFGAVTRELLALADWLRACGVTHVAMESTGVYWKPVWNILEGQFEVLLVNAQHIKAVPGRKTDQKDSEWIADLLQHGLLRASFVPPRATRELRDLTRYRVSLAQECNRIANRIQKVLEDANIKLASVATDALGASGRAMLEAIVAGQHDSERLAEMAKGLLRNKIPELRQALEGRVTEHHRFLLRQLLDHLKFTESKMGEIEAEIDRRLRPFEEEVARLCTIPGVERVTAWGMLAEIGFNMEQFPSGAHLASWAGLCPGSFESAGKRLSGRTRKGSAALRRCLCQSAWAVSTKRDNYLSAQYRRLAARRGGKRAVIAVAHTILVMAFYMLKRKQDYREVGADYFDRLNPDRLKRSLVRRLERLGHKVTLEPLAQPA

SEQ ID NO: 204136 - protein, 416 aa, unidentified
METLEWFVGIDWASEKHRVCLLDGTGRCIGERDVPHGGAALAELCRWLLAVTGAPASRIAVAIEVPHGPVVEALLEQGFAVYAINPKQLDRFRDRFSVAGAKDDSRDAYVLGDAVRTDRHLLRRLAVEHSLVIELREFSRLSEELQQEQQRLVNRMREQLWRYYPQALELTDDLTSDWFVALWRLAPTPAKAARLRQATVAQLFKTHRVRRLQADEALDILRRTPLAVAAGTTEAARAHIESLVARLVLIKRQIKAAHRRLDELCAQLEAEDGPGQPFEQRDLAILRSLPGVGRIVQATLLAEAPELVRRRDYEALRTLGGIAPVTRRSGKSCIVIRRLACNKRLSNALFHCAKAAAQHDPVSRQRYDALRQRGHSQGRALRSVADRMLYVLCTLLRRQTLFDPDHAQPAPMAAAA

SEQ ID NO: 204137 - protein, 335 aa, unidentified
MDNLVFCGIEVSAQELVVAWTGKKGQPVMQRFANSAAGHRALSAALTRGGKRVRACLEATGLYGWDVALFLSTQAGLELMVANPRAARHFALARMQRSKNDRLDALGLWEFAKRMEFTAWRRPAEHCLTLWALARRLQALTQQRVAEKNRQHAAGVSQAIPAAVRRSVARTLRFLEREMQQLREQARRCIAGDARLQQRYAQLCSVPGIGENSAIQILAEVALLPEDRDVRQWVAYAGLDPREYSSGTSVHKHTRISKVGNRHLRRALYMPALVASRREPHLRGFYEHLLARGKKKRQALVAVERKMLHAIFGMFRTNQPYHGALVYQLPAEKVA

SEQ ID NO: 204138 - protein, 315 aa, unidentified
MTTSSGKFVGVDVAKEKLDIAVLGEIKASQVTNDAKGIASLIKEMTALRPELIVVEATGGYQRAVVLGLYEAGLPVAVVNPARVRQYARACGLLAKTDKLDAFNLAEFGKQVRPRQFEAKSEVGRYLSALLVRRRQVEEMLKAEKSRLRTVHVDMRVSLERMIEILKEEIKRLEKDLDRFMKEHADWQEQEEILCSAKGVGRVTAATLLAELPELGKLDRKKIAALVGLAPMNLDSGKKRGYRKTKGGRIEVRSVLYMATLVATRYNPLIQVQYQELLRRGKVKKVALTACMRKFLTILNAMMRDRVPFRQTVAA

SEQ ID NO: 204139 - protein, 366 aa, unidentified
MKKISTVQVFGNEILKEQKLTIGVDLGDRWSFYCVLDEAGRILLEQKVATTPEALKQAFAKIPRSLIALETGTHSPWVSRLLTELGYKVIVAHAQKVQLITKSNRKDDRHDARTLARLARIDPELLGPVRHRSAKAQIHLTVIRARAELVRARTALVNAARGLVKSYGQRLPKCGTRQVSRELGAGLHAELREVLEPLLQEIESLNERIQEYEVRMEKIAKESYPHVELLKQVKGVGTQIALTYVLTLEDPQRFPKSREVGCFLGLRPGRRDSGESQPQMRISKEGDRYLRTMLVQGAHYILGPFGEDSDLRRWGLKLAGRGGKSAKKRAVVAVARKLAVLLHRLWVSAEVYEPLRNSQKAMRAAA

SEQ ID NO: 204140 - protein, 353 aa, unidentified
METITRVGVDLAKNVMQIHAVDGREHVVVRKAVRREHFLSWFANLQPCLVAMEACSAAHYWARRLRALGHLVRLLPPQFVAPYRKGGAQIKNDAQDAEAVCEAAGRPNMRFVPVKSPAQQSVLVLHRMRTGFVEERTALVNRLRRLLGEFGVFLPQGINQLRKHLVEHIEDGNNELNGQARQALMRGWAQWQTLDDEISWLDRQIGDHAKHDSQAQRCMELCGVGTVTASAAVATIVDAAQFKNGGQMAAWLGLVPKQNSSGGKQRLGRITRQGNDYLRSLLFQGARSAVLTAPRRNDRLSRWIVQLQARVGYSRTLVAVANKHARVLWAVLARGERFDPSHAPARHGGAASA

SEQ ID NO: 204141 - protein, 349 aa, unidentified
MNSTRVAVDLAKSVFQVAVSTTPGRIDQHHRLSRERFRRFFTQHESADVLMEACGTAHHWGRELEALGHRVRLLPPSDVARYRDGNKTDRADAIAILEASRNEAIDTVPVKTIEQQALTSLHRLRSAYVADRTARINTVRGILREFGYTIPQGSRTFVAHARVALDDEQLPQDLRDELGRAFDEIVAFRTTIDEITGRIELLGQQMPAVAYLRSVPGIGVLTATALVAFVGEPHRFRSGRHFASFLGLTPRENSSGLRRRLGRISKKGDTYLRTLLVHGARSALLAARRTKQPDPLQLWALRVELRSGHNKATVALANRLARIAWRVWRDQRSFEPLPQFGHPGQGGRL

SEQ ID NO: 204142 - protein, 432 aa, unidentified
MFIVGIDIAKRSHMVRVIDSEGRTVYKPFSIRNSCSGCSAMLERLRKLTNRKGEFLFAMESTAHYWLALYTRLRKEGYQVVVLNPIQTDAMREMLMEENKTDEIDTLVIAETIRFGRYRASSVPQEKLLALRELCRNRFYLIDMGSDLKRKITALLDQVFPEFESQFSTIFGKTALAVLRQYPTPEKLSRAQTGKLTEVLQTASNGRFGEWKARQLKELARDSFGIPDCEGAYSALLLLYLDQFQSLQDAAAALEKRIAELFSQFDSTLTSITAIGPVLGAVILSEIRDISCFASAHKLAAYAGLNPKVNQSGDKKSSAVHMSKRGSPYLRRAVWMAGAVAVQYDPMFRAYYEKKAAEGLRYMNIIGHVSKKMTSVIFRSCGTPRYTSLFCPLRNGGMAYFLTAHCGGLSSLHPLSSPVHSTLSEFLYLTNP

SEQ ID NO: 204143 - protein, 261 aa, unidentified
MDIEKRNCKACMMNADGSIVEESEYDNKLTEAEIFAYSLVKKYGKCIAVCESTSNLWLKTYQAFEKYGIGVKLANPLKTKAIAEARIKTDTLDARTLAHLLRSDLVAECYIAPKGIREDRSLLRLRTNFVQDRTRVMNRVHSLLDKYDVKCDYDNIFGVKGTRWLSSLKLSDNDQILLHEYIMQIEFLNTEIKNTESKISYQASKNESAKILMSMTGIDYFSAMLIALEIGDITRFNTPEKLVSWSGLCPSIHQSGNSLYM

SEQ ID NO: 204144 - protein, 354 aa, unidentified
MKRTTKYVAFDVHQATTVASVREESGRVIARSVLPTDSGALTEFVRGMRGTRHVTFEEGTQAQWLYELLAPLVDRVVVCDRRGAPRQGNKGDQVDADQLSELLRRGALRAVYHGSADRATLKELTRTYRNLVEDATRVMLRLKALFRARGIPTAGTAVYDARHRAHWLARLFEAGARFRAEALYAELDVLRKLRPKAKAAMVMEAQRDPAWPVLRTIPFLGSVRVALLLATMQTPWRFRTKRHLWAYAGLAVVTRSSADYTIVAGQAVRRRRSPMTRGLNRNHNRVLKDVFKGAATAATARPGPLQAFYRSVVARGTREELARLTLTRKLAALTLRLWKKGERYDPTKLTTPAR

SEQ ID NO: 204145 - protein, 329 aa, unidentified
MDVSKAHLDLAVWLDGKIVAQFAPANGVSALRKCVLEMRRLDGFAMSQAVFCVEHTGIYCAHLLEVLQQAKGRVALVAAVEVQRSLGLQRGKNDQVDARRLAEYAARFSDKLRFWQAPRPVLRQLKQLATLRQRLLNAKIQLQVPLDEGRPFTDKVDQKILEQHSQGPLKALQKALEEIEEQIRSLIQQDEDLRGLFEQITSVPGVGAVTACEIITTTNEFKDFDDPRKFACHAGVAPFEHQSGSSVRGKPRVSHKANKTLKTLLHLAAMSAIRSKSDLQVYYLRKTAEGKAKLSVINAVRNKIIHRIFALVKNHTTYQKNYQLLLAKP

SEQ ID NO: 204146 - protein, 342 aa, unidentified
MVQPVTVGLDIAKNVFHAYGVDARGEKVLSRKLRRAQVAAFFAKLEPCLVGIEACATAHHWARTIEKLGHQVRLMPPAYVKPYVKTQKNDEADAEAICEAVTRPNMRFAEVKTIEQQSVLVLHRTRAMLIKHRTRMGNTIRAHLAEFGITESIGRIGLSRLIDIIVSGEDDRITDVTRRALMCLVDQYCLLQDQILELDRQVMAWHRSNEASKRLATIPGIGPLAASALVASVGDASNFKNGRSFAAFIGLVPRQSSSGGKERLGKISKRGDHYLRWLLVVGSLAVIRYAQRHGTRRPWLLKLLQRRTTKIAAVALANKMARIAWVLMTRGGAYREPLPQAA

SEQ ID NO: 204147 - protein, 356 aa, unidentified
MQNDHQSSESVILGVDTHLDIHVGAVISQAGKLLGTHIIQTNQSGYLELLDWARTFGILERAGIEGTGTYGAALTRYLIKNGVYVVEVNRPDRSKRRLEGKSAPLDAENAARTVLSGSSKAIPKMQSGACEALRIISVARRSAVKARTQAINQLRALLVSAPQDVRDKLWKSKPHECVSACINSEMSECSPLQIALCSTLRSLAKRWMALTEELNELDESLDKLTRKYASNLRRQFGVGPQTAATLLAVAGDNPERLKNEAALASLCGVNPLPASSGKTVRHRLNRGGSREANNALWTIALVRMRSDPRTRIYVDRRTGEGLSTKEILRCLKRYIVRELYPLILSDLAYANRPLLT

SEQ ID NO: 204148 - protein, 466 aa, unidentified
MRTDKKLWRNRKARKELARRLQSENPGLEVVHPHAAGIDVGNGAHYVAVRPDRDPQPVRRFECFTADLYRLADWLQSCGVRTVALQSTGVYWIPLYDILEERGFEVYLVNARHTKNLPGRKSDVQESQWLLKLHTYGLLNNSFQPPSKIRILRTYWRQRLQHVTGAATCVQRMQKALTQMNIQLANVISDLSGVTGQLIVRAIVAGERDPWKLAELSHPRIQASREEIAKSLEGNWRQELIFVLQQDIEMYDTYQRRMAECDQELQKHLRAFADTVPPPVKEALPPKKQKKQNKNNPHFHLADELQRITGVDLTRIDGVDVMVAQTLISEVGLDMSRWKTEAHFASWLGLCPDNRISGDKVLARGTRHVLNRAATALRLGASTLLKSQTYLGAQYRRLRSKLGAPKAITAMAHRIARLVYRMLKYGQHYVDKGAEYYEQRNRQQQIEFLRKKAARLGLQLAPAHPS

SEQ ID NO: 204149 - protein, 358 aa, unidentified
MQRNKNSFKGQKIFIGIDVHKRNWDVAIAPAVGNVKRHTQKASARELFDFLKKHYPDGDYLAVYESGFSGYSTFYALKEVGVECLVTHAADVPTTQYEEVMKTDKIDSVKLVRSLKAGLLKGIYIREKENIDDRSVVRIRKTIQRQLSGYKARVKHMLHCNGVSLPGCFEKPGSHWSKAFIKWLKEDVRLLSSTRNSLDLLIRQVETIRMTLLEATKMMRNLSQTERYKRKFDLLMTVPGIGVAVSMCILTEVYDVKRFRNENQFAAYLGLIPTSHSSGEKVAHGEKTFRGNRQLGPMIIEAAWITVCKDAGLGSLYLRYKERMKPQVAIVRIARKLSNIIFAVLKNEKEYVPYHTAN

SEQ ID NO: 204150 - protein, 340 aa, unidentified
MPLYGGIDLHANNSVIVLLNEQDEVIYRKRLSNELPAILEQLAPYHAEVKGLVVESTYNWYWLVDGLMEAEYRVHLANPAAMQQYSGLKYTDDHSDARWLAHLLRLGVLPEGYIYPKAARAVRDLLRKRAHLVRQHTANVLSVQNIMARNTGARFSVKRIQELTKQELTTLLAEETQVLAVTSSLVVLDCLRHQIKRLEQSVHTRLHHTPAYEQLLTVQGIGTILAQTITLETGAISRFPTVGNYASYCRCVDSTKISNGKRKGTGNVKNGNPYLAWAYMEAAQFAMRFQPEAQRFYQRKLAKSRNNTVLARKAVAHKLSRACYYIMRDLVPYEVTKAFG

SEQ ID NO: 204151 - protein, 376 aa, unidentified
MQDTEDEPLFAERVAGLDIAKAEVEVTIRVPSDTTAGRRQQETRTFGATRRELLALADWLRCWGVTKAGMEATGDYWKPVFFLLESRGFDCELYNAAQVKALPGRPKTDRADSIWLARITERGMISSSFVPPEPIRRLRTHTRYRRHLTQARTAEKQRTEKLLEDGHLKLSSVISDIHGVSGRDMLNGLAAGQRDPRALAQLARGTMRGKIRRLEEALECSFFTDEHAAVLAMMLVTIDHYTTQIDQLTAKIEKLAEPYLHQIRQLDEIDGVGTICAQDIIAETGADMTVFPTASHLVSWARWSPQVKQSAGKRKGSNATGRGNPYLSAALGEASISAGRTPVLPGRPVPAPDQADAEKEGPGRDGYLERRPRARR

SEQ ID NO: 204152 - protein, 432 aa, unidentified
MSIEGGDEVKRSFGLDVHLDFCEVAVCEDNQVSGLGRVASTPEAIREFAAGLGAGDQVALEASCGAMMIAGLLRESPARVVVCNAAETRAISHARVKSDRFDAAMLAKLLAAGMLAEVWVPDEDTSALRRRVARRAGLVRARTRVKNEVHAVLARCLLGRPPVSDLFGKKGRAWLAGLALPEEELQTVQSCLRHIDFLDGEVAMLDREIARQALARPGFHRLLTIPGVDVGTAAAVIAAIGEINRFASPGQLVAYLGLDPKVRQSGSEPARYGHISKRGDPQARAVLVEAAWRAIRTPGPLRAFGERVRARRGAQIAAVAVARKLVVLCWHLLTKNEDYAFARPSLTRQKTRRLELLAGAMPLPRRHTGATVTPTPKQREAELALGQQAEQAYRRLIADWRSMAPRGGAGATTGRASKRPKESQAARQATSP

SEQ ID NO: 204153 - protein, 339 aa, unidentified
MDRETGAVVERRLTPDHREIVGWIEGLPGPVAVTYEAGPTGFFLARALEAAGVSCQVAAPSKLIRPVGDRVKTDARDAVHLARLLHLGQVTAVTIPTAEQEAARDLVRAREDCRGDLMTARHRISKLLLRQGIVYYDGKNWTGRHELWLRKQRFDNPALQLTYDAAFDAMTACVDRRERLEAAIEAMAADSEFTPVVQRLGCIRGIATLTAFGLATEIGDWHRLTGRTIGAYLGLVPSEYSSGDSRVQGSVTKTGNGHARRLLVEAAWHHRSPYRPGTMLRRRWELASPAARARGQAANRRLHQRWIDFDLRRKRSVVANMAVARELAGWCWSLAVLQE

SEQ ID NO: 204154 - protein, 324 aa, unidentified
MICGVDISSASVEARISRDGATSSFPNNSEGINALAAFCQTHQVELVAMEATGGYEQQAFAGLSEHGLPVAILNPRSVRKFAESMGRLEKTDRIDAGMIGWYAEVKQSRPLCLAPASQLHLRALVTRLRQLTEVRTAQLNQQRLVTNEAVQACFKELLAVIASQIRALEQSIAALIDADPLWRELNRAFRTIKGVADRTVARLMAEMPEIGILSNKTVSKLAGVAPLARDSGKFQGKRAIRGGRAAVREILFIVASVVGRYEPDFIAFQQRLAAAGKPRKVIRIALAHKLLVRLNAKARQVREQITGIKQNSSHNRAAAIVIGV

SEQ ID NO: 204155 - protein, 342 aa, unidentified
MSVYVGIDVHRKRSQLAVIDAKGEVLANRNVPNGAEPILKVIGGLPAGTPAAFEAAFGTSWLVELLEDYGFDPHLVHPSRCKAIASARLKNDKVDAAILAQLLRADLLQEAWIAPPPVRELRALLRHRVHPVRVRTLLRNRIQAIVADHGHDRPRGGYWTGPGRAWLASLPLPAASRELVDDNLGLIDAIQDRVDRLDGEIRQRARSDPRVKVLTQLPGVGPFTALGILAEVGDISRFASARKLASRAGLTPTVRGSDRVAHYGHISKEGPVWLRWVLCEAAQTAKRHPQFAATFQRIARRRGKKIATTAVARKLLTRAWHLLTDAESTASPQPAAPQIAAR

SEQ ID NO: 204156 - protein, 452 aa, unidentified
MMEDAMAQRKRPSRQAAITLTHPNAAGIDIGSAAHFVAVPPDRDDEPVREFPSFTAELHRLADWLDACNVDTVAMESTGVYWIPLFELLESRGFTVLLANARSVKNVSGRKSDVLDCQWLQQLMSYGLLGGAFRPTEQVCVLRALTRQRAMLLRSQARHVQHMQKALTQMNIQLANVISDVVGETGQRILRAIVAGERDGLALARLKNARIHASEQEIAASLQGSWRAEHLFALKQALDAFDFCAQQLSECDAQIEAQLQNLHICEDEPAKGKKRTRARNAPRFDLRTQLFRMCGVDLTRIDGVDVTTALAVISEVGVDMSRFKSDKHFASWMGLCPGTRITGGKVISGKTKRCANRAAQALRLAAAALRTSQSALGAYYRRLCARMDKPKAVTAAAHKLARLIYAMLTKGQEYTDAGQDYFEERYRQRVLHNLAQRAKAMGMQLTPCESAA

SEQ ID NO: 204157 - protein, 398 aa, unidentified
MAQAYAVFCGVDVGRGEHHAVGLDTTGKRLFDKALPNDESRLRALFDQLAARGPLLIVVDQPNTIGALPVTVARACGHDVAYLPGLSMRRIADLYPGQAKTDGRDAYIIADAARTMPHTLRRVDTGDETLTELGVLVGFDDDLAGEATRTSNRIRGLLTSIHPGLERVLGPRISHPAVLEILSRCGGTAGIRAAGKRKLTTIATKHAPRMGSRLVEEVLAALPAQTVTVPGAKAAEVVLPKLADSLKTVLLQRQSIAADIERMLDDHPLSKVLTSMPGVGVRTAARILLEVGDGSAFASAGHLASYAGIAPVTHRSGSSIRGESPARSGNHKLKRALFLSAFAALHDPASRTYYDRKRGEGKKHNAALICLARRRCDVLYAMLKTKQPYRNPLVPAST

SEQ ID NO: 204158 - protein, 325 aa, unidentified
MKPTTLYCGIDMSAETFDICVQADDNNFAWHQLPNNITGFKKLLQICPANYHFVMETTGAFHLPLCFFLHENNCSYSVVNALQIKRYIQMNLERSKSDKKDAKHICMYGIERKPEQYQMPCLQYFECKQLNNAIESLTQEIVSFNNKIYATEKLKMDSTVVIKSYKNIIKNLKAELKKLESELDKKLKLWQPDLTKKVQSVKGIGKRTTAILIVFTQAFAHTETYQQLISYAGLSPKEYSSGKSIRGKVRISKIGGKQLRQTLYMCALNAKATNAACKQLYDRLVAKGKNKKLAIIAVCNKLLKQVFAVVKSGVMYQDNYSKNIA

SEQ ID NO: 204159 - protein, 339 aa, unidentified
MKVSTLGIDLAKNVFQLHGVDHNGKTVLKKKLTRDKFVPFIMQLEPCLIGMEACASSHHFARVLTQFGHQVKLMPPQYVKPYVKTNKTDAADAEAICEAVTRPNMRFVQVKTAEQQAVLALHTERDILIRERIACVNSLRAILAEFGLIMAVGRKAFNQGIPDILENGDIELSPFIRRSVARQFEHIQSLEDQVTLIEQELSQWAQTQPACQRVMKVPGVGLLTSTYLVASVGNGQQFHCAKQFSSWLGLTPREHSSGGKQRLGSISKRGDGYFRYLLVHGARAVASVIERHKEDMPWLFALLQKKNYNVAVVAQASKTARILWSMLVKETEYRPVITH

SEQ ID NO: 204160 - protein, 389 aa, unidentified
MVTGITAYKRRSLMNRIIKIGMDVHSTNYTLCAMEPTIGSENRIFGETQVAPDYKEVICFIEALKMRLGLYDDYSIECGYEAGCLGYTLYHQLTNAGIKCVILAPTTMLTQQGQRVKTDKRDAHLIAQCLCYGGYHPVYIPTGEDDAVKEYLRMRDDHKKALKKLKQQINAFTLRHGHQYTGTKWSVKHVIWLNKLELKPMYRETLDEYMISYQEQEAKIERYDKRIEEIAAEARYKENVGKLGCFLGIRTHTALSLIVETGDFKRFAKGNAYAAFLGLVPGEHSSSNRVNRLGISKAGNKHLRCLLIEAARGICKGAIGYKSKTLRLRQNGQAPEIIAYADKANIRLRRKYHKMIRHGKKKNVAVAAVARELACFIWGMMTGRISITA

SEQ ID NO: 204161 - protein, 379 aa, unidentified
MVQWFLDLRTRDREPREKPSMKIVGCDFHPRWQQIAVFDGETGGVSEQKLLNGDGEAERFYRGLEAPALVGIEACGNSQWFIDLLERLGHQVWVGDAARIRASYVRRQKTDRRDAGHILKLLMEDRFPRLWMATAAQRDLRQLLVHRHKLVEIRTRVKNGLQHLALNRGMQKQRSLWTAGGMAGLKNLALEGWSLRRRADLLKLLGELDQQVSALDEAVGQAAAGHPEARLLMTQPGVGPVTALAFAVTIGDVRRFEHSGQVASYVGLIPREHSSGGKQRLGAISKQGNRFMRQLLVEAAQTACRLDEGFRKPYVARCHHKPKGVAKVAAARKLAVRLYWMMRQKVAYPEIAHIESSSRVPLTGTKEVVTLNERSRIRQ

SEQ ID NO: 204162 - protein, 409 aa, unidentified
MKSQLEILHKRVAGIDVHRMKHVVTVLIEDAAGNLTRHPREFGGFKRDLKALAAWLVELGVELVILESTGIYWKSVYARLEEADLATWVVNAHHVKNVPGRKTDVADSEWLAQLGRYGLVRASFIPPKDLRELRLVSRYRRKVQANLAAETNRLHKILDDAGIKLGGLVADINGQAAHAMVDGLIDGLAPCELIKLSGRLKAPREALLASLDGDLSARHRLVLAEIREHIRQLEARLEKLDAYLRDAMVPYLWAWTLLQTIPGIGEIAAALILIEMGDDLTHFGNADRFASWAALCPGNNESAGKRKSGKTRKGNSILRYLLCEAANGAIRTLSVFREKYRSLVIRRGHKKAIVAIAHKLIRTIYFMLTRRQTYHDSGFDYAAANVKKNAPRWIKALELHGYVVKLNAA

SEQ ID NO: 204163 - protein, 360 aa, unidentified
MKVTTVGVDLAKNVFQVHAMDERGKVVVRKQLKRDQVAAFFARLEPCLVGMEACASAHHWARKLQGFGHTVRLIAPQFVKPYVKTNKNDAADAEAICEAVSRPSMRFVAVKTVAQQALLAMHRVRQGFIKARTAQANQIRGLLGEYGLIIPQGIGNIAKRVPSLIEDATNELPGSFRVLIDRLLEHLKALDQQVAELEAQITAWHRESEASRRLERIPGIGPLTATALVATMGEARNFSNGRQVAAWLGLVPRQHSSGGKATLLGMSKRGDAYLRTLLIHGARSMILALRRKTKPDGWFEPWMFGWHCRKTKPDGWLHDLVKRRNPNVAAVALANKNARIAWALLAHERSYRADYVSVPA

SEQ ID NO: 204164 - protein, 403 aa, unidentified
MAGTRTAGIDWASEAHEVCISEEGRATQRFSVTHEERGILELAARLTRLRVARVAIERPDGVLVERLLAAGLEVLAIHPNQVKAARARYAVAHGKSDRFDAYVLAELARTDAHRFRVLVPDGDQTKALRALTRAREDLVGARVELANQLRAQLGAFWPGALIFAEVDSPISLAFLKRYPSPAEAKGLGAGRMAAFLTRNSYSGRTDAAELVGRIKAAPQGTAGPEEQRARRAVVLGLVAALTPIVAQIAELSAQIRSALAAHPDAAIFRPLFRDPKTAICPATLIAEIGDCRGRYPTEAALAADAGMSPVALESGKLRVATFRRACDKRLRSAVATLADTTRHWHPWAKEVYRGARARGQDHPHAIRTLGRAWIRVLWRCWRDEVPYDPRRHGNFNRLQTAGG

SEQ ID NO: 204165 - protein, 343 aa, unidentified
MPKHYLGVDYHKAYSVLCLKDELGQTLKQRKINNTRGAVENFLKGYSNIAAVIEAARNWQVMYDILEEKTNSVKLANPLMVKMIASAKIKTDTIDAKVLADLLRTNFLPTAHVPTLQAREARQILRQRMHFVRISTMIKNRISHLLDKYPESPRPCKTTLFGKKNFRWLEQLKIKENDRLVLDQDLALLKAVQERIAQSDKLVQNLFQSNSEIKYLQSLPGLGIFLSTLIFYETDGVGRFISVKHFHSYCGLIPFLHSSGGKTRTGPITNGGNKWLRYAFIEAVWPAIRQDPSLRNYYQKMKSKKGPNPAKVATARRLATIAYQLMREKRYYRRTPSVALIFP

SEQ ID NO: 204166 - protein, 370 aa, unidentified
MSVYVGIDVHRKRSQVAVVTEDGTVQLNKNTVNGTAPILRLIGDLPSGTPVAFEAAFGWSWLAQLLEDYGFEAHMVHPLRCKAIASARLKNDKVDAATLAQLLRADLLPEAWIAPPAVRQLRALLRHRTGLVRLRTQLQNRIHAVVADFGYDRSGSYLSGPGRGWLAELELPAVSREIITDCLTFIDALAPEIDRIDGELRQHAKTDPRVKILTTLPGVGQFTALVMLAEIGDISRFPSSRKLASWAGLTPTVRGSDRTVRHGHISKQGSAWLRWVLNQAAQTAKRSPEFSATYAVIAKKRGKKIATIAISRKLLTRAWHLLAAAQAADPAAPGGSAATAAHPQTGRVTKPRARSFTRHEQADGRARSSD

SEQ ID NO: 204167 - protein, 523 aa, unidentified
MVTKTKKRRSTGSKKRFIGKPNGQIHERVQAVGPAQFGVVTVDWAKRRSKWMLCSFFGKVIIEPTTVEHTAGGLRAMTQLVTATCKAEGLTETIVAVEMTGIYHKPVQRAFRKAGFDTRIVHPFASHHYRRPLHPDAKTDDNDLEAIFHAAINGYGLATLPVGPVYQSLQAVSRHRHNLVKQRSRLMVQIRRLLHQTMPGFADLFEDGKLFHKSIALPVVLKFSSAEAVYRAGVAGIASHLNKTKVRFQRRTIERIVAWSSTAAEPSELAAMHTRQWQQLNEVRKLLGEQIAAAEREMAGFLVKTPYVLLLSVTGINVISAARLAGEAGPIEHYASVRAINGRAGLFPSRYQSDEVDRADGSLVRQCNRKLRGAAMLVAENLIKCHPYYRGLSALWTQQKVDPRDRRCRIANRAMRMVYQLVGGRQLWRGKGVDREYLLAKLQEFHRVHKTPIDQSIRDMNEAFAWLPKSAYAAEAKPLGELARKKHRGPKRIGDLLIPLLIRLGVSIEEEVESNTSEARSSD

SEQ ID NO: 204168 - protein, 408 aa, unidentified
MNAVGIDVSKGKSMVAALRPMGEVALLPQEFLHTEVGLEQMAYAIIALGEDTRVIMEATGRYHEPVAAALHEYGIYVCVLNPLLIKQSGGGSIRKVKTDKADAMKIAKYGLDNWVDLREYTPMDTVRQQLKLCSRQYNLYMKTVVSLQNNLISLTDKTFPGVNELFSSPERADGHQKWVDFVMTFWHCDCICRISEKAFTERYQKWCKRKGYHFSAEKALDVYTGSCGHFTTLPKNGNTKLLITTAAQQLLAGKMTLAALRAEMTRLAKQLPEYDTVRAMYGVGETTAAQLMAEIGDIRRFPRRSSIVGFAGVDPAVDQSGKHSAKSVPTTKRGSPHLRKTLYQIVCTYLKKSPADEPVYQFLDKKRSEGKPYFVYMTAAQNKFLRIYYARVKECLEAFDARQDTVQN

SEQ ID NO: 204169 - protein, 331 aa, unidentified
MEIKETIGIDVSKLTLDAHIHSNRQSTVFENSEKGFAKLVKWAYVNSPHSKDHILFIFEHTGLYSERLSEHLSKEGIPYSIVSGLEIKRSLGIVRGKDDRIDAARIALYGYRLRDEVTLFKSPSKTIRTLKKLLSLRERLIRQRAGYKTSIKEQKKVLGQKDFKLLFKVQEKMIGELTVHIDALDLEMEANIKSESELDRIFSLLLSIKCIGKQAAMLLLVYTEGFTKFKSARQFAAYCGIAPYPHQSGSSIRGKSRVSQMANKSIKSLLNMCALSSIRHDAEIKGYYEQRVASGKNKMSTVNIVRNKLVSRAFAVVHRGTPYVNVYKHAS

SEQ ID NO: 204170 - protein, 406 aa, unidentified
MNAVGIDVSKGKSMVTIMRPFGEVVASPYEVMHTDSELSKLANSLKSLNGETKVIMECTGSYYQPIAYTLHDAGLFVSAVHAKLIHSFGNNTIRKVKTDKADSIKIANYGLTHWLELPKYIPEDDIRRMLKTYSRQYSKYTKLKTMLKNNFISLTDQTFPGVNELFKSPPRKSDGHEKWMDFAFKFWHCECVCGLSRKAFSERYRKWCKKAGYYFNEDKALDIYASACGHICVVPMNDSTKQLVTLAVNQINTVAESLAVCAREMKRLAEMLPEYPVVSGFYGVGDVLAPQIMAEVGDIVRFRSKGSLVCFAGLEAPPYQSGTFESNNRHISKRGSPHLRKTLFQVMDCILKHSPADEPIYQFLDRKRAEGKHYYSYMTAGCAKFLRIYYARVNEYLDALEAKTSE

SEQ ID NO: 204171 - protein, 345 aa, unidentified
MPIVGGLDIHRKQLTFDYLDTVTGEVRRGQVAPADREHLRAWLARFGGGQVADFALEGCTGWRYVAEELAAAGIGAHVGEPADTAAARGRKRHAKTDRTDSRHLRQLLADGRLPECWIPPSHILECRALLELYHDLRTGHTAWVQRIHAVLFHQGARQLGEGHLRTEEDLAQLRAIAAAQLSPAGQLQVATALDMLTVLEDHLDAVRRRLLEAARHLAGAKVLQQRLYGVGPITALALTCWLGGAGRFSSSRKAVRFAGLDVTVYSSAGKRSPGHLSRQGPEVLRWCVYEAGKAHARTSAPDHAYYAQLKDRIDGKRAAISEARKIIRQACHILSGLGDDALTTT

SEQ ID NO: 204172 - protein, 347 aa, unidentified
MVTLGGDCHKRTHTLVAVDENGRELARKTVPAVSAGHAEARRWACQWPERRWALENCRHVSRRLEMDLLMAGEMVVQVSPKLMAGARRTGREWGKSDPIDALAAARAALRDGELPVAHLDQAGRDVKLLLDHRDDLVGERTRVQNRLRWHLHELDPAFDVPDRSLGRKVVLNQVEKMLGGHRGVAADIAVELLEWIRRLTMRIKQLERQIGALVAKLAPTLLQLDGCAALGAAKLIGETAGISRFKTSARFAMHNGSAPIPVWSGSHERHRLNRGGNRQLNAALHRIAVTQIRLGGRGYDYIQHRLAAGDTKKEAIRALRRRISDEVFRRMWQDHLLTVGAGAHAAA

SEQ ID NO: 204173 - protein, 410 aa, unidentified
MEAIVERCAGLDVHQATVVACLNIGAVGTRPTKQIRTFGTTLSDLEALRDWLTANGCTLAAMESTGIYWVPVHAVLEGHVELVVGNAQHIKNVPGRKTDVKDCDWISDLARHGLIAKSFAPPRPIRELRDLTRYRSKLVQAASAERNRLLKLLESANVKLASVASDVFGVSGWAMLQALVEGKRTPAEMAQLAQRRMRRKLAELERALHGRLEEHHRFLLGVQMRRIEAMEADVAELDQRLRRKLVPYRRQMHLLRQIPGVDWVTAATIIAEIGADMTAFASSAHLASWASMCPGSYESAGKRRGGKTRKGNVHLKTALVMAAKAAGKTKGTYLGDKYRRLRARIGASRAGVAIGHKILVIAYRMLTDGADYQDLGPGYLDQLNTRRTAGNLLRRLREMGYHVQLTPKAA

SEQ ID NO: 204174 - protein, 326 aa, unidentified
MLYVGVDIACATAQVAWLTVEGATGQQTVAQSEEGHRGLIRQLQQFALASQTRVVMEATGTYWLALALALHDAGMAVSVLNPSQARHFAKVCLKRAKSDPVDAALLAEFGRRMEPALWTPPPAVCSHLQQVLARRRQLVEMRTAELNHLHALQQRPDVLPCLVAQVRDHLALLTQGIDHLNDVLKELTNGQHEWQIAVRHLCSIPGVGALGAAALLTATHCFARCETPEQAAAFAGLVPYRHESGSSVRGKAHIGGGHPDLRQVLYMCALSASRCNPVLRAFYHRLLAHGKAKRAALCAVARKLVHIAWALVTKDRDFDPSFATPT

SEQ ID NO: 204175 - protein, 337 aa, unidentified
MSYLGVDLHTNSFTVCYRSSQGKERIATFEVRRIGQFRKTLRKRDELAVEATGNTAWFVEQISDRVSKVVVVNPHQFKVIRKSVKKTDKHDAKTLAFFLSKDMLPEARMKSKENTQLHSLAGTRDKLVKQRTALINKIHNVLNRHGLKYKKESLSAEKHLKKVLSFDWDAIVRVELEVLAEQIRSLNGSIKRLDEQMSEYGKNLKGHKNLASIKGIGERSATVLLSVIDDVNDFADEDKLAAYFGIVPRVSDSNETVRHGRITKNGSKIGRTTLVQCTLVATRYSPYLRRYYERIKRHRGSGKAIIATSRKLLGIIYQTLKNDWIFEDFPNFVIANT

SEQ ID NO: 204176 - protein, 345 aa, unidentified
MIVIGVDSHKDTLTAAAVDATTRRVVATRCVPADSAGYAELLGWADGMDLDRVWAIEDCRHLTGGIERALLARSERAHRVAPRLMAGCRSTARSNGKTDPIDAEACAIALIRYPDLPAVARDDVSHSIRLLVNHREDLVQERTRVQSRLRWILHDLALEGDIAARTLDRSNVLDRVARKLRQLDRTDTRVRICLELVSDIRAATKRITSLERELDQLTRAACPNLRAVEGCGALTAAKIVARTHGATYATDHKLAMLAGTAPLDASSGRQQRHRLNRRGDRQLNAAMHRIAVTQMRMYEPARTYLANATERGKTKTEALRMLKRKITRRIHTALIRDFAAEQAPA

SEQ ID NO: 204177 - protein, 312 aa, unidentified
MTNKICGVDVGSETLDARVGQDGPWRQFARSLEGSLALAEFCKEHDVDLVVMEATGGYERLPFAQLWGAGQPVAIVNPRSVRKFAEAMGRLEKTDRIDCGMIAWYAQTKRIRPMQPASATQTRLTALVVRLHQLTEAKVVQTNQRRLVTEPDALATFEPILAAIVSQIRSLEHQIAETIDDDPLWAELDREFRTIKGVANRSVATLMAELPEIGTLSNKAVAKLAGLAPLARDSGKKTGQRPVRAGRAGVRSILFVVAEIVRRFDPDFKAFHQRLCAAGKPKKVVRVALAHKLLVRLNAKARDTRRKLAAAT

SEQ ID NO: 204178 - protein, 365 aa, unidentified
MKDYTGKTIFVGMDVHKKTYSITAICDGVVVKKDTLKADPQSLVYFLKKRFGSGKIKTAYEAGFCGFHLHRILKAAGIENIVVHAAGIETSNSRVKTDKRDSLKIAAHLSEGKLRCVYIPTLEQEDNRTVTRLRNTFCKERARIANQIKSLLFLHGLIPADHNKKVSLKWIRALSKFKMTSGLKFSIEAFQAMWLQFDMKIKEIDKEIKKQALENKEIDGMYQAASGIGWTSARVLANELGDLQQFKNERQLFSFTGFTPSEHSSGEKTRQGHITKQGKPLVRKILVQAAWVAIRHDRELQAIYERIAAKSGAKRAIVGVARRLIGRIRASFRTGEIHKPQKVERPTLKFKKEQQPKKQKIKLVA

SEQ ID NO: 204179 - protein, 345 aa, unidentified
MKNTLIAVDLAKSVFEVAVSDRPGRVKERKRLSRAGLLKFFVNRQPALVLLESCGSAHFWGRQIRDLGHEVLLLPPHAVRPYVPRNKTDRTDAKGMLEAHRNEQIHPVPLKTIEQQALCALHRLRSGWLDTRTARINSVRGLLREFGITIPVGAKKVVPQLEMLLADADSALPDSIRPALHEARLEIRQIEQRMQLVENQLEALARQIPTVHKLLTIPGIGVLTATALVAFVGDVRRFPSGRHFASYLGLTPRENSSALKRRLGSISKRGDVYLRWLLIHGGRSILANAPRRQEPSRLRTWALNIQQKRGHNKAVVAMANKLARFVWAVWRKDVEYAEPQDMQAA

SEQ ID NO: 204180 - protein, 372 aa, unidentified
MQKDKTVFIGLDTSKMKISVALAEEGRQGEIRFFGDIDNTPDTVQRFIAKMSSRYIKLSFCYEAGPTGYGLYRQIKELGHDCTVIAPSLIPKKPGEHVKTNRRDAITLARLHRAGELTAIWVPDPDHEAIRDLVRAREAAMEDLREKRQHLQSFLLRHGRIYAGHRPWTKVHAHWLAALIFDHPAQYLVLREYRQAIQDAETRLERLMQHVTELVSSWSMAPIVEAYQAMRGVALLTAVTFVAEIGDVRRFETPRQLMAYLGLVPSERSTGDRVRRSGITKAGNPSARRVLIEGAWTYRNPARVSRPLEVRQEGLPEIVRAIAWKAQVRLCARYRRMMASGKRQTLVTTAIAREMAAFLWAIGHEVEPRSAA

SEQ ID NO: 204181 - protein, 420 aa, unidentified
MKAKKKAKLDLIDGNTLIAGIDVGKKKHFARFINLRGYEIGKVFSFSNNREGMEKVIARIEKAKKQNNLTKAVIGLEPSGHYWRPAAHYLSRSGYDLALVNPYHVKRIKEIDDNCQTKTDIKDCLLIAKLVRDGDFFDPNLASGTYAELRRMYRLRLKVKKSFVREKTKLKVLLDEYFPEYEDLFCDTLGKTSEYIIDNYFLPEVIAKENILSLAGKIKMISRGKIGATKVLKLIEYAKDSIGITTGIEAALLEKTYILEEISNLKLKLAYLNKKLKYYLDKIEYSKYLLSIPGVGIVTAAGFLGEVGDISKYKSAKEIIKLAGLNLVEISSGIKKGKKKISKRGNSILRCLLYQCAIVAISKNSQIKKYFSYQTEKKNKMKMVVAVQCKLARIMFALLKYKKYYDPEEVLKSMVAQAVA

SEQ ID NO: 204182 - protein, 311 aa, unidentified
MNHVVGIDLAKYHFDLHLLPEGKGLHCLNDAQGIADCCRFLAQVQPEAIVLEATGGYELPLTCQLQAAGLPVIVVNPRRVRDYARSMGLVAKTDRIDARVIAEFATSPRLVLRELPDESTRQRKALIARKEQLVEIHVAERNRLEHASDPSVAESLRHVLSVVEEQIASIDHTLAEAIAADERLQRKVEILDSAPGLASATAIMLVTQLPELGHANRRQIAALVGVAPINRDSGQFRGKRMTGGGRVRVRTALYMPMLAAIRCNPRIRQFYQRLVDNGKSKMTALVAAMRKLLTILNTLIQKNELWNPNIA

SEQ ID NO: 204183 - protein, 391 aa, unidentified
MIYIGIDVAKDKHDCFITNSDSEVLFKAFTIANNLDGFNDLYQKSESVMDDVTKVKVGLEATGHYSYNLLGYLIDKGLPTYVINPLHTNLYRKSLSLRQTKTDKVDARTIASMLMSDVNLKSYSDISYHNEELKSLTRYRFDKVKERAKLKSSVSRLVCILFPELEKLVPTLHMASVYAMLSEFPGAKQVADAHLTRLTNLLSESSKGRYGKETAIAFRNAARTSIGSNMPAKSLELKHTIKLIRELTSDIDEIEHEIKLIMDEINSPILSIPGINYRMGAMIIAEIGDFNRFDSPDKILAYAGLSPSTYQSGQLDGAYSHMEKRGSRYLRYALYNAAKYVCHWDPTFAEYLAKKRAEGKHYNVAISHAVKKLVRVIYHLEKTNQQYIKAA

SEQ ID NO: 204184 - protein, 375 aa, unidentified
MQAAGSGYEAGRVLYMALELSNRTWRLGFSNGTKVRQKSVGARALERVVEEIALAKHKLGLEPGARVVACYEAGRDGHWICRWLRTLGVEVLVMDSSSIERAQGRKHVKTDGLDVERLLDLLMRYCQGFRRSFRVVRVPDEAAEAGLRLHREDAYLVRSRGRVANRIRGLLATQGLVEVSLGRGFTGWLDSVQLWNGEGLSAELRAELMRLYEQYQLFGRQQGDVAAAYQEELETEGVIGTQRTRLELLKSIGPKISRVLSAEVFAWRTFRNVKQVGSMAGLTPTPDQSGEVSRERGIGKHGNARVRHTTIELAWLWLRWQPGSQLSAWYRERFGSGGKRLRRIGIVALARKLLIALWKYLEQGVVPDGAVLRAA

SEQ ID NO: 204185 - protein, 410 aa, unidentified
MDVLYARCCGLDIHKRTVVACLIVPGPRGAPVKEIRTFETMTDDLLALADWLEAAGCTHVGMEATGVYWQPIWNLLEDRFTLQLANARHIKAVPGRKTDVRDCEWIADLLRHGLLPASVVPPRPQRELRELTRYRTSLVQERSAEVNRLQKTLEGANLKLAAVATNVLGQSGRAILTALVGGTTDPAVLADLAVGKLRAKLPQLERALAGQVGPHQRFLLARQLAHLDDLDALIEEVSAEIAERLRPFEDVIARLDTLPGVARRTAEILLAEIGTDMSRFRTARHLASWAGVCPGNHESAGRRQNGKTRPGSKWLRTALVEAAQAAARTKGTYFLAQYQRLVPRRGKKKALIAVAHSLLVRVYYLLRHGTRYEELGANYFDELDRQQVERRLVRRLERLGYKVILKPAAA

SEQ ID NO: 204186 - protein, 405 aa, unidentified
MERVFVGHDWAEAHHDIYVEDSDGQRLARARLAEGVEGVARFHELVAPFAEDSGDVVVATETDRGLFVGALVAAGYQVLAINPLSTSRYRERHSTSGAKSDPGDAFVLAELARTDGHNHRPIAGDSDLAEAVKVLARAHQSLIWTRQRQTNQLRSALREFYPAALGVFDDLACGDALAVLAVAPTPSLGRRLSRSKIAAALRRGGRQRRIDERAAEIQTALRADTLEAPGLVSEAMGAQVRALVAVIAELVTQIGRLEAELADRFDQHPDAKIIRSLPGLGTILGARVLAEFGDDPNRYADAKSRKNYAGTSPITRASGKHRVVLARYARNRRLADACYLWAFAALNVSPGARAFYDQRRAAGDTHHRALRALANRLVGILHGCLRHGTLYDEHTAWAHRTPAAA

SEQ ID NO: 204187 - protein, 387 aa, unidentified
MPQPNDLSRSLVALDQDSTVIAVVEMSQSSWLVAGVLPGIERQPRKKLEPSAERLLGLLHRWRDEAVRAGKKITRIALAFEAGRDGFWLARWLSARGVEAHVIHPSSVAVSREHRRAKTDRLDTELLKRGFLGWLRGERGHCSMARVPTIAEEDAKRPNRERECLVGERTRIVNRMKGSLARLGIRNFKPTLRKAAERLATLQTPEGSPLPPNVSAELQRDMARLRFVISQIREIEEARQKRLEQEPETGSHAMVRRLARVVGVGIETADMLVHEVLSRPIRDRKAVARYAGLTGSPDESGAKRREQGLARAGNARVRRGMIQLAWRFLRFQKQSALAQWYRARTTDSRLGTRKTMIVALARKLLIALWRFVTTGETLEGVVLRPAG

SEQ ID NO: 204188 - protein, 375 aa, unidentified
MIATTRPVMSVSEPTMFVAFELGKRHWKLAMTSGFGVTPWLRTRRSGDLAAVERALAEGRRRFTLSATAGVQSCYEAGRDGFWIHRALTARGITNRVVDSSSIDVKRRRRRMKTDRIDALKLVHMLVRVWAGETDVWSEVRVPTLAAEAARHESRERTALTHEQTRLVNQLRSWLATMGTALPKRRPDGWWRTVRDWAGEPLPPPLQERLARVHARLRLVVKQIATLEIAARRAVAAAPADSAVRRLVQLKGIATTSATVLVDEGLAWRAFTNRRQVGGLLGFAPLKYESGELSRDQGISRAGNDRLQAMMVQLAWSWVHWQPHSALTRWYRERFGTGKRARKVGIVALARKLLIALWRWTTAGIVPAGAMLKAA

SEQ ID NO: 204189 - protein, 374 aa, unidentified
MNIIYIGVDFHARQQTICYLKTETGELVTCELQHQDKQAVRAFYAQFPGPAVIGLEASGYSPWFEALLEDLGCEVWLGDATEIRRRARWRQKNDRRDAELILDLMVHKEFPRLHRPAIESREVLRMLRYRQKLIKIRTMSKNSLQALALQSGLAKGSRLFTKAGQQELNSAVMSPVMQWQCEHWLQLLQPLNQQLLETMVWLKLQSKGDVQITRLRTHPGIGLLTSLCLVHTLQPISRFRNQRKVAAYAGFDPVERSSAERKCFLGISKAGSRILRYLLVEAAQTAVRKDEDLKRFYKRLAERRGRPKAKVAAARKLLIRAYIMLRDEIDYAEFRRRAVAARLARRGQGPNVPAVLIGQPASADHRDDLPSASQ

SEQ ID NO: 204190 - protein, 405 aa, unidentified
MYYVGVDIAKDKHYVCILDDTKELACKPFWIHSDILGLRELLKRLAELSLDMDDFLIGIESTGAFSENFYSYITDADYKVILLNSYQTAKYRDFSTLKKIKNDSIDAYVIAELLASGKYKASYISNEAYHDLKVLNRLKKSLDDKIKNIQREISTVVATVNPEIEKVFPNIFTKTAIAIIKAYPTAMDIQKATPEKLTKIFRHIKGNSFNLEKAKYLIELAKSSIYTGRALESRALMIKTNIKILELYLQEKNEVEKQIQDLIDNQLDDDSTNIDNVKSIPGISDKTVTAILGECGDLRRFESAKAFIGFLGLYPTLYQSGKSSSTGTLAKRGIPIAKHALYMAAVSAVRHNTELHKLFRDKVSSGKSKKEALIIIAKKLASIIYSLFKYDQPYNPNRVLIQHKK

SEQ ID NO: 204191 - protein, 390 aa, unidentified
MGIDIAKWVFHIVGMDDTDAVVLRKRLARSEWLALMANLPPLRIGMEACGSAHDWARCVREHGHDVRLIAPQCVKASVKSPKHDARDAEAICEAVTRPTRRVVPITWVEPQDLQALHRIRERLIKARTALVHEIRGLLSEYGMILPQRLTKFRALIVDKLHEEQAKLTTLSAEVFWHLDDAFRAMEKRLAYDDEKLAAIGQAHPAYQRLQIIPGIGPVTATALITAIGDVTPFKNGCQLAAWLGLVPREHSTGGKPRLLGMSTRGNLYLRKLFVHGARDALRWIDTKDDERSRWLKALIARRRKNRAAVALANKNARIVWALLTVLLQKSTSAIFDGCNPLKYRDTILDKSVKNRFLQQNPMRCVTLWLRGNRAGDGWHLVALVTTDSVG

SEQ ID NO: 204192 - protein, 346 aa, unidentified
MTIVDLARAVTGGVDTHLELNVAAAIDHIGGLLGVAEFPTTSSGHKELLAWLKTFGPLVKVGIEGTSSYGAGLARSLRRAGIEVAEVDRPNRQSRRRSGKSDPADAVEAARAALSGRAQGAGKAKDGNVEAIRALVVAKRSARDTKIKTMNQIRHLGFTAPDELRERLAGVSRKDLAATAAALRPRDGGDQVAFATKTALCLLGRRVLALDAEKEHLEDLLSKLVEKTAPELLSLYGVGVDTAAALLVTAGDNPERLRSEAAWAHLCGAAPIEASSGKVTRWRLDRGGDRQANAALYVIVITRMSADKRTRAYVERRLAEGKTKPDIIRILKRYVAREVYHHLPRA

SEQ ID NO: 204193 - protein, 407 aa, unidentified
MDLLKTVFGIDVSSRKSNVCIMVNGQKVNDYAISNDMVGFNQLLGDLKQVTKPQIIFEATGVYSRRLQAFLDMHELRYVMMNPLEAKRKTKDDLHQNKTDKLDALYLAKLQSEHPQRLAYVQNKEYQELMANNRIYEQASHDLITNKNRLHKAVQLTFPEIEHLLANPRGKNYWSIALRFPHPDIVLETKEADIIDFLKGLSGIGKKRANDITQNLIRLAKVACPAVKKNSAHIRGLKMAINNILSAEEECQTALQEMAKLAPKRDLEILTSIPGIGENTALRIISELGDIRRFNNPSQLNAFVGVDPQVYESGNLTAHLSISKRGTAIGRKVLYLAINQIQSAKKAGNPCHIADYYEKRKRSSETASHKKAAIASIHKLLRTIFALIKNDQLYSYDVAKHNQRLLS

SEQ ID NO: 204194 - protein, 391 aa, unidentified
MEEGLEEILECSCGLDVHKDKIEACILKTGAKAAYRETFGCISSELDRLCKWIKEHGCKDIAMESTGVYWLPIYERIEAKCPDRQSLLVVNAYEIKNMPGRKTDIKDAHWIALLLKRGLLRQHNSFIPEHIVRSMREISRLRRKITGDRSKASNQLEKFLQTHGFKFSSVFSSITGMSSTALLKRLAQRGKLSLRDIYDCCYRNLKHVPEEILAAVNGELNEAERKLLCFHIKRIEALSDEISELTGMLADLFEEYKEQLKIAVSLPGINLDSAMEVLAEISPEPQASFDTQRKISKWAGLSPRNDDSADKITCRKTLHGNPYVKSILVQCAWAAVKTRNSEFQKWFWPRQCRLGRKKAIIAVARKLLCLLYTLLSKGVLYSPPSPEPIAV

SEQ ID NO: 204195 - protein, 349 aa, unidentified
MLSCKVENDEVDLLKLIDEVLSVAEDVVWATDQPGGSAALLLALLWERDQRVLYIPGLTVDRARDAYRGESKTDARDAHVIADQARMRSDLGGLTASEGDLAELQLLLARRRDLVADRTRSVTRLRETLLALFPALERALDLNRRGALTLVAHYQTPASIRRMGRKRLTSFLKNRGVKGAHALTEKALAAAKAHSATLPAEDVAARIVVELAGEALDAKERVEALDGEIRQRFFARPEAKILASLPGMGPILGAEFLVETGDLSAFESSDKLAAYAGLVPAAHDSGKRIGNDRRMRGGNKVLKRVFYQSAFASLRSAPESRAFYDRKRREGKKHTQALIALARRRVNVL

SEQ ID NO: 204196 - protein, 393 aa, unidentified
MEVQDEQGRVLRRARLSEGMAGITEFGELVGRLLSEDGQAADVLVCTETDRGPWVNALIAAGYRVFSVDPKQAHRHREILSSSGAKSDKGDARGLADMVRTRRHQLREAGGDSEIAEAVKVVARAHQTMIWERTRHMLRLRAALREYFPAILAVCDTVDLSLTSRPLLVLLDKAPTPELAAKLTARQILPMLKGCRNKDAKAAQIQQILRGENLGQPPVVTRAYAASVRSSVAVLMVIVEEITHLETEVKAHFGQHPDADIILSQPGLGPILGARVLAEFGDAPGRYRSSKDRKNYAGTSPITRQSGKMRIVAARYIHNNRLVDALQGQASCAILHDPDVRGYYDQLRARGTKHNAALRQVANRLVGVLHGCLNARTRYDRNTAWAHRHTAAA

SEQ ID NO: 204197 - protein, 439 aa, unidentified
MIDTILSGYAAIDLGNEKLFVAVPNGPVRSFGGFTSDLRLLAAWLKENDVHSVAMEATGVIWINPHDALEKAGFKVMLFHGNHARNLPGRKTDVQDCQWHAMLYSHGLLKPCFVPTERIRELRSFCRLRDDHLEMAGAHIQHMQRALDLLNVRVHNVISQIHGVSGLRIVEAILAGQRDPIQLAALCDRRILSKKEKEVLASLEGNWQEHHLFALKQAYEGYRFYQQQIAECDKQMEKTLQTMNAGKEPIPRVKGRKVKVTRHNAPLVGNLYGELYTACGGHDAQLLPAIGPLSWLKLTAELGTDLSHWSSEKHFTAWLGLSPGRSQSGKRRRRIARRKTRAGQIFREAVMSLAGSKDCVLGDFYRRIRAKRGAPVAIVATARKLAELYWRVMVKGIEYVEQGLEEYAKRMREQSERLLRKKAAKMGFSLQPIQPSTSV

SEQ ID NO: 204198 - protein, 364 aa, unidentified
MRDPIQQPERVTLGADTHAEQHVAAALDERGRLLGTCTIPTTTSGFAELVRWASAYGELGQVGIEGTGSYGAGLARWLGSRHIAVVEVDRPDRRTRRRRGKSDSVDAEAAARAVLAGIATAQPKAGTGAMEMMRTLRVARQSAVKARTQAANELHALVVTAPDALRAQLRQLRLPQLVIRAAAFRRSTELSTPTAATKLALRSIALRYQHLSVEIDELDKHLDKLVAVAAPTLVAIKGIGTDIAATLLIVAGDNPERLASEGAFAHLIGVAPVEASSGKITRHRLNRGGNRQGNRALYLLAVGRMRWDPATRAYVARRTAEGRTKPEIIRCLKRYIARELYPVLLTATSILVRLDSSTAHSAAA

SEQ ID NO: 204199 - protein, 341 aa, unidentified
MEQYIGLDVSLKETAISVRQGGKRIWRGKCASDPKVLAAIIRDRAPEAKRVVFETGPLSVWFYHALMAEGIPAICIDARHAKAALDMAPNKTDTNDADGLAQLAEVGFYREVRVKQYDSMLSRTRVGARNKVIKITIELSNQIRGVLKTFGLIVGKGSGRVFEGNVRALLAGNAELARIVLPLLEAWRDLRARATELDRQLVAAARESAACRLLMSIPGVGSVVAASFAAAIERPENFRTSRSVGAWLGLTPRRYQSGEVDFDGHISRRGDNHLRGLLYQAATVILTRSLADSTLRSWGLKLREKVGFKRAAVAVARKLAIVMHTMLKTGERFDRTIGASA

SEQ ID NO: 204200 - protein, 483 aa, unidentified
MKATNRSASRRSTKKFARPGQPVQASARMPVIHPHAAGIDVGATSHWVCVPEDAVAEGQSSVREFGAFTQDLDELVEWLLKSQVQTVAMESTSVYWIPLFQKLEAAGLAVVLVNARHVRHVPGRKTDCKDCQWLQRLHSYGLLNGSFRPSDDICCLRSLMRHRDNLTKACGQAVQHMQQALNYMNVHLHHAVSDLNGETGLRILEAILRGEHDPKELVKLRDPQITRSTVAEMEAALCGDWREEHLFVLRQSLENYRHLHRQLAVCDRELEKVLAKVVVNPTTVVEAERPKNPPAAERKAKRQKRFKKLKAGTGLKRDVSAELTRICGVDLTQIIGLNVLGILIVISEIGVDMSRWRNAKAFCSWLGLCPGNKISGGKVLSSHTVHVVNRVAILLRTVAPAVGRSDTWLGIFHRRMRARLGPAAANTATARKLACLIYHLLKYKEEYIDVDALIYQEKIRKSRIARLCKQAEELGFEVIKKAA

SEQ ID NO: 204201 - protein, 389 aa, unidentified
MTYFVGIDIAKSEHVASILDSSTGELIVNSLHFDNNLKGFNLLLSKIAMLNKEDVVIGFESTAHYHLALFNFLNENDYSCVLVNPLQISRFRKISLRDTKNDNVDSRTIASFLLLEHQNILEEEFYNNELKELCSQRFFLVQHSSKLKIKLVSYLDRVFPELQTTIPAGTLHTMGLRAILKKYPTARQISNVRIDHLVNVAKKASKGRYKESVVIKIKDAAKSSVGFDSPGLALKIRQSIESLESIERQIDEVESFINSHHTIINSPLHKIKGINSIEIAYIMSAIISINRFGSEKKLIAFAGLDPKIRQSGTWVAKSTRMSKRGNRLLRYALIWTANNMRRHPSKMKDYYNKKRLEAKSHYCALGHCAAKLCRYIFFILNNPDVEFIN

SEQ ID NO: 204202 - protein, 408 aa, unidentified
MQVLYPRCAGLDVHKDTVVAWVRCVSEPEHHETRSFATTTRELLALGEWIASHGCSHVALEATGVYWRPVWHVLEGQVELVLANAHHIKNVPGRKTDVNDAMWIADLLAHGLIRSSFVPPQPIQELRDLTRTRKQVVREISQHSLRIQKVLEDANIKLGSVLSEVLGVSGRAMLGAIIEGERDPHKLADLAHGTARHKHDALVEALHGHIRPHHCTLLKLHLNLIIALEHTVAEVDAAVGKCLDPIRQRARLLTTMPGVRDTVAEVIVAEIGIDMTRFPTPGHLLSWATMCPRNDESAGKRRSTRLLKGNNWLKTALVTAAWAAVRTKTSYLRAQFLRLKARRGAKKAIIAVAASMLTAAYFILRDGVPYRDLGPNHFDRQQRGKTVRRLLRRLHDLGYNLPLQNQPV

SEQ ID NO: 204203 - protein, 316 aa, unidentified
MKIYIGIDISKDTFDVAVSTQKQSVTFNNTPAGFKKFIKWMSLFDSPHIAMEATGKYYLGLALHLYEQEYPVYVINPFKIKHHAQSKLKRVKTDSEDAKLIADFCEVHKLKPWQPDSPIIAKLQEFSALQSLLIQTKTRIKNQMQSSTEIEVQKIQIAQIKQLEKQIEKIQSQMKGCVQQDVELAKQMALLKSIKGLGEKTAIELITHIKDIYRFDNAKALACYSGLVPQIQQSGSSLNRSSLSKMGNANLRKCLYMPAVNSIAYNPVLKSFADNLRKRGVAGKKIVAAVMRKLIHLVYAILKSGKPFDPEYKIGA

SEQ ID NO: 204204 - protein, 409 aa, unidentified
MQVVHPKCAGLDVHQRQVVACIRVVGRKKVVQEVRTFETTTRDLLALSDWLASHGCTHVAMESTGVYWKPIWHVLDGAFELVLANAMHIKNIPGRKSDVNDATWISDLLAHGLIRSSFVPPVQIQELRDLTRSRKQFVLESSRHVLRLQKVLEDANVKLTEILSDVMGKSGRAIIEALISGETNPEVLAGLACGNRLKATREEFVEALRGRISPHHRFLLKLHLGQIDALDSAVRELEVRMGEALSPFRESVELLKTIPGVNDTVARVIIAEVGLDMGRFPTSGHLISWAGLCPGMNESAGKRLSSRIRPGAPWLKATLAQAAWAAVRTKCSYLRAQFHRLKSRRGPKKAIIAVAASMLTAVYHILKNHVPYRDLGSEHYDRIDRTKTATRLVKKLKNLGFQVAISPAA

SEQ ID NO: 204205 - protein, 401 aa, unidentified
MAAVRDNAWVGIDVGKTHHWVCAVDADGKTLLSVKVANDEAGILSLIAAASALAQRLTWAVDIIGAPSALLLALLAQAGQPVHYASGRVVAAMSAAYVGEGKTDAKDARVIAETARLRRDLAIIDTDTDLVRNLAVLTGHRADLIADRVRMINRLRDLMTSVFPSLERAFDYSSHKGALVLLTGYARPDRIRRIGQTRLAAWLRTRHVRGFADVAARAIAAAKAQSVVLPGQDLTASIIAELAGNVLRLDERLKSLDDQIEELFQQHPQAAIIQSMPGFGPFLGASLLVGAGDLRAFPNAGHLAAAAGLVPVPNDSGRRTGNLHRPLRYSRPLRHVCYLSAQTSMMRAGPNRDYYLKKRANGRTHSQAVIALARRRIDVLWALLRENRTWTATPPQLAQAA

SEQ ID NO: 204206 - protein, 381 aa, unidentified
MKQDNKTKQNRGNQISAEAPQGTFDLGLRRWRVQREGLTVGVDVGDKISHYCVLDEEAEVVERGKLKTTPAALQPWLEALPAGTRVVLETGTHSSWISRLIERAGQEALVAQPRKIPQIYRSKRKNDRRDAEKLARTGRLDPNSMGPIRHRSVEQQADLAVIQARDALVQVRTQLINTVRGLVKGTGERLTGCSARSFAPKAEEQIPQRLRTALLPLMSQITSLSEQIERYDAEVDQLAQKKYPETELLRQVSGVGPVTSLAFVLTVADRWRFRHSRDVGPFLGLVPAQDESGESSPQLGISKAGNTYLRRLLVGSANYILGPFGPDCELRRWGMKLSERGGKNARQRAKVAVARRLAVLLHKLWVSGEVYEPLPEKRAAA

SEQ ID NO: 204207 - protein, 374 aa, unidentified
MSNHSEAFVGFDTSKLRNAVAIADGGRTGEVRFFGEIDNMEAATAKLVKKLAAKYQCVTFCYEAGPTGYGLYRQIKSLGHECIVAAPSLIPKRPGDKVKTNRRDAVSLAKLLRAGELTAVWVPDRHHEAMRDLVRAREAAMLDLRCKRQRVSAFLLRQGRPYAGRTAWTKAHMSWLASQTFDYPEQRIAFEEMMLAIRQAQERLDRLEHAIRGAVPDWSLAEVATALMAMRGIDLIAATTFLAEIGDLSRFRTPHELMAYLGLVPSEASTGNTIKRGPITKAGNRRARRMLVECAWSYQHPPRVGRNKQQKVDAASPAVREIAWKAQCRLYRRYRALIRRGKLKTVAITAVARELAGFIWAVGREITIVRVAAK

SEQ ID NO: 204208 - protein, 319 aa, unidentified
MSKIVLGIDVSKKTLDTALIFDNRTFSKQFQNSSEGFKLLAAWLASLHITEVHACLEATGIYGEAVALFLHESGHRVSVVNPLRIKGFAQSNMQRNKTDWLDARLIASFCLTQEPDRWLPPSAEVKHLQILIRRIETLEEMRQAEENRLANAASEVQLSIERMIHLLKEEIIQLERQIKEHIDRHPNLKEQSRLLQTIPGIGSRTAQLLLAEVEFERYDSARAVAAQAGVTPRKKQSGTSLKQTNLSKLGNARIRRALYFPAIVARQHNEIVKKFAERLKKKGKAPMQIVCAAMRKLLHIAFGVLKHKRAFDSSLACSA

SEQ ID NO: 204209 - protein, 377 aa, unidentified
MHSENIAAYIGLDVHKETLAVAIAAPERLGEVRYYGTINNEAQAVRRLFQKLQGLYGNILSCYEAGPCGFGLYHQLTAMNIKCQVIAPSRIPKSPTDRIKNDHREAISLARLLRAGELTPVWIPDLTHEAMRDLIRARAAAKRDSRVARQRILSMLLRTDKRYAGKHWTGKHRTWLANQSFSQPSQQIAFQHYCQSLEQIEDRILQLDQEISRLLPEWSLCNLVCQLQALKGVGQLIAITLVAELGDFSRFSNPKQLMAFLGLVPGEYSSGNSIRPRGITKVGNSELRRLLYEAAWSYRTPAKVGAWLIYYRPDSVTQYSKDIAWKAQQRLCSRYRTLTAKGKKSQVAITAVARELTGFMWDIALAAQSSFSQQKQN

SEQ ID NO: 204210 - protein, 344 aa, unidentified
MKITTIGLDLAKSVFQVHGVDATGQVVVRKSLRRSQMLPFFAKLPPCLVGIEACGTSHHWARELIKLGHEVRLMPPAYVKPYVKRGKTDAADAEAVCEAVTRPTMRFVPVKSPEQQAALSMHRTRDLLVKQRTQLINMIRGLLAEFGIDIPKGLERALLMARQIVDGKPPEVPFEAAKIVSTLSQQVLDTHVRLREIDRDLAIWLRSNDVARRLMTIPGIGPIGASALAASVTDPHQFRSGRQFAAWLGLTPLQKSSGGKERLGRISKMGDKYLRKLLIVGMTSLVRRAKYNPGKIDPRLADLLARKPTRVATVAMANKTARVIWAIMARGETYRAGHRPALSA

SEQ ID NO: 204211 - protein, 339 aa, unidentified
MKSKRYMGIDLHRNCFTVYTRQEDGSGESREWSIRSLNTFAKTVKASDEVAVEATGNTRLFCEALKSGCRIVVVNPHQFQVISRSVKKTDEHDAKVLAEFLAKDMLPEVRMKDEMHARVASLAQTRDKLVKLRTTLKNKVNNLLAARGILIRKESLASEKGLVKVLAAPVSELEHLELEILVGELRHLNESIKKLEGLLHDQGPKLPGWENLTSIKGIGATGASVLLSTIGKIEDFADEGKLAAYFGIVPRVSNSNETERSGRITKRGCKLGRTTLVQCALIAARYSPYLQTYYRRIAVHRGTGKAIIALARKFLGIIYKTLKNNWVFEDFPNFVLVKT

SEQ ID NO: 204212 - protein, 359 aa, unidentified
MVAEVLPKRRYEHMQVLIGVDPHKASLAVAAIDEATGDLLERASFPQDRSGLRSLERWAKRFPERRWAVENASGLGRHLAVRLAGSGESVVDVPPKLSARVRVLSKGNARKNDGVDALATALAASRNERLAQVDPEAASEAMRLLSDRREDLVAERTRALNRLHALLRDLVPGGLARTLSADRAARILRGIRPKGTSARLRRRLASEILRDVRTLDRKIADLDGRIETEVEASGTTLTEIFGIGPILAARIIGTVGDVGRFPTRAHFASYSGTAPVEASSGEVVRHRLSLAGNRHLNYALHMVATCQARSDARGGAYYRKKIAEGKSRREALRCLKRRISDAVFRSLMADSPSPSRDAA

SEQ ID NO: 204213 - protein, 370 aa, unidentified
MLSIGIDVSKGKSTVCGMKPGGEIVYAPFEVQHTREGMSELVSLLRSSGEEVRAVLESTGSYHCPVVAALLENGIFVSVVNSLRMKRFCSQSIRKVKTDRIDAMQIALYGLAYWQELQPARLPEDTYRELQLLARQYYQMTSMLIKAKVDFNAICDRVLPGMQELMNDHAGRHKLSDFVLRYRHTTHILEMGETRFRKDYCKWAEKKGYRNCERMAVLIFATAQNGIPVLPNAPSTQIVITEAIRVLHTVEASRDAILTQMQALAKTLPEYSLVREMPCIGDTLAPRLIAEIGDVRRFHSKRALIAYAGIDAPPYQSGKFCANNRHISKRGNRYLRKTGYEVMQSYVMHKPANDPIFTFIEKKRGEGKEW

SEQ ID NO: 204214 - protein, 359 aa, unidentified
MNNEQVWAGLDLGLRRTHVCVVDSEGVVVHEEDCETGLHAIGSALNAFPMVSLGLVAVEAGSDTHIVRKLRCAGYPVAIFEARKASRFLAVRRNKTDASDARGLADLARIGRNTISQVYLKSPDCERLRGTVVMRKRVVLLRVIAEGVLRSRLRLHGQVLKRARGASGARPQVEAILTQIKADEAIDLSAELGPLLDLSDSLTAYLKQLNSEIEARAKSNEVCRLLMEVAGVGPVCAVSFYTAIEDPSRFARVSDVAAYLGLVPRRYQSGEVSRTHGITKNGSKLTRTHLVTAAMVFARHGPDCALKEWYAALSERVGSKRARVALARKLAIVLLSMWKNNAHFEPYPTARLPELSIAS

SEQ ID NO: 204215 - protein, 314 aa, unidentified
MDTTLADVYVGIDVSRSTLDMDIYPGSNVAQFPNDEGGHARLVKALSALGPRLIVLEATGGLELAVVAAMATAKLRVVVVNPRQARDFAKALGILAKTDGVDAHVLARFAEAVKPELRPLKSADVMALEAILTRRRQLVEMLTAEQNRRLRATGPIMKDLDAHIAWLKQRLKGVDRDMNGAIKSSPVWQAKANLLLSVPGVGMVTTVTMLAELPELGTLNRREIAALAGICPYNHDSGGHRGKRAIRGGRSTVRAALYMATLTATRHNPVIKNFYTKLVNEGKVKKVALTACMRKMLVTLNAIVSSQLPWNVAR

SEQ ID NO: 204216 - protein, 323 aa, unidentified
MSNQNYAGIDIAKRNFVIGIRGKDKTKTETNNPKCFAHTVEYLHKHNVGLVVMESTGGLEISLAKTLHRAGFRVVIANPRMTKKFSESFSLAKTDELDAKMLADYAQELETKRLVANMLYTPPGEAEEQLEALVKRRSQPVDIRAAEKNRPDQIHESQRQSVTDLIAHIDGLTAALDKDIDKHTDTFGGKGGVLTEVKGIGSTTCATLLSMPPELGTVPHKRIAMPAGVVPPPNQSADTDKKTGCTGGRMAVRNMPYMAALTAGRHEPKIKAFYQRLRAKGKPFKVAINACMHKLLRILNARMRDYPASLQTASEQPTTPQTA

SEQ ID NO: 204217 - protein, 392 aa, unidentified
MFYVGIDIAKRKHEAVVTDDKGDIVVKAFSFTNDLTGYNYLLGKIKLVTISREQIVIGMESTSHYWLTLYTRLIKDGYNVHIFNPIQSDALRGMYIRQSKTDARDSFIIAEVIRFGKYSESNVPQEKLFALRELTRNRYFMVDSVSDLKRKTTALIDQVFPEYEKLFSNNFGVSSMALLLKYPTPEKLKNVSLQSLAKLLSKASNGYFGLGKAKEVKETAKSTFGVIDNCGIYATLISTYIKQILFIQDQVKEIDSQIAEIMSELDSKITTINGIGHALGAVIISEIGDISRFQNSDKLAAYAGVDPTVKQSGDYCAVRNHMSKRGSPYLRRAIWQASVIAVGCDSMFKAYYDKKAAEGKRYMNIIGHCTRKMISVIFAVLRDDKEYIPMAA

SEQ ID NO: 204218 - protein, 344 aa, unidentified
MLYVGIDVSCKEFVVYAVNERKQKVFDKKVEPTREGLRKMVKELGEEQKLLVFEAGNQMKWIALALKKMNGVTIHVVHPNEVKWISQSNGKTDKVDAKKLAELARGDMLPRAVHIVEGEIRELRELVSARDQLQSKRVALINTIRAMVLQEGAKLPVKFFQGMGWREKIEGMKLDKTQKLIIESYMKSVEQLLISEEEITAQMLTIEDRRIELLESVPCIGKISSRVLVSAIDQAERFDNKKSVANYGGLTPTIRQSGEVKLMGHINRDGRREVRKVLLQCSHALSRTKSSGAKPLKIFYERIERRRGKKKAIVALARKLLTTAYGVLKNNEYYDPQKLTAYAV

SEQ ID NO: 204219 - protein, 340 aa, unidentified
MEKRYIGIDLHRNRFTCCIRLENERTYVTEWELEDLGKFVKKLRPGDEIAVEITGNTRLFFDAVAPHVARVVVVNTNQFKVIRHSVKKTDPHDARALALYLSKNMLPEVRMKDKEHGQLASLTQTRDTLVKLRTALKNKINNILSARGLNLAREALSSEKKLNEVVDLPFDEIVRIELRVIVEQIRSLNKSIADLEKTIGEEGSKLEGHQGLSSIKGIGKITGAILLSVIGDVNDFADEGRLASYFGIVPRVSNSNETEHSGRIHKRGTKLGRTALVQSALIAANYSPYLKRFYEQVKARRGAGKAIIALARKFLGIIYRTLKNKWVFEDFPNFVLAEAS

SEQ ID NO: 204220 - protein, 310 aa, unidentified
MPRGCHRAAAHNRILEEPAMAKARSLVGLDVHATKVVAAVLDAETGQLQMFAMSSENAKVAAFCTGLPRPVRVAYEAGPTGYGLARELIKRGVECVVAAPSKIPRASGDRVKTDRRDAEHLVRLLLAGKLHPVRVPGPEEEALRDLVRAREAVRMDLMRCRHRLSKLLLRHGIRFDDGNAWTDRHRDWLDAIVLEWPAAQTTMLDLRGAIDGLTHRRDQLEREIIGLLPSAPWTVQVGRLRCLRGVDTLTAVGLCAEVGDFERFAKAGQLMSYVGLVPSESSTGQQRRLGQITKTGSGHARRLLVEAAWH

SEQ ID NO: 204221 - protein, 398 aa, unidentified
MTESSDYESVQVFIGVDVGKDTHHAVAINRSGKRLFDKALPNDENKLRSLISDLKQHGQILLVVDQPATIGALPVAVARSEGVLVGYLPGLAMRRIADLHAGEAKTDARDAAIIAEAARTLPHALRTLKLADEQIAELSMLCGFDDDLAAQTTQASNRIRGLLTQIHPALERVLGPRLDHPAVLDLLQRYPSPEKLASLGEKKLAAQLCKLAPRLGKRLAADIAQALAEQTVVVPGTNAAAVVLPRLALQLITLRKQRDEVALAVEQRVLAHPLYPVLTSMPGVGVRTAARLLTEVACRAFASVAHLAAYAGLAPVTRRSGSSIRGEHPTRRGNKALKRALFLSAFAALRDPLSRAYYTRKMSQGKRHNQALIALARRRCDVLFAMMRDGTFYTPQAS

SEQ ID NO: 204222 - protein, 366 aa, unidentified
MKKSSTVAIDKIQIFEEKQLTIGLDLGDRTSHYCALNEAGEVIVESKLATTPKGVEEVFGRIPRSRVALETGTHSPWLSRQLAQLGHEVIVAHARNVRLIGESSRKDDQLDARTLARLARIDPGLLGPVQHRSAKAQIHLTAIRARAVLVSSRTALVNAARGLTKSYGQRLRKCGTEQMNRESASGLSQELQDVLDPLLREIESLNERIAEYDRRIEHIAKEIYPQVAVLKQIKGVGPLIALTFVLTLDDPNRFRHSRDVGYFLGLRPGRRNYGMSEPQLHISKEGDRYLRTLLVQGAQYILGPFGQDSDLRRWGLRLAERGGKNAKKRAVVAVARKLAVLLHKLWVSGEVYEPLRNNHRAVAAVA

SEQ ID NO: 204223 - protein, 415 aa, unidentified
MELLYPHCCGLDVHQSSITACVRMQENSGKPRKLVRRFGAMTADLRALANWLAEQQVTHVAMESTGVYWKPVWNILEGQFTLILANAQHVKNVPGRKTDTKDSEWLAELLQYGLLHSSFVPPQLIRDLRDLTRARARLAQESSRLASRIQKVLEDANIKLASVASDVLGKSGQAMLAALIAGQHDAEILAELACGLLRVKIPQLRSALEGFTRDHHRFLLERLFVQWQFVESEIELLDQRLEQIGQAEPPLAEAVARWDTVPGVDRIAAWGLVAEMGIDMEQFPSAQHLASWGGVCPGNQESGGKRLSGKTRKGNPWLRRILGQSAWAAARTKNTYVAAQFRRLAAKRGRKRAIVAVGHSLLVAGYHLLRKQCSYQDLGPDYFDRLNAEGLKRYLVKRLEGLGQKVTLEPRETAA

SEQ ID NO: 204224 - protein, 427 aa, unidentified
MKTEDSRLEEFRQLRNEIRGSEKHLLVGIDIGKEKQNAFLGTATGKTLFKRLIFENNKEGFEKLLTHTEAAKVQNNLSQVVFGMEPTANYHKPLGEYLITRGHEVVLVSGNAVANNRQLLDGRWDKHDGKDAANVADLISQGKCQYYEYPCREVRDLRVLLSLKRKLKKQAQGLWLRIRNNLVAQYFPEMDRYYGSCAQDNLEIVRNCLSPSVIAGMEYNEFFKTVVSRKKGLRQHKHLYRLWQLAGDSICCEAGDAAICEAEVLVEQLKQTRKAILQVEKEIEKLCNLFSEYEFLMSIPGFGPDVSAKVLAYIGDQYRFDKASQVVKMAGLDLNANRSGKTTDKAVPVISKKGKADLRYALYQAALIASTRNQHFIKYFTEKIRGREMEKGIKTKMRVKLSAKLLIIAWTLMKNKEPFNPDYLTVA

SEQ ID NO: 204225 - protein, 353 aa, unidentified
MTDTPAIAWLGLDAHSRNCVLAQLDDQGHEIHHWRFPTDPRQLLRHIQAIPATVKRLMLEESNLARWISQLLKPHVQQLVVCDARRNRLISHDANKHDRRDAFALARLLRLNEYRPVWQPTDDQRVLFKRAAQAYENSVLRQTRLKLQLKSLFQHWGLFPTGATVFSQAGRSAWLQQLPYDALRAQARLLYELLDQALAGQARARRLLCQAGRPFPEVQHLRTAPGIGLVGAHLFVAYVQDPHRFAKFSRLSKYCRLSIRDRTSDNKPLGFKQLDRQGNGVLKAISYRAFLQAAKRRSGPLWDFYQASLRHTGSTTHARLNTQRKILLVLWTLWLKDKDFDPNQFSRSQPFDV

SEQ ID NO: 204226 - protein, 388 aa, unidentified
MMEAGYERYLGIDVGKRGHWAYAIDRTGGLLFSAPLANSEQDIDSMLARAGDGCLVVVDQKRNIGLLAVRRARLKGLDVAYLPGLAMSRAAALFPGDAKTDERDAEVIARTALGIPGALRSVPDEDSRTERLRRLSAQRADLLADRTHQKNRLRSLLLESNPAFEALTDLGKPWMLSLLAALGGPWNILDAGRRRFSSWERSAPHADPDACERIWASLGAATRVTEGQAEAERCLVKMVAGRIIAIDKEMASLSSMIEDGLKGDPAFEALLTVPGVGPKTAAQLVLSIDITDFKDHDALASYAGLAPRNRQSGTSVSTVSASRQGNKPLKNLLIYSCTSLIGKDCYYGRYYAACRARGMRHNHALKATARKRLKVIFAVMRDLRPYAA

SEQ ID NO: 204227 - protein, 408 aa, unidentified
MDLLHARCAGLDVHKDLIVGCIRVQEGRQATTTLMRFGATTRELLKLSEWLHAAGCTHVAMEATGVYWKPVWHILEDSFALVLANAGHIKGVPGRKSDVNDAAWIADLLAHGLIRGSMVPPQPVQEIRELTRERLGFVREVTRHTQRVQKVLEDCNVKLSSVLSDTMGLTGRKILRAIVKGQKDPERLADLAHGGVKASREELVESLRGRYTPHNRFLLEQHLKAIEDSEKIISVIERRIGKAIEPFRDAIERLSTIPGVSKTAAASIVGEIGVDMGRFETDDHLVSWACLCPRMEESAGKRRSTRIRKGANYLKPLLLQGAWAAIRTKGSYLRAKYYRLKSRRGSKKAAIAIAASILRAVYIVLRDGVNYRELGADYFIPKDRLKVAKRLAARIQELGFNVQLQAVA

SEQ ID NO: 204228 - protein, 381 aa, unidentified
MEISPTPAAPATGIQPATLFVALELSKAKWLVGLHSPAADKISRHTIAGGDAPALLSLIEVTRRRAEASLGGEVQVVACYEAGYDGFWLHRLLLAHGIANQVVDPASLLVNRRARRRKTDRIDLAGLLRTLMAWHRGEPQVCSMVRVPSLEEEDQRRRGRERERLVKERVQHLGRIKGLLMTQGIRDFQPARRGWQERLEALRTGNGQPLPVCLKAEIARECRRLALVDEMLEELEREREAASDGKAPQQAALLGKLRGIGPISAHLLAEEVFHRDFANRRQVAAYLGLEPSPWQSGQRDHEQGISKAGNRRARRVAIELAWFWLQHQPDSGLSRWFKERVGTAKGRVRRIMLVALARKLIVALWRYLASGTVPEGALMRA

SEQ ID NO: 204229 - protein, 323 aa, unidentified
MHYTQFVGIDVSKAWLEVAVCDEKGDRAAKTERYHNGREGWAALSRRFADRWGETLVVLESTGGYEAALLAYLLAEDVAVHRAHPLTAKHFLRSLQRAKTDALDAAALARYGAERWAQLPRFRAADAHTAALAALLARRSDLVELRAAEQTRRQHPRYAALQDSVQAVLRTLDREIAKIEARMRALVQESCALRTRCDVIESVKGVAEKTAWTLLAAMPELGALTRRQAASLAGCAPHPRDSGQRQGYRRTGGGREPVKRALFLACWSAVRYNPRLKEFYDRLRQNGKKPMVALVAAMRKLITILNAKLRDALAVKSPLGSAV

SEQ ID NO: 204230 - protein, 400 aa, unidentified
MLSIGIDVSKGKSTVCGMKPGGEIVYAPFEVQHTREGMSELVSLLRSSGEEVRAVLESTGSYHCPVVAALLENGIFVSVVNSLRMKRFCSQSIRKVKTDRIDAMQIALYGLAYWQELQPARLPEDTYRELQLLARQYYQMTSMLIKAKVDFNAICDQVLPGMQELMSDHAGRHKLSDFVLRYRHTTHILEMGETRFRKDYCKWAEKKGYRNCERMAALIFATAQNGIPVLPNAPSTQIVITEAIRVLHTVEASRDAILTQMQALAKTLPEYSLVREMPCIGDTLAPRLIAEIGDVRRFHSKRALIAYAGIDAPPYQSGKFCANNRHISKRGNRYLRKTGYEVMQSYVMHKPANDPIFTFIEKKRGEGKSGKLAMVAGLNKFLRVYYGKVTELYRSLPAIE

SEQ ID NO: 204231 - protein, 312 aa, unidentified
MLPSLVYVGMDIAKATLDLHALSTPAQSRQFANNPAGHRTLVRWLQGLGCVHVVCEASGGYERSVVLALQQAPLAVSVVNPRQARDFARAQGRLAKTDQLDAQVLAEFGQRLQPAATPVLSVAQRQLVELVARRQQVQQLRIAEHNRLEHTTHPAVRRQVQRHLRGLERQLEQLDAWITELVQAEPVLAHKVARLCEVVGVGRITAVVLLATMPELGALNRGQAAALVGVAPFNRDSGPRRGHRLIGGGRSVARRALYMAALVAAFSNPRFQVFYQRLIAAGKAPKVALVAVMRKLIILLNQLLKNPEFQLT

SEQ ID NO: 204232 - protein, 321 aa, unidentified
MQSQNPVVYAGVDVAKATLQLHLQGQQSEFSNTPKGLLQLLAQLQTVPSVQVVCEATGGYERALVKVLHQAQIPVSVTNPARVRAAAQAQGQRAKTDRIDAQVLTDYGQRYQPEPTPPTSATQDQLVALTQWLKQLIHGRALAKTQTEHHQDPFVLRQHAKLMTHLQSQIEAVEKQIEALIAQDAALQQRVNCLDEIQGVGPRTAWMVLAHMPELGRLNRHEVAALGGLAPWTRESGTMKGRCCIGGGRPEVRLALYMAALSAARCNPVLSTLYKRLRAKGKLPKVALTAVMRRLLTYMNHCIKALPSETAGARPQELKAA

SEQ ID NO: 204233 - protein, 430 aa, unidentified
MEQVNGIRLQEFRQVKKEIRGSTEHLIVGLDIAKERHNAFFGTATGKTLHKGMFFDNTYDGFQKLLIQTDALKVQHGLRKVVFGLEPTANYHKPLGEYLIKGGHLVVLVSTAATANNRELLDGRWDKHDTKDSANVADLISQGKCLYYDCPGEDLRSLRGLLSLKKRLKKEEHGLRVRIRNQLLAQYFPEMDQHFGSVMSLNVIQHCLDPSLISLMEYDEFCRTVAPGKVNLAQQRRLTQIWRAAKQSIGCSVGEAVSVEAQIMVAALHRVRETIKTVEDKIEDICLKFPEYSFLLMIPGFGPDVSSKVLSAIGDPERFTNGKQVLKMAGFDLCASRSGKTSNSATPVISKHGKSDLRYALYQAAIISSLNYKEFIVYHTNKIKGREREKGIGTKMRVKLAAKLLIIAWTLMKKKEPFDPKYLNQGDGKA

SEQ ID NO: 204234 - protein, 325 aa, unidentified
MADNVTGIAVVGGVDTHKDLHVVAVVDQNNKVPGTRSFSTTRQSYRQMLAWMTSFGALKRIGVEYTGTDGSGLLRYFQNAGLEVPEVTAPDRMARRKRGKSDTIDAECAAHAAFSGIRTVTPETRDGMIESLRVLKTCRKTARSARRVALQIIHPNIISAPDELREQLRIMTRMQRIRMLGSWVPDASEYRNVTSVYRITLKSLARRYLELHDEIADLDVMIATLVDELVPELITHNTIGYENASQLLITAGDNPQRLRSESDFAALCGVSPVPVSSGKTNRYRGDRAAKSVLHIIAIGHLRTDDKTKAYVARRVAEGHTKMKAI

SEQ ID NO: 204235 - protein, 332 aa, unidentified
MQMLAIDLGKQSFHIYGITCDGEVVSRKVSRTKLADAVTRLQPQSVAMEACASSHHWGRVFVDQGCAVHLIHPRFVKPFVKGSKNDAVDAEAIFEAANRPTMRFVPLKSVEQQDLQALHRTRDRLIVQRTALINHTRGLLAEYGVIMPAGASRFRLQIDKTIETAKLSDLAKNLFLKLAEEYRDLDARVSTLDDMLAEICRKDERCKRLTTLPGVGPIIATSLVAAIDDGQHFASGRALSAWIGLVPRQYTTGGKPRLGGIGNRANHYLRRQLIHGARSALLRVAKHDDRRSKWAQELQSRAGHNKTLVAMANKTARMAWAMLRSGESYKMA

SEQ ID NO: 204236 - protein, 330 aa, unidentified
MKTTVANFFLGLDISKGSFHAALQMAGRSQCMEHSFTNEAQGFKQLERWLRALGVPPKQVHACMEATSRYGEALAESLHAYLGSVSMVNPRLVKHYAKACNLRAKSDSADARLLAQFCAERHPRPWTPPLEERRMLQEMTRRLGQLRAAQNAEYNRLESVRTEVVRRDVQQHIAELQERLDELQEAVARHIAAHRTLREQEQLLRSIPGIGAKTAAVLLSELPAHLQQHYGSARQLAAHSGLTPRHNQSGKHAAPTPVCRIGSSRLRASLYMSALVGSRCQAFAAFRARLIARGKKPKQAICALMRKLIHIVFGVLKNQQPFNPNMLVPS

SEQ ID NO: 204237 - protein, 346 aa, unidentified
MTIVETRAVTGGVDTHADMHVAAALDPIGGLLGVQEFPVTPAGYTRLLGWLGGFGTVALVGIEGTGSYGAGLARHVAAAGVRVVEVDRSDRQDRRRQGKSDPLDAISAARAAQSGRARGTPKGRDGAVEAIRALMVAKRSARSERVQTINQARSLIVTGPDDLRARFAGHTVAALVSELAALRPRPGDAVGYATRTALRELGRRAEFLDGQLGRLDELIVPLVTARAAGLLALHGVGPDTAALLLIAAGDHPHRLRSEAAWAHLCAVAPIPASSGKVTRHRLNPGGNREAGHALWRIVITRMSSHAPTRAYVERRTEQGLSKKEIIRCLKRYVAREVYRHLRAAAG

SEQ ID NO: 204238 - protein, 409 aa, unidentified
MRYFVGLDWASREHAVCVVDGQGAVVDRFVVEHSAPGMQELAERLRILAAKGEVRVAIERPTGLIVDTLVEGGFTVVPIHPNAVKASRPRYSAAQGKTDAGDAYLLADLLRTDGHRFRVLTPLSDETKALRGLVRLRDDLVEQRVALANQLRCLLEQFWPGAAAIFAEVDSPIALDFLDRYPTPAGASTLGEKRMAAFMARHAYCGRRSAAELLARLRAAPVGATGELEAEAKGECVRALVAVLRPLVAQVQTLTAAVEHAVEAHPDGHVVTSLFRSGRVCAAQILAELGDDRVRFTSAEHLAAEAGVAPITRESGKHRAVSFRWACNKRLRSALTCLADSSRKTSPWAAALYQRARDRGCDHPHACRILARAWCRVLWTCWQKRLPYDPNKHVAARSFASPAAEKEAA

SEQ ID NO: 204239 - protein, 315 aa, unidentified
MVEQVVVGIDVSKAKLDVAILPSGEQFTVSNDRDGIARLVKRLRPLAPSRVVLEATGKLERPAVSELAAAGLPVAVVNPGRVRHYAKARGQRAKNDPIDARLIAEFGRDLDLEFHPLPDAETQALAALCQRRNQLLEMQQMENNRLERADSATRKSLKAVLRTLQRELEHVDKDTERSIRNSPIWQAKRELLVSMKGIGETSCSALLAWLPELGQFSRQKICALVGVAPYDDDSGQRHGRRQIAGGRAAVRRVLYMATLAAVRFNPVLRDYYQRLLTRGVEPKAALIAALRKMLTILNAMVRDNTPWRPPCPTHA

SEQ ID NO: 204240 - protein, 345 aa, unidentified
MNKLSVVGLDLAKNVFQVHGINTDGEVVVRKQLRRSEMRKYFAKLEPCLIGMEACGGAHFWSRELTRLGHTVRMMAPAFVKPYLKSNKNDRNDAEAICEAVQRPSMRFVQPKLPEQQAVLHLHHGRQLLVRQRVALSNHMRGVLSEYGIVVPQGVKVLSRQLPEILEDAENTLPILARHLLAELKAEHDQLIERVDRFEKQLKAWHANSTVSQRLASIPGIGVLTATALAATVGEGQDFKNGRQLAAYLGLVPRQSSSGGKDRLLGISKRGDGYLRGLLIHGARAVIHHIRRRLKAGRPGGNPWVEQLLQRCHVNEVAVALANKMARTAWVLLARNETYCPAHPA

SEQ ID NO: 204241 - protein, 346 aa, unidentified
MDYFAGLDASLETVNVCIVDGEGSVLLEQKVEAEPQEIVALLRRFGRPLKRVGLEAGPTSSWLFTELRAAGYPALCLECRHVKAGLSAMRNKTDRNDARGIAHLVRLGWFRVVHVKSEEAQQIRMLLVNRNLLLSKLQDIENSMRGSLKVFGLRLGQVTKRSFEARILELVEGHPNLAAITEPLLRVRRALLDEFCLLDRMARKTARNDVVCRRLMAEQGVGVIVALTYRTGVDVPERFTRSRDVGAHFGLTPRRYSSGQIDYDGHISRCGDEMVRTALYQAAHVLMHHGRWSGLRGWAMRIAKRSGAKLAKVALARKLAVVLHRMWIDGTEFRWTTSEQPLAPAA

SEQ ID NO: 204242 - protein, 360 aa, unidentified
MRIIGCDLHARQQTVAMLDTETGEVVNRTLMHEGNQVREFYSELPRPVLVGIEAIGPMQWFLDLLAQLGIECRVGDAAKIRAAEPRKQKHDRRDAELILKLLVEKRFPAIWMPSKELLDLRALLLHRHQWVRLRTQVQNALQAIALANGLRRGPSLWSYDGLAKIAFLPLPPHASYRRSALQAEYRDMEEEIEKLTVQVAEQVEHRSGAQLLMTHPGVGPVTALATDVFLGDAQRFDDGKSLASYVGLIPEERSSGRRRRLGRISKQGNPLLRFLWNEAGAHAARRDPELRRFYRRKLVQKGLGKARVAVARKLGIRLWIMLRDQIDYQEFCRRGQKQSGATCAGMPEVGNGANRHRPVE

SEQ ID NO: 204243 - protein, 438 aa, unidentified
MRAKCNDDLSTVNFSTIGLDVHKNRLVACAVHVQHDAKGREVHEKEYFESTGTYSGRQRLTEWCSSQNADVILMESTGIFWKAPFRDLEKADLHPVLINPRIFNRGSDKRKTDKSDATWLANLARLGLYRASFIPAEPYRSLRLVQSQIKSLVAERQRLKNRLVKVLDDSGFRFTVAFADIGGASSQSLIAGILEDAPREELALMIDPLCKKSIEEILDAVSGELSQINKDIVQLILRLIETHTKEIETLEQTVIRELKKCEKVKQNIRLMTTIPGFSEKSAQLLMSMIGPDFVENFSSPHAFARWLGVCPGNNESAGQIKSGRTPHGQRLIKKVLTECAQAACHTKGSHLAVLFGGWKHKEFCKAVMAVAHKLALLIHWVVVNQKPYIDKEFDYTGVFKQDGQRRPRWIRALRRYGLMTLADVEKEKAARGWIIAKA

SEQ ID NO: 204244 - protein, 409 aa, unidentified
MMYFVGLDWAAREHAVCVVDGRGAVVEKFTVRHTAVGMTELVARLAKVGAPEELRVAIERPTGLIVDTLVDGKFAVVPIHPNADKAARPRYSAAQGKTDLGDAYLLADLLRTDGHRFRTLTPLSDETKALRGLVRVRDDLVGQRVGIANQLRCLLEQFWPGAAEIFADVDSPIALEFLDRYPTPQSASAVGEKRMAAFMARHAYCGRRTAGELLERLRAAPRSAAGELEAEAKGECVRALVAVLRPLVAQLATLSAAIEHAVEAHPDGKIVTSLFRKGRICAASLLAELGDDRARFVSADHLAAEGGAAPVTRESGKHRAVTFRWACNMRLRQALATLADTTRHTHPWARAVYQRARDRGCEHAHAIRVLARAWCRVIWTCWQNREPYDPMKHRAARPFTLRLVDQEAA

SEQ ID NO: 204245 - protein, 466 aa, unidentified
MEKYYLGCDVSKGYCDFVILDQSKKVVEANFQLDDTPEGHTELCRIIHNFTLYHRDSTIHIGLESTGGYENNWYELFRKIQGIYNLQVARLNPLGVHNYAKAALNRIGTDKISARNVAEYLIVHEEKVSYNQEDYYSALRRQWKFVRFLKKQKVGLLNQLESLLYNTHPHILTYCRAGMPEWVLKVVEKYPAASCLAGVDAEAVAEIPYVTLKRAEELIGAARKSIAASTDSVTGQLVRTVAQQILQVGNTIKEQEKLMMSSCKIPEIDLLKSFTGIGNFSALGLMLEIGTVERFRSVKALASYFGLHPVYKESGDGIWGVRMSKMGRKEPRWILFMVATCAIVKNEMIRELYQGYLKKGKTKMQAIGIMMHKILRIIYGMLKNNTPYDPEIDRANRNKPIERVMIQRTGKARRFQTQDHQAPISRRQNKKRKEQAASQNDNIIKNGIITPAHNKDNKILEEIPMR

SEQ ID NO: 204246 - protein, 335 aa, unidentified
MTLYCGIDLHSNNQMVVVIDDRDRRLLERRVPNDLDATLNALAPFKADLLAVAVESTYNWYWLVDGLSDHGYSTQLVNTAKVEQYSGLKYSDDQHDAFWLAHLMRLGILPTGYICPREIREVRDLLRKRLGLVRERARNLTSVQNILARELGHRVPTSKVRGVLDADERFRPAVRTSIAANLAVIETLDTVIAGIQTQVLGAIQPTQRYQQLKTLCGVGDVLAPTIALETGEIERFKSVGNYSSYCRVVESRRESNERKKGAGNKKCGNRYLAWAFSEAAHFAVRYNDRARRFFDRKAARRNRMVAIRAVAHKLARAAYFVQRDRVPFDAARLFG

SEQ ID NO: 204247 - protein, 428 aa, unidentified
MDFEVKHLICAGLDVHKKTIVASVCMTDPVTLEAAYKVKSFSTNNSQIATMRDWLLSYNCHDVCMESTGKYWIPVFNILETHMHVVLTHPKYVKAIKGKKTDKRDAKWIANLFRFDIVKASFIPPADIRALRELSRYRLKLSYMRSAEKNRFQNSMTISRIRIDCVLTDPFGKTASSIMDYLLSDVPFDETECAKLIHGRVKASNEEIFDSIRGFEILSEQRFKMSHAKQHMELLSSYMDDIETELFRLSRSYDEVIKRISGIVGFTERSALFVISEIGADMGVFESAKHLCSWTGLTPANNESANKKKSTRCSKAGQYLKPLLIQCALAAVKSKKNPYYAIKYKRLAKRRGRKKAVIAIARMMLTGIYHMILNNEEWKPDDYEAIIHPSEPVKVALTLDNVIQFLGEQGADPETLKLLQQQCAVTPG

SEQ ID NO: 204248 - protein, 412 aa, unidentified
MQDILTCAMGLDVHRDIIVACLVKGAVDAEPEAETRTFSTLIPEMQKLRDWVIESECRNIAMESTGIYWQPIYEMLESCFDGEISILVVNARHMKNVPGRKTDMKDAQWIATLLRAGLLKGSFIPDKAFRELRHLTRYRKSVVHDITAQKNRIDKFLQSSGFRFTAFLSDTFGASGRNIIRHLIEHGSIDREALDKCLKTKTRNRIDEILVALNGSLSEHQRRFLNMVFRHLEDLEAHKHTIEDEITEEVLKHTDALNLLCSIPGIDVTAAAAIVAEIGTDMSAFPDSQHICSWAGLSPGNNESAGKRKSVHINKGNPYLKSMLCEVAWIMASHRKLYLSGWYWKVKQRKGAKRATIALARKILSIIYTMLKTGTPYNEECFEQRRLRCERKRANRLVNELQKLGYVVVAPD

SEQ ID NO: 204249 - protein, 346 aa, unidentified
MNNSFSGFDPCGIEVSARALLVTLGPEERTASPREFPNTAEGHQAVLRWLKSWKRPVRVVMESTGLYGLDLALCLQRAGVALMVANPRAVRHFAQAMMKRSKTDRLDAEVLRQFAARMPLVAWRPPSPPAFKLVAVARRLEALTQMLAAEKNRLHAASLSEALPVVIRRDIQRSIATQQRAIERLTRAAQQFVISDPELGRRYRLLLSIPGFATTSALHTLAELALLPPGMDVRQWVAYAGLDPRHHTSGSSVEKKPRISKTGNKHLRRALYMPALVSIVHEPHLRAFYDHLLARGKAKMQALVAVMRKLLHAIFGIFKHDQSFDGTKVYPLSPTVVPVPLAQEVA

SEQ ID NO: 204250 - protein, 366 aa, unidentified
MKETSTVRVNGNMIFKGHKLTIGVDLGDRWSYYCVLDEAGEILLEQKLATTPEGMKQTFERIPRSLMAMETGTHSPWVSRLLKELGHEVLVAHAQRVELISKSTRKDDRHDARTLARLARIDPELLGPVRHRSAKAQIHLTVIRARAALVSARTALVNAARGLVKSYGQRLPKCGTQQVSRELGAKLNAELREVLEPLLKEIESLNERIKEYDERMEKIAKESYPHVELLKQVKGVGTQIALTYVLTLDDPHRFPKSREVGCFLGLRPGRRDSGQSQPQMHISKEGDPYLRTMLVQGAHYILGPFGEDSDLRRWGLRLAERGGKSAKKRAVVAVARKLAVLLHRLWVSAEVYEPLRNSQKAMRAVA

SEQ ID NO: 204251 - protein, 343 aa, unidentified
MEHFAGLDVSVKQTSVCIVDGTGRLVREGRVASEPEALLPVLTNPLWRFKRIGLEAGPLSQWLFSALAEADLPVICVETRHMRAVLQAQINKTDRNDARGIAQMMRAGLYRPVHVKTLRSQKLRMLLTHRKLLQSKAIAIDNDLRGTLRNFGLKVGVVGTVKFEARIRELVETLPDLAELVEPLLIVRRTLREQIGILHGRLLAIVRHDDVCRRLMTVPGVGPVVALTYRATVDVAARFRNSKAVGAVFGLTPSRYQSGEVNRTGAISRCGDEMMRVMLYEAAHTMLLRLAKWSWLKAWAMKIARQRGIKKAVVALARRLAVILHRIWVDGTEFRWTRETAAA

SEQ ID NO: 204252 - protein, 360 aa, unidentified
MHYRTFVGLDVHKSSIKACAYDPMTLEEKHRTFTYDPAAIAKWVVGLEGPVKVVYESGFCGFSLYRSLVELQIDCHIAAISKTARPKGDKVKTDRKDARFLAHQLASNNLSIVVVPDIETEGLRDLSRRRTKLRDDLTAAKHRVSQMTMRYGFRFDGKEKNWSVRHRHWLGTLEMPTMCAQLVFDACLEDVERIEEEKARCERLIHELCRTEPIACAVKVYSLIKGVSEITAFCVLVEIGDVTRFKTAGAFCGFLGLVPSEESSGDKTSRGRITKTGNAHVRKALVEAAWGQNRAKSSYVKIPEDIDPEIARAIRSINTRLKKRRERLLTVNRRRPCVANTAIARELACSFWALGRLMAA

SEQ ID NO: 204253 - protein, 361 aa, unidentified
MNTVIRVGIDLAKYLIQVHAVDAAGKVVTNRALKREKFLLWCADLPAGCVIAMEACSGAHHWSRKLIDRGFDARIIPGSSVVPYRIQGRTGKNDANDAAAVCEAASRPHMNFVPPKTLAQQGMLCVHRLREGLKEERTSCINRIRGLLAEFGVVLPQSPEVLRRHLSDIVEDASNDIAGVARLVLQRAYEHWRELDAHIKWCDQRIADHQKFDEQVQRAAELMGVGSITASALVATVGDFRQFRNGSQFAAWLGLTPKQRSSGGKTSLGGITKRGSVYLRTLLIQGAKAIALTRQYDNPIFLWAQKLRERIGWQRAVVALANKNARILWAVMTREKRYDAHHVSCIPLLAPVTVPAQVSVA

SEQ ID NO: 204254 - protein, 356 aa, unidentified
MGNLSKDFIGKAFVGIDVHKNSWKVCVLGDVGFKKEFSCDPETKVLVKSLENLLPKFSFDCAYEAGFSGFWLHDELYEYEGFNCIVVNAADIPTSDKERAQKEDRRDARKIASQLKAEALRGIYVPSKEDVSLREVQRLRYTMTKDLVRYQARIKSFLMRHGIEVPKAQFKDSKAHWSKKFMKWLSALKLETAGLSFTLNQLIETTTRFRAQKAAVLLELRKQIQASSKKDAFEKLMSIPGIGVIGASTILTEIVDINRFRTYEKFHSFIGLVPSTNSSDVVEKIRGITHRSNRRLRNVLIEASWIAIRYNTDLFVKYNELKQRMNSNKAIIRVAKKLSSQVRYVLLELESQATTA

SEQ ID NO: 204255 - protein, 351 aa, unidentified
MIIIGVDYHPSDQYIAFVDTETGEYGERRLNHSDGEAEKFYRELAARGISVRVGLEATGYSRWFERLLAEVGIEVWIGNAAEIKTKRVRKQKTDREDARLLLKLLRENNFPRIWVPSRENRDLRQLLWHPHRMVQMRTRIMNQLQALAMNEGLRRKKKLWSDQGRAQLEKLSLGTWASRRRKDLLELLDRMNPSIEELTAVVEQEAKKWPEVLRLMTHPGVGPLTALAFVLIIGTPERFQCGKQIGSYVGLIPEEDSSANHQRLGHITKQGSSLLRFLLGEAAQAAARCDADWRRRYMHLAVRRQRNIAKVAMARRLAVRLYWMWRNGWEYAQWVAFGSHAGQLGTGHGVQ

SEQ ID NO: 204256 - protein, 355 aa, unidentified
MKSCFENKDIYVGVDVHKKRWVVSVRTYDVELKTFSMQPAAEELEKFLVDNYKDALLHIVYECCFSGFWIYDYFHNKGYDIVVTPTNRIYRDGSIVKTDKIDSRKLVFQHSRGLLRAVKVPTEKIREYRSIFRIYDKEKIREGQILRQIRCILEVRNHPLKWERWNKEFVEKLKGINFQEDIFNRKFEQLLREYEYVKLQIKDSEKRIKEIGEDQELGLKIKRIEKINGIGIVSAVRLVVFLFDKKGRFETGEKLAHYVGLTPGEHSSGEEIIRSRTGLIGNKQLRSIIIQLAWVTVRKDGSLLDKFERVYKKNNSKQKAIVAVARKLMMKVYAITEKEEEYEINKLDCQSGRAA

SEQ ID NO: 204257 - protein, 381 aa, unidentified
MYVGIDVHKNMCHAIVMSPEGGIIGEKIFSTNAKVLEAWVRTHPKDYVYAMESGTPTKRLYWILKEMGREVHMAHPTEVRRMMGTKKKTDREDSAFLAELLRMNRLPKSYVPDPEANEERQLLRYRMDLAKKVIAVKNQIHAILTAAGVPECEFTDVFGREGLRTLHRIELQGYQKYILDCHLRQFELLNAQIEDVMGALAKLAQKNPAARNLMQIKGIDFYSALVILNEIGDVTRFPTAKHLTSYAGLVPRIYQSGDISRTGHIHKQGPKALRTMMVRCAAASVRGPGKFQRFYERKRKQIGHGKAIVAVARKMLAIVFTLLTRGCEYEERDDRNVHKKMRIMERKAKALPDIDLDSSFAGLPENARQVLEGETGIWDLG

SEQ ID NO: 204258 - protein, 352 aa, unidentified
MGERTTVFVGCDVGDKFTDICVLDGDGAVLETARVRTTRSSLEGHLRGYERARVVLEVGTHSRWIAAALGEAGHEVIVANPRQVQLIWKRPRKTDRTDALLLARLGRMDVELLAPVHHRSREAHVDLACLRARDQLVGARTKLVNHVRGALKPFGLRVADCSTDTFADKAQEVVPPELVPALGPMLDVIRLLTTQIAAHDKQAEQLAKTVYPESKRCSQVFGVGTLTALAFQLTLDDPTRFKHSRFVAAFLGLTPGKDQSGDSDPQKHITKAGDRFTRKLLVECANRILSPRGGLDSDLRTWGLKLAERGGKNGRKRAVVAVARKLAVLLHRLWLTGEEYQPTGYSPRPLAA

SEQ ID NO: 204259 - protein, 319 aa, unidentified
MTKIVLGIDVSKKTLDAALIFNNQTFSKQFKNSSEGFKSLAAWLESLKIEQVHACLEATGTYSEAAALFLHERGHRVSVVNPLRIKGYANANMQRNKTDRLDARLIASFCQTQEPDEWLPPSAEVKQLQVLMRRIEVLEEMRQAEENRLANAASEVQPSIERMIALLKEEIIQFERQIKEHIDRHPNLKQQSRLLQTIPGIGERTAHLLLSEIEFERYGSARSIAAQAGVTPRKKQSGTSLKQTNLSKLGNARLRKALYFPAIVARQHNEIVKEFAKRLKSRGKTPMQIVCAAMRKLLHIAFGVLKHKRAFDSSLAFSA

SEQ ID NO: 204260 - protein, 426 aa, unidentified
MDQHCSSTKTLVAIDVAKFHDDVLIECPDGSRRRMRIANTRTDWEKLAALLGGLGAPCEIAFEATGDYHRPLASFLDRKGYTLHLVSSIAVARTRDALFNSWDKNDPKDAQVILHLLKTGATQEFHDPLKSGYHDLLEIANTYQQISHRKVGLWNTIATHYLPLYFPEAEQYSHSSRAEWFTQLLILAPCRAAVAKYSETEFRKAARKIGGAKTDKMRWLTDFHRTALDSIGLPVSEESEAIRMFRLVLGEYLAVCKLRARLEKEIVERLKDHPDYQRLQTIPGIGPILALIILAESGDMRRFSHHRKFLKYCGLDLSTEQSGQFRGTSKLSKRGNARLRYAFWMAGAVAVRARENTFRQKFERYIRRDPQNGDLRRKAYTAVAAKIARVAYAIVKAGIDYRRFHEVASPGGGVRSPRSVEALATS

SEQ ID NO: 204261 - protein, 326 aa, unidentified
MDVLGIDLAKLSFDATLLLQTGSSHYAAFPNTPEGFLQLATWLTEHNVSSLHACMEATNIYWQALASWLHEAGYSVSVVNPARIKGYAMATMQRNKTDKLDSAMIAGFCAKHQPTLWQPASQEQQRLRALTRHRDDLLQTQLQQQNRLRDTTDELVRSSLESLLTAIASQLETVQEQIKQQLREQESFQTNLALLTSIVGIGAVTAAKLLAEYADLDQYESAKAAAADAGLTPSHYESGTSVRRRSKLSKMGKAGIRAALYWPAITAMRRCPAIKAFAQRLAARGKPKMVIIGAVMRKLVHICYGVLKHQTPYDPAKAFGHTTPAT

SEQ ID NO: 204262 - protein, 418 aa, unidentified
MKTEYAMLVGLDWADQKHVLCYRETATGQTGTRTLEQRPEQINEWIVGLMAKHSGGRIAVCLEQSRGPVVYALMGYAEVDLYPVNPVTLANYRTAFRPSGAKDDPTDAALLLDLLERHSEELTVWAPDTEITRLLRSLCEDRRKAVDARSALSNALGARLKEYFPQALALIGEHLYCEMGCALLMKWPRFEAVTAARADTVRRFYYAHHSRSEPHIQASLDLIAASRPLTTDAAVVEAGIRWVQALVTQIRAFNRSIQAYDQRIAEVFKAHPDAFIFASFPGAGKQLAPRLVAVFGTDRSRYETATNIATYSGVAPVIERSGNQSWTHWRWHCPKFLRQSLVEFACKSIGFSAWASAYYHEQIKRGKGHHAAVRALAFKWLRILFRCWKERTPYDEAKYLAALQQHGSWIAQAIKNAA

SEQ ID NO: 204263 - protein, 345 aa, unidentified
MDLGKKESQIAILTEAGELIEKRMRTERDRLVAFFKDRPKAKILIEASTISEWVARLLEELGHEVVVADPNYAPMYAQRSRRVKTDKRDAQALAEACRLGAYRPAHRTSDEQCHVRALLTVRDSLVRTRARWVTLAQAIVSREGFRVPTGSSGCFGERAERLELPEPLTAEIAPLLAMLAPGLNEQIGILDEKLGELSRKDERVKRLMTMPEVGPVTAVAYVATLDDAGRFRGAHQVEAYLGLVPQEWSSSEVQRRGHITKAGNSRMRWLLVEAAWRLATHKKRPETQALREWAERIARRRGQRVAMVALARKLSGILYAMLRDGSAYDPAKLKGALRSKAEQVA

SEQ ID NO: 204264 - protein, 396 aa, unidentified
MIKNHAEVDVFLGVDVGKGEHHAVALDRTGRKLYDKALPNDEAKMKAVIEKLAKHGAILFIVDQPATIGALPVAVAQAAGVTVGYLPGLAMRRIADLHPGEAKTDARDAYIIAEAARTMPHTLRSIQVADEQVAELSMLCGFDDDRQTDHRNLQPVARAAHPDPPRPRTGPGPRRITRQCSTCSARGPPGSPETAGRKRVGAAETARPRMYARLTEEIFDALDQQTVTVVGTNAAAVVVPQLAGMLGDLRASRETLHARVEALVEAHPLHSVLSSIPAVGIRTEARILTEIVGKEFATAGHLASYAGLSPVTWRSGSSIRGDHSSRRGNKILKRALFLSAFAALKDPLSRAYYDRKRAQGKKHNQALIALARRRCDVIFAMLRDGTLYEAQTPAAA

SEQ ID NO: 204265 - protein, 479 aa, unidentified
MVERRLLGIDLGIASAHTAVVLRGDGTEVCRRRCHPIVESFGELERAALEGAPPGTQIEIVIEPTGPAWLPVAVFFGRRHPVFRVSSQKAADLRRFLHRHAKSNSIDATTLARLPLVDPGSLHPVELPGRDRASLDRRVRACDRLTRQASEHKVRLKDLVRQLLPMTPLSGDLGKSDLAVLERWADPNALLKAGKARLVAVIAKASHGQQGADRAEEWLASARASVDLYGGDGAVAFADLAAEVATEIRLLRGIEAELDSHAAVRERAYRRVDPEELARSLPGIAEVVGPVLVAAMARPGRFARGEQFKSFTGLVARASETGESERKGQPMSKAGPSLLRTMLLRAADTARTQDPQLARIYFVQMVERGANHIKALCVVAAHLAERAWVVMARGTPYVVRDTDGGPVSKAEAKAIIAEHWTVPEDVRRRRRNKKVGKVPHQVLMGHAQSRARRAATRRPSPPESSPFAAAASTTQGGGA

SEQ ID NO: 204266 - protein, 359 aa, unidentified
MAVIEGRERHIVGGVDTHKDLHVAAVVDEQDRILGTRSFPTTRQGYRQMLAWMLSFGELQRIGIESTGSYGAGLLRFMQQAKVVVLEVTTPDKQDRRRRGKNDDLDAQNAAHAALAGQRTVTPRSRDGMIESLRILMACRKTAVSARRIALQMIHNTIVCAPDALRDQLRNLTRMQLVRTLASWRPDLTAYRDLDSAYRIGLKSLARRYLELHDEIADLDVMIAAIVNELAPNLVARNSIGHIGAAQLLLTAGDNPERLRSEASFASLCGVSPVPASSGKTVRHRLNRGGDRAANSALHIIAIGRLRTDQRTKDYVARRIAEGHSKLDAIRALKRYLAREVFTLITQRRKEINATRIAA

SEQ ID NO: 204267 - protein, 347 aa, unidentified
MRPKLLMENDYILRQCVGIDVSKETLVVTMCMFSFAEEAHYSDVKTFKNNKTGFNQLVKWSRKEAYTDKPLRYVMEATGVYHEELTNHLVKIGCTVIIMMPNKAREFAIWEGMISKNDTIDSRVLALVGCVKRSMRPWQPSKEIYHELRAMTRFAQDTKKLRLALKNHLEALEHSHQAEKSVVKHYEAMVSYLDKRLEMNLKNMKEKVASDEALNKKVENIITAPSLGFTSVITVIAETNGFALIQNRKQLTSYAGFDVKDNQSGNVKGTSRISKKGNSRIRAILYMPAVQAQLRSKHLKEAYDRIVQKHPDKKMIAVTAMERRLLLLIYALWKSDKPYDEDHNKKK

SEQ ID NO: 204268 - protein, 422 aa, unidentified
MLEATQDEQEIIARVAALDIGKAELVCCVRVPDPKGGSRRVQEVTTYSTMTRSLQTMADRLLDLGVTRVVMEATSSYWKPAFYLLEAHGFQTWLVNAKDVKHLPGRPKTDRLDAVWLCKVAERQMLRPSFVPPVPIRRLRDLTRYRIALVSDQGREKNRVEKLLEDAQIKLSVVASDIFGVSGRDMMAALIRGERNPQVLAQMARSRMRTKIPQLEEAFVGYFTEHHRFLLAKMLARIDALDGDIADVEAEIETQIAPFAPAVARLDEIPGVGATAAAVIIAEVGVDMTRFPTPAHLSSWARFAPGVKESAGRKKGTGSTGHGDRYLARVLGEAAVGASRTDTFLGERYRRIARRRGKKKAVVAVGRSILVIVWYLLQNDTAQFHDLGPGYYDSRTNPERTKRNHIRELEALGYRVILQPAA

SEQ ID NO: 204269 - protein, 414 aa, unidentified
MEIVHTPCAGLDVHKKTVVAAIIVPGPKPSGYQETRTFGTMTVDLLTLSDWLLAHGVTHVAMESTGEYWKPVFNLLESDFQVLLVNAAHIKAVPGRKTDVNDAEWIADLLKHGLLKASFVPPLGQRELRDLTRHRSTFVRERASLVNRVQKVLESANIKLASVATDVLGVSGRAMLEALIAGQASPAEMAELAKGRLREKREPLAKALEGRVHAHHRFVLTELLCQIDSLDETIARFDTQIEAYCAPFEEAVVLLDTIPGVARQTAEIMVAEMGMDMSRFPTADHLAAWAGVAPGNHESAGKRRSRQTRKGNRPLGVALHQAAHAAARTKHTYLAAQYHRLAGRRGKKKAIVAVAHSIVVIAYHLMQRKEPYRELGGDYFDKQRPDATAKRLVKRLERLGYSVALQQNPMSGAA

SEQ ID NO: 204270 - protein, 351 aa, unidentified
MSRNSTSLAIATIGLDIGKNIFHLVGLDKRGAIALRIKVSRGQVERRLATVPHCLIGLEACSGSHHIGRQLAALGHDVRLLPAQYVKPFLKGHKNDYRDAEAIAEAVQRPTMQFVAIKTPEQMDLLALHRVRSRLVSQRTGVINQIRGFLLERGITARQGPSALRQMLPTVLGSRSDSLSPRVGRLVADLAEDWRRLDERIATVSAEINELAKQDDHCQRLMTVPGIGPLIASAVVAAIGTGGGFKQGRDFGAWLGLVPRQESTGDRTILGRISKRGNKYLRTLFVQAAHVVLARRPHRARPGLWPWIEAAARRLHRNVLAIALANKLARIAWAVLARGHSYQPMRAHDAA

SEQ ID NO: 204271 - protein, 427 aa, unidentified
MNSNEATRYGQFCQFKTEIRGSREYLIVGIDAAKDKHQAFIGTATGKTVLRRLIFENSRAGFQQLVDRARQLQAVHQLPKLVFGLEPTGNYHKPLANWLLENDQPLVLVSNKAIRENRELLDGRWDKNDTKDSANVADLISQGKCQFFEQPGADLSELRSLLGYRKRLKKQEHALRMQIRNGLLAKYFPELDRLWGNRLQENLAILRWCLDPREIAAMEFEAFIQRVTQRNTGAKQVRRLRAIWKVAAVSIGCPVTGAAVFEARQLADRLEDVRERIKQTEALMAEVAQRFGSYKLLLTIPGFGPYIASLVVATIGDADRFDNRKQVIRLAGLDLNAKRSGKRSQEAPSHISKRGNADLRYAIYQAALIASYHDERLRALFVRYLQGREKEQGIKTKMRVKLAAKLLVIAWTMMKHQTAFNPALIQV

SEQ ID NO: 204272 - protein, 453 aa, unidentified
MAKKRKKDAKTNNATLPVMRPDAAGIDIGATEIFVAVPANRTNENVRSFPTFTQDLYVLADWLKQCGIQTVAMESTGVYWIPLFQILEERGFEVCLVNARHVKNVPGRRTDVSDCQWLQFLHSVGLLRASYRPEQEVCAVRSLLRHREGLVQMAATHVNHMQKALDQMNLQLHHVISDIVGQTGLAIVDAILAGQRDPHVLAKLRNERIKATEEVIAKSLVGDYRHEHLFTLRQSLAAYRSYQKLIDDCDREIRQHLEKFKPPDQPDTHESEMPKLPSKKLSADGVLKSELKRILGVDVTKIPGIRTGIAQTLFGEIGPDFTKFRSASAFASWMGLCPDNDISGGKVLWVGTRKVKCRAATALRMAAQSLHHSKSALGDFYRRMRAKLGAPKAITAAAHKLARIIFHLISTRQEFDDSRFAADQLRYEKRQEGKLRAKAQALGFQLVPLAQAG

SEQ ID NO: 204273 - protein, 441 aa, unidentified
MSASTGTRPHHGRPITTETITVTEQYNWFLGIDWGYTAHQVCLIDATGQIRETRRVDHDIASVDECLTWVFERTGATPAQIAVAIETPRGALVATLLERGIAVYAINPKQLDRFRDRHTAAGAKDDRRDGLVLADSLRTDRPAFRRVRLDDPLVLQLRELAHVEADCKRDRSRLTNQLRDQVYRIAPPVLRLCPAADEPWFWTLLEQASTPTEQHRLTRTQVLTVLRTHRIRRVSADEILAALRAPGFVLAPGVTEATREAVQLLIPHLRFVEAQRKRCEKRQEALLGELAERPASEAEPGEHRDVEILASLPGVGRTVTVAMLTEAAQPLATRDYDALRTHTGVAPITKASGKRRLVRMRYACASRLRDAAYHWGRVSAQQDPASATYYRALRARGQTHGRALRGVVDRWLRILVAMLRHRTLYDPTRFLSVVIPASGEA

SEQ ID NO: 204274 - protein, 334 aa, unidentified
MKITKKKVIGKAYVGIDVHKTSWKVCVLSSGGFKKEFSCNPQVEALVASLQNMLPDFEFQCAYEAGFSGFWLADGLNETEGFKCIVVNPADIPTSDKERAQKEDKRDARKIASQLKAESLEGIYIPSAEDIAFRELQRLRSTISQEFPDSKQHWSARFIKRLNELPIENSALRFTLTQLVQTLINLREQQKTVLLELRTQIRNSKKEKMHEALCKITGIGEITSATIISEVIDINRFSSYEKYHSFIGLVPSTNSSADIEVVRGITNRANKRLRKVFVESAWIAIRKDAELHHLYHSLKMRMKPNKAIIRVAKKLANRVRFTLLELENEMLITT

SEQ ID NO: 204275 - protein, 384 aa, unidentified
MGNDLGYQSGTDEVVLAVSLELAARKWKVAVHDGRRERPAVHTVEQPQAAARLQAVLALIDAHRHSWSLPAGVRIVVCYEAGPDAFWIWRALQAQGIECYVLDPASIPVERHKRRAKTDRLDVIKLVINLRAWLRGERDRMHVVHVPSAQDEASRHLMRERGQLQKEVLQHLDRMRKLLATLGCWENVTYRSFADRLARDEVRCHDGTPLPPELRERLLRECERLVLATKQLAALEKTRQASVPAPSRARSDALARLKGIGEVGASRLALELYWRDFHNRREVGACVGLVPQPYDSGESQTDQGISKQGNGRVRALLVEMAWTWLRYQPGSALTQWFNRRTQGTGPNRRARRIAIVAVARRLAIALWRYLKDGVIPDGAQLKPS

SEQ ID NO: 204276 - protein, 404 aa, unidentified
MFYCGIDWSEDHHNLCILNEAGGRVSQLQFEHSLAGFAQIEVERRKLEVPAGECFVGIETAYHLIVDFLLEHDYPTYIVPPQATKGYRNRQRSSGAHDDDSDAALLASIMRTDRESHRRLRPNLALTQQLLAQVRLIEILRRSIQRQSNQLRAVLFRTYPQAVGLFSDLTSQITLEFLLAYPTAQDAQTLSREAFEAFLRQHGYTRSDLIPLRYARLVEPFPTANPAVVQAYQGQVRALAQVLLPQVNGRTQALAQLGQLFEQHPDAFIFESLPGTGLLLAPALLAKFGDYRDRFPTPGDVQALAGTCPVTERSGKRKWVKFRHGCDKEFRRITQQFARASVPQSSWAAAYWHEIRPNCDSDSHAYRILANRWLAIIWKMWQDRKPYDEAYHLHQRALRRKPRA

SEQ ID NO: 204277 - protein, 430 aa, unidentified
MKSNTQNAKIEAITENTLVLGIDIGSETHYARAFDYRGIEYSKKPFKFSNTEAGFMSFKAWIQDMKEMHEKDKVVPGMEPTGHYWFNLGKFLQDNEMRPVLVNPHHVKKSKELDDNHPTKNDRKDPKVIAGLVREGRYMIPYLPEGVYADLRTASNIRFQLQAELTRIQNRISRWFNIYFPEYKTVYGKPDAKSGMMILKVAPLPEDILTLGIDGVNQIWRDAKMRAVGKARAKTLMEAAEHSVGSKEGAVSARMEIRMLLEDYESRNVRLQEVMALIEELVKQIPMAEKLLEIKGVGIKTVSGFLAEVGDISRFNNPKELQKLAGLALVENSSGKHKGETRISRRGRKRLRYLLFEVAMSLVSKNVEFKELHIYYTTRRINPLKKMQSLMAVAAKALRIFYAILTKGVAYDPKKMINDIKRPKIYLQAA

SEQ ID NO: 204278 - protein, 340 aa, unidentified
MKKFLFIGIDFSKSKFDVTVLKSIDQQDYAQAIFLNEQKGFNDFVKWLSKQSDVPQKDWLFCGEHTGLYSRGLTGFLVKKNLFIWLENPLQIKCSWGIKRTKNDRIDSLEIARYALRFQDKAVACKPANKDIESIRILLAYRGRLVKNKVSLEVAAKETRRVINRDSVSRFVYENSQRDIERIKKEIEQIEAKMFEIIMASELKENYQLVVSIKGVGPITAITLIVYTDNFTAFETARQLACYSGVVPFEKSSGTSIKGANHVSHLANKDLKVLLTQCARSAVQYDKELSAYYTRKIAQGKKHLVVINNVRNKLIHRIFAVVTYKIPYRENYLNPWADCA

SEQ ID NO: 204279 - protein, 349 aa, unidentified
MAKVVSRPEPGQAVFIGLDVSRSKWVFNVRWGGAEQRRMTTAAELRHLEALVAEYHGAALHLAYEACGFGYEIAWMLRARGVAVTVVPPSTVERAPGATVKTDRLDARALAGQLEQGRLKHVHVPTRDDHAWRQLSRTYDQALKDKKRAQARIRALLQGHGRLGPLPAAGWPAYERWLSEQELPAPVQRCLAELLALRAAALASTQRLKRALTDVARDARYAPVVTALATQSGVGSFTAVRLRLELGDITHFRTADAFANYLGLTPSEYSSGDRVQRGSIVKRGPGHIRGWFIQCAWASVRAATPDPGLRDCYQRLCLRAGKKRAIVAVARRLALRVRARWLAQIKEAA

SEQ ID NO: 204280 - protein, 419 aa, unidentified
MNERHQPGLFIGIDWADRKHDCYVIDRDGKGFHQELSHSPEDIDTWVGEMLKRAAGKPIAIMLEQSRGPLVHALMFRKNVLLFPINPKQLVRYRESYPGGGKDDPTDAKYLARMLRERISTLTAWQPDDEDTRLLAHLSQQRRKLVDGHTKLRQQLTSLLKSYYPVVLELFGNDHRLPLLLSMLRRWPDPRQLRRADRRLICRVLSDHRIRNEQQQNEIIEGIRSAQLLTRDDALITPAAMAVKLLANQIEQYRKTIKDFDAKIAESIKRHPDAQLFTGLRGAGATLAARLICAFGSQKDRWEDADSLAAFSGIAPVTRKSGRQCQVYRRYACPKYLRQTFHEFADSARMYCPWTKARYRMLRDRGMKHHAVLRKIARSWIRILFRVWQTRTPFDCNRYIAQLRQRCPEIIPYLAQDSS

SEQ ID NO: 204281 - protein, 312 aa, unidentified
MDATVVVGIDVSKDRLDVAVRPGGIVFAVSRDGDGIASLAEQLGRLGVKAVAVEATGGFERVVAAGLAGAGLPVAVVNPAQVRAFAQALGKRAKTDPIDAAVIAHFVEATAPAIRPLPGEETRILADLVARRRQIVAMIGAERQREMRAPVRIAKSIRRLVKALEKELAVIDGDIDDAVRGSPVWRAKEDLLASVPGIGKTIARTLLAELPELGSLDRRQVAALTGLAPWTRQSGQWRGKSFIGGGRADVRAALFMGAMVASRHNPTLKAFRDKLVAAGKPKLVAIIATARKLVTILNAIIRDKQPWREQNA

SEQ ID NO: 204282 - protein, 412 aa, unidentified
MEVLYERCCGIDVHKSSVAACILLERGHKPQKHLRRFGCTTRDLRELTEWIRSFGVRHVAMESTGVYWKPVWNVLEEHFHMVLANAQHIKAVPGRKTDMMDCQWIAELLRHGLLRSSYIPSPVIRDLRDLTRTRATLSQEQSGISSRIQKLLESANIKLSSTVTHTMGKSGQAMLDAIVSGEDSPERLADLALGKLRSKIPQLQLALDGRIRDHHRFLLDSLLRQYRFLEAEIQALDDRLGQLGEQHQELADAVARWITVPGVERVAAWSLVAEIGSDMTAFPSAAHLASWAGLCPGNHESAGKRLSGKSRKGSPWLRRMACQSAWAAARTKNGYLSAQFKRLAARRGSKRALIAVAHSLLVIGYYLQSKGCVYQELGGDYFDQLHAERLKRHLVKRLESLGVSVTLQPQAG

SEQ ID NO: 204283 - protein, 487 aa, unidentified
MNSIFRKRNPDVQKLFDSAGRPEKVMCIPFDYAKKTHTAMVCNGRGDCLRSAFNVENNRNGIDYLLSIVKGLCRKHTINIKHVFFGGEDGGAYSFNFIHALVSRGFLVLGINANEAKKERENTTASSDLIDTVGVAGSMIKMRGRTIGEATAQVISIRRLRRQRGSLLKAHSACAHLVHRVVDELFPGFLDVELSGVLPFGKASLWLMDDNFSAASILARQCPALVRHLRELQLRDPEGAADKLKQLARIALPPPECMIPALRRSLHEEMAVYGLLESSMRSLDTDIAKLLAHTPGAMLTTLPGIGLRWAPGLYAELGDPLRRRNVHSMAALGGIVPRSKQTGGPEKPAVTGHRGKNCSAFLKHILMSGAVSISQYGHPEMRQAYQTDKDMGRDARARLAQRLLRASLYLIDNQSFFLPPSLHRGATRDQLREYYAQAWPKVLIKWRDSGAIKDAVAEGSPLRRWRDMAQELYGLELDLTSPQTGRK

SEQ ID NO: 204284 - protein, 354 aa, unidentified
MTRTSRTATSELTVIGIDIGKDVFHVVGFDTAGKIVLRRKIKRLALVATFEKLPRCIVGLEACLSAHFVSRTLRRLGFEPRIIPAKYTKPFVKGQKNDYNDAEGIAEAALRPNLKVVTEKTQDQLDLQALHRVRSRLVSRRTATINQIRAFLIEQGITVRTGASALRKSLFPILENRSDEISPRMADIIVGLYEDWLWLDERIESLTNEIEKISRTEDNCERLMSVPGIGPMISTAMVAAIGKGEAFDRGRDFGAWLGLVPRQYSTGGKPILGRISKRGSRYLRTLFVQAAHIILMRPHNWVKFSFGPWLQQAALRMHKNKLAAALANKLARIAWSVLRNGGTFGAQRPAAEAV

SEQ ID NO: 204285 - protein, 387 aa, unidentified
MQDEAPRPAQAAIRTDLGAIFVSMELSRSNWLVTSLSPGAGEKMSKHSVAAGDVAGLLERFARLKQKALARTGQDFPIIVIQEAGLDGFWIHRVLESEGIESHVVDAASILTSRRRRRAKTDKIDGETLVRTLLAYKRGEPRVCSMVKAPTPEEEDRRRICRERKILVAERIEHVNRIKGLLFAQGIFDYQPLRRNRRERLEVLKTGDGRPLPPRLKVQISRELDRLENVLTQLEAVETERDALIEQASQDASAPAAMLTRLKGIGPEFAAILWSEGLFRSFDNRRQVAAYAGLAPTPWQSGSVDREQGVSKAGNPRLRTAMIQLAWLWLRHQPGSALSCWFHERVKRNGGRLRKTTIVALARKLLIALWKYATTGVVIEGALAKAA

SEQ ID NO: 204286 - protein, 399 aa, unidentified
MTNQQAHVGGVDSHKDTIHVAVITQIGHAVADEEFPTTTAGYRRAVAWLIAHGPLGAVGIEGTSSYGVGITAAVSRAGIRVVEVNRTRPAERRKQGKTDRLDAYRAARSVLSGEATTNPKHASIEPLRALTVSRRSAVKAQQAAWRQIQALLINAPAHLRDRYRYLPEAKLVVALSRTRPDVVKDAGEVDILHALRSLARRHRQLGEETAQLQQRMLARATTANPALLALKGVGPVIGAQLLITAGDNPDRLRSSTSFAALCGTAPIPVSSGRTDRHRLSRGGDRQANAALHHIVKVRMSYDPVTKAYRDAHLAKGWTISAVFRALKRAVAREIFQALTGHCAVPDYTDLRPARRAKNLTLTAAAAHLGVWPSRIGELELGRRPNDELAERYRTWLNAA

SEQ ID NO: 204287 - protein, 417 aa, unidentified
MQDAPKDVLPAAGPSHRTAGVDWARDDHAVAIVDASGQVVERFTVAHTAAGIRDLVRRLTKLGTHEVAIERPDGPVVDALLEAGLTVVVISPNQLKPLRSRYGSAGNKDDRFDAFVLADTLRTDRARLRPLVPDSPATVALRTACRARKDLVAHRIALANQLRAHLQRILPGAVGLFAEIDSPISLRFLARFDCQERADWLSPRRLTAWLASVGYCGRVAPTTLHARLAAAPRGATGAEGAAQAHVTRALLAALSTLVEQIKVLSEQIDEQLALHADAHIFTSLPRAGSVRAARLLAEIGDCRARFPTPDSLACLAGVAPSTRQSGKHRAVGFRWAADKQLRDAVCDFAGDSIRANPWAADLYRRAIARGHDHPHAVRILARAWLFVIWHCWQNGTPYDPAQHHALQALVQPHQQVA

SEQ ID NO: 204288 - protein, 391 aa, unidentified
MIYVGIDIAKDKHDCFITNSDCEVLFKSFTISNNRDGFKTLFQKIQSVSDDLTKVKVGLEATGHYSYNLLGFLLDKGLPTYVINPLHTNLYRKSLSLRKTKTDKVDAHTIASMIMSDVNLKSYSDTSYHNEELKSLTRYRFDKVKERAKLKSSVSKLVCILFPELEKLVPTLHMSSVYSLLSEFPSAHDVASAHLTRLIHLLSESSKGRYGRDTAICFRDAARSSIGSHMPAKSLELKHTIKLILELTSEIDEIEAEIKTIMDEINSPILTIPGIGYKMGAMIIAEIGDFSRFDSPDKILAYAGMSPSIYQSGQLDNCYAHMEKRGSRYLRYALYNATKYVCHWDESFGTYLAKKRAEGKHYNVALSHATKKLVRTIYAMEKSGQAYINAA

SEQ ID NO: 204289 - protein, 334 aa, unidentified
MEFNHFVGIDISKGSFDVAVIKDNDINNSVSFVASNDPKGIVQLEEFLKKQEINLEETLFCMEHTGIYCRLLSQYLVEQKYHVWLEMPVQILRSQGVQRGKSDVVDARRIAEYACLKKDKAELWEPPREIMLQIQDLLSLRDRLCDSRKMLKQPIKEFKDTGHKQTAQLIESHCRNTLTSLDKEIIQIEKELDKLINKDSNLKKLYTLAKSVPGIGRITALALLCYTNEFKLYQNPKQLACYCGVAPFEHTSGTSVKGKTRVSHFANKVLKKLLHLVAMINIKIDKELKAYYLRKVAEGKAKMSVINAVRNKILHRLCAVIKRGTPFQLEYQFA

SEQ ID NO: 204290 - protein, 332 aa, unidentified
MLYAGVDLHRRSLVVAVEDEAGKEVVMRQFSCEAVQEIKAFFSGLSPFRAVIEASSSYRWLYELISVHGQVVLAHPYRLRAIVAGRAKTDKLDARLLAKLLRAGLIPTAYIPPADYQALRDLARARARLSREATHAKNELHALLGRANLHSPYANVFCQRGRKWIAAQELPPVARGMADELLRRLAHFEAELARVDGGLRAMSEHFPEAEALTILYGIGLYSALLIIGELGEPWRFGDARQVGAYAGLTARVTQSGSSCRHGSISRQGSPWLRWILVEAAMKLVRQDVQLGNFYQRIRKRSGAKIARVAAARKLAEICWKRLMRWHREHPAA

SEQ ID NO: 204291 - protein, 465 aa, unidentified
MKNKTVRSKKRKQKISMEQAWAAVNPHAAGIDIGAREHWACVPADAAPTPVRKFGTFTADLEALADWFEACGVTTVAMEATGVYWIPVFQILERRGLQVLLVNARQTKNVAGRKTDVQDCQWIQRLHTYGLLQGSFRPADAYCVVRTYLRYRDELVSARSTQCQHMQKALQQMNLALTQVLSDVTGASGLAIIGAILQGERDPVKLSQLVDRRVRATPGTLQKALVGDYRPEHLFVLQQAFALYHTYEEKIQACDQEIVRCITQLPDRLDLSRQPLPARKAGRRAALDQMAGQDLREALYRKTAVDLTAIEGIGPLTSLVLLTEVGPDVSRFPTEKHFCSWLGLCPDNRISGGKVLSSRTRRVVNRAADALRLAATTLERSQSALGGFYRRMKARLGAAEAVTATAHKLARIIYRLIKHGEAYVRHGLEAYEQRFRIRKLRALQKTAKSMGLELVPSQTIPSRVS

SEQ ID NO: 204292 - protein, 319 aa, unidentified
MDTTSRVETYAGIDVSKATLDVGIWGESGVVTYGYDAGGIAAVVEALRRYQPSRVVVEATGDLQKELVTALVMAGLAVAVVNPKRVRDFARAAGRLAKTDHLDALVLAQFGQALQPPLYQAQSAEGEQMSAWVSRRQQLVEMLTAEKNRLKMTRDATVRAQIEAHIRWLEEEIAALNDKVADLIAADPCWQATGAVLRSMPGVGPVAVATLLAELPELGQLNRQQVAALVGVAPLNRDSGQRRGKRHVTGGRATVRRVLYMAALTATRCNPVISQFYQHLLAAGKEKKVALTACMRKMIVILNAMVRDQRAWEVSFAAT

SEQ ID NO: 204293 - protein, 410 aa, unidentified
MKMAGIDVHKKVLMVVVVDTSTPQEKPARRRFVTMPSELHRLLTWLREREVEEAVMESTAQYWRSVWLELEPHMRLHLAQAFSNRAPRGRKHDFKDAERLVRRLMADELILSFVPSGEQRIWRSMTRMKLQLTRDRVRLQNQIECLLEEMRIKLSIVVSNLLGASGLRILHALANGETDPRKLAQLGGERLQCSEEQLVDALTGRVQPVHGEMLGLQLERLQLIDEQMTRLNSMIAAAMKSHQDAVIRLAEVPGLGVDSAQQIIAEVGAQASTFGSAAELTSWVGTCPGKDESAEQNHSSRSAKGNKYMRRVLNQAAHAAVAKKGSHFQALFRRLLPRLGYQSAIWAVAHRLCRLVWKILHEGVRFIEQGAEVGPREKKKRAQMLARALRRLGYEVTITPINQLVTKPPV

SEQ ID NO: 204294 - protein, 526 aa, unidentified
MASSNKHSKLRACDEGRYTSDGLKNVTLDDGTRVVTSPSNDIKRPVCGSVDVHKSILMAAACVTDKESLNAVFYVRQFTSSNSDIRLMAEWFASYGVQDVCMESTGKYWIPVYDILEQNGIKPILTHPKYVKQAKGKKTDFRDAIHIANLFRMDLVAASFIPPADIRDLRELCRYRLKLTYIRTSEKNRFQNSMTISKVRLDSVFTDPFGKSARDIMSYLIQTDPDKVSDEKILSFVRRGVKASPEEILESIHGYEFIGAQRDKLEVIQTHMDDLNKCIDMIDEKLSYYRLKYSKVILHLVTMVGISEESALYILGEIGADMSVWRDSDSIASWAGLSPANNSSAGKKKTTKIGKGGHYLKPLMVQCALAAIKSTKKHPYFYYKYLTIKKRRGHKKAIIAIARKMLVAIYHMIRDDKDFEPIDYEQVVTRKQSQKELNLTNIIEFLGEHGVDPETIRTVETQCSQAGQAGEGTNIGKPKKSRQKKQPKSKTEATPTEQKPAKRRGRPPKSPQTKSQSSTQPAAATA

SEQ ID NO: 204295 - protein, 359 aa, unidentified
MRIIGCDLHARQQTVAMLDTTTGEVVSLTLTHQGNNVREFYSALPRPVRVGIEATGSMQWFVNLMEELGIECQVGHPAKIRAAEPRKQKHDRRDADLILKLLVENRFPAIWLPTKELLDLRALLRHRHQWVRMRTRIQNALQAIALAHGLRRGPSLWSQDGQSTIASLSLAPHTAHRRSELQALYRKFESDIEQLNQRVEEQAGGRPGARLLMTHPGVGPVTALATEVFLGDPTRFADGKVLASYVGIIPREYSSGGRQRLGGLSKQGNPLLRFLWGEAGAHAVRRDLELQRFYRRKLVQKGLGKARMAVARKLGIRLWIMLRDQIDYNEFCRRRQKNGDACAGMPETRYGATSHRPVD

SEQ ID NO: 204296 - protein, 408 aa, unidentified
MNAVGIDVSKGKSMVAALRPMGEVALLPQEFLHTEVGLEQMAYAIIALGEDTRVVMEATGRYHEPVAAALHEYGIYVSVLNPLFIKQSGGGSIRKVKTDKADAMKIAKYGLDNWVDLREYTPMDTVRQQLKLCSRQYNLYMKTVVSLQNNLISLTDKTFPGVNELFSSPERADGHQKWVDFVMTFWHCDCICRVSEKAFTERYQKWCKRKGYHFSTEKALDLYAGSCGHFTTLPKNDNIKLLITTAAQQLLAGKMTLAALRAEMTRLAMQLPEYDTVRAMYGVGQTTAAQLMAEIGDVRRFPRRSSIVGFAGVDPGVDDSGKHSAKSVPTTKRGSPHLRKTLYQIVCTYLRKAPADEPVYQFLDKKRAEGKPYFVYMTAAQNKFLRIYYARVKECLEAFDAQQDTSQR

SEQ ID NO: 204297 - protein, 372 aa, unidentified
MKNISIFVGLDVHKDSVDIALVEDDRNSTVRYYGTIGGDLADLDKAVKKIKKAHPEAFFHFVYEAGPCGYGIYRYLTKAGHECMVVAPSMIPKRSGNRIKTDRRDSIMLAGLHRAGELMPVYVPREEDEAMRDLVRARQDAVKAGRVAKQQLKGFLLRHGIKFAGKGDWKQTHVTWLAGLTMQIPAQQIVLQEYINTVKDCTERIARLTTQIQEVLPSWEMAPVVKALQAMRGVSLQVAVTTVAELGDLKRFDNPRKLMSFLGLVPSEHSSGGSRRTGSITKAGNGHVRKALVEAAHTYRLKARIGKELLARQEGLPKQICDIAWKAQVRLCSRFRKMEARGKKHQTIICAIARELCAFMWAIAREVKPTTA

SEQ ID NO: 204298 - protein, 491 aa, unidentified
MSTAGKQNREKKDPTLNARASKRNASASHCKQGKGSQRRSKLTIANPDAAGVDVGSQVHYAAVPEGRAEQSVRSFGAYTAQLDELVQWFKDCEIKTVAMESTGVYWIPLYQKLEEAGFEVLLVDARQVKHVPGRKSDVQDCQWLQQLHSYGLLRAAFRPEDSICRLRTLQRHRKNLVECGAMWIQHIQKALNEMNLHLHHVLTDISGQSGLAILDAILAGERDSKKLASLADHRVKKSQAQIEAALTGDYRPELLFVVSQALYDYRQMQQQIAQCDLNIEKHLATIAACAEPKQGSGQTPPPQEGAVVKARTSKRKPKDALELSLAGHLKRILGVDLTTIPGLNVLAVLSLISEIGTNMAKWRNAKAFVSWMGLSPNNKVSGERVLSSRTRKVNNRAATTLRLAAMLLGRTDTPLGSFYRRKRAHLGAPKAITATARKLGCLIYRLIKDGQAYREPDLHTYELKYKNQILRSLRKRANGFGFDLVELPKAA

SEQ ID NO: 204299 - protein, 434 aa, unidentified
MTLINFVAANQKYYTFNLLSVFIMVLWSVQYLLQHLLVQTQLSDQLLQPLIFILQLPQTPQFRHARPGKFFLPVNGMDYLLPLRLTVRNVLTRRITMNIVFLGIDLAKNVFQLCGLNQAGKPVYTKRTGRKELLQTLANIPACLIGIEASTGAFYWQREFEKLGHKVKVISPQYVKPFVRGQKNDGNDAQAIAVALMQPTMQFVPPKSPEQQDIQALHRARQRIVNHRTATVCQIRGLLLDRGIPIGSAVSRARRAIPLILEDAESGLSSRMRRTIAELYDLFNDLGRRIHFFDKEIETVFRQSEACQHIAKVKGIGPKTATAVVAAIGKGTEFKNGRHFAAWLGLVPRQHSSGDRQVLMNMTKKGDKHLRTLFIHGARAVVRVATNNNDGHMNQWVNQLKERRGFNKTTVAVANKNARIIWSMLRNETEYQVV

SEQ ID NO: 204300 - protein, 347 aa, unidentified
MRFYTTQHQFYCGIDLHARTMYVCILDQNSEVLVHRNMKTSPEAFLNVIAPYRQGIVVAVECMFTWYWLADLCADEGIPFVLGHALYMKAIHGGKAKNDKIDSQKIAALLRGGMLPQSYVYPAAMRATRDLLRRRMHLAHKRAELLAHVQNTNSQYNLPAIGKKIAYKANRDGVAERFADPAVQKSIEVDLALITYYDELLRDVELTIVKTAKHHDANTLYLLQTVPGIGKILSLVLLYEIHDIDRFPRVQDFVSYCRLVKCAKESAGKRFGTSGAKIGNAHLKWAFSEAAVLFLRDHPPAQKYLARLEKKHSKGKALTVLAHKLARAVYYMLKRHVAFDREKFFQR

SEQ ID NO: 204301 - protein, 344 aa, unidentified
MNTTPPVGTTPVITPVPVGLDVSKDTLDVCLLAQNKRHEKQFCNDAAGHRQLLRWSHSLAKEGPCHFCLEATGPYSQSVALFLVEKEQKVSVINPARIKYFGLAQNQGNKTDKADARLIALYCQMQCPPPWRLADPEVRLLQEMVRRLHALSDLVAQEKNRAQTPGQGKAVMASNKRVVVALERELLRLKREVRAHVKAHENLYRDSKLLQSVPGIGEITSWDILAEMPDVEEFESAQSVAAYAGLAPREQRSGSSVRKATTLSKRGNSRLRKAFYFPAVSAMQWNPLVKAHYQRLREKGKPKMVALAACMRKLLMICYGVLKHQKPFDAQWLSQSPKTPTGAV

SEQ ID NO: 204302 - protein, 390 aa, unidentified
MAKKRISDDSAGFTVLTEMLAAAGDSFDDAIPIAIETPRGLLVAALRATRRPVFAINPLAVARYRERHSVAGAKSDHADAMTLANILRVDSHLHRRMPADSELAQAIAVLARAQQDAVWRRSKASNELRSMLREYYPAFLDTFAGKSATNLAKPEARAVLAIAPTPAHAAKLIKTRVAAALRRAGRKRGIDGLAVNILEHLQAPQLRQPELVEKAMGRQALALLAMLDAACTGADELAQTAAEEFRKHPDYAVITSFPGLADLTGARVLAEIGDDRDRFADDRALKAYAGSAPITRASGKVTSITHRRIKNDRLAAVGWVWATYAYINPGPAQDHYRRRRDHGDRHAAALRHLFNKMLGQLHHCLQTRQTFDPIKAFGQPRTAPREPAAA

SEQ ID NO: 204303 - protein, 338 aa, unidentified
MKLYGGIDLHCNNNYLGIIDKKDKRVFQKKLPNDLETVLKVLKPYRKDMEGIAVESTFNWYWLVDGLIEEGYTVHLPNPAAIKQYEGLKHSDDIRDAFHLAHLLKLGILPEGYIYPKKERPVRDLLRKRLFLMKHKTSHILSFKNMVSRSLGIQISSNEVKRLFEEDVEKLFQQEHLILAGKAHIATIRFLKEKITGIEKAILKKAVLRDEYSNLLTVPGVGKILALTIMLETGDIRRFPEVGNYVSYCRCVRSNRTSNGKSKGEGNSKNGNKYLSWAFVEAANFAVRSYPFVRMYYQKKTARTNSIVAIKAVSHKLARASYYVIKNQEVFQPKKAFG

SEQ ID NO: 204304 - protein, 356 aa, unidentified
MKEYISFDSHKHYTLAERESIESRTAVQCRIAHQPGAIREYLRRCEAGTPVAVEAVGNWYWIVDEIEQANLLPLLVHPRKAKMMMAMTNKTDKLDVHGMNRLQRTGTLPTVWIPPRELRDLRELARTRMVIARSRTRLKNRIQATLSKYGLALTGYSDPFGKRARQALCNYIGELPPQTQYVTRMLLKQLDLVERQIKALEERLEALITVTPDMQLLQSLPGVGVILAAVIALEIGDVNRFPDAEHLASYAGTTPRVHASGGKVRYGQLRQDVNNFLKWAFSEAANSVAVNHERRPERHVSRIYQRVRNRRGHPKAIGAVARHLAEATFHVLSKKEKYKDPSLVRERAKQGRTREA

SEQ ID NO: 204305 - protein, 344 aa, unidentified
MGEVSTIGLDIAKSVFQVHGVDGAGAVVIRKRIGRSKMLEFFAKQPPCLVGIEACATAHHWGRELQALGHTVKLMPPSYVKAYLKRSKNDANDAAAICEAVTRPTMRFVPIKTKEQQAALMLHRTRQLLVRQRTMLSNAIRGHLAELGIVSAKGRNGTGELLGIIADGADGRVAPAARGILDALARQYSAIGAEIGSIEKSILAWHRSCEASRRLEEIPGIGPIIATALVAEIGDWKAFSSGRSLAAWIGLVPKQHTTGGKDRLGSITKQGNRYLRWLLVVGAMAVIRYAQKYGTQKRPWLGRLMERRPRKVAAVALANKIARMAWAIMVRGERYKEPKLLLAA

SEQ ID NO: 204306 - protein, 394 aa, unidentified
MNAIQSSACKGNSTQKVQNLRDFTRRNLYVGIDIHKARWQVAVLFDGIVLSNTSIEASADALINHLNKFYNGATFHCVYESGPFGFTLCRSLWREGIECIVVNPADIPGTHKEQRSKTDPVDARKLARHLAAGLLNAIHVPSEKIQKQRSLIRFRKKLWGDLVRSKNRLKSELLFQGISIPKQYDNPHWSHNFLNWIEQQALKDQYLKDALLLMLEETKLLRQLLLKAERKIREMMRSEDFVHDSTLLKSITGVGSLTSMLFLLEVGDVARFKSFDALNRFVGFCPDSHSSGDTQRHTGLSVRKHSQLRTMLVEAAWQLIRRDPAMLDYYRELTKRMKGQDAIIRVARKLLRRIRAVMLSGKMYVNGIDGRLQTTDINAPSLPGSDRKNKLVKK

SEQ ID NO: 204307 - protein, 509 aa, unidentified
MKYAPIQVLPDVPAGGVFAGIDWATADHVACAVDMAGRILDRFSAAHDKAGIEMLITRLRENGATEVAIERGGGVLVEALLAAGLTVVVVSSHQVKNLRARYRSGGGKDDRFDAFVLADTLRTDRARLRPLVPDAPATLALRAAVRARRDLVAHRVAACNQLRAHLAAAFPAAAGLFYDLASPISLRFLASFGSQDAAAQLDEQAITAWLKTIPERGKTAPASVLCARLRAAPDGVTGEDGAAHAVITAALTVTVGMLAAQVKVLETGIGAQLAAHPDGHIFTSLPRAGTLRAARLLAEIGDCRSRYPGPQSLAALAGVVPVTRESGTHTSHAFRWAVNRPLRDAVCDFADGSRHASPWAASVAHCPPAHPGPAGRASSRGRPPGHPVTAALSAALRASAAGLYPDEAGNELLISHGGFLRRHDFAAFVHAGTSISDGTTPMAWIDWDAAITAQLPLSGGERRILQLAASIAGGTPASLRESIPGLDPRNLHLVITAIRHAAGQRPPHC

SEQ ID NO: 204308 - protein, 345 aa, unidentified
MKITTIGIDLAKEVFQIHGVDERGKAVLRKQLKRKDMAEYFANLEPCLVGMEACGSAHHWARKLEGYGHTVKLMAPQFVKPYVKTNKNDMADAEAICEAVGRPNMRFVRTKNVEQQAALSVHRARQGFIKARTAQGNQIRGLLSEFGIIIPQGIRQIIGRVPEILEDGDNGLPGIMRQLIARLTDNLKEMDRQVDDLETQIGAWHRENAASRKLAEIPGIGPITASAIVATIGDAREFENGRQLAAWLGLVPRQSSSGGKQALLGISKRGDTYLRTLLIHGARAVIRFAENKAEPDSWIRKLMARRNKNAAAVALANKNARIVWALLAKDRMFRPDYATAKAAAA

SEQ ID NO: 204309 - protein, 340 aa, unidentified
MKATTKFFIGVDVSKPYFDVSLMKVINYEKQPMETQRFDNNNPGIKTFDKWLKSHKIFFDSNTLLVIENTGIYHRLLWSYCSSKNLPIHIGNAAHIKWSFGIARGKSDVVDSIRLCHYAFKESDSLKSTPVLNPVLMQLKDMMTARTKLLSQINSIKTYIRELKNVSDTSVQSIWEKAHKAAIEGLALSIKNIEAHIKKIITQNSELQNNYELLITVPGIGHLTAIYIICCTNNFATKITGKQLACYAGVVPFEYTSGISVKGRNRVHHMANKDLKKLLHLCAVSAIQNHQEFKIYYDRKKKEGKHSMSILNAIRNKIILRAVAVVNNQRPYVQKHDVAA

SEQ ID NO: 204310 - protein, 343 aa, unidentified
MKLSRVGVDLAKNVYQCHGVDRFGKTTWKRRLKRHQWLKVLLDNTEPGCVIGMEACASAHHWGRELQCRGYTVKLIPPQFVKPYVKSNKNDARDAEAICEAMSRPNMRFVTVKTIDQQDIQATHRVREELKVRRTAKANQIRGLVAEYGLVAPKRLSSLRAAIPCWLEDAENGLTHYFRSLLHGLWDDLLALDDRMCEMDKTIKRLAKDNEDCVRLEQLRGIGPMTSTAMIATVGDARQYHKSRQMAAGIGITPRQHSSGDKHRLLGISKRGDVYLRTLMIHGARAVVTRAKHKDDPLSRWVTEIATRRHPNVAAVALANKNARMAWAILRNKTDYDPDFAIG

SEQ ID NO: 204311 - protein, 416 aa, unidentified
MNAAGIDVSSRKSTVAVLRPFGEVVRLPFDVAHNTEGLASLAEQLKALDGETRVVLEHTGRYYEPVAKALHEAGLYVSAVNPLLIKEYGANSLRRVKTDKADAVKIARYALDNWADLRDYTPMDTIRYDLKTLNRQFQLASKQRTASANNLIALLEQSFPGIRKCFDSPVRSDGTQKWVDFIHTFWHVECVRKQSLNAFSERYRKWCKHHGYIFKQGNAVEVYSLAKNAVVLVPKSEVTKVLVQEAANQLTSISRSVETYRAEMERLASTLPEYPVVMAMYGVGKSFGPQLMAEIGDVRRFERKQSLVAFAGIDPMPNQSGDKNVRSNKSSKRGSPYLRKTLFNIMGIYLKCSPQDEPVYQFLDHKRSEGKPFYVYMTAASNKFLRRYYAQVRDYLSTLDNLPPVDMDSTGLKSSD

SEQ ID NO: 204312 - protein, 349 aa, unidentified
MIVIGADVHKRSHTFVAVDDVGRKLGSTVVATTTAGHLTALRWAHDRFGHELLWAIEDCRNMSARLERDLLGAHQKVVRVTPRLMAEHRRTGRERGKSDPIDALAVARAAAREPDLPVASHDDVSYEAKALVDYRETLVRERTSKTNRVLWRVHQLDPEYHIPRGGLTLNKHQNNLAAWLIDRPGIDARLARNEVAAIIALTAEIKQVTREITTLARDAVPTLLAMPGCAELTAAKLLGESAGITRFGTEAHFARNAGVAPVPVWSANPGRHRLTRSGNRQLNAALHRIALTQARMPESLGHTYYQRKRDEGKTKREAMRCLKRRLARVVYNNLTLDHHNRTTPQQDAA

SEQ ID NO: 204313 - protein, 386 aa, unidentified
MQASTLCTPTKDHIGTIFVAIELSQRSWLVTIHAPDRDRMSRHKLAGGDHIGLLALIGKVRMRAEQKLGAAPAVVSCYEAGYDGFWLHRCLTAAGITNFVFDPASIAVDQRARRAKTDRIDGELAIRTLMAHWRGEPRVVRSVHVPSAEQEDARRQTRERQRLITEQTAHTNRMKALLRLIGMPVGNPRRRDWLIWLERQRDWQGQPVPPQLMAELKHEHARLMLLRDQIEVLSEAAAGVELSAAAAQMTQRCPLLSRLKGVGPVFAATLTNEVFYKDFRNRREVAGYIGLAPSPWRSGGTDREQGISKSGNPRARHKAIELAWLWLQHQPESALSRWFLERTLNASKRFRRIAIVALARKLIVALWRYLTAGLVPQGAMFNMCNG

SEQ ID NO: 204314 - protein, 487 aa, unidentified
MPGELICHADAGSQYTSIHFTEHLGLEGIRPSIGSVGDAYDNALMETINGLYKAECIRTTVFHEGPYRTIADVEFATAGWVDWYNNRRLHSTLGNVPPIEFEQAHYATLNREPHPAQERQRSWGASMRKRVTAWPQRVWAVEGSNGAGRSLAQRLLADGEHVVDVPAKLAARARMLDTGHGRKTDAHDAHSVAAAAVRAKELRVLALDPQLEALRMLADRRDELSKARVQAANRLHRLLAELVPGQSKKDITTGQAKAILASVRPRDLVGKTRRRPAAEQLAELVAVERKIKALTKELKEMVLTSGSTLDLPGVGPVVAARALADVGDVARFADRNRFASWTGTAPIEASSGEIVRHRLSRAGNRRMNHMIHIAATTQIRLDTDGRAYYRRKIAAGKTRREAMHCLKRRISHALYRQLRADAKTAAIKDVDAGPGGHRGATQESSAAGSHPHTGTSDQPLPGPAPTTLPAHTPARKTTRSRPLEPAS

SEQ ID NO: 204315 - protein, 366 aa, unidentified
MDAIYIGVDFHARQQTICYLKTETGELVISELKHQDKEQLRAFYQRFQGPLIIGLEASGYSPWFEAMLEQLGHEVWLGDASEIRRRARWRQKSDRRDAELIWDLMVHNEFPRLHQPSAQSREVLRMLRYRQKLIKVRTMTKNSLQAIALQAGLAKGKGLFTKAGQAEFKLVTLSPALQWQREHWLDLLKPLNQQLLETMVWFKAQSKGDAVITRLRTHPGIGLLTALCLWHTLQPVSRFRNPRKVVAYAGLDPMIRSSAERATYLGISKAGSRMLRYLLVEAVHTAVRYDDDLKRFYKRVAERRGRPKAKVAAARKLLIRAYIMLRDEIDYAEFRRRAVAVDLPAEVKGQPKVPEVLIGKSASPGA

SEQ ID NO: 204316 - protein, 367 aa, unidentified
MSNDSTVFVGLDVHKGSIVAAYAVGSGHVQSIGNIGVRECDLDRFCKRMQGKASRVVFVYEAGPCGYGLQRYLTRKGFICHVCAPSLMAKKPGDRVKTDRRDAEKLVRLLRMDDLAFVHVPDERDEAFRDLVRAWGAAKEDVKKAKQRLKSFLLVHGVRYSGSADWREAHRRWLSEFTFAEAWSQIAFEEHRRSIGDRIAQSQRLEQVLRDAARQWRFYPVVQALQALRGVQFTVAVGLIAEAGDLSRFDNPRQLMAWMGLVPSEHSSGSSIRKGGITKAGNGYARKLMVEAAWSYRYTAKVSRIIQLRHEGLPKPVVDRAWDAQLRLCRRYRKLSQQGKHPNVVVTAIARELSGFVWDIARIASAV

SEQ ID NO: 204317 - protein, 398 aa, unidentified
MTESSDYESVQVFIGVDVGKDTHHAVAINRSGKRLFDKALPNDENKLRSLISDLKQHGQILLVVDQPATIGALPVAVARSEGVLVGYLPGVAMRRIADLHASEAKTDARDAAIIAEAARTLPHALRTLKLADEQIAELSMLCGFDDDLAAQTTQASNRIRGLLTQIHPALERVLGPRLDHPAVLDLLQRYPSPEKLASLGEKKLAAQLCKLAPRLGKRLAADIAQALAEQTVVVPGTNAAAVVLPRLALQLITLRKQRDEVALEVEQRVLAHPLYPVLTSMPGVGVRTAARLLTEVACRAFASAAHLAAYAGLAPVTRRSGSSIRGEHPSRRGNKALKRALFLSAFAALRDPLSRAYYTRKMSQGKRHNQALIALARRRCDVLFAMMRDGTFYTPQAS

SEQ ID NO: 204318 - protein, 323 aa, unidentified
MQGQKSPERSAQPRVYVGVDVCKDWLDVYLHPIGQAFRVANAPEGLKTLKRRIAAIPVELIVMEATAKFHRQAHRTLHAAGFAVAVVNPLRARLFAEAVGQLAKTDRLDARLLAFMGQTLEPSAIAPAPEALEALQELARARAAAKAEQTALSNRRGASQTAFLKTELGRRLKTLAGHIERLDEEIKRRLRADPALQRRFDILLSIPGVGPVAALALVIGLPELGACSAKAATLLAGLAPLACDSGDKAGERHIRGGRAFVRTGLYLAALAAARFNPQLSLVYTRLRHAGKKTKVAITAIMRKLVVLANILIKEDRPWNPVLP

SEQ ID NO: 204319 - protein, 377 aa, unidentified
MERTFGNVEGSASVDGVILGVDTHLDLHVAVALDQLGRRLGELTVPSTTRGYEKLLRWAEGFGSVGCAGIEGTSSFGAGLSCHLKAAGVSVVEIERPKRRHLRRHLRRNGKSDPIDAEAAARAVLAGEAIGEPKSGDGEVEMIRVLRSARQSAVNFRSQAANQLQALLVMAAEDLRHRLRELPTKELVATCARLHPGDDPDNIETATRFALRSVARCHQTLSEEITELDAQLKRLVADVGPGLISLPAIGTHHAATLLVVAGDNPQRLRSEASFASLCGVSPVEASSGKVVRRRLNRGGNRDANRAVLMICVVRMGSDKRTREYVARRTAEGKSKWEIMRCLKRYIAREVYRILLFSTTTKPPPIQAVSRVLEADIA

SEQ ID NO: 204320 - protein, 461 aa, unidentified
MKIRLGVDIACRAPHQASCADEHGVMLFTGHRFRTDPDQLETLWARLPDDVDAVMVIMEPTRNAWVALAAWFRRRGATVVMVPPEQSADLRAYYSKHAKTDRLDSKILARLPLLHPEGLHREDTLGPGDALKRAVKIRSGLVHRRTSSMARLDALLEILGPAWAAAIGSDMTLTALRLLARYAHPEKVKTLGKARLAAFLRRSSRQQWGEQRAAAIVDAAAATLRLWGTDGMDFDALAADIAVEARLALTLSEEIKALDRRIADLYEQVDPDGIVRSAPGVGTVGAPQIAGRLGDATRFANLAAIRCFAGLVPHQDSSGQAARAGGPTKAGDACLREALYMAADHARKIDPTLAARYHRLITEDGKHHNSAVCTIAAVLLTRIAACLRNGTPYQLRDTDGTVITEQQGREIIARRYTIPPAVRAARRQLTGTTRQPRRNERAEKGVAKRSEAPPVHEPACT

SEQ ID NO: 204321 - protein, 343 aa, unidentified
MDHFAGLDVSVKETSVCIVDDVGKIIWEVKVASEPAELLAVLTNPAYHFKRIGLEAGPLSQWLYSALAESGLPVICVETRHMRAVLKAQINKTDRNDARGIAQMMRVGLYRPVHVKTLRSQKLRMLLTHRKLLQSKAIAIENDLRGTLRNFGLKVGVVGAARFETRIKELVETFTDLMMLIEPLLVVRRTLREQIGVLHRRLLTIVRDDDVCRRLMTVPGVGPVVALTYRATVDVPARFRKSKSVGAVFGLTSAKYQSGEVDRSGKISRCGDEMMRVMLYEAAQSMLRAKKWSWLKAWAMQLARRCGMKKAIVALARRLAVIMHRIWIDGTEFRWTREACAAA

SEQ ID NO: 204322 - protein, 383 aa, unidentified
MRHGGILIEANDSEGETMKKNRTINQSLSADLKACTTLAVDLAKRVFQLAGEDALGQVIFEDRIKSREAFQAFLHQLPASVAVLVETGPGAQAWARLLQTQGNPVRILPAQLVATHRSGPKNDRNDALAILRAGRDCKISAVPLKSAAALAMQALHRARQGYVRRRTAVGNQMRGLLLEHGVVMAQGELAISQLVPRVLEDATQPLPDLLRELIAELLGEWNQLGERVNILTGRLETAAKADETAKRLMTVRGVGPIIATALLAKQTEPERFANARLFAAYFGLVPSQNSSGEKVRLGRMSKHGDAYLRSLTIQGAHAVLRQLRPDSQQPDDQRLQRWISRLGRKEAAVRLANRNLRILWVLLQNDQTYHRQPGTGQEAAMSH

SEQ ID NO: 204323 - protein, 342 aa, unidentified
MQYYVGLDVSLKQTSICVVDQAGLVVREGVVDSDPEAISSYVTSKAPNAVRIGLETGPTSTWLWTELKRLGLPVICIDARHAKAVLKMQINKSDRNDAIGIARIMQTGWFKEVHVKDIDSHSVRALLASRALLVKIKRDLENHVRGLLKNLGLVIGRAKFNVFAVRAEGLIEGRPELIAAIRPLLEARKAVEQQVSELDRKVMRLARHDAQVRRFMTAPGVGPITALAFKATIDDPARFARSRSLGAYIGLTSRRHASGEVDWTGRISKCGDAMLRCYLFEAAGVLLTRVPKWSTVKAWGMKLAKRNGLRKAKVAVARKLAIILHRMWIDGTEFNWSKEIAA

SEQ ID NO: 204324 - protein, 440 aa, unidentified
MRIMYERCCGLDIHKASIAACALISEKGKPQEETRRFGTMTADLRELAGWLQQKGIRHVAMESTGVYWKPVWNILEPAGFELLLANAQEVKVVPGRKTDQKDSQWIADLHKHGLLRNSFVPPRAIRDLRDLTRTRAILTQEHTSICNRIQKVLEDANIKLGSVASDVFGVSGRAILRALMKEENDAEALADLSKGLLRKKIPQLRRALEGQVTAHHRSLLTGQWSRMEFLEREIVDLETQIAERMKPTPEETALTLPNTAEDAPAPLSPREEAIQLWMEIPGVGWTAACSMVAELGVNMDQFPSAAHVASWAALCPGNNESAGKRLSGKTRKGNVWLRRTMCEVAWAASHTKDTYFAAQFHRIASRRGNKRALMAVAHSILVTAYHMLKHKRHYQELGADFFDAINRDKVRDRLVQRLAKLGFDVTLKSKDSIASDSQKN

SEQ ID NO: 204325 - protein, 366 aa, unidentified
MRTRKSYYIGLDVHKDSIWMAVMVDEKDSPVESKQLPNNYLKVVKAMAPYQEKGKVQVAYEAGCIGYGLQRHLSEFGFDCRVIPPTKIVRPGMDKRIKTDKRDAVLIANMLKRREGESINIPTRTDEAGRDLLRCRSDFIDDQKRAKQRLLNFLLRHDKKYETNRYWTMKHRKWMADLKFDLAVDKMTFEYYLNYIENMEERIARVDEQIRKEAENELNAEKTRILRAFRGIDYITALSFICEIGDFRRFSTAESFMSYLGLVPSEYSSGKKIQRGPITKMGNSHLRKLLIESAWHYTRPIKESKRLAARRVGTAEQFITYADKAISRLHRKYYKMLSRGKIQNVAITGVARELAGFIWGVMNMAA

SEQ ID NO: 204326 - protein, 427 aa, unidentified
MSYRIAAVDVHKKMLAVVVADVAGEGEYRFERRKFGATPGELHLLAQWLDRQEVEEVVMESTAQYWKPVWGALERYWKPARQKREGASKMCGTLHLCQAKSNHGPRGRKNDFADGERMIKRLVAQELVLSFVPDPEQRLWRTVTRRKHQLTRAKVGFKNQLESLLEQAHIKLSSFVSDLLGVSARRMLKALAEGETDPAALAAMADRRLRATPEQLRDALGACAQLNGVYRRLLKMALEQLEVIETHIEQLDREALGLMQEHQDVVKRVAEVPGFGVDSALQMIAEVGPEAAAFRSKKALSSWVGVCPGNEESAGESHSTRSPKGNRPMRRLLNQAAQSAVKVKGSIFEVVFSRLLPRLGYKQAIWAIAHRLCRVLWLILHKGVRYEERGPAVSAKSKRTRAARMIKELQKLGYCVVGGPLPAVARA

SEQ ID NO: 204327 - protein, 392 aa, unidentified
MVVSVGIDVSKDKHDCFIVSSEGEVLADAFIIPNTMDGFHYLLQRIRHCTAPQDKIKVGLEATGHYSYNLLGFLLDNGLTTYVLNPLRTNLYRKSLSLRKTKTDRVDARTIASMLLSDAGLKPYTDTAYHNEELKSLTRYRFDKVKERAKLKSSIARLVCILFPELEKLVPSLHIASVYALLEEFPGAKQVAAAHLTRLKALLETASKGRYKRDMALEIREVARNSIASPLPAKSLELQHTIRLIRELDNEIAEIEEQIQSIMDELHSPITTIPGLGFRMAAMILAEVGDFTRFDSPDKLLAYAGMSPSTYQSGQLKNCYPHMEKRGSRYLRYALYNATKYVCHWDPTFADYLAKKRAEGKHYNIAISHAAKKLVRLIFAMEKSRQPYCSAA

SEQ ID NO: 204328 - protein, 370 aa, unidentified
MGPRESSCRARRLLVCVYERVILQWIHNQLEYAKRAVRLRADICGMEYQQQVVSVGIDMAKEKFDAALLYEDNGSSVGTFENSPDGIGKFIGLLKAQRTAETVPCVVESTGLYHVAPALMIRQAGDRVNVINPLITKKYQRSSVRNAKTDTIDALRLAEIGIREADLPLFSGDIRSLEARKLASYCGKLEDTKRSLKASMKQVEQLQAITGMEMDLDHTKKALTALDEQIALLQERICEMAPKEAAVLAEQTKGISKEKLSIVLSMLADKQFANRDQLVAFVGLDVMPRQSGTWRGKGKLSKRGSPYLRKVLHHIAWGLQKHNPTYQAEYKRLRDNGKGYRQTLIILARKFLRFLYAYYWKNGGCPQMKI

SEQ ID NO: 204329 - protein, 416 aa, unidentified
MNAVGIDVSSRKSTVAVLRPLGEVVCLPFDVTHDIAGLASLAEKLKALDGETRVVMEHTGRYYEAVAKALHEAGLLVCAVNPLLIKEYGANSLRRVKTDKADAVKIARYALDNWADLRDFTPMDAIRYDLKTLNRQFQLASKQRTASANNLIALLEQSFPGIRKCFDSPVRSDGTQKWVDFAHSFWHVDCVRKQPFPAFCERYRKWCKRHAYFFKLRNAEKVYALAKSAVVLTPKSKVVKVLVQEAANQLISISRSVEVYRAEMDRLAAMLPEYPVVMAMYGVGKSYGPQLMAEIGDVRRFERKQALVAFAGIDPMPNQSGDKNVRSNKSSKRGSPYLRKTLFNVIRTYLQCAPQDEPVFQFLNRKRAEGKPFYVYMLAAANKFLRRYYAKLRDYFASLDTLQSVDPIPATLKASL

SEQ ID NO: 204330 - protein, 407 aa, unidentified
MNAVGIDVSKGKSTVAVLRPFGEIVVSPFDVSHSPKELSKLVTLLKTLNGDTKVVMEYTGNYYLPIALFLRNNGFFVSVVNPILVKDYSTKSLTVRKVKTDKKDALKIASFALDRWNELSPFSAQSEARLLLKSYNRQYNQYNKLKIILKNNLIALLDQTFPGANTLFSTPTRKSDGHEKWVDFVLKFSHSECISKKSFSFFLKSYLSWCKKFGYKFSKSKAQAVYDFACNCSPSLSFSDSSALLVSNAIIQLNSINETLASLASEMNKIAATLPEYDSVMSMFGVGSVLGSQLIAEIGDVSRFPNKKALVGFAGLDASPFQSGNFNPQSRSISKRGSAALRKTLFQVMSVVLQRAPTNNVIFQFMGKKRSEGKHFYVYMTAAANKFLRIYYARVTEHLNLFTTTTA

SEQ ID NO: 204331 - protein, 344 aa, unidentified
MKDVRILGVDLGKNSCSIVGLDGAGRVLLRRRTRREGVIALAAKLPGCVVAMEACCGAHHLGRLLVEQGHEVRLMSPEYVRPYVKAQKNDDRDAEAIAEAATRPTMRFVALKSEAQLDVQVLHRVRDRLVGQRTSLTNQIRSILLERGIVVPQGRRSLLEALAVLSSEPDGSQVGTRVQRLLDDMLDQWRALDARIKALDDEFAEMARNDPAARRLATIPGIGVLNATALVAAIGDGRTFSRGRDLSAWLGLVPHQATTGGRPKLLGITKRGSKYLRKLVIQGARAALPSLARTATPLGGWLRGLLARAHCNTVVVALASKLIRIAWALLRNETRFVAGGAAVA

SEQ ID NO: 204332 - protein, 315 aa, unidentified
MTTMNYIGLDVHKKTISYCVKDVSGRIQQEGKIGSTRRELDCWMKTLPQPWTVAMEATIFSGWIYDHLLSHATQIKVAHPLMLRAIAAAKKKNDQIDASKLADCLRCDFLPECHMMPRAIRDRRRTLRYRHLLVRQMVQMKNRVSGLLMETGVEYNKQRLHKVSYFRELLSANGEVPPSIRPLLKLSRETIERCQKTEYALVSSLQRDPVLADRIKRLRTVPGVGPITALTWALEIGDVSRFGSIKKAISYCGLCGDERSSADKAMRMPLSKQRNKHIQRALVEAAKLAPRQNHEMAVIYDQERKKEIAIGRHLP

SEQ ID NO: 204333 - protein, 459 aa, unidentified
MAKRSTKRRRIPKPGSASPAFPLVNPNAAGIDLGSRKHFVAVPEDQDTQPVREFGCYTAQLEDMASWLKGCGIETIAMEATGVYWVPVFEILESHGFEVLLVDALQVKNLTGRKTDAVDCQWIRHLHSYGLLSAAFRPKAEICEMRAYWRQRSNLVESASRQIQLMQKALEQMNVQLHKAVSDITGKTGMSIIRAVVRGERDPHTLAQMRHSRLKASRDELALALTGNYRPEHVFALEQALEGYDFIHQQIASCDRRLETYMTALPGKASRVANTNPRQARRKNQPYFDLRAEQVRIAGVDFTRIPSIDTLTAQLVLTEVGTEVSRFPTEGNFASWATLCPNNRKTGGKIRSRRTRKSSHRLAAALRVAAQTLSRSKTALGADYRRLRARIGAPKAITALAHKLARIIYRMLKYGEEYVEQGQRLAEAKSQRRSLKTLTRFANELGYGLILKETGEILD

SEQ ID NO: 204334 - protein, 323 aa, unidentified
MQGKELSEQIPMEKVYIGIDVCKDWLDIHVHPGGVEARFTNDHGGVGDLVRCLADWSVGLIVVEATGKWHRRVHRRLHEAHHRVASINPYRSRKFADALGLLAKTDTIDARVLALFAAHLTPRPTTPPTADVAALKELVTARRESQRDMVALKNRLATTEHRLVGRQLRARLVMIERHLKALEAAIHEIIAANPALAQRAAILMSIPGVGPIAAMTMIAELGELGTCSRTEIAALTGVAPMNWDSGQLRGRRIIKGGRAHVRAVLYMVAVAAIRCNPSLKAFYKRLTEKGKKPKVALTAVMRKLVIIANALITENRLWSPTPP

SEQ ID NO: 204335 - protein, 414 aa, unidentified
MEIVYSRCAGLDVHKKTVVAAIIVADPNRELHKATQTFGTMTADLLTLSDWLTAQGVTHVAMESTGEYWKPVFNILEANFEVWLVNAQHIKAVPGRKTDVNDAEWIADLLRHGLLRASFIPPLGQRELRELTRHRSNFVRERANLINRVHKVLESANIKLASVATDVMGVSGRAMLAAIIEGQATPSEMAELSKGRMRDKRDQLAKALEGRVKPHHRFVLTELLCQIDSLDESIARFDQQIEDYCAPFEEAVTLLDTIPGVARQTAEVIVSEIGTDMSRFPSAAHLAAWAGVAPGNNESAGKRRSGRTRKGNRPLCAALNQAANAASHTKATYLSAQYHRLAGRRGKKKAIVAVEHSILVIAYHVIKRQEPYHELGGNYFDNRRPEATAKHLVKRLEQLGYEVTIQQPSASVAV

SEQ ID NO: 204336 - protein, 406 aa, unidentified
MLLFVGDDWAEAHHDVELMDTAGRRLAKARLPEGVAGMARLHAMIGEALGEDAEAAQVLVGIETDRGPWVAALIAAGYRVYAINPLQVARYRERHSISGAKSDAADAHTLADMVRTDSHQLRPVAADSAQAEAVRVVTRAHKTLIWERTRHTQRLRHALREYFPAALQAFEDLDAPDALELLARAPDPVSAAGLTITQISAALSRARRRNIPEKAARIQAVLRGRHLGQPEVLTAAYAATTRAAVAVLRTLDEQVRVLQGQVGVCFGQHPDAKIILSQPGLGPILGARVLAEFGDDPGRYTDARARKNYAGTSPITRASGKKKVVLARFVRNDRLIDALMAQGFSALNASPGARAYYDQLKARGAEHNAALRQLANRLVGILHGCLKTRTCYDEATAWSHPGEHAA

SEQ ID NO: 204337 - protein, 337 aa, unidentified
MRIIRIGLDTAKHVFQAHGVDESEQPVLRRQLRRSEVERFFGKLPPTRIGLEACGAAHHWARALRALGHEVVVMPPQYIKPYLKRGKNDALDAAAICEAMSRPGMRFVAIKSAERQAALMLLSARDLLVKQRTMLINAMRGHAAEFGVIAAKGPVKLSELLQRVHAAEAGVPRLAREIMSLLSRQLDALAAELKGLEARLMAWHKADPVSQCLATQPGIGPIGAVSFALKVSDPGGFRSARHFAAWLGLTPKEHATGGRRRPGRISRQGDETLRRLLVLGATARIRFAKAGRASPWLINLLARRPNKLAAVALANKMARILWAMMMSGETYRHPQQA

SEQ ID NO: 204338 - protein, 354 aa, unidentified
MSQTLNTTIAVVGIDIGKNSFHIIGLDTRGAIVLRQKWSRGQVETRFANMPPCLVGMEACVGAHHLSRKLKALGHDARLMPAKYVRPYSKGQKNDFRDAEAIAEAVQRPTMKFVATKTADQLDLQALHRVRERLVRQRTGIINQIRAFLLERGIAVRQGQRFLRAQLPTILATPPDVLSPRMTRAIEGLATDWRHLDERIEGLSDEITALAKQDTGCERLMSVPGIGPIISSAMVASVGSGDGFAKGRDFAAWLGLVPKQISTGDRTILGKISKRGNRYLRVLFVQAAWVVLIKPKSWERHGLKPWIEAAKKRLHHNVLAIALANKLARIAWSVLARGKAFEARRIDEGAAQSA

SEQ ID NO: 204339 - protein, 343 aa, unidentified
MQVVTTVGLDIAKSVFQVHGIDAAGQVVIRRQLKRRYVLAFFEKLPRCLVGIEACASSHHWSRELSALGHTVRLMPPAYVKPYVKRQKNDATDAEAICEAVTRANMRFVATKTPEQQSGLTLHRTRHLFIRQQTAVINVIRAHLAEFGIVAPVGRKGVEELLNVVTDASDNRVPVVARMCLAALGSQLRRLKEQILEFDRMIMAWHRSHEASRRLDAIPGVGPILATALVASVADPKVFRSGRNFSAWIGLVPKQHSSGGKDRLGSISKQGDRYLRSLFVAGALAVIRYAKIHGTKHRPWLTALLTRRPIKVAAIALANKIARMVWAMMARGERYKEPVELAA

SEQ ID NO: 204340 - protein, 385 aa, unidentified
MTCIDQSSPKPAGLHTEHGVIVVSLELSPSKWLVTSLVPGSEKFSRRWLEGGDSAGLLKLLGELKAKAESRLGRPVRVISIQEAGLDGFWLHRVLEANGVESHVVDAASVAMPRRKRRAKSDTIDGETLLRTLLAWRRGEPRVCSMVRPPSVAAEDRRRLTRERATLVSERTRLTNRIRGLLASQGIAGYEPLRRDRRQRLAGLVTGDGRALAPRLAAELARALDRLEGLLRQIGEVEAARDQEIAAAGGRDPAALLPQLRSLGEETVAVLAFEGFYRSFDNRRQIGAYAGLAPTPWQSGQMMREQGVAKAGNPRLRKAVLQLAWLWRRHQPNSALSRWFNQRVGQEKGRVRRIAIVAMARKLLVALWRYVTQGIIPEGAVLKAA

SEQ ID NO: 204341 - protein, 429 aa, unidentified
MKKSLRSRPVLAKGRAVVGIDVGKRKHAATALTPQGEVIARLASFPNTRAGIDLLEKEVLRKAGGPNKVLVGMEATGHYWMCLYHELTRRGYACVVVNPLQTNARSSARIRKTRTDKIDSGTIARLILSGEAKATRVPDPKTTELRLLVRHRQRLLRAAGDMERYAHTLVDRVFPEYADVFCKVFLSSSQKLIREIGLAPGKLVERAGEVRELLRRAGRGRIAPQTIDQLLQAANESIGTRQAEDLAESQLRSIFDYLATVRQQIADIEKQLDERAGQLDSPLFSLGLSSPLVAAIHAETDPIGDFASPEQYVAYTGLDPSLHESGDSIQWRGKISKRGSPVLRHALFLAAFVVSRRHDYFRRIYRKHRTRGKKHRNALVIVARRLARVIWRLLTDSRPFTVRPPKTACPFTKPRKPAKPSTKAVRVRV

SEQ ID NO: 204342 - protein, 394 aa, unidentified
MDATTIGIDLAKEVFEVAMANDRWRVIKRERLTRPRFERLLKEHPAAHLILEACGSAHYWARTAQRLGHQVTLLPSQYVRPYVRRQKTDRTDAEAMLEAARSGGIPPVAVKTVTQQDVLALHRMRAPWMMTRTARLNAMRGLLLEHGIAIARGAHTLLRQVAARLANEDDPLPPRLRIVLRLTVDEVRDLEDRIDAIDRERAAVAADDLVVQRLMRIPGIGLLTATAMVATVGHIHAFPRARRFASWLGLTPREHSSGGRRHLSAITKRGDVYLRCLLTHGARAVLRMAHRGARAMSPLPRFHEWALAVERRCGHNKATIAIANKLARIIWVVWTREVEFTMAPPVGCAARRPRDGRLRGPRTWAGLPIFLSRPLFTPAGQPGRGGRHRTASRL

SEQ ID NO: 204343 - protein, 353 aa, unidentified
MKVTEMEKDGEMKDTMIGVDLAKRVFHLHVASMTGEVRDRKKLTPGQFRRYMSEVPKCIVVFEACGSAHYWSREMMGLGHEARIIPAQYVKPFVKRHKNDKNDAEAIVVAAQRPEMRFATVKTEEQQARAIVFRARERLVHQRTDLVNALRSTLYEYGHVFPVGIVHLKKIVDLLEDPNCDLPALVMTECQDLLSQIAEKTERIKAKDKLIKELAKQSDVARRLQTMPGVGPMTALAVEAFAPDMAQFSCGRDFAAWLGLVPLQNSTGGKSRLGKMSKMGQVDIRRLLIIGAMSRIIGRARHTIPDDSWLGRKLATRPKMLVSITLANKMARQIWAMITKNEDYRDPALVSAA

SEQ ID NO: 204344 - protein, 343 aa, unidentified
MDHFAGLDVSVKETSLCIVDDAGRIVREVRVASEPEALLGVLTNPAWHFKRIGLEAGPLSQWLFNALAEAGLPVICVETRHMRAVLKAQINKTDRNDARGIARMMRAGLYRPVHVKTLGSQKLRMLLTHRKLLQSKAVAIENDLRATLRNFGLKVGVVGAAKFEARIKELVETLPDLALLVEPLLVVRRVLRDQIGVLHRRLLAIVRDDDVCRRLMTVPGVGPVVALTYRATVDVPSRFRNSKAVGAVFGLTPSQHQSGESNRTGGISRCGDEMVRTMLYEAAQILLMRSTKWSWLKAWAMQIARRRGMKKAIVALARRLAVIMHRIWIDGTEFRWTREAEAA

SEQ ID NO: 204345 - protein, 408 aa, unidentified
MEVLYPRCAGVDVHKDLVVARARCVSEPQVDETRSFATTTAALIELQEWLSAHAVTHVAMEATGVYWKPVWHLLEGHFELVLANAQHIKNVPGRKTDVNDAAWIADLLAHGLIRSSFVPPAPIQELRDLTRTRKQLVREISQHTLRIQKTLEDANLKLSSVLSSVVGSSGRAILNALIAGESDPERLAELAQGTARKKRAALIEALHGRITPHHRRLLKLHLDLIGALEAALAEVDADVGKLLAPIRKSARLLTTMPGISELTAQVVLAEVGVDMRRFPTPAHLLSWATMCPRNDESAGKRRSTRTRQGSPWLKTALVTAAWAAVRAKDTYLQAQFLRLRARRGAKKAILAVAASMLTAIWHMLKDGVEYRDLGADHFSRRNHAQQIQRLLRRLSDLGCEVQLTTQAA

SEQ ID NO: 204346 - protein, 304 aa, unidentified
MFGIGIDVSKATLDVAVHEEQFRQFSNDKRGFLRLIRWLKKWAIKQVVLEASGGYERAALDALYAAGLPVVRINPARARRFAQGTGRAAKTDRLDATVLAQMAHLLPLTRYVPPAPWQQRLAEFGQCRRHLVQMRVSEMQRLRRLADPDLIAIKQRHIAQLSDDLKQLDKAIAEQLEGQPGWKDIGSLKGVGPILISTLACELPELGRLGSKAIASLVGLAPMNRESGTWQGQRRISGGRAVVREALYMAALTAIRYEPRLRAFYACLKAKGKASKVALVAVMRKMLVILNARKRDAEVALGSP

SEQ ID NO: 204347 - protein, 397 aa, unidentified
MYIVGIDIAKRKHEAAVIDGEGAVIIKPFSFTNNCSGYNRLLAMLTKAKLPLDEVSFAMEATGHYWLALFTRLQKEGFRVQVINPVQTNSIRSFYIRQAKTDPRDALLIAEVIRFGHFSESTLHPENIYELRELCRGRHAIVSMQADVKRKVVALLDQVFPEYETAFTNLFGDTSMAILQTCPTPKELSEMPLEELCHLIEVSSHKRFRMAKAQELQALARNSFGFAMAGDVFSTMIRLYAKHLVFLKQQVQEMDRKIAEIMDTLDTPITTITGIGPTLGAYILSEIGDISRFSSAAKLAAYAGIDPTMRQSGEYNGVRNRMSKRGSPYLRHAIWLAASSAVLHDPALKLYFQKKRDEGKPYMASVGHACRKMVSIIYAVMRDNKAYTPCIPNEISA

SEQ ID NO: 204348 - protein, 351 aa, unidentified
MLLIGVDYHPSFQQIAFFDEETGECGERQLSHSDGEAERFYRDQQQRGVRVRVGMEATGYSRWFERLLAELGFELWIGDPAEIKAKRVKKQKTDRKDAQLLLRLMREGNFPRIWVPSPENRDLRQLLWHRHRLVQMRTRIMNQLQALAMNEGRRWKTKLWSERGRAELEKLALAPWASRRRQELLELLDRLHPTIEELTTAAEQEARKRPEVVRLMTHPGVGPLTALAYVLIIGTPERFHRGKQIGTYVGMIPSEDSSAGKQQLGHISKQGNSLLRFLLVEAAQAAARINPEWRRRYTHLATRRHKSIAKVAMGRRLAIRLYWMWRNGCAYSSSLEFGSYVGQPGTGHGVQ

SEQ ID NO: 204349 - protein, 325 aa, unidentified
MQMKASKTRYARVIGVDIASDKIDIHDSHGKLTGELPNTCSAIDNRLAAKLKSVDNVLVICEATGGYEHVLVDSMQQAGIDVAVANPRQVRDFAKGHGYFEKTDSIDAAIIAKFGSDVDVHLAPQRTDAERAFQALVRRRGQVISALQAEQNRLAQTPDKFAKKLIEQSISHWKSQLKTLDEHIAGALAEQAKNDPKIDILQSVPGVATVTTATLVAELPELGSLNRGQIAKLVGVAPLANQSGKSDKQRKAKGGRGQVRNVLYMATLVATRHNPIIKQFYNRLLAKGKLKKVALVASMRKLLTILNDMVRNGKSWRKADQSLSK

SEQ ID NO: 204350 - protein, 362 aa, unidentified
MNRNTGMSAGQIIGLINGLQVVGLDIAKSVFQLHTVDMGTGEIVNIQLKRAKVLEHFSNRQPCLIGIEACGGAHHWARELKALGHCVRLIHAKAVRPFVQGNKTDATDARAIWLAVQQPGTKFVGVKTQQQQATLTLHRQRELLMKIKTMQSNALRGLLYEFGATFAKGKRALFSEIEAALESLVQDIPQYVADSLREQVQRIKQVEQDIQTIEQRLAQQLKSEPSMKRVAQIPGVGLLTATAAIATMGEASVFKSGREFCAWLGLVPKQRGTGGKVQLLGVSKRGDSYLRTLLIHGARSVLTHSKQPGPWLEQIKERRPANVVIVAQAAKMARTIWAVTAKEQDYQRGYQSVRPCMNVQAA

SEQ ID NO: 204351 - protein, 347 aa, unidentified
MSITMIGLDTAKSVFHVHGVNEAGKAELKRKLRRSELIPFFEKQERCTVVMEACGAAHHWARILTGLGHTVKLIAPEAVKPFVKKGKKNDPADAKAICEAASRPDVKFVPVKSVEQQGILALHAVRSQLVKQQTMTANAMRGLATEFGLTVPKGMSKLDELMALVDSDETLPTQARQAIRGLHDHCLDLHEAIVTFEAEIVAHARKDETARRLATIPGIGPITASLIAATVGDISLFKTARDFAAWLGLVPRQNSTGGKTRLGRITKAGNREIRKLLVLGATSMVYRADGWNSAVGAWLRNVLQRRPVRLVTVALANKMARIAWAVMTRKEVYRPKGGVAAAVTAAA

SEQ ID NO: 204352 - protein, 326 aa, unidentified
MKKNIFIGIDVSKATLDICIKCDQSQSSIVINNNTKDIKKFFKQFTQQNAIVAMENTGRYNWALYEVLAGYEFIVYVIPPLHLKKSTGLVRGKNDKIDAIRITEFICKNHDTLTPWKQPALAIQKLKVLLTERSYRIKTKRQLLNMQHDYALMQSMQLDKQMLKMNKKLILEIEKQIKTLNDQMANIIQCNEQLSKQAQLMQSVPGVGKILCWTMLAKTNGFTSITTARKMACYSGVAPFDCQSGTSIKHKPHVSVLADKTLKKILHLAAMSAIRLKNDLSEYYLRKVSEGKNKMSVLNAVRNKIIHRIYAVIKNQTVYKNNIAMS

SEQ ID NO: 204353 - protein, 340 aa, unidentified
MQVTTIGVDLAKNVFQVHGITASEEVVFNKPLRRTQFLPFFAKLDPCLIGMESCSSAHHWARELTALGHEVRLIPPMYVKPYVKRGKFDAIDAEAICEAVTRPTMRFVATKTVEQQSLLSLHRARDLLVRQRTQLINNLRGLVAEFGIFIPKGLARVIGFAEDITLGEVLDLPDIANEVIRNLSEQLMALHKQVRWYEERLKQVAKEDARVRLLRTIPGVGAVTASAIIASIGDGHQFKNGREFAAWLGLTPANKSSGGKEKLGRITKMGDQYLRSLLVVGMTSLVRQTRSHPERASKWLTSLLERKPARVATVAMANKTARIVWAVLTRNEPYSPRTVA

SEQ ID NO: 204354 - protein, 341 aa, unidentified
MNIKRVGIDLAKQVFQVHGVDYQDKVVLRKQLRRNQLLSFFATLPPCLIGMEACGGAHHWARELQKLGHTVKLIAPQFVKPYVKSNKNDANDAEAICEAVDRPTMRFVTIKTIAQQDLQAIHRIRSELVRQRTAKVNQIRGFLAEYGLVVGRQVATLRRALPELLENAENGLSFDFRGLLEDLRQDLIRLDERVAEMDKKVHTLAHSMPAAKRLQSIPGIGPISATAIVCAVGDGKQFKRGRDLAAWLGLTPRQQSSGGKDRLLGISKRGDTYLRTLLIQGAKSVLKVVDKKTDPRSLWLQNLCARKHKNIAAVALANKNARIAWALLSKETSYLPEGKPA

SEQ ID NO: 204355 - protein, 315 aa, unidentified
MPNLYANFIGIDVSKNKLDVYFTKNKKSFCVSNDKQGIKSLLQNFTPSKDLLVLIDLTGGYEACAVDAFFKAGFNVHRAQGRKVKNFVRSYGQSAKTDKIDALMLTVYGAKMQETLRLHQPHDRILSQLVSRREDLKDMLLKEKNRKEHFNNKITKRSLDNTISYLQKEIKSIEQEINNLIDQNKELKDKAKVINSVKSVGDKTTMTLLAALPELGHANRRQIAALAGLAPYANDSGSSSKKRKTSVGRPVVKRMLFMCAIVAIVNDPHLKAFYEKLRSKGKMKMVAIVAVMRKLLIIINNACKHFYLQRTFTSA

SEQ ID NO: 204356 - protein, 366 aa, unidentified
MVILGIDAHKRTHTVVAIDGNGRRLASKTFGTTTADHLALLCWADRLDPTGDQIGEQAQPRQWAVEDCRHLSRRLERDLLAAGQHLVRVPPKLMAHVRDSARTFGKSDPIDALAVARAVLREPGLPTARLDGRDREVRLLVDHREALVAERTRIINRVRWYLHELDPSWDPTPRSLDRVSAYDKITQRLREHSTSDPTAACGSATVIVRLAEQLVEHARALTAQINELATELADLVEALAPTLLAIPGCGALTAAKIVGETAGIDRFVSKDAYARHNGTAPLPVWSSNKARHRLSRTGNRQLNAALHRIALTQARCHADAKTLITRRKNGGDSGLEALRVLKRHLSDVVYRALRADLQPKIITVAA

SEQ ID NO: 204357 - protein, 369 aa, unidentified
MSHAKLTVTALARPPRELREQARGRARSGAAIVESLSKPERLEGSESRIERKEGSNNMEQQFVGIDVSKAWLDTEAIPQSQSMRYGNDAAGIVALVEAMQAATPALIVVEATGGYETAVASALSAAGLPVVVVNPKQVRDFAKAMGILAKNDRIDARVLALFGQRIRPQLRPLPGVEQRELAELLDRRSQLVVMRAQERARLATALPVAKASLVEHIHWLDERLRQLDIELTARLRTSAAWKVKVDLLKGVPGIGKVTIFTLLARLPELGQLNRGTIAALAGVAPFDDDSGKRRGQRFIRGGRAEVRNVLYMAALTASQHNAVIKAFFARLTAAGKPFKVAITACMRKLLTILNAMLKNNESWHCPVTT

SEQ ID NO: 204358 - protein, 415 aa, unidentified
MEELGLRALHRRVAGIDVHRMLHVVTVLIEQPDGSMQRQTREFGGFRRDCRALAAWLAELHVELVVMESTGIYWKSVFTHLENAGITAWVVNAHRIKHVPGRKTDMADSEWLAVLARFGLVKASFIPPRDLRELRLVSRYRRKLSAMCASEINRLHKILDDGGIKLGGVVSDINGVSARAMVSALIAGQPIEQMLGLARGKLQQKREELGASLDGDLSARHLFVLGHIEAHIQTLQRELAEIDRYLLAAMRPYAWAHQLLQTIPGIDEIAAALIVIEIGDDMARFGRARSLACWAALSPGNNESAGKRKSGRTGHGNSTIRFILCECANAARMTKSTLAAKYRSLMVRKSHKKAIIAVAHKMIRLIFVMLSRRQPYLDQGIDYAAMSAKKNAPRWIRQLKAIGRWPSPKSAAASA

SEQ ID NO: 204359 - protein, 355 aa, unidentified
MQKYKTSFKGQNIYVGIDVHLKTWHVTTLTESGYKYSFAQHSDAKELFDRLNKKFPEAHFRSAYEAGFCGFSVHYALSEQGFENLVVNAGDIPTTGKEKVMKTDAVDSEKIAWALKRGQLTGIYIKDKSFMDDTNLMRLRQRFIKDLSRQKNRLKHLLYTQGVTYPERFTRSGTHWSCSFMKWLREEVVLLSGEKRTLTLLCDHVDNTRKAILEVTREIRRLSRDDKYKVNFNLLTSVPGFGLITSMSLLTELDNNPTRFPNERKFVAILGLIPTCHDSGEKKVSGEKTFRGNKHLGPLIVEASWIAIQRDYQLGAYYTKCCQSMKPQMAIIKVARRLACRAYAVMKTKKAYVLQ

SEQ ID NO: 204360 - protein, 373 aa, unidentified
MNTIYIGVDFHARQQTICYLTTETGELVTTALKHEPKTAVRTFYEQFSGEVIVGLEASGYSPWFERLLEELGHQVWLGDATEIRRRARWRQKNDRRDAELILDLMLHDEFPRLHRPSLQSREVMRMLRYRQKLIKMRTMSKNSLQSLALQSGIARRGRLFTREGKAELDAAVMSPAMEWQRAHWWQLLEALNQQALEAMTWLKGAGQNDVSIARLRTHPGIGLLTSLCLVHTLQPVARFRNTRKVAAYAGFDPMERSSAERKHFLGISKAGSRVLRYLLVEAANTAVRKDEELKRFYQRLAQRRGRPKAKVAAARKLLIRAYIMMRDEIDYAEFRRRAVAARLARLRQGPQIPAALIGQPASTGRQEPPARGK

SEQ ID NO: 204361 - protein, 344 aa, unidentified
MMTQFVGLDVSQKMTAVCVVDNAGRRVWRGQCPTAPEQIAAMVHQHAGDDARIGIETGAMTPWLVHELRALGLEVICLDARHARAALKMQINKTDQNDAEGLAQIVRTGWFRSVHVKSFDSHRARALLGARAQLVGMTTRLSNHLRGVLKTFGLLPGAMRGLRFDRKVEVLLENRSDVAPIVRPMLVAWRQLREQISAFDKAIRVLVRSNSPCRLLMSVPGIGVLSALAYVSTIEDLARFSQSRSVGAHLGLTPRQYQSGDVDRSGRISKCGDTLARTLLYEAAVVIMTRVKKASELKDWALAIAKRSGVGKARVALARKLAVILHSVWRSGKPFRWSEVAIAA

SEQ ID NO: 204362 - protein, 440 aa, unidentified
MKEKKSMAFPIIYPNAAGIDISSKEHYVAVNPGSSEEPIKAFGSYTEDLKAIALWLRQCKVDTVAMEATGIYWVSLFLILEEAGFDVVLVTAKHVKNVRGKKTDVSDAEWIRQLHSCGLLSASFQPDDFTRKLRTYMRHRKNLIEMAATHIRMMHKALEQMNIKLQHVIADITGKSGQEIIRAIISGERNPVKLAAFCDGRIRANKKESIIKSLEGVWKEEHIFELEQSFMLYHVYHEKIRECDKQIEKHLREKSGINTKDEERIKVRSNKNNLNFDAREILQSITGTDLSEIFGITETNAVELISEVGLNMEKWPTVKHFTSWLNLAPNNKISGGKLLSSRIPKKKNHAGQIFKMAAFAVQRSDNWLAKFFQRIKSKRGTQKAVVATARKIAVIFYKLLREKIEFNPVPVEKYMDGFKQYQIKKLRRHALTLGYQLVDV

SEQ ID NO: 204363 - protein, 410 aa, unidentified
MELLHRRCCGLDVHKETVVACLRLVSDGKVTTEVRTFQTTTADLLRLSEWLAANDCTHVAMEATGVYWKPVWHILDDGEFELVLANAAHVKNVPGRKTDVNDAMWLAELLAHGLIRASFVPDAQTQEMRNLLRTRKQLVREQSSHVLRVQKTLEDANIKLDSVLSDLMGKSGRAMIEALITGETNPAKLASLADRRVKASPEEFREALRGRVTKHHRFLLRLHLNQIDALDAATVTVDAQVEANLGPFRTAVDLIISIPGIKNLGAHVIVSEIGIDMSRFPSDAHLISWAGICPRNDESAGKRRSNRLRKGAPWLKTTLVQCSWAAIKKKNSYLQAQYYRIKARRGPKKAIMAVAASILTAIYHMLKDGTMYQDLGCNHFDRRSADKQKHRLVKRLADLGYAVEIKPITA

SEQ ID NO: 204364 - protein, 344 aa, unidentified
MSTIKVLGIDLGKSCFHVIGRDFSDNQVIRKKLSRSALLNYLHQLTPCTIAFEACGGAHWPGRQCEAMGHTVRLIPPQYVKPFVKSNKNDFIDAEAICEASTRPNMRFVSVKSEDAQVISAIHKARHGYIKDRTACMSRIGALLLEFGVALPTGHSVMKQLFNWLAQQKQSIPGLLMQEIAELHDYYLLLNENIDRQDKKLKQLVETNPIGQLLKTIPGIGDMTASLCIANISSATDFKSGRNMAAWLGLVPAQYSTGGKPKLLGISKRGNKELRTLFIHAARAVMSRPDKTGKIYGEWLINLRATKPFNVVTVALANKLARIAWAVMKTKQAFNSNALAPGLQ

SEQ ID NO: 204365 - protein, 349 aa, unidentified
MKQVTYVGLDVHKNSITAVLGPALTEPELMKVKNESKGWDQLAKRLEGYEVRSVYEASSCGFEVYDEMAARGWNVVVVAPTLMPKSVKSRKRKTDREDALKLRSDLVAYCEGGSLLPTVWIPPEIVRQDRELVRRRLAIGGRLTRVKSSIKSLLQTHKVRPDREFKSKWSLEYRVWLEGLHADESLLAGAVKIALASMMRELTFLMGEGKALDRELKRLAGEVRHKSQVEAVREVAGIGILTALTFLTELGDVTRFQNRKQVGSYLGLTPTSHESGEADDRKGHITKMGPARIRKVLNQAAWCGVRRDPRRGARFAQVSERIGPNKAIVGEMRRLGIELWHRAMEAVPA

SEQ ID NO: 204366 - protein, 394 aa, unidentified
MFLVGIDIGKHKHSFCIINKETGESIVKPKFFDNNKVGFEELLSSFKGLPKKDILIGMEDTGHYHFALLKFLLDKKYQVALINPVTTDLTRKLSGSHTKTDKLDTLTICDVLTSNQRTKPYRISKVDRFDLYEQKQLTREHHNLKEQSNVLKNRLQKSIDIVFPEFNSLFKSMYGVVYMNILKEFGSADALAHSDIRTIRKCFDFKGRGKRIELTAKELKNAAINSIGFPSIAEVVQIKHLVNQIELVEEQIEELDKKIEEFSIANNSPILSIPGISHFSGTSILAELGDIHNYSKPSQIIKFAGVAPLTYESSQFMAKHTAITKKGSTYLRKTLYQIILPVINNNKVFKDYYNLKLSQGKGYRCAQGHCVRKLLRVIYQLLSTNTQFDPALLV

SEQ ID NO: 204367 - protein, 438 aa, unidentified
MSNKVFFNLDDLFISVGIDVGADFSWMSIALPNQQFVGKPYKILHNSIDSLTTAVSKIKEAEELYSLESRIFLESTGIYHYPLFCYLRDKGFNCSVINPIITKNSTNINIRKVHNDRFDSKKAALVGLKPDLKVSLMPSDLALNCRNLCREYYDLMDNRSAYVNKLQGELRMAFPQYLGIFSKVTVNTSLTLLETYTSPSAFLKADKQEIIDIIKSTARFGLTYAQNKYNAIIQAATDANQFGYIIDSNIKRIRLYISFIRKYDEEINNILESLHELVDANEDADFVKQIHLIETFKGAGFLSAVSIMGEIGDFSAFSKPKQLFAYFGLDPAVKQSGKFEGTKVQMSKRGSAIARRVIHTLTLQSISISRNGEAKNPVLREYYLKKCDSKPKLVAMGAVSHKVCNMIFAILRDNKPFKIIAPQEHIKQYNAAKCDIAA

SEQ ID NO: 204368 - protein, 309 aa, unidentified
MSDTLSQTIGIDISKATLDAHAYPAGRNRQFANTASGHKALIAWLGQWSVERVAYEATGAYHRELEQALADLPCVKLNPARARRFAQAAGTLAKTDRIDAVMLARMASTMQPAINLEQARLAELISARDGLMRDRTALKNQEKNLTIPLLKRQHKQRLNQIDQHITALDVELAASIAADPQLARRHEIISSIAGLGPRTANQLVATMPELGSLDNKQAASLAGLAPVARQSGQWKGRSFIQGGRANVRRALYMPALVEARFNPDLREKYQHLIASGKPAKIAIVAVMRKLLVTANALVKADRMWVEKHA

SEQ ID NO: 204369 - protein, 311 aa, unidentified
MTNDTIGVDISKATLDVHRLSDGLTAHFKNNKSGFLKLKYWLSDTQVTRIVYEPTGAYHRDFEMSLGVTYPMVKVNPLHARRFAQARGVRAKTDRVDAQMLAIMGDSFSLEPQLLASKKQRALKELQTLRMALLKDRTRNLNRQKPLKLAISKRQIQAYLNLIERQLKDVNASIQKLLSDDPTMACARDILCSIPELSKVSAAALLIEMPELGTLSNKQAASLAGLAPMSRQSGKWNGKAFIQGGRKHLRNALYMPALVAARHNPDLKAKYTAFVAAGKPKKVALSALMRKLIILANILIKQDRKWCENMT

SEQ ID NO: 204370 - protein, 381 aa, unidentified
MNNDSIIFIGLDMHKSFIQVAVLQEQRGATPEHLGRIKSNKSALIKLTQQLQSKYPKATLHFVYEAGPCGYWTYRLLTSLGHCCCVIAPSLIPKKSGDRVKTDKRDAAKLAKLLKAEELTPIYVPEAEDEAIRDLSRARETAMKDLKDAKFQLKGFLLRNNIQATVNDNWSKKHLRWLTDLILPHHSQQIVLQEMIITINERLQRLDNELLHQVKNWRYYPVVKAIQAMRGVRLLVALGTIAELGDLRRFDHPRKLMAYLGLVPTENSSGGKTRRGSLTKCGNSRARRLLVEGAHTYKHKANISVELQLRQEGLPKEIVDIAWQAQQRLCRRYQRLLQKGKHRNVVVVAIAREMSAYIWAIAREVVISDVDPRTRIARLPA

SEQ ID NO: 204371 - protein, 450 aa, unidentified
MDPGFLEHLNLLPRAIIGPGARSLEFFYWDPTPATCQEEAMEVLYSRCCGLDVHKETVVACLRLVIDGKVVKEVRTFSTTTAGLMALSEWLAENECTHIAMEATGVYWKPVWHILSDSDFELVLANAAHVKNVPGRKTDVKDADWVADLLAHGLIRASFVPDSQTQEMRTLLRTRKQLVREKSSHILRIQKTLEDANIKLDSVISDVMGLSGRKMIEALIAGERSPSKLARLADHRVRASQGTLREALHGHVKEHHRFLLRLHLNQIDALDAAIAEIDAQVEAGIAPFRNAVEQVTSIPGVKNLGAQTIISEIGIDMNRFATDANLISWASICPRSDESAGKRRSTRIRKGSPWLKTTLVQCAWAAARTKGSYLQAQFHRIRARRGPKKAIIAVAASILTAIYHMLKDGTMYHDLGPNYFDSRSKERQKNRLVKRLADLGYAVELAPLAS

SEQ ID NO: 204372 - protein, 424 aa, unidentified
MDSKDQNSWEQHRYYMGLDWAKQEHAIAVVDGNGLIMAETTIKHTVEGWHRLREKLVDLAGPDLSLVAATIETNRGPVVERLLELGCTVYPINPNAAQCYRSRKAPSGSKTDRLDALSFADALRTDGHGWRPLNPEDPKTQELRLLCRDEMSLIEQRTTLVNQLQQALHEYYPAALEAFDDWTSPSSWAFVERFPTPQALKKAGKRHWEKFLHTHRLYRPETYQKRLEIFAGATEFCGSHAVTNAKSMLAVSLAKQLRLLEQQLKAYREHIDKLFQEHPDYTIFDSLPGIGEKLGPRLLSECGEDRDRFEDHEALQCYAGTAPVSFQSGQINRVRFRYACNKNLRTAVHLWANLSRKKCAWAQVYYHQKRLEGKSHACALRCLGQRWLKILWKMWQTKTPYDEQMHTRNQIKHGSWVLALTASK

SEQ ID NO: 204373 - protein, 408 aa, unidentified
MDVLYQRCAGLDVHKDTVVACARIMTRGEVARTVRSFATTTSGLLVLADWLSEHGCTHVAMEATGVYWKPVWHVLEESFALILANAAHVKNVPGRKTDVNDATWLGELLAHGPIRASFVPERPTQELRALLRTRKQLVREQVSHVQRVHKTLEDANIKLASVLSDIVGMSGRAMLRALIAGETDPVVLAGLAHRRVKAGRQELVEALRGDVRPHHRFLLALHLRQIDGLDEAIMAVDRQIDEQLAPFRRAVELLTSIPGVSALSACSIVAEIGTDMARFADAGHLVSWAGMCPRNDESAGKRRSTRLRRGNPWLKTVLVQCAWAASRAKLTYLQAQFHRLRARRGAKKAICAVAASILTAVYHMLRDGTLYRDLGPNHLRPASPDHLARKLVRTLNNLGFHVELTAAA

SEQ ID NO: 204374 - protein, 310 aa, unidentified
MLHPDVIGCDIAKAHLDFFDSGLERHFRIDNTPAAISAWLDGLDGRGVHIVFEATGRYDRQLRIALETRELPYSRVNPARARDFAKAIGLLAKTDAIDARLLARMGQSLPLSTQAPDDPARHVLARLHTRRDQLVAMRQQERTRLHETEGIERDSAESHMAWLDAEVARIEMACRDVLKAEKTLQEQEARLRSIPGIGPVAALTLIAHMPELGNRSAKAIAALAGLAPFNVDSGTSRGKRHIRGGRKRIRDALYMAALTASRMPRAFKSHADQMKEAGKPFKVVIIALARKLLAIANAIIRDKTTFRRTT

SEQ ID NO: 204375 - protein, 344 aa, unidentified
MDHFAGLDVSVKETSICIVDDTGKIVREVRAASEPEGLLVVLKNPAYNFKRIGLEAGPLSQWLFGALAEAELPVVCVETRHMQAVLKAQINKTDRNDARGIAQMMRVGLYRPVHVKTIRSQKLRMLLTHRQLLQSKAIAIENDLRATLRNFGLKVGMVGKVRFEARIKELVEKLPDLAALVEPLLIVRRVLREQIVILHRRLLAVVRDDEVCRRLMTVPGVGPVVSLTYRVTVDAPARFRKSKAVGAVFGLTCSKYQSGEIDRSGRISRCGDEMMRVMLYEAAQSMLRSKKWSWLKAWAMQIARRRGMKKAIVALARRLAVIMHRIWVDGTEFRWTREQAPAAA

SEQ ID NO: 204376 - protein, 319 aa, unidentified
MHCIGVDVSKQELVTYDGVSERVFPNTPGLAAFRRFVEGASEAIIVFEPTSTYSRRLETFCRAESIACCQLNPRVVPHYRQVGKGRSKTDKTDAELLYRYGIERGQEEAEQLTSDVLAQAVAAHLACYRVVQKARVAYQGLLEALEHDPATGKSLLSGLRREIEAFKTRETRRIAQAQAIVVKDEDAARRLDALLSIPGIGPITALTLLALFRKYPNVNRQQLVALSGLDPIQVQSGTSVHGKSRISKRGNREVRKRLYEATLSAARYNPNIQAIYRRLKDQGKPEKVVRTAAARKLLLLAHAIYESGESFRAPAEEVT

SEQ ID NO: 204377 - protein, 319 aa, unidentified
MMAALAAGIDAGKTYLDIGIEPSRKHFRVANAAAGIEDAIARLQQAGVGKVVLEAIGPFAQAAVTRLVAAGFEVGLVNPRRIKAFREAEGRRAKTDRLDARLIARFAVRMTDALRPVPTESQQALKALATRRRQLVEMIAMEKTRLKQAADPLLCESHRTAIAALSAERARIEADIDARLAADAAATRKRAILLSVPGFGPAVATTLITDLPELGTLDRRAIASLAGLAPHPTQSGTSIGRNQIGGGRPCVRTALYMAGLVAGRCNPRFRTEYQAMRAEGKPAKVAIIATARKLLVLANSLVKNDRLYDPAHVAANVTH

SEQ ID NO: 204378 - protein, 371 aa, unidentified
MKKNITFVGLDVHKATIDVALADVGRSGDVRFYGTIGGDLESFHKVVRKLQSRGNELRFVYEAGPCGYDIYRSLTKHGFDCTVVAPSMIPRKSGDRIKNDRRDAQNLARLHRSGELTAVYVPTEEDEAMRDLSRAREDAVRALRVARQVLLAFLLRHGYRYSGRTHWTRAHKNWIADIKMPHRAQQIALQEYVHTAQEQLERVDRLTHQIRELLPQWGQAPLVTALQALRGVSLLVAVTTVAELGDLTRFQSAKQLMAYLGLVPSEHSSGGTIRRGGITKTGNGHVRKALTEAAHAYCHPARESRALLKRLDGLPPEVRQIAWKAQVRLCGRFRKLLGYGKNKKTVVIATARELSAFMWAIANAVTPKPTE

SEQ ID NO: 204379 - protein, 344 aa, unidentified
MSEAFIIGLDIAKYVFHAHGVDERGRAIFSKRISRKKLLDFFAAQPSCTVALEACGGAHHWARQLSQLGHEVRLIPPAYVKPFVKRQKNDAIDAEAICEAAQRPNMRFVAVKSEQQQAAGLVFRTRDLLVRQRTQLINAIRGHLTEFGWIAPKGPSHVAMLAGLIEEEEMASSLPEAARAMLRLMSDLLADLDGKIADLDKEIARRAREDEVSRRLMTVPGIGPISATAIAALAPPAETFAKGRDFAAWLGLTPLQRSTGGKHKLGSTSKMGERTLRRLLIIGSSAVVLQASKRGAPKGSWLEQMLARKPRMLVTVALANKTARIIWALLVKKENYRAPVVAKA

SEQ ID NO: 204380 - protein, 338 aa, unidentified
MELYAGIDLHSNNSFLVVLQSDDRIVYQKRLPNVIDRIVNELAPFKDKLVGVVVESTYNWYWLIDGLEAVGHKVSLANTTAIQQYNGLKQTNDKTDARWLAKLLQLNILPTGYIYPKEKRGIRDLLRKRMQMVQQRTLHLLSLQTLIERNTSIQLKANEIKKLTEEDLKKYFSDETIILAAKSNLLVMQCINEQVNATEKAVLKQARLNEAYEKLLTVDGIGKILALTIMMETGEINRFRQVGNYASYCRCVSSKRISNGKKKGENNRKNGNRYLSWAYVEAANFAIRFNPIIKKYYQKKKAKTSNVVAIKTVAHKLARACFYILKDGVDFDVGKSFR

SEQ ID NO: 204381 - protein, 397 aa, unidentified
MYLNIGIDVSKNKHDACIVNENGEQIGKFMKLTNTKTSLDKFLEQIKIISEKHGAEVRIGLEATGIYWYSLFSKISDDHKISIYNPTQINAFAKVNVRGSKTDKIDAKTIANMLRFGNAPQTDYSDRQRLELREYVRFHWKLTNKKTNLKKRFKRNLHLVFPGYDQVFKNVFTKTSREILSQSPTPDDILEMGEAKLLELMKKASKNHIDKEKARELMAKAEDTIPSEILKESSLFELQIMMDMIENIEKHLDSLENRIFAIWDKVKDKHYIQTIPGISEFRAAMIWAEIGDIENFKHPDQIVAFAGLDPKVRKSANREVIGGPNKRGSSTLRWALGWAVQESKNVNPVLAPYFEKKIAEGKHYNTARCAASKKLIRIIWSVEKNKKPFQIPSNLQS

SEQ ID NO: 204382 - protein, 303 aa, unidentified
MEVLYPCCCGLDVHKKSITACVLWAGEKGKSRLEKRRFGTFTQDLLRLADWLRECGVTHVAMESTGVYWKPVWNILEGQFEVLLVNAQHIKAVPGRKTDQKDSAWIADLLQHGLLRGSFVPPRPTRELRDLTRYRVSLTQEINRIANRVQKVLEDANIKLASVATNSLGASGRAMLEAMLVGEEDATRLAEMSKGLLRNKIPQLRLALEGRMNEHHRFLLRQLYDHLLFTEGKLREIEQEIARRMRPFEEEVARLCTIPGVDRVTAHGLLAEIGLNMDQFPSAAHLASWACLCPGNFESAGSG

SEQ ID NO: 204383 - protein, 345 aa, unidentified
MSIVGGLDIHRKQLTFDYLDTATGEVKRGQIAPADRAHLRAWLARFASRDDVAFAVEGCTGWRYVAEELAAAGVAAHLGEPADTAAARGRKRHAKTDKTDSRHLRTLLAEGRLPECWVPPAQILECRALLETYHDLRREHTAWVQRIHAVFFHQGAPALGEGALHTEQGLAALQVAAAADLSPAGQLQVATALGVLAAVEARMEVLRAQLRDAARHLTGAKVLAARLYGVGPVTALALTCWLAGEGRFSSSRKAVRFAGLDVTVWSSDSKGPPGRLSRQGPPMLRWAVYEAGKTHARASAPDHGYYAAVKDRKNSKRAALSEARKIVRQACHILAELGDDALTAA

SEQ ID NO: 204384 - protein, 358 aa, unidentified
MQRNKKSFNGQKIFIGIDVHRRSWSVTTITESGSEHSHAQKPGAQELFDFLTKRYPHAEYHAVYEAGFTGMATYYALSDVGIKCIAIHPADVPTTQRDAVMKSDKVDSSKLARALRNGLLNGIYIRPKEFLDDRGIVRFRRMLIANLNAYKVRVKHLLHANGIELPQEFDRLKGSCWNGAFIKWLKEDVTLLSPTKETLGLILNQVERLRRDVLHVTRKIRELAATPKYEKSYNLLISIPGIGIVTAMTLLTELCEIKRFSGHRQFASYLGLIPTCHSSGERISNGPMTFRGNAHIKNMLIEAAWVAIRRDDSIGLAYTNLRRRMEPQKAIVRIAHKLSNIIFAVLKKEKGYAPQLDG

SEQ ID NO: 204385 - protein, 369 aa, unidentified
MKKQTKTNPSVVLTSTAAVVSGFTIGLDLGDRSHYVCVLDATGQIIHEGPMLNDRAALALLLTQYPAATVALEAGTHSPWISRYLTGLGATVIVANPRKLHAISRNERKCDRRDAVMLARLARADAALLHPLQHGSAQAQHDLLGLKLRDSLVRTRVNLINTVRFTLKSLGHGVSNPSSEAFHKSILTEVPADCLPVVAPVLAVLTLLTEQIKTLERDLVARSKKEYPVTQRLQQIAGVGPLTALCFVLKIGEPTRFGRSRDVGPYLGLCPRRDQSGGTDKQLRISKCGDGLLRRLLVSAAHYILGPFGPACALRAYGQHLVGTSAREKKRAVVAVARKLAVLLLSLWKHGTDYEPRVPAAPALVLTPA

SEQ ID NO: 204386 - protein, 325 aa, unidentified
MEKLYAGIDIHKEKLAGCIMDRDGNITREHTFPSSKKAVERFLCNIPSSGITIAIEACGMWRGTYKILTDMGYEVKLANPKKTHDIACKKKTDRVDAKILADLLRTKYLPEVWIPDEQTLKFRDLARHKSNLTRLKTQVQCKIKSYLLRKGVKYGKLWNEKTLSTLAQEDQDIQNLINVYNSLKKEEKEVMKRIKQVARNRKETTLLMSIPGIAEFSSLMILAEIGDIQRFPSPKELVSYAGLCRGIYQSASTERSVRNTAVNKWLKWIIYECSGRAIMLDQRFQQYFYPIQKRKGGNTARRATARKMLTIIWYMLTNKETYRAS

SEQ ID NO: 204387 - protein, 367 aa, unidentified
MSRMKRLAVQQLDVSKDYLVIGLDLAKTDTAVIAITTDGELYAIDRLKYSDLLNQARQLGSTVFAMEPCNGMTYLVHELEELGHECRVINGEAVKDYVKSHFAGQKNDLNDAQAIAFLAQDEMLKFIRVKAKSEMTMQTLQVVRQQLIKQRTCSVVCIKGICQNYGLIISKSIMSEAKIRPIIEETQKLPDEIKEPLKRLLRNAARFTIDIKQIDKAIEQGLKGNETAERLLEVPGLGPQCVSRLLTTIGDINRFEGPKNLAAYYGLVPRSHTTGHNEKMGKITKHGDRLMRAFLVQGAHAVLIQHTKGRLPKSALKKWIDKKLSAGMPCSKLSIALAAKLLRIAFAVLKYKKKFDIKKAGVARCSL

SEQ ID NO: 204388 - protein, 369 aa, unidentified
MQTLVAMASVMFQELEEVPMTMVGGLDVHRQQITFDYVDDDGLVHWGQIRPATRKTLRGWLAEHFRDGDADFALEGCTGWRYVSEELAAAGLGVHLGDPAETAALRGRKKRAKTDRADARLLRTLLVEGRFPESWIPPAHVVEVRTLGRLYCTLMDERRAWQQRIHAQVFHQGCPPIRALLTRAGREALAGAELSAAGRQYVDTALRRIDELSAEIDPLRTQLISFARRQPGCRALQRHYGVGWLCAVIIWAEIGDARRFSSSDQLVRFAGLDVTVYSSDAKRAPGHLSRQGSPELRWAAFEAAKSAARRGSPDHGYYHKLAAKKDGHNGKNPTLAVERKILRRCYHTLRELGDAALALPDIRPQEVAA

SEQ ID NO: 204389 - protein, 361 aa, unidentified
MRIIGCDLHARQQTLAMLETTTGEVVNRTLLHEGNHVREFYSTLSRPVLVGIEATGSTQWFLRLLDELGIEYQVGHPATIRAAEPRMQKHDRRDAVLILRLLAENRFPAIWLPSKELVDLRALVLHRHQWVRMRTRVQNALQAIALANGLRRGPGLWSRDGQQKIASLPLMPHTADRRNALQAMYQKMESEIENLTQQVADQAFHRSGAQLLMTHPGVGPVTALATDVFLGDPKRFVDGKALASYVGIIPREYSSGARQRFGGVTKQGSPLLRFLWGEAGAHAARRDPELKRFYRRKVVQKGLGKARVAVARKLGIRLWIMLRDGIDYAEFCRRGQKQQSGAACAGMPETGFGANRHRPVE

SEQ ID NO: 204390 - protein, 351 aa, unidentified
MNKEIISYRGKKVYVGIDVHKKTYSVTLICGTDVVARDTMQASPDGLGRYLKKRFLGAQIFSVYEAGFSGFGLHRKLVELGIRNIVINAASLQTAANDKVKTDKRDSKKLAEQLKDGRLKGIYIPSTTEELKRVLTRTREQIVRHRAKVATQIKSKLHYFGLIECDGDNKPMSAAYLKRIEEQKLPAELVYCLRLLGEQWKFLTMKLKEIADKITEQAKGDEELEKVYQSVPGVGNISARVLSNELGNLAERFHNERSVFSFTGLTPGEHSSGENVYKGNISRQGSSRIRKYLTEIAWRAIGKDDALEEVFNRIAKTRGKKRAIVAIARKIIGRIRACFRLGCLYQVGVYA

SEQ ID NO: 204391 - protein, 316 aa, unidentified
MEISSEIIGIDVSKARLDVAMYPSGKRQSLVHDKTVIKELVKGLAKVKPTLIVLEASGGLERQVTRALASAELPVVVVNPRQVRDFAKATGQLAKTDSIDAWVLARFGDAVRPALRPLPEEATLEIRALTARRRQLVEMTVAEKNRLARASKSIRKGIEAHIAWLEQQLERADNDLDRSIRQSPVWKEQEELLRSVPSIGPTTSRVLLAELPELGTLNRKQISALVGVAPFNRDSGTLKGRRMIWGGRATVRSTLYMATLVATRFNPVIRDFYKRLRSKGKAAKVALIACMRKLLTILNSMIKHKTRWSETFLQIP

SEQ ID NO: 204392 - protein, 360 aa, unidentified
MTGTVTWAGLDVHARSIHAAVVDARSGELVRRHFGGETEAVVAWLAQLPGPLRVCYEAGPTGYGLARACAAAGLCCEVIAPSKTPRASGDRIKSDRKDAELLVRLLMAGSLTPVRVPAPELEAVRDLVRVRAGLRDDLSRERQRTSKMLLRYGRVYPGKSCWTRAHRLWLADQRWPYPAQELAWCDHLAAVDGLAARRAAIDEQLSLLMHADFLWPTVARLRCFRGVDSLTALALHVEVGDWARFVRPAQLSAWLGLVPTLSQSGESLRRGGITKTGSRHARRLLVESAWHYARPPRLGVTLDRRQAGQPAHILQIAWRAQCRLHRLSTRLRGAGKPANVVTVAVARELACFLWAAAVAA

SEQ ID NO: 204393 - protein, 344 aa, unidentified
MRKYFVGLDVHWKHTNICILDARGKKVKRMTVRGKWPKVAEELRKLRGKLFVCYEASCGYGYLYELFNAVAQRVVVAHPGQLRLIFRSKRKKDRVDAEKLAKLLFLDEVPTVHVPSRNVRAWRQLIEYRIRLVNKRTRAKNSCRALLRSLGIRVPQRLDLWTRRGMRWLHALELPDAMHALRRDMLLEEIEMFNEQIARSEKALKQFSTGNPAVELLMTIPGVGLRTAETVVAYLDDPSRFRRNKLVGAYLGLVPCQDQSGNTNRLGHITREGPASVRRMLCEATWQAIRYSPTTQRYFERIAQGNKDRRKIAIVATAHYLARVMLAMLRTGEAWRETEPKRAA

SEQ ID NO: 204394 - protein, 353 aa, unidentified
MKKVIMCSADVHEKNISVEIAVHRETPMVKDYPYAVKGRQKLLSDLKTLAEKNQADRIVVVYEASSLGYGFYDDCQAAGVECHVLAPTRMAKSAQDRKRKSDRWDAKKMMELLRGHVLAGNELPSVWVPDHPLRDDRELVRTRIDIGEKKSAVKAQVQMLLKRTRAKRPPECKNWTLAYRAWLKMVELPSGTRTALDSLLRQLHHLEEESDQMDVGIETLSQTPRYLKLVEALQKVKGIGVLAAIVYLTEMGDLSRFANRRKVGAYLGLAPACYESGERSDRKGHITREGPSRLRKILCQAVWSRVRCDKQEQVAYDRIVSRNPKHKKIAVVACMRRLGVLLWHKGLEVKAAA

SEQ ID NO: 204395 - protein, 329 aa, unidentified
MSAFVCGLDVHRDSTYATILDCNGKIVSQGRMGNDKVLPYLSNYKIDKIGVEASNQITPLYRLLSKKGYTVSVSHPKKTRYIAEAKIKSDRIDSKAIAELARLDALPLAYMPDQETAMLREKIRRRAFLVRERVRLRAKIRSILTYEGIKPPSEHDLFTEKGVEWLHRLNLEPVESYLQIIKPLDDEIKQLSKHLKELAKDDGDVKLLMTVPGVGYYTALLVKSETGHINRFSDGEKLCSYSGLVPSTYASGGVVTHGNITKEGSRWLRWVMVEAAMIHVHKYDTSITRAYHRIAQRRGRQVATVAAARRLLMCCYSVLKNKRPYYDQA

SEQ ID NO: 204396 - protein, 348 aa, unidentified
MSIAMIGLDTAKSVFQVHAVDESGKAEVRRKLRRSELRAFFEKQEACTVVMEACGAAHHWARVLIGLGHDVKLLAPEAVRPFVKKGKKNDAADAAALCEAASRPDMRFVPVKSLGQQGVLALHSARALLVKQRTMLANAMRGLATEFGLVVPKGMGRLEELVTLVEEDGTFPEQARGVFAGLLGQCRATAERIEALEAEIVAHARGDDTARRLATVPGIGPITASLIAATVGGNIRAFRSARHFAAWLGLVPRQRSTGGKTRLGRITKAGDREIRTLLVLGATSMVYRAEQWNSAAGAWTRGLLARRPVRLATVALANKMARIAWALMARKEIYRATGHAAAASAATA

SEQ ID NO: 204397 - protein, 475 aa, unidentified
MDIVHPRVAGIDVHKKVVWVAVRLPGEAPGERTVVIKRFKTFWRPLTKMAAWLAELGVTDAALESTGVYWWPVYHALAGAGIEVCVCNAAHMRNVPGRKTDLKDCQWIAELHEYGLLRPSFIPAAEVAALRQRTRYRKRLIEARTAEGQRLAKVLEDAGIKIDSVASRLLGKSGREMIEALIAGERNPGRLADLARGVLRRKTDDLQMACDGRFTGGHGQMCRLHLDAYDHLTAKIAELDALIAEAAAPFAAVIARLMTIPGIGQRTAEVIVAETGGDMTRFATSARLAAWAGLAPGDNQSAGKRKHAAARQGNRHLRAAMTESAWATARTRTRPGARFRRLARRFGKGHEKKAAIAVAHTLICIAWAVMARGQDYADPGEDYYDQRDQHNREHLIRHHQQALARLGCQVTLIPPGGRQPAPRPGSLTASPPHRQPSQPAPPALPRAWLGSPSFVTEAFVMLGSGARVGCRLRRT

SEQ ID NO: 204398 - protein, 427 aa, unidentified
MYRMAGIDVHKKKLAVVVSDVEVHGEYQFERCWFGANPEQLRLLSPWLAEHQVEEVVMESTALYWQPVWGALERYWQPICQKREGAGATSGILHRAQAQSNRAPRGRKKDFRDAERLVKRLVGDELKLSFVPDREQRLWRTLTRRRYQLTRARVQLQNQLEAMLEEAQLKLSSLVSDLLGVSARRMLQAIADGETNPEALAGLADRRLRATPAQLSDALGACTELHAVYRRLIKMMLGELKVIEEHTAELNQELATLLRPHQDAVERLAEVPGLGVDSAQQILAEVGANAVVFASDKNLCSWVGVCPGDEESAGESSSHRSPQGNRQMRRLLNQAANAAVKTKGSIFEIVYRRLVPRLGHNQTIGAVAHRLCRLIWLLLHKGVRYEERGPAVSQRSRQNRTSKMIRELRTLGYRVEFLNAVPSNPMP

SEQ ID NO: 204399 - protein, 317 aa, unidentified
MESGMISFEQVVAIGCGLDVHKNSVVATIGGIGVDEETRTFGTFTDTLEQLDSWLKQAGVTHVAMESTSVYWKPVYNILEADFEILLVNAQHVKNVPGRKTDKADSRWLTKLLLSGLLKGSFIPPCDIREMRDLFRYRKKLTAQIVAEKNRFQKILEDANIKLGSVISDVFGASGKAITNAIIGGQTDATKLASLANYSIRASKETLRQSLQGKITGHHRFMLSTIRKSIANTENLIVDIEKSIDEHVQQYSTEMDLLQTVPGVGKQSAAAIISEIGTQMDAFPSAQHLASWAGISPGNNESAGKKKVDELPKATPI

SEQ ID NO: 204400 - protein, 359 aa, unidentified
MCQSGGVAHHLRAASVSEVSIIGLDISKHVFHAHGVDGRGRAMFSKRIGRGKVLDFFATQPSCTVALEACGGAHHWARQLAQLGHDVRLIPPAYVKPFVKRQKNDAIDAEAICEAAQRPSMRFVAVKSEAQQAAGLVFRTRDLLVRQRTQLINAIRGHLTEYGWVAPKGPSHVAMLADLIDEDEMANSLPGAARAMFRVMLDLLTGLSRKIANLDKEIARRAREDEVSRRLMTVPGIGPISATAIAALAPPAETFAKGRDFAAWLGLTPLQRSTGGKQKLGATSKMGERTLRRLLIIGSSAVVKQASKRGAPRGSWLEQMLARKPRMLVTVALANKMARIVWALLVKQETYRAPVAARA

SEQ ID NO: 204401 - protein, 420 aa, unidentified
MKVTYQTCCGVDVHKSFLVATIVKTTGGIEPSYQKKRFSTFNNSILEFKQWLLDNDCHDICMESTGKYWVPVFNLLEDEINVVIANPKWVKAVKGNKDDTKDSKWIGDLFRLGLVKGSYIPCKIVRILREYTRYRYKLVSCRSSEKNRYQNALTVCNVALDSVVSDIFGKSATSVIDYLIERSDNSINHEEIASRLLRSLKKKSDSVIESIEGYQMTDSQKYRMRLVRAHLDYITSTINDIDTMLDSLIAPYENAVQLLCTIPGVDRNSAITVISEIGTDMTPFSNSKRLCCWAGLTPGNNESAGKKKSVRITRAGVYLKPALVQVAHAAVKSDKSPYYKQKYERIMKRRGKKRAIIAIARMILTAIYQMLSTGEAWNPTDLYKIDIPEPLKEKQKEKAIKQAKKLLIREGILSESQLAS

SEQ ID NO: 204402 - protein, 388 aa, unidentified
MTTDHEFAVVASTTDVQKVFVAIELSKSTWVVAIQPPAVDKVSLFRIAGGEIERLFELFEQARRRAGQPVAICACYEAGYDGFWIYRALTARGVACTVLDSASIQVSRRARRVKTDRTDAESLVRVLMAIYRGEHQVAKIVQVPSPEEEDDKRLLRCRGNLLRDRIQHMNRIRGLLNLQGVRHIDPNRSNWENELVNLRTGDGRSFPRQLMNEVRREGKLLGTVVRMLKEVEAEIAGMIRDERKRRHPAQRGQNHPMARRLAEIHGVGPQTAGILATEVFYRGFKNRREVASYVGLTPTPYNSGTMVRDQGISKAGNRRARAVAVELAWIWLRNQPESKLSRWFRTRVGDSAGRVRRIAIVALARKLIVALWHFLEAGVIPEGAKTNA

SEQ ID NO: 204403 - protein, 385 aa, unidentified
MAPPRMPEAVIGLDVGKLSHWACVATRDGEILLSAPVANREGDLDSLFGRFPDALVVVDQSRNIGALALARAKAAGMSAAYLPGLAAHGAARLFAGDAKTDERDAMVIAKTALGIPDALLPVGDPGPTVAAARALAAQRNFLTCENTRSKNRLRSILLESCPAFEALVDLSDGPQLRLMASLGGAWSVADAGPRRAAALTRGAARGKIEALVRSTASSTRPDAAAIAAEDRAVRLLARRISENSAEIDVITAEISALLEGDDTYRCLLTVPGIGPKTASELAISIDIEDFPSHDRLASYCGLAPRNRQSGTSISSVTASRQGNKRLKNLLIFSCNCLTRTEGRWGDYYARCRERGMPHGKALKTLARKRLKVIYAIMRDRVPYAA

SEQ ID NO: 204404 - protein, 458 aa, unidentified
MARKKKDSKNNMRKSEPLKTVQPNAAGIDLGSREHWVAGPPLSDGSPNVERFGTTTPELLRLADWLSEQKVSTVAMESTGVYWIPLFEILDNRGFEVNLVNARQISHVPGRKTDIIDCQWLQLLHSCGLLRGSFRPGDDICRLRSLIRERNTIVAERSDWVRRMQKSLDQMNVCVHHAVSDITGVTGMAIIRAIIDGERDPKVLAGLRDPRCRKSEEEIADELTGNWRPEHLFNLKQALHVYDQLCAVIANYDSEIIDYIESLQPPENKDLSAPPPKTKSKAKTIAKRGQEPLRQALFGMSGFDLTTIDGIGVDTAAVLISELGTDFSAFADENRFVSYLRLAPNISISAGKKVPGKFKSVTSTRVSNALRMAATTLRNSKTALGAYYRRISYRKGASVAVFATARKLAQLIYRLVKHGQAYADAGAAAYEARFTQRRLISYTKALKDMGYKVEPLAA

SEQ ID NO: 204405 - protein, 458 aa, unidentified
MYRELQPLRRALSAELKAYLPPVEPGIEPEHLLQTYLDHLTMYVGCDGADQTFTLLALDATGEELGYLLNAPNNPLGFERAWDWLEGLRCHHRLRLTLLAMETSGVYYWAWWDFLADRPNLARVLYNPRTTEHMTEVLSKRVRNELVDAYALAEQVRLGGTPEVVLIEDADLLTARFCSRAARDLAQQINRKKNQLRSLLRAYNPALSQVFPRAKLHHPAVYALLQHYLFPDELVAAGVEPITAILRAHCRAAFGQKQAQQLVVLCSQTFTREIGREVIRQRVHYLIEDILTAQTRKRQFLNTGYSLIQDRPETKLLRGVPGAGISNTLALVSEMGDIGRFPFGENMASFLGLTTSKHISGTTLFQSKRITKQGPPNGRYGAVNLAQHLSQRVPKYQQMYQHIKNRKPPHEGHFIALVAIARDFVTNVLYDMWRYQRPFFREVEDYRAYRREHPRSHD

SEQ ID NO: 204406 - protein, 337 aa, unidentified
MMYSGIDLHSNNSVVAVVDDGDRVVAQKRLPNDIAKIVGFLARWQDKLAGVVVESTYNWYWLVDGLQDAGFHVHLANTAAIKQYEGLKHSGDETDAQHLAHLMRLGILPTGTILPREHRVVRDLARKRMQLVQSCTTHVLAVENIMARQLGGRMTSNQIKRLTDDTIDSLPLAADVGLAIKANIAVIATLQSQIEVLEKRLQERVKPRPQYGLLTSVPGIGQTLATVILLETGPIDRFADVGNFASYARCVDSVHTSNRKKKGEGNVKNGNRYLAWAFVEAANFARRFCPEAKRFHERKKARTNNIVATKALAHKLARASYHILKEGKPFDVTRCFA

SEQ ID NO: 204407 - protein, 449 aa, unidentified
MESIQWGVAPASASTGAMGRHGTSSGSQEEETLLTAQWFVGIDWASEAHEVCVLDREGRVYEQRQVKHTATDLQALVDALLARAQGDPSTVAIGIEVPRGALVELLVERGFAVYAINPKQLDRFRDRFTAAGAKDDRRDALVIGDSLRTDAQAFRQVRLDHPLIMQLREWSRVDEDLGVEFTRLTNQLRDLVYRSAPGLLALSPAADEPWFWALLRDAPTPAAQQRLSPRRLERLLRHHRIRRLEAGQVHEVLQRPGVYTAPGVVEAVAAHMQLLLPRVALIAGQRRDAEKQLERLLNALDAEGAPAGDQREHSDVAIVRSMPGIGTRVAARMLAEASQPLVDRAYHVLRAVMGVAPVTKQSGRRRSVSMRYACNVRLRNAGYHWARTGAQKDPASRAYYATLRARGHSHGRALRSVADRLLRILTTLLTRGQVFDASHAQHSPVAAGA

SEQ ID NO: 204408 - protein, 324 aa, unidentified
MSDAIVGIDVSKETLDASCARGHRKQGKTFANSPDGWKLVRAWLKAMGSKQAHVCMEATGRHSLGAALALHDAGHVVSVVNPAQIRDFGRTKLGRNKTDKVDAALIREYAELFKPEPWTPPSPAMRRLCELQTVRAGIIRSRTEWKNRSGSGLGDSTATKLAAATITHFTRQLEAIDRAIGETIDQDAELHGRRELLLSIIGVGETLAASLMAEMPEPGVLRRSGEMVAYAGLNPSHHRSGSSIDRPTRISKIGNATLRSSLYMPALSAMRFNPAVAALVARLKSAGRLQPKQIVVAAMRKLLVLCFGVLKTGKRFDPAIAMPA

SEQ ID NO: 204409 - protein, 358 aa, unidentified
MSDYRTFVGLDVHARTIVGSALDATTGEVLRHRFGCDLSEVVAWTRSLPGPQIATYEAGPTGFGLYRRLLESGTACVVAAPSKLQRPSGDRVRTDARDAFHLMRLLHLDEITAVTVPSVEEETARDLVRSREDTRQDLMGVRHRLSRLLLRHGFVYDDGAAWTQKHDRCLREHRGGDLAFMTAFDANDETVVQAVARRDRLDKAITAMAEDSPFTPMVNRLGCLRGISTLTGFALAVEITDWHRFTGSTIGAYLALVPSEYSSGQSRQLGGITKTGNTHARRLLVEAAWHHRRDYRPSPSSVLQARWDKAPVAAQLRGQAGNERLHHQWVAFTARKKRPVVANVASPASWRAGAGPSR

SEQ ID NO: 204410 - protein, 338 aa, unidentified
MSLYAGIDLHSNNSVLAVMDEGGKPLLQCRRRNELSHILADLELYRSELAGVAVESTYNWYWLVDGLMEHGYDVRLVNTAAVPQYDDLKHGNDHTDALHLAQLLRLGLLPEGYIYPREQRATRDLLRRRFMLVRQAVQLMLAIQSSFSRSTGKQLSANALKRIAASELEALFPDPTTRYGVLLQYRLWLTLQEQITHLEQWVRQDLAYPGDLARLRSVPGIGPILGMTIALETGPIERFASVGDYASYCRMVESVRLSNGKRKGRGNRKCGNRYLCWAYMEAANYATRFNPIIRRWYERKKTNKHRVVAIKAVAHKLARACYHLLRDSTEFDPKRAFG

SEQ ID NO: 204411 - protein, 358 aa, unidentified
MMMTDAEKAATEVILGVDTHLDVHVAVALDHLGRRLGELSVPTTAKGYERLVRWAEGFGTLRCAGVEGTSSYGAAITRYLRTAEIAVREVERPKRRHLHRSSKSDSRDAESAARAVLAGETAGEPKSADGRVEMIRALRTARRSAMKSRTQAANQLQGLRVTAPDELRHRLRRLSTKELVAVAARFRLGDAPCDVLAATKFALRSVARRYEALSAEIDELDAQLDRLVTQVAPGLVSLAGIGTDHAATLLTVAGDNPQRLRSEASFASLCGVSPVEASSGKVVRHRLNRGGNRDANRALYMVCLARMRRDPRTREYVARRTAEGKSKREIIRCLKRYVARETYRVLISCVACSSLTRP

SEQ ID NO: 204412 - protein, 444 aa, unidentified
MNRRTRRSIQRVSNQKELSIINPHVAGIDIGSEEHYVAVPPNSCEQPVQKFGCFTKDIQAMAKWLRKCNVKSIAMESTGVYWIPVFQILETEGFEVLLVNAYDVKNLPGRKTDVLDCQWIQMLHCYGLLRGSFRPNDETVILRAYVRQRDRLTRLATMHVQRMQKAMTEMNMQLHHAISDITGASGLRIIESILHGERNPQKLALLCDYRIKKSMKTVAASLEGDWREEQLFLLDQEYAAWKYVQHQIQEVDTQIEQQLGNMQKNTTIGNAQNIKSVLQEVCGIDLCKVHGLDTNTVLVLISEIGVDMSHWKTEKQFASWLGLCPNHRITGGVVHRRHTRKVVNRASRALRLAALSLRRSSCALGAFFRRIQARSGMPKAITATAHKLARLYYQLISTQQEYRDTGVDYYEQKYRNNLIKFLKRKAESLGCQVVDNQAVTAPAR

SEQ ID NO: 204413 - protein, 343 aa, unidentified
MGRMIGVDLHKNSFRVCYYQNDEKYDFETYHVSIKGLEHFKKGLRKADELAVESTGNTGHFVRSIEGKVKRIRVVNPMQFKVISESVKKTDDEDALKIAKFLSKDMIPEVRMKTKQEGQLSSLIGTRDKFVKLRTALKNKVHNILNANGIVTKTELLTSDKSLDKVLGNKLDEACLFELEIIVNEIRNLNEAIKKIDAQVKERGQKLDGFKSVTSITGIGDMSGTILLNTIGDVRYFRDEKALASYFGIVPRIRSSNETTHMGRITKMGNKIARTALVQSTLIAIRYSPYLRAFYDRLKAKKGSGKAIIATARKLLGIVYNTLKNNWVFEDFNNYKLAPQGAY

SEQ ID NO: 204414 - protein, 344 aa, unidentified
MTIDTKVLGIDLAKTIFQIHGTNKHGKQTLKKRVNRTQLIGLMRNMQPCLVGIEACTGSNYWARVFEDCGHKVKIIAPQFVKPYVMSNKNDANDAKGIAEAVTRPEMRFVSRKSLSQQDVLLLHRARELSVKSRTAQANQIRGLLAEYGVIIARGISSVRKLRTILSMNEDKLSPKSLAVFERLYEQFTGYDAQVASFDKDIDLHVASDAICQEIMKIDGIGPISASAIVATVGDARQFKGGRELSAWLGLVPKQHSSGNNIRLGGIHKRGDKYLRTLLIHGARCALIHVDKKIDKKSRWATDKKERLGFNKAAVALANKHTRIIWAMMSSGECYRQEGVCDAA

SEQ ID NO: 204415 - protein, 428 aa, unidentified
MTRAEDTRLEKFRQLRKGIRGSKEHLIVGIDVAKERHNAFFGTATGKTLLKRLVFENTSEGFERLLIQTEALKAQHALTKTVFGLEPTANYHKPLGEFLIKGAHQVVLVSGVAVKRNRELLDGRWDKHDTKDSANVADLISQGKCLFYEHPPVALRELRSLLSLKRRLKKQEHGLKVRIRNHLLAQYFPELDRYFVRSGSVGLEIVKWCLAPSVIAGLDYEQFVSLVAPGKRNGGKHKSIEGVWKMSVDSIGCDAGEAVAFEAKVLVEGLEQTRAVLHVTDTKIEDICLQFPEYSYLLTIPGFGPDVSSKTLAAIGNPFRFTTRGQVLKMAGLDLNANRSGNRSDAATPVLSKKGKADLRYALYQGAFIASTRNKHFIAYYTKILRGREQEKGITTKMRVKLAAKLLVIAWTLMKKKESFSPDYLSRE

SEQ ID NO: 204416 - protein, 338 aa, unidentified
MKLYGGIDLHSNNSMMVLQDENDAVLFRRRLPNDRNVILGELAPFADAIDGLVVESTYNWYWLVDGLMEAGYRVHLANTAAIVQYSGLKYADDDSDARWLAKLLRLGLLPEGYIYPKGERAVRDLLRKRSQLVHQHTANLQSIQNLLARDLGYSLSANQVRRLTYEEINRLLPDLDLALAVQSTLAVMHTQEEVIALLEKEVRTKIRLRSTFKPLLTVSGIGEILGLTIMLETGDIARFAKAGNYASYCRCVGSAHLSNGKRKGQGNTKNGNKYLAWAFIEAANFAVRYNPRIKRYYQRKRERTNGLIAIKTVAHKLARACFYILRDQVTFDVSKAFA

SEQ ID NO: 204417 - protein, 347 aa, unidentified
MRFYQVKHRHYCGIDLHARTMHVCVVDAEGRKLLHENVPASRQALVECVAPFREDLVVAAECIYCWYWLADACAEEGIAFVLGHALYMKAIHGGKTKSDRIDSEKIVQLLRGGLLPQAYVYPREMRATRDLLRRRLYLVHQRAELLAHVQLTHHQYNLESPGARLSYRANRAGVAERFLEADARRSVAIDLGLIEQYDATIRSMELHLEHRAQEQRGDDFLLLQTWPGIGRILALTLLYEIHDVARFAKVQHFCSYARLVRCAHESAGKTVGHGGKKIGNVFLRWALGEIAVSSLHHSDAAKKLHERLVKKHGKGKALSILAHKIGRGIYFMLARRRAFAEEKLMAA

SEQ ID NO: 204418 - protein, 418 aa, unidentified
MSEENNARPSRRYVALDIHKYYCVVAAVDREGKVVLQPVRVEHQDLEGWLKKNLYPSDHVVIESTTNAWHVYDLLEPLAECVLVANPIKVKQIAFARVKTDIRDTLILARLLAANLVPVVWVPPQHIRQMRQLLSQRRQMVETHTQILNRMHSAAHRHHLNHERGKRFNEKTTAWQKDESLSQIEQFQLALEMENRAYIEQQIARITEKVSKMSHQKPWADSMTYLMQLPGFGVITTMTVLAAIGDIGRFETSKKLASYSGLTPGLEQSGTKNRGKGITKEGRRELRWALVEAAQMAVKSDPLLKRRFQELQHRMHRNQAIVAIAHHLLELVWYVLTRRESYRHFSEEKIAYKYLSWAWRMSDDARDGLTRQQFARYYLMRLGIGKDLTRIALDPKHPRRLASESELLALRPELQQIE

SEQ ID NO: 204419 - protein, 343 aa, unidentified
MEYSNKTVVGVDTAKRVFQLHWMEPGGELVDLKLSRQKFQEHFANRAPCRIGLEACGGSQEWARRFRRMGHEVMVLPAQSVRAFVTGNKSDVQDARAIWTAVQHPRAKAVAIKDEEQQMILGLHRMRQQQVKFRTATINCLRGLLSEYGEVMPKGRAGLSREIEGVLARLTSRLPELGLEELRRQWGRVQDYDDAIARIERKLEVWSESHEACRRLRAVPGIGLLTATALVAAVGDARVFRNGREFAAWLGLVPRHRGTGGKTRTLGISKRGDRYLRTLLIHGARALLVNGKDLPDWTEKIKQNKPFNVALVAVANRQARIVWALLAHDREYRKDYVSPPPRG

SEQ ID NO: 204420 - protein, 438 aa, unidentified
MSNKVIFNLDELFISVGIDVGADFSWMSIALPNQQFVGKPYKILHNSIDSLTTAVSKIKEAEELYSLESRIFLESTGIYHYPLFCYLRDKGFNCSVINPIITKNSTNINIRKVHNDRFDSKKAALVGLKPDLKVSLMPSDLALNCRNLCREYYDLMDNRSAYVNKLQGELRMAFPQYLGIFSKVTINTSLTLLETYTSPSAFLEADKQEIIDIIRSTARFGLTYAQNKYNAIIQAATDANQFGYIINSNIKRIRLYISFIRKYDEEINSILESLHELVDANEDADFVKQIHLIETFKGAGFLSAVSIMGEIGDFSAFSKPKQLFAYFGLDPAVKQSGKFEGTKVQMSKRGSAIARRVIHTLTLQSISISRNGEAKNPVLREYYLKKCDSKPKLVAMGAVSHKVCNMIFAILRDNKPFKIIAPQEHIKQYNAAKCDMAA

SEQ ID NO: 204421 - protein, 377 aa, unidentified
MSKVRFIGLDVHADTIAVAAAEPGGDVRSMGIIPNRPESIRKLVKKLGPVGSLRVCYEAGPTGYVIYWQLTSLGVHCEVVAPTLVPVKAGDRVKTDRRDATKLARSYRAGDLTAVWVPDAAHEALRDLVRAREAAKKDQLRARHRLGKFLLRHGRRPATAMTPWTQRHLTWVRQMQFEQPAQEATRLDYLHEVDHVADRIERLERAIDEAVKTAPRQMRAVIDALQALRGIALVSAVTIVAEVGDLSRFARAPQLMGYSGMGVREDSSGSRTQRGGITKTGNAHLRRIVIEAAWAYRHRPAVGGALRKRQAIVSEEVKAIGWKAQLRLHGRYRKLLGRGKCQQQVVTAVGRELLGFIWAIGVTVERQQRKTSPSIAA

SEQ ID NO: 204422 - protein, 360 aa, unidentified
MPSIALGRSDVIVGVDTHKDEHVAFAIDGLGGTLGDPLFVPASPDGYADLLAWADSLGAIYAFGVEGCGSYGCGLARFLRRQDQKVFEVARPRRTDRRLSGKSDTLDAERAARSVLSGTGNATPKLADGKIEAIRLIKIARDTAVKAHTATLITLKAVLVTASDELRGRLEALTDHKLVVASAAFETQESVSDPEAAMRHTLSHLARRWLDLHEEIKVHSSHLKILTKAVAPQMLERFGIGFDTAAELLITAGDNSERIRSEAAFAKMCGVCPIPTGSGKSSGRHRLNRGGNRQANAALHRVVIARMQWHAPTIAYFARRTADGLSKKDVIRCLKRFVAREIYSLLPGTSNSSESGELAA

SEQ ID NO: 204423 - protein, 345 aa, unidentified
MEIRTIGIDLGKTVFHFVGVNARGEVVIRKKGSRTQLLRFTSNLRECLIGMEACGGSHFLGRALREQGHDVRLMPAQYVKPYVKTNKNDYIDAEACAEAVTRPTMRFVPIKTDDQLDLQSLHRVRERWVVRRTAVINQIRGLLLERGITIRKGRHHIEESLPGILEDPDNKLSGALRVLLRQLQLEMQYLHGQVEESDQLIVRIAGELEPCRRLIAIPGIGPITATATIAAIGNGAAFKKGRGFAAWLGVVPGEHSTGGKQKLTGTSRRGNKYLRKLFVQGAHSVLLQRTKQSSGLSMWLANLVTRKRKQVATVALANKMACMAWAVLFKGEAYRPPLLPQTVAA

SEQ ID NO: 204424 - protein, 430 aa, unidentified
MQKNYSTQNEKIERITEHTLVIGVDIAKERHYARMVNWRKQEGQKGKNFKNNKTGYEKFIGWVNKGIKQSGASDVVVAMEPTGTYYFVFEEYLEKQGIEVVIVNGRDVRRTSEIMGNESSKNDPRDALIIAQLTVDGRYGPSTRPKEGVYAELRELSSLRDLLATDDTRHKNRLHNQLSQLFPEYQKYQKRGFSLGMLAALKHFGTLEALIQAGPDGIHQLWKEQHIKNYGQKKAHALYTLARQSIGIKRNSLAAAHKLRILINNYEANQQALAETEEKLQQQLEQLPQAQQLMDIPGIGPVIAGTFLAEIGDIQNYNSPKQIQKLAGYAITSKSSGKHNGKETSSKMGRKLLKTILYKAGIVLISKNKAFRQIYDYYTIERKKPLIKMKAVIAISCKLIRVFYAMLKNGTAFDEKKMLNDIHRPQTKTA

SEQ ID NO: 204425 - protein, 371 aa, unidentified
MEHTRFIGLDIHKERISVAVAQSGRSGAVEYLGEIINEPGAISKLCDRLRRSGKPLAFCYEAGPCGYGVHRQLKSLGHRCDVVAPSLIPMKPGDRVKTNRRDATLLARLHRAGELTPVWVPDADHEAMRDLIRLRSVVRQIVTRARQHLQGFLLRHGRKHGGGTAWRMAYRRWLSTLAFEHPAQQIAFQDYVDAVMDAERRLKRVEEQIFSLLPDWTLRPVVDGLQAMRGIALINAVVLVAEVGDFTRFSNPRQLMAYFGLVPGERSSGETVRRGGITKTGNTHARRALVEGAWAYRMKARIGRHKVDRIEALPKVVRDIGWKAQVRLCARYRRLSARGKTANVVNVAIAREMVGFIWSIACTIQSTPKAA

SEQ ID NO: 204426 - protein, 340 aa, unidentified
MKHVAIDLGGRESQICVRGEDGTILDEKRVATKSLPKLMTQLDSSTVILETSAEAFRVADAAKQAGHRVAVVPATLVKQLGVGARGVKTDRRDAQALSLASCRIELTSVHIPSENSRLLKSICGSREALVRTRTLLVNNARGWLRTQLLRPRSGTTRTFGARVREHAATHGFELPSHIERDLIVLETVNEQIKASDQQLRELAGGNDVCRRLMTVPGVGALTAVRFFAAIDDVSRFRTAHAVQSYLGLTPGERSSSERKQTTGITKAGPSEVRRTLIQAALVARRIRPNDPMVQWSLQIEQRRGRFIAVVALARKLAGILYAMWRDAATYQPTHSARATI

SEQ ID NO: 204427 - protein, 430 aa, unidentified
MHNKNYISVGIDVGSAFSFMTILAPDETVILKPFKITHNNKDSLERAVSEIKKAEELYSLESRTFLESTGIYHFPLFCYLVDCGFNASIINPIITHSTKNGNIRKVKNDKIDSKGIAKLGLSKDIPVSQFPAKLVLELRSLTRKYYDLTDERSAHINKLKGDLHTVFPQYLDVFCDVTGKTSTMILRQYGTPDKILRGHKKTMIEKISKASRKGLAKASERYEKLCAAANAAKTFGCQIDSIYFNIFLTLDLVEKLDSALDSILNRIRQLITFNKNEKFIQQIKLLNTIPGVGFLTAVTIMCEIGDFSAFRNPKQLFAYFGLDPEVNESGKFVGTQLHMSKRGSRIARRAIFAVALASIRTKRNGEGINPYLRKYYELKSGQKPKMVAIGAVMHKVCNIVFAVLRDEKTFELRSPEEHCKQYQRPALAAA

SEQ ID NO: 204428 - protein, 584 aa, unidentified
MENMKKKKRNCLVGVGIDTSRYGHVVKFMSSDLSVAAPGLIVTECRDGYDKLEKQLNKLSRSNPGTYFKIRIDAAGQYSANLENFLRGLPLPIDVSVGEPTRNKNYRQAHYPKTKTDDVEGWAMARFSVIEQPPATPKLPDEFFALCEITSRLQGAVKDSTRAINRLHNLLSRVFPELENIVSNVAAGWVLALLQKYPSSAKIARARLKTLESIPYAKLDKVKAIHEEAKRSVGALHGPLIESMLQELVGQVQSSKKVEKRYENLLIEAYRQLPDSGHKQVETIIGIGEITAAILVSKIISIDRFEMPKNLVGYFGVFPNLKSSGINADGTPKPAPKGHMSCKGNDLVRRYLWTAAFSAIQHNPAIRALFNRLRKRGTRGDVAVGHCMRKLLHLVFAVWKTDKPFDKNHYPWETKSNAVETSIEQSTRKENAVGPKMDTNSKEVASQEVTTATVNLDRQLPSVKQQSAKTQVAKSTNSVDYAYLRSQVTIEQVLKHIDHFENLRGTKIQRRGPCPIHKSTSKTSKSFSVNLTKNVFQCFNQKCGAHGNTLDLWAAIHGQTIHQAAIDIAKTFGLSIAVTEKRNP

SEQ ID NO: 204429 - protein, 337 aa, unidentified
MSVAGIDSHKDTLAVAVVDDQGRELDRTEIENSSRGHHTLIGWLGRHQPTRVGIEGAGSNGRVAALRLKDAGYEVVEVPPQLTAQARRRQRTQAKSDPIDALLICRIALREPELPQIRPSGDIEDLRVLVHHRRELQSERTRAASRLHADLEQLQPGYQTRIGRLTAERNLDRARRLLSGDGRVRAEVARERVRRLRQLNRQIARITEEIGVLSATFGSGLTTITGIAELSAAELLAEIGDIGRYRTKAQFAMANGTAPLTASSGRIDRHRLNRGGNRQLNRIIHFVALTQISRSPEGRAYYERKRAQGRTTKEAIRCLKRRISDRIFVTLRASALT

SEQ ID NO: 204430 - protein, 406 aa, unidentified
MRLFAGDDWAEDHHDVELMDATGQVLASRRLPEGVAGMARLHELIGQQLGEAGEDAEVVIGIETDRGPWVAALVAAGYTVYAVNPLQASRFRERLGVSGAKSDPGDPHMLADMVRTDSRQLRAVAAGSAEAGGIKVVARTHKTLIWERTRQVQRLRHQLREYFPAALEAFEDLAAPDALELLGKAPDPARAARLTRAQVSAALKRARRRAIADQTTQIIAALRSQQLARPAALTAAYAVTVRALAAVITTLNEQVKALESQVEAHFGQHPDAEIYLSQPGLGRILGARVPGEPGDDPHRYPGGRARKNYAATSPLTRASGKKKTVTARFIHNDRLIDALMAQAFSALNVSPGARALYDDLRARGIEHNDALRRVANRLVGILHGCLKTRTLYDEATAWSHRQNLAA

SEQ ID NO: 204431 - protein, 456 aa, unidentified
MNQYFLGIDASKGYSDFVMLDAKKQTIIENFQIDDTFDGHARLYEVLHSFNKDYPEATICAAVESTGGYENNWFQSLLKFQGSLPIKTAHLNPLGVSHNSKADLKRNNTDKISARNVAEYMIAHPEKVSYQHQDSLASLRKQWGFITMLTKQSTQLLNQLESLVYNANPEILIYCKDGAPQWVLKLLTSYPTALRLSRAKVKVLARIPYISVDRAKQLIATAKKSVASANDKVTEQLIVATVKQIVHLKKTIKVQSEILANECQIPEVALLKTFNGIGDYSAIGLMLQIQSVSRFLTSKKISSFFGIHPEYKKSGDGIYKYRMSKKGRKEGRQILFIVAMSAIQTNPLIRDVYQQAVERGMEKMSAMGLCMHKILRIVYGMLKHNKAFDPQIDLKNRQKTSSRKNNVVQDEDRRYQDFDSNAPISRRQKMKRKERKQSQNVSNVEYGISEASVPVS

SEQ ID NO: 204432 - protein, 399 aa, unidentified
MNAIGIDVSKGKSTVAILRPFGEVVASPFDVIHNDSELKKLVAFIRQLPGESKVVMESTGNYSEPIARFLHNEGIFVSVVNALLIHDYGGNTIRKAKTDKKDAIKLASFALDKWLDLNEYTPAEDLRETLKFLNRQYIQYTKMLTMLKNNLISLLDLTFPNANQFFNTPPKASDGHEKWVDFVLKFWHRECISKLSLSAFKLKYQRWCKKNSYNYSEIKAEEIHCYAKSQISVLPMNDSVKLLITQSVTQLITMQETLCALRKEMDNVSSQLPEYDTVMSMFGAGKVLGAQLMAEIGDTRRFRNRKCITAYAGLDAPPYQSGTVNIQSRSISKKGSSALRKTLFQIMTIYIQNQPITEPVYNFLDKKRSEGKPYKVYMIAAANKFLRIYYAKVNKVLCS

SEQ ID NO: 204433 - protein, 376 aa, unidentified
MERGSLMLNTTTFVGLDVHARSIKAVALDAMTGEVRSATFGYDAAEVAGWVSSVDPSAKCVYESGVTGFDLQKRLASMGIDCVVGAVSKMIKPPADRKRKNDRNDAEFLARMLSVGNVVEVWVPDDGCEAARDLVRALDDAREDLKRCKQRLSKFLLRHGCVFSETTPTGRRKGSWTAAHWAWIKSISFPEKADNDVLAYYVDAVRQAMEDKARLERLVEAEASKPRWKRRIDSVRCLKGIDVTSAADLVFEAGEFSRFKSARSFAAWLGLTPSEHSSGESARQGGITKAGNKHLRRVLVESAWHYLGCSPRSKDLAKGQVPDPAARRHAAKGVRRLVERRRAMLERGVHKNKANVATARELACWCWAVGRMIENG

SEQ ID NO: 204434 - protein, 297 aa, unidentified
MEVIIDKGCGLDVHKDTVASCVMGSGIKKEIRTFRTMTGDLYKLKEWLEEKGITHVAMESTGPYWKPVFNVLENSFEVVLVNARHIKNVPGRKTDVKDCEWICRLLRSGLLTASFVPPRPIRELRDLTRYRRKLTQAISSEKNRIQKVLEDANVKLSSVVSDTFGVSGSRMIEAIMTGDFDLDSIANLAVGRLKSKKDDLKKALEGHFRDHHRFMIQASLDHIESLEKIIAQLDQEISEKLKDYHREVELLQSIPGVKEQGAALIIAEIGADMDVFPTEGHLSSWAGMSPGNNESAG

SEQ ID NO: 204435 - protein, 429 aa, unidentified
MSRDIARVNQYRQFKENVRRTKNYLVIGIDIAKSSHYAFFGTPDGKTILRRFIFNNNVEGFEKLITMANSLCRQNGLDKMVFGIEPTGNFHKPLANYLVSNQYFIVMVTGKAVRNNRQLLDGRWDKNDVKDSANVADLIAQGKCQYYDQPDENMLDLKKLLSLRKRLKKTEQRLILSIRNSLITKYFPEFDAHSGVLKGINLTIVEHFLNPVKIASMGFSEFCSRVTVNKATLPQRRRLQAIYDAAGRSIGCPVTSCAELEAQILVEQLRNVRGQIDQIMCEIEEICQGIDNYHRLRSIPGFGPYIAALVLSVIGDPMRFQNRKQVIKLSGFDLNASRSGKNSREQIPIISKNGDGDLRFALFQAAIIASRFSEKFQKQYTRLVGRRVAERGIKKKVRVKMASKLLIIAWTLMKNKEMFDVNKIVLSDA

SEQ ID NO: 204436 - protein, 343 aa, unidentified
MQAVTTIGLDIAKSVFQIHGVDAAGNVVVRRQLKRRYVLPFFQKLPACLIGIEACASSHHWSRELKALGHTVRLMPAAYVKPYVKRQKNDAADAEAICEAVTRANMRFVATKTLEQQSCLMLHRTRHLFIRQQTAVINAIRAHLAEFGIVAPVGRNGVEELLDVVADPGDKQLPHLARACVATLGAQLRMLKAQILEFDRLIMAWHRSSEASQRLDEIPGVGPALATALVASVADPKAFRSGRNFSAWIGLVPKQHSSGGKAKLGSISKQGDRYLRSLFTAGALAVIRYAKIHGTKRRPWLTALLARRPTKVAAIALANKIARMAWAMLARGGRYKEPVALAV

SEQ ID NO: 204437 - protein, 341 aa, unidentified
MQITTIGLDIAKHVFQVHGVDATEKVVVRKQLRRSQVIAFFASLPPCLIGMEACATAHYWARELTKLGHEVRLMPAKDVKAYLKRNKNDAADAEAICEAVRRPTMRFVSIKSPEQQSQLMQHRARDLLIRQRTQAINALRAHLAELGIAAAQGREGLKKLLAIIADAKDERLPIDARATLIVLAAQLQALQTLIGSIDKRIMTQHRSNEASKRLETIPGIGVVGATAIAATVTDPKAFRSGRDFAAWIGLVPRQDSTGGKQKLGPISKQGDRYLRRILVVGAHSVLRLVKKNPQKHPWLTQLLARRPFKVVAIALANKMARIAWALLAKGETYRAPQLTAA

SEQ ID NO: 204438 - protein, 486 aa, unidentified
MVHTVGMDLHKGRHRVRCLDEKAQLCDAFSFQTTPEGLATLEQRIFRDGSNPVVVFEPAGLAWLMVAAYLRSQHPECRLVKAKGQKVAALRRYLRGSAKSDRIDALTLAKMPFIDPEQLDGLYLAPAETHALQRLIRQRKRLEDQITAHKNRIAAIIDGYLPGVRKAFSHPWSLRVRAFLRSRVNPFAVVSAGEEALHAFLSRASARGKGDMAESHQVYLACQNAAALYELSRGAGSTNDDFFADLQDEIARELRLMEAAEAESEALSQRIGELYHKLHPSDNLRTIPGVGEATAPVFLATIGDPGRFHSQAAFANWTGVVPGARQSSQVEAKGLRMTKAGPPLMRWALYQAGQIGRRYDPQLALVYHREMVHHGKNHKQAMGAVMSHLGARVLAVLQENRPYELRDTEGKPIGWQEARGLIMSRYRVPEEIRRERRRTNLRKGGPPALRKKSPEMAAHRTNEAADAPQPAAVAMPPGTSLSGCSA

SEQ ID NO: 204439 - protein, 367 aa, unidentified
MKKVSTVSAKQSRNFSQARLTIGLDLGDRNSWYCVLDETGQIQLEQRVRTTAKALQEVFGAMPCRRIALETGTHSPWISRLLSELGHEVIVANARKVRLIGESRKKDDRLDAQTLARLARIDPALLSPVKHRSAQAQADLTVIRARAGLVRARTGLVNTARGVAKSYGERLRGCNVRNMNPEKADGLSPELQRALEPLLSAIEELSERIAEYNDRMEVLAQESYPQVALLKQIKGVGTLIALTFLLTLEDPHRFRKSRDVGGYLGLQPGRRNSGQSEPQMHISKEGDPYLRTLLVQGAQHILGPFGVDCDLRRWGLKLAERGGRNAKKRAIVATARKLAVLLHHLWVSGEAYEPLHNSSRITVAAAA

SEQ ID NO: 204440 - protein, 358 aa, unidentified
MQRNKKTFKGQNIYIGIDVHKKNWQVAVITESGYTERLSTAADAKALFKFLKSHYPDGNYRAVYESGFSGFATYYALSELGVSCVVAHAADIPSSQYELTMKSDRIDAEKLARALRAGLVRGIYVRPKDNLDDRGVLRIRKTIQIQVGGYKTRIKHLLHSNGVELPERFSRSGTHWSRAFIAWLREDVRLLSDTRRSLDLLLLQVETLRANLLETTRRVRALSMTDRYREDCALLMGIPGIGLTVAMTILTEVCDIGRFGNERQFASYLGLVPTSHSSGERVSHGEMTFRGNKHIGPLLVEASWVLIVRDRELGRMYTEYRWRMAGQKAIIKIARKLSNIIFAVLKTRKAYEPYRRDA

SEQ ID NO: 204441 - protein, 346 aa, unidentified
MLYVGLDLSRQRLDVHVLDEEGRTVEVTAVHPDADALRTLANRVLCHGQEVSAAIESMTGSRFVHDTLERFGWDVMIADAVKAKGVAPLAAKTDKIDAHVLAELARRDLVPEIWLPTPGVRADRERARFRLHLVHHRSALKCRIHATLMTFGHSVPVADLFGTSGRRLLAGFELPEPWATTLATSLAMVDELDERIDECGRELIRLGADHPYIPLLLTVPGVGPLLAYTIASEIGDIHRFASPKKLTGYTGLCPLVRQSGNRDFRGPLAKNGPKYLRWALVEAATHAARDPHYRDRYERNKRRLGRQRGAKVARIDIARQLAEGIWHVLTKNEPFAPASPAILLVA

SEQ ID NO: 204442 - protein, 379 aa, unidentified
MITTTCMPESTVPATLLLAFELGQRSWKLGFTTGLGQRPRMRQVPAGGIDRVLEEIGRAKRRFKMADDAAVVACYEAGRDGFWLHRWLVAQGITNYVVDSSSIEVNRRARRAKTDRLDLAGLLNLLARHLLGDRRVWRVVRVPSVAEEDARQVHRSWETLQKDHTRLMCRLRSLLVTQGIRMPITSGFLTDMRAARLFDGSPVPPGLQARLTHLWDQLTVIKHQCKQLAQIRTACSPAPTTATGRCVQRLETLRGIGPVGAWTLATEIFGWRQIRNARQLGGLVGLVPAPYQSGEMARDSGITRAGNTHVRRVMVQLTWTWLQHQPTSALSQWYRRRFDGSRRLRRIGIVALARKLLVALWRYAEHGVMPEGALVKRVA

SEQ ID NO: 204443 - protein, 423 aa, unidentified
MDHVGIDVHKKDSQICIVAEGGELIERRVRTEVGRLAEMFEQRPHARILIEASTDSEWVARCLEGLGHEVVVADPNFAPMYATRRRTVKTDRRDARAVADACVLGAYRPAHRLSDAQRHVRGRLGVREALVRTRTRYISLIRARLRQDGWQVPTGSAEGFGRRVLALRLPGRLLSEVAPLLAVMRHGDRQLAYADERIAAFTATDPRVRRLRSVPSVGPVTAAAFVAALDDAQRFRRAHEVEAYLGLVPQEWSSGESQRRGRITKAGSRRVRWLLIQAAVSMRRLRDPRTAGLREWAERIAARRGRKIAVVALARRLAGILFALLRDGTVYESRLGQAPPPAGRAGLREEVQMNDVAALPHRLHTRPWPGRTGMTTYSDQVDSLHASQSHDLRATHISVSPLAGGGPCGHDVSGSHCESKGGR

SEQ ID NO: 204444 - protein, 446 aa, unidentified
MSELIPAAPTAGSEFAAFVAIDWADQKHYWKLYSPNSAQTEHGELPNTPEAIEVWAVELGRRFPGRPIAVILEQKRGPLVYQLSKYVHLVLFPAHPTTLARYRQAFCPSGSKNDPGDTGLLLEILLHHRDHLRRLDPDTPETRLLQILSEQRRKWVDEKTALSNGLTAWLKSYFPQALDWFDDIDSPLALDFLERWPALEQLQCTKPNALWQFFTDHNSRSEQRIQARINAIYQAVRATHDRALEVAGPQVTAGFVRQLKALQTSIDALNEQIRRAEAEHPDAPLFAAVPGAGPALRPRLIVAFGTQRERYATAAELQAASGIAPVQKQSGNTRSTHFRQACPKFLRQTFHEFAAQSIKKSQWARACYDYQREDLHKSHHAAVRVVAFKWIRVLFACWKTRTPYDEATYLRALERHHSPLTRCLDPHTQLVWKEVAGFQKLGMENA

SEQ ID NO: 204445 - protein, 443 aa, unidentified
MSRKRRTHLRGNRGQAFADKIRGIPLDRILCVSLDIHKYFHVVMIHNALGEIVTPTFEIDIFQTGFDQLCQAIDEASVRIKAQVVLTGMEPTSHYFENLARHLRQRPQPVTLINSYAVKKNRDQQMMHREKDDEIDTASIGDLLRRGEGTPFKPASGVYLQLQHLDRVRLSKVKIRTMLQNQVLGHLDRIFPGLVIIAKEAKVRYTPLFATDFWKCQAMQHLIRVCPDPRRLAAMSPQDLIDAFHAHRYAMGPITAAKIIAYAQKVLLPDAELVAIRGELLAHDLALLEEVEGHIAQLEDRLRTLLAETPYQIWVKLKGISDIQVASLAAAIGDPANYSYAAQVFRRSGLVSGRNDSGIRQRKGKGKRVVKVGDVYLRRALMNALATLLLHQPVLQQYYNKLKKSKPAGVARVATARRATGILWATLRDQQAKTLILKKGAAM

SEQ ID NO: 204446 - protein, 408 aa, unidentified
MQVYIGIDWSSVKHDVSVLNENGAVVTRLTIPHTPEGLEQIENLRKQVDVQPGECLIGIETAHTLLVDFFWDHGYQQIYVLPPTKIKAERPKLHTSGAYTDQGDAFLIASLLRTQRESFILWQPEGLLIRQMRSIVSLVLHLTTEITRTSNRLTSVLKRYYPAALQVFSSLDTLIAQSFIQTYPTPQAAAQLTWEQFSAFARAHGHRQPRKLPGCYARLRQPQIPASTAVVAAYAREAEILSRLLEQQLRTKGQLLKELQVLFRQHPDHGVFASLPGAGEWLAPALLAKIGDDRQRFPQSEYLLGTAGTCPVTKVSGKRRQVVFRNACDHELRQIVTQWSRASMSQCGWAAEYFAQVLSRGHSENEGYRYLGNRWMKILWKLWQTHQVYDEAYHLQQIALRKQPKPGK

SEQ ID NO: 204447 - protein, 389 aa, unidentified
MKRSNEEERIVGLDVHPDSFAGAILEGRDPWAARVVSTSTRVALPLLEKWALRHTRESDTLVMEASGNAFAVAERLRGLKRKVAILDSHSAGKVGKTYCATDRLDAIKIARIYLSALSPVVWQPDAQTRERREVFSAYQAVVKEGTRLKQQIKSMLNEHCVRLESGFRLSHPSAIRGLLGRQKWTEAQKMLLEQLHAGLVGARARRQQLRRYMAREILAEKELLRVTRLCGINLITLYGLIAAIGDIKRFVNARKLCAYFGLNPSVEQSGNYQGPTALKRHGRGAMRALLVQSAKKLLQVDNSLQKWGLAVAMRRGRNKAAVAVARKLCVAVWHVLQGHVIGAIARMDTLHTKLHKLATELGVPTIKQLGFQTKEAFVQKKLYLLRSYP

SEQ ID NO: 204448 - protein, 348 aa, unidentified
MAKISRIGIDTSKSVFQLQGVDEAEQPVLRRKLRRREFLAFFERLEPTEIGIEACGASHHWARELGKLGHQVVLLPPQYVRPYVERNKNDAADAEAICEALSRPKVRKRRVAVKSAEQSALQMLLGTRDSLIRRRTQLSNAIRSYAAEFGLVIAKGLARIEPLLERVAADNSVPAIATQVFVTLGTEFRELAPRIAELDGKLKAWHRSNELSQRLAEVPTIGPIGACLLPIKIPDPRIFRSGRRCAAWIGLTAKDHSSGGKHKLGGITRAGNETLRAVLVCGATAYIAHVRRRRTQPSPWLAELLKRKPPKLAAVALANKTARIAWKLMISGQHYDRTRTAAPLAAAA

SEQ ID NO: 204449 - protein, 428 aa, unidentified
MEVIYPKACGVDVHKTFIVAVICDSTNQIPKYFKKRFSTFNNSLIGFREWLLENDCQNVCMESTGKYYIPVYNALEGFISNVVVANPKWVKCIKGEKDDNKDAKWIADLFKLGIVRSSFIPYKDFRVLREFTRYLYKLTCNKTSEKNRFTNALTVGNCKLDMVFSDIFGKSSQDIIDIILNNDSFSDEDIINCLRKNCKSSKEDIISAITGITFTNEQKLRIKLIKDHINYLTNEINDLRETVDTLVAPYEDYINLLMTIPGIDRNSAITILSEIGTDMSQFSNHHRLASWAGLAPGCNESAGKKKSVKISRAGVYLKPCLVEVAHCAVKDKTNTYYANKFNKISKRRGKKRAIIAIARKILVAIYHMLSTGEAWNPRDLASNETSDKDRIKYTKNNFKQSLKQLLSLGLTSDELLEILNQNASISDS

SEQ ID NO: 204450 - protein, 400 aa, unidentified
MNKTSFCGFLGIDISKDKFDAYCMDMNGEKHFYISCSMDRTGFEKLMSRLEILPISKEGLLIGMESTACYHMNLFSFLLVSGYMAVIINPLLISNFVKMQLRKTKTDKKDAFVIAHFLSMYADGLIQSSVSTHISDLRDLSRQRESLLSQMTALKCDMKRILTIVFPELERLTGVFTKSILKLLGRFPSAHAIVQADPAEITQLLIDHSMGKNSAKAAEIIIKAARSSVGTTSPAREVILKQKAEVLIHLDGHLKELTALMIELCRSDMGDDIEIMTSLRGIGDKTATNFLVEMGGDIRKFKDHKKLIAMAGIDPAIYQSGKHDGQGRITKRGNRHLRRVVWLMSIRVIQFNDFFRNYYKKRMQDGLPFKKAVLATAHKLLRIIFAMLTQRTLFRCVVNS

SEQ ID NO: 204451 - protein, 420 aa, unidentified
MDVVLERCAGIDIGKDEVVACVRAPRAGGRGRHKDTRSFGSFVEDLEAMADWFAAAGVTEVAMEATGSYWKPVWEVLEDRAFELKLVNAHHLKILPGRKSDVLDAEWIAELLEHGLLRASFVPPRVIRELRDLTRYRKRLVQTHTQESQRIQKTLEDAGIKLDSVASHVMGVSGRAMLRALITGERDPEVLAELAKGKLRKKIPELRRALQGRFGDHHALLIEMSLDHIDHLEAAMARLDDQIDVLFVTNANEDGIPFAQARDHLDTIPGVAKRAAEAILAEIGVDMARFPTAGHLASWAGMAPGNNITGGKRGSGRTTKGDVWLGEVLNQCAWSAARTRDTYLSAQFWRLARRIGKKKAAVAVGHSILVICWHLVANDVDYEDLGGDYFTRRNDPDRHRDRLIEQLHRLGYRVTLDRVA

SEQ ID NO: 204452 - protein, 427 aa, unidentified
MLFEAERLRAYRQLRIEKRSSDRHLIVGIDIAKEKHYAFFGTSSGQVLCKQFTFPNSKEGFELLLCRTEQLRLQHQLDAAVFGMEPTANYHKPLADYLVLQEQQVYQVAGVAVSQNRQMLDGRWDKHDRKDAANIADLIVQGKCQFYEYPSLEIRQLRELLSLKHRFKKEEHGLKTRIRNNLLAKFFPEMDQFVNTCQQDTLAVIGTCCAPELISELDYASFFTKVVPVYKGKRQEAHLMRIWQAAQTSIGCRAGELANYEGELLVRQLQGVHQLIRELEKRIEVLCSGFEEYPCLLSIPGVGPDISSKLLAYIGDPHRFETVSQVIKLAGLDLSASRSGKSATQARPVISKRGNADLRYALYQAAIVASTKDIHFRCWLARQVKGREREQGILGILRIKLAAKLLAIAWTLMKKKEMFAYEKLNNS

SEQ ID NO: 204453 - protein, 332 aa, unidentified
MFIGIDVHKRYSQIAVLDENGEIVEEVRVENANLDDFAQQYAGSKAALEATTNYYHIHDTLSEYLDVTVANPGALKLIAGSDKKTDRVDAKQLARLVRLGSLPESYVPTDEVRQARALVRGRQKLVENRTEYANKIHGLLSDHGITREVKPLSVEGREFLAELSLPAPWDALLESYLELIQVLTEQIESLEAEIEERAGSLKETQLLMTIPGVSYFTALTIYAELGEIARFDRAKEVVSYVGLNPIIRESGDSRFEGSISKRGSGRVRWLLVQASYTAVHTCEDEYLSRFYNRLARKKNSKTAIVATARKLLVSMYHMLDREEVYDPPGVSA

SEQ ID NO: 204454 - protein, 351 aa, unidentified
MKEYISFDSHKHYTLMEREDIQSRVAQQQRIEPAPGAIHAALQGCAPGTAVAVEATGNWYWIVGEIEQAGLRPLLVHPRKAKLMMGLINKTDKLDVHGLNRLQRNGTLPAVWIPPADLRDLRELTRTRLVLSTQRTRLKNRLSATLAKHGRQLSGVSDPYGRKARQELNARLGLLPAHTRWVSEALLAQLGFVEEQIRALEQQLQELVKITAEMGWLMSLPGIGVILAASIALEMGDINRFASAERLASYAGVTPRVHSSGDKTRYGPLRSDVNRYLKWAFVEAANSIAVNHTRCWQRHASQLYRRLRARKGHYKAIGAVARHLAEAAWHVLQRKEAYRDPVLPAGSSNQA

SEQ ID NO: 204455 - protein, 537 aa, unidentified
MQFHLKKSSLSSDTVSKVIHPPARRARKNSPQPVVNNFAAPEIKPSEKVLRSRHSGHGRIALGGTRSSVFHPKRIQQSSPACPAASVSTSERTIACEASGIRSTHDGATMHNRKVKRMKNWKDLTHYAGFDWAKDHHAVVIVNGEGCIVADFEFAHSLEGWKSFDEKTSAWPNLAVAIETSQGAAVDQLLQRDYTVFPVHPIAAQSYRERKAPSGTKTDHLDAWSLSDALRMDGQGWKVLQPLDPMTQQLRLLCRDEVSLIEQRTALVNQLQQALAEYYPAALEAFEDWTDAFTWEFVLAFPTPQALVNAGKRRWEKFLHTHKLWRPETVEKRLKLFAQADQFKASEPIVRAKSQLAISLCKLLCTLAQQLKLYRKRIEALFRDHPDHDLFGSLPGAKKMLAPRLLGAVGSDPERYGSHEVLQSMAGTAPVSYESGKISRVRLRWSCDKFMRHTVHLWADCFRKASAWGQTYYQKKREEGMSHACALRCLGQRLLKILFRILNTKTPYNAELHALNQQKHGSWVLKLINLPAVKPSE

SEQ ID NO: 204456 - protein, 360 aa, unidentified
MFVERTSVGLDVHARSVAAAAIDGVTGEVFQARLTPSSEHVRSWIGELPGPVAVAYEAGPTGFGLARALSAVGIRCVVAAPSKLQRPSGDRVTTDARDAVHLARLLRLDEVIPVVVPTVAQEAARDLVRAREDCRGDLMRARHRLSKLLLRHGVVYADGRAWTGAHDAWLRRQRFDIRAVQMTFESDYDAVLAVRARRDRLDDAIAAMAADSEFTPTVRRLGCLRGIGTLTGFALAVEIGDWHRFTGNTIGSFVGLVPSEYSSGQSRVQGSITKTGNTHVRRLLIEAGWHHRARYTVGKIMRDRWELAPPAARARGDAGNRRLHERWVNFNLRRKRHVIANVAIARELAGWCWSLAVLED

SEQ ID NO: 204457 - protein, 347 aa, unidentified
MDHIGIDLHKRSSQICILTEGGELVERRVLTSRERFAAVLGIRSRARILIEASTESAWAAACLEQLGHEVIVADPNYAPMYAERRRKIKTDRRDARTLAEACRLGAYRPAHRTSEPQRHVRAQVAVRETLVRTRCQYMALIEAHVRQEGRHLRTGGSRTFLSRVQELSLSPPLSEVTAPLLLMLDHLNQQIRTADVQLEHLVDADPRVRRLCSVPGVGPVTAASFVATIDQVERFAGAHQVEAYLGLVPREMSSGERQHRGRITKAGNSRVRWLLVEAAWSILRYKKPETAALRHWADRIAARRGRSIAAVALARRLAGILYALLRDGTEYQPTRVRPPAHSDPAAA

SEQ ID NO: 204458 - protein, 356 aa, unidentified
MSEGSWVGLDVHARSVVAGVIDQLSGEVRSLRVPPGNEGTVAWLQTLPTPVRAVYEAGPTGYGLARACAGAGISCVVAAPSRIRPAADRVKTDRRDAERLARLLRLGEITPVRVPAAEEEAARDLVRAREDARGDLMRARHRLSKLLLRHGMVYDATAWTRAHDAWLRRRRFQSGPLAVVFDECYGRMLDAKTRRDALDRAITELAGAPPYVDVVERLVCLRGVSTLTAFALSVELGDWNRFRPTSLGAFLGLTPSENSSGERRRQGAITKAGNSHARRLLVEAAWHQRRPPRLSVTLERRRTGKSLAVRAQADRSARRLHGRWHALEGRGKPRTIVVVAVARELAGHCWALATME

SEQ ID NO: 204459 - protein, 315 aa, unidentified
MDQQIFIGIDVSKTKLDIAVRPTKEKWSTANAPTEISALVKRFEELQPTLIVLESTGGLEIPLVSELAKKFLPIVVVNPRQVRDFAKATGKLAKTDSIDSEIIARFGEAIRPEPRPIKDEQARELDAVLVRRRQIVDMLTMEKNRLRCSTKHVRKDLEAHIKWLEKRLQNVDGDLQKLIQQSDVWRVNDKILQSVPGVGPVLSLALLAGLPELGQLNRKEVAALAGVAPLNRDSGFFRGSRRIWGGRAQIRSVLYMGALTAARCNPVIRTFHEQLIARGKKPKVALTACMRKLLTILNVMVRNQTTWSPTYAEQR

SEQ ID NO: 204460 - protein, 419 aa, unidentified
MKPWMEITHYAGFDWARDHHDVVIVDRQGQIVADFRIEHSLAGWQAFRDQVQPYSALAVAIETNQGTAVDQLLQRDCAIYPVNPLSAKSYRERKAPSGHKTDRLDAWALAEALRQDGQQWKALQPLDPLTQQLQLLCRDEIGLIEQRTALINQLQQALVEYYPAALQAFEDWTQPFCWDFILQFPTPEKLVGAGRRRWGKFLHTQKLWRPETASKRMEIFEHARQFCGSAAVTAAKSLLALSLAKLLNALQLQLDQYRRQIEALFKQHPDHDLFGSLPGAAQTLGPRLLGEIGGPPQRFEDTEALQCVAGTAPVSFQSGQIHRVHVRYQCNKVLRHTVHLWAQCSLRVCPWADVYYRQKRAEGKSHACALRCLGQRLLKILWRMIQTRRPYDADLHARNQKQHGSWVLALMKPVAKASQ

SEQ ID NO: 204461 - protein, 465 aa, unidentified
MKPIYRRCCGIDVHKKSLSVCVLPPEGQQGEVKREQFRTFLRDLKRLRAWLLRCRVTDVAMESTGQYWRPVWNVLEGHIANLVLLNPAHVKGLAGRKTDRRDAEWLARLHEREHLRGSFIPQMELREMRELTRTRVHLLEDCNRTKNRIAQLCEAGNIKISSVASDLFGTSGRRMLAALIEGRHGPGWIADYACTRLRGKRDQLAMALEGTLTAHHKGLLKRLTGQLKAQETEVADLTREIESRVAVWAEVIGRLVEIPGIERVSAWTILAEIGTDMNVFPDAQHLASWAAVCPGNRESGGKRMSGRTRKGNAYLRRILCQAAWAATRKKGSYLGAFYRRIRARRGHQKAIMALAHHMLTVIYHMLRDNQPYREPGASFYEDKRKPEITRRMVKRLERLGYQVTLEIRLTPDQIRELEPVLTQQLTVPPAVRRRGRPCKCSDRGIACVHRIPTPTTQEPAKLNPQ

SEQ ID NO: 204462 - protein, 363 aa, unidentified
MGNTIICGIDAHEKTLVTRIGVNQEPAETKRFSNTRSGRDALFNYLKKLSGEYAGGKMVMAYEASTLGFGIYDESVASGIECHILAPTKMPTARKDRKKKTDERDAQRVFEIVRAYALAGNELPRIWIPDHQTRDDREVVRGRLDAAQKLTGLKCQVQTLLKRTGVVKPAEAGDSWTQSYRRWLKQLCIQPGAQIALQSLLRQIEGMEEEIKILDQAVEQLAEGERYKAVAGALVREVKGVGLLTAMVYVTEMGDLSRFNNRKQVGSYLGLVPSSNESGEVADHKGHITREGSARVRKVLCQATWARVAHDKEEAVVYQRLVKKNPKHKKIAVVASMRRLGVLLWHIGLAAQKEAVAVKEQAA

SEQ ID NO: 204463 - protein, 338 aa, unidentified
MKLYGGMDLHSTNVVTQLIDEGDKVLYRKKQSCDLDQILKGLEPFKDNIEGIAVESTYNWYWLVDGLMAAGYRVHLVNTAAVKQYEGLKYTDDDSDAFWLAHLLRLGILPTGHIYPKESRGVRDLLRKRGQLVRQRTAHILSIENLYARNSGDRLSCNAIKCLTEEQIQQQFADPNVALAIDSNRILMNALDQQIKVLEQALLKQTKLNPRYRKLLTIDGVGEVLALTITLETGDIGRFAQVGNFTSYCRCVGSEKLSNGKKKGQGNSKNGNKYLAWAFVEAANFAIRFNEQAKRFYQRKAAKRNRVVALKAVAHKLARASYYVMRDQVPFDSTKLFV

SEQ ID NO: 204464 - protein, 346 aa, unidentified
MVIIGCDFHPSWEQVCWLDTETGETGEQKLVHSAGEAQRFYSSLPAPALIGLEATGNCHWLLDLLRDLGHEVWIGDAAEIRASYVRRQKTDKRDAAHILKLLVEGRFPRLWVPEREQRDLRQLLIHRHKLVEIRSRVKNGLQHLALNQGMQKKQRLWSAAGQQALRELPLQPWASRRREDLFGLLASLNEQITPLDRAVAEAAQQNPEARLLMSQPGVGPITALAFVLTIGDVSRFARGKQVASYLGLIPREHSSAGHQRLGAISKQGNRFLRMLLVEAAQSAVRYDPEFRREYQHRCHSKPKNVAKVAAARKLAVRLYWMLRTYKAHPESVAIESSPRVPLVSAS

SEQ ID NO: 204465 - protein, 407 aa, unidentified
MTAVGIDISKGRSTVAAVNSAKEVVLTPRDFDHTEIGLERLIYNELLSLAANGEVKVIMEATGRYHEPVAQALHEAGVFVCVLNPLVTHNYGNNTIRKARSDKADARKIARYGIDHWAELREYTPIDSMRQQLKLISRQYNFYMKHVVQQQNNLIALSDKVFPGVNEIFTSPMRKDGHQKWVDFFLTFWHADCISRMSQNAFTQRYQKWCKRKGYNFSEQKAFDVYVSALGHYITLPKNAYAKLLVTTACNQLIATLKNLAAIKVELLRIAALMPEYEKVLSLYGVGEITAAQLMAEIGDVRRFDNRSSLIAYAGVDPATSQSGKYESKSGKTTKRGSSHLRKTLFQIVSSHLRRSPADEAVYQFIDRKRSEGKPYFVYMTAGANKFLRIYYGIVKPFLASSQEDSQ

SEQ ID NO: 204466 - protein, 421 aa, unidentified
MTPTSHTTFAAFVGIDWADAKHDGCLQTAGSANRECFQLEHAPEVIDAWVTALRTRCNGQPVAICLELTKGPLVSALRKYDFLVLFPINPLTLARYREAFTPSRAKDDPTDAALQLELLLTHRDKLQPLNPQSPTMRTLAQLVEHRRRVVGDKVRITNRLTSTLKNYFPHVLHWFQEKDTAIFCDFLSRWPTLKAVQLARRATLETFFRAHHVRYADVITQRIQAIKAATPLTTDAGVITPNALLVQALVAQLRVTLQAITDFDTAIAQCAQSHPDFPLFQALPGAGPVFAPRLLVAFGEQRERYASAADLQKYAGIAPVTERSGKKAWVHWRLQCPKFLRQTFVEWAAESMRHSFWAQVYYQQQRDKGKAHQAAVRALAFKWIRILYRCWQERTPYNESVYLQALHRRGSSLIHNLAKAS

SEQ ID NO: 204467 - protein, 483 aa, unidentified
MAARTDKKNAEQQQHNQRQREKQTRRKRRVSTFAVSHPDAAGIDIGSRSHWVCVALTTDVHDVDAIREFSAYTDGLRGIVAFLREHGVTSVAMESTGIYWIPLFELLVDEGFEVFLVNASYTKQVKGRPKTDRRDCQWIYRLHHAGLLAAAYRPSGPTCVLRSYLRQRQTLIRYGGRHIQHMQKALEQMNVKLTEVISDITGVTGQKIIRAILDGERDPKTLSRLRDKACKADQAEIARALDGTFHEEHLFALKLAFELWQTYQEKLDQTDARIAQQLATMKLDRPLPELVAEPKRNHGHKPNEPRFGVRQAVYGVVGIDLLAIEGLAETTALTLVAEIGTDVSKFATVQNFTSWLGLCPCLKKTGGKVKSSRTRPGANRAAQALRLAANGLWNSKSAMGAYYRRMKARLGAPQAITATAHKLARRVYYALKYGMTYVKQTQEQYEELMRARQINALQRRARQLGFQLLAPGEVPSQQAAPAP

SEQ ID NO: 204468 - protein, 422 aa, unidentified
MRILEPLQIFILEESVMLNAVGIDVSKERSTVAVLQPGGVIVHKPFDVPHKSRNLHDLAQYIGSLEGDTRVVMESTGRYHEPIRNVLFKAGLFVCTVNPHLIKNYGNNTIRKVKTDSADAKKIARYTLDNWAELREYTSMDTTRTQLKTLNSQFSFFMKQKTAAKTNLIALLDTTYPGVNKLFDSPVRADGSEKWVDFAYSFWHVDCVRKAGKTAFTDRYKRFCKHHGYEFQEAKANAIYKDSKELIATLPKEAVYKELIQESIRQLNLLSENVEHIRKTMNELASTLPEYNTVMSMYGVGPTFGPQLMAEIGDISKFQHREALTAYAGVDPGKNDSGQEVHNSSHASKCGPSRLRHTLFQIMTTMLQTGGKEDDAVSNFLFKKKAENKPYLVYMTAGANKFLRVYYGKVKECLRNQEQAEE

SEQ ID NO: 204469 - protein, 351 aa, unidentified
MIPVASDVHKGRCWMAMIPPGEELKMLEPIECTREAWRERLAELPPEAEIALEVSTSGYFVMSVLEEAGWRERAHWVHTAGIDSLRKQKSDRLDTRRLVKKLAVHDVDPLPEAWFPPPPIRALRLLARQRCGLARLRAQTKNRVNRLLEMHGLRPQRCVFTAKGRAWIQQQALSAGAQLCFARMFRLYDFLTAERETSEAELTAAAAAFPQVALLMTIPGLGHMLAAVIWSEMGDLARFDSADALLNYTGLVPSSYDSGEVSMHGPITRQGPVWLRWALVTAANPSADGQQESAGTALLAFAALPQVAQCGQDGRGGFRRPLRLWSFETRSTFPGRTLGPESRQVGTVNLR

SEQ ID NO: 204470 - protein, 341 aa, unidentified
MAEVCTIGLDLAKHVFQAHGADASGAVLFRKKLRRAQVLSFFATQPPGTVAMEACGSALHWAREIGKLGHAVRLIPPAYVKPFVKRQKNDAADAQAICEAAQRPTMRFVAPKSEQAQAAALVFRARDLLVRQRTQIINALRGHLAEFGIVVAQGPAHVSSLVRAVEDPAEPVPEIARAILSVLIEMLHRLDGRISLLDREIAQRAKEDVTARRLMTIPGVGPITATALTALAPPAETFKRGRDFAAWIGLTPLQHSTGGKQKLGATSKMGERTLRRLLIIGASAVLRWAARHGAPAGSWLSRMLARKPPMLVRVALANKMARMVWALMAKGGDYRAPAVSV

SEQ ID NO: 204471 - protein, 366 aa, unidentified
MRKPSTSALRRRGKLQDGQLTIGLDLGDRSSFYCVLNGAGEVILEERVATNPEAMKKTFVTMPPSRIALETGTHSPWVSRLLSDLGHEAIVAHARNVRLIGESRRKDDRLDAQALARLARIDPQLLSPIQHRSAQAQADLSVIRARYALVRTRTALICAARGLTKSFGERIRSRYIRGFKPAMGDTLSPQLRVALAPLLSALEAITARIREYDAQIEKLAEESYPDVALLKQVKGVGTLIALTYILTLEDPRRFRKSRDAGCYVGLQPGRRNSGQSEPQLHITREGDSYLRMVLVQGAQHILGPFGEDSDLRRWGLKLAERGGKSGKKRAIVAVARKLAVLLHHLWISCEAYEPLHNTRKRRMAAA

SEQ ID NO: 204472 - protein, 337 aa, unidentified
MSEISILAIDLAKGSFQVCGVKADGTVVFNRSVSRPRLYQLLAEQAHCVVAMEACATSHHWGRVAQSHGHEARLIPAAYVKPFVKRQKNDRADAEAIAEAASRPSMRFVAVKSAEKQGRAVAFRTHQCFVRQRTQLINALRGHLAEFGLVAPKGPASLKLLEKALAQPDVDLPAPVREMGVLYLEQIGRLTELVEQLADELECASKTDDELRRLCTVPGIGPVTAGAGAAFAPDLSTFDSGRNFAAWLGLVPRQRSTGGKARLGAVSKMGQCDIRKLLIVGAMSVIRWVVRKGGSANRWLANLVARKPRLVAAVALANKMARMIWAMTTKQENYRMA

SEQ ID NO: 204473 - protein, 339 aa, unidentified
MKYTPVGVDIAKHVIQVHFINEHTGEVVDKQVRRQDFLAYFSNREPCLIGMEACGGSQHWARELTKQGHKVRLLQARFVKAFVMGNKNDVMDARAIWMAVQQPGKEIAVKTEEQQSILVLHRSRRQLVKFRTAQINALHGTLLEFGETIHKGRAAMEREFPEALERMKERLPLYLITVLENQYNRLNELDSLIDDIEKQLTSVARQNETCRRLLDIPGVGPLIATAALAIMGKASVFKSGREFAAYVGPVPRQTGSGGKIRLLGISKRGDKYLRTLFIHGARAAALLTKEPGPWITELKKRRPASVAIVAMANKLARTVWAIAAHGRKYDKNHVSIRPY

SEQ ID NO: 204474 - protein, 366 aa, unidentified
MRSDIKSKELSSLEETRRQVNVRTGAIKLGIDVHQAFYVVVMQEDGSNPKPAQRMSRAAFLSWAAKLRRSHPRAVLHAVYEACGFGFGLQRELTALGIACHVVCPQKLDERKQRVKTDGRDAKALCQKLDRYVEGNKDALALVRVPTPEEEQLRAVHRQREQLVRTRKQLEAHGRSLLVNHGCEGISKWWKPRTFAKLEVPAWLQTLLSHTQPILLALEAQIRALALQLEASAAPGQPRGLGALSSVVIDREVGDWHRFKNRRQPASYTGLCPGEYSSGNTRVQSCVTKHGNPRLRAALVETAWRLVRFQPTYKPVVKWRKILAKGALATGAARKKAIVAVARQLAVDLWRLRTGQLQLADLGLVC

SEQ ID NO: 204475 - protein, 323 aa, unidentified
MSPVIGIDVAKRSFDVAIELINGKHRTKAKLSNDAKGFQALQAWLQTHAQPDSWIAMEATGTYHQALAEFLHARGYRVCVLNPAQTAAYARSQLSRVKTDRSDAKLIASYALRHREQLRRWSPDPPALKQLKALVRRRQDLQQMLQMERNRLDVAPAQVKDSIQVHLADLQHHIAQIEQAIDDHIDQDPTLRGQRELLVSIQGIADTSAALMLAELGDVRRFADASAVTAFAGLNPCLQESGERKGRVCISRTGSPRLRAGLFMPALVAMTHNPIIRALKQRLSERGKTGKQIVCAAMRKLLHLAYGVLKSGTAFDPKRGLAC

SEQ ID NO: 204476 - protein, 322 aa, unidentified
MAMLSFGGIDVSKDRLDITVLPDEQCSSVSNDAAGWAELVEQLRGSSITAIGVEASGGYERGVVRALLAAGMSVRQINPFKLRQFAKASGTLAKNDRLDARMIASFVAIMPTRPAQRQAPMIEQLAAMLTVRRQLSDHKVATENASRLLEGAMLQRLSRRRIAGLTADIDLLDQRLVEIVTADPALAHRFRLLTSMPGVGAVLACTLIALLPELGQMSRKQVAALVGLAPYDFDSGKLKGRRCIWGGRARVRHVLYMAALSASNWNPGLKAFHDRLEATGKKPKVVIVAVMRKMITTLNAMLRDGKTWVDRYSGRRSASTAR

SEQ ID NO: 204477 - protein, 343 aa, unidentified
MYYIGLDVHKKTISYCVKDAAGRVFQEGKIGSTRRELDAWIRMMPQPRMIAMEATIFTGWIYDHLLPYAEKVKVAHPLMLRAIAAAKRKNDRIDAAKIADCLRCDFLPECHMASTEIRDRRRTLRYRSLVIKQMVQMKNRVSGLLMETGVSYNKQRLHKLGYFEELMTTNEDVHDSIRPLLRLSRDLISRSQRLDYALVSSLERDPLLKERLRRLRTVPGVGPITALTWALEIGDFTRFTSNKQAISYCGLCGDENSSADKVLRMPISKQRNKHIQRVLIEAAKLATRESPELAMIRARELERGNPNLATLAVARKMVIYMLAVERRQQDWVPAEQFSRTAAA

SEQ ID NO: 204478 - protein, 335 aa, unidentified
MIIIGCDFHPSWQQVSWLDTETGDCGERKVVHVSGEAKMFYQQLGAPVLIGMEATGNSQWFVELVEDLGHEIWIGDAAQIRASYVRKQKTDKRDAAHILKLLLEGRFPRLWMPDREHKLVIIRSRVKNELQHLSMNKGVQKKRTLWSQAGQKMLRELALKPWASCRREDLLGLLAMLNQQIGKLDEAVQHAAEENPQAKLLMTQPGVGPNTALAYVLTIGDVSRFRRGKQVASYLGLIPREESSGGRQKLGAITKQGNRMLRSLLVEAAQVAVMHDPGLRKQYLHRCHQKAKAVAKVAVARKLAVRLYWMLRTNVAYPEIVRIESSSGLALVGAS

SEQ ID NO: 204479 - protein, 407 aa, unidentified
MNKKNQKTFIIEEGFDMINPDAAGIDIGSKIHYVCVPEGRDNERIRSFGCFTEDINKMASWLKKCKVKSVAMESTGVYWIPVFQILEQAGFEVNLINAQYIKGVPGRKKTDVEDCSWLQKLHSYGLLKASFRPNDQICVLRSYIRHRARLTENASTHVLRMQKALTEMNIQLHNVITDIMGVTGTAIITAILEGQRDPLELAKLRNERIKSSEDVIAKSLQGNYREEHLFILRQEFESYQFYQNQIQALDKVIEACYQTFDQQGNREPLKTKKKPKSKHTPPFDLRERLYVLTGVDFTAIPGLNELTVQTILSEVGTDMSKWETEKHFTSWLGLSPTNKISGAKVLSSRTRKVKNSAATAFRIAACCAGKTQTAIGAFMRRIKSKAGSPKAITATARKIAAPHCQEH

SEQ ID NO: 204480 - protein, 481 aa, unidentified
MGEKKPAPRGKSGHGGKRRGRGVPKTLQVVNPDAAGIDIGAESHYVSVPEDRSTEPVRQFGCYTPQLEEMAEWLLECGVKTVVMEATGVYWIPVFRVLESRGLEVLLVNPKHVKHVPGRKSDVADCQWLRQLHTFGLLRGAFVPPQDVAAMRTYWRQRRTLVEAASREILHMQKALTQMNLHLHVVLSDVTGVSGMKILRAIVAGEHDPVQLASLAGTQVRASREEIAQALSGHYTGEHLFVLGQALELFDVFQAKIRDCDGQLAIHLSRFEGKAGAGAPPSNPKRSRRVSRRKNEPYFDLRAELWRLTGVDFSRIDGIDSLTAFTVLSETGFDVSAFATEHHYASWMGLCPNNSITGGRVKRRHTRRVINRAADALRIAAQSLWRSKSYLGAYYRRLAARMGAPKAITATAHKLACIMYRAVKYGQQYVDKGEQYLEDQHRKRNLKSLVHRAKDLGYMLVHSETGECLPLTNQPLTPCVS

SEQ ID NO: 204481 - protein, 359 aa, unidentified
MTTATTTATTCAILALDLGKYKSVACAYDPDDGEARFQTLTTGRAELARLIDRERPAVVVIEACTLAGWVHDLCVERGVVCKVANTASEAWKFKHAKRKTDKDDALRLAQLEALGQLPTVTIPPKPTREWRALIAYRQGLVGRRVAAQNRIRAILLSQGLPAPCGHRAWTATGLEGIEQFARPLSDCGADELWRGLLLLALTELRQARDLIDQAEVRLDKMARASEAVRILETVPGVGPRTAEAVAAHLHDPRRFRSGKQVSAYAGLVPRQYQSGECDRRGRITKRGPGLLRKLLVECAWAMLRYNAWARAVYLRLSRGKARKKQAIVALARKLLVRCWAMLRDRTPWQDRLPAAAAPA

SEQ ID NO: 204482 - protein, 434 aa, unidentified
MTRQKLTPSGATLVAIDIAKHRNEVLVHMPGQRRRRRLTVLNTRAAHDRLIEALLAIGNVVVVGFEATGNYHRPLAWRLLEAGFEVRLISSVALARTREALHNSWDKNDPKDAQVILHLLQSGVSQRYYDPLAEGINDIQELSKTHEVVSKAKNEILHRIQTHYLSLYFPEIERFRNNSRSDWFFAFLDRFPTPAGITALGKDAFIRAAWDVVGRKVSKARLLADIYETAQSSIALPVALDSSAVAMFRLVLAEARGLIRQRDAIERMADELLRDRPDYRRLRQIPGIGPINALTILAEAGDLQRFGHHRQFLKFCGLDLSTHQSGQFRGQTRLSKFGNARLRRALWMAAQVAIRQRENSFRDKFERYIAKDRHNPDLRRKALTAVTAKMGRVVHAVIKSGTDYRPFFEAAVPSGRTSLRLGREGAPRNSGATL

SEQ ID NO: 204483 - protein, 348 aa, unidentified
MITIGIDPHTRTHSAAALDAQGRLLEEITVGSNAAELDRLARWIEGVGAERTVAIEGARGFGLALCRKLLAAGERILDVAPALTASERRSARKAGKDDRGDAVAVARIALRERGLPRVSAEVAASDLKLLVDARDQLVSEATRVRNRLHALLVTIAPGYQEHVRDLTGSASLLVARRLASRARGRDQVRSTLACSAIARLRSLSAEIDGLEREITSVLDQAEPGNLLSICGVGSLVAAKILGEVRGVGRFSSAAAFASYSGTAPIPASSGTVIRHRLHRGGNRQLNRALHIVALTQARRDARARAFLARKRAEGKTPREARRALKRHLANAVYRALLLDAEEARSAEA

SEQ ID NO: 204484 - protein, 361 aa, unidentified
MTTVAHNFTFVIGVDTHARTHTYAVLAANGEQLGTESFPNTHAGRSRAIAWAARRTGGDLEALWVIEGTGSYGALLAGTVIRAGYRVVEAPRVRAYATARHGAGKSDPLDAAAIAAAALPLKESHLRIPRQDEGVRAALRVLVTAREQITDERTAKVNALTALLRSVDLGVDARKPLTDTQIAEITRWRQRDEELSAATARTEAIRLAKRIVVLDAELKDNEKRTVELIQASPVAPLLEETGVGPVTAAVVYTAWSHLGRVRSEAAFAALAGVNPIPASSGNTVRHRLNRGGDRRLNSALHMATVVRMVHDPATRAYAQRRTAEGKTSREIRRCLKRYLARRLYRTLNALHTAPATPPLTV

SEQ ID NO: 204485 - protein, 359 aa, unidentified
MDKSSMFFVGLDLGDKFSYITILDQDGEVIEETRLPTTRASFQRKFSALHTCRVAMEVGSHSRWVSYQLKDLGHDVLVANARKLRAIYHNPRKGDRVDAETLARLARLDPRLLSPVHHRSAQAQAHLAVIRSRDALVRSRTSLINHVRGIAKSNGAQLPSCSAQCFSVKVEPAVPEALRPALLPVLETIASLTQQIRAYDRQIEQLCQIHYPETKLLSKPSGVGDLTALAYVLTLEEPRRFQKSRQVGPALGLVPKRDQSGDHDPQLRITKTGDSYLRRLLVGSAQYILGPFGPDCDLRRWGLKLAERGGKNAKRRAVVAVARKLAILLHHLWKTGEIYDPFYHASKKVDEPVSVPVSV

SEQ ID NO: 204486 - protein, 313 aa, unidentified
MQETTMNVGIDVSKATLDVSVRPTNESWQAPNTQEGIEQLVKRLTELAPERIVLEATSTYHLNLVTALVAAELPAVAANPRQVRDFARATGHLAKTDRLDAAILAHFAEAVKPEIRPLPDEEQQGLSALRVRRRQVVEMLTAEKNRLGTAPKGIWPRIEAHIAWLTEELGDINKQLRAMIEQSPEWRDLDALLQSAKGVGPVVSMTLIAELPELGRLNRHEIAALVGVAPLNHDSGQYRGKRIIWGGRAEVRDAMYMAALVATKRNPVIRVFYERLLEAGKEKKVALVACMRKLLVILNSMVKTGQHWNPSLA

SEQ ID NO: 204487 - protein, 351 aa, unidentified
MPHKLNSGIAVIGIDIGKNSFHVVGHDKRGAILLRQKWSRGQVEARLANLPPCLIGMEACVGAHHLSRKLQMLGHDARLMSAKYVRPYSKGQKNDFRDAEAITEAVQRPTMKFVATKTTEQLDLQALHRVRERLVSQRTGIVNQIRAFLLERGVAVRQGLRFLRAELPRILAAPCDALSPRMLRVVEDLAGDWRRLDERIEGLSSEIEALARQDKSCERLMTVPGIGPIISSAMVAAIGTGDAFSKGRDFGAWLGLVPKQISTGDRTILGSISKRGNRYLRALFVQAAWVVLVKVGPKHWERYGLKSWIEAAKKRLHHNVLAVALANKLARIAWSVLAHGRTFETSKIQAA

SEQ ID NO: 204488 - protein, 343 aa, unidentified
MGIVVLGIDLGKNSCSLAGLDASGRVVLRRRMRRGSLESFVGGLERCVVAMEACGGAHHLGRVFVGQGHAVRLMSPEYVRPYVKAQKNDDLDAEAIAEAATRPTMRFVEVKSQAQSDVQALHRARERLVSERTALINHLRALLLERGIVVPQGRRKLEEEIAVFADEDAIEALSPRIRRLIEDLRSEWRTLDERIAGFDVEFVRMAREDEAVRRLITIPGIGTINATALAAAVGDARTFVRGRDMAAWLGLTPRQMTTGGKPRLLGITKRGNRYLRKNLIHGARAVLPYLIERETPLGRWVRGLLARAHKNIVVVALENKLARIAWAVLARGCTFEPGGAAAV

SEQ ID NO: 204489 - protein, 417 aa, unidentified
MKSAPSVLPDDAPNGLTCGIDWARDDHAVAVVDARGREVHRCVVEHSAAGLRALLDMLRRRGVGEVAIERPDGPVVEALLEAGITVVVISPNQVKNLRGRYGSAGNKDDRFDAFVLADTLRTDRARLRPLVPDQPATMALRRACRARKDLVSHRVGVANQLREHLKRVFPGAVGLFADLDSAISLAFLTRFDCQDRADWLSPKRMAAWLASTGYCGRVDPAVLHARLAAAPRGATGEHGTAEAHVTRALLAVLVTLTEQIKALAAQISEQLALHADQHIFTSLPRSGRVRAARLLAEIGDCRARFPTPESLACLAGVAPSTRQSGKVRAVGFRWACDKQLRDAVTDFAGDSRRASPWAARLYDDAIARGHDHPHAVRILARAWLYVIWHCWQDGVAYDPARHKALQRILAQQKPAAA

SEQ ID NO: 204490 - protein, 412 aa, unidentified
MFKIFRNNCCGLDVHKTWIYACIGITDPNGRTEYKQARFSSFSKGLRELAAWLAKYSCTEVCMESTGKYWIPVFNILEKSCLVTLAHPKYTKPQKGNKTDRKDAKWICDLFMCDMIKPSFIPSPEIRQLRDLMRYRFKLTNVLTGEKNRARNCLTVSNLKLDDVFSDVFGKSARSITNYILEHPGETFDVSPFVDPRCKTPVSEIQAAVDGAISPEQAVKLRQCLAHIDELEAHRKEIESEILQIAEPFSAVLDLLYTLPGLDKNPMTAIAILSEIGPDMSVFPSSKHLVSWAGCCPRNDQSNQKVKSRRISRAGSYLKPLLVQVANALIKSKKHPEFKERYHRIKSRRGHKKAIIAVCKMLLTAIWNMLSKLEPYNPEGFLEHRPVKQEKTLTVSQALELLRLRGYTITNQ

SEQ ID NO: 204491 - protein, 314 aa, unidentified
MTQQIEEIFIGIDVSKTMLDVAQWELEAVERYANDAEGIAAIVNRLDAQPSIALIVVEASGGFEQALVSELAAVRLPIVVVNPTRVRNFARALGQLAKTDKIDAQVIVHFAQSIRPEVRPLADSDQQFIKALVTRRRQLIDMQTAEKNRRSSINPSLLSRLEKHIAWIAAELAEIESELEEWIDNNTHWRETRDRLESVPGVGTVTSFTLLAELPELGTLSRQKIAALVGLAPFNRDSGRFRGRRHIFGGRSDVRSVLYMAALSGIRHNPFLKVFYDRLIANGKLFKVAITACMRKLLTILNAIVRDGSSWQAA

SEQ ID NO: 204492 - protein, 373 aa, unidentified
MPTNLRYLGLDVHAETIAVAVAEPAGEVRFLGVIPNRPEAVTKLVRKLGPREHLWACYEAGPCGYVLYWQLTRLGVHCDVVAPTLVPTKPGDRVKTDRRDAGKLAHCYRAGDLTPVWVPDAAHEALRDLVRAREAAKQDQLRARHRLGKFLLRQGHRPPAGVKPWTQRHRRWLDALHCELPAHQATLADYLYEIDHAVARLDRLEVALDEAVQAAPPPMRAVMAALQCLRGIRQVTAATIVSEVGPLGRFPHPRQLMGYSGTVPSEHSSGSRVHRGAITKTGNAHLRRVLVEAAWAYRFGPKCAKGLRQRQHGQPETITALAWKAQQRLCSRYRRLLARGKPTPHVITVVARELVGFIWAIGVAVERELAMAA

SEQ ID NO: 204493 - protein, 338 aa, unidentified
MFNLPLFVGLDYHTHTIQVCVMNQQRQILVNQSVANDPEAVFRLVAPFGSNVHVAIEASTGVADFADQLIARYCWQVELAHAGYVARLKQTPDKSDWTDAKLLADLTRAGYLPRVWLAPQPIRDLRELVRYRHGLVQQRTQAKLRLRAALRHHRVVCPHKPWTIPWKQWLRNPQNISSLTLQFLLQELFDAIDYFNTKIATATERMTAQVADDSVVKHLLRQPGVGVITAITLRAMIGHFDRFHSGKQLAHFCAVCPRNHSSAGKTTTSGLIKAGDDLLRIVLIEAAHRLIRYDTHWKSLATRLRANGKKTCVIVAAVANRWIRKLFHQMREPMMDMA

SEQ ID NO: 204494 - protein, 352 aa, unidentified
MRKRNTIGMDMGDRNHRICILDAQGEVVSRKSVGNTAVALRKCFKNQKPALFAIEAGTQSAWVSRVLEEMGHEVLVGNPRKLRAIWSSNEKCDERDAEMLARIARVDPNLLYPITHRGRESQLDLLNIKARDLLVKTRKMQIAHVRCVAKGFGERVSKCSTKSFHSHAVEELSAELLDALAPVLGSIKELSARITEYEKRIRRISQERYPETATLQAVVGVGPITALAYVLTLEDPTRFKKSRDVGPFLGLVPKRDQSGDSDKQLSITKAGNFALRRLLVGCAQYILGAFGPECELREFGLKLAERGGKNAKKRAVVAVARKLAVMLHRLWLDGASYDPFYQQSRKQSSRAA

SEQ ID NO: 204495 - protein, 326 aa, unidentified
MWIIGCDFHSGFQQVAIFDKQSGAIEEKKLCHPAPATEFYRQLQGEVLVGMESGCGCQWFRRLLQECGHQLWMGDAARIRASETRQQKTDRRDAELILKLLLEGRFPRIWVPTEAERDVRQLLLDRHHRMRMRTRVKNQLQGLALNQGVQKGRRLWSEEGLRQLRELPLLEHAGRRRDQLLKLLTELNGQIAVLDGVVRREAEGREEVRRLMTHPGVGPQTALGMVLTVGQVSRFASSKQLASYLGLTPREHSSGGKQRLGHISKQGSSFMRFLLVEAGQTAVRGDEELKRAYRRLAAKKSRAVAKVMVARRLAIRLYWMLRNRWT

SEQ ID NO: 204496 - protein, 343 aa, unidentified
MQHYVGLDVSQKTTAICVVDEQGRQLWRGVCVTDPGAISARVVKHAGVDAKLGVETGSMTPWLVHGLRSAGLEVDCLDARRVKTALQMRLNKTDENDAEGLAQIMRTGWYRAVHVKSLDAHRARALLGARAQLVGMTTRLSNMIRGVLKTFGLLPGAGRGLSFDRKVEALLEGVPEIALIVRPLLATWRQLREQIAVFDKAVRQRVRTDPICRLLMTVPGIGALSSLMYVSTIEDPGRFSRSRAVGAHLGLTPRRYQSGETDRSGHISRCGDGLARTLMYEAAIVILHRVKRSLYLKDWAEAIERRSGSGKARVALARKLSVILHSVWRSGEPFRWAPQAAAA

SEQ ID NO: 204497 - protein, 413 aa, unidentified
MDVLHSRCCGLDVHKSSISACVLLREAGRVQKHQRRFGAMTQELQELAEWLRQFGVTQVAMESSGVYWKPVWNILEGQFTVVLANAQHIKNVPGRKTDQKDAEWIAQLLQYGLLRASYIPCEIIRDLRDLTRMRASLSQEASRISSRIQKVLEDANVKLASVATNVLGKSGRAMLEDIITGEDDPEHLASLALGHLRVKIPQLRLALQGKIRSHHRFLLRRLLDQIQFLEHEIALLDERLEDIGRQRPDLAQAVARWDTIPGIDQVAAWALLAEIGNNMAQFPTADHLASWAALCPGNHESAGKRLRGTTRQGSTWLCRMACQCAWAAARTKNTYLSSQFRRLAARRGKKRAIIAVAHTLIVIGYHLQKNQSNYEDLGGDYFDRIHSDGLKRYLVKRLQQLGHKVTLEPIEAA

SEQ ID NO: 204498 - protein, 355 aa, unidentified
MDSTKYIGMDVHKEATTIAVLDASGRLVMESIVETKAATIVQLVQGLRGDLQVTFEEGTWAAWLYDLLKPYVAKVVVCNPRKNALLQSGNKSDRIDARKLAELLRAGLVSAVYHGENGLRTLKELSRSYLTITKDLTRTMNRVKALFRSWSIPCAGASVYAPRHRAEWLSKIQEAGVRRRAELFYQQLDGLQELRQQARKDLLAESRKQEATKLLRKIPYIGPIRAALLIALIQTPHRFRTKRQLWAYSGLALETRNSAEYRYKKGELQRSPKPVALRGLNENHNHDLKGIFKAAAVRASTAGPFQQFYTALVAQGMKPTLARLTLARKMATITLTVWKKGVCFDAARLKRQESV

SEQ ID NO: 204499 - protein, 356 aa, unidentified
MSQKLDTSPAVIGIDIGKNSFHIVCQNQRGAIVLRQKWSRGQVEARLANLPPCRIGMEACVGAHHLSRTLTALGHDARLMPAKYVRPYSKGQKNDYRDAEAIAEAVQRPTMKFVATKTADQLDLQALHRVRERFVGQRTGIINQIRAFLLERGIAVRQGPRFLRTELPSILATRTDTLSPRMLRILEDLMADWRRLDARIEDLSSEIEAIARQDKGCERLMSIPGIGPIISSAMVAAIGAGDAFSKGRDFGAWLGLVPKQFSTGDRTILGSISKRGNRYLRSLFVQAAWVVLVKIGPKNWDRYGLKSWIEAAKKRLHHNVLAIALANKLARIAWAVLHKGRAFECVKTNEVTSRPA

SEQ ID NO: 204500 - protein, 348 aa, unidentified
MRFYTNQHKYYCGIDLHARSMFICILDQEGKTVLHRNRKASPEAFLKAIEPYREDIVVAVECMFVWYWLADVCAGEKIPFVLGHALYMKAIHGGKSKNDKIDSRKIATLLRGGNIPMAYVYPRKMRSTRDLLRRRNHLMRKRSELLAHIQNTNSQYNLPEFGKKLAYKTNRDGVAEHFPDPSVRKSIEVDLQLLDFYDQLLNDLELYIVKKAKVDDVYSWYRLRSIPGVGKILSLILLYEIHDINRFPTVQDFVSYCRLVKCPRESAGKKFGTKNSKVGNAHLKWAFSEAACLFLRGNEQAQHYHARLVSKYGKGKALSILAHKIGRASYFMLKRKEPFSMNVFFQQT

SEQ ID NO: 204501 - protein, 355 aa, unidentified
MPLYSQKKQREAALRPAAVTTPDLFVPDTAPALPALPALGIDIAKATFRACLLRPGAQRSVEADFVNTPEGFAALTRWLEEHGAPCTRAALEATGHYSLELLRYLHGARHAVSLLNPRWIKDYARSEGRRNKTDAVDARLIARYVQTHATRTWQPRTAPQEALQALSRRREEALPALTSEKLRLQSAASQTASFIKTSIAHYERQLLAIAKAVEALLKNDDTLRHHCALLESIPGIGRTTAILLLAELPALECFERVRDAAAWAGLTPALRESGTSVRGRSRMNKQGSGRLRKALYMPALVLLRSKASHVFGHLRDRLRKAGKAEMVIIGGLMRKLFQTACGVLKHGQRFNQSLS

SEQ ID NO: 204502 - protein, 303 aa, unidentified
MSISYIGAYVDCKMTELDVEKNQKIIYRARIKTTIPTLRQELAKFSGKKFLIFEECPLAGWLYRNLQDAATEVIVSDPRRNKLISSDGDKTDDLDAADLAALYRGGYIRQVHHPLDEDHQALREALALYYDRVRQRVREVNKFYAACHGHGITVAKKDFLKPGWRAEWFELLPKSLREQLAISAIGLESIVLQSKQAKNLLIRRARKFEIIKFWNELPGISWVRSSTIFAYLDTPWRFKTTKRLWKYCGVGLRRIASGSDKNGNPRPGQVKLHKFVNSKLKASILGAALSAIIKDGARWCNPK

SEQ ID NO: 204503 - protein, 346 aa, unidentified
MTIVETRPITGGVDTHLDTHVAAALDGNGGVLGVESFPTTLAGFAALAAWLAGFGPIARVGVEGTGAYGAGLARHLRGIGLEVIEVDRPNRQVRRSSGKSDTIDAVEAARAVLSGRARGIAKTADGNVEAMRVLLIAKRSGRDTRIACLNQLRHLGFTAPDELREQFRGVPKTRLADLAAGLRPRRDSDPVVHATKLAMRTIGRRVLAAIDDNDVLDAVLAALVAATAPSLLALHGVGLDTAAILLVAAGDNPERVRSEAAWAHLCGVAPLPAMTGKTTHRYRLNRGGNRQANHALWRIVFTRMGSDPRTRTYVARRTTDGLSTPEIMRVLKRYVAREVYRHLPRP

SEQ ID NO: 204504 - protein, 344 aa, unidentified
MEHFAGLDVSVKETSVCIVDDTSKIVREVKVASEPAALLAVLKNPTYHFKRIGLEAGPLSQWLYSALAEAGLPVICVETRHMRAVLKAQINKTDRNDARGMAQMMRVGLYRPVHVKTLRSQKLRMLLTHRKLLQSKAIAIENDLRGTLRNFGLKVGMVGKVKFETRIKELVENLPDLAVLVEPLLIVRRALREQFCILHRRLLAIVRDDEVCRRLMTAPGVGPVVSLTYRATVDVPARFRKSKSVGAVFGLTCAKYQSGEVDWSGRISRCGDEMMRVMLYEAAQSMMRSKKWSWLKAWAMQIARRCGMKKAIVALARRLAVIMHRMWVDGTEFRWTREQVAAAA

SEQ ID NO: 204505 - protein, 395 aa, unidentified
MFIVGIDVAKRSHEVCMITSDGQTVQRPFSIRNNCTGYNLMLEKIRKHTNIKSQIVFAMESTAHYWLALFTRLRKDGYHVILLNPIQTSAMRDMFIRKIKTDAKDSFIIAELIRFGRYAESNVAQDRLLALKELCRNRFYLVDMAGDLKRKLIALIDRVFPEYEAQFDTIFCKSSVAVLKKYPTPQKLSNAHLDKLTELLWNSSNGHFGEWKARELKELARNSFGVEDCDGAYSTLILLMLDQIQSLSGKADALEKEISRLFQSFDTTVTTIPGVGPIIGAVILSEVGDISRFSSADKLAAYIGVDPSVNQSGEFQAAHAHMSKRGSPYLRRCIWMASQVAVQRDPMFRAYYEKKAAEGLKYMTIIGHVTRKMTTVIFAILRDHKVYEPVLPTAA

SEQ ID NO: 204506 - protein, 428 aa, unidentified
MLKQNTEPDPAPDFAAFLAIDWADEEHAFHLQVVGQSKIETGTLEQKPHVLGPWVAKLRERFGGRPIAVGLEQSRGALIHGLMSYDFLVLYPIHPTTVAKYREAFKSSGAKSDPLDAGQILEILTKHQDRLHRLNPDTVETRLLGRLVEDRRKAVDLRTTHVQALGANLKEYYPQALELTNDNLSSRLAGDLLIKWPTFEDFQQAKPSTLKRFYYGHNVRSPEVIERVLTLAQKSQALTTDPAIVESGRRLTQMYARLIQALHPAIADYDQRIQQVFNAHPEAKLFRDLPGAGPALAPRLLAFFGTDRSRYAAAFNVQSFTGIAPVTKSSGKSKVVYARAACPKFDRQTFHEFSRLSVIRCQWARNYVQYYTDKGKKYHTIVRALAYKWIRILFKCWQERTPYNEDKYLETLKLRGSIFATWHLQKKS

SEQ ID NO: 204507 - protein, 373 aa, unidentified
MPRYSTAFGMDVHLRSTTVCALDAETGEAVTRRFRGNPWGEVAEWMSGFPGPSLAAYESGYLGFAPQRELSGLGVDCVVAAVSKVPRSAADLSSKNDRSDAARMAKAILSHDISPVWVPSPEIEGLRDLAAAHDAATARLAAAKQRLLAFLARRGYAYGGTTPAGNPRRYWTYDFLRWLDKVRPADDGGIRALAALRNEVEAAAETRDDLLAEYRAAVAAGPLSAEVEALQSIKGCGFALAAAFASEVGDFSRFRSGRQVTSYFGLAPKQRSSADSVRLGGISGAGNALVRRLAVEGSWSYVQASHQPKLMPKGSGVPLEVRMHGRKGSERLLRRREEMLARGMPQAKANAATAAELVRWLWALGAMCREATE

SEQ ID NO: 204508 - protein, 410 aa, unidentified
METVVERPAALDVHKEQVTGCVRTPGAEGRRDQHVAEFKTTVQGLLALRDWLKAHGVTQVAMEASGVYWKPPWAILEDEFDCLLVNARHVKQVPGRKTDVSDAAWLCQLLEAGLLERSFVPPKPIRTLRNLTRYRKAQVGERQREANRLHKILEDTGIKLDCVATDILGASGRAMLDALVAGTTDPGVLADLAKGKLRQKLPALREALEGRFDAEHGIVVGAILAHIDFLDEQISLLSDAIEEQIRPFAAAVELLCTIPGVQRRTAEVIVAEIGTDMSLFRTAGHLASWAGLCPGNDESAGKRRSGRTRKGSRWLGIALTEAAQANTRSRDTYLSAQYRRLKPRRGHRKAIGAVRHSIIVACWHMLTTGEIYRDAGGDYFTRLDPDKQTRRLIAQLERLGHTVTLQEAAA

SEQ ID NO: 204509 - protein, 392 aa, unidentified
MVYVGIDVAKDKHDCYIVNSDGEVLAEVFTISNDQDGFTLLFQRLQSVAPDLSNVKVGLEATGHYSYNILGFLLDKGLTTYVINPLHTNLFRKSTSLRRTKTDRVDARAIAAMMMSDVVLTSYTATSYHNEELKSLTRYRFEKVQERARLKQSVARLVNILFPELEKLVPTLHMQSVYALLAELPGAKQIASCHLTHLKALLNEASRGRYGRDHAIEIRDAARRSIGSVMKMKSMELQHTIRLIRELDAEIEEIEAAIKEIMDEMAPPILTIPGISYRMGAMILAEIGDFSRFDSPDKLLAYAGLSPSTYESGKLKATGAYAHMEKRGSRYLRYALFNAAKYVCFWEPSFAAYLAKKRAEGKHYNVAISHAAKKLVRLIFALQTSGKAFQPA

SEQ ID NO: 204510 - protein, 361 aa, unidentified
MRIIGCDLHARQQSVAMLDTETGEVVNRTLMHEGNEVREFYAQLLQPVLVGIEAIGPMQWFLQLLDELGIECRVGDAAKIRAAEPRKQKHDRRDAELILKLLVEKRFPTIWMPSQEQLDLRALLLHRHHWVRLRTQIQNALQAIALAHGLRRGPSLWSYDGQAKIAFLPLPPHASYRRSMLQALYRKMEEEIEQLTAQVAEQAEQRSGARLLLTHPGVGPVTALATDVFLGDPQRFADGKALASYVGLIPREYSSGAHQRLGALTKQGSPFLRFLWNEAGAHAVRRDPELQRFYRRKLVQKGLGKARVAAARKLDIRLWIMLRDQIDYQEFCRRGQKQQSGDACAGMLEVGNGANGHRPVG

SEQ ID NO: 204511 - protein, 343 aa, unidentified
MMKDTMIGVDLAKNVFQLHAASITGHPKYRKKLPRNNFAAFMAQQPPAIVVMEACGSAHYWAREMIKLGHEVKLIAPQYVKPFVKRQKNDAADAEAIVTAAQRPEMRFVDPKTAEQQSRAILFRARERLVHQRTELVNALRACLYEYGHVVPQGIHNIKRIEGILDVPNSDLPDLMREECKELLVQIAEKTIRINARTGKIKALAAEADAARRLQTIPGVGPLTALAVEAFAPAMECFKCGRDFAAWLGLVPRQFSSGGKERLGRISKAGQADIRRLLIIGAMSRLNWLGRKSIPEDSWLARLAARKPRMLVAIALANKMARTIWALMTKGEDYRDSAQAAVA

SEQ ID NO: 204512 - protein, 343 aa, unidentified
MQIRSVGIDLGKTSFHLVILSEAGKVLLRKKFTQKQLITFTANMQTCLIGMEACSGAHFLGRVLREQGHDVKLIPAQFVKPFVKSNKNDFLDAEAIAEAVDRQNMRFVPIKTDDQLDLQALHRVRDRLIARRTSVINQLRSFLLERGMTFAKTPAKLKLAMPEILENADANLTLRMRNLVSLLWSEWKDLEQQIIAMNADVEQIASSDPACQRLRQIPGVGPLVATAIVAAIGNGAAFHKGREFSSWLGLVPRQHSTGGKARLFGISKRGNSYLRKILVHGARSAVLRVKRERSPFGPWLDALEQRAPINVVITAAANKLARIAWSVLSSGQEYRPTVSPTAA

SEQ ID NO: 204513 - protein, 403 aa, unidentified
MVFVGIDWAEAHHDICVVDEAGQVLEKRRVPEGLEGVGKLHALIAEHAEDPAGVVVGIETDRGLLVGSLVAAGYQVYAINPLASSRYRARHATSGAKSDPGDARVLADLVRTDRHQHRPLAGDTNLAEAVQILARAHQGLVWTRQRQVNQLRNALREFYPGALSAFVDLDAADAVAILERAPTPIRGRALSQAKIISALRQGGRERNLEAKAAQIQVQLRLPQLQAPALLAEAYGHSVAATVAVIKQLNLQIAALEQELAASFEIHPDAEIYLSLPGLGVVLGARAMAEFGDDRARFLHPKARKSYAGTAPITKASGTRKVVLARVARNRRLADACYQWAFSALTRSDGARHRYDVLRRRGQTHHQALRALANRLVGILHGCLTSRQTYSERIAWSADMQVAA

SEQ ID NO: 204514 - protein, 392 aa, unidentified
MVVSVGVDVSKDKHDCFIVSSEGEVLADVFTIPNTMDGFHYLLQRIRHCTTPQDKIKVGLEATGHYSYNILGFLLDNDLPVYVMNPLHTNLYRKSLSLRKTKTDRVDAKTIATMLLSDVDLKSYTDTAYHNEELKSLTRYRFDKVQERAKLKQSVSRLVTILFPELEQLVSSIHGTSIYALLSEYPGAKQISEAHLTRLANILVKTSRGHYRKDKATHIRDAARTSIGSVMPAKSLELKHTIKLIQELTSEINEIEDAIRKIMDELKPPILSIPGMGFHSAAMILAEVGDFSNFNSPDKVLAYAGCSPSTYQSGKLTNCYAHMEKRGSRYLRYALYTATKYVCYWNPVFTEYLTKKQAEGKHYNVALSHATKKLVRLIYALQKSGKAYLAVT

SEQ ID NO: 204515 - protein, 344 aa, unidentified
MSEVIIIGLDIAKHVFHAHGADERGRAIFSKRISRGKLLDFFAAHPSCTVALEACGGAHHWARQLTQLGHEVRLIPPAYVKPFVRRQKNDAIDAEAICEAAQRPSMRFVAVKSEQQQAAGLVFRTRDLLVRQRTQLINAIRGHLTEYGWIAPKGPSHVAMLADLLEEEEMASSLPDAARAMFRLMLDLLAGLAGKIADLDKEIARRAREDEVSRRLMTVPGIGPISATAIAALAPPAETFAKGRDFAAWLGLTPLQRSTGGKRKLGATSKMGERTLRRLLIIGSSTVVLQASKRGAPKGSWLEQMLARKPRMLVTVALANKMARIIWALLVKQESYRAPVAAKA

SEQ ID NO: 204516 - protein, 347 aa, unidentified
MNSVGIDLHRNRSHVAVIDGQGELSLSRRIVNSRETFLELLGELKGESRIAVEATYGWEWLAELLEDAGYEIHLAHPLRTRAIAAARVKTDAVDARTLAHLLRADLLPEAYVAPRELRDLRELLRHRIALTGMRSALKNRVHAILAKHGITRQHSDLFGPGGRRFLSEVRLREAPRRRLDSLLALIDDFDREIGTTTAEIEQRAKADARVDVLTQIRGVGRYTAMLIIAEVGEIERFPDARHLCAWAGLTPTVRSSDGRARLGHISRQGSPALRWALVEAAQKCTTGGGPLRESFERIAKRRGRKIAKVAVARQILTLSYYGLRDGEIRCLARRSRASAKEKLAVAR

SEQ ID NO: 204517 - protein, 386 aa, unidentified
MQKLNDLSRCLTPLEPDSTLIAVVEMSLSSWLVAGIVPGVERQPLKKLAVDESVLLKLLHRWREEAEKAGYMIKRIAVAFEAGRDGFWLARWLRARDIEVHVIHASSVAVSREHRRAKTDRLDTELLKRAFLGWLRGERDHCKMVAIPTIKDEDGKRPNRERESLVGEQSRIINRIKATLVRLGIRGFNPKLKKAAERLEGLRTPEGELIPPNTLSELYRDMERRRLVRDQIRQIESARLDRLEHAPGEGAHAMVRLLARVMGIGIETADMLVQEVLSRNLRDRRAVARYAGLTGSPDESGKKRREKGLARSGNARVRRGMIQLAWRFLLFQKDSALAQWFRARTENARGTRKTMIVALARKLLIALWRLVREDVMPDGVILRPAQ

SEQ ID NO: 204518 - protein, 453 aa, unidentified
MAPPSHVAPRQRTVGIDLAISAVQVAQVFDDGRAVGKPIRFRLTPADLKRFIAAVKSGLAGDAKITAVMEPTGMAWFPVAAWLQRAGVTVIRVKGQRVKALRKYLSEHAKTDMADAHVLGAMPGFGGHGLDPVHVPAPDQHALQRLTKQRHRYQELVCSARRRVLDLIRWACPALEPALPQTTTQLTLAILGELFDPRKVVAMRRDVLARLLARNASGNHPKSGPFIDELVDKLKAAAEETIELHGEAVDFTALQFEVAQEVEHVRLWERHIGEIERQVEQIYQRVHPSNALRSIPGIGPTLAPLLIGVLGHAKRFRNEDHIRGFCGMFPAKSSSGGVDKPGQRLTKSGSDRVKRALYIAADVARKIDPDLAAVYWRLMVKKGHHHKQALCAVATRLVNRIYRVLKTGEPYVLRDQQGVAITVQEGKRIVTAHFTVPLDVRQSRRKQLMPQPA

SEQ ID NO: 204519 - protein, 343 aa, unidentified
MQTVTTIGLDIAKSVFQVHGVDANGQVVIRRQLKRRYILAFFQKVPPCLVGIEACASSHHWSRELQALGHTVRLMPPAYVKPYVKRHKNDATDAEAICEAVSRPNMRFVATKTPGQQSCLTLHRTRHLFIRQQTSVINAIRAHLAEFGIVAPVGRHGVEQLLQVVADKSDKRLPEVARTCVAALGAQLQTLKAKILEFDRLIMAWHRSSETSRRLDDIPGVGPALATALVASIADPNAFRSGRDFSAWIGVVPRQNSSGGKDRLGSISKRGDRYLRGLFVAGALAVIRYAKIYGTKHRPWLTALLARRPTKVAAIALANKIARMAWAMMAKGQRYKEPVALAV

SEQ ID NO: 204520 - protein, 419 aa, unidentified
MDKIKTGKFRVVNEKTLLVTVDIGKPMLTAYCRCLQRRTWKPFEVSNNLKGFEKLWEHICWIKTANHLEEVVVGFESTGVYGEPLAHYFRQKPVKLVQVNPMHTKRVKELEGNSPRKTDRKDPKVIADIIELGHALSVVVPEGAAAELRRLTSARERRIERRTALYNQLQDLVFLIFPEFLEVMKDVKTRSAQFLLGHYPTPEAIVGLGLEGLVQVLRRVSRGKLGRERAEALYEAAQRSGGICEGRRGILLEMGEMLSEIETLMRFMEKLEEEIRSYLKQIPYRDMLLSMKGIGDITVAGLIGEVGDFRQYRILPEIMKMAGLDLFEISSGKHKGTRRISKRGRPLLRKFLYFAAINTVRKGGVMHATYQRYLERGMPKMKALVAIARKLLRILFALVRDHSLYSENYMKMECLKLAA

SEQ ID NO: 204521 - protein, 389 aa, unidentified
MLCVGIDVAKRKHDCCIIDSDALKTVESFTFPNSREGFDMLLSKISELGIPKDKIRVGLEATGHYSSNLAHFISEHDLPLLTFNPLLTNRYKQGFSLRKTKTDKVDACAIAQMIVSGKGSQTYSSSLYHNEEMKSLSRYRSQTMQKCSKLKISVSRLVTILFPELEGLTSSIHLASIYALLKAYPGHEQIAHCSMKRLTHLLSDASQGRFDKSKALEIHQAACRSIGKVSLSASMELVHTITDIEVLKQHIVEIDEKLKEMVDQEESSIIDIPGIGYTLCASILGEVGDFKRFPDVDKLLAYAGMSPSKHDSGDYHSKHNKMEKRGSPYLRKTLYLAARLVAQNVPRFKEYLEKKLSEHKPYKIALSHVAKKLIRLIYRLGISGCPYLA

SEQ ID NO: 204522 - protein, 370 aa, unidentified
MLNTTTFVGLDVHARSIKAVALDAMTGEVRSATFAYDAAAVAEWAGSLDPAAKCVYESGVTGFDLQKKLTALGVDCVVGAVSKMIKPSADRKRKNDRNDAEFLARMLSVGNVVEVWVPDDECEAARDLVRALDDAREDLKRCKQRLSKFLMRHGYAFSETTPTGRRKGNWTAAHWAWIKSISFPEKADNDVLAYYVDAVRQAMEDKARLERLVEAEASKPRWKRRIDSIRCLKGIDVTSAADLVFEAGEFSRFKSARSFAAWLGLAPSEHSSGESVRQGGITKAGNKHLRRVLVEAAWHYISASPHPKDLAKGQAPDPAARRHAAKGIRRLVKRREEMLGRGVHKNKANVATARELACWCWAVGRMIENG

SEQ ID NO: 204523 - protein, 317 aa, unidentified
MTFVGIDVSKATLDLAALSLTGEVRHETFENTAQGHAALLAWLEPFPRCRVSLEATSSYHQHLTETLQAKGLYVSVLNPAQVSYFVKSQHRRNKTDKADALWLAIYTKERHPVATPASNLRRQSLAREIGALQKDITRLKNRLEAASGGQVHPKVVASLKQRIIALKEQKRELEAELERETKDANGQELCLLTSIPGVGVHTACLLLAELGDVRRFASARKLVAFAGLTPAQFESGSSIARRSHISRLGSCHLRRLLYMPCLSAIRFNPIIKVFFERLVVRGKHKKAAVVACMAKVLRIVYGVLTQQMPFDPGRVST

SEQ ID NO: 204524 - protein, 357 aa, unidentified
MQKENSKLDFSDQEIYVGLDTGKKSWKVSILTKDFEHKTFTHPPEPEALVRYLHRNFPGAKYLCVYEAGYFGFWIHDALKQQGVNCIVVNPADVPTKDKERSNRNDRVDARKLVHNLRSGDLIPLYVPERRFLEDRSLVRMRMAMVKKQTRCKNQIKGLLTFYGYTIPDELAGSKWSGNFINWLDKLEFQQNSGKQALQVLLAELKHLRQSITQLTYQIRALAQQESYRTHVQYLKSIPGISTFTAMVLLTEIVDINRFKNLDHLASFVGLVPGEDSSGDQEINTGISHRHNAYLRVLLVESSWIAVRKDPALLMAFSKLTERMPKNRAIIQIARKVLNRIRYVLKNQQSYEPCVVA

SEQ ID NO: 204525 - protein, 372 aa, unidentified
MRDDSEVYVGLDTSKLKISVAVAAAGRDGEVRFFGDIDSTPEAVERLVRKLAQRHQRLFFAYEAGPTGYGLQRQIAALGHDCAVVAPSLIPKRPGERVKTNRRDALALAKLHRAGELTPVWLPDPAHEAIRELVRAREAAMEDLRAKRQHLQSFLLRHGRVYGGRSAWSRAHTRWLCELQFAHPAQYLVMAEYRQAIADAEKRLERLSEQVAELVPSWSMAPVIAAYQAMRGIAFLTAVTFVAEIGDVRRFESPRQLMAYLGLVPSESSTGEQVRRGGITKAGNSRARRVLIEGAWTYRFPARKSRLLEERQAGLPKAVCDIAWKAQLRLCGRYRKLMAHGKQRGVVIAAIAREMAAFLWAIGHEVEPAHAS

SEQ ID NO: 204526 - protein, 402 aa, unidentified
MKEFNSEAVRYETSSALKTVMQAQAGHQYPAYIGLDVHKETIAVAVARAGREAPESRGEIANKPQAVAKLVDRLNREFTGEVLLFCYEAGPCGYGLYRQLLELGQDCQVVAPSLIPKKPGEHIKTDRRDACKLAQALRSGDLTAVWVPGEEQEAMRDLTRARDDLKAQERKARQQLNAYVLRHGHAWPSNKTRWTKTHYHWLESLRFAHDWQQVVLQEYIDAAKAASQRVADITAQMERVLPQWSLAPVVDSLVALRGIDKLAAMVLLAELGDISRFDSPKQLMAYLGLVPSEHSSGGRRRLGAITKTGNRHARRMLVESAWSYRFPARQTAHLKRKAANASDEAKVIAWRAQKRLCGRYRTLLQAGKNTKQTTVAIARELTGFIWDIVCHEMPKIQPQVAR

SEQ ID NO: 204527 - protein, 421 aa, unidentified
MGKLIERCAGIDIGKRFLVCCVMTGAAHEEPRSETRRFDTTVPGLTRLRNWLNEERVTDVVMESTGSYWIPVFNLLEGHVTVVLANPEEVKNRKGHKTDRKDAGHLADLLRHNHVKSSYIPTEPVRQLRDLTRRRVQLTQDATRERNRVQKLLEQVNVKIGSVLTDVFGVSGLHMLLALLDGRAAPEEIAGLARGSAKRKTPQLIEAIEGNRMSDHVRFLIRGCLRHLACLEEEVEELDTEILRRMQLSTFQKAFTLLQTIPGVGQLSAATILAETGPDLDAFPTVEQMASWAGLCPGNRESAGIQKGPQTTHGNPYLCTALVQCAWAATRKRDSVFRSRFQRLAPRRGEKRAIIAVAHHMVIILYCMLKRGVPFLGAENAPKQRRRERRAHHHLRCLRRLGFSVEIRQNSEATPPDTISR

SEQ ID NO: 204528 - protein, 351 aa, unidentified
MKSNHSKKESIQREIVGIDLGDKVSRYAVVNHDGEVVEEGTFRNQSTSIEKHFRGERRRIALEVGAQSAWIARQLREMGHEVIVANARQVRWITASDQKNDRMDAKKLAWLARADVRLLAPVEHRSAEQQAELSIIRARDATVRARTLLVNTARGIAKSFGHRLPATVTATFGKRAAGTLPLILQAALMGLLEQIDGLGKQIRDYEERIAEAGAKHPELERMTSIPGVGTLTALTFFLTLGRAERFSRSRDVAAFLGLRPRQRQSGGLDPQLGISKSGDKYLRKLLVQCAHHTLGHWGPDSALRQWGLAKGAGGAKGATRRAIVAVARKLAVLLHRLWVTGEFYKPFPKAA

SEQ ID NO: 204529 - protein, 353 aa, unidentified
MRKVQDFIVRGKRIFVGLEDSKRTWKLCVRCEGMIVHETSMPAEYDNLWSYLGGRYPECTIQVMYEAGFGGFWLHDLLAADGIDCLVTPAHKVTQEKVNTVKTDRVDARRLAKNLENGDYTSCHVPDRERREDRQISRTLNQIQRDIVRTKNRIRRFLDFHGLNGQLPAGAWGSSHYQSLKRLALSRSLQISLDAYLRVLDELAALRSELTAQLKALCDKDRYRQGVGSKKSCVGVGWLSAIRFTLEWGNLSRFPSGDHLASYTGLTGREYSTGETIHRGRITRQGNGQVRAWLIQCAWRAISRDPVLLDKFDRVRCNCGSRKKAIVAVARKLVVRMRALELADQPYCAGVVE

SEQ ID NO: 204530 - protein, 330 aa, unidentified
MHPQGGVASRDHRPNAGIDVAKQHLDACWAGVELRVANDASGWDELTAKLKAAEVDLVLVEATGGYERGLVCALQGAGITVARVNPRQARDFAKSMGVLAKTDRVDARLLRDFADVVSRHKDRAHYITPLIEVERLELAALTTRRRQLVEMRVAEANRLEQANKLTYRSIKRVIAMLDKQIAQIDKDADDHLDRHFKSQRKLLDSVKGVGPVTILTLIAQLPELGLLNRRQISKLVGLAPLANDSGQRKGPRRIWGGRAPVRAVLYMATLSAIRHNPVIRQFHSRLIAAGKAKKVAIVACMRKLLVILNAMLRDQAQWSAVKQLQMTETG

SEQ ID NO: 204531 - protein, 371 aa, unidentified
MKQQTKSSNITVGLDLGDRRHRFCALDERGEVVEQDSICNDRVSLRKLAGRYHSALGVKEAGAHSPWISRFLEALGWRVVVSNPRKVRAIYQHERKSDQRDALMLARIGRMDLALLYPVRHGTAEAQQDLLRIKLRDSLVRARVAVINSVRFTLKSLGYTVRNPSSARFHKVVMEEVPESVREMITPSVQALAELTARIKMLELEINTLAQMKYPQSAQLQQIPGVGPITALYFVLKIEDPNRFAHVRDVGAYAGLCPRRDQSGQSDPQLRISKRGDAYLRRLLVSAAHYILGPFGPQSALRAYGLMLAADGTARAKKRATVAVARKLAVLLLSLWKSQQPYQPFPGACLNGEQEDRRSGTIALHRMEATD

SEQ ID NO: 204532 - protein, 327 aa, unidentified
MSNQNYAGTDIAKRNFVIGIRGKDKTKTETNNPKGFAHTVEYLQKHNVGLIVMESTGGLEIPLAKTLHRAGFRVVIANPRMTKKFSESFSPAKTDELDAKTLAAYAQVLDLRNMADNILYTPPGEAEEELEALVKRRSQPVDIRAAEKNRLDQIHESQRQSVTDLIARLDGLTAALDKDIDKHTDTFGGKGEVLTGVKGIGNTTCATLLSMLPELGTVPHKRIAMPAGVVPPPNQSADTDMKTGCTGGRMAVRNMLYMAALTAGRHEPKIKAFYQRLRARGKPFKVAINACMHKLLRILNARMRDYPASLQTASEQPTELRNTPQCA

SEQ ID NO: 204533 - protein, 453 aa, unidentified
MGRCIGLDVHRDFAQVAIWENGRVRDAGRVATSPERLREFATTLRKTDKVALEATMNTAAIAGLLAERAGEVVVSNPFKTRVIAEAKIKTDKVDARVLAELLAADYLPSVWQADEATKALRRQVGQHISLVRQRTRVKNQVQAILARNLLPRCPFSDLFGIKGRRWLGDQELAADERRTVHSLLRQLDFAGQELKLVDAELACVALDDVNARRLMTIPGVDMAVAVAIVATVGDFSRFESPDKLVSYVGLNPSVRQSGGLPATHGRISKQGRAWARGMLVEAAHAASRTPGPLHAFFERVKARRGWQIATVAVARKLLVICWHMIHDERDYAFSRPSLVAKKTRALELRAGAPAHRGHPAGSAAAYNLRTVRDRERALGEQAEAAYNHLTRNWQPTRPAAKAQPASPKRARQTSVPTTPARPVKAAPEGGSAGLDRPPATAGTRKPRVTRLNA

SEQ ID NO: 204534 - protein, 419 aa, unidentified
MTQKKYTESVSIVHPVCCGLDIHKRIIVACLIDQSQDEAVMEIKQFGTFTNELLLLKEWLLEHACPVVAMESTGVYWRPVHNILEGYMQVVLINARHYKNVPGRKTDVADSQWIAELLRHGLLRGSFIPDPEVRRWRELVTMRNHFVSTESDFRRRIQKLFETANIKIDSVVSDLFGVSGRNLMNLILSVPTEEITREDVRKCLRGRLNKKGEELFLAIQGFVTDHHRFMLSEYLEVVDSCRHSVNHIESRIMEVMSPHQDVLDRLQELPGISQIAAAGILARLSPCLDAFPNSAALCSWAGVCPGNNESGGKRHSGRSPVHKHPLKTLLVEVAWAAIKTKGSYYRDKYYRLKARRGAKRAIVAIAHKLLKAIYVIIKEGKRYQELGSDYLDGRNKQAQIFRLKKMAEKYGFTVVENVA

SEQ ID NO: 204535 - protein, 349 aa, unidentified
MGEVSTIGVDIAKSVFQIHGVDADGTVVIRKRVGRAKVLEFFAKLPPCLVGMEACATAHQWARELKKLGHDTRLMPPTYVKAYVKRGKNDAADAAAICEGVTRPSMRFVPIKSVEQQSALMLHRTRDLLIRQRTQLINALRAHLAELGLVAAKGHEGLQQLVKVVTESSDERLPSDAGFACQSIVGQLHAVQTQINGLDKRVNLAHRANADSKRLEAIPGFGVILSTAVVATMTDPKAFRTGREFAAWIGLVPRQNSTGGKERLGSISKQGDRYLRRLLVLGAISIIGTARVRPDKYPWVTELLGRRPAKVVAVALANKMARTAWVVLARGATYRAPTRSSNAAIAAAA

SEQ ID NO: 204536 - protein, 343 aa, unidentified
MDHFAGLDVSVKETSVCIVDDTGKIVREVKVASEPDALLAVLANPTYRLRRIGLEAGPLSQWLFSALANAGLPVICVETRHIRAALKAQINKTDRNDARGIAQMMRAGLYRAVHVKTLRSQKLRMLLTHRKLLQSKAIAIENDLRATLRNFGLKVGMVGTVRFEERIKELVENLPDLAVLVEPLLIVRQTLREQFGILHRRLLAIVRDDEVCRRLMTVPGVGPVVALTYRATVDVPARFRKSKAVGAVFGLTPSKYQSGEINRTGAISRCGDEMMRMMLYEAAQVMLLRSAKWSWLKAWAMKIARNRGMKKAIVALARRLAVIMHRIWVDGTEFRWTREFAAA

SEQ ID NO: 204537 - protein, 310 aa, unidentified
MKVVGIDISKDHFDLHLLPEGKTARYTNTSDGIQQCRLFLAQVQPERIVLEATGGYELALTMELQTAAMPVIVVNPRRVRDYAKSQGWIAKTDRIDARVLAEFATSPRLPVRELPDAQARQRRALIARKHQLVEIHGAERNHLEHAADRVLTQSIRRVRRVVEKEIANLDKKIAASVAADPRLQRKAEILDSVPGFGPSTAALLVTELPELGLVNRQEIAALVGVAPMNRDSGRFQGKRMTGGGRVRVRSALYMPLLAVIRCNPAIRQFYQRLVDHGKAKMTALVAALRKLLTIANTMLKNDQLWNPKTT

SEQ ID NO: 204538 - protein, 317 aa, unidentified
MSNPESFVGIDVAKGWLDVAWLTGETLRIDHAEKAIAVLVERLRSQPPALVVMEATGGLETGVASALAAAGLAVAVVNPRQVRDYAKACGRLAKTDRIDALILAAFAAAIRPQVRELPDEHTRALGDLLARRRQLVEMRVQEKLRLQRASNVQRASLREHIVWLDERIGRLDIDLTHALRSSPAWRDKDDLLKPIPGVGSLTRATMLALLPQLGTLSRRQIAALVGVAPFNRDSGQHQGGRVIWGGRAQVRRTLYMAAVAAMRCNPVIRSFYQHLRSQGKPAKVALTACMRKLLVTMNAMLKHHSAWSNRLDTQHSC

SEQ ID NO: 204539 - protein, 351 aa, unidentified
MPRPSTVQAVTTIGIDMGKNTLHMIGLDSRGAIVLREKVSRGRITLRLANLPPCLIGIEAGMATHYVARELAALGHDVKQVPPAYAKPFRQGHKNDFRDAHAVAEAVQRPTTRFVPAKTDEQLDLQALHRVRSRLVSERTAVINQIRGFLLERGIIVRQGLRFLRQALPDILAKRTDVLSPRMVRIVADLASDWRQLDERIEPVTDEIETLAKSDGSCRRVMTVPGIGPIISSAMVAAIGSGAAFARGRDFSAWIGLVPKQMSTGDRTILGRITKRGNGYLRTLFVQAARVILLRPASWPKHGFGVWLARAAQRLHRNVLAAALANKLARIAWTVLAQERNYEARIMKAAA

SEQ ID NO: 204540 - protein, 344 aa, unidentified
MNKLSRVGIDLAKNIFQLHGVDRHGKAVWRRRLTRDKWLKVLLGKVEPGCEIGMEACAGAHHWARQLQAKGFTVRLIAPQFVKPYVKSNKNDANDAEAVCEAMSRPSMRFVAIKTVGQQDIQAIHRVRSELIGHRTAKANQIRGLVAEYGLVAPQQLARLRAAVPVWLEDAENGLTSRFRELLNGLWDDLKTLDRRVAELDREIDVIAQSDPVAKRLQQLRGVGPMVATALVATVGNAEQFANGRQMAASLGLTPRQHSSGGKDRLLGISKRGDAHLRSILIHGARSVIRTAKLKDDRLSQWVTSLAERRHPNVAAVALANKTARIAWAMLRHGGDYEPVYIAA

SEQ ID NO: 204541 - protein, 344 aa, unidentified
MILIGCDFHPSWQQVCWLDSETGETAEAEVVHAPGEVEKFYRRFAAPALIGMESTGNCQWFVELAEKLGHEVWIGDAAKIRASEVRQQKHDRRDAALLLRLLCEKRFPRIWTPSSEERDARQLLIHRHKLVRLRAQVKNGLQHLAMNRGMQKKRRLWSAAGQQALRELALQPWADRRREDLLKLLAMFDEQVASLDLAVKAAAEKNENARLLMSQPGVGPVTSLAFVLTMGDVRRFPRGKQVASYLGLIPREYSSGGHQRFGSISKQGNRFMRMLLVEAAQVAVRCDPGFRNEYLHRCHRMAKGVAKVAAARKLAVRLYWMLRTQKRYPEIVHVESSPRVPVVG

SEQ ID NO: 204542 - protein, 370 aa, unidentified
MLDTTTFVGLDVHARSIKAVSLDVMTGEVRCATFGYDAGAVAEWVRSVDPKAKCVYESGVTGFDLQKRLSGLGVDCAVGAVSKMIKPSADRRRKNDRNDAEFLARMLSVGNVVEVWVPDDECEAARDLTRALEDARDDLSRAKQRLSKFLLRHGLVFDERTPTGRRKGNWTRAHWSWIESIGFAEGADNDVLAYYVDAVRRAAEEKARLEGLVEAEARKPRWRKRVDSLRCLKGVDTATAADLVFEAGEFSRFGNARSFASWVGLTPSEHSSGEGDRRGAITKAGNKHLRKALVEAAWHYLTCSARPKDLARGQDPDRGARRHAAKGVRRLVERREALLARGVHNNKANVATARELACWVWAVGLMAEGA

SEQ ID NO: 204543 - protein, 307 aa, unidentified
MNESSEFFVGMDVHKDSISFAVLTETSPSPVLQVRKTNIHRAVDETLDKLYGQGMVFACYEAGPCGYGLARYIESKGIQCQVFAPGKIPRKPGERRKTDRRDALKLAQLLKHGEGTPVHILSEQDEAVRDLLRYRDGVRRKLGKEKQKIRMFLLRYDRASCEHNPWTQPYMKWLYGLDMGQPLLTDVLHRRLDCLEYLQLEVKELDKQINEIAVQERYKDEISSLRCLNGVGTLTALALRCEVGDFRRFPTARSFMAFLGLVPSEHSSGNTIRRGSITKTGNSYLRRLLVESSFKIRESREKQRSTS

SEQ ID NO: 204544 - protein, 340 aa, unidentified
MTITTIGIDLAKNVFAVHGVDQNGKTVLVKSRVTRAALPGLIASLPPCVIGMEACSGAHYWARLFLQYGHEPRLMAAKFVSPYRMAGKSGKNDAADAQAICEAVRRPHMRFVPVKDESQQAMQCLHRTRQGFIEEKTATYNRLRGLISEFGVIAPQSTDALRHMVSAQKSSLPLQVQQCVDDLLEHVDRIEANITEYDRILSRIAKTDHRSQRLMKLKGVGPTTACALVAYIGNAHDFKNGRQLAAWLGLTPSQYSSGGKSKLGRITKAGDSYLRTLLVQGARSVLIGAEKRTDSFSRWVCSLVERRGYWRAVVAIAAKNARLCWASLHYGDDFRLYSAS

SEQ ID NO: 204545 - protein, 420 aa, unidentified
MALKIVYPVCCGMDVHKSFVIACIAATDNKGVTSYKKRRFSTFTGDLRLLAQWLSDNNCADVCMESTGKYWIPVYNILEPTCNVVLAHPKYVKAIRGKKTDQRDAKWIADIFKHDLVAGSFIPSADIRQLRDLMRYRVKLTSFMTGEKNRLQNCLTVSNIKLDDVFSSVFGKSAAAITDQLILHPDGNFDVAPFIDGRCKAPPDKVQAAVDGVICPGQVSKLGVIRSHMDALSSCRNNLESVIFAIAEPFRPQTELLMTVPGIQLISAVAIISEIGVDMSVFPTSKHLCSWAGLVPQNNESAGKKKTTRINRAGAYIKPLLVQCALAVCMSDKHPEIKSRYLALKKRRGHKKAIIAICRMLLTAIYSILKKSEAYNPELYRKETANNVPANRVLSVEQAIAFIQRQGYLVAVSDDGELAS

SEQ ID NO: 204546 - protein, 397 aa, unidentified
MSQVIIGMDPHKRSATIEVMTSDETDGFRAMLAEAKRWRERTWAIEGCQGIGRHIANRLLAAGEHVVDVPPKLSARTRVFATGQGRKTDATDAHSVALAATRMTGLRQVVDDQQLAVLRILADRRRSLGEDHTRMVSQLHQLLLELMPGGAKKDLSAAQAKALLARVRPRDAAGKARRRVAAELISDLERIYQRKKEANKELNALLAVTGTTLTDLHGIGPSGAARLLVEVGEVTRFPNKAHFASWDGTAPMDASSGDQVRHRLSRAGNRQINRVLHIMAVVQLRNPTEGRAYYDRKVAAGKTPREAMRALKRRLSDIVYHQMITDTRRAATGPGGHLGAATGSSAADLHPSAGTSEKSLPGPATNDLTPGKPAHSPGRSRHSPSAPDRRRRQAQSA

SEQ ID NO: 204547 - protein, 355 aa, unidentified
MSSEKYIGLDVHQATISVAVMDSQGKVVMESILETKASTILEFLAGLRGSLFVTLEEGSWAAWLYDLLKPHVTEVLVCNPRKIPLLKQGNKSDKIDARKLAERLRLHDLKPVYHGETGVRMLRELARSYLTVVKDLSRVMNRLKALYRSWAIPCAGRDVYYRRHRSQWLEKISEAGTRRRAEQLYEQLDMLQRLRQQARRELLAESRKHTITAKLRQIPSLGPIRSALAVALIQTPHRFRSKRQLWTYSGLGLETRDSGEYHYVSGQVRRRKKQATIRGLNKDYNHDLKGLFKAAALRASVLPGPFQEFYQRSLAKGIKPPMVRLTLARKIAAITLTLWKKGEDFDIDKLNSQAA

SEQ ID NO: 204548 - protein, 322 aa, unidentified
MSETPERFVGIDVAKAELVVAERPRETHWTVPNDDAGVRTLTQRLCAAAPTLIVLEATGGYELAAVGALGAAGLPVVLVNPRQVRDFARATGQLAKTDALDAHVLALFAERVRPVVRPLPSEAQVELDAVLGRRRQLLEMLVAEQNRLGQVRGGQTKGIKKSLKKHIAYLELELRITDTELGERIKASPLWRAQDDLLQSAPGVGRVVSLTLLAEVPELGHLTRKEIAKLVGVAPLNRDSGTWRGRRVIAGGRSTVRAALYMAALVATRCNTVIRAFYQRLLAAGKPKKLALTACMRKLLTILNAMVKTNTRWQAPNALTTA

SEQ ID NO: 204549 - protein, 405 aa, unidentified
MEILYTHCCGMDIHKKDITACIITPEGKELKQFGTMTPDLLKLADWIKAKGCTHVAMESTGVYWKPIYNILEHYDLQEILVVNAKHIKNVPGRKTDRIDAAWIAKLLRYGLLKGSFIQNREQRELKELVGYRKSLVEERAREVNRIQKVLEGAGIKMGSVMTDITGVSGRAMLDAIVSGIDDPTFLAEMAKGRLKGKKDQLEKALVGLVGRHQRMMIAMQLRHIDYLDQEITRLDQEVEEQMHPFEQELALLDGIPGIGSRSAQIILACIGTDMSRFPGAPHISSWLGLSPGNNESAGKRKQARTTKGNPLLRSTLIQAAKSAAKTKDTYLSAQYHRIAARRGANKAAVAVAHSMIVIIYYMLKHHQPFKEMGADYFAKNNAKAIKNRAVKQLEMLGYQVKIEVA

SEQ ID NO: 204550 - protein, 356 aa, unidentified
MSEAAGSRSCIIGGVDTHKDTHTAAALDLTGRALGNATFAASAAGYAAMLGWLQTFGPVERVGIEGTGSYGAGLARHLRDQHVSVVEVNRPNRQTRRRHGKSDPADAEAAARATLSGDAIGVPKSQDGAVEVIRILRVERRSAIHARTQAANQVHAVVSTAPEALRAKLRDLPLASLISRASKLRGLVPTDPVSATKRVLRGLAERWEHLDREIAYLDVQLGAIVKKTAPDLVALHGVGVDVAGALLVAAGDNPERLSNEGSFASLCGTSPVDASSGRQHRHRLNRGGNRDANRALWVVALVRLRCDPRTRKYAERRTAQGLSKREILRCIKRYIAREVFKILRASMSQSRPADPA

SEQ ID NO: 204551 - protein, 339 aa, unidentified
MTHLPVGIDIAKSVFQVHYVDEATGEIVNRPLKRAQLLVHFANRAPCVIGMEACGGAHHWARQLMSLGHQVRLLPAEYVKAFNIRNKNDAADARAIWLAVQQPSKAVAVKSETQQAMLALHRLRQQLVKYRTMQMNGLRGLLAEYGEVMARGRASLDKGMPAILARVSQRLPAFLVDTLREQWNGLAKVDEQIEAIERRIREWVKSDAAVAAIIAIPGVGLLTATAAVATMGSAKTFRSGREFAAWAGLVPRQKGTGGKVDLSGISKRGDTYLRTLLVHGARSVVMRSKDSRPWVEQLRLRRPLNVVIVAMANKIARTIWAVLAHQQPYDKNHVSAKPA

SEQ ID NO: 204552 - protein, 333 aa, unidentified
MKDLTNFQHFVGCDVSKSTLDFALHERGNDYRTFEHIKVPNTAQGFQDMRKWLRTFKIDIKTAVIAMEHTGIYSNALSEWCFKKGVTFVMLHPLDVKNAGCRGRNKTDKVDAQFIADYVYTMREKLTPSQPEASIIKRLRELRNERQLAVRAHTAYLNQLKTVTDRSTLKRMENMADSFTAQIKAIEKEIKKVIDSDSQIKRTYELLISVPGIGMVNALATIVTTGNFTRFQTARQYAKFICISPLSRQSGTSIKGGDHVSRAGHNEIKSLLTQGARNVIYSDPQFKAYYERKRAEGKSHGCVMNAVKFKLICRMFAVVQRQSPYVNTERYLS

SEQ ID NO: 204553 - protein, 376 aa, unidentified
MERIAYIGIDVHKDTNTACLFARMEHEVLLQDIGTMPAGCEYMAKAIRKALKSYGLMDWDVLCGYEAGPTGYGLCKGLQKAGFKCEVMAPSTIRKASGERTKTDRRDARMLALALSTDSYHAVHILDDKDIATREFTRTRNARKGDLKRAKQHLQSFLLRMGRTYPEGGSHWTDRHWRWLGSLSFDDAYLDYSFRSYMQDIKDLEHKISMMDAMIEDIASKDGRYRDMVAKLKCFAGVETHTALSIVCEIGDFDRFPDAKSFSSYIGIVPGQDSSGKRQRYTEMTKTGNARVRTLLVEAAKGIKRSSPFNKSKRLVQRQSGQDPDVIAYADRCRRRLKLRMKRLEESSGKNANVATAAAARELACFVWGMMTGNIA

SEQ ID NO: 204554 - protein, 391 aa, unidentified
MESNPMQKLNDLSRSLTPLKPDGTLIAVIEMSLSSWLVAGIVPGIERQPLKKLEVDESTLLKLLIRWREEAKKSGHSIERIAVAFEAGRDGFWLARWLRARDIEAHIIHASSVAVSREHRRAKTDRLDTELLKRAFLGWLRGERDHCKMVAIPTIKDEDAKRPNRERESLVGEQSRIVNRMKAALVRLGIRGFNPKLKKAVERLDGLRTPEGEPIPPNTLAELRRDMARRRLVSDQIRQIEDTRLERLEQAPRDGPHAMVRLLARVIGVGIETADMLVQEVLSRNMRDRRAIARYAGLTGSPDESGRKRREKGLARSGNARVRRGMIQLAWRFLMFQKDSTLAQWFRARTENARSARKTMIVALARKLLIGLWRLVREGVVPDGVVLRPVS

SEQ ID NO: 204555 - protein, 415 aa, unidentified
MLKIVYPICCGLDVHRDFVYACIATTENGITTYKSHRFSTFTKGLRELLSWLLQNNCCDVCMESTGKYWIPIYNILESDCKIVLAHPKYVKAIRGKKTDKKDAKWIADIFKHDLVSGSFIPPADIRQLRDLVRYNVKLTNYTTGEKNRAQNCLTVSNLKLDSVFSDVFGKASSNIIGRILANPSEKISDVSVFRTKGMKATDEEVLAAVDGEMCAEQAEKLRIIRSHMDGLELCKANLMSLILSTAEKYIPEVDLVSTVPGLTAYSAIAVIGELGVDMSVFPTSKHLCSWAGLAPQNDQSAGKKKTTRISRAGVYIKPLLVQCALAAIKSKNKHPEIVNRYNALRKRRGHKKAVIAIARILLTAIYNILKKREPYNPELYRNSDTPPEHRNVTIEEAVFILQRQGYIISSPTSVG

SEQ ID NO: 204556 - protein, 348 aa, unidentified
MKFYTNQHRYTCGIDLHARSLYVCILDDTGQTVVHKQISASPEALLRLITPYLSDLVMGVECMFSWYWVADFCADHQIEFVLGHALYMKAIHGGKAKNDKIDSEKIARLLKGGMFPMAYVYPRQWRGTRDLMRRRMRLMRQRAELIAHIHNTISQYNLPPNTDNLRYEKHREPLRQLFADASVQRSIDLDLDRIDFYDQQLSKLEYYLKKTAKQVDKHAVIRLKSIQGIGDILSLVILYEIHSIDRFERVQDFVSYCRLVKCKRESAGKSYGTGGAKIGNAYLRWAFGEAAVLFLRGNPKAQQWVARKTQQHNKAKALTLLAHKLGRAVFFMLKRHTLFDQDKFLASR

SEQ ID NO: 204557 - protein, 452 aa, unidentified
MKKLSMDVINAHAAGIDVGSRFHMVAVNQNADDVKEFGVYTEDHQRMIEHLKNEGITSVAMESTGNYWQTLFSALQIAGFEVILVNGRQTQNAQGKKTDVRDSLWIQKLHSLGLLTGSFLPGCHTEQLRTYYNHRQYLVEQTSRYINKMQKALRLMNIRLDVALNDITGKSGRAIIDAILTGQRDPQKLASIVDSRVKKSKEEIAKSLHGNWREDLLFELKECLSLYDTYQSKILVCDQQLKKVLESMQNTPAVMAPLSKLPSKKQRSKHSPLFDVRMMAYAHFGADLFAIPALSFNTILCLMTNISREELQKFPTVKNFTSWLRLAPNNKKTGGKIISSRTPKGKNKIALALRQAANTIGNMKTHPLLAFFRRIAFKNGRAAAITATARKLAVIIYQMITKQQPYQPLNSEVLNKKIKNQQIKNIKRRLEKLSLNRQELDTLFSSLSLSTD

SEQ ID NO: 204558 - protein, 358 aa, unidentified
MKIIGVDLHTRQQTIAMLDDQTGELIEKQLTHEGEQVREFYAGLPQPVLVGLEATGSMHWFLRLLEELAIEYRVGHPAKIRAAEPRKQKNDRRDARLLLTLLAENRFPAIWMPSREQHDLQILLRHRDQFVRIRTRVQLSLQALALSHGLRRGHALWNCEGQRTLRALSLAPHAGEQRDTLLALYPQLQGPIEDLDRQVERAAQQRAQARRLMTHPGVGPVTALATEVFLGDPQRFADGKAIGSYIGMIPSEHSSGGRKQRFGRISKQGNSLLRFLWGEAAIHAVRRDPELRRFYRRKLVQKGMGKARIAAARKLGIRLWIMLRDEIDYSEFCRRGHQRRQSSGAVRAGMLAGDSGRN

SEQ ID NO: 204559 - protein, 484 aa, unidentified
MRPWITNICSQSRDDYRISFESTGALEFDNEYSGLAVAPAHRYCFRRIQARIRCYKSNILELAMKDSQYTAFVGIDWADAKHDYCIQSSTAKSTDKTFGVVAHVPAELEEWLLALHQQYGGRLAFALELSSGPIVSVLQKYDFIDIYPITPSTLAKYREAFKPSRAKDDPSDAELALDLITRHPERFKKLQPQSVEMRTLVSLVEHRRKLVHERVRVTNRLRTTLKQYYPQILEWFDHIVTPMFCEFLENWPTLKKAQRVRKTTLTTFFSKHNMDRANVLERRFNAIDAATALTNDPAIIDPHQLLALAHADMLRTLLRSIAKYDKQIASIAPQLDDYQLFESLPGAGPMLTPRLLAAVGEQRDRFKTAAELRQYAGIAPVTERSGKKHWVHWRWQCPTFLRQTFIEWAGQTIKYSTWARVYYDQQRNKGATHQAAIRSLAFKWIRILYSCWKTSTPYDESRYINTLKKRVSPLMSQIELAKTA

SEQ ID NO: 204560 - protein, 485 aa, unidentified
MFRSTLTGLWCCEPVSKSGGGEHSCCPREPWIVALSTSVRILIHPLSSEHTPLVQIKPATRWSKRKVRCVVEVVHPRCAGIDISKKDAKVCVRIQGGGGRRTSSTVTTWGSMTNQVLALRDHLVAAQVSVVVMEATSDYWRPFYYLLESDFQVMLVNAREAKNVPGRKSDVSDAAWLADLGAHGLLRASFVPPEPIRQLRDLTRARTVITRERTREVQRLEKLLEDAGIKLSSVASDITGVSGRLMLQALIDTGGAIDPAGVADLAKRRLRSKIDDLTEALTGHFSGHHAFMARLFLDRIDSHSRDIVALSARVEELMEPYLPIRVLLESVPGFSQIVAEIFIAETGGDMRQFPTAGHLASWSGVSPGSNESAGRIKSTKTRPGNRYLKGALGIAALTAARCKNTFLSAKYRRIASSRGPMKAVVAVEHAIIVAAWNMLTGGEFYRDPGPDFYTRRDPGRAQARAVKQLEALGFHVTIEPLSAAG

SEQ ID NO: 204561 - protein, 463 aa, unidentified
MDVIVERPGALDVHNASVVACVRLPAEKGRRDEQVAEFSTTTRGLLALHDWLWAHGVRQVAMEATGSYWKPIWAVLEDDFECLLVNARHVKQVPGRKTDLKDAQWLCQLLEAGLLKASLVPPKPIRTLRNLTRYRKSQIRDRQREANRLHKVMQETGIKLDCVASDLLGKSGRAMLDALVSGTTDPGVLADLARGQLRKKLPALREALNGRFSPEHSLVVGRILAHIDFLDESIEQLSEAIEQQIAPFAPAVELLCTIPGVGRRAAEVIIAETGGDMSAFPTAKHLTSWAGVCPGNDQSAGKRRSGRTTKGSKWLRGTLIEAAKAAARTKDTYLQAQYARLRVRRGASRASVAVAHSILTACWHMLQTGELYNDLGATTSPAATPHAPPSASSLNSNASGTSSHSNRRPPNERDFLFRTRPSDLVRRTRQLLPQVRDCRPVAETRRAWRRFSAGIETAPALLR

SEQ ID NO: 204562 - protein, 400 aa, unidentified
MLSIGIDVSKGKSTVCGMKPGGEIVYAPFEVQHTREGMSELVSLLRSSGEEVRAVLESTGSYHCPVVAALLENGIFVSVVNSLRMKRFCSQSIRKVKTDRIDAMQIALYGLAYWQELQPTKLPEDTYRELQLLARQYYQMTSLLIKAKVDFNALCDQVLPGMQELMNDHAGRHKLSDFVLRYRHTTHILEMGETRFRKDYCKWAEKKGYRNCERMAALIFATAQNGIPVLPNAPSTQIVITEAIRVLHTVEASRDAILTQMQALAKTLPEYSLVREMPCIGDTLAPRLIAEIGDVRRFHSKRALIAYAGIDAPPYQSGKFCANNRHISKRGNRYLRKTGYEVMQSYVMHKPANDPIFTFIEKKRGEGKSGKLAMVAGLNKFLRVYYGKVTELYRSLPAIE

SEQ ID NO: 204563 - protein, 428 aa, unidentified
MKNRNIQKLEAITPGTLVVGVDVAKDTQWARFVDYRGLELRKVLKFKNHKNGFDSILASIEAICQNRRLDDVIVGMEPTGHYWKPLANYLLIHEVTVVMVNPYHTKRAKELDDNSQTKSDKKDALTIARLVRDGRYYEVYMPQDIFAELRVLSNSRISLMKRSNALKNTITAAIDEYFPEIVTVFKNPLKGKAAMQILKSCPFPSLILELGIEGVLAEIKKAVKKTVGRKKAQQLVETAKNSVGVGYGLVSAKLKLGLMIEELELLTKQLKQLEAVMEKALADTGYGEIILGIPGIGVVTAASFLGEIGDPMRFDHPRQICKMAGYNLIEDSSGKNKSGTKISKRGRKNLRNVLYQMARTMVAVNAEMKELYQYLKTRPNNPLKKKQALVVISKKIVTIIYSLVKKQTGYQAELVFNKFRKNQMKQVA

SEQ ID NO: 204564 - protein, 316 aa, unidentified
MTNSSTTTAGIDTGKTSLDVALDDSAKRLRVPNDTPGHRKLATWLRRHGVTRVGIEASGGYERAVVAHLRAADIAVIVFQPRQVRAYATFRLQRAKTDIIDAALIATCAAAASEQRAAPDPRIEALAGSLTLIEQIEEDIVRWKTRREAAGGCERTFIDRQITRLKAERALALKRLARTVRAHDDLATRLDLVISIPGLGERTALALLLRLPELGQLSREKIAALAALAPFPDDSGQRTGGRHIAGGRTRVRKSLYAAALPAAFQWNPSLVALYKRLIAAGKPHKLALVACARKLLIFANTVLARGTPWTQTASAG

SEQ ID NO: 204565 - protein, 343 aa, unidentified
MAVIIGVDPHKATHTAVAISGGEQELARKKVRAGGTQADQLLAWAEPFDMRTWAIESAGGLGYLLAQQLVAAGETVVDVPATLASRVRVLSTGRSNKNDPNDALSVAIAALRSDGLRRVEAVGHSEVLRLLAKRNTDIGNQRTRLVCRMHALLAELAGGGITKEINASDVDRFLQAVTPTTPAEQVRYDLAVELLDDIRRLDTQLKTSHKRIRAAVAASGTTVTDLFGIGPILAGTLIGYTGDVTRFGNRDHYAAYNGTAPVEFSSGGRVVHRVSQRGNRQLNHALHMAAVCQLRQPHSDGRAYFDRRVAEGKTTREALRALKRHVSNAVFRHLVADARRARP

SEQ ID NO: 204566 - protein, 351 aa, unidentified
MEEYIAFDSHKRYTWVEHQEANTGKTRAYRLEHGAGAIRQALVGCAPGTAVAIEATANWYWIIDEIEQAGCVARLVHPRKAKLMMGLINKTDKLDAHGFNTLQRNGTLPTVWIPPGALRELRELTRTRLVLVAQRTRWKNRITATLAKWGLPPSAYSDPYGKRARVELEQQLERLPEQTRWATRQMLAQLDSLSEQAQQFEKRLEQLVEVTPMMQWLMTLPGVGIILAATIALEIGEIERFANAERLASYSGTTPRVHSSGDRTRYGRTRPDVNRYLKWAFAEAANSVAVNHRRNPERHVSRLYARLRASKGHARAVGAVARHLAEAAFHVLQRKEVYRDPSLNPRPEKGV

SEQ ID NO: 204567 - protein, 351 aa, unidentified
MTTSSLAQEVIVGVDTHKDVHVAVAIDVNGRRLGEHLVPTTERGCIELHRWALGLAPRVCYGVEGTGSYGAGLSRYLQAQGSPVTEIRGPNRKLRRDRGKSDTIDAEAAARAVLAGTSTISPKAGNDWVEQLRILRVARRSAVQARTQAINQMHAVVVGAPQELRDSLQQLPRHELIRRAASFRVAGATDAQSTVRWTLRLLALRYQALTDEVAAIDQAIAPLLQKHAARLLALTGVGPEVAGALLVVAGDNPQRLRSEASFAALCGVTPLPASSGKTSRHRLNQGGDRQGNCALWRIAMTRMSCDQRTQAYACRRTAEGLSKREILRCLKRYIARDVFRALPEATTLDRT

SEQ ID NO: 204568 - protein, 473 aa, unidentified
MNSLFFGIDVSKGYADFCCINQAGSRIGVVSQFDDDFNGHTAVKILVEGLRSKFPDAQMIFGLENSGGFERNWAVFLKALVTPFNGKVFTLNPLAVKKFLDRDLHRNITDAISAHGIANYLRQGMRPAEFPFEDSLSGPISLYRCLRNAISRCAQMQNELQSFLPRVQPELVQFCRHRVPDWALEVLQMWPTALKLSKAKRTQLVKIPRLTEKRATELIIAAKESVASQGDSFTETTMSFLAKEIIHAQETISTLKKQLIESLAKDRGVITLMTIPGIGAWGATCLRLEIGAIDRFPSPEGLVAFAGLDPRIKQSGDNTRHVGISRRGRRQIRAILYPLTLSAIRHNPAVKEFYSRLRAKGKKHMVSATACMRKMLHIIYGCWISGKHFDPCYEKNRQADKSQAVSPQDEQVNEPKAASPKAEKPSPRVYILKIKAPVSRREAVKRRKAATMPQTGISRRERGPGTASENNIT

SEQ ID NO: 204569 - protein, 448 aa, unidentified
MSKKMSLEIVHPNAAGIDVGSRTHHVAIGQALDDVKEFGVYDQDLKAIAKWLLDNNVTTVAMESTGSYWQNLFATLQEAKLEVILVNAMFSKNPSNKKTDVKDCRWLQKLHSIGLLSGSFLPDTDTEQLRTYCRHRNNLLDCSADTVRKMQKYLRLLNLRLDVVVNDIVGQTGLAIIDAICKGETNPAALATLRNGRCKKSEEEISKALCGNGRKDYLFALKQEYEIYLNLQAKIKGCDTEIEKLLQEQINSDEQKKQLSIDKKKHKRINKNTPKNMDMNLLAYQYFGGVDLLAIEGVSHATVMSIMSEVGNCIHDFPSAKQFTSWLRLAPNNKISGGKVLSSKIPKGSNRLKIALRNAANVIGNLKDTALSNFFKKIAFRKGRKAAISATARKLAVIIWNMLVKKTAWQTTSPEEFVVQQRKKKVTEVKKLIHKFGIKTDELGLNFT

SEQ ID NO: 204570 - protein, 310 aa, unidentified
MTNPYVGIDVSKAMLDIAIGSDGEVVQVENSEDGIGRLIERLRESAPTLVVLEATGGYESLVAGALAGQEIAVAVVNPRQVRDFAKATGVLAKTDRIDARVLARFAEAVRPEPRPLPTEEARELEEFLSRRRQIVDMLTMEKNRLSIAATERAKKSLKKHIAWLEEALRRVNDDIDTAVRNSPAWREKEDLLRSVPGIGPVSARTMLAELPELGTLSRQKIAALVGVAPLNRDSGTIRGSRICWGGRAAVRQVLYMAATSAIRCNPVIRRTYLALRARGKKHKVALVACMRKLLTILTAMVRDQRRWSPS

SEQ ID NO: 204571 - protein, 376 aa, unidentified
MSALCHVWTSGNRGRVIIIPVTAIRAECARFAGWEMIMTKYVGLDVSQKTTVLCIVDGEGHRLWRGECSSSPDQIVHTVLQHAGAGASIGVETGPMTPWLVHELRSRGLDVICLDARHARAALRMQLNKTDRNDAEGLAQIMRTGWFRAVHVKSFDAHRARALLGARQQLVGMVTKLSNHIRGVLKTFGMLPGSVRGRSFAERVELLVAERLDVAPIVRPMLTAWSKLREQIAAFDKAIRAEVKQSRECRLLMSVPGIGPVTVLAYVSAIERPDRFRRSRLVGAHLGLTPRQYQSGDVDRSGHISKCGDTLARLCLYEAATVIMTRVKRPLGLKIWAMKIAKRSGTNKARVALARKLAVILHSIWRTGEAFCWGTH

SEQ ID NO: 204572 - protein, 387 aa, unidentified
MDTLLTCCCGLDVHKEIIQGCILKGLGNDPLPIRREFQATRLGLSELRAWLIDNECICVAMESTGVYWRPVFETLEAEPRFEQLYVVNAYHMRNLPGRKNDVGDAEWIASLFRHGLLRNSFVPERRIRTMREVSRMKRALVDEHSAHVNRLEKFLQTRGFKLSSVVSNILGVCARQLLDTLAHRGWLTLCDVEAAYTGKLKATPSEIHAAVCGRLDAHERAILSICLNKLDALDAEIHNLLDLLSDLAQPDQEQLQLLDSIPGIDSNAALSILAEIGPAPHRNFADSGRLCAWAGLVPRNDESAGKIKSRKILHGNPYIKSILCQTAWAAVYTRNSVFHEWFWKHQAHLGRKKAIIAVARKMLALIFTLLQSGQSYDASLPLANAAS

SEQ ID NO: 204573 - protein, 343 aa, unidentified
MQIRSVGIDLGKTTFHLVALGDNGKVLLKKKFTQKQLIAFTATMQTCLIGMEACSGSHFLGRALRAQGHDVKLIPAQFVKPFVKSNKNDFIDAEAIAEAVDRENMRFVPIKTDDQLDLQALHRVRDRLMARRTALINQIRAFLLERGIVFAKSPIRLKEALPEVLENVNENLTPRMRNLVAMLWSEWKDLELQIAEMNDEVERIASSDEACRRLRQIPGIGPLVATAIVASIGNGAAFRKGREFAAWLGLLPNQHSTGGKVRLYGISKRGNCYLRKILIHGARAVVLRSKRDRIAMGAWMTSLETRAPRNVLIVATAHKLARIAWAVLSSGQDYRAVPEALTV

SEQ ID NO: 204574 - protein, 406 aa, unidentified
MNAVGIDVSKGKSTVAILRPGGEVVASPFEVSHNPRELNGLVTLMKSLDGDTKIVMEYTGNYYLPVALFLRKVGLFVSVVNPILVKDYSNKSLTVRKGKTDKKDSIKLAAFALDRWNELPLFSSKSDTRTLLKSFNRQYNQYTKLKVMLKNNLISILDQTFPGANTLFTTPARKADGHEKWIDFVLKFPHCECISRKIYSAFSKCYLLWCKKCGYKFSGAKAKEIYEFACNCTPSLADSEAAHALVSAAILQLNTLNETLASLQKEMDLLASSLPEYDTVMSLFGVGAVLGSQLIAEIGDVSRFSNKKALVGFAGIDAPPFQSGNFNPQSRSISKRGPAALRKTLFQVMAVILQNAPANEPVFLFMDKKRSEGKHFYVYMMAGANKFLRIYYARVMEHLNKTQPAA

SEQ ID NO: 204575 - protein, 319 aa, unidentified
MGKEIYIGIDVSKDTLDVAVYGDKQHLSFANDEAGIAKVISKLRQLSPELVVLEATGGFEVALAAELGVAKIPTAVVNPRQIRDFAKSVGMLAKTDILDARIIARFAATVQPTPHPMPDIEAQELGAIIARRRQIISMITAEKNRLGTASKMVKPRIRAHINWLEKELDDVNRNLRQKVKDSPIWQEKDRLMQSVPGVGPNLSITILAELPELGTLNRKQIAALVGVAPLNRDSGTLRGKRTIWGGRATVRAALYMAALSAKRYNPVIRRFYERLLAAGKAKKVALTACMHKLLTILNAMLKYHTCWKLDVSQILGPCH

SEQ ID NO: 204576 - protein, 390 aa, unidentified
MIFVGIDVAKDKHDCFICNSDGEVLFNAFTIQNTIEGFNFLYQRIESVSKDFNKVKVGLEATGHYSYNLLGYLLDKGLTTFVINPLHTNLFRKSLSLRKTKTDKIDAHTIAMMLMSNVDLKSYSDILYHNEELKSLTRYRFYKVSERAKLKTTVSRLVNILFPELEKLVPSLHIKSVYTMLSEFPSAHHIAEAHLTKLTNLLHTASRGRYGKDTAIGFREAAKNSIGSDMPAKSLELKHTIKLIQELTAEIEEIEAEIKHIMDNINTPILSIPGISYTMGAMIVAEIGDFSKFSSPDKILAYSGMSPSTYQSGQITNSYSHMEKRGSRYLRYALYNAAKYVCHWDETFKNYLAKKRTEGKHYNVAISHAVKKLVRVIYHLQKTGQSYQAV

SEQ ID NO: 204577 - protein, 410 aa, unidentified
MSLFCGIDWATEYHDVAVINDDGSVVARGRISNDASGFAALLSLLAEAGDSAADPIPVGIETDRGLLVAALRETGRVIYPINPLAASRYRARYAVSGAKSDATDAVLLANIVRTDPGAHRPLPADTEAAQAIRVLARAQQDAIWARKQVGNQIRDLLKDFYPAALVAFAELSEGGLARRDARTILAAAPTPVQAAKLTPARLRRLLIKAGRKRNLDRDVERLREVFTGTYLHQRPAVENAMGIHLTAMLGQFDAACTAADELAEAAIAHFEQHPDAEIITSFPGLGMLAGARVLAEIGDDRSRFADARGLKAFAGSAPITRASGKKTVVLHRHIKNRRLAAVGPIWALGSLRASPGARRHFDARRAAGDWNHQAQRHLFNKFLGQLHHCLQTGQHYDEHRAFPPPLELAA

SEQ ID NO: 204578 - protein, 459 aa, unidentified
MKRKNKRTKGMEEARPFDGLSKVNKNAAGVDIGATEIVACVSGGDEVQLVRAFGNYTVDLLSIGEWFRKHEVKTVAMESTGVYWIPLFEELERQGFQCLLISSRSLRKVAGQKTDVEDAQWIQTLHSYGLLKGSFRPEGDLVGLRTLLRHRAQLLEHRAPHIQHMQKALLQMNIQLSQAVTDVMGMTGQAIIRAIVAGMRSPENLATFRDPGCKHSAEEIAKALTGTWREEHLYVLKQSLELYDFYTEKMEACDEEISRQYGVTRPDWGSGELPMVPEKKRHAHSKNAPKEAKEIREHLYRINGVDLSLVDGFGISLAQTVTMEVGSNVWEKFPTEKHFCSWLGLAPKHDITGGKVLSNHTLKTKNRAGQAFRMAAQSVKKADCPFGAMYRRLRSRLGPAQATVATAHAIARVVYKMLKYKVEYDPMSVNEYQKQYEAQQVKYMKKKAAKLGYQLVPAA

SEQ ID NO: 204579 - protein, 313 aa, unidentified
MVPFFVSLKNKVMKNSQHIVGADISKRTIDLFCHQINNHLPITNNLKGFKEMLVWFKQQNINLSNTMLVMEHTGLYSFCFERFLHQHQICFIKVNALAIKNSLGLVRGKSDKMDAQRIARYGFEKQATLQPEALESKEIQRLRLLHATRERLVKQRAALLNVIKEYNNIGLLKQDSIMQSQLRLIKQFGKEIEKLDDEMEASIQCNESLQRNYELLQSIKGVGKVAAITTLIKTGNFTRFTNARKFACYCGTAPFEHTSGSSIKGKTRVSHLADKKMKTLLDLCAKSAIQYDKELREYYLKRVEMGKSKNEHH

SEQ ID NO: 204580 - protein, 367 aa, unidentified
MKKVSTILAKQSRKSSQRELIVGLDLGDRNSWYCVLDEAGHIQLEQRVRTTVKALGEVFSGMPSSRVALETGTHSPWISRLLRELGHEVIVANARKVRLIGESRKKDDRLDAQTLARLARIDPELLCPVKHRSAQAQADLMMIRARAGLVRARTGLVNTARGLAKSYGERLRGCNVRNMNPEKAEGLSAELQAALEPLLAAIESVSERIAEYNQRIEKLAQESYPQVAVLKQVKGVGTLIALTFLLTLEDPHRFDKSRDVGCYLGLQPGRRNSGQSEPQLHISKEGDPYLRTLLVQGAQHILGPFGVDCDLRRWGLKLADRGGRNGKKRAIVATARKLAVLLHHLWVSGEVYEPLHNNRRVAVTAAA

SEQ ID NO: 204581 - protein, 347 aa, unidentified
MDTADTSVSPASVPLTVPPAPAAPTQPLVIGVDMAKDKFDLAFSDGRPQQTLSNDSAGIEQAIRLLNKADLIVVESTGSLQRPLVNALLDAALPVALVHPRRVRHLAKALGMEAKTDRIDADVLVRFGQLAKPRLSEQRSRNHSELAALVVCRRQLAVTRVQQSNRLSSLGPLSSATKAAMQSIKAVIRTLDKQIDALDRKIRKLIEADDDFKHLDGLLQSVPGVGPGLSATLAAELRELGDTNRRQVGALAGVAPFNCDSGRHRGKRMIRGDRTAVRCVLYMATIAAIRCNPVIIAFSDRLKIAGKISKVRIVACMRKLLTLLNAMVRDGLRWEELDAVTKLVPQP

SEQ ID NO: 204582 - protein, 427 aa, unidentified
MEIVYPRVAAIDVHKKQITVAVRVPGEQVGQRRQQVRKYPTFYSALREMTAWLVAEQVTHVAMEATGVYWRPVFHALAEADGLEVLLCNAHHVKNVPGRKTDASDAVWLAELCEVGLLRGSFIPPADIAAIRELTRYRKKLIEERTRETQRLHKVLEDGGIKLDSVASIATGVSGRAMIEALIAGERDPAVLADLARGVLRKKIPDLTLALAGRFADHHALLCRLHLTHIDHLNDMIGKLDARIEQVIIPFAAQRDRLKTIPGVGDRAAQTIIAEIGVDMTRFPTPAHLASWAGLCPGNHESAGKRRKGTTRHGNPHLATVLVEAAWATSRTRTRLGARYRRLHRRFGKTGSKKAAVAIAHTVLVIVWHLLANDQTYTDLGADYYTQRDDPETRKKPPATPTTRPRLPSRTHRTRGIAPHAVRLSFV

SEQ ID NO: 204583 - protein, 322 aa, unidentified
MLASKTAAVHVGIDMSKVEQVVHILPAGQRFTLGNDTAGRAELVRRLRRLPVARIVLEPSGSYEQATFKALRDAGLPVFMVPAEKIRAFALATRGPLKTDAVDAQTLAHYAALFEPPAPMPRGALAERLHELLLLREQFVAWRAAAKCKLEQAQDREVRRLLTAEIKHHDGRIARLEQRLRAIVADDADAADLCRRLRTAPGIGELAAFAILADLPELGRLDRRKIARLVGVAPIARDSGASKGYRAIHGGRFRLRRILFMGVLGAVSRPAADNSLADFYRRRISDGAATKAALVAVINKLLARLNAMVRDRKDWLDNPLLA

SEQ ID NO: 204584 - protein, 421 aa, unidentified
MKTPSLKNVAGQPEKLRTACADISKASFTWAIEGRDEGIVPQKNQAVREWIRAQLEEARSHGYTGVRIVCESTSGYHKRLLRIARAEGCETALVSAEQVKAMQVVESNDTGKADWKDPRTMLLLVKLGKTLTDRQLTGEWAALRELNVDYEHVERRSTQVKNRIHGMLLQLFPDLSFKKDWLFEADAARAVLSVYGFNPYAIVAEGQASVRRTLRKQGVRQKTVERIFRDAQQSILQPSEALWREIKAEQLKDAYADLSLAQERREKLRSKMIALLEALQAKGEVKLKPQKGLIGPFLLARILAETGPLNDFENLSKLLRYAGMNLRPNQSGLHRGKERQAKRGRARLRAVLAQAVLKLVVRTELYGPYYHGKKAAGMPGAVAMTAVARKFLKLLFGLNRSGQAFDPARVFKCHNEYAKAA

SEQ ID NO: 204585 - protein, 422 aa, unidentified
MSYCPVAGIDVSKRFSDMCILSPDNKIFAQEKIYHDETSINRANALLQKAERLFFSKPVIVMESTSHYHLILFQFFSEHGYDVIVVNPLQSNSMKDFSIRKRKTDRVDAFKLAMMYRTKTLRPSQIPQTATRALRQLCRHRAELLNDVSSYKNRLTALLDQTFPGYDKVFSDVGGVTSCAVLVRFPTPTILLVEEESELVEVIAAASKSGYSFAKKKAGLLISAAQKAQTLGIHSCADETLIVCTIQMLRTLSESVLQIETAIDNLLAQIKEMRNNVSLLQSIPGIGSHSAALLLGEIGDISLFKKPKQLAAYFGLDPTERQSGSFRGTKNKLSKRGSSYARAALHMGIVNSICKRGKDSAANPVLLSYYEKKCKNKPAKVAQAASMHKLVFIVFAVLRDQKPFELKTPEQHAVEQGFVKAA

SEQ ID NO: 204586 - protein, 356 aa, unidentified
MNYVGIDYHKKYSVVTAVDEKGQVIRTTRLDNKHEPFQAFFSSLDGPSEAVLEATRTWGVLYDLLEEIDGVDSVTLAHSLKVRAIAEAKIKTDTIDSHTLAQLLRVDLIPAAYIPGKETRSFKEMIRQRIFLVRMRTRLKNRIHVLLDRRHVPPPPVTDMFGKGGTAYLKKLNLSGVDGEILKENLELLKAFDTLITEAEREIKHLMGNDPRVTLLRSIPSLGPILAVVVALEIDNISRFSAAPKLAAYAGLVPSTYASGGKVFHGHLLHMSNKWLRWAFVEAAWVAMRTSPYCRAYFESRKRHKGPHVAIIALARRLSEIVWHILNEERAYEERPFKIYKKTPSKETSPAALTIT

SEQ ID NO: 204587 - protein, 389 aa, unidentified
MRAVFGIDVSKASSEVAILVNGEKVHGYTMSNDALGFARLLGDLRTVHKPEIIFEATGVYSRPYTRLNPLEAKKQLDSLRVRKTDQIDAEKLAQSQFVLSRKPTYVQEEVYQNLRALSRFYQNLTEDIVRAKNRLHKVLQVTFPELETILSTPSGEQYWNLVIAFPCTDFVLELSKDKLSESIRQSTSKRISDKRVAYLAEKLIGLANQSYCAVKKNSPMLEEVRYYTKELLRLSEQRQTVLDQMVELAQPLPEYDILLSIPGIAETTATSIIGELGDIRRFQSANQINAFIGIDLRHYESGNFLAKEHITKRGNPYARKILFKCIHNIASASHTKPCHIADFYEKRKRQSQTTSTKPHTIASIHRLIRTMYYLITHNKLYDYTSTQNR

SEQ ID NO: 204588 - protein, 343 aa, unidentified
MDHFAGLDVSVKDTSVCIVDEVGKIVRELKVASEPDALLVVLRNTAYRFKRIGLEAGPLSQWLFSALAEADLPVICVETRHMRAVLKSQINKTDRNDARGIAQMIRVGLYRPVHVKTLRSQKLRMLLTHRKLLQSKAIAVDNDLRSTLRNFGLKVGIVGVARFEARIRELVADLPDLAILVEPLLVVRRVLREQIAVLHHRLLAVVRDDEVCRRLMTVPGVGPVVALTYRATVDVPVRFRKSKSVGAAFGLTCSRDQSGERDRPGAISRCGDEMMRMMLYEAAQSMLVHVKKWSWLKAWAMQIAKRRGMKKAIVALARRLAVIMHRIWIDGTEFRWTRDAAAA

SEQ ID NO: 204589 - protein, 315 aa, unidentified
MAMPVLVSKPIVGVDVAKNELVIYQAELDLLEAIPNTKATIKQWLKELPETVAIAIEATNIYHLEFADLAFEAGCTIYMVGGYELSHYRKGVKVRAKTDALDAKLLARYLKNEAEELRPWTPPTPLYRQLLSLFRRRAALVQARVGLVQSWANEPLLKTAFAEQVKSMQQLETLVEKTIKDHLKEAGLLGQLKRCLKVEGIGFLTGARLIAAFQRGDFRNANAFIAFLGMDLRVAKSGQKDCRRSLSKRGDPEARRLLHNAAMSASRTATWKGFYEAQRARGFSTTQALVMLARKLARVVFALLNGQSEYQPKTS

SEQ ID NO: 204590 - protein, 382 aa, unidentified
MHCHTSSLVTDEIVIHAALELSKNSWLLAIEASEHNRPSLHHLKGGDSSTLLAKLHKACEQFECRTGKPARIILCYEAGYDGFWLARLLESHGIDCLVVDPASLQVDRRARRVKTDRIDVEAILRTVIAWRRGERHVCSLVHVPSRDEEDLRRSHRERERLVKERTAHTNRIKGLLFTQGIREINLRRRRKPLAIDLTDLVTGDGHGIPPRLKCEVERELQRLALVDEQLAIAEAERDQVARQCEDSEKKRRQLTLLRGIGETGAAILVREVFYRKFSNRRQVGSYLGLAPCPYDSGSSARSQGISKAGNARARSTMIELAWFWLRYQPDSQLTLWFQGRVKGQSKRIRRIMIVALARKLAIAFWRYVETGLVPSGAIVGNA

SEQ ID NO: 204591 - protein, 356 aa, unidentified
MKSTTENTLKNFEGQEFYISLDVHKRTFKVTIRNNGRELKTYSMDPKPEQLKDYMRRNYPGGIYNSVYEAGFCGNWIDRELRGYGFNNIVINAADVPTKQKERVNKTDKVDSRKLARELENGSLEGIYVPRIEEEALRNISRLRFQIVKEKTRIKNRIISFLDSQGVVLPPEIEEKHWSKKFITKIREHTFSESYHKIYLDKLMDELEHQRRRNLEILRQIRKTSNEIEVIRYVRSVPGIGVIVAFTLYAELYKMERFKSIDQLAAIVGLVPSVSESDETKYNKGLTNRANKYLRPLLIEAAWKAVSLDPALTRAFNEYCKRMSKQKAIIRIAKKLLNRIRYVWINSKEYVQGVIE

SEQ ID NO: 204592 - protein, 334 aa, unidentified
MKHARKRYVGLDVHKDVVEYCILDAAGKKIDGGRIVCEQSVLQRFATKTLSSKDHVALEATTNTWSVVDIIEPHVAKIVVGNPLKTKAIAEANVKTDKIDAMILAQLLRCDFLPTVWIPDAKTRVLRRLSSFRKALVQDSTAAKNRIKGILNHLLIKHAVVWSRKGLDELKKLDIPSHERIIMDCEIAMLEHLGTQIEKVESAIKKLAYEEDNVRLLMTLTGVDYNTATAIVAAFGDIARFKDADHAASYLGLVPRTKQSANSCRQGSITKAGASLARSLLCEAAQHLSRNEGPLGVFVRRLLQKKTWNKAIVAGARKLATIAYHMLKNKEPYR

SEQ ID NO: 204593 - protein, 271 aa, unidentified
MGGATKEVIMAEVHVSAIDLAKRSFQVCGIARGGVVLFVRTVSRSKLEQLLPGQTPRIVAMEACDTSHYWGRVAQGLGHELRLIPPIYVKPFVKRQKNDAADAAAIAEAALRPNMHCVAVKSAEYQARAVALRTHQCFFRQRTQLINSLRGHLAEFGTVEMHRLCTVPGVGPITTGAVLAFALDLRAFFSGRNFAAWLGLVPRQHSAGGKTRLGSVSKMLQHNIRKLLIVGTMSRIRWIVRKGVLPDHWLGRILGREPRMVAVVALANKIL

SEQ ID NO: 204594 - protein, 343 aa, unidentified
MQTVTTIGLDIAKSVFQVHGIDAEGKVLIRRQLKRRYVLAFFQKLQPCLVGIEACATSHHWSRELKALGHMVRLMPPAYVKPYVKRQKNDAADAEAICEAVTRANMRFVETKTAEQQSCLMLHRTRQLFIRQQTSVINAIRAHMAEFGIVAPVGRHGVEALLEVVADVGDNRVPEVARACLSGLGTQLRMLKAQILEFDRRIMAWHRSNETSRRLDAIPGIGPALATALVASVADPKAFRSGRNFSAWIGLVPKQHSSGGKDKLGSISKQGDRYLRSLFTAGALAVIRYAKIHGTQHRPWLAALLARRPTKVAAIALANKIARMAWAMMARGERYKEPVALAA

SEQ ID NO: 204595 - protein, 368 aa, unidentified
MEQYSTDPIWVGLDVHQNSITAAILEGDAHEPEVIRMNSDLNTVRRMFRRLSERGVPRSCYEASGAGYVLQRVLDNDGFHCEVIAPSLIPRKPGDRRKTDRLDAIMLAKLYRSGHLTPVAVPDEQQEAVRQLVRARLAVQTHITRLKHRIVRVLATHGYHFTGTRSNWTKKHRTWLQQLRRQVEGPLATVLGIHLEHLEYLEAQQHSLDTEIERFSQTEPWRTGADALRCFRGIKTLTAMTILTEVGDIRRFRSPTQLMAYTGLVPSERSSGDVERRGPISRTGNRYLRRVLVESAWHYRHRACANLLLTRRRQGQNPVVVAIAVKAQHRLPKKFWRLAERKHTNKAVVAVARELTGFIWDALTTVAD

SEQ ID NO: 204596 - protein, 310 aa, unidentified
MDAIYVGIDVSKDRLDVHVRPDGEAFAVTRDGKGLEELVERMRALSPTLITVEATGGFEAIVAATIGGAGLPLVVVNPAQIRHFAQALGKRAKTDPIDAAVIALFAEAVKPELRPLPDEAQRLLAELVSRRRQIIEMIVAERQREKRTANARIRKSISRHIRVLEKELPEIDGDIGTMVRGSPAWREKEDLLKSIPGIGKILSRTILAELPELGTLTRREVASLVGLAPFTRQSGRWKGKSMIAGGRSTARWALYMAALVASRHNPLLRAFYLRLLAAGKPKMLALIAVARKLLTTLNAMLRDNKKWQHA

SEQ ID NO: 204597 - protein, 348 aa, unidentified
MLHAGLDLSRTRLDFCLLDELGERVEVGAVPPDGDGLAGFVRRVEERHGRTSVRAAIESMNGARFVHDSLERLGWEVEIADAVKVKGLAPLACKTDRIDAWVLAELSRRDLVPAIWLPSFGLRQERERARWRLFLVRKRSSLKHRVHAQLLAFGHACPVSDLFGVRGRELLERLEFPQPWRGNVLAAVRMIDELGEEIAAIEKELRVLGADHRYVPLLISVPGIAWVLGYTIAAEIGDINRFASPKKLTSYTGLCPRVYQSGGSDRRGPLTHAGPRYLRWALIEASTHACRHELYRDRYQHTKKRLGKQRGPKIALVDLARQLSQAIWHMLTRNQPFAPAGATPALAA

SEQ ID NO: 204598 - protein, 353 aa, unidentified
MDSKKYIGMDVHKESISIAVRNDAGKIVMECVIETRANAILDFIHGLRGELQITFEEGTWATWLYDLLKPHVSKLVVCDPRKNSRQGNKNDRIDARELSDRLYMNKLSSVYHGGAGVRTLRELARSYLTISKDLARVMSRVKAIYRSWGIPCAGKQVYATRHRAEWLAKISEVGVRRRAEFYYQQLDALRPLRQEVRRELLAESKKHPATKLLRQIPSIGPLRAALLIALIQTPHRFRTQRPLWKYSGFGIEMHSSADYRKVQGQLQRSRKQISVRGLNRDCNHDLKNLFKSAATIASIKPGPFQEFYAALLAKGMRPEMARLTLARKIATIVLIVWKRGVSFDAQYLKPQTA

SEQ ID NO: 204599 - protein, 411 aa, unidentified
MIKENYIYVGIDLHKETHTAVMIDCYNQKLGEITFPNRPADFPKLVAKVKKCNTDGKTIVFGLENAYGYGRALAVWLIDKGYLVKDVNTAISHRQAKHRGAMYRKSDSDDAEAIALATLNMLDKLPDAYPNDAYWSLGQLVHRRDNIMKQRTRLVNQLHEQLCIAYPSYKQFFNNISRPTALYFWEHYPSRKYLKGKSVEDLRAELVPVSHNKCSTRTCEKILDAIAGDKVKNNAYQDARDMVTLSIVSDLQHYDKQLAEVDKMLEQMYKMLGCTLTTIPGVNVITAVKILAEIGDIKRFSNANKLAQFAGIAPLHLSSSGKGKDVATKQGNRRLQATIYFLAIQMVQISSKGTPRNPVVRAYYEKRKAEGKTSQQALICISRRLISIIYGMLKSGTEYRMPVMENTGETV

SEQ ID NO: 204600 - protein, 335 aa, unidentified
MKVFYLGVDVSKKKLDLCLRSNGKDILYDVIPNDLSSIKSWLTRTFEKFFLSEDSLVVCAEHTGQYTYPLVCATKSIGVYLCLEDAAKIKYCHGIPRGKNDKIDACRIAMYAERYNDCLQPYTASELIIQKLKNLSTERSMLVADRAKYQSQLKDQVDYMEHSIYIAKCNRVEGIINTFTDYIAQIDLEIKELINQAPVIAHQMDLLMSVDGVGERIALKMIMETDAFTSFTDPRKFCCHAGVVPFVYVSGSSQRSKNRVSNRADKSIKHLLHMAALSVSQVKNSPLKKYYDRKVEEGKNKMSVLNAVRAKLVTIMFAVIRKDAFFSRNYQNSLA

SEQ ID NO: 204601 - protein, 354 aa, unidentified
MALLMMADSARVVTGGVDTHKDFHVAVVVDETSRRLGVGHFVADLEGYGELLAWMGSFGPIDRVGVEGTGSYGKGLARFLTVGGVEVVEVLRPDRQLRRRNGKTDAADAEAAAITALSGRDSGAPKRGTGPIESLRVLRVARDSAVTQRTAVTNQIGSLLMTAPEPVIKRYADKTGRVLYNALAASRPGPDTTDPKTAVAHALNMLARQQQFLTSQIRSLDENMAQIVSIVAPRLTARVGVGPQTAAALLICAGDNPDRLRSPASFAALCGAAPIPASSGRTQNRHRLNRAGDRRANSALWRTTMTRMRIDPRTKAYVTKRTGEGLSKQEIMRCLKTYIAREFYPIILADLAAI

SEQ ID NO: 204602 - protein, 343 aa, unidentified
MEELKVIGLDLAKNIFQVHGINSRGRKLCGCKLKRGEVLAYFANLPPVLVGMEACGGAHDWARRIGALGHTIKLMAPQHVKPFVQGHKTDARDAAAIAEAAQRESVPSVTVRSLDSQQMQALHRVRELWMKQRIALGNQIRGLLGEFGEAMPLGLKGLKQAVAQWQAQAGNELAVLKQLIEQLMTALREQESRLSEIEGRIREQHRHNAASRLLETIPGIGLLGSTAVVASFGQCETFSSSRKFANCLGLTPREHSSGGKQVLLGISKRGNGYVRKLLIHGARAVLKCRLNRPEHADDWEVKLAKRRGYNIAAVALAAKNARRAWAMLRSGEVFRQDLAPASA

SEQ ID NO: 204603 - protein, 346 aa, unidentified
MTRILAIDLGKFKSVACLYTTESSDPVFQTVQTRPQVFHDLIAEQDPHRVVIEVGSAAGWVKDLCEAMEIAIEVANPNHEAWRWKSVKRKTDKDDALKLAKLSAMGQLPTVQLPTSEVRQWRSLISYRTTLVRRRTAIKNSIRAIIDHQGMKYLSGRNGWTKAALAQLHQWSSPLVECEPSQLWRGQLYLELTALDQIQSLISIAEKKLDTIAASSKSVKRLQTVPGVGPRLAEWVVAVIDNPQRFRNGKQVGAYIGLCPRQYESGQMSRSGGITGQGHRLLRSLLVEVSWLTLRYNPWLASVYNHVCRGSKTRRKIAVVAVARRLIILCWAMLRDGTDWREPVVT

SEQ ID NO: 204604 - protein, 351 aa, unidentified
MLIIGCDYHPSFQQIAWVDTETGECGEQQLQHSNGEAEKFYRALKLREVHVRVGMEATGHARWFERLLAEVKYELWVGDPAQIRASRVRKQKTDRRDADHILKLRVEDRFPRVWVPSAENRDLRQLLWHRHRLVQMRTRVMNQLQAIAMNEGVRRKKGLWSKLGREQWESFPLAPWAQRRRQDLLELLDRLNPRIGELTTAIEQEAERRPEARRLMTHPGVGPLTALAFGLIVGPAERFGCGKQVSSYLGLVPCEDSSANHQRLGHLSKPGNTLRRFLLVEAGQAVVRSDPEWRGRFLHLAMRRGRSVAVVAMARKLAVRLYWMLRQGTEYRPSPVSVRTWGSSKLGHGVK

SEQ ID NO: 204605 - protein, 347 aa, unidentified
MAFIGVDLHTNSFTICRLHDDGSEAFETFTLSASALQAFCMSLDADDEIAVEATGNTAWFCDEIRSCVGRIVVVNPRQFQVIRKSVNKTDKNDARSLAFFLSKDMLPETRLKSTAEAELGSLVATRDVFVKQRTMLLNKIHAMFVRRGTKLKKEGLASKKRLRELDVSQFTALEQVELNALRNQALGLTETLAELDKAIEAAGAELPGHEGISSIKGIGSRSAAILLSGIGNIDDFESADKLAAYVGIVPKVSQSNDTDNRGRITKRGNKLMRTTLVQCTLIATRYSGYLNAFYQRIKERRGAGKAIIATARKLLSIIYDTLKNGWVFEDFTEFKIKQNQCPTGQPS

SEQ ID NO: 204606 - protein, 370 aa, unidentified
MRKNITETPKKNRQSRSQLSGNLTVGIDLGDRSSRYCILNQEGEVVAASAVATTKKDLSRVFGTLRPSRLALEVGTHSSWVSRHLKAMGHEVIVANPRRTRLIAESSNKQDRLDAETLARLARVDPKMLFPIRHRGEAAQADLAMIRARAALVEARTRLINTARGLTKSFGERLRACDAGYVDGCLAQDLPAALREAIEPLLEQAAELSARIQQYDERIQQMARKQYPETALLTAVAGVGVLIALTFILTLEDPHRFPKRRAVGAYLGMKPRRRQSGGRDPELGISKEGDVYLRKLLVQGAHVILGRNGSDSDLRRFWQRLISRGGKGAKKKARVAVARRLAVLLHHLWVTGEVYEAVHRKPAQPVPAAA

SEQ ID NO: 204607 - protein, 445 aa, unidentified
MLVWDKPGIFLILTKKGGDETMKKTDYLSTLFVGIDIGSKTNVVSALNFSQDYLVRMVPVKNAKGGVELIEQLLCEALEKDPEIKRVVIALESTGYYGFHTANYLSSSQKLLPFNVKVYCLNPKVVKNYKESFIDLPKNDGIDSFVIADYARCDRIKIKPWKGSQYLALQRLTRHRLHITECIAREKVYMLNNIFLKFSEFAFLQKEEHPFSNKYSATAEAILTEFTTTEQIVNTPIEELVELITARSHGRIINPMNTAELLQKAARDSYRLDKCLYEPLTTSIACSFNCIRAFEKELKALDIAISEAVKGLNPTEYQILTSVPGIGKVYGAGILAEIGSINYFKNHNSLAKYSGIFWNQNQSGDFNGEDTPMSKAGNRYLRYYLIEATDSVVRHCPEYAAFYEKKYAEVPKHQHKRALALTSRKLIRMLFGLLDKSQLYSPGKE

SEQ ID NO: 204608 - protein, 332 aa, unidentified
MENFYFIGVDVSKKKLDFCVMFEGKVVHEEETANHQSSIMALLHQLEENYGIAGGQMLVCAEHTGQYTFPLACACKTVECRLWLENAAEIKYSSGVQRGKNDKVDAKRIAVYASRFQDKVQYYERPSEDIERLKQLESERSLYVTDLAKYKGQLKDQREYMPTALYERKVKRLTALMENLEQAIQAITNEMDEVITSCPVLSRQMELLMSIDGVGRVVATNMIITTEAFTRFDDPRKFNCYAGVAPFSYSSGTSQQSKARVSHRADKVMKRLLHMAAIAVTHRNGGELKRYYDRKVAEGKNKMSVINALRAKIVARMFAVIKRNELYKPILS

SEQ ID NO: 204609 - protein, 338 aa, unidentified
MKLYGAIDLHSNNNVMVLSDEQDHVVYEKRLPNDLALITEQLAAYRDSLEGIVVESTYNWYWLVDGLMDAGHKLHLANTAAIQQYEGLKYTDDPYDARWLAHLLRLGILPQGHIYPKQHRPVRDLLRKRGQMVRQRTMNLLSIQNLFSRNTGGSMNANRVKRLDSKEIDELIPNTDLALAIKANLAMLQCAEGQIDILEKAVIGRVKLEPEFELLKTVPGIGLILALTIMLETGDIGRFPTVGDYASYCRCVGSKKISNGKKKGSGNPKNGNKYLAWAYIEAANYAVRYSAKIKSFYQRKKAKTNGIVAIKAVAHKLCRACYYIMKDQVAFDVTKAFA

SEQ ID NO: 204610 - protein, 402 aa, unidentified
MRTVQKLDSREVVSGAGGDIGQPVTLIEVVDSVCLELDHMKKLPPPGTYVTIGVRRTKTRKEVAVMYYTGIDLHRKTSFITTINESGQIVKKRNLINNEEKILQFFISLDDDTQVVIESTANWYWLYDLLTENGMDVVISNPLKTKAIASARIKNDKLDSHMLAQLLRADLLSTVYVSSRQNRQLKELLRHRSKLVRDTVRMKNRIHSIMAKNNLSVSASDLFGCRGLEFLTHAPLPQYQRYQVDTYLNLYTQLKEQVEILTKKVKQQADLNPMAQLLMTIPGVGAITAMFMVAEIENISRFKTYRHLASYAGLVPRLDASADKQRMGRITKQGSPYLRTALVEAAQASTRTKSRLNLFFRRRVIRSGYQKAIVATAHKIVQYAFYILRDQRPYRESIAALA

SEQ ID NO: 204611 - protein, 370 aa, unidentified
MSIKRILVNQIDTNLEYEVIGIDLAKNCVSAILLTTDGEIFGIDRLDYQELEKSAQELSPTIFAMEPCTEMNYMVQKLEDWGHQCIVISGKNVKDYVESHFSNQKTDLNDAQALAFLTKDTQLRTVKAKDPEQLKYASLTTLREQYVKQYRQTMVSLKGICQVWGLNISKGISGKARLKDMIENHADFPAELRTALVGMVAHAQAVQKDLKSVTKILEELAKKDKACQLIQTVPGLGTICSCRLRATVGDIKRFKHPKDFPAYYGLVPRSMATGHNEKKGEITHRGDKTMRSLMVQGAGIVINQATKGNLNSKQLTKWILKKQKEKMPWGKLVCAVAAKLLRIVRAILISGKPYNPKIAGVAKCSLPKAS

SEQ ID NO: 204612 - protein, 343 aa, unidentified
MAVIIGVDPHKATHTAVVIDGREEELGRKRVRAGSAQVDQLVSWAEPFGRHTWAVESAGGLGYLLSQQLVAAGETVVDVPATLASRVRVLGNGRSDKTDPNDALSIAVAALRARRLRRVESASHSEVLRLLAKRNTDIGDHRTRVVCRMHALLVELAPGGIAKEINASDVDRLLETINPTSPDQQIRYDLAVELLDDIRRLDQQLKLSHERIRVAVKASATSVTELFGVGPIIAAMLIGYSGNMARFPTRDSYAAYTGTAPVEFSSGGRTIHRLSQRGNRQLNHAIHMTAISQLRHPGSAGRIYFERRVSEGKTSKEAIRALKRHISNSVYRHLIADSRTART

SEQ ID NO: 204613 - protein, 345 aa, unidentified
MEFFAGIDLGKRKSQIKVLNQDRKVVEELKIDNDPKEFFRIFKKYKGKIDVACEASSNAFWIWDTLSPIVRRFSIGHTSKIRWIAEARIKTDKIDAGILAELLRADLFPAIAIPPKRIRELRELIRGIIRLRRQALRYRNQVHGLLGRHGVPYKRSEVQDTKLGELVRSVDLPRPARMAADALLRLEAATREEIRQLQVELQKELKGEDEINKQISLLESIPGVGFFSAALLVLELWDMTRFSDERHLASYIGFVPGTHQTGETLWHGGMTRQGNVLVRWILIQDTWIAIHNHWFFGRMYERYKKRKGNTRAVVPVARALLKTIHRVWTEQKSYEELYKEKTLVG

SEQ ID NO: 204614 - protein, 349 aa, unidentified
MINYVGMDLHSTNTVLGMVDEDGKRIYRKKIPNHYALISKELHPFKEKIKGVVVESTYNWYWLVDQLIEDGYKVHLANPSAIKQYEGKKYVNDQDDAFFLAELLRLGILPTGYIYPKKERSVRDLLRKRLMLVRQRTAHILSFESFYCRNTGLRMSCNDVKKLNISDVENMFESDYQVLSAQANIATIIFLNERIKKIEKAVLDFMKLMPQFQKLLTIPGIGNILALTISLEVGEIDRFKKVGNYSSYSRCVSSGRYSNGKKKGENNRKNGNKYLSWAYVEAANHSKKNCPYAMRFFQRKAAKTSNIVAIKALAHKIARASYYVMKNQENYDIERIFGPIKKQAAAVNQ

SEQ ID NO: 204615 - protein, 416 aa, unidentified
MTDQNQCYAGVDWASEAHHVFLTDNNGRKIAEKVFKHGGEGLAGMAAWLMAMSHAGEAGHIQVAIEVPHGPVVETLIERGFKVHAINPKQMDRFRDRFTLAGAKDDSRDAEVMASALRTDPRCFRPLAIADPLVIELREWSRMTEDLGAERNRLTNRMRELLWRYYPALLTLENDLGAEWLLDLWETVPTPAKAARIRETTITRLLKRHRIRRFDAAHVIAVLRQPSVQVSAGTTHAASAHIATLTARIRLVNRQIRQAHQQLHELTDRLIPREEAEPGQARQHDVEILASLPGVGRIVLATLLAEAFDALQRRDYAALRSLTGVAPVTKRSGKSCIVVRRQACHDRLANAMYHWARVAVQHDARSREKYTALRSRGHSHGRALRSVADRLLNVACAMLKTGTTFNPAIATQNAPC

SEQ ID NO: 204616 - protein, 420 aa, unidentified
MNREVRAWIGIDWADEKHDVSLYEVATGRQERLEVKQSPEALAEWIGQLRTRYGNAGQVAVVLEQGRGALLNVLMGCEFLVLYVINPKSLSCYREAFYGSGAKSDPVDAELMREMVRQNPERFRAWHPDDVLTRSLRLMTEGRRDLVNQATAVTNQLTALLKGYYPQALRWIGALDTHWACDFLDQWPTLQALQSSSRRQILRFYEKHPRHHLDLEQQIQQFHQTLPLTGDEAVLEYSTLMVQALIPQLRALLDSIDEFDRKIAEVFRKHPDRPIFESFPGAGAALAPRLTAAFGADRDRYAAASEMQQFSGIAPVTEKSGKQHWVHWRMACPKFIRQTFHEFADHSRRWSAWAKAYYQLQIERGKKHNAAIRALAYKWIRILFRCWKQRVPYNEQVYLASLLKHQSALLLKAAPAVEKL

SEQ ID NO: 204617 - protein, 417 aa, unidentified
MDPQISFNQVVSRGCGIDVHQKVVVATIGGEGLKKATREFGTFTRSLTELKDWLLENGVTHVAMESTGIYWKPVYHVLEPTSLKVWIVNARHIKYVPGHKTDKQDSAWICKLLLAGLLKPSYIPAKEQRELRDLTRFRTKMIQHVASEKNRIVRILEDCNIKLSSVLSTTQGVVATKLIDKLCEVGTITMSDIEEVYHKRLEASKEDLYEACQGLIDKHHIYLLGLIRQDIASTEAVIKNLNARIKEVLSGYDNVLENLKAIPGLSTKTVEDLVAEIGLDMSVFPTEKHLASWAGMCPGNNESAGKKKSGRTTHGNKQVKAVITEAAWAATRTKNTFYSARYHRVAARRGKKRALIAVGHSILKSVYHVINGMEGYKELGADYVTQRVEKRRKLYLKKELEKLGYAVQLTPPVPQAG

SEQ ID NO: 204618 - protein, 314 aa, unidentified
MDQVIVGIDVSKSRLDVHILLGAQGPGECEAVPRDGAGIAALAERLGALGATLVGVEATGGFETVVAAGLAGAGLPVVVVNPRQIRAFAQALGRRAKTDPIDAEMIARFLAATRPEPRALPDASGRLLADLVARRRQIVSMIAAERQRQSRLTEPRVRRSILRLITALEKELNEVDREIDDQVRGSPVWQAQEDLLRSVPGIGPATARTLLADLPELGRLDRRQIASLAGLAPWTRQSGTWRGKAFIGGGRASVRTALFVAAMVGARYNPTLKAFHARLIAAGKPKMVALIAVARKLLTILNAIVRDQKPWQVA

SEQ ID NO: 204619 - protein, 359 aa, unidentified
MQRNKISFKGQKIFVGIDVHKTTWEVAVLTESGLLRRHSQESSAKVLFDFLRKHYPDGEYHAVYESGFSGFATYYSLKDYGIECTITHAADVPTTQYEEVMKTDKIDAEKLARALKKGDIKRPVYIRERDNIDDRGVIRIRKTIQKQLSGYKSRVKHMLHCNGVELPERFSKPSSHWSRAFITWLMQDVKLLSSTRLSLDLLIRQVEVIRGTLLEATRELRKLSQTERYKHRFDLLMTIPGIGQHVSMCILTEVWDVNRFPNERAFAHNMGLVPTCHDSGPHKSNGEKTFRGNKHLGPMIIEACWIAIYKDMGLAACYAYHKQRMNPQKAIVRVARRMSNIIYSVLKNDKAYEPYQWDK

SEQ ID NO: 204620 - protein, 442 aa, unidentified
MLRTIYRRVAGLDVHKKTVVATRMRMTEDDRVVWETKTFGTTTPDLLELHDWLLEWSSTHVAIESTGDFWKPVYNVLEGTFELLVVNAKHVKHVPGRKTDATDSEWLAELMMHGLLKASFIPPEPQRALRDMTRYRTTLVQERARVVNRVQKLLEGANIKLSSVATDIMGVSARAMLDEIVAGQADTTLLAELAKGRMRTKIPELEKALTGKVKAHHRFLLAKQLAHVDFLDEQIEEISAEIGRHMAEMGGPSMPGANAGGGEKPTEGEQPLPPLTWEEAVALLDTIPGVNRRAAEVILAEIGLDMSRFPTADHLASWAGLAPGNHESGGKRYSGRRTKGNRSLSSMMTEAAQAASRSKDTFLSARYHRLAARRGKKRAIGAVAHSMIVMIWHILTSRQPYRELGGNYFDERKKESKVNYYLRRLEQLTGAAVTLGFQPAAA

SEQ ID NO: 204621 - protein, 387 aa, unidentified
MKKFNYSIGIDVSKDSFVVSIKGNDFIKSNLSFSMDKSGFENFASQTIQFKNSSVCACEPTSIYHINLVNFLKEKGYNVCMVNPYKVKQFFRFFANKLTKTDKIDSKVLADFIQFNNQSQNPTSCQKEQFRYLVREKENISFQIAQIKSEIKRILYLVFPEIVRNGNVFSSGIISILKVFPSAYSIRSVSESQFISSVEKYLPTRGKKPDLKLIYKLACQSIAYSYPHFEKILLLKIQYLEFLENQMNYISQLIEKLADQIYKREIEILTSIPGIAKKSTIYFISEIMNIGRFASYKKLIGYCGLDPVIKQSGKYKGVWKISKRGNSHVRRIAFIMAESVRKMTPYFRDYYIKKINEGKSYRQAIIATSTRLLKVIYYLLLDNRLFS

SEQ ID NO: 204622 - protein, 347 aa, unidentified
MDYYAGIDVSLECSSVCVVDANGKIVREAKVASEPEALIGWFGSVGFGLTRIGLEAGPLSQWLYAGLRDAALAVELLETRHVRTALKTMPVKSDRNDARAIAQLMRLGWFRPVHCKSIAAQEMRALLTARKLIQGKLFDVEMSLRGILRGFGLKVGATTPRRFAGRIRELVAGHLTLEAIAAAMLAAHEVLLREFATFEKQLRTMARSDARTRLLMSAPGVGPIVALTYVSALDDPARFASSKAVGAYVGLTPKKHQSGESDRTGRISKIGDAGLRTALYQAAHVMLVRPVKGSHLKSWAMRLARRAGMKKAKVALARKLAVVLHRMWVDGRSFAFKAFSKPATMAA

SEQ ID NO: 204623 - protein, 332 aa, unidentified
METIYFLGIDMAKKTFQAALTLNGVDMAECSVENTSEGIKSYFQELKKKFSFSQLIVCVEHSGIYTYRLLDYLAKNNIKVCVESALQIQRSQGLKRGKNDQIDACRIAQYAYKNIKDLRFWTPPRKVIERIKSLLAARARIVNARVQLTVPIKEQESVDAYERKLIEKVCKESIASLGRDIDKIEKEIRLLIKSDQQVSEQMAYATSVPGVGPITALNMIICTGEFERISESKKFACYTGVAPFEHSSGTSVRGKTRVSKLANMNMKKLLHMAAMSSITCSTELRAFYDRKVTEGKNKMSVLNAVRNKLISRVFACVKNKRLYEKAYLNALA

SEQ ID NO: 204624 - protein, 377 aa, unidentified
MSEAKKRGSGPSHLLMTPDHSGNVVGVDPHKRTLTATVADARGGILGSAHFRVSGEGHRELEAWARQFGQIARWGVEGAASWGRHTAMFLASRGHDVRDVCPNRTPRSDRARQRGKSDMLDSERIAREVLAHSLLPKAFKRAGQEQGPDEQHQLLALWNNRRRSILTGRQHLVGEAEYLLCELPLELREQLPDTKAVRPRLAALARRKGRRRYDAPTRLRLQLLDGYRAQIKALDGQERQVLAELEVLVDQSGSTLGELCGLSTRSVAELLVEVGDPRRFTEGGFARFNGSAPLPASTAEGPGEPVRHRYNPGGNRRINAILYRMAITQLRCEPRAQRIYEGARANGHTKKEARRILKRHLATAQKAARQVKRTVNA

SEQ ID NO: 204625 - protein, 316 aa, unidentified
MNQSTNSVKFLGVDVAKDRLQLFCNGLKVPAQIDNTPKSIASWLKGLKRLHSQLHIVCESTGGYENTLLRACWKAGVLVTRLNPARVRDFARCRGLLAKTDAIDAKAISEFASTFPPDPTPEPSPQQVLLAELVARREDLKTQRAAESNRSRDIQDKVLRRMLEKHLQFLDAQIKQIDKLIEDTISQDQAMHQKREILVRTKGVGATSAAILLSCLPELGTISGEAISALAGVAPFNRDSGTLRGKRCIRAGRAVARKALYMCALVGSRANPILKDFYQRLISKGKPPKVALTALMRKLVVHLNSSLKIINSPSPC

SEQ ID NO: 204626 - protein, 392 aa, unidentified
MYIVGIDIGKNHHEASIVSPEGKQIGRSLRFATTHKGADSLMSFIFKNIGNSPCVFGMEATGHYWYPIYSFLKAKGYTICVINPIQSDSLRKMYIRQTKNDSIDSFLITEVIRFGQFGTTSMADENILAMRQLCRYRDSVISSRTEIKLRIGTIMEQIFPEYEKQFSSLWLSTSMGILEKYLTPENIENAPIDELFEIIKDKSHNRLTKAKAISIKEAAADTFGIKIAQDAFSFQLKQLIDRMNFHDKQIEALDIEIMKYYEQFDCYLHTIPGIGIIGAATILAEIGDISRFKNSSALVAFAGIDPTVRQSGEFNSTHNHMSKRGSPYLRHAIFLAATTCSFHNSPLNAYYKKKRDQGKHHLTATGAVTRKLTTVIYAVLRDSKPYEPKKFC

SEQ ID NO: 204627 - protein, 345 aa, unidentified
MELHTIGIDLGKTVFHLVGLNLRGEVVVRKKFSRTQLLRFTANVHVKLIGMEACGGAHFLGRALREQGHEVRLIPAQYVKPYVKTNKSDYIDAEAIAEAVARPTMRFVPIKTDDQLDLQSLHRVRERWVMRRTAVINQIRGLLLERGITLRKGRCYVGAALPGILEDADAKLSGALRMLLAQLKLELDHLYLRIDEADALNKKTARENEACQRLVAIPGIGPVTATAVIAAIGNGGAFRKGREFAAWMGVVPREHSTGGKQKLVGISKRGNSYLRRLFVQGARAVLQQRTKQSSGLSVWLAQLISRSHRNVAAVALANKVARMAWAVLAKNEPYRPPVLADVAAT

SEQ ID NO: 204628 - protein, 343 aa, unidentified
MYYIGLDIHKRTISYCVKDAAGHVHQQGKIGTTRCELDAWIKTLPQPRMMAMEATIFTGWIYDYLLPHAEQVKVAHPLMLRAIAAAKRKNDKIDAAKIADCLRCDFLPECHMASTEIRDRRRMLRYRNLVLRQMVQMKNRVSGLLMETGVTYNKQRLHKLGYFTELLSSDDEVIDSIRPLLKLSRETINRSQKLDRALTSSLERDPLLSERLRRLRTIPGVGPITALTWALEIGDYTRFQSVKEAISYCGLCSAEKSSADKVIRMPISKQRNKHIQHVLVEAAKLAPRYSHELALVREKEMQKGNTNQATLAVARKLVAYMLAVDRRKQDFLPAEELGGKAVA

SEQ ID NO: 204629 - protein, 346 aa, unidentified
MRNSNTIGVDLAKNVIQVSIVTPGNKELSNKELTRVKFAEFLARQKPGLVAFEACATAHHWARLASTYGHQVKIIPAISVAPFRQGHKTDKNDALAVAEAANRPNVKIAPMKSIDHQSIQSIQRSRELVIQERTATSNHIRGLLLEFGIVIPKGLAYLRKLVPLILEDAENGLPMSYRPTLHRMLMRFRAAEDDLAFMDEQIKQVIKSNDGCQRLTALEGVGPIGAILIFATLGSGDAFKNGREFSAYLGLTPKQYSSGGKTNVVGISRHVANRRLRAVLIQGARAYVHKHKQVTSGKDEWLQALVARGGTGRAAVALANKNVRTAWAMLTQGTEYNCKPCVGNAA

SEQ ID NO: 204630 - protein, 372 aa, unidentified
MPSVTNKPVPITPTSVGDEYDYVVGVDTHAATHSYAIVTAPTGALVDERTFPTTPAGVARARDWIARRTGGDVSGVLISAEGTGSYGAILGAELAQVGYRVVEAPTPRRERGRGKTDAMDAVTAARGTLAMPMSRLRDRRGAGGDASEQVALQVLTTAREQLNAERVRAINALTALVRTHALGVDARRALTTTQIREIARWRRRDEETGIATARVEAVRLAARVVQLDTDLKTNRVDLTAIVEARAPELRELPCVGAITAAVIVGVWSHPGRVRSEAAMAQIAGTCPIPASSGNTERHRLNRGGDRRLNWALNTIVLTRMRDDTQTRVYVERRTTEGKTRREIRRCLKRYTTRQIYRTLNAAHPLEELTRTA

SEQ ID NO: 204631 - protein, 362 aa, unidentified
MKEGKRRYVGIDLGKRTYEIAIVGPTGKVTMSNGKTTVEGRQRLYQKLTAQDKVALEAGNLAFIMAKEMEAATGCQIRILNPSHLALIYGSMKKTDKEDALKLAHIIEDYKDERLPVVPLPSDKEIKRRKLLASYRREQRVRVQGINRLHGLFVSQGITDVVKSDLATDDARSQTVKALTGLEKEEAEHLLACLKLYEKRIEVLEAQMGQEAKGDQEIERLQTVPGVGPKISFAFVAHVAAERFENASQVSNYLGLVPRVYISGDTVRYGRITKRGNGFLRALLVQGSWALIRSKAGGCLKERYEYMTGEKGISKKKAIVAIARRLSELLYTLMKNGTEYEVRKFKHGKEEAKKLALVAISA

SEQ ID NO: 204632 - protein, 345 aa, unidentified
MELFTLGIDLAKTTFHLVGMNQRGEVVVRKRLSRTQLLCFTANLKVELIGMEACGGSHFLGRALREQGHEVRLIPAQYVKPYVKTNKSDYIDAEAIAEAVGRPTMRFVPIKSEEQLDLQSVHRVRERWVMRRTAVVNQIRGLLLERGITLRKGRRYVDEALPGILADATSKLSGSLLVLLRELKLELAQLADKIDRSDTAIAQIARQNEACQRLVAMPGVGPVTATAIIATIGNGAAFRKGRDFAAWLGVVPEEHSTGGKQTLWELPRRGNKYLRRLFVQGARAVMQHKTKQSSGLTAWLAQLTARTHHNIAIVALANKLARMAWAVLAKNEVYRPPLLAGTAII

SEQ ID NO: 204633 - protein, 337 aa, unidentified
MKYSGIDLHSNNSVVTITDEEDRVMAEKRLPNDLTRILDFLKPWKEELAGVVVESTFNWYWLVDGLQEAGYTVHLANTTAIKKYDGLKHSGDETDARHLAHLLRLGILPTGTILPKEQRTVRDLARKRMQLVRSRTAHILAVENITARQLGARISSNMVKQLTGDSVDQMPLPEDVALAVKANVAVIETLAEQIKLLEKRLQEKVGAQAEYEILNSVPGIGQVLATTILLETGPIERFAAAGNFASYARCVDSVHTSNNKKKGEGNTKNGNKYLAWAFVEAANFALRYNPEAKRFYERKKSKTNSVVAIKALAHKLARACFHMLKEKKPFDAERCFA

SEQ ID NO: 204634 - protein, 371 aa, unidentified
MTYDTTVFVGLDVHKDSITVACVGADPAEPPVDVGTIGPQQYAIDRLIKKLAGRGSLQFVYEAGPCGFWLQRYLQSVGQQCLVAAPSLIPRRPGVRIKTDRLDARNLALALRAGTLTAVHIPTPEEEAFRDVVRAWQQCKRDVTAAKQRLKAFLLRNDIRYEGRATWSAAHRRWLARLVLPSPAQQIVFQELVDAVLERERRRDRLEYQLDALAPAWPGHRLACALLAFRGIQKTVAYTVVAETTSFARFSHPSRYMAWLGFVPSEHSSGASRHQGPITRSGNRWARTLLVEAAWSYRYAPKVSAIIERRAPQIDPAIRTLAWKAHLRLTHKYRRLIARGKHANVAVTAVARELAGFIWDAARLIEQPERT

SEQ ID NO: 204635 - protein, 356 aa, unidentified
MTTAQKQSCMFVGIDVHKDTHTVVGISPYGEKLFEITVGNYKEDFETLNEKVKEHSGVLSPFFGLEDVRGYGERLAGYLYEKYPVYHVPSILVDRQRQNATHPEKSDSLDALGVAKVMIQSIDTLLPYTISQESEKAKQLKEISVDREDLVLERTRLKNQVHTLLYRIYNTEYEQKFKDPFALKALRFWRNAKPKCDPFLLKTMKRKVRRLLDIHVEVVDLEKDMAQLLKDNYTIQTASGCGVVLASTIVGEIGDINRFTSPGALSKYAGCSPRERSSGKKVRHVKSRSGNRRLNCAFHRMALSQISRMGNDRARVYFRRKISEGKSKSQALVCLRRQMVNIIWMMLKHKTIYRNA

SEQ ID NO: 204636 - protein, 313 aa, unidentified
MAETVVTAGIDVSKEWLDCAVWPGKAELRVERNAVGFDQLAAWLVEHRVGRVGLEASGGYETVVMDALQARGFAVIRFNAKRIRMFAKAKGRLAKNDRADARVIAQATLVLDENTPPERRRDLDPLVEHLAYRRQLRDWLGDCANQLEHLRDASLRRQILVRQVGLNKALAALDAKLAKLVAAHKDWHALEQRLRKVPGVGPVLAQTLIALLPELGQVSRRAIASLVGVAPFDDDSGKRAGERHITGGRDAVREVLYMAAVAARRWNPVIAAFAKRLVGKKPKVIIVACMRKLLTILNAMVRDGQDWNPGAAA

SEQ ID NO: 204637 - protein, 411 aa, unidentified
MESVYRCIAGIDVHKKMLAVVIRQPAGEHIQRKFGTTQSEIGHLAAWLREHRVSEVVMESTAQYWRPVWYGLEAHFQLHLTHPLKTRAPRGRKRDFRDAQRLADRWYSGDLEESFIPGAEQRSWRWLTRTRVQLKRKLGVIRNQVEGILEQGGIKLSAVTSDLFGVSGWAMLEKIAEGKADAEELLKEARGALRKKRAQLKEALAGKLEPVYQLLLKQQMAQVRLLWQQVEEINGALAEAMQPHLPILVRLTKMPGLDLYAAQELLAEIGPAAAAFPSAEQFVSWIGVCPGSQESAGVNYSRRSPKGNRYLRRLLTQIAWAAIHTKETFFAGLFYRLKPRVEGKGAAWAVALRVAKVIWLILHNGVEYVEKGAGPLNPRTLRRKFRRLMKEFARIGLDVKSLLNQEAATAP

SEQ ID NO: 204638 - protein, 387 aa, unidentified
MYFVGIDISKYKHDCFICTETGEVIESNFSFPNTSDGFEQLLNLLKSIDNFKEIRIGFEATGHYGMNLKLFLEKNNYSFMEFNPKLVKEFISGQTLRKTKTDKKDAYQITKYLISVDYKPHPKQFYHKYSLKSLSRMREKLVKQRSYYEVALTNVLDHIFPEYKPFFNNTFSASSIFILSKYKSPDKIKNMKDYDSIRKISRGKFTSAQFFLLKDLAKNTIGTSNEIFELELETLLILRSQIEVEIKKLESNIEEIIKELNPPILSIKGIGYILGAGIVSEYGDVSRFKSADAMVAFAGIEPSICQSGTESHTGHMVKHGSGHLRYYLLNAADCIFLHEPIFTEFYYKKRNEGKSHRVALNHVAKKLIRIIYKLENENITFDSSKVK

SEQ ID NO: 204639 - protein, 391 aa, unidentified
MIYIGIDVAKDKHDCFITNSDSEVLFKAFTIFNNLDGFNDLYQKIESVMDDVTKVKVGLEATGHYSYNLLGYLIDKGLPTYVINPLHTNLYRKSLSLRQTKTDKVDARTIASMLMSDMNLKSYSDTSYHNEELKSLTRYRFDKVKERAKLKTSVSRLVCILFPELEKLVPTLHIASVYAMLSEFPGAKQVANAHLTRFTNLLSEASKGRYGKETAIAFRDAARTSIGSNMPAKSLELKHTIKLIQELTSEIDEIEHEIKLIMDELNSPILSIPGINYRMGAMIIAEIGDFTRFDSPDKILAYAGFSPSTYQSGQLDGAYSHIEKRGSRYLRYALYNAAKYVCIWDPTFAEYLAKKRAEGKHYTVAISHAVKKLVRVIYHLEKTNQQYIKAA

SEQ ID NO: 204640 - protein, 370 aa, unidentified
MPDVSSKAPVDVRLWVALDVHKFSIVAAILPPVGGSPEVQRIETTEKAIRRFIGRLGGPEGLAVAYEAGGFDLLRLLARIGVACDVIAPSLVPVRAGDRVKTDRRDAKKLVRLLRAGELVFVAPPSPETEGLRDLLRCRDDLRCARTAARHRVAKALLRHGRIFREAKTTWTARHRAWIARQRLDDVLAHAALEQMLIHLDGIDRQLDALDAQLEQLAASDRWRAQVQTLSAFRGIRTLTALGLIAEIGDFARFAHPRELASWLGITPSEYSSGDSQHRGHITKAGNRHARRLLVEAAWHYRHAPRLPAGGPPPSERAWQAQIRLHHRYRHLSTHGKRPTVINVAIARELVAFLWAAMTDQPPREMTAAA

SEQ ID NO: 204641 - protein, 412 aa, unidentified
MPDDQSLPNLSNLSWEVYVAFKIFRKNCCGLDVHKTWIYACMGITDTNGRTEYKQARFSSFTKGLQKLADWLAKYDCNDVCMESTGKFWIPVFNILEKTCWVTLAYPKYTKPQKGNKTDHKDAKWICDLYMCDMVNPSFIPPPDIRQLRDLMRYRSKLTNIMTSEKNRALNCLTVSNLKLDDVFSDVFGKSSRSVIRYILEHPGETFQVAPFIDRRCKHPVEEIQAVIDGTISHQQAVKLRECLQHLDELEVHKTNVEKEILCLVQQYPYQLELLQTVPGFSGNIMTAIALISEIGADMSVFPSAKHLVSWAGCCPRNDQSSKKVKSTRISRAGVYLKPLLVQVAIQPFTANADKLSAAGALEIRCQICDGRFLSMWAALFIFLGCPLPPCPKNLHVHNGRIVILASVAWIF

SEQ ID NO: 204642 - protein, 348 aa, unidentified
MQVTTIGLDIAKNVFQVHGINAAEKVIVRKQLRRSQVLAFFKALPPCLIGMEACATAHYWARELTKLGHRVRLMPAKDVKAYVKRNKNDVADAEAIADAEAICEAVRRPTMRFVQTKSAEQQGRLMLHRVRDLLMRQRTQVINALRAHLAELGITAAQGTAGLKELLKIIASDADERLPVDAHASLVVLAAELQAMQTLVGSLEKRIMAQHRGNEASKRLETIPGIGFIGATAIAATVTDPTAFRSGRDFAAWIGLVPRQDSTGGKQKLGPISKQGDRYLRRILVVGAHAVLRYAKQNPEKYPWLTQLLARRPFKVVAVALANKMARMAWALLAHGGTYRAPALAAAA

SEQ ID NO: 204643 - protein, 342 aa, unidentified
MKELKKVVGIDVPQKELVVTIGRLLEDLSVDLFSYKVFKNNEKGFSALVEWVSKLVENHEEVHYVMEATGVYHQKVAYFLDTNQLKVSIVLPNKISNYFRTLEVKTITDKTCSQVIARFGLERKLDLWKRPKTVYKNLQQLTRERDQIVAERVIVKNQLHAEKVEAEPNSMTLKRISERIKLLNKQENEIKNDISKILKNNAELKEEIDRMMTIPGIGELTAVIILAETNGFELIRNKKQLTSYAGLDVKEKQSGTSIKGKPKISKKGNRSIRKAMHFPSLVAVKWDENFKELYARLVSKHGIKMKALVSIQRKLLEMSYVLYKNQTIYDKEYKNSVKTQMA

SEQ ID NO: 204644 - protein, 457 aa, unidentified
MQTVKRCDPEKPQFDVLTQINHHAAGIDIGADEIYVAIPAGRDEQNVRSFGTFTIDLLALARWLQTCGVETVAMEATGVYWVPLYEVLERCGFRVNLINARHIKNVSGRKSDILDCQWIQQLHTYGLLQASFRPPEEICELRSLVRHRDMLLKYRGSHIQHMQKALDLMNLKLTNVISDITGVTGLEIIRAIIAGEHRPSILAQFRDGRCKKSEAEIAKSLEGNFRSEHLFILQQAVELYDFYNQQIQACDRQLEARYSQFVLTEQPGTLGPESHKTKRSKNSPAFDLSQDLYRMTGVDLTQVDGLEALSVQTILTEIGTDMSKWPTVKHFTSWLGVAPNNKITGGEVKSRSTKKTKNRANTAFRRAAQSLARSQSALGAFFRRIRAKHGAPVAVTATAHRLARIVYFMLLRREPYRDLGADYYDKQHQARTIRNLERRAAQLGLRLEPISSGERVS

SEQ ID NO: 204645 - protein, 320 aa, unidentified
MQTPTQVLNIGADVAKDEIVVACSEESFPVRKLANQRTALLAFLKCLPPCSRIGMESTGIYHELFANLAHKLGFIVFVLNPKDARHYAKGVGLRGKTDRVDAELIARMIAHEHTKLFAWTPPTPEQYEIAQLLKRRAKLTSLRAALGMSLKGVDGFCADLKALKKRFDQVIARIDQRVKELVEANPDRKQHVTHLRTIYGVGPVVSTALVNTLERVPLKSADAFVAFTGLDPRPDDSGQHRGKRRLSKRGPSELRRLLFLEALSAAKTKAWHPLYERYREKGLSSTAVLVILARRIARTAWSMYTYKTEFDPGRLTKGLT

SEQ ID NO: 204646 - protein, 408 aa, unidentified
MAGKVAGIDVHKKVLMVVVIDAEAPAAKPERRRFTTMPSELCRLSTWLKEHSVEEAVMESTAQYWRPVWLELEPHLRLHLAQAFSNRAPRGRKHDFKDAERLVRRLIAQELILSFVPDGEQRIWRNLTRMKLQLVRDRVRLQSQIECVLEEMRIKLSVVVTDLLGLSGLRILHALANGETDARNLALLGDHRLKCSEEELIEALTGRSHPLHRQMLALQLERLRLIDEQIAKLNSLIAQAMSPYQDSVIRLAEVPGLGIDSAQQIIAEVGVTAGTFPSAAEFTSWVGTCPGKQESAEENSSSRSAKGNKYMRRVLSQAANAAARSKGTHFQAVFRRLLPRLGYQSAIWAIAHRLCRLVWKILHEGIRYVEQGIEYEPKLLIHRARSLAKQLRKFGYNVQITPADGAPA

SEQ ID NO: 204647 - protein, 343 aa, unidentified
MKLSYIGVDLAKNVYQLHGVDRHGKAVWKRRLRRGQWLQALIDKVEPGCEIGMEACTGAHHWARELQSRGYTVRLIAPQFVKPYVKSNKNDANDAEAICEAMSRPHMRFVTVKSVDQQDIQATHRVRSELKAHRNAKANQIRGLVAEYGLVAPQTLLALRRAIPEWLEDAENGLTHYFRSLLHGLWDDLLTLEDRLKELDKEIDKLARSNEVAKRLQQLRGVGPIVATALVATVGDGAQYKKGRQMAAALGLTPRQYSSGDKHRLYGISKRGDAYLRTQMIHGARAVVSQAKHRDDPLSRWVTDIAKRRHPNVAAVALANKTARMAWAMLRNDTDYDPSLGTC

SEQ ID NO: 204648 - protein, 338 aa, unidentified
MKTHVGVDLHQRFCYLTAVDASGRMCKQGQVVNEGAALRAWLRPLPAPRQVVVEASGFWPAFARAAGPEAERLVMVHPQRVKAIASAKLKNDRVDSETLAHLSRCDLLPEAWMADEATQQLRLLVRLRITLGRQRTRAKNQLQSVLHQEGFKKPVTDVFGKRGRAWLAGLELSAAGRLVVDTWLREVDHLDAELAVQTRELERMAGEDARARCLQTVPGIGAYAAMVIVAELGDAKRFQNKRALASYAGLTPVVRESAGKRKRGGITHQGSNTLRWIMLQVAQVAARSSPAARSYYQGLRQRKPAQVARIALARKLLTVVWALLDHGVCWDEKLFARG

SEQ ID NO: 204649 - protein, 335 aa, unidentified
MHVAHAKDALGRQLATTSIPTTPDGYRRLLGWGQGLGEVQAWGVEGTGCYGAALTRFLHAHAQVVVEVNRPDRAARRRQGKCDPVDAEAAARAVQAKDATGLPKSGDAKVEMLRCLRVARSTAVKARTQAINALKALVVTAPEDLREQLRGLSATKLVRAAASLEPGHLDTTTAATKLALRTLAERHQALSAEVKALDRELRRLVAAAAPGLLELLGVGSESAGALLVAAGDNPGRLHSEAAFSMLCGSSPIQASSGKTTRHRLNRGGDRQANAALHRIVVIRLRWHQPTRDYLARRTTQGKSKPEIIRCLKRYVAREIFAVLKDMTPQHSTQAA

SEQ ID NO: 204650 - protein, 347 aa, unidentified
MTIVEAPVGITGGVDTHLDTHVAAALDPLGRLVGTESFDADAAGYKALLSWLEQFGQVDKIGVEGTGSYGVGLARFLRRKGVEVIEVNRPNRQARRNHGKSDPLDAVEAARAVISGRALGTGKTKDGPVEAVRVLVVAKRSARQARVKAIVQMRHLVITAPDQLHSRLKCLTVTALVAESAKLRATRATDPVTAATKASLCSLAHRVQALEAELDELNEQIEALLYATAPDLMARFGVGPDTAASLLVAAGDNPERLHSEAAWAHLCGVSPVPADSGKNAGHLRRHCGGDRQANSALWRIAMVRIAHDPETRMYFDRRVKEGRTKRDIIRILQRYIAREVYRYLPRG

SEQ ID NO: 204651 - protein, 394 aa, unidentified
MSNLLIGIDVSKDLSSAHGIDSEGNKQFYIEFSMDSKGFSKLIKKIKACSKDMSEVTAAMESTGCYHLNLFCFLSSKGIVCFIVNPLLISNYAKLSLRKTKTDKKDSFTIARFLRGHKDSLTKTSFSQDIQDLRDLSRERESLTGHISSMKNDIKRLLQITFPELQSFCKTIYTETMLNFLTQFPSARIIRNANPKDIEKALIHKKRVLYSVEDIITAAKASIATDSTAKELILSEKTSTVLYLQDKKQKITDLLIESCESMMVDDLNIIKSINGVNDITGSMFLAELGDIRNFKSHKHVIAFAGLDPSVNQSGNHEGASKLSKRGNRHLRRVVYLMSLCIVRTDSVFREYFQRRKKEGLPPMKALLATTHKLIRVIFAMLSKNTPFRSEVIDV

SEQ ID NO: 204652 - protein, 360 aa, unidentified
MERNTENEGHLVVGGVDTHKDLHVAAVVDEHDGVLASRCFPTTRHGYKQMLAWMRSFGVLQRVGIEATGTYGAGLLRYLQRAGVEVLEVTAPDTQDRRRRGKNDDLDAQNAAHAAFAGRRTVTPKSRDGMIESLRVLKACRKTAVAGRRVALQMIHTTIVSAPDELRETLRQMTRMQLIRTLAAWRPDLTDYRNVVSAYRIALRSLARRYLELHDEIADLDTMIIAIVDELAPALLARNSVGHGSAAQLLLTAGDNPQRLRSEAGFAALCGVSPVPASSGKTTRHRLNRGGDRAANSALHIIAIGRLRTEPRTKAYVAKRIAQGHSKLEAIRCLKRYIARELFTLMRQRAREVNQAAVAA

SEQ ID NO: 204653 - protein, 412 aa, unidentified
MDIVYDCCAGLDVHKETVVVTVRRREGKRVQQRTCTYGTMTEQLLELGDWLEAEGVTHLAMESTGVYWKPIWNLLEDRFQILLVNAQHIKHVPGRKTDVKDSEWIAQLLQCGLLRGSFVPPAPQRELRELTRQRRQMVHSKSSVANRIQKVLEDANIKLGSVATDVLGVSGRDMLRALIAGEQDATKLAELARRRLRGKIPALRLALQGRVTEHHRFLLGLLMDELTHLEELISRLTARITETLPVPFAEALRRLATIPGIDVRAAENILAETGIDMEVFPTAHHLASWTGMCSGQRESAGKRQSGRTRKGNQWLRTTLVQVAWAASHTKNTYLSSQYRRLASRRGKKRALVAVGHTILIIIYHVLRKGTTYTELGSNYFDQLDTHRLTNALVRRLERLGHEVVLKPKEPAA

SEQ ID NO: 204654 - protein, 478 aa, unidentified
MMAGHAKQRPNLQAIPLLKHESLYIGIDVGKVKHVAGFVSTTLLERHERFEACPALAFENVREGFRALIERIRSLAPLEHVFVLMERTGHYHLALQQYLQEFDLPIYLMHVQERPKGMMKTDKRDALGLANHLYNQLELGVQVADKKELVRRAVPPTPAAAQLKGLVRHRYELVRESTQRKNKLVAICDELFPELTQVMKNPNRPTALAIRERFPTAYAIATASLTALQELRGKNHSLSDAKLLELQQLAAHSIGTRDLIRQRGLVLEQGQLIKELRLLQAHSAQLEEEITAIVEQAREGKILSSMGIGPIQAGTAIAAIGSIENFPNAGKLKAYFGWAPLDDQTGTTYDRAKLTRGGTRTMRQMMVLIIGNVIQQETEWKQLYDRLVPRMCRFDERKGEYIGKKKVIGRVAGQMIETMYALLKTDAEVLSKVPPGKAPPPPILYDPALHRRHREGHYRPLKSSPRPTVITLLPKALE

SEQ ID NO: 204655 - protein, 343 aa, unidentified
MTLVGCDLHTRKQQVAALDTETGEMCERELGHEGSVVEEFYAALPRPVTVGIESTGYAIWFHALMHRLGHTVLVGDAAKIRAMVVRKTKTDRRDARHLLDLLRHDRFPTVWVPDPATRDLRALLTHRRRLVRIQTMLKNGLHAIALNERLVCGSKLLRHAGVVQLQALPLPPYTAQRRDHSLELLELLHTKIQQLDGAIATAALAHPDAPRLLTHPGVGPLTALATVVVLGPVTRFADAKHVVSYVGLAPSLNASADKYRLGHITKQGSSLLRWVLGQAAPHAARLDADLNRTYGTLRHRRGRAKARVAVTRKLLVRLFIMLRDHIDYAEFRRRGRPPVSVAG

SEQ ID NO: 204656 - protein, 355 aa, unidentified
MTSAKYIGLDVHKESISICVRNSLGKIVMESVIETKASTILQFIEGLRGDLRVTFEEGTWAAWLYDLLKPRVAGVEVCNPRKNALLNDGSKSDRIDANKLSEQLYMNNIKSVYHGEHGLRTLKELARSYLTISKDLTRVMNRLKALYRSWAIPCAGKEVYAPRYRAEWLGKISEPGVRRRAEFYYQQLDALYPLRQEVRQDLLLEVKKHKAWKLLRQIPGIGPIRAAVLMAVMQTPHRFRTKRQLWNYCGLGLETHDSGEWRAVQGQLRRAKKQATVRGLNEDHNHDLKDIFKSAAMRASTAAGTLHDFYENLLAKGRKPTMARLTLARKIAAITLIVWKKEVGFDANYLKQQAA

SEQ ID NO: 204657 - protein, 420 aa, unidentified
MLITPYNSIEPTVLQGVPMNSKIVYKICCGIDVHKTFVVACIASTNKQGVTAYKHHCFTTFTQGLKELLQWLLDKHCKDVCMESTGKYWIPVYNVLERDCTIVLAHPKYVKAIRGKKTDKKEAKWIADLCKHDLVAGSFMPVADIRQLRDLMRYSFKLTCFISNEQNYLQNGLTLSNIQLASVVSDTFGKSSQRILDKILENPEDTSFDIVSLIHSSMEKKLPELELAIDGFITSEQAGKLKIIKKHFEDLESRKAELEELILAFASPYQRELELDLILTATSFKNTFTAIGIIYEIGVNMEAFPSEKHFFSWVGITPTNNESAGKKKSVRVSKSGCYIEPLLVQCANSVVKSEKHPQIRNRYLRLRKRRGHKKSMIAVARMLLTALYNMLKIRNPIMRNYTEKVMVFLSIMKSQLNKLS

SEQ ID NO: 204658 - protein, 350 aa, unidentified
MDALNKTKRYVYFIGIDISKETLDIAVMVQGSILVHNTIPNEPKVIKDHMLHLKASLKFTTRNTVVGMENTGIYGNHVINKLKTLKIDTVVDPPLRIKNSSGLIRGKTDKKDAERIALYLYKSRDILRLRIPRRPIIEQLAGLSTLRKRLQSLHIAMRVPLKENTGFVKKGLIEQNNRLCSRSIDALRLDIKDVEDSIEATWKADEETNRLMTLMQSVPCVGPVVALEILICTNEFKNINTIRKFASYAGIAPFPYKSGTTVHKKTRISKIANKKMKALLHNSAVLAKKFIPDIKAYYHRKMDIEGKHKMSVLNAIRLKIAARVYSCVKNNRLYEKIHEYRPAIDNAPPT

SEQ ID NO: 204659 - protein, 359 aa, unidentified
MAEELVLKQALGIDVSKDSLSFCLGVLKANLEKEFIQGKDVSNNKKGFKELTKWLKAFSCKKSTPIIVMEATGVYHEQIAHYLYDHQYDVCIMQSGRVKKYAQSLDQRSKTDALDSKMLSMLGCERKIKPWTPPSETLQELKFLSRERSKLVKERSREKNQYHAMTASSYAFKKAIKRYKKRMQLLTIQITEIEVEMQEIVNKDSVLTDKMNLLKSIPGLSFISIATVVAETSGFSLFTSAKQLVSYSGYDIVLRESGNYRGKTRISKKGNKHIRAVLHMPSMTAIRVNPTLKPFYNRLKPKKLKPLIALIAVQRKLLILMYSLWKNNEYYDPKHEIKKAARKQVLAAQDRNKISFVTS

SEQ ID NO: 204660 - protein, 307 aa, unidentified
MFVGIDVSKERLDVHLRPSGEAFVVPRDNESVEVLAERLQALQPALIVLEATGGFETVAAAGLAAAGLPVAVVNPRQIRDFARAMGQLAKTDPLDAAVIAHFAEAVHPHPRPIADGAARMLGELVARRRQVLEMMVSEKMRRSHMSNPRTLRSVKAVLKVLEAQLKDIDGEISTTIRNTPAWREKDDLLQSMPGIGPKTARVLIAELPELGRLDRRSISALSGLAPFPRDSGRMRGRRTICGGRRAVRQALFMAVLVSIRYSLPIAETYHRLLVAGKKPKVAITACMRKMLVILNAIIRDQKPWQNA

SEQ ID NO: 204661 - protein, 342 aa, unidentified
MEKVSIIGLDLAKRSFQAHGGLVDGGVGFRKKLSREKVLAFFADQPRCIVAMEACASAHHWGRAIRDLGHEVRLIPPAYVKPFVKRQKNDAADAEAIAEAASRPTMRFVAVKTEEGQARAMLFRTRDILVRQRTQLINALRGHLSEHGVVAAQGLANVKVLEAAVEDQTKSLPLLVVELARVFLDQIKGLSKKISELEKATAQEAACGETTRRLQTMPGVGPITALAIETFAPPMDVFKRGRDFAAWLGLVPRQHSTGGKQILGKISKMGQRDIRRLLIIGAMAVVRSALRKGALEGSWLQRMLARKPKMLVAIALANKMARSVWAMLAKGENFRVPVVAVS

SEQ ID NO: 204662 - protein, 392 aa, unidentified
MFFVGIDIGKNNHVASMMDETGKVVFKAFSFPNTFDGGNALFSKLTSYSSSTDDFEIGMEATGHYWLSVYSFLFEKGVLLHVINPIQTDGWRRGTEIRKRKNDIIDSVLIADLIRYGQFVETRLADEDLFSLRTLTRFRTYLVESISDLKRKVVCVLDQVFPEYQSIFSDIFGKTSKEILLQFSSPIDFESVSSQTLAGLLAKLSRKQVGSAKAEQLKAAASCSFGVTFAKSSFTFQLKALIEQIAFIEKQVKETETEIAGIMEKLESPITTITGIGNVTGAAIISEIGDISKFDSPRKLVAFAGLDATVTQSGEFEAAHNVMSKRGSPYLRKAIFQAALVAAFKDPVLSAYYQKKRAEGKHHLTCIGAVARKMCNIIYAVVKNNQPYVPKA

SEQ ID NO: 204663 - protein, 523 aa, unidentified
MASTRSSKRSRAAAEFLQKPRGIIHPRVQQVGPDHFGIVSVDCAKARCKWMLTDFYGTILVPPTEVANNRVELDAAVARCRAAMIQHALGDAIVAIERTGRYHHPVKNAFARAGFETRIVHPYATKQFRQPANPDNKTDDTDLAAIARAAVNGFALVENPLPEAWRQLQLCIRHRRDLVRKTSALACQIREHLDAAMPGYAACFADKLWDSNVAFCLVRQFGSATVLLQQGLTGLCHYLRQQKVRFQQRTLDTVLAWAQSAAAPDPAAELHRQIALAYHDDRQRKTEEILVLERNIAHRLAQTPYILLLSFPGINVVSAADYAGEMGPIENYANPRSITGRAGLFPSRYQSDRVDHADGPLVRRANRALRAVIMGIADNLILCNQRFRMLAAAWKAAGKDPRLSHVKVACRFCRMSFHMVAGRQVFRHPSLRERGYILDKLLAFHLEHQTPYQQSLRDLNLAFTQIPAKEHAAEAQPLIDRQRTARRGRARGPQPIGEILAIVLARLGVGALPSTPSGDQDLP

SEQ ID NO: 204664 - protein, 338 aa, unidentified
MSESALIGIDLGKHTFHLHGQDKSGREVFRKKCSRAQMMQFFASSQSCVVAMEACAGSHCVARQLAAIGHTPKLISPQFVKPFVKGNKNDFVDAEAICEAASRPSMRFVTPKTESQQTLSVLHRMRESLVRDRTRTANQMHGFLLEFGVSLPRGLAIMKRLAVVLAEHELPVRLTVLLQRLHNHLIYLDEQIKAMDKELACQVADDDLGSRLLSIPCVGPITASLLAVEMGDGKQYRCSRDFAASVGLVPKQYSTGGKANLLGISKRGDKHLRQLLVQCSRVYMQRLDHQKGALADWVRSLLSRRHSNVVACALANKLARIAWAIAAHHRQYEAGPGA

SEQ ID NO: 204665 - protein, 343 aa, unidentified
MQVVTTIGLDIAKSVFQVHGIDAEGKVTIRRQLKRRYVLAFFQKLQPCLVGIEACATSHHWSRQLKALGHTVRLMPPAYVKPYVKRQKNDAADAEAICEAVTRANMRFVETKTPEQQSCLMLHRTRQLFIRQQTSVINAIRAQLAELGIVAPVGRKGVEQLLAVAADASDHHVPEMARACVVALGAQLRMLKAQILEFDRRILAWHRSNEICQRLDELPGVGPALATALVASVADPKAFRSGRNFSAWIGLVPKQHSSGGKNKLGGISKQGDRYLRSLFTAGALAVIRYAKIYGTQHRPWLTALLARRPTKVAAIALANKIARMAWAIMAKGEPYKEPVAFAA

SEQ ID NO: 204666 - protein, 347 aa, unidentified
MTTAAIHIIGIDLGKNWFHLVGMNERGDVLLRKKLNRNQLAEFVATSTTCIVAMESCPGSQYWGRRFQNAGYTVRIIPAQFVKPYLKSNKNDFNDAEAIAEAGSRGRMRTVQLKSLDQLEMQATHRVRQRFIVERTALVNQMRALLLEHGLVVPVGRALFAKRLPSILTDAENGLSVRMRQLMQRLHQRWQGLDKEINSITAEIHEIAKGSALCRRAATVPGVGPIIATAMVAAVGNGQAFGSGRDLSAWLGLVPKQYSTGGKSNLGSISKRGNTYLRMLLIQGARALMIHMKREKTGMGQWLHQLEKRSHPHVALVAMANKIARICWKVLSCDEVYRPFPGLPVAP

SEQ ID NO: 204667 - protein, 394 aa, unidentified
MTATYTHSIPAGTLVLHVAFELGANQWKLGFSTGLGVAVRLRTIGAGNLAVLRREIELAKKKFRLTDDVPVCSCYEAGRDGFWLHRWLVEQGVSNIIVDAASIEVNRRYRRRKTDSLDAAKLVAMLIRHHAGEKLWSVVRVPSREDEERRHLHRDLEEMKAETTQHRNRIRGLLAGVGARVAEINSNFLEMLPTLQTADGREIPGELRARLLREFERLQFVEQQIRSLERQRNQKLRDGDDQEYVVKARKLMGLRAIGPHSAWVFVLELFGWRRVNNRRQLASLVGLTPTPYDSGEDEREQGISKAGNRRLRTLLVEIGWCWLQYQKSSALSQWYQKRFAGGSKRQKKIGIVALARKLLIALWKYLQRGEMPEGAVLVDWRAKLVGLGAQPLPV

SEQ ID NO: 204668 - protein, 407 aa, unidentified
MNAVGIDVSKGKSTVAVLRPFGEIVVSPFDVSHSPKELSKLVTLLKTLNGDTKVVMEYTGNYYLPIALFLRNNGFFVSVVNPILVKDYSTKSLTVRKVKTDKKDALKIASFALDRWNELSPFSAQSEARLLLKSYNRQYNQYNKLKIILKNNLIALLDQTFPGANTLFSTPTRKSDGHEKWVDFVLKFSHSECISKKSFSFILKSYLSWCKKFGYKFSKSKAQAVYDFACNCSPSLSFSDSSALLVSNAIIQLNSINETLASLASEMNKIAATLPEYDSVMSMFGVGSVLGSQLIAEIGDVSRFPNKKALVGFAGLDASPFQSGNFNPQSRSISKRGSAALRKTLFQVMSVVLQRAPTNNVIFQFMDKKRSEGKHFYVYMTAAANKFLRIYYARVTEHLNLFTTTTA

SEQ ID NO: 204669 - protein, 345 aa, unidentified
MSVYVGIDVHRKRSQVAVIDQDGGVLANRNVPNGVVPILRVIGDLPPGTPAAFEAAFGWGWLVQLLEDYGFEPHLVHPLQCKAIASARLKNDKVDAAILAQLLRADLLPEAWIAPPQVRQLRALLRHRIQLVRLRTLLRNRIHAVLADHGHDRPAGYWSGPGRAWLASLDLPAVSAEVISDALALIDALESVIDRLDAEIRGHARSDPRVKILTQLPGVGPFTALVLLAEIGDVTRFASARKLASWAGLTPTVRGSDRTVRHGHISKQGSVWVRWILCEAAQTAKRSPQFAARYQIIARKRGKKIATTAIARKLLTRAWHLLTDAERAASPPAITTASAPPTGAP

SEQ ID NO: 204670 - protein, 344 aa, unidentified
MEHLGIDVHKVESQICILTERGDVVERRIRTQRERFAAVLGERPRAKILIEASTESEWVARCLEELGHEVIVADPNFAAMYATRSRKVKTDLRDARTLAEACKLGAYRAAHRASDRQWHVRAQLSVREALVQTRARYISLIGALLRREGLRIASGSAAGFTRRVAKLALPGRLKSEIAPLMAVYVSVDRQVAWIDARLEELARTDETVERLCTAPSVGPVTAAAFSSTVDDPGRFKNAHQVEAYLGLTPSEWSSGEKQSKGHITKAGNSRLRKLLVQVAVSILRLRNPRTEGLRKWATGIAVRRGKKIAIVALARRMTGVLFAMMRDRTCYLQPGSPEPAAQVA

SEQ ID NO: 204671 - protein, 356 aa, unidentified
MSEITRVGVDLAKSVIQVNAVDVGGKLVTNRQLSRDKFLQWCAQLPPGCLVAMEACGGAHHWARKLIALGLNVKIIAAHLVAPYRLQGKGGKNDANDAAAVCEAASRPNMRFVPVKTTVQQGILCVHRLREGLKEERTASINRIRGMLTEFGLVASKSPEKLRERLTDMLEDASNDLSGLARLVVQEAYDQWKDIDERIEWCDERINAHVKDDAQAKAAKELVGVGPVTASAVVATVGDFNQFKNGAQFGAWLGLTPRQNSSGGKNSLGGITKRGDMYLRMLLIQGAKSAVMTAHKRSDPISKWLYELREKSGWQKAAVAMANKNARILWAMMTKGRRFDPRHVSVKPVGPTTAMA

SEQ ID NO: 204672 - protein, 355 aa, unidentified
MNVYNQQHSYYCGIDLHARTMYICILDHTGTKVLHRNYPCSREAFLEAVAPFREDLVVTTECVFCWYWLADLCDEENLLFVLGHALYMKLIHGTKSKNDKNDSLKIARLLRGGNYPLAYVYPAGMRSTRDLMRRRIHFVQNRSQLIAHIQNTTSQYNLPPLGNLARPHHRRDRDIVGHFPDPVVGLMIQADLDTIDHYDPLINELDKQILALAKEHDPTSLHILRSVQGIGPVLGLTMLYEIHDINRFASRQDFCSYARLVKGQKQSAGKNYGTTGGRMGNAHLKWAFSEATLLYLRGNKQAEKYYNRLISKHGKGKALSIIAKRLGVAVYYMLKRREPFNEQKFLNMNQHLSVT

SEQ ID NO: 204673 - protein, 416 aa, unidentified
MNAVGIDVSSRKSTVAVLRPLGEVVCLPFDVTHDIAGLASLAEKLKALDGETRVVMEHTGRYYEAVEKAMHEAGLFVCAVNPLLIKEYGANSLRRVKTDKADAVKIARYALDNWADLRDFTPMDAIRYDFKTLNRQFQLASKQRTASANNLIALLEQSFPGIRKCFDSPVRSDGTQKWVDFAHSFWHVDCVRKQPFPAFCERYRKWCKRHAYLFKLSNAEEVYALAKRAVVLTPKSKVVKVLVQEAANQLISISRSVEVYRAEMDRLAAMLPEYPVVMAMYGVGKSYGPQLMAEIGDVRRFERKQALIAFAGIDPMPNQSGDKNVRSNKSSKRGSPYLRKTLFNVIRTYLQCAPQDEPVFQFLNRKRAEGKPFYVYMLAAANKFLRRYYAKLRDYFASLDTLQPVAPIPTILKATL

SEQ ID NO: 204674 - protein, 351 aa, unidentified
MLIIGVDYHPSDQYIAFADTETGECGEQRLNHSDGEAEKFYQGLQSRAASVRVGMEATGYSRWFERLLTELGIELWIGDAAEIQTRRVRKQKTDSNDARLLLKLLLEDNFPRIWVPSPENRDLRQLLWHRHRMVQMRTRMMNQLQALAMNEGQRRKKKLWSEQGRAQLEKLPLAPWACRRRKDLLELLDRMKPTIEELTRAIEREARKRTEVARLMTHPGVGPITALAFILIIGTPRRFGCGKQIGSYVGLIPAEDSSAGHQRLGRITKQGSTLLRFLLVEAAQAAARCDADWRQRYMHLAMRRQRNIAKVAMARRLGVRLYWMWRNGWEYSEWVKFGSNAGQLGTGHSVQ

SEQ ID NO: 204675 - protein, 389 aa, unidentified
MKIYVGIDIAKLNHFAAAISSDGEIIIEPFKFTNDADGFQLLVSKLESFDKNSIIIGLESTAHYGDNLVRYLVTELYQVCVLNPIKTCQMRKNNVRKTKTDKVDTFVIAKTLMMQDDLRFITFFDLDMMDLKALGRFRQKTIKQRTRLKIQLTTYVDQVFPEIQYFFKSGLHQHAVYALLKEAPSPKEIASMHMTHLANLLKVNSHGHFTKEQAKELRVLAQKSVGANDSAISIQITQTIQQIELLDSQLEKIEAEMTDIMKFNDSVIMTIPGIGYINGGMILGEIGDIHRFSNPNKLLAFAGLDPSVYQSGNFQAKTTRMSKRGSRVLRYALVNAAWNVVRNNATFKAYYDAKRAEGRSHYNALGHCAGKLVRVIWKMLTDEVEFNLE

SEQ ID NO: 204676 - protein, 387 aa, unidentified
MIYVGIDIAKLNHVASIINSDGEVLASPFSFTNDIKGFETFLSKLEPFKNYSLLIGMESTAHYAENLIYFLFNKGFNICIINPIQTSAIRKSNIRKTKNDNIDSSIIIKSMMLNNYRLFTKQDLDSLQLKNLCRFRNKIIKARSKVKIQLTSYIDLLFPELQYFFKSGIHIKACYELLKFESNPNKIASMHLSKLSNLLKNASHGRFGKVQASSLKKLASQSVGISNNTLSLQIVQSINQIEMYSSQLIEIEDAINTIMDKSNCVIKTIPGVGSINGAMIIGEIGDINRFKKPSQLLAYAGLDPSVYQSGNFNAPRTRMSKRGSKLLRYALINAAWQLTLHNKTFKDYYDLKISQGRTHYSALGHVAHKLVRIIHKLMTDDIAFNLA

SEQ ID NO: 204677 - protein, 422 aa, unidentified
MRSVALDVHLDFCEVAIVEDGELRSAGRIETKPEQIELFASSLAPDDRVALEVTGNAWEIARIIEPHVAQVLVVSPSDTGIRQARAKTDRLDARTLARLLATGSLDGVWMPDRWTWMMRRRLSRRSQLVWARSRSKNQVHAVLMRQLVGRPPFADVFGVKGRQWLSELKLPLEESETVGAAMRQIEFLEKEIAEVERLIAVAAMKSGEIKRLMSVPGVNVIVAASFMAAIGDIHRFESPRKLAGYLGLDPRVRQSGVGPATHGHISKRGSSRARHALVEACWTTVRQPGPLHAFYQRIRARRGHSVAIVAAARKLACLFWCLLTREEDYAYQQPSLTKKKLRRLEIAAGAERYSAKAAGIWSANDAVRQAERELARQAEVAYARTVRDWHSSQAVKVGASVTPGRASKKPLKGEAARQTTSP

SEQ ID NO: 204678 - protein, 339 aa, unidentified
MNVSTLGIDLAKNVFQLHGVGCNGQTVLKKKLTRDKFLPFLMQLEPCLIGMEACASSHHFARVLRQYGHEVKLIPPQYVKPYVKTNKTDAADAEAICEAVARPNMRFVQIKTAEQQAILVLHTERNILIRERTACANSMRAILAEFGIIMPRTLSQLYKKIPEILEEYDNELSPFVRCSVARQLEHLQGVEDQITLIEQELSRWAKTQPACQRVMKVPGVGLMTATYLVASVGNGQQFHSAKQFAAWLGLVPREFSSGGKQRLGRISKRGDRYFRYLLVHGARAVAAVIERHKDNMPWLYRLLNKKAYNVAVVAQANKTARILWSMLVHHTEYRTLSAV

SEQ ID NO: 204679 - protein, 370 aa, unidentified
MLDTTTFVGLDVHARSIKAVSLDVMTGEVRAATFGYDAGAVAEWVRSVDPRARCVYESGVTGFDLQKRLSGLGVGCAVGAVSKMIKPSADRRRKNDRNDAEFLARMLSVGNVVEVWVPDDECEAARDLTRALEDARDDLSRSKQRLSKFLLRHGLVFDERTPTGRRKGNWTRAHWSWIESIRFAEGADNDVLAYYVDAVRRAAEDKARLEGLVEAEARKPRWRKGVDSLRCLKGVDTASAADLVFEAGEFSRFGNARSFAAWVGLTPSEHSSGESDRRGAITKAGNKHLRKTLVEAAWHYLTCSARPKDLAKGQAPDRGARRHAAKGVRRLVERREALLARGVHNNKANVATARELACWVWAVGLMAEEA

SEQ ID NO: 204680 - protein, 349 aa, unidentified
MKYIGCDFHPSFQQIAMLDKETGELVERRLLHTEEARVFYEGLKEPVVVGIEASGNTHWFESLLARCQQQLWIGDAAAISRQEGRKQKHDRRAAELILKLMLENRFPKIWVPTVAERDLRQLLIHRQHLVRMRTRVKNQLQHMALNQGWQKKRKLWSEAGLELLRQLKLEPWAGQRRDTLLEMLEELEEKIQPLDQAVAQQAQACAAARRLATHPGVGPVISLATVLTLGDVARFADSRSWVSYLGLNPSEHSSGQRRRLGGISKQGNPFLRYLLVEGAASAARGDEDLGRMYARLKARRHHGVAKVAAARKLAVRLYWMARTEKSYPEVRSHAGEPESSRGRKSRPTG

SEQ ID NO: 204681 - protein, 331 aa, unidentified
MVEGTEGSHHKEGMTKMTKSTTIAAGIDVAKAKLDVAIDGCKQHWEVSNDPAGFLHLAKLLRSRKVNRVGLEATGGYERDVTEYLRKAGFTVFLLQPRQVRAFAESMLRRAKNDRIDASLIAAFTALMKVTREAPDPRYAPLADVLVFIEQIEEDLKRIKTRLEHTRIAEHRRFMLDDIERLKTRRSRMLAKLEAAVRSHDDIAERLNLVLSIDGIALRTALAIIVYMPELGKLSREQAAALAGVAPFDDSSGKRSGERHIWGGRARLRTSVYAATLPAAFRWNSQLVDLYRRLIAAGKAHKVALIACTRKLIIFANTVLARGTPWVKATV

SEQ ID NO: 204682 - protein, 464 aa, unidentified
MKPKRRRRNKGMCLEDRPVLEPNAAGIDVGAREMFVAVPPGRDENPVRVFATFTEDLERLTDWLEQCGVTTVALESTGVYWIPLFEILEQRGIRPCLVNARHMKNVPGRRTDWHECQWLQFLHSVGLLRSAFRPGQDICAVRTVLRHRNELVLAASQHVQHMHKALTQMNLQIHHVINDITGTTGRAIVDAILAGQRDGAELAKLRDPHIRADIDTIRKSLEGNWRPEHLFTLRQSRDLFRIYQQQIVNCDLEIEKMLREFEPRTNPAEKPLPPDRKRNRAGSKRRKKNGHPHPEFDLRTETYKLFGVDVTQIPGIEENALPLFSEVGRDMSRWPTAAHFISWLALCPDNDISGGKLLWRGARRIRNRAGHLFRLAAFSLHHSPTPLGNYLRRMKAKLGPKAATMATAHKIAVIFYTMVKNQVEYDETLWATRDAQREKRLEAKLKRQAKQLGYELVPIEPKAA

SEQ ID NO: 204683 - protein, 364 aa, unidentified
MPNKIPKTMQTQVTKKIDFKGKDLYIGLDVHKKSWSVTILVEGMEHRTFTQPPDPLALYTYLQRMFPGGTYYSAYEAGFCGYGIHRALNDLGIKNIVINAADIPTSQKDQIHKLDPVDSRKIARALEKGLLRAIHIFDRDREELRSLNRTRFYLMRDLRRSKNRIKSFLQYYGIPIPPEYDNNQWTLKYIAWLKQIQMKTSSGQDAFSNLISSYEYHREQILALSRQIRIRMREYDNELYNLLKTVSGIGPLTSSALITELGDINRFPHINHLSSFVGLVPRVKQSGETSYNAGMTFRCNEYLRTLLIESSWQAIRLDPALMQYYHQHVINNKGQKVIIKVARKLLNRIRYVMKNRQPYVTGVA

SEQ ID NO: 204684 - protein, 345 aa, unidentified
MKKSLYCGIDLHSNNAMYVVSDEQDKMLFKKRLANRLPIVLEALEPFRKRLKIVAVESTYNWYWLVDGLMEAGYPVSLANPAAIDQYDGIKDANDLTDAAFLAHLSRMGILPTGYIYPKEDRPVRDLLRRRTLLVQKRTSIILSVQNMVLRHTGQSMNWRQIRKTGTKTLSALLDNHDCLLFVAYQQIDLIEQLNEKVELLEDKVLQKVKLRPDYQVLLTMPGVGVILGLTIMLETGTIDRFCKPGDYSSYCRTVRAKRTSNGKKKGNNNSKNGNKYLAWAFVEAVHRALSCCPPARQFYERKKAIAKAKGGGTLATKALAAKWSKAAYYMMKRQEPFDLSRVFG

SEQ ID NO: 204685 - protein, 405 aa, unidentified
MVFLGVDWAEEHHDVCLLDEQGKVLGRARVANSLEGVSRIHALVADYADEPGTVVVGIETDRGLLVQALVAAGYQLYAINPLAVDRYRDRHSVSGAKSDAGDAKVLADLVRTDRNNHRQVAGDSEEVEAIKLLARAHQSLVHSRQRQVNQLRSTLREFYPAALEAFKDDLGGRDAMAILEYAPTPTSGRSVSQAKLISALRKAGRERNLEARAVELQGMLRQPHLEQPATLVAAYAVIVKSCIQMIRELNAQTKALEDELTKSFELHPDAALYLSLPGLGFVLGARVIGEFGDDPNRYLDAKGRRAYSGMAPITKSSGIRHVVLARYARNRQLADACYLWAFSSLTGSAGAHQYYRVLRARGKSHHQALRALGNRWVSILHGCLRHGTLYSEAVAWTTPATAIAA

SEQ ID NO: 204686 - protein, 395 aa, unidentified
MELMDELGRVLARRRLPEGVAGMARLHELTGQQLGDNEDAEVVVGIETDRGPWVAALVAAGYTVYGVNPLQASRYRERHGVSGAKSDGADAHMLADMVRTDSHQLRAVAGDSAEAEGIKVLARTHKTLIWERTRAVQRLRHQLREYFPAALEAFDDLDAPDALELLGKAPEPARAARLTRAQVSAALKRARRRSIPDKAMAILAALRGEQLGQPEAVTAAYAVTVRSLIAVITVLNEQVKVLQGQVEENFGRHPDAEIYRSQPGMGAILGARVLGEFGDDPDRYADGKSRRNYAATSPITRASGKKKVVAARFVHNDRLVDALNAQAQSAMSASPGARALYDELRARGIEHNDALRRLANRLVGILHGCLKTRTLYDEATAWGHRKNRPQTSVAA

SEQ ID NO: 204687 - protein, 456 aa, unidentified
MNKKNQKASRPEEFDMINPHAAGIDIGSKIHYVCVPIGRDNERIKSFGCFTEDINKMASWLKKCKVQSVAMESTGVYWIPVYQILEQEGFEVNLINAQHVKGVPGRKKTDVEDCSWLQKLHSYGLLKASFRPSDQICVLRSYIRHRARLIENASTHVLRMQKALTEMNVQLHNVISDITGVTGTAIITAILAGERDPVELAKLRNNRIQSSEEVIAKSLQGNYREEHLFILKQEFESYQFYQNQIQALDKVIEACYQTFDKQGNNELLKTEKRKSSNSPPFDLRKNLYVLAGVDFTAIPGLNELTVQTIVSEIGTDMSKWPTEKHFTSWLGLSPTNKISGAKILSSRTRKVKNSAASAFRTAACSAGKTQTAIGAFMRRIKSKAGAPKAITATARKIACLFYRLLKYGSDYVEEGLEYYEKKYEANLVEKAKKMAKRLGYELVKNLDKPTLEVSVS

SEQ ID NO: 204688 - protein, 318 aa, unidentified
MVSFVGIDVSSRTLDIAVRPQSLKINVTNDQAGFEVLEKSLRGLKVKRVLLEATGGYEREVLSFLQSAGYKVIRVNPRRARSFAESMNIKAKTDAIDAAVLAHFAEVIPDKPTLQVSPQRALLRELLQQRDRLVQQRDDDRRRLKQAQSEVVARFLKSNLQHFRSQIRQIEHELKLHAEGLGDERIAQLVQVKGIGLVTAGKLVTLLPELGHVEAREIASLVGVAPFNHDSGTSVGKRSISGGRFGIRCALYMSCLVAVRQNPSLKAKYQALRERGKAAKVAIVACMRVFIVRLNAMLRTGTPWQDVELPQCKSATPA

SEQ ID NO: 204689 - protein, 352 aa, unidentified
MRFYTNSHQYVCGIDLHTKMMYVCILDQRGETLVHENVPTDNPERFLALVEPYKADLVVACECTFSWYWIADLCCAQGIEFILGHALYMGAIHGGKVKNDKLDSLKIAKLVRGDTFPLAYVYPSQWRALRDLLRRRHYLVHIRSEILSHIQIVNYQYNLPAFNKKLDRANNRLGIEERFSDSSARMSIAVNVKLLDVLEQTIKSIENFILRHIQGLDRRLLFRLKTVYGIGDILALTLMLEVQDIKRFDSVQQFCSYGRLVKGQKESAGKTAGKTNSKIGNPYIRWAFAEAAILFIRGSDKAKRYIDKQSKKHHKAKAISILAHKLARAVYHIWLREDSFDEDCFWRQLSFK

SEQ ID NO: 204690 - protein, 350 aa, unidentified
MSIRNQPRDAAVFGIDIGKTVFHVVGLDAGHAPIQKATFRRETLLQFFERASPVLVGMEACPGSQWLARKLRTMGHTVRIVPAQFVKPFVKSNKNDIIDAEAIAEAVTRPTMRFVEIRTPEQIDLQALHRVRDRMIAHRTRLISQMRAFCLEYGIAIHQGAGKFKAEIPRVLADETNELTPSMRRILTEVHGEMMELEQRIAAMNNEIDAIAARSDIARRLMTVPGIGPLASTALLAAAGSGRQFRKARDLAAWLGLVPREHSTGGKTKLLGISKRGNKYLRRMIVHGARSCVTHLDRSRDRLEPWLDGLESRMRKNKVTVALAAKIARIVWVILTKQGATYERRVPALG

SEQ ID NO: 204691 - protein, 323 aa, unidentified
MYVAGLDAHLKYVAIAVVDRMGQVALETTVSTKEPERLLGALAPYRPLEAVVETCPFWPWLYDLLVPAGIGFHLAHAKQLRAIAVAPQKSDAVDARLLARMLLSGLIPEAYPRPADQRDLLRLLRHRTAVVRFRTRLVCRIHSQLHQQRLSLPREQLRRRATRAWLQETAWPRLTVEQRAIVTTHLELIDHCTPLIRALERRIAAAATGHATAPLLATIPGIGPYRSLLLAAELAPITRFRRAEHLVSYAGLAPVTRSSGGHTYHGSIPQGANRWVRGALVSAIPSHVRYAPTSPLTVAYAQLKARLGWREWPPPGSWLESVL

SEQ ID NO: 204692 - protein, 351 aa, unidentified
MNTQITATPKLYIGIDIHKRSWKVHCSTDLFSGKSFSMPPEPSQLKAYVDKHFLDHEVSTAYEAGCCGYYAHRCFESYGWRSLVVNPADIHRKGKERFTKTDRIDAQLISRELKDGRLSSIHVPDMHREALRSLFRRRNDLVKDFRRIKSYIKMQLLYFGIKVPEQYDNDHWSHGFRDWLDNMIFQYPIAKGSLESRMRHFRFIDEDLRLVSNQLRAYCRKHFKKDYYLLKSIPGIGGIVACGIISELGDLRRFNNLKHLAGYVGLAPGVYQSGANSKTMGITPQAHRLIRSYFIEASWQAIRTDPVMQSYYRKHSGKDSKKIIIKVARKLLCRTLAIIKTETPYEIGVVA

SEQ ID NO: 204693 - protein, 385 aa, unidentified
MKPNSQVTLGEFFRQCVGIDISKNKFTACLYMYDRASDVGCCTKSIDFDNTKSGFNQMVKWSRKEAVKDYPLTYLMEPTGVYYERLAYHLYKIGQTIYVVLPNKARKFCESEGIKTKTDAMDARCLALMGCASRKLKPWSPPAAIYRELRQMTRFHADLCVIRRSVANRMEALDHMESVSKTVRKHCEKLIKEIDTLTEKNDKDIIRKVAEDKELLAKVKRIATARGLGVTTIVCVIAETEGFHLIENRKQLTSYAGLDVKARQSGKEDPKHRISKEGNAHIRAALYMPALVAVRHNRQIREAYGRICQKHPKEKMIGVAAAMRRLLMLIYTLWKNGEEYDETRDKTHTPKKKELEPEYGPEHCIETNQESIDWNAVDENGEPPF

SEQ ID NO: 204694 - protein, 309 aa, unidentified
MHQSRTLYIGLDVHQESIAVAYVAKEDHAEVISLGNIGTRQCDIDQRIRKMQSKSKHLVFVYEAGPCGYWLYRYLTKKGHVCWVVAPSLIPQKPGDRVKTNRRDAITLARLMRSGDLTPVYVPQVEDAAIRDLCRAREDAIGDLKTAKFQLKAFLLRHDIRSTGQASWNPAHLRWLSAVVCPTPAQQIVFQAYVRAITDHTERLARLDQELTEHVQTWRLAPVVDALQALRGVQFTVAVTTVAALGDLTRFENPRQLMHYLGFTPSEYSTGERRQQGGITKTGNSHARRALIEGAWASRYPAKVSRHLQ

SEQ ID NO: 204695 - protein, 325 aa, unidentified
MQGKDRSEQETKTKSTVGIDVCKLWLDIHILPSEESFRVPNTKAGSKEISRRLQHYDVQLIAIEATGKWHRDLHRNLVEQGYAVRVVNPLRARLFAEAMGLLAKTDRLDARMLAIFAASLTEARPPAPEIIEALKELVQARSSAVEEQTSLTNQLKSATIAFLHRQLKLRLTHIAKQIKALETEALKRIKADPGLARRYDILVSIPGFGDVVAMTLLAWLSELGSCNDKQIATLCGLAPWPDESSDRVGARHIRGGRELIRKILYLAALTAKSFNQPMKAFFRRLTANGKAKKLALIAVARKLIVLANTLVRADRLWQTEAPKCA

SEQ ID NO: 204696 - protein, 342 aa, unidentified
MKFYCGIDLSARDCQVCVIDEQLKVLVQQKPGNELPKICRLLEPYKANLKIVVESTFNWYWLIDGLQAADFEVMLAHTLGLYLITGAKVKTDRRDAYSLAKLLLVGAVPTAYIYPVETRPVRDLLRRRMHLVQVRAGEYGSLRRLLLRQGILSSKQQEIKTATEAELEQWFEHPLVRLHASQELRRIELYSQQIAELEKTILALAQTAPSYDRLLKLPGVGQTIALTILYEVGELTRFANPKVFSSYCRVVPGIAQSGSVSGRGRASKQGNHYLKAAFSQAAVHAVRCYPKVRRYYERQLKRHQGRGRRMICYNIIAHKLAQAAFHVLKEQIEYREELLFGP

SEQ ID NO: 204697 - protein, 345 aa, unidentified
MDHFAGLDVSVKQTSVCIVDDTGRMVREVKVASEPEALLPVLTNALYRFKRIGLEAGPLSQWLFSALAEAGLPVICVETRHMRAVLQAQINKTDRNDARGMAQMMRAGLYRPVHVKTLRSQKLRMLLTHRKLLQSKAIAIDNDLRGTLRNFGLKVGVVGASKFEARIRELVESLPDLAELVEPMLIVRRTLREQIGILHGRVLAIVRTDDVCRRLMTVPGVGPVVALTYRATVDVPARFRNSKAVGAVFGLTPSRYQSGEINRTGAISRCGDEMMRAMLYEAAHIMLVRLAKWSWLKAWAMKIARQRGMKKAIVALARRLAVILHRIWVDGSEFRWTREQAAAAA

SEQ ID NO: 204698 - protein, 330 aa, unidentified
MKNYVDVIGIDVSKLTIDAHIHNRAVHRVFSNTTKGYKALLSWTETYLKEQVYFFCFENTGHYSTNLSVYLSENNRDYIEQSPLAIKRSVGIVRGKTDKLDAGMIARYAWLHKEELLLSTPIENHVQELGRLLSIREQLVRDRTGKMSSLKEMQSLLSSPSTDNCCRIIKKTIHYLTKQIEALELCIKKLMKSDKSLDKNFKLLNTLKGVGLILSCQIIYHTSNFKRFNSWRQFSSYCGVAPFEYSSGTSIRRRNRIHHIGDRKMKTLLTLASVSAIQCDKELKQYYKKKLEEGKPKMVALNNIRNKILSRAFAVVKRGTPYVELQKFVA

SEQ ID NO: 204699 - protein, 408 aa, unidentified
MIYCGIDWAERTHDVALVDETGTLVAKRHITDDATGYELLLELLAEHGDTEEAPIPVAIETSRGLLVAVLRTGKRKVYAINPLAAARYRDRHSVSRKKSDPGDALVLANILRTDMHAHRPLPDDSDLGRAIAVLARAQQDSLWNRQQLANQLRSLLREYYPAALDAFTPWINGLCRPEAHELLKAAPTPTQAARLTRPQLQAALKRAGRKRGISAEADRIRAVFRAEWAHQPPLVEDALGKQMLALLVQLEAACTAADQLAEAVEEAFPQHPDAEVILSFPGLGVQLGARILAEIGDDHTRFADARGLKAYAGSSPVTRASGKKSSITRRWVKNDRLNHAGYLWAFASLRASAGANAHYRRRREHGDWHAAAQRNLFNRMIGQLYHCLQHHKLFDEHTAYPTELAAAA

SEQ ID NO: 204700 - protein, 424 aa, unidentified
MNLTQNDRLKQVTSDTLIVGVDVGSQTHFCRAFDWRGFELSRRVFKFSNTGMGFLTFLRWTEELMNKTGMKKVIVGCEPTGCYWLTFQKFLQEHEVELVTVNPFTVNRSMELDDNSPEKSDLKDPKTIAQLVKDGRYSTSYLPSGVYAEIREASVCRDQIMKQHVRLSNQIQGWLQKFFPEYFECYADWDSTSGLMLLKEAPLPQDILKLGAGGINQIWRNAKVRAAGIKRAQTLIEAAQNSVGLEAGEAARLEIWILVNDYILKAEQLRRIDEYLEEKVKEVPNVEKLLAMKGVGISTVIGFVAEVGDIGRFTEPKQIQKLAGLEIVKKSSGKKKGQPRISKRGRRKLRRTMYESARALMTWNPAFQDVFFYYRNRQKKPLGSMQAKIAVACKAIRIFYVVLQTGCDFDEEKFRKDIIRPEAV

SEQ ID NO: 204701 - protein, 360 aa, unidentified
MTATMTYVGLDVHARSTHAAAIDVASGELRRSRFGGGSEEVVAWLRTLPPPLRGCYEAGPTGFALYRAAEAAGLRLDVVAPSKTPRAPGDRIKTDRKDAELLARLLLAGQLKFVTVPSPSFEAARHLCRAREQVRSDLMRCRHRVSKLLLLHGRVYPEPSTWTQRHRQWLARQSFDDPVAELAYLDTLAAVDGLVARKAALDERLSRLAVEGEWWPTVARLRCFRGIDTLTAFVLALEVGEFARFPRPAKLAGWLGLVPSLDQSGESRRQGAITKTGSGYARRLLVEASWHYLRPPRIGATLANRQQGQPAHVLQIAWRAQHRLNRQHQRLRARGKPGNVSTVAVARELACFLWAAAVAD

SEQ ID NO: 204702 - protein, 358 aa, unidentified
MMYVGVDVHKKVCRAAMANDEGELVDEFSFMNSKRGIEDFMMKLEAFKERVLVAVESTANLWIRLYDSLEDHGVQVVLSNPSKTRLIAEARVKTDKVDARILAQLLRADMLPLCFVPTRRQRDRRQFIRHRVHLVKMRTEVKNRVHALLDKHGLRCPYPTLFGKKGVEWLKGLKLGFTDDAVLGSDLALLESLGEQIGFMEAKIAAVAVNDERVRLLMTMPGLGYFAASLLVAEICDINRFTSEKKLVAWAGLAPGVHQSGDKTVHGRITRQGNRLVRWVLVQAAQMARLHDERFKEFYERYSKRKGHQKAVVAVAHEMLRIVYFMLKGNERYRGEKLGLSRRKLKRLECVALSGFQA

SEQ ID NO: 204703 - protein, 357 aa, unidentified
MFYLGIDQHARQLTISLRNEQGHVVQSRQVSTQPEKIQEFLERLKRDVLRDGESFVAVVEVCGFNDWLLQALEEHQCHKVILIQPEERKKQKTDRRDAAALSELLWVNRERFLAGKPIHGLRQVQLPSATDQQNRRLTTLRKEASEARTRVINKIKHLLRRHNLQWSLPTKTFPTQRAVAWLKELVLPEIDRLEMGFLLADLERTQQRVDELERVIIERSRNNEDEKLLRSIPGVSYFTATSLACRVGNVQRFPRARSLANYWGLTPGCRNSGEHSQRLGHITKAGSNTARWLLAQVTHQALRKDGRLREWYKRIRRRRGSTIARVAVMIKLATVIWQMLRKRQTYSECRAHAGMAA

SEQ ID NO: 204704 - protein, 338 aa, unidentified
MGLYGAIDLHSNNSVLVVLDERDQVLYEKRLPNDLGRVLEVLLPYRDQLVGVVVESTFNWYWLVDGLMAAGYRVHLANTTAIQQYKGLKYTDDAHDARWLAKMLRLGILPEGYIYPKEARAVRDLLRRRAQLVRQRTTNLLSMINQFARLTGCGVSVRRLKQLSEAQIDEWVSDPNVASALRANLAVIRVLDKEIERLEGEILRQAKIAAQFSPLLSIPGVGEILALTIMLETGDVGRFAKVGQFSSYARCVDSKRISNGKKKGEGNVKCGNPYLAWAFSEAAALAVRFNPRIKRFFERKRSKASAPLAYKAVAHKLARAAYHVMRERVPYEERRAFG

SEQ ID NO: 204705 - protein, 352 aa, unidentified
MKIVGALDVHRRQITFKTLEPASGESSRGRISPAAREPLRQWLERFDGLEGEFVLEGTTGWRFVVEEIERAGHVARLADPAETAARRGRKRRAKTDDADCDLQLRLLLAGELPEAWIPPVQILELRTRVRLRKTLIDQRTAWLQRLQAQLFHQGVPPGLKPRTAAGRDALARVELSPAGREAVELYLRMLDQIDRELAPIDRALRAFARHQPGCRALTGQLYGVGAVTATAILAELGDARRFRSSDDAVRHCGLDITVWQSDRKRAAGHLSHQGPSLLRWALFEAAQCAARRSSPDHTYYLDVAKRIDHNRACLSVARKLCRRAHHILRELGDDALAPTDHEPRAKLVDAAA

SEQ ID NO: 204706 - protein, 411 aa, unidentified
MDKIYDNCCGIDVHKKLIVACFRKGNKQEIREFGGTTRELLEMADWLRNGGCEMAAMESTASYWKPLYNILESSDLNAMVVNARHMKAVPGRKTDVKDAEWIADLLQHGLLQPSYIPDKDQRELRELVRYRKSLVGERTRELNRLQKMLEGANIKLSGTVSDINGKSARSILEYLLTGASIDEAKYDEMYKQKIIAHNLKASREQIIDDLNGVMSSLQRRMMKELLEHLDELNIHIKNLDEEIDNFMKPEEKQASQAIQDVTGIGNTSAQAVISVIGTDMSRFPTDRHISSWAGLCPGDNESAKKRKSGKTRKGNALLRTTLITCAHSAVKNKKSYFHAQFMRISAHRGSKRAYVAVAHSMLIAIYHILKDGVVFKDLGADYYNQFNKERKINAYLKKLKALGWEVPVVAA

SEQ ID NO: 204707 - protein, 320 aa, unidentified
MRNAVGLDISKLTFDASAMVGKTEHSAKFDNDSKGLDQFSDRLKSLGCQNLHICMEATGNYYEEVADYFAQYYSVYVVNPLKISKYAESRFKRTKTDKQDAKLIAQYCRSAQESELVKRQKPTDEQYRLLRMTAAYAQIKSECAAMKNRHHAAKDEEAAKAYAQIIKAMNEQLEVLKEKIKEQTEKPNCKEGVKRLETIPAIGRMTAAVLFHHLTSSKFETSNKFAAFAGLSPQQKESGTSVRGKGKLTKFGNRKLRAVLFMPAMVAYRIRAFPDFIKRLEEKKKPKKVIIAALMRKLAVIAYHVHKKGGDYDPSRYKSA

SEQ ID NO: 204708 - protein, 357 aa, unidentified
MQRNKISFKGQKIFAGIDVHKCKWAVTCISESGFEHTYAQKASASDLAAYLNRNFPQGEYHAVYEAGFTGFSTYYALRACGIDCIVIHAADVPTSQYEEVMKTDKVDSKKLARALKAGELKGIYIRPVENLDDRAVVRLRTAIRKESVRYKNRAKFMLMANGVELPDEFQKNGGRWNGNLIKWMRQDVTLLSSTRVSLDMILDQVENTRKALLEATRQLLRLARSDKYKEQFRLLLTIPGIGQIVAMTLLTEIYDIKRFSNERQFAHYLGLVPTCHSSGDKVVHGEKTFRGNKELGPMIIEAAWIAVRRDIGLGAAYGQYCRRMKPQKAIVRIARKLSNIIFSVMKTQKDYVPYTTG

SEQ ID NO: 204709 - protein, 348 aa, unidentified
MEHVAIDLGSRKSQICVRDSAGNILEEKRCDTSELTEYLAKRPRSRVVVETCAEAFRVADAARAHGHEARVVSATLVRTLGIGARRNKTDRRDAQVLSEVSCRIDLPSVHIPSSQARERKTVCGMREALVGARTKVINTVRGWLRGQGKRPRPGSTSTFVDRVRAVFGEEELPIYVERQLRAVEKLTEEIDEADKDVEQQAREDETCRRLMSVPGVGAVTAVRFVAALDQVERFESAHHVESYLGLVPGESSSSERQQRLSITKAGPTKLRWVLVQAAWALRTRCRTPAALPLQLWAHQVEQRRGKRTATVALARKLAGILYAIWRDGTEYQAARGAKMPSNLTDPSS

SEQ ID NO: 204710 - protein, 403 aa, unidentified
MIFVGNDWAEDHHDVYVMDQAGKKLAAKRFGEGIEGITALHALLGAHAEDPAQVRIGIETDRGLWVNALVAAGYQVHAINPKAAARYRDRHHVSGAKSDAADAKMLADLVRTDAHNHRLVAGDSAQVEGIKVIARAHQDLIWSRSRETNRLRSALREYYPAALVAFEDLGHRDALAVLGRAPDPLTGARLTLSQIKAALRAGGRRRYLDATAERIQHALRSEQLAAPAPVVQAYAASTKALVGLLVAFNTQITDLEAHLEPSFELHPDADIYLSLPGLSDVLGARVLGELGDDPERFADAKSRRNYAGTSPITKASGKKKIVLARYIRNKRLYDAIDQWAFCSLSGSRGARAYYDERRAADYEHHEALRALGNRWIGILHGCLKHGAIYDEHTAWAHRHHAAA

SEQ ID NO: 204711 - protein, 390 aa, unidentified
MEARTVNNLLPAASHDDAVGCLVAIELSKKSWIVAVNTPLSDKISRHTLKAGDGKELLDLCERIRTRVARETKRRVEIVSCYEAGYDGFWLHRLLEAHGIRNYVIDPASLQVDRRARRAKTDHVDVERLLRSLMAYLRGEPKVWSVVCVPSVAEEDDRRLNRERGRLINERIQHVNRIKGLLAIHGIYDYQPLRRDRMLRLERLRTAADGQTLPPRLKAEILRELQRLELVLGMIKTIEAERDAIASPKTETEHTNAKKIQDLAKIKSIGPEFATTLIGEVLYRSFDNRKQLASYVGLTPAHFQSGAMCRDQGISKAGNGKARTVMIELAWLWLRHQPDSPLSVWFRERVGKLKGRIRRITIVAVARKLLIALWRYLETGLVPKGAILKA

SEQ ID NO: 204712 - protein, 373 aa, unidentified
MFHFTTLFIGMDVHKESFSLCYYDMMANQFKHSTKVGPNVSYIVNYVNELRRLYGQDAEVLCGYEAGCLGFTLYHQLQAHGIPCIVMAPTTVMKEGSKRVKTDKKDAAQLAKALAFHSYRPVHIPTVEDEQVKEYIRMRTDHKVALKKIKQQILAFCLRHDFRYTEGSSNWTQKHVRWLRSLNPDGLYAEILTEYLLTYEKLVDQIERYDARIEQLGQSDSYQEKVSRLSCFIGIKTLTALSIVTEIGDFNRFATAQHFASYLGLTPSENSSGDKERRGAITKAGNSHVRRLLIEAAQSLAKGTIGYKSKELKRRQSGNRVEVIAYADKANERLRRRYRTLVLGKNKKQNVAKTAIARELSGFIWGMMTGRIA

SEQ ID NO: 204713 - protein, 441 aa, unidentified
MEKVISFEQVNEAAAGIDIGSEKIFVSPDGLLVENFGTYTSEYYRCINYLQEQGIKRVAMEATGIYWISLYNLLESAGIKVSLVNPKETKQKKGKKTDVRDCRWIQKLFSAGLLKESFIPEGKLLEIRYLVRERLDIIEMGSTYVNKMQRCLELMNIKLTQVISQVHGTSGMRMLKAIIKGERNPDVLLLLCDERIKKQKGVEVIKALEGNYNDTWLFMLEQNISLWERHQEQITQIDKRIEVLLEDLTTGKSVEEGVVGKIKPVRHHRPQINNLHETLVKFFGVNVTSISGVNSYTCLRLIGETGADMSRFETKKHFTSWCGLSAGHHQSGKRSKWVKQAPCNKAGQIFKEAAQSLENSKYIAIGSFIRRLKARRGASVAYKAGARKIAEAYYNILTKGIAYVERGLQKYEQQIKQREIATLKKLAKKHQVQIIEKQEAA

SEQ ID NO: 204714 - protein, 403 aa, unidentified
MRFLRIDWGEHHHDLCLLDHDGRVLAAGRIADGLAGAGELHALVAAHAQDPAQVAVGIETDRGLLVGALLAAGYQVYAVNPQVVSHYRSRHGSSRAKSDRGDAKVLADLVRTDRHNHRQVAGDSPLAEAVKVLARAHQSLIWSRQRHVNALRSALRDFYPGALSALGAQLAEPEALAVLALAPTPEQGRRLTRAAVRRALVGAGRRRNLQARVVAVHAALAAPQLAAPAPVEAAYREVVGALVAMLRCLNEQVTILEQQLAARFAAHPDAAILRSQPGLGLVLGARVLGEFGDAPHRYATARGRKAFAGTAPVTRSSGLRTVVVARAACNQRLVDACYLWAFAALTASPGARRCYDAHRARGATHHQALRALGNRLVGILHGCLARQVTYQEQIAWPTAQPAA

SEQ ID NO: 204715 - protein, 370 aa, unidentified
MLDTTIFVGLDVHARSIKAVSLDVMTGEVRCATFGYDAGAVAGWVRSVDPRARCVYESGVTEFDLQKRLSGLGVDCVVGAVSKMIKPSADRRRKNDRNDAEFLARMLSVGNVVEVWVPDDECEAARDLTRALEDARDDLSRSKQRLSKFLLRHGLVFDERTPTGRRKGNWTRAHWSWIESIRFAEGADNDVLAYYVDAVRRAAEEKARLEGLVEAEARKPRWRRRVDSLRCLKGVDTATAADLVFEAGEFSRFRNARSFAAWVGLTPSEHSSGESDRRGAITKAGNKHLRKALVEAAWHYLTCSARPKEPARGQAPDPGARRHAAKGVRRLVERRGTLLARGVHNNKANVATARELACWVWAVGLMAEEA

SEQ ID NO: 204716 - protein, 339 aa, unidentified
MSKLLKKFVGIDISKTYFDAALVKVEDSSQIIHQQFSQNSEGFLKMILWLKQQDVTAGEETLFCMEYTGLYNNGLVNYLVQKKAQLWVEMPLRIKKAGGFERGSDDKTAAIKIAWYALRYHDQMKLWQPVDSNIEKIKSLIVQRDRIINAVTQLSVPINELKECSCIAEAKTMEKLQRPALTALQKTKAAIEALIIKTVQADEQINKKVQQVQSINGIGPVTAVAMLVYTKGFSSFTNAKELACYCGIVPFKKISGTSVRYKPSVSPYANKKLKKLLHLCALSAIKNDAELKAYFERKVAEGKNKMCVINAVRNKLVHRVFAVIRDNRSFEANYVRKCA

SEQ ID NO: 204717 - protein, 412 aa, unidentified
MSVVQFTQVLSRDCGMDIHKKVVVATVQGEGICKETRSFDTFTRSLTQLRERLVSLGITHVAMESTGVYWKPIYNVFEGFIPHIWIVNARHIRNVPGHKTDKNDSEWICQLLMAGLLKPSFIPPKAQRELRDLTRYRRKLIQSVSANKNRIIRILEDGNIKLSSVLSDTSGATAVKLIDMLCDGKQITLSDIESVRHGRCQHTKEEMLEACTGCLDEHKVYMLGKIRECNASLKEGILDFDKRIKDVLSSYHDAIERMCEIPGIQNRVCEDLVAEIGLDMSNFPTSAHLCSWAGMCPGNNESADKKKSGRTNHGDKQVKETLVEAAWAVSRAKGTFFMERFNRLAPRKGSKKALITVGHSLLKCIHYVLSTGGRYKELGDNYVPNKKEQKRKEYLKKELQKLGYSVKLSKED

SEQ ID NO: 204718 - protein, 320 aa, unidentified
MQTQSEALYVGADVAKDEVVVACAEGSFPVRPIVNQRIALVAFLKGLPAGSCIGMESTGIYHELLANLAHKRGFTVFVLNPKDTRHYAKGVGLRGKTDRVDAEMIARMIEREHAQLHPWIPPTPEQREIARLLKRRATLSSLRQALAMTLKGLEGFATDLKTLQMRFDRVIARIDARIETLIESSPERKEHVTRLRTINGVGPVVSAALVNALEHIPLASADAFVAFTGLDPRPDDSGQHRGKRRLSKRGSSELRRLLYIAAMSARKTTTWKPLFEHCRAKGLSTTASLVILARRIARTAWSMYTYKTEFDPVRLTKCLT

SEQ ID NO: 204719 - protein, 387 aa, unidentified
MQKPHDNSKASPAAFMQDSTLIAVIELSLSSWLVAGLIPGVSREPLKKLEPNPEDLLKLLHGWRDEAIKAGRPITRIAVAYETGRDSFWLARWLRERGIDAHVIHATSVAVSREHRRAKTDRLDTAMLKRGFLGWLRGERGHCTVAIVPTMEEEDAKRPHREREGLVHEQTRVVNRMKSALIQFGVRNFNPKLRKARVKLETVRTPEGKSLPPNTIAALRRDMERLKIIKEQIKAIEQTRLQQFEQKPEALANRMVYLLVRIYGLGWETADLLVHELLSRTLRDRKAVARYAGLTGSPDESGSKRREKGLSRSGNARVRKIMIQLAWRMVKFQPDSALVQWFKQRTENAKGSRKPMIVALARKLIIALWRYANDGVIPEGFRLHSAA

SEQ ID NO: 204720 - protein, 354 aa, unidentified
MNTTQVFEKRKIAVAIGIDLAKDHCDVVAYNADNKICFTKANWAYPHLMEWLANAQPAVVLMESCKGCHVRARDIADLGHDTRLVKGADVKALRNVCQKNDIRDADYIARLLYVPGTKFVFVKNQRQQSLQFLQNEYKSIQELRIQVGNQIHAGLEEFGCPGPKSKKFIQSRMMAHLEKNAELIPDEVMSSFLRRREMWLNLFEQEEEAKKRMEEIAKTDDDAQRIMTVPGVGAQTTVGMLVHIGGDIGRFKNSGQFAASIGLVPKQNSTGGNTTLNGITKCGPKRLRANLVQCGQVILMHADKLKGNFGDWVRKLRDSGKKRGVIVCAIAAKIARIVYRLMKDKVDYTPVPSR

SEQ ID NO: 204721 - protein, 335 aa, unidentified
MSLYCGIDLHSNNHFICVIDEKDNRIFEVKLDNDASLTLKSLSKYKRRLKGIAVESTYNWYWLVDALMEAGHHVDLVNTAKVVQYEGLKHTNDKYDAFHLAHLMRLGILPTGHIYQKETRGLRDLLRKRMQLVQTRSAALIRFKSMIQLHSGKTLRADSIKARKFEIPIVGDSNVQLALQSEHQLIRALMAQVKLLEVSILGQLEPLVEYQLLKSIPGIGEILASTIWLEIGDINRFNSPGNFASYCRCVNSRRDSNGKKKGENNRKNGNKYLAWAFIEAANFCVRRCEPAKRFCEKKTAQRNNIVARKALAHKLSRACYWVIKNREPFELSKLF

SEQ ID NO: 204722 - protein, 414 aa, unidentified
MSVTDSAASARGNSAGVDWAKDDYAVCVIDADGEPLERLTLTYTKTGLRRLIDLLDRHRVDAVGIERPDGPIVDALLAADTTVYVIPPSQVKALRRRYGSAGNKDDRFDAYVLADTVRTDRRRLTPLVLDSPPTTALRKLCRARKDLIAHRIAVANQLRAHLATALPGTVELFNDIDSPISRQFLTRFTTQDALDRLSPTRLAGWLKSVSYSGRTDPAVLHARITAAPRGATGDYGQTLAGITRAYLATLAAIVAQIDTLNQQITDTLDRHPDRDIFTSLPRSGTVRAARLLAEIGDARGRFPTPASLACLAGVAPSTRESGKVRIVAFRWAVDKQLRDAVCDFAGDSRHANPWAANLYQRARARGHDHPHAVRILARAWLDIIWKCWTTNTPYNPDRHRALQHLLSQDQPAMA

SEQ ID NO: 204723 - protein, 345 aa, unidentified
MELHTIGIDLGKTVFHLVGLNQRGGVEVRKKFSRKQLLQFTANLQVELIGMEACGGAHFLGRALQEQGHEVRLMPAQYVKPYVKTNKSDYIDAEAIAEAVTRPNMRFVPIKSDDQLDLQSLHRVRERWVMRRTAVINQIRGLLLERGITLRKGRCHVDAALPGILEDASTKLSGALRVLLAQLRLELDHLQTRIDEADAVIKKTAGENEACRRLVAIPGIGPVTATAIIAAIGNGAAFRKGREFAAWLGVVPGEHTTGGKQKLLGISKRGNSYLRRLFVHGARAVLQQSTKQSPGLSAWLAQLTSRTHRNVAAVALANKLARMAWAVLAKNEPYRPPVLADSAAV

SEQ ID NO: 204724 - protein, 415 aa, unidentified
MNDSLQTCERYLALDVHKHYVVVGGVNAEKKVILPPRRLDLGEWAVWHTKYLHPTDAVVLEATTNAWTFYDQVAPRVGRAVVAHPGLVKVIASARVKTDNRDVLQLARLLAANMIPEVWVPQLEVRELRALLSHRRRLIKMRTMTRNRLNSVIHRYNLTPPRGELFLLKHRAWWLGLQLSPTEKLRIRQDLATLDHLEPEIVEVEEELFRLSTAPPWVEHVPYLMQLPGFGIIVAMTVLSAIGDVTRFPSAKKLVGYAGLGASVHDSGETHRTGRITKTGRKDLRWIVVESARIAVLYHEYWKREYAKLEKRMDSNKAIVVIARKLLVGVWHVLTERVADRHVTPEMAASKLMVWSWNLTDEQREGMTSRQFIRYHLMQLKLGDDLTHFPYGGRARPLASVDEVLALRPELKSAA

SEQ ID NO: 204725 - protein, 402 aa, unidentified
MNAVGIDVSKGKSMVAIMRPFGEIVSAPFEIKHTASDINSLVELINSVEGESRIVMEHTGRYYEALAHQLSEANLFVSAINPKLIKDFDNDSLRKVKSDKADAIKIARYALDKWQNLKQYNVMDELRNQLKTMNRQFGFYMKHKTAMKNNLIGILDQTYPGVNTYFDSPARSDGSQKWVDFASTYWHVDCVRKMSLNAFIVHYQNWCKRKKYNFSQSKAEEIYGKAKELVPVLPKDDITKLIIKQAVNQLNSASTTVESLRTLMNETASKLPEYPVVMAMKGVGTSLGPQLMAEIGDVSRFTHKGAITAFAGVDPGVNESGSYEQKSVPTSKRGSSDLRKTLFQVMDVLIKTHPQDDPVYQFLDKKRAQGKPYYVYMTAGANKFLRIYYGQVKEYLSSLPES

SEQ ID NO: 204726 - protein, 358 aa, unidentified
MKAHDKIEGQLTVGLDVGDKYTHACVLDADGEILEEIRLSTNARALRHRFEGKEQHRVVLEAGVHSPWISRLLVEIGHEVYVANPRRVRAIYENENKCDRVDAQYLARIGRLDPALLFPLSHRTAQAQADLAILRSRAALVRTRSSLIRFVRGVVKSSGGRIPACDARNFARKAELHLPPELQPALSLIIATIVDMDARVGEYDKEIESVAGERYPETNLLRQVAGVGPITAATFVLTVEDPARFNNCRSIGSYLGLRPRRDESGSINRQLRITKAGDGALRSLLVSCSQYILGHFGPDSDLRRWGLHLAERGGKNGKKRAVVAVARKLSVLLLRLWITGEIYEPLRNARLRGTLQTT

SEQ ID NO: 204727 - protein, 329 aa, unidentified
MSKLSKKVIGVDVGAKFLTVSFTDNVNQDQVFNIQNNQRSILSFLKKFPTEDYCLAIEATGNYSSRILHLSLDNGFESSLINCMSVKYFSRMKNIISKTDAEDAKVIRLYGEIFRPEVYIPKSIEIEDLDQEIKLLNDLEEEKRRYSVKLKSLRYNPQLNPNTEKHYEKRLKQLDKEIREVEMRLPQLQDEEFREIKGLIQSVSGIGEKTSLQLMTATSGFKNFDSSKSLVKYFGLAPRIYQSGKKSYSPGKCRTSKTHIRSLLYVCSWTAIKHNTQCKELYLRLLEKGKPKKLALIAVCNKLLRICFGVVKNKTAYQQNFQKNFKILT

SEQ ID NO: 204728 - protein, 400 aa, unidentified
MMTPDDIDVWVGLDVGKSAHHAHALDHDGNTLYDKPLKQDEKAIRTMLGKLSKHGRVLLVVDQPNTIGSLPLTVARNMGIAVAYLPGTAMRRTAQLLPGDAKTDRRDAHVIAWAALKLPETLRDAGPDDETLAALKLLAGHDEDLAHESTRHVNRLRSLLLQTHPAFERALKGERITRDATLALLERYGGPMGVKRAGIEDVKDWAKSNGLRAGRIIDDMFKAIGEQTVTVPGTLMAETIIPSIAHDIKTIRDRRREVGRQVEKLLEDHPLLTVLTSMPGIGVRTASNILLGIGGDIANFKSSAHLAAYAGISPVTGQSGTSIKGERPSRRGNKRLKNALWQTAFVASTKHPPSVAYYKRKREQGKHHNAAVICLARRRCDVIYSMLKNGTLYQEPALVA

SEQ ID NO: 204729 - protein, 360 aa, unidentified
MAALSIANVPANAKVIVGVDTHKHTHLARAKDGLGRHLGQLEIATDPGGYAELLAWAQGLGPGRTFGIEGTSSYGAGLSRYLHAHGESIIEVLRPTRQDRRLRGKSDPIDADAAAQAVISGKANAVPKAGDASVEMVRAIRTAKVSAIKARTQTMNAVKALIVVAPDVIREQLRGLTAAALIRTCCGYRVDQVTDPTSAIKRALRSMCRRYAALDQEVRSLEKELDALTTKAVPGLCQLPGVGQDVASAILLAAGDGGARLRSDAAFSMLCGSSPIPASPGIVRRHRLNRGGDRQANAALHRIVVVRLKYHQPTKDYVARRTAEGKSKKEIIRCLKRYVAREVFKTLTAPKAEPVTVAAA

SEQ ID NO: 204730 - protein, 343 aa, unidentified
MQVNTIGVDLAKNVFQVHGVDNACKVVISRQLRRKQVIDFFSKIPPCLVGMEACGTAHHWAREVSKLGHTVRLIPPSYVKGYVKRSKNDAADAAAICEAVTRPSMRFVPIKSADQQALLMLHRTRDLLIRQRTQLINALRAHLAEFGLVAETGREGLAQLAAIITDQSNREALPSAMKQALQAIVDQFAALELRIGTLDRTIHAHHRANDMSCRLETVPGIGVIGATAIASTVTDPSNFKSGRDFAAWIGLVPRQHSTGGKERLGGISKQGDRYLRRLLVIGATAVVRHARQYPQKHPWVMRLLAKKPAKLVAVAVANKMARIAWAIMAKGGHYRAPELAAAA

SEQ ID NO: 204731 - protein, 345 aa, unidentified
MKITAVGIDLAKNVFQVHGVDERGKAVLRKQLKRKGVVRFFANLGPCLIGMEACGSAHYWARKLCEFGHTVRLMAPQFVKPYVKTNKNDRNDAEAICEAVGRPNMRFVPVKTAEAQAVLGLHRARQGFVRARTAQANQIRGLLAEFGIVIPKGIVHITKRLPEILEDAENGLPGMMRQLLERLVEQLKELDRQVVELERQIKLWHRENEQSRKLEEIAGIGPITASALVASVGDARSFKNARQVPAWLGMVPRQDSTGGKATLGRISKRGDVYLRTLLIHGARAVISQFERKPDQPDGWLKRLLARRNKNIAAVALAAKNARIAWALLANDRTYQSDYAARRAAA

SEQ ID NO: 204732 - protein, 355 aa, unidentified
MNQEKYIGMDVHQATISVAVMDAGGKLIMECLLETKASTIVEFIQGLQGTLSLAFEEGTSAAWLHDLLKPHVSRRVVCDPRKAARLKEGNKSDRIDARKLAELLRTNQLKPVYHEEHGIRALRELGRSYLTITKDVTRVMNRIKALYRSWGIPCSGTSIYAPRHRAEWLAKLVEPGVRVRGEHLYQQLDRLQPLRLQARRELLQESPKHSGAKLLRQIPSIGPIRAALLVALLQTPQRFRTKRQLWAYSGFAVETHDSGEYRCVRGKLQRNRERITVRGLNDNHNKDVKNLFKSAAISASTRPGPLHDFYVARVEKGMRPTMARLTLARKIATITLTMWKKGVGFDPQNLYRQAA

SEQ ID NO: 204733 - protein, 338 aa, unidentified
MALYAGIDLHSNNNVVVVQDEEDNVVGRRRLANDLRTVSAWLEPYRDDLAGVVVESTYNWYWLVDGLMDQGYPVHLANTVAIQQYDGLKYRDDASDARWLAKLLRLGQLPEGYIYPRTERAIRDLLRKRSQLVRQATMNLLSIQNLFARNRGEGLSANRVKQLTPEAVDAAFEDPNVALAVKSNVKVLECLRDQISVLEAAVHDQVRLRQGYQKLLTVPGIGKILAQTIMLETGDITRFREVGHYVSYGRLVGSSHLTNGKRKGSGNTKNGNAFLCWAFIEAANFAIRFNPTIRCYYQRKQAKTKRIVALKAVAHKLARACYHMIREDVAFDMTRAFG

SEQ ID NO: 204734 - protein, 406 aa, unidentified
MFIGWDWATETHDVTVMDDTGKRIDRWEPTHTEEGFAKTLARLRKHADPADLPVAIETTRGLAVDRLLAAGHPVVPVHPNAFHAMRARWGASKAKTDAGDSMKLADYLRTDGHLLPRLEPTEPATLDLQALTRQRADHIEARIAAVNQLAALLDEHWPGGKAVFGKLDSDIAQAFLERYPTPASAAKLTAGRLETWCKRRGYSGKKPGSVLIERLRSAPTAASRLSETVVEHLIRVQVQLVHGIRATIRALDKAITEATATHPYAPLFATLPRIGTISLGQVIGEIGPLLERAQTCEQLIAEAGVVPVTRASGKSRTVAFRFATNRRARVALTTFADNSRHGSQWAAKIYDDARARKKRHPHAVRILARSWLRVMWACWRTGTCYDPDIHQANNKINTTADAPLAA

SEQ ID NO: 204735 - protein, 429 aa, unidentified
MTRISAGVDVSKNRSTVCIMDQDGKFIMRPFLVWHSTEELDFLADTLKRLNGEVRVIMESTSIYQYPIALQLKERGLFISIVNAYEMKQFANIDFRGGKTDKKDSRTIASYGISYWDKLVEWQIPKDTYFNLDLLNRTYMNAKKHRQIILQELQHYIDCAMPGMDKELHSLNLSTKKDFMLDFVEKFWHRDEIVNMTEAEFTEVFTAWAKKKGYRPVEGKAAKIYAIAKSCIPYYPANPTVKTILQCIVDKLSGVNRTLVTIVTQMIEEAKKLPEYQIVREMPGVGDPLAARFFGSVGDIRRFKNSKALVAYAGIDSPPDESGDFSSTHRHITKKGSKVFRDTGYEIMMALRAQKRTWEKVRKNPEVYDYMLKKKAEGKPRKVAKIAALNKFLRIIYARIKELYDNMALAERAKTKTRSKTRAKTKVTA

SEQ ID NO: 204736 - protein, 375 aa, unidentified
MGKQRDIACGADIHKNTIVATILSLAGTKNQAKFGTTLSELLRFKFWLTDNGCGVVAMESTGTYWIPVYSVLEGSIEVVVANPYMIKHIPGKKTDLIDSDWLAELCLKDLIVPSRIFPKEDRALRSLTRAREGLVKIRTQLKNRIHRDLSSSHIKLSSVVTDIFGKSGMHILRGLLDDQSIDEIITGIPSGRVKKNADKIKESIENNLDSSQIFLIESSLDLMGHVQDKIDRIDMDLKSKIITRLNDLKIAMSIPGIEFTSAATILAEIGNYRNFSSPEKLASYFGLVPFVNQSADKLHTGCITKHGSKHLRWIMVQVAHAASKKIGSKLRKFYLRVRARKGANVAIVALARKILCILYHPHPACLSSDIAFFTS

SEQ ID NO: 204737 - protein, 361 aa, unidentified
MKKTAQHLIAEVPSRHSPTELTIGVDLGDVWSHYCTINQNGEVIDRGRFRTNPQGVEKWFKNLAPVRVAMEAGTHSIWISEQLQLLGHEVIVANVRELRAISHSDRKSDQVDAEKLARFARLDPKILRPIAHRTLQQQQALTLIRARDLLVRLRTAAVNAVRGLTKSCGHRMPASTTTCFAQRGLAMLPIGLAPALGPVLAQIAEMTTKIKQYDRQIRQLTETEYSETQALLKVYGVGPITALTYVLTLGDKQRFQRSRDVGCYLGLRPRRSQSGDRDPQLGITKAGNGYLRMLLIECANHILRPPGKDSSLRRWGLALAARGGKKAKNKAVVAVARKLAVLLHRIWVTQEPYIPFYAEAA

SEQ ID NO: 204738 - protein, 424 aa, unidentified
MKVTYQTCCGVDVHKSFLVATIVKTTGGIEPSYQKKRFSTFNNSILEFKQWLLDNDCHDICMESTGKYWVPVFNLLEDKINVVIANPKWVKAVKGNKDDTKDSKWIGDLFRLRLVRGSYIPCKKIRVLREYTRYRYKLVSCRSSEKNKYQNALTVCNIALDSVVSDIFGKSSMSIIDYLLEQSGTSINHEEIASKLLRSLKSKEDAVIESVEGYQMTDAQKYRMRLVRAHMDYITAEINDVDKMIENMISSNPDFENAVQFLCTIPGVKRDSAITIISETGTDMSQFSSSKRLCCWAGLTPGSNESAGKKKSVRITRAGVYLKPALVQCAHAAVKSDKSPYYKKKYESLVKRRGKKRAIIAIARMILTAIYQMLSTGEQWNPSDLYKIDMPVALVEKQKAKAIKQAKKLLQREGLLPPDEPLAS

SEQ ID NO: 204739 - protein, 370 aa, unidentified
MAKRNMFVGLDVHKESIDVALAEEGRDGEVRHYGTIPGDLEALGKVIRAVQAPERRLRFVYEAGPCGFGIHRYLTTHGEDCVVVNSSSMPKRSGDRMKTDRRDSLTLARLHRAGELTAIYIPTADDEALRDLVRAREDAVGLSTQAKHRLKAFLLRQGRRYPGKAGWTQPYRRWLADLSFPLAPQHIALQEYRDTIDETERRVERLTDQLRQLTPTSRWAPVVDALQALRGVSFVTAVGLVVEIGDIRRFDHPRQLMAFLGLVPSEYSSGPSVRRGGITKAGNPHARRLLAEAAWAYQGVPRLGRQMLYRQEALPKPICAIAWKAQLRLTSRFRRLVARGEANPKVAADIARELTGFIWAIAREVPAPLA

SEQ ID NO: 204740 - protein, 351 aa, unidentified
MAIADGGRDGEVRYLGEINSTPATVEKMIVKLAKRYAKLHVCYEAGPTGYGLYRQVKALGHECIVVAPSLIPKKPGERVKTNRLDAVTLARLHRAGELTPVWVPDAIHEAVRDLARAREGASEDLRKKRQQLLAFLLRHGRIFGEGKHWTLAHARWLARQSFEHPAQQIVFQDAIDAIEGGAMRLRTLEQQLAAIVPSWSMAPVVAAFQAMRGVSFLVAVTFVTEIGDVRRFDSARQIMSFLGLVPSERSTGEAVRRAGLTLAGNRRARRVLIEGAWTYRYPARISEVLRARLEKLPKAVRDIAWKGQVRLCARYRRLIAAGKRPPVVIAAIAREMAAFLWAIGHQVEPVS

SEQ ID NO: 204741 - protein, 349 aa, unidentified
MYYVGMDIHKKYSSVAVIDEQGVLVDRHRVDHRYREEVTEYFNQFASKTQVVMEATCGWAWLSDVLQDLGLEVRLANPSKVRVIAESHIKTDKVDAEVLAQLLRINYLPECYLAPRELREARDLLRYRITLVHIRSGVKNRVHALLTRLGIYHSYSDLFGKKGRRYLSSLELPPIYRQALDGYLCLIDTTNKLIGEAEVEIRKVVKESEDGQLLLAVPGIGFILAYLILVEIGDIARFPSEKKLCSYGGLVPSVHQSGAKSYHGHISKKCNRYLQWGMVEAAQKAKVIDPFLRAKAEKIQRKRGASVATAAIARHLLVAVYHILKEKTPYRTPKLKHHSLGKPVLTLVA

SEQ ID NO: 204742 - protein, 370 aa, unidentified
MAKSTPLFVGLDVHKESIAVAHATGGCADAPVFVGAIGPRQADVDKLIRRLQGRTSELRFVYEAGPSGYGLYRYLTGKGLACDVVAPSLIPRRPGDKVKTDRRDAVELARLLRSGDLTAVYVPTVEDEAIRDLCRARDAARITLKDAKLRLKAFLLRLGLHYVGRADWNAAHKRYLAKVVCPTPAQQIVFQETLGAVDEQVDRLTRIEAELQELAPHWRRYPVVEALQALRGVQWVVALTVVAELGDLTRFDNPRQLAAFVGLVPSEYSSGASRRQGGITKAGNGRARRVLVEAAWAYRYPAKVSLHIQQRIDRLPKPLQDLGWKAQVRLCKRYRRLVARGKHPNVVVTAIARELIAFMWAIARAMPTHA

SEQ ID NO: 204743 - protein, 353 aa, unidentified
MKRPKDKLIAGIDLHSNNVMIGVMNQDGKRVAYQKLDCDLNRVTEFLDPIKPQLQSLAVESTFNWYWLVDGLRAKGYPIELANPAKIEQYNGLKHSADKDDAFHLAELQRLNILPKAHVYDPELRPVRDLLRRRTNLVHQRTALLLSFKSLYARTTGERLDLSDVKKTEPKEAPKLYEHPANQLIAQVQAEHIQALDKSVRRLEKAVLACAQEIPLYEKLLTLPGIGQILGMTITMEVGDIKRFKTDGNFASYCRVVDAKRLSNGKSKGDNNQKCGNKYLAWAFVEAANFAKRYSLPCRRWYDRKAAKTSSVIATKALACKLAKAAWHVMARQCSYDEQRMFPELATKTMKPN

SEQ ID NO: 204744 - protein, 425 aa, unidentified
MKFTRNDPTNQRIERITNHHIIVGIDIAKDVHAAQITDFRGRMLTSRHLSFTNTKEGFEKLFHWFRETSAKHNKSSFLVGMEPTGHYWHNLADWLLEQGIEVVLVNPVTTHRNKENRDNSPSKNDPKDALVIADVVSRGYYTDYSPQQPVFQCIKAMMSTREYWSGQSTSLGNRIVRWIDLYFPEFRSVFQEWNGIRSLATLKAFALPDDLRDLNAEEVMEGWRNQGMRRVAGVSGKAKAVELLNAAAHSIGKSHTNDAARQEILRLILFYEQTQRTLDEMQQELESLLEQVPLTEQLRSIDGLGTITIACLLGCAGDLRHYAHGRQLLRRAGLNLAERTSGKHKGPVKLSKRGDSMLRKYLYMGILNLVKQNADFKKWHVQNQMRGMTKMASIFKLMGKLARILIGMVQRGETYRSQLHDVIAA

SEQ ID NO: 204745 - protein, 468 aa, unidentified
MGHERSRSRQTRGQKTRHPSLLERINRDAAGIDCGSETHFVAVPPERDQEPVRSFKTFTSELRRLADWLETCKIKTVAMESTGVYWIPIFELLEERGFEVVLVNARHVKNVPGRKSDVSDCQWIQELHSVGLLRGSFRPDGEIATLRAYLRHREKLVQSAASRIRRVQKSLVEMNLQLHNVISDITGATGMRILRDIVTGVTDPEALAAHRDYRCRASKQEIAASLTGNYRPEHLFALRQNLELFDTIQRQIQECDGAVETILNRLGRKHDKSKGTLPRPRCKFKLCDNEPRFDIRDPLFRLSGVDLTQIDGIGPYTALRLVAEIGTDMSRWPTYKHFTSWLTLAPKNKVSGARLISSRTQPSANRAAYLLRMSAMVLGRTSTALGAYYRRIAYRIGKPKAITATARKLAILVYRTLKGELDYADPGELAYEARHRERVLRNVRKRAERLGFGLVNLQTGEVLPGAVS

SEQ ID NO: 204746 - protein, 363 aa, unidentified
MQFVGIDLHTNRFTCCYLNEGSREKTMRTFELKADDLKEFHKTLTLDTVVLIEATINSFAFAKLFQHAVKEVIIANTYQLKNINLSDKKTDKVDADKLARMLKLQFLGGEKLIVGVTIPPKEISDLRSLFASYRIIRKQITQTKNRIHSLLKENLYPFIKEYIFGKKTRKAIRAISQDQILSFQINLCMGSLEQLESSFDILEEKIKIARAPFMKEIDLLSSLSGLSVITALAIIADIIDVSRFKNAKKFASYPRSASRAESSNEHTIIKSTNKAGRKLSITLLSQSLNHFRDSNKKLNAWYGRLSIYKKKGVIRMALCRRVFTDIYQVLKKNEYHRFINPRLHDKKILEYKKLLERNNIVFQ

SEQ ID NO: 204747 - protein, 448 aa, unidentified
MREPQEIEDREHEQAVLRVAAVDVAKASGVVCTRVPREGGRGFVTKVWPVEATTGAILELADHLAGLAVEKVVLESTSDYWRPFFYLLEAAGLDVALVNARDVKNAPGRPKTDKLDAVWLAKLAGWGMLRPSFVPPPEIRVLRDYARLRIDLTRERTRHWQRLEKLLEDALIKITTVASRIDTMSVRDMVEALIAGQRDPHRLADLARGKMKAKRAALVRALDGRFDDHHGELAAILLAQIDALTGQINTLTTRIEEVVSQIPAAQGVNEDGTTGPHAGRGPDAPALPAIDRLAEIPGISRDAAQVIIAEVGLDMSRFPTAAHLVSWARLCPRTLQSGARERPGRTAKGNPYLKGVLGNAAAAAGKTDTFLGERYRRLARRRGKLKAVVAIARTLLVIVWHLLADRAARYTDLGMDYYISRLDINARARSHVRQLEALGFTVSIAQAA

SEQ ID NO: 204748 - protein, 338 aa, unidentified
MTIVMGLDQHRAQITAEWVDTGTGEVSRARVTPAHRHSVRRFLERFDGGELEVALEATTGWRFVVEELRRVGAGAHLAEPAETSALRGNKKRAKNDRADARHLRELLQAGRLPESWIGPDHILDLRARVRLRHSLVDDRGEWQQRMQAVLYHHGVPKRAALLTNENRAWVQQLPLPAAGREQITIGLAIVDAIEAQLRPLDRELSAYARRQPGCQALQRHYGIGALTSVTILAELGDVRRFSSSREAVRYAGMDITVHASDKRRAPGHLSRQGPPALRWALYEAAQVATRERSPDRAYFLQAAERLGRNRACLALARKLLKRSYHTLKHLGEEGLQPA

SEQ ID NO: 204749 - protein, 299 aa, unidentified
MSIVANDYAFVVGVDTHARAHTYAIISSRTGEVLGTKAFAVTDAAIDRAIAWTASHTNGQVLFALEGPGSYGASLARSLRRGGHEFCDVRPPERASRTRGKNDEIDAVAAAKSALGIGMDALTMPKADGLRNALRVLLDARMDMELRRTSARNQLNALVRTTDFGLDTRRALTDKKIRQLAGLERAHADRATQIVQREAIRLASIVIDLGGQMLENRTELGEVVEILAPGLQEIYGVGPITAGVAVSAYSHRGRVRSEAAFAALAGVNPIPASSGNTTRHRLNRHGNRLSISDSGGHRY

SEQ ID NO: 204750 - protein, 339 aa, unidentified
MTVKTVGLDLAKDVFQVHCVSATGRRIINKKIKRAKLLSFFETLPRCVVGMEACGSSHHWGRKLRELGHDVRLMPAAYVKPYVKRGKTDATDAEAICEAVRRPTMRFVEIKSEDQQAVLAIHRARDLVVRQRTQVVNMIRSILREFGHILPTGIEAVSRFAREHGTEEQLEMPEIADGILGVMCHQLNGLNARIDGLTKLIEQHALLDADARRLMRMPGIGPITASAVVATIGDAKQFETARDFAAWLGLTPLNKSSGGRERLGRITKKGDRYIRKLLIVGMTSRALMAKNKPEKADIWTAKLLDEKPFRLATVAMANKSARIIWALLTKQEEYRQPIA

SEQ ID NO: 204751 - protein, 425 aa, unidentified
MATETTSVIAGIDTHADTHHVAVINEHGKPVADKDFLAVGSGYRKIVDFITSYGTVTAVGVEGTGSYGAEIAKTLRGEGLCVLEVNRPNRAARRLKGKSDPLDAYQAAQSVLDGRTTSVPKAKDGPVECLRILRTGRTSALKARTAAINQIKGLLVSAPDKLRAKYRGLGTSAMITALQRTRPSGHMADPEYVCLLTLKALATRCHSLAAEIATADAALQEILDTYAPMLCDLPGVGTEVASQLLVTVGDNPDRLENEAQFAALVGVAPIPASSGKTTRHRLSRGGDRNANHALYQVVLVRMASCQRTKDYVAKRTAEGKSKREIMRCLKRYAAREIYRQITNPQAAPNNTDLRHKRNDLGRTLASAASHLGQWPSVISRLERGHIRNDDLASTYRQWLTDQTADLVRLPADGRGGWHRRVQARQ

SEQ ID NO: 204752 - protein, 309 aa, unidentified
MPHVTSIGLDVHARSVAAAAFNPFTGEVVHRDFGTDAAEIAEWALGFEEPRACYESGPTGFHMARELRALGLDCAVAAVSKMQRPAADARRKNDRRDAEFIARMLATHNIVEVPPPDAAVEAARDLDRALDDATVEYRRARQRLNMFLIRLGHVWDERNADGTRKGSWTRAHWRWISGIRLEGPQRDVLEYYVTAARCAESDRRQLEKKVLALARTDRWRPAVEALSCIKGIDTLTAFRLAAEAGSFTRFRTAPAFASWCGLVPSERSSGETERRGGITKTGNRLARTALVESAWHYLCLLYTSPSPRD

SEQ ID NO: 204753 - protein, 411 aa, unidentified
MDLVYARCAGLDVHKKTVVAGVRVPAPQGGERRGEVQTFPTTMSGLLALTDWLIAHEVTHVAMESTGVYWRPVYAVLEGLMTVLLVNARHVKMVPGRKTDVRDCEWLAQLLECGLLRSSFVPPRPIRDLRDLTRLRKTLIRERGHHVNRIEKTLELANIKLGSVVTDLMGNTGRAILEALSLGIDDPDKLAACAQGLLRKKQAALREALVGRLTPHYAFLLQQHLSLIDALDAHIATLDARIAEAMAPFADAAALAQTMPGVATRAAQAILAETGVDMATFPTADNFASWARLCPGNNESAGKRRPTTTGQGATWLRATLQEVAWAAAKTKKSYYRALFHRLKARSDSKTAIVAVQHAMLVALWHMLKHRVPHQDLGADYFTRRDTERTRRHHVRRLEQLGYQVLLAKEAA

SEQ ID NO: 204754 - protein, 315 aa, unidentified
MTRVQVFVGIDVSKAQLDVALRPEGRFAAPNTEVGIAQVLTRLQAVSPTLVVLEATGGLEIPLTGALAAAGMPVVVVNPRQVRDFAKATGKLAKTDALDAQTLAHFAEVMRPEPRPLPDEQTQTLAALLTRRRQLVEMLTAEKNRLASARTPVRKSLRTHITWLERELSHTDRDLAHAIRESPVWREKEELLQSTPGVGPVVTTTLLANLPELGTLTAKQIAALVGVAPFNRDSGTLRGKRTVWGGRAQVRAVLYMGTLVATRFNPVIRAFYQRLCAAGKPKKVALTACMRKLLIILNAMLKHRTPWRPELVQRA

SEQ ID NO: 204755 - protein, 364 aa, unidentified
MEYFDCIGCDVHKDYSVFRMFDAQRKVGPPIRIRHENGELERFLKTLPPGSHVGFEACGSWMWMAQQIEDAGLVPRLGHPLEIKRRITGSTRTDETDSAGMLILLANGTFPEVWMAPPMVRDLRGLVRTRLAIRRQESAMKNRVHGVLNQYGLKNSVEEEDDVDIPDWFSRKAQEQLQRAIEQLPPASREATRQQWMAIQDLERRVKSLELAMEARMGKLGWLRLLQTLPGVGKILGATIWVEIGDVKRFPSAQHLARYAGVVPQVQSSGGKTWRGSTMKDCNHYLKWALVEAANTVAARRAKWGEKYPHAVGLYQRVKATTKLSGKAKVAVARHLAEAAWWILTRKQDYREPTSARVTSSNNG

SEQ ID NO: 204756 - protein, 314 aa, unidentified
MESQEVKYVGVDCGKKSIEVVRINSENSLERRQFSTTESGINNLLQWLTLNDIVGLEAGSQSFRIAKSILNKGVQVIVLNPGNLATIYQSLKKTDKEDSLKIARLIQRHPIEELPTVPIPNDEEEDNRRLCSEHENWTKQLTQGKNRLHSLFTQAGLTQITKKHLRTKVSREASVTLLSDRYKKEAERILKVLDLVELNLKLIEEEIQEALKKNKAYVQTIMSMPGIGMITSLAIMSYMGDCKRFSSAKQAAYYAGLVPRVDISGDTVRYGRIINRGCHSIRRVIVQAAWSLVRCLHGGKVKEFYQRLYLKKGD

SEQ ID NO: 204757 - protein, 465 aa, unidentified
MPNHPKPPSKPRKTTRKMDPTEGLPPLNLNAAGIDVGSAEHHVAVPGDRDAEPVQSFGSFTADLHRMARWLKDCRIQTVVMQATGVYWTALYDVLESYGLEVNVAHAQHTKTLPGRKTDVQECQWLQKLHTFGLLNKAFRPAEEIRVLRSYLRQRENLVAAAATCVQHMQKALTEMNIQLANVISDISGTTGMAILRDIVQGERDSEKLARHKHVLIRATHKEIARSLEGTWRPELLFVLEQSLDLYDTYQDKIQSCDQRIDEHLRSMEAKVDPLREPIPQPPRRGKGARPHQPRFDLRGHLYRITGVDLTQIDSIDVRIAQTVISEVGLDMSRWKTEKHFASWLGLCPDHRISGGKVLKRGTRRVINRAATALRLAAWSLIRSQSALGAKFRRLRSKLGAPKAITAMAHTLARLIYRMLKFGHQYADRGIEYYEAKYRQQQLYWVAKKAATLNMQLVPIPDAAN

SEQ ID NO: 204758 - protein, 354 aa, unidentified
MNYLGVDFHKNYSTATIVNPKGKVLQKLKLYNDKGSFVELLKPYEQEICAVVEACRNWHVAVDLLDGLVKEITLAHPLKVRAIAEAKIKTDSIDSETLAQLLRADLIPQAYLRDTSNQKEQRVLHTRSFYVKLRTQIKNRIHYIIDAQGQEEITEGAKGFSDLFGKRGVEWLRSLELCEPDNKLLKNLLETHEVICQKIGETEWRIKEIMAKYRDCQLLKTIPGIGDFLSVLIKTEIGEIGRFRTSSHLCSYAGLVSSTYSSGGKSRNGRITKQGNKWLRWAMVEAVVPGINSSGELRNYYEKIKVRKGSKVAKVATARRLLCIVYRVLKEKDSFKVYKKEIRNKFSGAAFRKI

SEQ ID NO: 204759 - protein, 410 aa, unidentified
MQTMVERGCGLDVHQATVVACLLIVLKNGKVQKQIRTFGTTTRELMSLREWLLSEGCTHVAMESTGVYWKPIYTILEGAFEIVVANAQHVKKVPGRKTDVKDAEWIADLLGHGLLRSSFVPPKPIRELRDLTRYRRKLVESRSAERNRLLKLLESANIKLASVASDVFGVSGLLMLQALVEGKATPQEMAELAKRQLRKKIPELELALEGKVEEHHRFLLRVQLRRLQAVEEDLGILEHRIQEKLKPYTAELILLDEIPGVDRTLAAGIIAEMGVDMSVFGSVSQLASWAGICPGNNESGGKRKSSRIPKGNVYLKTTLVEAANAAAKAKGTYLRDKFYRLKARRGYKRAAVAVAHKILVAIYHMFSHQVCYNELGDLYLDKLNKHRLTRNLVHRLERLGYIVTLDQKAA

SEQ ID NO: 204760 - protein, 338 aa, unidentified
MHKRSLQDVVWCGIDVSATELTVAVLGDDFLQQRSFANRATGHDALIAWLQGHAHAAWVCLEATGVYSLDLALALHAAERIGVAVLNPKMACRFAETLRRSKTDPADAQVLAEYARRMPFVAWCPPTATALRLRAITRHLAALVKQHTAIHNQLHAAQASVLVPACVRQDLRRTLRSMERSRQRMRREAVALVEQDGELARRFALLQTIPGIGEVSALYLLAELLLLPAGLSVRQWVAHSGLDPKHHQSGSSVQKTSRISRSGNRYLRQALYMPALVAVRHDPHFRGFYEVLQQRHKRKMQALVAVSRKILHAIYGMFRSDSAYDGSRLFSNALATAA

SEQ ID NO: 204761 - protein, 317 aa, unidentified
MTSLACAAGVDAGRDFLDVAVAPSGRTRRLPNAPQGILALLAWLRRHEARRVVLEAIGPYAARLVRALADAGFEVGVVDPRRIKAWRTAEGRRAKTDRLDAQLIARFALSMQNVVRPVPDPQSLHIRALSARRRQIVEMIAMEKTRLKQALDDDIAASHREMIALLASRRQKIEDDLQAAIAARDGGAHRMALLQTAPGVGPAVAATLVADLPELGKLDRRAIASLAGLAPHISQSGVDKGRAQIAGGRPCVRNALYMAALTGARSRTGFKTEYESMRNAGKPAKVALVAIARKLIVALNGMIRDDRQWTSLPPDSA

SEQ ID NO: 204762 - protein, 408 aa, unidentified
MDVIVERVGALDVHKAQVTACVRVPEKRGRASEVAEFKTTVRGLLVLRDWLVSHGVTQVAMEATGDYWRPVWHVLEDDFELLLVNARHVKQVPGRKTDVKDAEWLCQLAEAGLLRASFVPPKPIRDLRQLTRYRKAQIQERQREANRLHKTLEDTGIKLDCVATDILGVSGRLMLDALVSGTTDPEVLAELARGKLRRKLPALREALEGRFDSLHALLVGSILAHLDFLDEQIERLSDAIEQQLGPFAPAVELLRTIPGVERRTAEVIVAEIGTDMSVFPTAGHLASWAGQCPGNHQSAGKRTSGRTRKGSKWLNQALKDAGMAALRTNDSYLQALYRRKKSQLGHGRALGAVKHSIICACWQMLTTGELYTDLGGDYYARRDPQRQTRRLIAQLERLGHTVTLREAA

SEQ ID NO: 204763 - protein, 343 aa, unidentified
MKIIRIGVDLAKDVFQVHGVDRNEKPVWRRKLKRAEWLKVLLEQTEPGCVIGMEACGGAHHWARVLQARGYQVRLVAPQFVKPYVKSNKNDANDAEAICEAMSRPHMRFVPVKTVEQQEVQAVHRVRAELMEQRTAKANQIRGLVSEYGLVAPRNMSHLRAAIPEWLEDAENGLTGRFRRLLKGLWEDLAILDQRVKELDREIAEIAAADPVAQRLQQLRGVGPMTSTALHATVGDASQFKNGRQMAASLGLTPKQNSSGGKEKLLGISKRGDAYVRSLLVHGGRAVVSTSRNKDDRLSLWVTRLASTRHPNVAAVAMANKTARIAWAMIRRGEDYQPERAEA

SEQ ID NO: 204764 - protein, 482 aa, unidentified
MKKRNIYQNQSQEIVNLFEAAGSNEKVMCVPMDYAKKDHLVMFCNGHGDILRKPFSVKNTPAGIAYIDDQVMRSCHRRGIKKEHVFFGGEDANSFAKNFVSTLRSKGFLVANVNARDAKKQRESVQASTDRIDLMGIAAMLLNCRGNCCPAQSGTYRNLRLLVRHRRKLVQMLTEVKNRVHGIVDELFPGFLKEQNTGIVAFTESSLYLMEDRFSPKQIRRRKRQKLSEILKRFGTSKAEKTAAKLQHYASKVLHAPVEYVDTMQLSLSQHVKHIRCLKESVAQMDKEIALNLAQTQGAFLTSVRGIGLVLAAGVTAEIGDPNEQKPLNNLSSYAGIVPRVKQTGGLDGKTYTGPVAKRCNRILKDYVVKSAYHLGLHGPPDLMVDYKRRDASGQHADFGMGRRYLRMAMCLMRTSQVYLPPDLRKGDYTPKDKAGYYLMNWPYLREKWKRVGTLEEAFANNRPLGLWRLIVQELYDIKLKL

SEQ ID NO: 204765 - protein, 380 aa, unidentified
MKVNNNKPGAKKLAENIIHIARKNDIENIQIGMEATNVYWEHLFNFLQHHEDLTAENKLSLFTLNPKVVKNFKGAYNDLPKNDRVDAWVIADRLRFGRVESSSAPETVYKALRQLTRFRFKQGEQLSKEKSRALNLIFLKFSDFASNEPFGTFSKASMALMEEYSQEEIIQADMEELVEFAYNNSNNRLASGYSLEEVSKALKKAARDSYRLKPRVNQAITQTLSMTFDNIRFLQQQMKKAKKAIKRELKAIPQTLSTVDGIGPILASGIISEIQDVNRFDNEAKIASFAGLTWNKHQSGSFTAEESSLSKSGNHYLRYYLVEAANSLRVHNEEYRQYYYKKYNEVNKHRHKRALVLTARKFVRLVFALLSKGEIYQPRR

SEQ ID NO: 204766 - protein, 373 aa, unidentified
MPKYSTAFGMDVHLRSTTVCALDADTGEAVTRRFPGNPWGEIAGWMDGFPGPSLAAYESGYLGFAPQRELAGLGIECVVAAVSKIPRSAADSASKNDRNDAARMAKAILAHDISPAWVPSPEVEGIRDLAGAYGGATARLATAKQRLLAFLAKRGFVYGGTTPAGNPRKYWTYDFLRWLDKVRPEDDGGVRTLAALRNEVEAAAEARADLLSEYRAAVDASPIAAEVAALQSIKGCAFALAAAFSAEVGDFTRFRSGRQVTAYFGLAPSQRSSGDSVRLGGISGAGNALVRKLAVEGSWCYAAARHQPKLMPRDTGVPLEIRVHGRKGSERLLRRREEMLARGMPAAKANAATAAELVRWLWALGMMCREGAE

SEQ ID NO: 204767 - protein, 352 aa, unidentified
MNDTSIAWLGLDAHSKNCVLGQLDDQGREIKWWGFPTKPEQLVQHIKAIPATSKHLMLEESNLARWISQLLKPHVQQLVVCDARRNRLISQDHHKHDKRDAFALARLLRLNEFKPVWQPADPQRVLFKRVAKSYENAVQRQTRLKLQLKSLFQHWGLFPTGATIYSKPGRVAWLKQLPYDTLRAQALLLYELLDQALAGQTQFRRLMCQTGRQFPEIQRLSTTPGVGLVGSHLFVAYVQDPKRFPKFGRLTRYCRLGIRDRTSDDKPLGYQQLDREGIGTLKAISYRAYLQAAKRRSGPVWDFYQLSLRHTGSTTHARLNTQRKILLTLWTLWLTGREFDPDQFSRAQPLDV

SEQ ID NO: 204768 - protein, 319 aa, unidentified
MTVSNQAERVIGVDVAKNRLDIADSQGKIRKTISNTAPAIKKAIVQKVKDGDSVFVVCEATGGYERGLVKTLQDAGISVAIANPRQVRQFASAMGRLEKSDPIDAEAICQFAQTAELPAAPVKTAEQEARDAVVRRREQVLEMIGQENNRLQQESDPKMKKTIERVLKTLKSLLKKLDAEVARFLAEEAKTNASVEVLMSVPGVGAVTTATLLCELPELGQLNRSEIAKLAGFAPIVHESGQSRGHRSVSGGRSNPALVEFHRRLVSRGKPQKVAIVACMRKLLTILNSMVRTKTMWRTKGEEKVMADQGPATTRAHGD

SEQ ID NO: 204769 - protein, 408 aa, unidentified
MEEKRKRYIGLDVHKHYLIALGVNDELEVVLHARRVELAHLESWMKKTLTRQDEVVLEMTTNTWQMYDELVQYAGKVMVVHPPHVALITRSQVMNDKIAASILARLLAKGLLVGIWIPPQEIREARGLVAQRQKMVRLATQAKNRLHAVIQRHHLVPPAGNPFGASNKAWWQSLPLGKLEKVNLQSDLETLQFAEKQVKGLTEIMEGMVAEQEEIGQLLHLAGFGVVTTFTVWAAIGDIRRFAEPRYLVGYAGLGARVHDSGMTSRSGKITKAGRRDLRTALIEAANVAANHHPHWKAELARLEPSLGRNKAIVAIARKLLIAVWYVLQGKTDKYAEPEAVAQKMLKFAYAVGKANRPKGQTAAQFARMRMDALGLGSELTSIPWGAKKPIPLPPSSLTKKESAVPNK

SEQ ID NO: 204770 - protein, 466 aa, unidentified
MPNETSVNANKVAKKELARRLRSIDPGLEVVHPNAAGIDVGNASHYVAVRPDRDTEPVRRFECFTADLYRLAEWLSSCGVKTIAMQSTGVYWIPLYDILEERGFEVFLVNARHTKNLPGRKSDVQESQWLLKLHTHGLLNNSFQPPSDIRVLRTYWRLRAEHATGMATCIQRMQKALTQMNIQLANVISDLSGTTGQAIVRAILNGERDPHKLAELRDRRIHATKEEIAKSLQGNWRPELLFIVRQQLEMYEAYERQIAECDQQLREHLAKFASAPLTSADTCNPPQSKKSKRHRYMPQFPLSNELMRISGVDLTQIDGVDAMTAQTLISEVGFDMSRWKTESHFASWLGLCPDNRISGDKVLSRGTRRVINRAATALRIAASTLIRSKTYLGAQYRRLRTRLGAPKAITAMAHRLARLVYRMLKYGQKYVDKGADYYEQKSRPQQIDSLKKKAAQLGLQVTLAQP

SEQ ID NO: 204771 - protein, 482 aa, unidentified
MKKRNIFQNRSQQLLALFEKAGNRLKMMCVPIDYAKKDHMVMFCNGYGDILRKPFSVKNTLEGVKYLIDQVMRSCRQRRIKKEYVFFGGEDVNSYAENFANALRTKGFLVANVNAHDAKKQRETLQASTDRIDLMGIATMLLNLRAKCSPAQDGIYRNLRTLVRHRKKLVVMKTEVKNRVHTLVDRLFPGFLNEKNTGINPFSKSSLVLMEDRFSAQQIRRRQVTTLIKILKRCATPDAQSVAAKLHSYAAQVITTPNEYAATLQLSLQHHIKHFRCLQENIDQLLSEIALVLAQTQAAFLTSIKGVGIVLAAGVSSEIGNPFEQKPLNNLTSYCGIIPRVKQSGGIEGHTHTGRVSKRSNHLLKDYVVQSAFQIGLRGPEPLLQDYKRREAAGQHADFGIARRFLRMAMCLMRSSQVYLPPKLRSPKTQMQERAGYYLTTWPLLRDKWKKAHAHQVAFAKDQPLGQWRQMVQELYDIKLKL

SEQ ID NO: 204772 - protein, 388 aa, unidentified
MPAAETPVAYLGIDVGKSSHSACALDAGGGVAFRAELANRPDDIDRLLERAGSGALVVVDQKRNIGALVLARAHAHGNPCAYLPGYAEKQARGMFPGTAKTDAIDAEVIARTALGVPRALRPAPEEPEGAASLRILSSQREFASSARTRAKNRLRATLLEADPALEGAVDPSSRWQVSMLAEFGGAAGCSAAGWRRFSNAARRAGAPAAGARRLWEALLASSRSGRRLPAGEDIAVRMLAREIASLDADIEELDSLVADSLAGDEVYECLLTVPGIGPKTAAALVTSIDISAFRGHDELASYCGVAPSDRRSGSSIRSTSPQRGGNRQLKNLLIFSCNSLIGTDNRFGRYYGECRARGMRHSKALKAVARKRLKVIYAIMRDAVPYAA

SEQ ID NO: 204773 - protein, 348 aa, unidentified
MRFYTHSHKYYCGIDLHTKMMYVCILDPDANILIHKNIPTNGKTFLKLIAPYTEDLVVGVECMFSWYWLADLCAQEGIEFILGHALYMRCIHGGKAKNDKIDSEKIAHIMLGKNFPLAYAYPAELRPVRDLMRRRSHLVRIKSEIQSHISITNYQYNLQPFEKNIVHKGNRAGIADHFQNPSVRLNVETDIAVMDGLHDHINRLENYIIKHAKHYDARMLYRLKSVPGIGDVLALTIMYEVLSIERFPTVQKFCSYSRLVKCASESAGKKVGASGSKIGNAHLKWAFSEAAILFIRGNDQAKKYVDKLTKKFGKGKALSILAHKLGRAIYFMMKRNDVFDMKYFFRTN

SEQ ID NO: 204774 - protein, 363 aa, unidentified
MIVIGADTHKSTHALAAVDGGTGEVRGEREITADDEGHRKALIWAHEIDPDVVWALEDCRHVSHHLERALVRSGERVLRVAPRLMGQTRRGEREAGKSDQIDARAVSRAVLREGVEKFPGAHLDERAMEIRLLCDHREDQVAEINRLTNRLRWNLVILDPALEASIPPRKMDFAGQLDRVARRLRGMEPSARVRISKEQVRKIRELSRQARELKRELDILIAAYRPELLAELGCSTITAAILIGQTAGAERFPTDAHFARMAGVAPIPASSGKQERHRLHRGGNRRLNRALHVIAITRGRWDPATKAYLQRKEAEGKTRLEALRCLKRQLARHFHRLLLKPPATATPRTAITACSAIAVPCPT

SEQ ID NO: 204775 - protein, 327 aa, unidentified
MTQKMDVVGIDVSKATLDAYALTSRQARQFANDPAGHQGLVAWLQELGVGVAVFEASGGYERAAAQSLRRAGLVAHVVDPKRVRYYARAAGQLAKTDRIDARMIAAFGAAFLRERPSGIVGGDDPARQDLAELVGTRQVLVDHRTSLQQQADAVTSAIAKKLLLAPLKQLDRQIETSDRQIAAAIARHEPFAALARRLDTVPGLGPVSIAALIAWLPELGQLDRRQLAALVGVAPFADDSGKRTGQRHIQGGRMKLRNILYMATVGAATRHNPVLQARYRRLLENGKKPKVALIACLRTLLTILNAMVAHQQDWNPTRLPATEPVAA

SEQ ID NO: 204776 - protein, 360 aa, unidentified
MEVGQEVVLHPVVGGVDTHKDLHVAAVVDELDRVLGTRCFATTRQGYRQMLAWMRSFGQLRCVGIEATGTYGAGLLRSMQNAGVEVLEVTAPDKPDRRKHGKNDDLDAQNAAHAAFAGKRTVTPRSRDGMIESLRVLKACRKTAVVARRIALQMIQNTIVCAPDGLREALRQMTRMQLVRTLAAWRPDLTDYRNVDSAYRISLKSLGRRYVELHDEIADLDVMIAAIVDELAPNLVARNSIGHAGAAQLLLTAGDNPERLHSEAGFAALCGVSPVPASSGKTTRHRLNRGGDRAANSALHIIAIGRLRTDPRTKAYMAKRVAEGHSKLEVIRCLKRYIAREVFTLISQRQKEINQARITA

SEQ ID NO: 204777 - protein, 345 aa, unidentified
MSKFYEGQQFLGMDLHRRRSVLVRMSETGEHLETTRILNDRDSLAEVMSRAGESPEVVLEATYGWYWAADALAELGATVHLAHPLGVKAFSYRRVKNDQRDAADLADLLRMGRLPHAWIAPPETRELRELVRHRAKLVAMRSQCKAHIHAGLAKNGIWVPMTDLFGVEGNLLLDKVTMPAPYQERIASLRRFIEAFDAEIDLFTILAQRRLTHDAGYTAIQQIPGIGPVLGAVFVAEIGDVHRFGKPAQLTCWAGLTPSHRESDTTVHRGRITKQGSRLVRWAAIESVKMLPKSSHIGAIRDKVADRRGNRNIGAVAAARRQLELVFYGLRDHHIRALHHPPRAA

SEQ ID NO: 204778 - protein, 432 aa, unidentified
MSQFLNDFVVGIDVSSEFSIVAMLAPTGELIRKPFRIDHNPVGFHKLLDILKKEEERLKRKPIYFVESTGIFHLPLFFFLKSNDLKGFVLNPLCVHSTKNFDLRKVKNDNKDSEAIARLAKYQDVKVSMMPEPQILVLRMMTREYYAVSDMLTMMKNRLCTDLYLLFPGFLNVFSGPFGKTALAVLKSYPSPRAIRDADTDVLTLLIAKTSRKGSEWASNKVALLRDCAQLASSMPSEFSMLDTKIKLHIDGIEHMQASLNGIEAQVKLMIKSKEFPAQAKRNIELLDEIPGIGFFTAATLIAEIGDFSLFNSPKALTAFFGLDPSVNQSGKFNGDRNKISKRGTRIGRRILFTVAMASIRRTRNGRAINPVLRDFYASKCVSKKKKVAIVAVMHKLLHYIFAVLRDQKSFEFRKPEDHQSWRENKLQPAAA

SEQ ID NO: 204779 - protein, 372 aa, unidentified
MNYNTVYVGMDVHKESFSLCAYTIEAEKASHYQRTEADYKKILNYLEFLRTIYGDDANFICGYEAGCLGYTLYHQLTANNVKCIILAPTTMLEQRSKKRIKTDKRDAEIIAKCLAQHNYSPVHIPTAKDEETKEFLRMRDDHKLALKKVKQQILAFCLRHNYRYDGNSHWTAAHLKWLKALTPEALYKEILDEYLLTYQTLSDKLERLDKRIEELATQDEYKEAVKKLCCFIGVKTHTALSVLVEVGDFKRFASAQHFASYLGLVPGEDSSGDDQNRLGITKAGNRHVRLLLTEASQCYARGQIGFKSRELKARQSGNTPAVIAYADKANERLRRRYYKMVLNKCKKHNVAKTAIARELACFMWGMMTDNIA

SEQ ID NO: 204780 - protein, 321 aa, unidentified
MAIPLAPFLVGVDVSKATLSLCTGPDASRQELPNQPRAIARWLKTLPGSPVCIAVEATNTFHVELVTQAHRQGHTVYLIDGYRLSRYRDSIGGRAKTDAGDARLLHRYLAHEHQDLRPWSPPPEGYLSLQRLLRRRAAVVKSRVALRQSLAGLPELKAAAEAVFRQISRLEDRLQERILLAIDQVQWGRDRRRCQAIEGVGPLTSAALATTFHRAPFANSDAFIAFIGFDVRARDSGQWHGRRKLSKRGDPEVRRLLYLAAMRACHSPTWRPFYQRCLDRGLAKIQALVILARKLARVAFALLKTQTAYHPRLHKEACAST

SEQ ID NO: 204781 - protein, 351 aa, unidentified
MTILALDLGKFKTVACLYTPGTDEHQFVTVPTNPQAFHDLFVAHQPHLIIIEACSIMGWVVDLAQGLDLTIQVANANDERWSWKRVKRKTDRDDALKLARLSAMNQLHLVHVPSRPIRQWRSLIVQRHRLKHDRVAIKNAIRSLLDTQAIAWPAGAKGWSVQARERLSTMACDLADCPIEQLWRGQLHIHLQQLRSVESLLHQVEMRLNIIAMADDRVRRVMTIPHVHLRTAEVLVAYLDDPDRFRSARQVSCYAGLTPRQHQSGAMNRQGRISKRGPALLRGLLLHVAWGMTRQCDQAKAVFDRVTGGHASKRKKAAVAVGRKVLICAWAMMRDRTDWQPQKMGLAASAV

SEQ ID NO: 204782 - protein, 352 aa, unidentified
MYYVGLDLHKKYITGCVLDSQGAVVAEQRRLPPVLETLLGWLAPVGQPVAVALEATLYWAWLHDRLTAAGYQVAVAHPQQVKLICHARCKTDPVDARKLADLLRTDLLPAIWIPDAATRARRTLLRGRAWVVRTRTRVKARIQAYLAAENERVPVSDLFSRGGRAWLATVALPPEVRQQVDRLVALVAHLDAQIAEQDRGVRELAQATPEAALLQTIPGIGPFGALLLLAEIGTIARFGSSHELAAYAGLVPSTRSSGGKTAHGSVGPAGSAWLKWLFVEAVQTLKRQPGPVRSQYERLLRAKGKPKATVAAARKLCCYVYWMMKEGRSYDDWLRQRQQREVRPIQAVASVA

SEQ ID NO: 204783 - protein, 335 aa, unidentified
MKHYAGLDLSTESTHVCIVDEDGHKLVSVKVESVPGEIAAAMRQAGGVKRAVIETGRMAPAICLGLRELGINVVCIDARQAHQSLKAMKANKTDPHDAAGLAQLARTGFYKEVHVKSPAAHGVRSVITARSHLVEARVRLDNMIRGLCATFGFKPGPGQGRSFITRVMEATCIPGLGEAITALLAVRSQLIEQIKELDAKLRAIASQSQACQILMSIPGVGIQTSAAFAAAVDEAHRFKRSRAAGAYFGLVPRRHQSGELDWTGRITKQGDSMVRKLLYEAANSILTRSRANFALKSWALKISRRRGLKKARVALARRLAVIMHAMLRDGTLFEA

SEQ ID NO: 204784 - protein, 317 aa, unidentified
MVRSAVVGIDVSKAFLDVAWWVPDHAARYANSPQGLAELTRALTQQAPELVVLEATGGYEIAAVEALQAAKIAVAVVNPRQVRDFARASGKLAKTDALDAKVLAWFGATMRPAPLPPIDPSHSAIANLVARRRQVIEMLIAERNRLEHAGAAVRRWIEEHILTLKTQLAQLDAAVALAVEASPSLHRRNEILTSVIGIGRLTAAVLIAELPELGSIGNKQVAALVGVAPFNQDSGNRRGERHIAGGRYSVRCALYMATLVAVRFNPALQSFYRRLRDAGKPAKVALVAAMRKLIIILNALVRDDILWQPNHALQDGC

SEQ ID NO: 204785 - protein, 385 aa, unidentified
MFQFSGSTQAAVDYDSTIIGALELSEKKWVLAVQLPGVSRHSRHALEACGDGLASFVERLKAKCAAAGRKIGRVILTHEAGRDGFWLARFLSRRGIEVHVIQPSSLPVDRRARRAKTDIIDVEMLLRTLMAWLRGEPRVCSMVPIPSEADEEARRAYREREDLTGERRSIVNKIDGILATLGIKAYKALRRDRREQLTSMQQPDGDPIPQKAKARIERLLARLELVLKLIEQVEAARDAVLKKDRPADEAERMIRSLTELRSIGPDFATLLVREAFVRQFRNRRALGGYVGLGGTPFSSGGSEREQGIGKDGNRRLRAAMVELAWMWLRWQPDSALSIWFRARVGAMGGRVKKVMIVALARKLLVALWRYVKDGVIPEGAKMKPA

SEQ ID NO: 204786 - protein, 343 aa, unidentified
MHKLSADGFLSCGIDVSAAQLVVALQSEGEGYLQRSFPNCARGHQALTLWLRKTGRSVRVCLEATGLYSLDLALALHAASGIEVAVLNPKLVNRFAATLCRSKTDPADAQVLAEYARRMPFQLWQPPRAVALELRTITRHVAALTQQHTRERNRLHAASASVAGARCVQQDLKRSLRDLELRIDKLRSAALALIQQDPDLRSRLALLLSMPGIGEVSALNLLGELALLAPGLSVRQWVAHSGLDPAHHQSGVSVQKRSHISRAGNRYLRRALYMPALVAARRDPHLRAFYQALVARHKAKMQALVAVARKMLHAIFGMFRSNCNYDGSRLLPNLEIPTLTALA

SEQ ID NO: 204787 - protein, 338 aa, unidentified
MRYVGLDVHWRQSTICVLDGRGRKLSMQTIRGGWSKVLEELGKTKKPFAICFEASSGYGYLFERLSTIARRVVVAHPGQLRLIFRSKRKNDRVDAEKLAKLLFLDEVPPVHVPSVEVRSWRSMIEHRRKLVAEQTRTKNGIRSLLRSQGIEAPRGLWTRRGLAWLAAVQLATDLDTLQRDIMRERLESIASMIHRVERVLNRKGTAHPGVQLLRTIPGVGPRTGEAVVAYIDKPDRFHSNKAIGCYFGLIPKQDASGRSNRLGHITREGPSLVRSLLVEAAWQGIRRCPEIREVYERIMRDDKQRKKIALVATAHYLIRAMLAMLQTGEVWRYSAEAA

SEQ ID NO: 204788 - protein, 376 aa, unidentified
MSNLRFIGLDVHAETIAVAVAEPDGAVRSLGVIPNRLESIQKLVKRLGPTTQLRVCYEAGPTGYVVYWQLTALGVQCSVVAPTLVPVKAGDRVKTDRRDALKLARSYRAGDLTTVWVPDAAHEALRDLVRAREAAKKDQLRARHRLGKFLLRHGRRPCRPVKAWTPAYLTWVNTAVRFEHPAQEATLLDYVHEVEHAARRIERLEHAIDEAIKTAPVRMRAVIAALQALRGIAQVSAVTIVAEVGELSRFTTPRQLMGYSGAVASEDSSGGRIRRGAITKTGNAHLRRIIIEAAWAYQHRPSVGAALRKRHAPLDAAVIAMAWKAQHRLHARYRSLTARGKSKQSAMTAVGRELLGFIWAIGRTAERPRLGAPVAA

SEQ ID NO: 204789 - protein, 412 aa, unidentified
MEVLYSHCAGLDVHKDTVVACGRHMANGTARREVHTFKTTTKELLALSDWLASQGCTHIAMEATGVYWKPVWHILSDGDFTLVLANAAHVKNVPGRKTDVNDAIWLADLLAHGLIRGSFVPDEQTQEMRTLLRTRKQLVRESSRHIQRLQKTLEDANIKLDSVISDVMGLSGRKMIEALIAGESDPERLAQLAHRRIKATPVMLGEALRGRVTRHHRFLLRLHLQQIDAINAAIEQIDQEVDQLVEPFHTTVLLLTTIPGIDELSASVILAEIGRDMSRFPTAGHLISWAGLCPKNDESAGKRRSTRMRKGAPWLKTTLVQCAQAAARKNGSYLQAQFHRLRARRGAKKAFGALAASILTSVYHMLITGELYHDLGPAHFDRRAKASQTQRLVTRLQNLGYAVQITPLPAAV

SEQ ID NO: 204790 - protein, 365 aa, unidentified
MDSERLVVGVAEARGEVRSLGSIPYTSEGVRGLVKKLGPASRLRICYEAGPHGYGLYWELTALGVHCDVVAPTLVPVKSGDRVKTNRRDAEKLARCYRSGDLTPVWVPDAEHEALRDLVRAREAAKKDQLRARHRLGKFLLRHGLRAAAGVKNWTLKHLLWVRTLHFEHPAQEATFLDYLHEVEHAAERVARLEKAIDQAVEGLPQEMKAMVAGLQALRGIKQVSAVTIVAEVGPLSRFERPKQLMGYSGMVSSEDSTGNRVRRFGITKTGNAHLRRVAGEAAWAYQYRPAMSAALKKRQEGLSEEVKEIAWKAQHRLCTRYRRLLARGKIKQQVTTAVGRELLGFIWAIGVQVEKEQQRRSRAA

SEQ ID NO: 204791 - protein, 373 aa, unidentified
MPKYSTAFGMDVHLRSTTVCALDADTGEAVTRRFPGNPWGEIAGWMDGFPGPSLAAYESGYLGFAPQRELAGLGVECVVAAVSKIPRSAADSASKNDRNDAARMAKAILAHDISPVWVPSPEVEGIRDLAGAYDGATARLATAKQRLLAFLAKRGFVYGGTTPAGNPRKYWTYDFLRWLDKVRPEDDGGVRTLAALRNEVEAAAEARADLLSEYRAAADASPIAAEVAALQSIKGCAFALAAAFSAEVGDFTRFRSGRQVTAYFGLAPSQRSSGDSVRLGGISGAGNALVRKLAVEGSWCYAAARHQPKLMPRDTGVPLEIRMHGRKGSERLLRRREEMLARGMPAAKANAATAAELVRWLWALGMMCREGAE

SEQ ID NO: 204792 - protein, 383 aa, unidentified
MQVISPRCAGLDVHKQTVVACVRIAGNGPPLQEVRTFATTTSGLLALCDWLDSFGVEHVAMEATGVYWKPVWHILEGHFELVLANAAHVKNVPGRKTDVNDSMWLADLLAHGLIRASFVPPAAVQELRTLTRTRKQFVRERSAHAQRIEKVLEDANLKLSVVLSDILGKSGRAVLQALIDGQTDPERLASCISTRVKASRAELLEALRGHLSTHHRFMLRLHLGHIDALDKAVSDIEQEVGLGLEPFRQATKLLSTIPGLSEVSANVVVAEIGIDMSRFATPAHLLSWACLCPRNDESAGKRRSKGGYLQAQFHRLRARRGAKKAIIGVAASMLTAAWHMLRDGTEWHDLGAAHFDRADAQKTANRLIKRLQQIGFAVQVSPA

SEQ ID NO: 204793 - protein, 373 aa, unidentified
MCKVIMIGCDLHSKTMLLKIGQGRSKPETQLVKNTPSGRAKMIQGLKKRAAAAGGTRILFAYEASGQGFGLYDELTDAGIECHVLAPTKIARSQRHASQKTDEKDAQQLLELLRGHVLAGNELPSVWVPDATTRDDRELIRTRLDVGEKITTIKLQIQSLLKRNHVARHKSTGKGWTLGFRHWLQHELCESAASPLGRNSRSTLTSLIRQLHFLEKEERRLDELVGALAAHPRYAAAFEEMVSLCGVGCLTALVFLTELGDLSRFANRRQLAAYLGLVPRSFESGDANDRKGHITRQGSSRVRKMLCQATWVRVRWHEKEQQVYQRIVQKNPKKKKIAVVASMRRLAVRMWHRGKAFQGKPARRMILMGAAPG

SEQ ID NO: 204794 - protein, 348 aa, unidentified
MTLVGCDLHSRKQPVAVLDTTTGEVLEQELAHDGDAVERFYRALRPPVTIGIETTGYTQWFHARMHRLGHTVLVGEAGKIRAMVVRKTKTDRRDARHLLDLLKHDRFPTVWMPDPDTRDRRALVAHRVRLVRMRTMVKNGLPAITLNQRLALRSALWTQRGLAQLRRLARPPHTQRRRDDSLELLAWINVRIDQLDAQLAAVVDADPRARRLLTHPGVGPLTALTTVLVLGPVTRFPDGKHVVSYVGLAPVINASADKQHLGPITKQGNALLRWVLGQAAPQAARADDELRRRYFAVLHRRGRPKAKVALARKLLVRLYVMLRDQIDYEEFRRRGRAARASRAPVTVT

SEQ ID NO: 204795 - protein, 393 aa, unidentified
MKNRNSKTKSDRAAKPGKARGPIQRDAKEVMAELVAKLSETLASRPALASAGGKREAGVAGPNRDRLTAGVDLGDQWSNYCILGLEGETLAEGQLRTTQQDFAEFFRSMAAARVVMEVGTHSAWAREVVAGCGHEVLVANPRQMDGPKRRRRKNDRIDAHKLARLGRVDPQSLFAIEHRSPEVRQDLVALRARDALVAVRTELINATRGLVKTMGGRLPKCSSDSFPHKVEEALPAEVREVLLPLVRLVETLSGCIAGYDQKIEKLATEKYADTELLRQVKGVGPLTSLAYVLTLEDPKRFPKSRDVGPYLGLVPRQEDSGECQPQLRITKAGDVMLRGSWWEARTISWVRSGRIPTYGVTGYGCVSEAGRMRKSEPPWRWRGSWPCCCTGCG

SEQ ID NO: 204796 - protein, 376 aa, unidentified
MGTPSAQTLDDVGVRKMFQELEEVPMTMVGGLDVHRQQITFDYVDDDGLVHWGQIRPATRKTLRGWLAEHCPDGDGEFALEGCTGWRYVSEELAAAGLGVHLGDPAEIAVLRGPKKRAKTDRADAKLLRTLLLEGRFPESWIPPAHVAEIRSLGRLYYTLMEERRAWQQRIHAQLFHQGCPPIKALLSASGRDALARAPLSAAGRQYVDTALRRIDELSAEIEPLRTQLANFARRQQGCQALQRHYGIGWLCAAIIWAEIGDTRRFTSSDQLVRFAGLDITVYSSDSKRSPGHLSRQGSPELRWAAFEAAKCAARRGSPDYAYYHRQAAKHDGHNGKNPTLAVERKILRRCYHTLRDLGDAALALPDTRPQQEVAA

SEQ ID NO: 204797 - protein, 352 aa, unidentified
MSHKSAPSTAVGTIGIDLGKNSFHLVGLDQRGAAVLQLKRSRAQLERRLANIPSCLIGMEACSGAHYIGRQLAALGHDVRLIPAQYVKPFLKGHKNDYRDAEAIAEAVQRPTMHFVAIKTPEQMDLLALHRVRSRLVGQRTGVINQIRGFLIERGITVRQGVVPLRKALPDILSSYIDALSPRMVNLITELVQDWRRLDERITTVSAEIESLAEQDEGCQRVMTVPGVGPIISSAVVAAIGNGAGFTQGRDFGAWLGLVPKQESTGDRTILGKISKRGNKYLRTLFVQAAHVVLARRPRAAMRGLWPWIEQASKRLHRNMLAIALANKLARIVWAVLSRGREYQPRIAPHAV

SEQ ID NO: 204798 - protein, 320 aa, unidentified
MMAQNDLVVVGIDVAKDKVDACIRALSLRQTFPSTAEGRRKLISWLRKHKVTAAVMEASGGYEREWAKALREKAVEVRIVDPKRVRNFARSAGRLAKNDAIDAEMIAWFAETFGEASSQAHDAAREKLVQIVNARCALIDLQTKLQNREEHPAPEPVQKMQARLLRQLAREIAGLEAAIAAMIKATAHFAELAEIIESVPGLAEITSAGLIAAMPELGQVSNQAIAALLGVAPYDDDSGKRRGERQIKGGRRKVRNLFYMACLGAATRHNPVLKAFYGRLIAKGKERKVALVACMRKLIVILNTMIARREKWDASRYAVS

SEQ ID NO: 204799 - protein, 360 aa, unidentified
MKIVGCDFHPSWQQVAVFDPETGEIAELKLLNGDGEAERFYRELEAPALIGIEACGNSQWFIELAEQLGHVVWVGDAAQIRASYVRKQKTDRRDAGHILKLLMESRFPRLWTPTAAQRDLRQLLIHRHKLVEIRTRVKNGLQHLALNRGFPKQSSRLCGVRGRAYMEKLPLTGWTARRREDLLKLLAELDKHLGELDDAVQRAADEHPQARLLMTQPGVGPITSLAFVLTIGDVSRFKHSNQVASYLGLIPREHSSGGKQRLGSISKQGNRFMRQLLVESVQTVNRLDEGFRKQYAARCHHKAKGVAKVAAARKLAVRLYWMLRQNVGYPEIARIESSPRAALRGESHLETVNGRSRIQQ

SEQ ID NO: 204800 - protein, 411 aa, unidentified
MEQIHDRVAGLDVHRDTVAVCVRTPGPRGGAQTEKARFDTTTGGLAALAEWLAGHAVALAAMEATGVYWKPVYYALEGRFELWLCNAHHVKNVPGRKTDMSDAGWLADVAAHGMVRPSFVPPPPIRELRELTRYRKTQIDVRAAEIARLEKVLQDAGIKLTSVASKVLTQSGRAMIEALIAGQRDPVALAELAKGKLRPKIPQLTAALRGHFGAHHAIIAARILAHLDFLDETIGALDARIAARVAGRYQSAARLLADVPGLERRSVEVIIAETGADMSRFPSPAHLASWAGLCPGNHESAGKRRRVATTPGNQWLRRTLIESARAAARTKDSYFGAQYRQIARRRGPNKAAVAVAHSLLDVIWHLLTTGEVFTDLGADYFISRQDKEHQARRLMRQLEKLGFTVQLTDAG

SEQ ID NO: 204801 - protein, 356 aa, unidentified
MSHDVKYIGMDVHKEAIVIAVQNESGKLVMETIVETKASSILQFIHGLRGELHVTWEEGTWAAWLYDLLQPQVQHIVVCNPRRNALLKEGSKSDKVDAQKLADLLRTGMLRPVYHGEHGLRTLRELARSYQTIGKDLTRVMNRLKAVYRAWGIACGGPQVYAPRYREEWLNKLPQAGVRRRAELLYEQLDGLQILRRNLRPEFLAESRKHKAAKLLRQIPSIGPIRAARLIALMQTPHRFRSKRQLWTYSGLGIETHDSAQYRYVGGQVQRSKKPQQIRGLNQNHNHEMKEIFKGAATRASCATGPFRDFYAALLTNGMKPEMARLTLARKIAAITLTLWKKEERFDAEQLKTQAA

SEQ ID NO: 204802 - protein, 369 aa, unidentified
MAKSITYIGLDVHKDTIAVALAEASSRGEVRERGKIPNSPAALKALAVKLASTGRDLRFCYEAGPCGYGIQRQLAGMGHECAVVAPSLIPRKPGERIKTDRRDAINLAKLHRAGELTAVWVPDQAHEAIRDLVRARQAAVRTLRQARQQLSGFLLRHGHHYHRPAWTQLHRRWLASLKFEQPGHHIVLEDCIATVEAATARRDRLETHIEAALPAWSLASVVQALQALRGVGLVAAATLVAELGDITRFTNPRQLMAYLGLVPSEHSSGGTRRQGGITKAGNGAARRMLIEAAWSYRFPARISREQLLRQERLAKPIRDIAWKAQERLCRRYRKLARAGKLPTVITAAVARELAGFIWAIAKQAQPTAP

SEQ ID NO: 204803 - protein, 466 aa, unidentified
MENNYILYVGMDSSKGKADAAILKVSDRRSVKPKFLRKKLSFKFVKSEVTSFLETVRSYSDDNCTSICFALEVTGIYSTNVYNFIKDNLNDNESIKFLNTDFVNQWRNAHNIAKSDPLDAQTISTIIGTDSDVQYVNDNIFKNKNGYQDLKALVHRHYQIKKIYSQEINRLIAQCDCLFPELQYVFEPKSAAFIAVLSSYPTTHDIINASRLEVFNVVYEATKHRCSMDKIDKLFDLCHDTLVPDNISSYGRSIILDLVENIKNIKGQLKMIERYIRDVASLNPAYKLLLTITGCGPLTAATVIAETGDIKRFKNADCFVSYSGTSPRNKRSGTSVETMGKISKKGSRYLRHAIYMIAEFARRHNPVLKHQFERIKNGNKKRHKLANIAIANKIARYIYSIMKNESGFVIFHEHIMRLPEETQNTFFNSISLDFPKNTRKQIYQYSDINGEVHKFVYTKLEETMII

SEQ ID NO: 204804 - protein, 313 aa, unidentified
MSENNTSIIYAGLDIHKATLQLHFANRDDELPNTPAGHRKLLALLRSHPNPHVICEASGGYERPVVAELHATDIPVSVLNPAQARHFARALGQRAKTDPLDAQLLSRCGEALRPEPTPPRSQAQLHLVELVRYRQQLMEKLIAERQQAEMIQYPCLRRQSNALVRRLETDLAKVDDLLAELRDDSKELAAKAQALTSVIGVGDQTAFSLLAEMPELGTLNRRQAAALAGLAPHPRQSGQWIGKSSIGGGRHQVRRAIYMAALCASRLHPSLSAFYKRLRANGKPSKVALTAVMRKLLILLNLVLKNLDFPLAR

SEQ ID NO: 204805 - protein, 369 aa, unidentified
MRKNSATRSPRRKVNRPSERMTIGMDLGDKVSRYCVLNEVGEVTLERSVPTTKKGMLQIFSAVQRCRIAIEVGTHSPWVSRLLSGLGHEMIVANARQVKLISASSRKDDKLDARMLARLARVDPKLLSPIRHRSAEAQADLNLIRVRAALVDGRTALVNTARGLCKAAGERLPQCDTDQMDVERMAEVPAALQEVLRPLIESVESMTEKIHECDQKLEQIARERYPETRLLKQVKGVGTLIALTLVLTLEDKSRFARSRDVGCYVGLRPKRSESGESQPQLRITKEGDVYLRKMLVQGAHYILGHRGPDTDLKRWGQKLAGRGGKNAKKRAIVAVARKLGVLLHRLWVTGEVYEPLRQAKEAATQKKAA

SEQ ID NO: 204806 - protein, 344 aa, unidentified
MGEVSTIGLDIAKSVFQVHGVDVAGAVVIRKRISRAKMLDYFGELPPCLVGIEACPSAHHWGRELQALGHTVRLIPPSYVKAYLKRSKNDANDAAAICEAVTRPSMRFVPIKTKEQQAALMLHRTRQLLVRQRTMLSNALRGHLAELGIVSAKGRNGTGDLLRIIADGADNRISPAIRGILNVLARQYSAIGTEIVSIDKSIMTLHRACEASRRLAEIPGIGPIGATALVAEIGDWKTFSSGRSLAAWIGLVPKQHTTGGKDRLGSITKQGNRYLRWLLIVGAMAVIRYARKHGTQKRPWLGRLMERRPTKVAAVALANKIARMAWAIMVRGERYKEPKLLLAA

SEQ ID NO: 204807 - protein, 356 aa, unidentified
MESMPAPSAPVTVGVDTHLETHVAAVVDQTGRLLGTQGFSASTRGYVALVTWAERFGPVARVGVEGTGTFGAGLARFVRAYGLQVVEVARPDRSTRRQHGKSDPIDAQAAARATLAGVATVTPKTREGQVEMIRVLRVARRGAMKARVAAAEQLYGVVCSAPEELRQPLLGLTTKALVRACAALRPGPLTSTTAATKTTLRTLARRWQQLQAELDQLDLQLQELVTSAAPALLALPGVGVETAGQLLVTAGDNPQRLRSEAAFAHLCGAAPIPASSGRTDRHRLNRGGDRRANNALWRIALVRMRCHPPTRAYVERRTKQGLSKLDILRCLKRYIAREIYHHLTSPPPTAATACPK

SEQ ID NO: 204808 - protein, 337 aa, unidentified
MMYSGIDLHSNNSVVAVIDDADRVVAQKRLPNDLAKIVGFLSRWKDELAGVVVESTYNWYWLIDGLQDAGFHVRLANTVAIKQYDGLKHSGDETDAQHLAHLLRLGILPTGTILPREHRAVRDLARKRMQLVRSCTTHVLAVENIMARQLGGRMTSNQIKRLTVDAIDKLPLAADVGLAVKANVAVIAALQAQIELLEKRLQERVKPQPEYGLLISVPGIGQTLATVIFLETGPIDRFAGVGNYASYARCVDSVHTSNRKKKGEGNVKNGNKYLAWAYVEAANFARRFCAEAKRFHERKKAKTNNVVATKALAHKLARACYHILKEGRPFDATRCFA

SEQ ID NO: 204809 - protein, 346 aa, unidentified
METRKIIADYYCGVDLHAKKNYICVLDKDGDIMLKRNIKNNFQIFKQNIQPFLPNLAIGCESTYNYYWLADGCHNHGLRFHLGHALYMKAISGHKKKNDPLDAETIANLLRTSFFPESFPYPEEMRATRDLLRRRHRLVRLRAEAYTHIQLVCHQYAITDVTGADVRNKDARRLLLGRFLTGDVRTNIVTDVQLIELLDPIIDELEQNILKQAKQHNYRDYALLLSTPGIGTMIALNILYEIHDIKRFKTVQKFSSYCRVVKCERSSAGKRKGSKNQKIGNPYLKWAMSEIIVNAQTNEEIKKYAHKLESKYGRRRARAQIAHKFAVAIYFMLKHSEPFDLERFLK

SEQ ID NO: 204810 - protein, 338 aa, unidentified
MHTTTLGIDVAKNVFQLHGVDARGRAVLSRRVKRQQLLDTVANLPACVIGMEACGSAQHWGRAFEQLGHTVKLMHPKYVKPYVKTNKNDGRDAEAICEAVGRPTMRFVSIKTVEQADMQALHRTRSLFIKHRTAVINQIRGLLAEYGLVIAQSPEKVRPAVVRFLDDAASGLTAFARDTFSELSEQLTELDSRIERVTHRIERVYRMHPVCQKLAAVPGIGPLTATALVATVGRPQAFQNGRHLAAWLGLVPRQYSSGGKERLGGISKRGSRYVRTLLIHGARAVVQRAARRTDTQGQWLCALMRRKGTNVAAVALANKNARVIWALLAHDEAYRPPA

SEQ ID NO: 204811 - protein, 410 aa, unidentified
MEVLHPRCCGLDVHKETVVACVRRVIDGKTVKEVRTFSTTTANLIALSEWLAEAKCTHVAMEATGVYWKPVWHILSDENFELVLANAAHIKNVPGRKTDVKDADWISDLLAHGLIRSSFVPDPQTQEMRTFLRTRKQFVREKSSHILRIQKTLEDANIKLDSVITDIMGASGRKMIETLIAGEKDPAKLARLADPRVKASQESLREALRGRVTNSHRFLLRLHLGHIDAIDAAIAEVDREVEAGIAPFRTAVQQVTTTPGIKSLAARTILSEIGTDMSRFPTSGHLISWACICPRNDESAGKRRSTRIRKGSPWLKTTLVQCAWAATRTKGTYLHAQFHRIRARRGPKKAILAIAASILTAIYHMLKDGTLYQDPGPNCLNARNKERQKNRLIKRLADLGYVVELVPQAS

SEQ ID NO: 204812 - protein, 343 aa, unidentified
MGDVITIGLDIAKSVFQIHGVDADGAVVIRKRVSRAKVLEFFAAVPRCLVGIEACPSAHYWSRKLEVLGHTVRLMPPSYVKAYLKRSKNDANDAAAICEAVTRPSMRFVSTKSEQQQSGLMLHHSRRLLVRQRTMLSNAIRGHMAELGIISAKGRNGTAELLEIIANAKDNCIPAAARFSLEVLARQYIAIATEIGVLEKRIHAWHRSCEESRRLEEIPGVGPIVATALIAEVGDWKAFASGRSLAAWIGLVPKQHSTGGKERLGGISKQGNRYLRWLLVAGAMAVIRYARRHGTKRLWLTRMMERRPIKVAAVALANKIARMAWAIIVRGERFREPRLLLAA

SEQ ID NO: 204813 - protein, 350 aa, unidentified
MIVGIDVHKHTHAVALIDEHGGLIGALKIANSPKGYRQLIDWLVDRQAAAAVIGVESPGSYGRCLVAALAGAGFEVLQVPAWRTHRERHRRGPGKTDHGDALSIAKVVLNDRQDLGPAEEPELVRALGMLELQRRRFVHDRTQAIQRLRSDWTQLDPVAEAGVVRCDRIRELRKLKRIQLGDSLAQRTAARCIRELARDIDDLNHRIAELDTEIADLLTEHGSPLEDLHGVGSNLAATIIAQAGDVRRFRNASAFARFCGAAPIPCGSGQTSGRHRLHRGGNRQLNAALYRIAIVQQRHHPKAKAYLARKIAEGKTPREARRALKRHLANVLYRRLIAWANTTPAMNNLT

SEQ ID NO: 204814 - protein, 417 aa, unidentified
MTETFQLFVGIDWATQAHQVCALNPHGEVLGERRVMHSGPALSDLITWLLQLAGSSPAAIAIAIEVPRGPVVETLLERGLTVFSLNPKQLDRFRDRYFPTGAKDDRRDAFVLAQALRTDRPCFQAVRSDDPHLLRLRDLSRLEEELQSSFHRYSCQLREQLQRYYPQLLGLCPSADEPWLWALLERAPTPAHAKRLSAARIEKLLRAHRIRRWKPSEVVEQLRAPGFRLAPGTAEAASEHALLLLPPLRLCTQQRAQLAVRIQAVLDQLATRSDADAHTHQHRDVTLLLSLPGVGRGVAATMLAEASEALAARDYHALRAYAGIAPVTRQSGKRAVVLMRRGCNHRLRNATYHWARVSVQHDPVSRQHYQRLRARGHAHGRALRGVADRLLAVLCAMLRSQTLFDPKRRHRSLPCAA

SEQ ID NO: 204815 - protein, 410 aa, unidentified
MKLFHEKCAGLDVHKETVVACVRVHQKGRVSHEVRTFGTTTQALLELADWLDEVGCTHAVMESTGVYWKPVWHVLSGGALELTLANADHVRNVPGRKTDVKDAVWLADLLAHGLTRSSFVPPPAIEELRDLTRTRRQLVRQRVQHVQRIQKTLESANVKLESVISDVLGVSGRAMVEAIAAGETNPERLAGLAHARLQTPREKLVAALHGKVTAHHRFMLQAHLEQVDATNKTIEAIDKEVERALEPFRDRVKLLKTMPGISDQVARTLVAEIGVDMTVFPSAAHLVSWAGLCPELRESAGKRRSSRTRKGAPWLKPVLVQCAWAAARKKDSYFKAQFLRLRTRRGPKKAVVAVAASMLTAAYFMLRDGTAFEDLGSGHFDTKDKTRATRALVRRLEGLGYAVELRDQAA

SEQ ID NO: 204816 - protein, 317 aa, unidentified
MKNTCSPKPLNRIDAGVDVSKATLDFAVDGNLFQISNTATEIRKKLSELSHKYGEALRVSCESTGRYGHTLIAICLELGIQICQLNPSEVREFAKSQKLLAKTDRIDAKIIAQFSSYSNPRPLGAEWKGRQEAACIHSRMRALVAIVAAQKASLDHFPDKSVHREILSTIRTLDLKIARYEKRLLEIVAENAASQELYNTLIKEPGVGPRTALALLVHLPELGSLDRSEAAALAGIAPMNRDSGKFRGKRYIQGGRKLLRCALYSAAVVAARFNPLFKPFYQRLRESGKPAKVAYIAVARKLLIRLNTLAKNRPCEI

SEQ ID NO: 204817 - protein, 323 aa, unidentified
MNKGIKYFGIDISHLVFDVTDSDGNYYQFKNNPIGFKKFIKLLDIDSHCVMEATGYYHYQMAYYLLESGIKVSVENPLAVKRFIQMKLSKIKTDKSDSKLICEYAKQVELKLWQGNSKHQTERLQMTRLLSVYTKQSTMLKNKLHGESVLGNPSKAVVISLKRSLKQVQKEIKTLEEKLMILVKQVHQDVLTRLKSIPGIGNKTALMLVVLTDGFERFTSGNELCSYAGLTPVIRKSGSSVNGRSRISKIGNQKLLNLLFMCSFNACKYNKACRELYERIVAKGKSKKLALIAVCNKLLKQAFAIAKSGLTYDDSYRSILVKN

SEQ ID NO: 204818 - protein, 339 aa, unidentified
MNNHSLIAIDLAKNVFQVCTINPNNRVQMNKSFNRKTLSEFMIQQASTTVAMEACYSSHYWARLFESYGHQVKLLPAQHVKPFVRGNKNDHNDALAIAEAAQRPDIKAVPIKTIAQQDIQTLHRLRERCVSQRTSLSNQTRGLLSEYGIIFPKGVKAFKQTLMNLLDPEDTQLSTAIKLQIQYVSDEFNRMSLRLKELNQTLAQIARDNPHCTRLMSVPGIGYVNATALYSAIGNGSQFKNARELSVWLGITPKQFASGNKQVMAGITKRGNRYLRKQLIHGARAMMIRCKKHDDHLSHWLQSIVIRRGPNKACVALANKMARLCWTLLQKNQMYNPQQ

SEQ ID NO: 204819 - protein, 315 aa, unidentified
MRSTVAQSVGVDISKDTLDVAIHPGGESFRITNNPEGHRALIKRLKGFDIARIVFEATGAYHRLFQQALVEAGLPWVKVNPCQARRFAQATGKLAKTDRCDALMLARMGAALDLETRAPASKTVEAMRELVNARDALVKDRVAALNRQAIAVSPLIKRQLAQRLRQIDGQIAVIDRRLKTPRNADSDLCQRFDVLTSIPGVGEVTANVLVVETPELGRLDHAQAASLVGLAPVPRDSGQTHGKRSIRGGRPRARQALYMPALNAIRLNPEFKAKYEAMVKAGKPAKVAIVAIMRKLLILANALIRDRRKWAPAKP

SEQ ID NO: 204820 - protein, 370 aa, unidentified
MREYNTYVGLDVHKDSISIAIADESRAGEVRYYGSTGGDLVSLDKVVKKLSSHGGELHFVYEAGPCGYGIYRHLSRQGLSCTVVAPSMIPKRPGDRIKNDRRDAESLARLHRSGELTAIYVPREDDEAMRDLTRAREDAVKAQRISRQELGAFLLRHGLRYSGKSHWTSIHKRWFAEIKMGHPGQQITLQEYINAEKENGERVDRLTEQIRQLIGSWRMEPVVKALQAMRGISLIVSATTVAEIGDMSRFANPRELMAYLGLNPSEHSSGDKIKRGRITKTGNGHVRRSLIEAAQAYAHPARISRRLVGRQESLPKSIRDIAWKAQLRLCGRFTRLIARGKNRNTAITAIARELCGFIWAMAKEVPLQSA

SEQ ID NO: 204821 - protein, 443 aa, unidentified
MTRLVKILLNREVSKMNCNTQNAKIASITEKTLIVGIDVGSETHYARAFDWRNYEYSKKPLEFSNTEAGFLTFKAWVEDIAEKHGKTAVIPGMEPTGHYWFALGKFLQDNGMKPVHVNPHHVKKSKELDDNNPNKNDRKDPKTIAALVNEGRFSYPYIPTGIYAEIRSLSNLRFQTQEELTRIKNRIARWFSIYFPEYKDVYGDLKAVSGRMVLKVAPLPEDIRKLGAEGVNRIWRDAKLRGAGMKRAKTLVSAAEHSVGSKEAPEAARIELKNLLNDMDVYASRLEELLKGIEEKLKEIPYVDKLMEIKGIGLVTVGGFIAEVGDIGRFDNPKQLQKLAGYAIVANDSGKHNGESRISYRGRKRLRYVLYEAAISLIGKNAEFREIHEYYRTRNANPLKKMQSVVAVACKILRIFYTILTKGVDYDAEKLMSDIRRPQMQAA

SEQ ID NO: 204822 - protein, 339 aa, unidentified
MKLYGAIDLHSTNSVVTVIDEQDQVVYQKRLDNDLTVILKQLAPYRSSLEGIAVESTYNWYWLVDGLMEAEYRAHLVNTAAVQQYEGLKYTDDHSDARWLAHLLRLGILPQGYIYPKEQRAVRDLLRKRSQLVRQRTANLLSIQNLVTRNTGSSISSNRIKVLRVEDVGSLLGNADQVLAAQSNLWVLRCLEEQIGKLERGVKERVKLRPQFRYLKTVHGIGEILALTIMLETGEIKRFAGVGNFASYCRCVGSEKLSNGKRKGSGNTKNGNKYLAWAFVEAANFAVRFNPQIRRFYQRKKAKTNGIVAIKAVAHKLARACYYIMRHEVPFDVARAFAG

SEQ ID NO: 204823 - protein, 421 aa, unidentified
MTQPYGNTGGVVLVAIDVAKKQNAVLIRLPDGTRKKLTVTNNLADYRELSNYLKKLEVPCKIGFEATGNYHRALAYYLQQRGFDLELISSVAASRTREAMFNSWDKNDPKDAQVILHMLQTGLTQTYHDPLVHRINDIQELSKTYCQVSLRKTRVQHSIMTHYLPLYFPEASKYFHTSRAEWFTSLLMTFPNPASVLKYSREGFFKAAQTVSGRKVNKAAWLKDFYETARESIGLPVPEDSEAVRMFRLVLQEHQDLCRMRRAIEARAELYLKDNADYLRLRTIPGIGAVIALIILAEAGDLRRFSHYKKFLKYCGLNLSTQQSGGFRGMSKLSKHGNSRLRYAFWIAGTSAIRMRENTFRKKFENYIKTDPQNPDLKRKAYTAVAAKIARVAYGLIKSGRDYRCYHESSIPSGIILSVGR

SEQ ID NO: 204824 - protein, 319 aa, unidentified
MRKHSIICAGIDTGKRKLDVALDGCPDEQLQVPNSEEGYQRLSAWLRQRKVKRVGIEASGGYEQAVVCRLRREGFSVVVFQPAQVRAYAKFHLQRAKNDKIDAALIAACTAAVRKLHAAPDPRLVRLAEHQTLIDQIVDQISRIKNYLESCRDPRLRRFWQDEIKRFRGLFKTELKALVAAIRRHRDLSERLDLIASVDGIALRTATAILVRLPEIGRISREQAAALAGLAPYDNDSGERDGARHIAGGRQRLRNSLYGAAFAASFHWNAELIELYKRLIAAGKEHKVALVACTRKLLIFANAVVARGTPWESRAATTR

SEQ ID NO: 204825 - protein, 405 aa, unidentified
MAVVMIGVDPHKGSHTAVAVSAGEVLLGQVRVRSSAAQAGRLLAWAESWPERTWAVEGAGGLGHLLAQELVAAGERVLDVQPKLAARVRLLASGAVNKNDPNDARSVAIVALRSSSCPLVRADDHASVLKIWAKRHRDLSRTRNQVACRLHAALCELIPGGISKEIYAAHAARLLDQAEPSGAVQQARLELAAELLSDLRRVDDLLRDTKKKLTATLRASGTSLTEAFGIGPVIAATVIGDVPDVSRFRSRDRFAAYNGTAPIEVSSGNRVIHRLSRRGNRRLNHAIHMAAVTQIRHPHSTGRVYYDKKRAEGKTGKEALRALKRQVSDTIYQRLKEDAARAAISSAQDPGGQPGNDSVASAAGLHPEHQLFGQATPGPDHTLRSNPPARNKITPRTRKKAARTT

SEQ ID NO: 204826 - protein, 429 aa, unidentified
MRTESIPGARGPVFCGVDTHADSHWLCVLDWRGRRVLSRRFPADAAGYEALAGAIAAAGEPACVAMEGTSSYGAGLTRHLASLGMPVREALSPARTQRRRPGQGKCDESDAERAARAAMSGSKLGTPKSQDGWVDGVRCMLAARSGAVKARTSAINTARSLLTTAPEGLRSRFRGMGGPRLMEELPSVRAEGALGAALGALADLWAAARDAALDMERAIEASLEENCPALLAMYGCGPVSAAKLAVAAGDNPGRLRSEASFAAICGACPIPASSGKTVRHRLNRGGDRQANSALHEIARQRVMRDPETAEYAERARARGKSDREVMRCLKRYVAREAYRALMRPHEIRRPEDASELVAARRAAKVSQVRAASILGTSEKYISMLERGQRELKPIRRAYEAWVEAGLPLDWDRQAFEAERKMDSKKHLAK

SEQ ID NO: 204827 - protein, 397 aa, unidentified
MIAVGIDVSKSKSTVAVIDSNGVVLASPYTIAHTQPELHALAKYLKELKEPVTILMEYTGHYHYPVLKQLQSEGFPVCLINPYQMKKYGDTEIHKAKTDKKDALRIATYALEKSYKLVPYSSMEQKYEDLKFLSRQYEQRISFVAKLKVQLLDLLDQTMPGITKQLSLTSRNPEKCALLLFIKRFKSFDEIQRMGKTRFLSSYETMTKKTSDRYAAQKGLAIYELAKDSITTRGDDSYIWLSQTQCVDLLSAAQNAADEIILKMQNIAQTIPEYAVLRAMHGVGDRLGPIILAEIGDIRRFHSGKALNSYAGNDAPPYQSGQFESRNRHISKRGSSALRKACYEVMQALKLTKPQDDPVYLFMLKKEQEGKPYNVAKMAGVNKFLRIYYAKAMELYK

SEQ ID NO: 204828 - protein, 438 aa, unidentified
MNKLISKKTVIESNQYVKRNNMEQKFGSYLYCLMKYCVESPIVSIDVSNGNSHYMCFIKNNKRFGKVKKIDHDIEGFKRLLEDIQKLEAETNEKVCAVFEATGVYTKPLERFLSKNSIKTYIINPLESARKRKEEIHNKKTDKLDPISISKVYYDKEEMMELKKKDETYNWLRKKNRLYEDQLNHLRKYKVTFQNQLSICFPGYLDLFKNGYSDIPMTILKKYPHPDLLKNKKAETVARYLEKNTCHTHKVSLEYALKIIEFAKKTYPGCEKDNVEVEIFKILLDKVIETQRECEKTLNEMITVASTLEEYRYISSIDGIGPNLAARIIAEIGDIEEFKSREALVAYAGLDPHIYQSGDQDGKHLKISKKGNKYLRCLLFLAVGCSIRGAKDNPVNRFYQKKKQQSNPLNSKAAKTACTAKLLKIIYGICKNKTTYER

SEQ ID NO: 204829 - protein, 316 aa, unidentified
MTASLLFAGIDVAKATLDIAVRPSAQTWQVIYDDAHVEALVTQLNDLSPTLIVVEATGGLERPLVVALLTAGLPVVVINPRLARDFAKATGRLAKTDRIDARVLAHYGEAIRPSCRPLPDADMQQLRAMVDRRRQLVDMMTAEQSRLSCSPAHIQDSIECHIDWLRQQIASLDDNLESMLQNSPLWREHDAILQSVPGVGPIVSHTLMVHVPELGHLNRKQIAALVGVAPFNRDSGAYRGRRSIWGGRAAVRAVLYMGALVATRHNPAIREFYQRLLAAGKSKKVALTACMRKLLTILNAMMKHQSRWQPRGAASV

SEQ ID NO: 204830 - protein, 428 aa, unidentified
MDFEVKHLICAGLDVHKKTVVAAVCITDPVTLEATYKVKSFSTNNSQIAAMRDWLLSYNCLHVCMESTGKYWIPVFNILEPHMHVILTHPKYVKAIKGKKTDKRDAKWIANLFRFDIVKASFIPPADIRALRELSRYRLKLSYMRSAEKNRYQNSMTISRIRIDCVLTDPFGKTASSIMNYLLSDVPFDEKECAKLIHGGIKVSNEEIFDSIRGFEILSEQRFKMSHAKQHMELLSSYMDEIETELFRLSRPYDEVIKRISRIAGFTERSALFVISEIGADMGVFESDKHLCSWAGLTPANNESANKKKSTRCSKAGQYLKPLLIQCALAAVKSRKNPYYAIKYNRLAKRRGRKKAIIAIARMMLTSIYHMILNNEEWKPDDYEAIIHPSKPEKVALILDNVIQFLGEQGADPETLKLLQQQCAVHSG

SEQ ID NO: 204831 - protein, 357 aa, unidentified
MISAAIERCAGIDVHKKFLAVCVMVGPLEGEPRIEKRRYGTTVAELNDLCEWLRSQGVTHVAMESTGSYWKPVFNVLEEAVRVYLANPQEVKNRKGHKTDDKDGWWLAHLLRHAMIQPSFIPPRAIRELRDLTRRRKRLLGNSTSEKNRVQKILEDANVKLGNVLSDVFGASGQLMLDALLEGKATPEQVAQLAQRKAKKKIPQIIAALEGHQMSAHHRQLIRYSLDHLQFLEEQILKLDNDIAAKIRAAQLEPQWQLLQTVPAIRETSAAAILAETGGDMTTFPSVKHLSSWAGLCPGNNRTAGKNKSSHTTGGNPWLRSSLVECSWAATVKRNCFLREKFWRIVTKTRDHKRGLP

SEQ ID NO: 204832 - protein, 403 aa, unidentified
MAEIFAGLDWASRLHAVCVIDAHGSICRQWEVSHDATGLRELMRALRALHVVRIAIERPSGLLVDALVDAGFEVVPIHPNAVKASRPRYRSHGGKSDASDAYLLADLLRTDGHRFKPLAAQSDEIRALRALVRGRDDLVATRVQLANQLRALLESYWAGAAEVFADVDSPIALAFVQRYPTPDAASRLGPKRMAAFCAQHAYSGRRSAQDLLERLQHAAAVACGELEMDAKGELACCLAATLSKLVDQIRLLSSRIEHHIANSDDGRILMSFPRAGRICAAQILAELGSVRERFDSDEHLAAEAGVAPVTYASGKHKSVVFRWACNHRLRFALTTLADNSRHASAWAAAIYAKARGRGCDHPHAIRILSRAWLRVIWRAWTDRKPYDRAQHGGLQSVLKAAGG

SEQ ID NO: 204833 - protein, 313 aa, unidentified
MEQQEVWVGIDVSSTSLDVAVRPSGEYWSASNTSDGVEGVVTKLRAISPRLIVVEATGGLEAHLVAGLATDGLPVVTVNPRQVRDFAKATGTLAKTDKLDAHVIAHFAEAVRPKTRPVKDKELQELTAILTRRRQLVDMLTAEKNRLNRAPKNVAKDVQAHVSWLEKRLAKTDGELKKRIMSNPAWRLQDEICRSIPGVGRILSMSLLACLPELGKVNSRQIAALVGVAPFNHDSGKYRGRRIVWGGRANVRSVLFMAAMSAVRFNPRLKAFYQRLLDAGKKPKVAITACMRKLLVILNTMVKNNTVWREDYA

SEQ ID NO: 204834 - protein, 429 aa, unidentified
MKNKAYRATAVNRVDAEQLSRGHPGQPLTVGLDIGKYRVLAVGRWPDAQFERPWLVAHPEQLPDLLALLQRLGHAHAVTVALEPSGTYGDPIRQAVTDAGLPVQRVSPKAAHDYAEVFDGVPSQHDGKDAAVVAELAALGKAAPWPYEAKEVWEQELVYAVEWLDAHRQIYGMWVNRLEALLARHWPELTRLLKVSSATVLRLLARYGGPAALAADAEAAAQLRHWGKKYLRPEKIAQVLASAQTTVGVRLGDVEQRRLQEYAQQALAARREVRRSQRSLRALAQGQAVLQAQGRVVGLPTACVLWASLGDPRHYSSGPAYRKAMGLNLVEQSSGTYQGALRISKRGQPRVRRWLYLAVLRLIRQEGVRDWYQGRKQQGPQATRKALVGVMRKLAVALYRVGVGGVVFEARRLFPGARSRRERADRGRR

SEQ ID NO: 204835 - protein, 347 aa, unidentified
MGKSITDLSSVTTVGLDLAKHVFQVHGVDASGRVIVAKALRRKDVLAFFAQLPECLVGMEACSSAHHWARELIKLGHDARMMPPAYVKPFVRRQKNDAADAAGICEAVTRPSMRFIGVRTLENQAALMHHKAREMLVAQRTQLINALRGHLAEMGVIAAQGLKNARELARLILAEGDETIPACVRMALVPLARQLHVLDQEIACSHRTIAAMARDDEMARRLMTIPGLGPVTASAMASSVQDISAFSGPREFAAFLGLTPRQHSSGGKERLGRVSKMGNRYLRRLLVVGAHAVLYHRKPHEDALRSWAKKLMQTKPFKLVAVALANKMARIAFAIMRGKTSYSVDPA

SEQ ID NO: 204836 - protein, 420 aa, unidentified
MNTHSKSQKVKKINSRTMIVAVDIGKGFHVGYFRAPNGEEQKPFLFSSAAKSFHQFWGKVREFSQQHGLDQIIVGFESSGPYAEPLFHYLRKKPINLVQVNPVHTKRIKELTGNSPNKTDRKDPRVIADVISLGHALTLVVPEGPAAHLRRLTQARERAIKKRTATLNQLQDSIFIIFPEFLKIMKGISTKTAFRLIERCPIPEDMVSLGLESLSKLIYTQSRGKLGRQRAEELFHAAQSCVGVREGRESMLMEIEYLVSQISADNKFIARVEEQMKKHLEEIPYAQSILSIKGIGEVTAAGLIGEVGDFRAFRTISEITKLAGFDLFEISSGKHMGQRRISKRGRPLMRKLLFYAGINVVKRNGILHEPYQQMVSGGKPKLKALVAMARKLLRIIFALARDNTVYVEDYCCNQHLKLAA

SEQ ID NO: 204837 - protein, 310 aa, unidentified
MANPYVGIDVAKAMLDVAIGSDGEVVRAENDERGIARLIEQLGEIAPTLVVLEATGGYESLVAGALAGHGIAVAVVNPRQVRDFAKATGVLAKSDRIDARVLARFAEAVRPEPRPLPTAEAKELEEFLGRRRQIVDMLTMEKNRLSIAATERMKKSLKKHIAWLEEALRRANDDIDTAVRNSPAWREQEDLLRSVPGIGPVSARTMLAELPELGALNRKKIAALVGVAPLNRDSGTIRGSRICWGGRASVRQVLYMAAVSAVRCNPVIRRAYLALRARGKKHKVALVACMRKLLTILTAMVRDQRRWSPS

SEQ ID NO: 204838 - protein, 376 aa, unidentified
MTAATRPELSVSEPTVYVAFELSAKQWKLAMTSGFGVAPWLRTVPAGDLAAVARAIAQARKRLALPPSAPALGCYEAGRDGFWIHRALTAQGIASRIVDSASIEVNRRARRAKTDRLDALKLVAMLVRVCQGECGVWREVRVPSVAEEAARHVSRERTALTQEQTRLINQLRGWLTTWGCTLPARRRDGWWTTVRDWAGAPLPAPLQARLERAHGRWVALEAQIAAVDAQQTAATAAAAPASALGRLVQVKGVGTTSAAVLLDEGLVWRAFRNRRELGGILGFAPTPYQSGDRRHEQGISRAGNHRLQGVSVQLAWQWVRWQPDSPITQWYQARFAAGSSRLRRIGIVAVARRLLIALWRYATTGVMPAGAILKRV

SEQ ID NO: 204839 - protein, 397 aa, unidentified
MIIIGIDVAKDKHDCHFMTYPDCEILCDNLQISNSLEGFKTLMNTILEYSNNDLSQVKVGLESTGHYSTNIISYLKRQCVNVVELNPLSVNRFRKSLTLRNTKTDKCDARFIARMLCSPESHSNPTQDISYHIDELKSLTRCRFRLNYELQPIKNRYRRSLQLVFPEFEKHFNVSIPSALKLLSKYPSPKDICSIRKSTLVKFLKDISHGHWAKYADLLISIAKDSIGSNNIGDIFELKHIAKEILFLEDELISIDEQISIVMAQINTPITTIPGIGDILGATILAELRDIHKFDTPEQIQAFAGCDPSIYQSGKYNAIDTPMTKKGSSYLRNAIYLATSAAFIQRGQIYDYVTKKRSQGKHFYVAMSHGMKKMIRIIFSVLKNNKPYFEPRLNPVV

SEQ ID NO: 204840 - protein, 345 aa, unidentified
MDHFAGLDVSVKETSVCIVDEAGRIVREVKVASEPEALLKVLGNPAYRCRRIGLEAGPLSQWLFSALAEAGLLVICVETRHMRAVLKAQINKTDRNDARGMAQMMRVGLYHPVHVKTLRSQKLRMLLTHRKLLQSKAIAIDNDLRGTLRNFGLKVGMVGAAKFEARIKELVENFPDLAVLVEPLLVVRRVLREQLSILHRRLLAVARDDDVCRRLMTVPGVGPVVALTYRATVDVPARFRKSKSVGAVFGLTCAKYQSGEIDRSGAISRCGDEMMRTLLYEAAQSMLFHSTRWSWLKAWAMQIARHRGMKKAVVALARRLAVIMHRIWVDGTEFRWTREQATAAA

SEQ ID NO: 204841 - protein, 356 aa, unidentified
MPTIAQLEPVRVTVGVDTHKDAHVAVAKDHLGRHLGDNTIPTTPSGYRDLLAWAETHGEVEAWGIEGTGSYGAGLLRFLLGADQAVIEINRPDRKARRLKGKSDLVDAEAAARAVLSGEASSVPKSADDRVEMIRALRAARSSAIKSRTQAINALKALVVSAPAELREQLRALSSTQLVRTCVRLRPGDIAGPLAATKLALRSLAGRHEALEAEIKILDPELLRLTAEAAPALVELFGVGPEVAGTLLVAAGDNPERLRSEAAFAHLCGASPINASSGKTVRHRLNRGGDRQANSALYRIVIVRMRYHAATKEYVERRTKEGKSKAEIIRCLKRYVAREVFAVLSDIGQKNLAVAA

SEQ ID NO: 204842 - protein, 311 aa, unidentified
MRFYTKQHQFYCGIDLHARTMYLCILNQDGEILVHRNMPAGPEPFLKAVAPYRTDLVVCVECIFTWYWLADLCAREGIPFVLGHALYMKAIHGGKAKNDKIDAQKIAVLLRGGMLPQAYVYPAEMRATRDLLRRRIHLMRKRAELLTHVQQTNSQYNLPDIGKKIAYKTNRSGVAERFTDPAVQKSVEVDLALLDYYDQLLRDLELAIVKTAKQHDANTLYLLQTVPGIGKILSLVLLYEMHDIARFPRVQDFVSYCRLVKCAKESAGKRYGTSGTKIGNAYLKWAFSEAAVLFLRNNPAGQKYLARLEPV

SEQ ID NO: 204843 - protein, 450 aa, unidentified
MSNASGVSRGDRNRNARLAKLRELVPAANAIVGIDLADRKQMVVVTDHDSKVIARRTFTCRAWDLGAALEWAAGRAGMAGFTGVTVACEPTGHRWRVLMQLAAERGMALVCVQPSQTTWARRAEDGTFDKTDDKDAVLIARLAAQLRCYVPEPGDETWARLRHLGTRREQLITEQISQVQQMRDLLECVWPAVLDVSRRPFLRQTWIAALSVVLERDGGDSARTLRLGAARFEQAVRREITRGGGQKPCLRLVRAVFAALSDPVGVVTHRRGALERVQFLLTDWKATGQRLSEVEVRMIGVLDELALTELVISIDGLSALGAAAILAQSGDLRRFTSARALVKHAGLAPREKLSGTFVGRTKLTGQGRPSLRLAAWRAIWPAMHHNSVYAARVAYLTTRETNKLKPMQAQAVIAATLLRHLHAVVTTGQAWDPNIATHGYRARRTQTMAA

SEQ ID NO: 204844 - protein, 527 aa, unidentified
MAVRSKSSRRRKARPHVFQKPRGVLHPRVQAVGPEHFAIVCVDCAKARSKIMLADFYGRVLIEPTTVAHNQFDLDAGVRSVRDAMVQHELKDVIVVVERTGRYHKVVQRIFTKAGFEVRVVHPFATKQFRQPANPGNKTDDTDLYAIHRATVTGFGLSEPKPDPLFAHLKVLVRHRRSLVRSRVTIQLKMRDHLEACMPGYSDCVSDLFDSDVAMWVAKNLGSAEAITDAGVTGLVRRLSEAGVRKNVPVVEKIVAWARSAPTADEAASLHHRFFVELDEDQTSKRRMIEGLEAEIAEQLVLTPYVLLLAIAGISVVSAAQFAGEAGPMERYPSARAITGRAGLYPSRYQSDEVDRRDGKLIRCANRDLRYALTLIADNLLKCNEYFRVLAASWRLRDKDPRDVHVKVAGRFSRIAFQVVGGRQVYRHPCARQHDYILEKLSDFCIEHKIPPERHRRILNAAADQLPPAARPEEAIPLQEKLARVRKHRGAGPRSLGEILPELLAKLGVPLIRSNESGESDLTKRPS

SEQ ID NO: 204845 - protein, 287 aa, unidentified
MDRVTVGLDLGDRYSRYCAIDEAGKLVGEGRVRTEVDALRGCFSGEPARVVLEVGTHSPWVSRTLEELGHEVIVANPRRLRFIWNESVKTDRKDAEQLARVGRMDPELLQPIQHRGQEAQMDLAILRSRAYDRQIEQLCKDRYPETERLRGPKGVGALTALAFVLVVEDPSRFNTSRAVGPYLGLRPKRRQSGESDPQLGITKAGDVMLRRLLVGSAHYILGPFGPDCELRRWGLELAARGGCNAKNRAAVAVARKLAVLLHRLWVSGQEYEPFHHHPPRRLSAVPA

SEQ ID NO: 204846 - protein, 315 aa, unidentified
MTTEPVYVGMDVAKATLDICVSDGEAWQTPNDDRAMKELCARVTALHPTLIVLEATGGYELRAAAALAATGLPVAVVNPRQVRSFARSIGQLAKTDRIDARVLARFAQAVQPEPRPLPDDDTRALEALITRRRQLVGMITAEKTRLDTAPPITRKQIKAHIGWLQRQLAKVEGDSDGMIRRSPIFRAKDDLLQSVPGIGDATSRTLLALFPELGSVTEKEAAALAGVAPINRDSGMMRGRRTVSGGRARVRTALYMAALVGTRHNPILKAFYARLRAAGKPAKVALVACMRKLLIIINAMVRDGRAWDAARSVAA

SEQ ID NO: 204847 - protein, 313 aa, unidentified
MAEEVFVGIDVAQETLDIHVLPSNEKWQCHNNAKDIGRLVKRLRPKAPEAIILEATGGYEAMAAALLIEAGLRVSIVNPRQVRDFAKAMGQLAKTDCIDALVLARYGQAIKPRLTPLPTKEERLIKELVSRRRQLVDLRSGEKNRLHQARTERIRQSICAVIDALDREIQQIDDDLDATIKQSPLWQEDVKLLKTIKGIGPVTARTLLAHLPELGKVSRQEIASLVGVAPLNRDSGKRRGKRSCIGGRKAIRRVLYMAAKTAAKHNKTIKLFYQRLEKEGKLYKVAIVACMRKLLVIANAVLRDRQPYRQIFA

SEQ ID NO: 204848 - protein, 388 aa, unidentified
MYYCGIDVAKRKHSAMVLDEHAETVQQNFTFKNDREGFDKLLSILEPYAGQVVVALEATGHYWLSLYECLTKADHPVVVLNPLQVHAYQRSGVRKRKNDRIDSFWIADYARISNSQATEQSEPAFLQLRELTRFRFRLSENIGDCKRKLLAVLDRVFPEYESLFSSVFLSTSRQLLAQAVSAQEFADFDLGELTALLVRASRGRFGQEKAELIVTQARHSIGVSLFADTARLQVQCLLAQLDLLEQQCQQIELEIESLMAQLHQHLTSIPGVGAVTGAAILAEIGDIQRFEAPEKLVAYAGLDATVYQSGDFEATETHISKRGSPFLRIAIWQAACMAAVYDPQLRQYYERKKAEGKHHGTVIGAVARKLLARIFIILKEDRPYEIRY

SEQ ID NO: 204849 - protein, 426 aa, unidentified
MTDLYISVGIDVGADFSFMSIALPNQTFVGKPFKITHSNLNSLETAVSKIKEAEESNSLKARIFLESTGVYHYPLFCYLRDKGFNVSVINPIITNNSTNLNIRKVHNDKFDSKKLALKPDLKTSVIPSDLVLNIRNLVREYYRLKDHMSAYVNKLTAVLKISFPEYLGIFSKITVNTSLALLDKYPSPELFLSARKSSIIKLIRKTARFGESYAQKQYEKLLAAANDAKVFGHSLPSDAEIIRLYISLIRTYDNAADSVMQSIKAAVESEPDELFAKQIRLLETIKGCGFLSTVTLMCEIGDFSVFSSPKKLYAYLGLDPAVKQSGKFNGTNVKLSKRGSKLARRVLHMMALNNIAIYKNSEPKNPVLRSYYDKKCVSKPKMIALSAVIHKLCNIIFAILRDNKPFEIISPEQHNFSYHLSQFSAA

SEQ ID NO: 204850 - protein, 356 aa, unidentified
MKKFLIGIDISKEKFDVTVIKSLGEGFECEQVHYDVYDNKVRGYSAMLKDMTTLGVRCGDSLFCMETTGAYELHLCDYLYGKGYDVWRESALQIKWSTGVAKSKNDKADSERIARYALRHQDAAVLYVPVNETLRTLKALSLYRERLVDERRAKEVSIKEIRATQKMNGDLQWIRTNSEQSVKRLKKDIMECEERIMAVIEGDEELKRTYGHITSIKGIGAVNAVAMIVSTGNFKTIPTARKAASYYGIAPFFAQSGSSVHHRKNVSNLSNRRLKGTLTQAAMCAKRFNEDMKAYYDRLLAAGKPRRVAVNDVRNKLVRIMYAMVQNDCDYEPKHEVRRTERVLQTTERHIDKAVG

SEQ ID NO: 204851 - protein, 399 aa, unidentified
MQKLYIGIDVSKDIHHVYVLLPDNSTEQLKVKQSTKGLRDFVNHLKGLQEEYRAEVIIGLEAVNGYASPLDRMLLDAGFVLLNVNSARLYNFRRIYGVPFKNDPHDARLIATYIRSGEFLRHKKLKPAIEIKKVPEVHRRIKRLSRYRNELIKEKVRISNRLTKILGEYAPELLSLGAVSRNKALWKFLAKYPYFWEWEGLSKEEIADISDGNGYRIGVSRAEKIKKVLEKVNIYAGEDKEEIGMIIMDYAIRLLEIDRKIKKVEERIKELGKKSKIYQRLLKEPGISHGIAAVIIGEIETILRFERESSFAAYNGSGVLDEQSGKKKSTKRIVLYNRALKRAMRNWAFARMECHKETRRYYQKKRKEGKTHLQALKCIERILSRLLYKLLWKLEIQTD

SEQ ID NO: 204852 - protein, 340 aa, unidentified
MENIALLGIDLGKHTFHVHAQDKAGHQLWRRKLNRKELVELVANTPVCRIVMESCSGAHHFARRFLQFGHDVKLIAPQYVKPFVKGNKSDFVDAEAICEAASRPTMRFAAVRNEQQQTISALHRTRDMLIRSRGSAHNQIHAYLVEFGIAISTGPAAIRKLPAVLEANELPPRLVALLEQLRDYVFHLNEQIAVIERELNALMKEDDVAQRLLTVPGIGPITASVLAAQAGDARQYRTSRDFAASLGLVPRQYSTGGKTTLLGISKRGDKHLRTLLVQCARSIMMHIHKRTDAMAIWVRQLLERRNSSIVACALAAKLARIAWAVLGGNAAYVPHPQRAA

SEQ ID NO: 204853 - protein, 371 aa, unidentified
MKQQTKSSNITVGLDLGDRRHRFCALDERGEVVEQDSICNDRVSLRKLAGRYHGALGVMEAGAHSPWISRFLEALGWRVVVSNPRKVRAIYQHERKSDQRDALMLARIGRMDLALLYPVRHGTAEAQQDLLRIKLRDSLVRARVAVINSVRFTLKSLGYTVRNPSSARFHKVVMEEVPESVREMITPSVQALTELTARIKMLELEINTLAQMKYPQSAQLQQIPGVGPITALYFVLKIEDPNRFAHVRDVGAYAGLCPRRDQSGESDPQLRISKRGDAYLRRLLVSAAHYILGPFGPQSALRAYGLMLAADGTARAKKRATVAVARKLAVLLLSLWKSQQPYQPFPGACLNGEQEDRRSGTIALHRMEATD

SEQ ID NO: 204854 - protein, 315 aa, unidentified
MEQSLFAGIDVSEDRLDVAINQGDEILEFYSIPHTEDEISHLIEKFQKTSPSLIIVERSGGLERSLVACLAGAGLPVVANNPRQVRDFAKATGILAKSDKIDARTMARFAAAVKPPQRPIKDAERQQLADRVARRRQLVHMLAQEKNRLSRSLGPVRADIQHHISYLQERLDKSNKDIDQIIKGTALYHDTLELLSSVPGIGPVTSASLIADCPELGSLNRRQIAALVGTAPFNRDSGKRSGTRCVWGGRRTVRAHLYMATISAIKCNHKIKSFYTRLIAAGKKPKVAITACMRKLITILNAMVKNQEPWQTSAA

SEQ ID NO: 204855 - protein, 429 aa, unidentified
MDKTELTRLEEFRQLRGEIRGSEEYLIVGIDVAKERHHAFFGTATGKTLHKRLVFENSKEGFERFLVQAEALKVQHGLGKMVLGMEPTANYHKPLGEYLIRRGDQVVLVCGVAVARNRELLDGRWDKHDMKDSANVADLISQGKMLYYDLPSQEVRELRELLSLKRGLKRQEHGMRVRIRNHLLAQYFPELDKPYGEGEAQGLKVVKWCVAPSEIAKMSYEGFIRLVKPGPRIRVEQKERLMAIWKAAPHSIGCEAGGSLGFVARMMVEGLEGLRETLGKVDERIQEICKRVPSYPYLLSIPGVGPAIAAVLIAAIGNPHRFSSAKEVIKLAGLDLSANRSGTTSERAVPVISKKGNASLRYALYQAALIASNKSSPIMRYYTRILQGRERERGIKTKMRIKLAVKLLVIAWTLMKKEERFNPDYLKWD

SEQ ID NO: 204856 - protein, 329 aa, unidentified
MQQKSVKSKPENTETATHGTKYLGVDISLEHLDVYLNGNYRRFNNNNEGIKKLKALIDKQNEPVLVAYESTGWLSRILSMQLLSMGISQVCLNPTRVRNYARALGVQAKTDKKDCEMIARFAEQTLAQPNVIESPVLMRLKELQSSLNFFKRRMAQAKSSLVAQRDKFLIREMKRAIAHDEKQIARIEKEMHKLIKANQEMQERYDYYLSLQGIGPHTALALLSQLPELGQMNRRQVASLVGLAPFNWDSGKMTGKRMTRMGRKGIKSLLYLSVTSLLRLEDHPITKMYKRLKENGKKTIVAMVACMRKLLIWLNGETKKWLKEKGYVQ

SEQ ID NO: 204857 - protein, 388 aa, unidentified
MNTVGIDIGKRQHVAAVCRADQLEADRKVLRFSADRSGLAELTAWMERQGGEVSRVVMESSGHYWMPLAQALHRGGLAVAIVDPLEAKYFGKSRLQRTKSDPADARTLAALGRRDRPATREPLAGAELREAARFAMTLVTEQAKVCQRILRLVDLGFPELAKAYEDPTCMSALAVLRAVPTAAEAARRRTSTIAEARTPGRRIGPAKAEQIRSLAQDTIAPPELAAQVGFEMRLLIAQHDFLDTQIKEAEARVAGLLDGELARRLRTIPGVGPAITATLLSEIGDIHRFSDFDKLVAYVGVHPAEKSSGRKGADPETSWHMAKTGKRLPARGALPHGRGRPHPQPGHQGPLHAQARPGQVEDERPRPLHEEGARHRLGRLARRPRLRR

SEQ ID NO: 204858 - protein, 314 aa, unidentified
MNTQGMVAGIDVSKDWLDVALGAESLRVANEAVGVSGLIERLQAMSVELVVMEATGGYETQAASAIAGAGLKLAVVNPRQVRDFAKATGRLAKNDRIDAHVIAAFGQAIEPQIVHLPDEQTRELQGLLLRRSQLLGMRVQETNRLAQMQGAVRKQIKSHIAWLDRAIDEVNTDLTARIRQSPAWREKDELLQSMKGIGPITSGTLMTSLPELGQLDRRSIAALVGVAPFNRDSGAFRGRRAIWGGRAQVRHMLYMAATTAIRANPVIKPFYERLIARGKPHKVAMVACMRKMLTILNAMMRSNTPWSPTFQGAN

SEQ ID NO: 204859 - protein, 364 aa, unidentified
MKYAAGEDKRSTPQGDARCSVSPFDSHKHYTWALVQDETGKVLREQRVNHTQGALRDFLEECEPGSPAAVETIGNWYWITDEIEQAGMVPQLVSARRAKLMNGLVNKTGKLDARGLNRLQRSGTLPTVWIPPWELPRTRMVLVRQRTKLKNRIHANLAKYGLRTDGVTDLFGVRGRQIIGRCLEELPVQTRYATQALLDELDHLQVKIGQLEERMAELFSGLKSLDNIKTLPGVGFILGVVILTEVGDVARFPSASHLASYSGMTPRVHASGGHVRYGRTRPDVNHYLKWAYAEAANVAMMHRGRHPQRHVSRLYERVKSRRGHPKAIGAVGRHLAEATYWMLTNCESYRDPAAQQTEESKREA

SEQ ID NO: 204860 - protein, 350 aa, unidentified
MTTIARRITGGVDTHLDVHVAAALDERGALLGVESFETTAAGYRKLLGWLESFGTLELVGVEGTGSYGAGLTRHLLAQEVAVVEVDRPNRQRRRRTGKSDPADAVAAARAAQGGDATGFAKTRDGNVEAMRVLRVARLSARRSRTQAINQIRSLVSTAPEELRAELRDLSIYRVLALASAYRHTGRTDVATVTKLTLRTLARRALSLEEEVKEIDRLLKTLVAETAPELNAIDGVGTDVASALLVAAGDNPDRLKNEATFAKLCGVSPLDASSGKQERHRLNRSGDRQANSALWHIVFTRMVNDPRTHHYIERRMKDGRTKKEAVRCLKRYVAREVFAALPRSEFALDSP

SEQ ID NO: 204861 - protein, 338 aa, unidentified
MRLFVGDDWAEDHHDVELMDAAGKVLARKRLPEGVAGMARLHELIGQHLGEDGEDAEVVIGIETDRGPWVAALVAAGYVVYAANPLQASRYRERHGVSGAKSDRGDAHMLTDMVRTDSHQLRVVAGDSPGASAVKAVARTRKTLIWDRTRQVQRLRHQLREYFPAALAAFEDLDAAGALELLANAPDPARAAKLTRAQLSAALKRARRRDIPAKVTAIMAALRGPQLGQPPAITAAYAVTVRSLIALITVLNEQVKTLEEEVEAVFGRHPDAEIYLSQPGLGPVLGARVLGEFGDDPDRYDSGKARKNYAGTSPLTRASGKRKPLSPGSSATTGSSTR

SEQ ID NO: 204862 - protein, 366 aa, unidentified
MMNPGVIGRRSQGLRDRGTARVVTPSPGMSPNSCVGPGARITQGWAIEEDTMTSPPVFVGIDVSKAQLDIALRPEGGFRVPHTEAGIGQLIDRLRRVGPALIVLEATGGLELPLTGGLAAAGLPVVVVNPRQIRDFAKASGQLAKTDALDAQLLAHFAAAMRPTPRPLPDEQAQALAALLARRRQLVEMLVAEKNRLAGARPAIRKSLQAHIAWLAHEVAQTETDLTQAIRQSPVWREKEEVLRSTPGVGPVLCTTLLANLPELGTLSRKQIAALVGVAPLNRDSGTLRGKRTVWGGRAQVRTALYMGTLVATRFNPVIKTFYQRLCAVGKPKKVALTACMRKLLTILNAMLKHRTPWHPEMAQHG

SEQ ID NO: 204863 - protein, 421 aa, unidentified
MDKNDDTRLEEFRQLKREIRGSTQHLVVGIDIAKERHHAFFGTPAGKVLLHRLVFDNTKEGFEKLCFQSDALKTQHGLAHVVFGMEPSSDYHKPLGEYLIEHGHGVVLVAGAAVKKNRELLDGRWDKNDTKDAANVADLITQGKCLFYEFPSLSLRELRSLLSLKRRLKKSEQGYKVRIKNHLIAQYFPEMDAYFNYAEGPALVRCLDPKKLAGLQFGEFMRMVPLGNGKQDERLGEIHAKAASSIGCAVHPSAVFEASILLDELKDIHVMMLETDRKIAGVCKKFPEYPCLLSIPGFGPDISAKVLGALGNSHRFENHRQVLKMAGLDLSADRSGKRTDVAPVISKKGKADLRYGLYEAALIASTRNAQFMTYFTKKLKGREREKGIGAKMRVKLSAKMLVIAWTLMKKKEMFNPDCIGG

SEQ ID NO: 204864 - protein, 313 aa, unidentified
MITDIVVAGIDVGKQRLDVQVGVADDGFSVDNSPAGYRQLLTRLRQAGVGRVGLEASGGYERAVAAALAAAGLAVVLCDPGLVRAFARAMRVKAKTDRIDAKMIARYVAAGEALPLWHPDPIRDRLGELAGLRRQLLAEQTVWAQRLEQVGAPASRRLIGRKLLRLKAELALVAAEIARHIATHPELQQRDRAYRAIPGVGPVLATALSAELPELGHLSARRIASLCGVAPHPRQSGQTDLGGKCTGGRPQVRNVLYMATLSAIKAKHSRLFPFYERLRRNGKPFKLAITATMRKFLTILNAIARDNAQYRPS

SEQ ID NO: 204865 - protein, 356 aa, unidentified
MSSDVKYIGLDVHKEAISIAVLNASGKLVMESIIETKASSILQFIQGLRGELHVTLEEGTWAAWLYDLVKPRVSELVVCNPRRNALLKEGSKSDKVDARKLAELLRAGMLRSVYHGENGLRTLKELGRSYQTISKDVQRVMNRIKALFRGWGILCTGTEVYAPCHREEWLNKISQAGVRKRAELFYQHLDGLQILRRNARREFLAESRKHQAVKLLRQIPCIGPIRSAQLIALIQNPHRFRSKRQLWTYSGLAVETHDSGQYRYVNGQLQRSKKPQQLRGLNRNHNHEMKEVFKSTALSASRSAGPFSEFYARLLAKGMKPELARLTLARKIAAVTLTLWKKGGRFDAEQLKTQAA

SEQ ID NO: 204866 - protein, 407 aa, unidentified
MNAVGIDVSKGKSMLAATRLFGEVLIEPREYPHTADGLSRMAKDILELGEDTRVVMEATGRYHEVVAFALREDGIFVCVLNPLLVKQSGGGTLRKAKTDKKDALKIAKYCLDNWNELREYIPLDTVRQHLKLFSRQYNLYMKTIVSLQNNLISLADKVFPGVNELFTSPDKEDGHQKWIDFFYTFWHADCIADVSKKSFTDRYQKWCKRKGYHFSQSKAEDLYTESAGLILTLPKNDNTKLLVQTAVQELIAAKTCLAAFKSEMINMAKMLPEYETVISMFGVGEVTGAQLMAEIGDVTRFTHRGALVAFAGVDPDVDQSGKHNASSVPTSKRGSPHLRKTLFQIMSTYLKCSHVDEPVYQYLDKKRAEGKPYFVYMTAAANKFLRIYYARVKEVLSTREESANDPA

SEQ ID NO: 204867 - protein, 358 aa, unidentified
MKIIGCDYHPSFQQIAMLDLETGEYVELRLLHAGGEAQRFYESLSGAVRVGVESSGNMLWFERLLQKLGHELWLGDAGVIRAKAPRKQKTDVRDARHLLQLMRENNFPRIWVPSVGERDVRQLLKHRHTLVQMRTRVKNQLQHIALNQGLQKKQKLWTRAGEELLRGLELDGWTARRRDDLLHLLEYLEKQIEALDQAVKTEAEQRPEVRLLMTHPGVGPVVGLATVLTLGEVGRFPRGREVAAYVGLIPSEDSSGQRRRLGAISKQGSSFLRFLLVQAAASAVKGDAEWARAYKRLAHKKHHGVAKVAIARKLVVRLYWMLRTQTRYPQVVRRSGSPSHPVARLQAERLSGHPASRR

SEQ ID NO: 204868 - protein, 345 aa, unidentified
MNVTAIGIDLAKNVFQVHAVDARGKVVLRKQLRRAQVAGFFSNMPPCLIGMEACASAHHWGRTFERFGHTVRLMASQFVKPYVKTNKNDVADAEAICEAVGRHSMRFVPIKSVEQQAILSVHRVRQGFVKARTAQANQIRGLLGEFGLVIPQGIYNVAKRVPELLEDASNELPVPFRHLIERLTQHLKELDRQVKEFEKEIIEWHRSSELSRKLEAIPGIGPLAASALVASIADAHSFDNGRQLSAWLGLVPRQSSSGGKPTLLGISKRGDAYLRTLLIHGARSAILAAKNKVDNTQGWLTNLLKRRHPNIAAVALANKNVRTVWALLAHGREFQANYMPTRMAA

SEQ ID NO: 204869 - protein, 459 aa, unidentified
MKRRFQRSIKKRMRQGLVVLEPHVAGVDCGSREHWVCAPQKEPGKPNVKQFATTTEQLEALADWLHQQGVVSVAMESTGTYWIPLFDLLEERGFEVLLVDARKLKKVPGRKTDILDCQWIQKLHSCGLLQGCFRPAAVIRELRALARERSNFKEDSGTVVQRMQKALDHMNVQVHHAVTDLTGVTGMKILRAIVSGERDPHQLAQFRDCRCRKSEAEIAQHLKGTWSDEHLFNLQRHLEHYDHLQQILDRYEQQIILRLQQLSPAERQDQPVPAHPNARKEKDMRRRAEEPLRTALWRFCGIDLSRIDGISSEGALMVLSEVGFDLSSFPTPKDFVSWLKLCPPLNRSAGKNRRGRGKGFGSSRIAKVLRLGALSLKHSPTALGGYYRRMARRRGASIGIGATARKLAEHIYRALRWGQEYLDQGAEAYEARFQHNRLRYAVTIAESMGYTLVPQGTAK

SEQ ID NO: 204870 - protein, 355 aa, unidentified
MNSEKYIGMDVHKESISIAVMNGAGKIVMECVIETKASVILQFIHGLSGDLQVTFEEGTWAAWLYDLLKPHVTKLVVCDPRKNASMKEGNKSDKIDARRLAELLRLNHLNPVYHGEHGLRSLKELVRSYLTITKDLGRVMSRVKAIYRSWGIACIGKQVYAPRHRAEWLGKISELGVRRRAEFYYQQLDALRALRKQVRRDLLAECKKHQAWKQLCQIPSIGPIRAAVLLGILQTPHRFRTKRQLWTYSGLGIETRSSADHRSVDGQLERAKKQISIRGLNQNCNHDLKNLFKGVAIVASSKPGPFQEFYTALLTKGIRPEMARLTLARKIATIALMVWKRGASFDAQHLKPQTA

SEQ ID NO: 204871 - protein, 337 aa, unidentified
MNPTKSNHKFCLGIDISKADYHVALLHLESGESIARSKFANNPQGHAKLLDWLAKHTGADLPVHACMEATGSYGESLADHLDGKVAILSVVNPRAIKAHGDSDLRRCKSDPADARLIADYCRSKQPRAWQAPSPAQRKNKAISRCLANLKKDRTRESNRLDLCSDKTVVKALKAHIKWIEKQIAKLEDELIAAVKENAASARALELIVSIKGIGEKSAAYLIAELPDLALLKNARQLAAYAGVTPRIFQSGTSGKTRTPMSKAGNRHIRKALFFPAMSAMRFNPICKAFAERLKEKGKPSIVIIGAVMTKLLHLIYGVLKSEKPFNPDNLKKAQISP

SEQ ID NO: 204872 - protein, 343 aa, unidentified
MQTITTIGLDIAKSVFQVHGVDASGQVVIRRQLKRRSVLTFFQKLPACLVGIEACASSHHWSRELQALGHTVRLMPPAYVKPYVKRQKNDMADAEAICEAVTRANMRFVPTKTPEQQSCLMLHRTRHLFIRQQTAVINSIRAHLAEFGIVAPVGRKGVTELLGIVADPSDKRVSELARACLAALGGQLLSLKQQIVEFDRMILAWHRSNQTSKRLHYIPGVGPMLATALVASVADPSTFRSARNFSAWIGLVPKQYSSGGKERLGNISKQGDRYLRGLFVAGALAVIRYAKIHGTGHRPWLTALLARKPTKVAAIALANKIARMAWAIMTKGERYKEPVALAR

SEQ ID NO: 204873 - protein, 415 aa, unidentified
MEDLGLRALYRRVAGIDVHRMLHVVTVLIEQGDGSMQRHTREFGGFRRDCRALAAWLSGLGVELVVMESTGIYWKSVHAHLENAGICAWVVNAHMIKHVPGRKTDMADSEWLAVLARFGLVRASFIPPKDLRELRLVSRYRRKLSAMCASEVNRLHKILDDGGIKLGGVVSDINGVSARAMVSALIEGKSVEHMLGLARGKLKQRREDLGASLEGDLSARHLFVLGHIHAHIETLQREIIDIDRYLLAAMQPYAWAHQLLQTIPGVDEIAAALILIEIGDDMARFGCAERLACWAALSPGNNESAGKRKSGRTRHGNSIIRFILCECANAARMTKSTLASKYRSLMARKSHKKAIVAVAHKMIRLIFLMLSRRQPYIDQAIDYAAMSAKKNAPRWIKQLKTIGRWPSPEPAAASH

SEQ ID NO: 204874 - protein, 414 aa, unidentified
MDKREWRPGSEAPEVRQQLNMRFIGIDVGSETHVVAVVDESGKVVFKAASFSEDADGYAKFRQILGAPGDAMCALEATGHYWQNLFAFLAAEGFPVALLNPLRTHHFAAEDLRRAKTDAIDALSIARFAQQKRPAVTVLPDEATLELREMVRLRDRMMEDLGDRIRQLHRTLDLTFPEFPRLVRDLSSYKATALLLRFPTATAFREASPGNIAEMRYDGRHRIGPELAAALCDTAGRSVGRHEGPSYRLQTQYACEDISTLRERLKTLDDDIHRSLGQHRVGQLLTTIDGIGPNTAARVIAEVNLLAFRDAGALAAYVGVAPSVNQSGKRVPQRGGLHSVGHARLRAKLWMPTLRAVRNNAWLRHFYEGLVARGKPKKLALVAALRKLLSAMLSVARSGKPFEPRLPEAAISLA

SEQ ID NO: 204875 - protein, 354 aa, unidentified
MERYIGLDVHAASCTAAVMDARGKKLGAHVIATNGQALVQFLATQPGTLSVCMEEGTQSEWLYQVLSPHAKQVVVIGLSERSGPQRQKNDELDAYDLADRHRRDALPKTVFKDGGQLTSLRQLVKVHASIVRDSVRVQNRLKAMFRSRGVHATGKNVYSAKSREKWLEQLAPSHRVAVSRLYDQHQALLEVREKTRKDLVAESHRQPVAKILETCPGLGEIRVAQMIAVVMTPDRFRTRQQFWSYCGLGIVTRSSSDWVQTSDGRWARAHVQKTRGLNRTHNTMLKALFKGAATTIVLQHRSSTLFADYERMLAGGTKPNLAKVTLARKIAATALAMWKTKEAYDPKKKTSTAS

SEQ ID NO: 204876 - protein, 319 aa, unidentified
MAGNRVIGIDIGKWTLDVAREGSATVERHANEAGAIEALVSNLDPARDLVVFERTGGYERLLEGALATAGVRWAVVHSKRVKAFREAQGIKAKSDAIDCRLLRAYGRDRLDAGDLRLGRIEDVTLAALVARRRQLYGMLHAERCRLETAAIELAHCSITRTITLLEAELEEIEAAVATHIAEDRRLGLKEKVMCGRIGVAHTTARGLLAVLPQIGEATAKQIAALGGIAARVHQSGTIQKRRGLDPGRAAVKVILFNPARTAMRFDPEIKAFAQRLRARGKPGKVILVAVMRKMLVQLNAAVRHALNSEGSDCAAPAAA

SEQ ID NO: 204877 - protein, 482 aa, unidentified
MKKRSIYQNRSQELYSLFEDAGDNAKIMCIPMDYAKKHHLVMFCNGYGDIVRKPFPIKNSPEGVDYLVDQVKRACAHRSIKLSHVFFGGEDISSYSENFVHALRSQGWIVGSVNAHEAKKQRENLQASTDRLDLMGIAAMLLNRRANTHPAQSGLYRNLRNIVRHRKKLVKMKTEVKNRIHTVIDQLFPGFLDETKSGIPPFSRSSLYLMSERFSTRQISRRRLQPLSKALNRFGTKHPDQAAAKLKRYALKAFAAPEPYMDTLQVSLSCHTKHLTCVYECIQQLEKEIAIILSQTQGAFLTSIQGIGIILAAGICSEIGDPFIQGNAANLASYAGVVPRVKQSGGPESEPRVGSVSKKNNHILKDYLLQASNHMGLHGPEDLKKDFQRRRIHGQNAEFGIARRLMRIAISMMRTWQFYIPCYLRSNHTDKKDRARYYQSIWPYVTEKWRRARVLEKAFEIDQPMGQWRDIVQKIYKIKLDL

SEQ ID NO: 204878 - protein, 395 aa, unidentified
MFIVGIDIAKRSHEAIIIAEDGQVVRKAFSFRNNCTGYNLLLEQVRRLTLVKSQIVFAMESTAHYWLALYARLLKDGYTVMVLNPIQSHSLRELYIRKAKTDARDSLIIADLVRFGRCKASNVPQDKILALRELCRSRAYLVDMAADLKRKLIALLDRIFPEYESLFDSIFSKASIAVLSKYSTPQKVKNANLRKLTDILMESSNGHFGEWKAHQLKEAACSSFGIDDSGGVYSTLLGMFLEQILSLTAQADSLEKQISVFFQEFNNPLNSIPGVGTVLAATILSEIGDITRFSSADKLLAYAGLDPSVKQSGEFKSNQNRMSKRGSPYLRRAIWLASTVAVHRDPMFQTYYEKKISEGLHYMNVIGHVSRKMTAVIFAVLRDGQPYQPILQSAG

SEQ ID NO: 204879 - protein, 361 aa, unidentified
MTTSIALGRGDVVVGVDTHKDEHVAVALDGLGGRLGDFPLVANPDGYAELLAWADALGAVHGFGVEGTGSYGSGLARFLRRHGRHVIEVSRPPRKGERRLSGKSDTIDAEHAAREVLAGKATATPKLADGIVEAIRLVKIARDSAVKARSQSMITLKATLVTASDELRGELEPLSDHKLVKACAALDSSGDIADPATAMHQVLASLARRWLELHEEIKIHSENLTRLTKTAAPDLVAAFGIGPDIAAEMLVTAGDNNDRIRSDAALAKLCGACPIPAGSGKTNGRHRLNRGGNRQANAALYRAIIVRMRWHPPTIAYVERRTAEGLSKKEIIRCLKRFLAREIYRLLPEPSSPPNELASAA

SEQ ID NO: 204880 - protein, 405 aa, unidentified
MEVLYKRCCGIDIHKNMMVACIFTSVRKKEIRQFSTMTEDILQLVSWLKETDCEMAAMESTGSYWKPVYNIFEEEQIPIMVVNAQHIKGVPGRKTDVKDAEWIADLVRHGLVKASYIPNRDQRELREITRYRQEITEERARELNRIQAVLEGCNVKLSSVITDISGKSGMTILKAIVSGETDPVVLSELAEGRARDKIPEMQKSLQGRISEHQQKMLKHQLGHIESLTALIMDLDADIKKKTESINWAIEALDDMPGIGRKSAERILAETGVEMEHFQNESRFSSWAGLVPECKESAGKKMSTRIRKGNKYLKATLVECARAGIRNKQSYLYSRYQRIAARRGGKRALIAVAHAMLIAIYHILKEKVPYHDLGADYYSVINQEKIINRNIRTLEKLGVNVMIQPK

SEQ ID NO: 204881 - protein, 329 aa, unidentified
MKVQHIIGADLSKRSIDLVYHLSKAYIKIDNSINGFNDLMQWLQKLNINTSETMIVMEHTGLYSYCFESFLHQHQIAFCKVNALEIKRSIGLVRGKTDKLDAARIAEYGYEKRDRLTVDQPVSNGLKRLQVLHSTYQRLVRHRAALINALKEYKHIGITEKDLVIQTQRQLIKNFDKHIQKLMSEIEMVINQQPALKQNFLLLQSIKGVGKILALTVIIKTHNFTRFINARKFACFCGTAPFDHSSGTSIRMKPRVSHLADKQMKTLLDLSAKSAIQYDKELKEYYLKRTQNGKSKMSTINVVRNKILYRMFAVIKRQTPFTENYSQAA

SEQ ID NO: 204882 - protein, 317 aa, unidentified
MSHITTLTAGIDTAKDKLDAAIHTTPFRLIVENRRPGWRRLATALTRAGASKVGIEATGGYERGIVAHLRASGFEVIVLQPLQVKAFARLHLRRAKNDALDAALIAACAAAVTPRDTEHDPRILPLADELTFVEQIEEDITRAKTRLEHIADTRIQRLVQADIRRLEKRRDAELRRIVQALQAHDDLAMRLQLVLRVPGIGERTALAIVLRMPEIGQISREQAAALAGLAPFDDDSGTRKGERHIAGGRGRLRRSLYLAALPAAFRWNQALISLYKRLIARGKPHRIALVACARKLIVYANAVVQRGKPWEINYASS

SEQ ID NO: 204883 - protein, 348 aa, unidentified
MLIIGCDYHPGFQQIAFVDTETGEVSERRLTHREEAEQFYRTLKTRKVRIGMEASGHARWFERLLTELQFELWIGDAAEIRTKRVRKQKTDRQDAQLLLKLLMEDRFPRIWVPDAENRDLRQLLWHRHRLVQMRTRLMNQLHVVALNEGVRRKKALWRPAGRSELESLVLAPWALRRRRDLLDLFDQLTPKIQELTRALEEEVEKRPIARRLMTHPGVGVLTALAFELVIGTPERFGCGKQIASYVGLVPTEESSGDRRRLGHISKQGNALLRFLLVEAAQVTVRSNQEWRSKFFHLAMRRGRKIAKVAMARKLAVHLYWMWRQGLDYGQWQKLGSHAGEPGNRHGVQ

SEQ ID NO: 204884 - protein, 369 aa, unidentified
MDIVHERAAGMDISKRDAKVCIRVPGTRAGTSSRTVTTYGATTNEIVRLSRDLEAAAVTVVVMEATGDYWKPFYFLLTESLNVQLVNAKAARNIPGRKSDVSDAMWLAELAAHNLLRASFVPPEPIRQLRDLTRTRSNLTHERTREFSRLEKALEDSNIKLSSVVSTLSTQSARSILDALVSGERDPQALASLAHASMSRKSAALAEALTGRFTDHHAFMVQLHLDRIDQIEATLAALDTRIDMMMEPFSLARELLMTVPGISKNVANVIIAEAGADMSVFDTAGHLASWAGVCPSQNESAGRIKSTQTRPGDHYLKAALGIAALAVSRSKTTYLAVKYRRIQSHAGALRAVVALQHTLLVIVWNMLHD

SEQ ID NO: 204885 - protein, 355 aa, unidentified
MTSTKYIGMDVYKESISIAVRNAAGKVVMECVIETKASMILQFIDGLRGDLQVTFEEGTSAAWLYDLLKPHVTKLVVCDPRKNKSMREGNQSDKIDARRLAELLRLDHLTPVYHGEHGLRTLKELVRSYLTVTKDLGRVMSRVKAIYRSWAIPCTGKQVYAPRHRAEWLGKINEPGVRQRAEFYYQQLDALRTLRQQVRRGLLAESKKHKAWKLLCQIPSIGPIRAAVLLGILQTPHRFRTKRQLWNYGGLAIEMHSSADHRSIDGHLQRSRKNVLVRGLNRNCNHDLKNLFKGAAVLASSKPGPFQEFFAALLATGMRPEMARLTLARKIATIVLMVWKKGVRFDAQHLKPQTA

SEQ ID NO: 204886 - protein, 424 aa, unidentified
MNCNQNFKISQVTEETLILGIDVGSSTHYVRAFDWRGLELSKVFKFKNSFEGFQNFVLWVNDLCCKNNKSKIIAGLEPTGHYWFSLGECLKENNITIAIVNPYHVKQSKELDDNIQTKNDSKDPKVIAKLVIDGRYSFPYIPEGVYGELRTADKLKDDITKQIISIKNKIHRWLSIYFPEYEKIYSSIDTKSGFLILKETPLPRDIVELGSEGIVKRWKQAKLRAVGFDKAKKLEEAAKKSIGCKNITSLARLEIKLLIEDYEYKQKQLELITGELNSLCEEIPEIKEVAEIKGIGMATVISFVAEIGDIRRFKSAKQVQKYAGLALRENSSGKHKGLTRISKRGRKKLRTILFRTVIPLIGLNEKFSSIYNYYIERKDNPLKKKQALTVICCKMIRIFFTILSKGIKYDETKMIQDIKRPLAA

SEQ ID NO: 204887 - protein, 333 aa, unidentified
MENFYFIGVDVSKKKLDFCVMFEGKVLHEEETANHQGAIMSLLYQLEEDYGISNSQMLVCAEHTGQYTFPLACACKAVECKLWLENPAEIKYSSGVQRGKNDKVDAKRIAIYANRFQDKVQYYECPTEDIERLKQLESERTLYVTDLAKYKGQMKDQKDYMPKALYERKVKRLQALMDDLEEAIQAITDEMDEVIASCPVLFRQRELLMSIDGVGRVVATNMIITTEAFTRFDDSRKFNCYAGVAPFSYSSGSSQHSKAKVSHRADKVMKRLLHLAAVVAVTHRAGGELKKYCERKVAEGKNKMSVINALRAKIVARMFAVIKRNEKYKPILS

SEQ ID NO: 204888 - protein, 478 aa, unidentified
MEAQQQKQGARRPDERSWHEMNRKQRREIARRIQSEDLRLEVVHPDAAGVDIGNESHYVAVPASRDRQPVRRFGCTTAELKDMARWLKQCGILTVALQSTGVFWIPVYDILEEAGLEVYLVNARDTKNLPGRKSDVQESQWLMKLHTYGLLRNSFRPPQEVRRMRTYWRQRNDLVRSAGRQIQRIQKALTQMNLRLANVLSDVSGVTGQAIIKAILTGERDPRKLATFRDKRVKASEEEIARGLEGNWQEDLLFMLKQEQEGYEFCQKQIAECDARLEQYLQQTPDRSQGASLPEEKRKGRLQKKAKNPHFDLRMALFRITGTDLTQIDGIDVRTAATVISEAGWDMSKWENENHFVSWLRLCPDNRISGDKVIGKGRLRTNNRLATALRMAASTLRESDTYLGAQFRRLRTRLEAPVAIKAMAAKLARLVYRMLRYGMQFVDRGAMFYDARHRQRQINSLKRKAAKLGFQIVLAPAT

SEQ ID NO: 204889 - protein, 340 aa, unidentified
MQVIRFGIDLAKNVFQVHGVDASGQVVVQRQLRRAQMEKFFAAQPPALIGMEACGSAHHWARTLSALGHEVKLMPPAYVKPYVPRNKNDARDAQGCCEAVSRPDMRFVPIKTVEQQWARALHRTRDLLVRQRTQLANAMRGMLYEMGLTSAKGAAGIETLLQRVEAADEAIPAALLICLAPLAGQWRALDGEIGKLDKQILAQVRQQRAALRLTTIPSVGPIIAHATLAAIGDGRQFASGRDFAAWLGLTRKSHDTGGKHRPTGHISRAGDRDLRRLLILGASSWLRQVRAKPDKGSPWIRGLLARRPVKVAVVAQAAKTARIIWAMLQSGQQYRAPAAA

SEQ ID NO: 204890 - protein, 403 aa, unidentified
MTKQLMAGIDLHSNNMFCGIVDQDGKRVFGQKLPCELPRVLQALKPFKGRIEQIAVESTYNWYWLVDGLQDHHYPVVLANPARMEQYNGLKVTDDQSDAFFLAEMLRLNILPTGHICDRPWRPVRDLLRRRLSLVRQRTSLILSLKSLHTRTTGQDLPLGQLKALPPESAGRLFENPFDQLTARVQTQLLDQFDQRIGEIEKSLLGKVSRLPRYRVLQSLPGVGRILGLTITLETGDPARFASAGHYASYCRCVDSRRLSNGKKKGKNNEKCGNKYLAWAFVEAAHFARRYDGPCRKFFDRKAAQTNTIVATKSLACKLSKAAWHMMSGQTPYAAGRMFPGEAGITRPEEKATGVTGVCDAPIRAGQAGPLRGGDRRRRALARSEARRRRRPARANKRRDDAL

SEQ ID NO: 204891 - protein, 337 aa, unidentified
MRIIGAFDVHRKQITYKWLDTETGEIQRGRIMPGVRKAVREFLVPFEGLDAHFALEATTGWRFVAEELSRVGLVAHLAEPADTAALRGSKRRAKTDRRDCDHMMDLLGTGRLPESWLPPAHVLEIRTLVRLRKALTDTRREWQQRVQAQLFHQGVPRIPAITTQGRAQLAAVDLSAAGRQVVTTGLAVIDHLDYQLAPLDTYLVRFAKVQPGCRALKQRLFGVGDLTAVFIWAELGDCVRFSSSDDAVRYAGLDITVYESADKRPPGHLSRQGPEALRWALYEVAQSARAVALRITHITWRSRGASTTSGPVCRWPVRSAGVPTTSSAVSGTTPSRR

SEQ ID NO: 204892 - protein, 362 aa, unidentified
MFESTTIIAFDQHAASVVAAVLLPGQRTPAIQPLTADLPTIGRFMARLAADQPVRCCYEAGPCGFELQRFLVAQQIPCDVIAPSLIPRRPGDRIKTDRRDAGHLAVLYRAGALTAIHIPTDQEEAARDLLRCREDIRADLLRARHRLSHFLLRHGRRFTATKRAWTKRHSEWLQAQRWDLPALEQTHRAYVRAVDDAVSRLHSVDDELRDLLRIEPLKSRIERVRCFRGIDDLTALTIAAELGDPRRFPTAPSLMAFTGLIPSEHSSGAKQARGPITKTGNAHLRRVLVEAAWQYRHHAFLGPSLQQRQRGAPPIAIDIAWHAQRRLHRRYRVLAARGKPKQLIVTAVARELTGFLWAALTQ

SEQ ID NO: 204893 - protein, 387 aa, unidentified
MQSVTSATAVATTARANNITLFASLELSKSKWVVTINSPGSEKFSKHVVEGGDGAGLLDLLSRSRAKAEQRYGVQVKAIVIQEAGLDGFWIHRLLLANGIESHVVDAASIAVDRRHRRAKTDAIDGETLLRTLMAWARGERRVCSMVRAPSPEDEDRRRLTRERGTLLKERIQHTNRVRGLLSGQGVRDYNPLRRDRFERLAALRTGDGRELPPMLKAEIRRELDRIALVTTQLAAVERARDALIRTDAEERNNPAALLLKLKGLGPEFASLLWLESLFRSFGNRRQVAAYGGLAPSPWQSGGVERDQGISKSGNRRLRKTMIELAWFWLRHQPDSALSRWFQARVGAAKGRIRRIAIVALARKLLVALWRYVTQGVVPEGAVFKAA

SEQ ID NO: 204894 - protein, 461 aa, unidentified
MAGVPEEIDAEELDQLVARVAAIDVAKASGKVCTRVPHDTVPGRRVTRVWDVPATTNAIVELSDHLACQGIERVVVESTSDYWRPFRYLLEARGLDTWLVNARDVKQVPGRPKTDKLDAVWLAKLTEKGMLRPSFVPPKEIRELRDYTRLRVDLTVERSRHKQRLEKLLEDALIKLSIVATDIFGVSGRAMIEALIAGERDPRRLAGLAKGRLRVKHAALVQALTGRFDEHHAELARMLLDQIDGLTAQIDRLTARIGDLLAAIPAAGIPKETGGDDSQGQPREPGTPADPTHPAGAEPLAALDRLDEIPGLGPLAVQAIIAEVGLDMTRFPTAAHLVSWAKLSPQTIQSGPKTRAGKTGKGNRYLKGVLGEAAAAAAKTDTFLGERYRRLVKRRGKLKALVAVARSILVIVWHLLADPAARFHDLGSDYHTTRINKDRKALNHVRQLQALGFTVTLSAAA

SEQ ID NO: 204895 - protein, 371 aa, unidentified
MKKNSTGKQSQGGGKRKRKLSGKLTVGLDLGDGSSRYSVVDEEGEKVSEGSVVTTRKGLNQVFGAMARCRIAMEVGAHSPWVSRHLKALGHEVIVANARKVRLITQSSRKSDQLDARTLARLARVDPNLLSPIQHRGEQAQADLLVIRARAALVEARTMLINAGRGMSKSFGEELAHCDAAQVSEDLGADLSEAIRPALLPLLEQVRGLTEQIQAYDGEIQRLGRERYAETEWLQQVQGVGPLIALTYVLTVEDPRRFRRSRDAGCYVGLQPRRRQSGQQDPALRISKEGDRYLRKLLVQGAHYILGPFGPDTDLRRWGCKLAARGGSSARKRARVAVARKLAVLLHHLWVNREVYEPLRMAQRQAAQPAA

SEQ ID NO: 204896 - protein, 389 aa, unidentified
MRRPASTGYRKVPNPRDGLSESKGRLAMDDAITPNGEGRVTVGLDLGDKHTQLCMIDADGELLEEARLRTTPAALRRRFAALPVARLVLEAGTHSPWVSRLLEDCGHEVYVANPRKLRLVYQNDSKSDRVDAEYLARIGRLDPALLAPLRHRHAATQADLAIIRSREALVRARVRLINHVRGAVKSVGGRLTKCSSPSFAGQAQPHIPEELAPALAPLLEMIAAMGEQIRAYDRQIEHLAQERYPETMLLRQVPGVGALTALTYVLTLEDPARFVDPRAVGSYLGLRPRQADSGDLSPQLHVTKAGDEMLRRLLVGAAHYILGPFGPDTDLRRWGLSLAARGGKRGKRLAVVAVARKLSVLLLRLWATGEAYEPLRNAAGEGRSLPDSA

SEQ ID NO: 204897 - protein, 407 aa, unidentified
MVFVGIDWAEQHHDVCVMSVDGQPLGRARVAEGVDGVARLHALVADHADDPAEVVVGIETDRGLLVTSLVATGYQVYAVNPRAVDRYRDRHAVSGAKSDGGDAKVLADLVRTDRHNHRQVAGDSVLVEAVKVTARAHQNLVWTRQRQVNQLRSALREYYPGALATFGTDLAHPDALAVLATAPTPELGRRLSSARIASALRRAGRVRNIDARAAAIRDGLRVPQLAAPTVVADAYGATAKALINVIAALTVQIAELESALADRFEQHPDADILRSLPRRAVILGARLLGERGDDPNRYANAKARKNYAGSSPITKQSGSRKIALARYVRNRRLADAITWWAFCSLQSSPGARAFYDRRRAAGDTHHKALRALSNRWVGILHGCLRHHTLYDEATAWGHLTESHAAAA

SEQ ID NO: 204898 - protein, 408 aa, unidentified
MRIIGLDIHRIFAEAMVLEDGTARRLGRVDMTRESLQAFAARLLPTDHVIVEATGNAAAVVDILAPKVARVVVANPLQVHLIARAKTKTDKIDARVLAQLYAAGFLPEVWIPDPATQARRRQVTRRNQLVKSRVRLKAIVQSILHAHLIPRCPHQDIFGAKGRAWVLAQEVPPDERAAITRHIEEYDRQTAAQRVVEEDIARAAIPDAAVRRLMTIPGVDMVVAVGVMAAIGRIDRFPSADQLSACLGLNASVRQSGDGPAHHGRITKRGRSDARHLLVEAAWQTVRSPGPLRAFYERIKARRGAHVGAVAVARKLAVLIWHMLSKEEDYAWGRPTLLARKIRKMELAAGAEARRGQRGTAYDYNHPALRRADRAVAEHAEQAYRRIMQHWQRTRKRSPPSQRGDMAT

SEQ ID NO: 204899 - protein, 361 aa, unidentified
MHPTTAAIDLAKNVFQLAIADCDHRVLEQHRLTRSQFMRFFENRNVQRIIMEACGSAHHWARTFNAHGIEVILLPPQYVRAYVRRNKTDAADAKALLEAARDCDLRPVRVKSVEQQALQALHRTRSLWMATRTARINALRGFCREFGLHIPVGARTGVEAISRAVADDQSALPELLRPTLRLLLDEIRVLETRIAQTERSIAEAAANSSACKLLMTIPGIGLLSSTAISAATCGSVAHFTSARHFASWFGITPKENSSGETRRLGRISKRGDKYLRMLLTHGARSVLRAAASAQRQGRTLTGIRQWVIALQARSHHNKATCALANKIARICYAVLRDQTPFGQPAPRLNTKAQRQTFSVAQ

SEQ ID NO: 204900 - protein, 345 aa, unidentified
MDHVSRIGMDTSKHVFQLHGVNAAEMPVLRKKLRRKEMVAFFANLAPTVIAVEACGASHHWARLLQLLGHTVRLIPPQLVKPYVKRGKNDAADAEALCEAMSRPTMRFVPVKTAEQQAALMLVGLRDRLIRNRTQLANAIRGYAAEFGLTAAKGMAHLAQLLERIQADEGVPVLARELFAIQAKEYEQMEQQIDEVDAKLMAWHRANECSRRLAKIPGVGPIAAAMLLMKTPAPELFRSGRQFAAWIGLTPKDHSTAGKVRLGVITRAGDEGLRSVLTVGATAVIKHALRDGSASPWLIKLLARKPPKLAAVALANKTARIAWKLMATGQSYATNTKPAATVGAV

SEQ ID NO: 204901 - protein, 417 aa, unidentified
MNSPPETIVIDRYIGIDIHKHYVMVGGQNANQEWILKPRQVQMVHFRSWAEKNLKEGDAVVVEATGSVWDIYDIVAPLVSKTVVANAHKVRQIAEARVKTDKEDIKRLITLLIADIVPEVWVPPTHVRELRSLISFRWRLSKQITMSKNRLHSVVQRFNLNAPEGGLLTDKNRSWWEEQNFSDLTGFQVDRDLEIVANLESQKAAIDQKLAELSNSEPWASDMVYLMQIPGMGLIFSMVVLSAIGDISRFPDPGKLVGYAGLGAGVHISGEKHQEKSITKAGRKELRWALVEAAWVAVRFDPFWKGQYQRLRVRMHPNKAIVAVARRLLVSIWHILTKREPYRHFDEETIAYKMLIWAQAIGEEARNDMTKQQFAKYGLLRLGIGQDLERIVKGGGPRRIAPAEEVLALRPELAPPR

SEQ ID NO: 204902 - protein, 409 aa, unidentified
MNSKENTKINQVTEQTLVIGIDIAKHNHYATFVDERGRVLKKAFLVKQTRKGFEQFYQEILEGMKEFDKSHVIVGVEPTGHYWLNLAYFLEDYGIPLVVINPMHVKKVKELDDNLQTKNDKKDALTIARLMKDGRFSYPKLLRDQAANIRSCFTLEQTLIDDRTILKNRIHRWVDKYFPELFEVFSDFGAMVLGVLETTPLPAELVNMTTADLADQCAKASQMKQRRPKIAAKVIEVAQTSIGITVAPWGAKREIQCLIRQYRLLEEELAMIEEEIQSLIVQTADYEYLASFPGISRRTISGLLAEIGSFTDFESPRQLIKLAGLTLHENSSGKHKGMKKISKRGRRRLRAILFRAMHPILRNNPAFMKLHQYYTQRPQNPLRKKESMVVLCSKLLKVLHAMCTKKAEI

SEQ ID NO: 204903 - protein, 328 aa, unidentified
MCTLGIDVSKNKIDLCLLTAGPGGKKKHKVLTNEPAVAHKVIDWLNAQRCVPESVTVVLEATGIYHENLAYGLHEAGVSVCMANPCRVREFAHGMDILNKNDAVDAFVLACYGELKPPAVWVPPSPEVRKLRALLRKRDALREDVQRTVNRLEKANSTSTPQEVIRSLERTKSWLNEELARIEKLITDHTDNDPGLKADLDLLKSIKGVKDQVGREMLALLKDGTFKSASQVAAYLGLTPVEKTSGSSVRGRPHMSKTGPSGVRAKLYVAALTASRWNKQAKAIYERLVAKGKAKKAALGAVMRKLVHLCFGVLKTRLPWDENYVATA

SEQ ID NO: 204904 - protein, 340 aa, unidentified
MDATTYGLDVAKRVFQLHWVDAHTGEIVNRRFGRDELIGFLAQRPAGRVALEACGSGHWWARKIRALGHEVVLLHAKFIRPFVQTNKTDAADARAIWTVVQQPEMRTVAAKTEEQQAMLALHRMRALLVKFRTMQINQLRGLLYEFGATFKAGRVAGLAAIRARMAELEDALPAMLFGSLRDQLQRIDGLEQDIDQFEKRIGTWQKQEAACRAIAEVPGVGRLTATALVAMIGDPKTFKSGREFASFLGLVPRQSGTGGRIRLGSISKRGDPYLRTLLIHGARSVMYHSKAPTPWQTEIQARRPANVAVVAMAHKMARTAWAILAHGRPYQKDYVSVKPA

SEQ ID NO: 204905 - protein, 321 aa, unidentified
MMNAPTLNCNRVLAFEVAKDSLVVHELPSDRQRTISNRGADVRRLLRKALHESPAPLLVVCEASGGYEKHVLQAACDLSIACHRAHGARVRHFAKYLGAAAKTDAIDARMLALYAANTKNLRLYRLPEPEQKAVRALKSRRDEIQEMLIAEGNRIEHADHPSVRASLKAHVKILTEALDRLDREIGELISATPALRERVRLMQTVIGVGARTAEALIAYFPELGSLSKGQAARLAGLAPIARDSGKTSAPRHIEPGRNALRRTLYMAALVAGRRNPRLAAFAQRLKARGKPAKLVIAAIMRKLIVILNAILAEGRPAHQFA

SEQ ID NO: 204906 - protein, 348 aa, unidentified
MNNLHYIGFDVHKKTISFCVKTAAGEIVEEGSMLARRAEVRQWAGARSQPWQGAMEATLFSGWIYDTLKPYGEQLEMAHPAKMKAISAGKKKSDTLDARTIADLVRCNLLPACYVAPPRIRELRRLLRYRSLVVSEAVRMKNKMAGLLMETGALYVKEKLHRKKYFASLLEELEEVPDSVIDLLRLSRGALEMFESTQKRLVRELLADPELTQRVERLMTIPAVGEITALTWALEVGDPQRFRCNSDAMSYCGLTAALKSSAGKQQRGPISKQRNRWLQTTLIEAAKLAPRWNPQLAALHARELERGHRNRATLAVARKLVAYLLAVDKSAQAFQVRAPLEVPTQKAA

SEQ ID NO: 204907 - protein, 368 aa, unidentified
MEQITRGGVAGEVVRVGVDLAKRVIQVHAVDAQGRVVTRRALRRDIFLAWCAQLPRGCVVAMEISSSAHHWARKLATMRLKPLLMSAQLVKPYRSEGATGKNDANDAAAICEAASRPTMRFVPVKSVEQQSMLCVHRLREGLKADRTACINRIRGLLAEFGLVFAQGPEALSSALPDVLEDGANEMNTLARRVIEHARAQWLELDTHLAWCDARIAQHAKDNAEVRQAAQLMGIGPITASAAIATVDDFAQFRNGAQFGAWCGITPRQDSSGGKTKLGRITRRGDTYLRSLLVQGAKSAVMTAHKRSDPISRWTLALRERSGWQIAAVALANKNARILWAVMTKGDKFDANYVSVKPGAAAAQAPAAP

SEQ ID NO: 204908 - protein, 348 aa, unidentified
MGMVGGLDLHRKQITFDVLDTETGQVHRGRISPADRRLFRGWLAEFAGQQVELAVEGCTGWRFVIEECQRAGVVAHLAEPAEVAGLRGRRRHAKTDRIDARHLRDLLLEGRLPQCWIPPQLVLETRAKVRLYKDLADQRVGWQQRMHATLYHLGAPAHRDLLAGDRDRLARIEELSPAARQAITVALSMIESLEAQLEPLRAELTGFARRQPGCQALQAEYGIGALTAVVIWSEMGDARRFTHSRDAVRHAGLDITVYSSDTKRSAGRLSRQGSPLLRWALYEAARCSARAASPDHGYYRQVADRLGGQRAALSVARKLARRAHHRLRALGEHALAPPPTTPAPPTRS

SEQ ID NO: 204909 - protein, 341 aa, unidentified
MNHYAGIDVSLKYSSVCVVDTGGKIIRESTVASEPEALIAWFSSLGFEIARIGLEAGPQSQWLYAAMRQAGLAVELLETRHVRDAFKAMPVKTDRKDAQGIAQLMRLGWFRPVHCKSIEAQETRAILSARKLVQSKLHDVEMSLRGTLRGFGLKVGRTTPNRFAARISELVKGHPTLQVIATSLLAVHAVLLREFKGFEKRVRIMARSDERARLLMSAPGVGALVALTYAAAIDDPGRFTSSKQAGAHFGMTPKKHQSGETDITGRISKIGDKGVRTALYEAAHVILTKPVKGSALKSWAAKIAKRAGMNKAKVALARKLAVIMHRMLADRTPFNPAAAAA

SEQ ID NO: 204910 - protein, 373 aa, unidentified
MPKYSTAFGMDVHLRSTTVCALDADTGEAVTRRFPGNPWGEIAGWMDGFPGPSLAAYESGYLGFAPQRELAGLGVECVVAAVSKIPRSAADSASKNDRNDAARMAKAILAHDISPVWVPSPEVEGIRDLAGAYDGATARLATAKQRLLAFLAKRGFVYGGTTPAGNPRKYWTYDFLRWLDKVRPEDDGGVRTLAALRNEVEAAAEARADLLSEYRAAVDAGPIAAEVAALQSIKGCAFALAAAFSAEVGDFTRFRSGRQVTAYFGLAPSQRSSGGSVRLGGISGAGNALVRKLAVEGSWCYAAARHQPKLMPRDTGVPLEIRMHGRKGSERLLRRREEMLARGVPAAKANAATAAELVRWLWALGMMCREGAE

SEQ ID NO: 204911 - protein, 338 aa, unidentified
MESYAGIDLHASNNYTAVIDDHDKRLYGKNQPNRLDVVLSALDPFKTELKGVVVESTFNWYWLVDGLMENGYKVHLANPSAIKQYEGLKHTDDKWDAFWLAHMLRLNILPEGYIYPKEERPVRDLLRRRLLFVKHRTSHILSLQSMITRNLGVRMACRGIKKLMEEDAESMFDSPYLVLAAKNNIATIQFLKKRIKVIEREIRPLIKIREEFKNLLTIPGIGDILGFTIMLEVGQLSRFPKVGDYSSYCRCVKSERLSNGKKKGKNNKKNGNKYLSWAYIEAANFIRMHCPKAKSFYQRKMAKAGGIVATKALSNKVARASYYIMRDQVPFDEDKLFA

SEQ ID NO: 204912 - protein, 348 aa, unidentified
MKQFSIGLDCHQATLNGAILDQNGSIVVEQRFANKAPELEEFVRPYAHCAKAVIEASSTSLPIYDQLTELGIPTIVANPLRLHAISDAPVKNDRNDALMLAKLLHANIVPTSYVPPKHIRELRDLVRAYTRLIDQRTQAKNRIRSVLMQHRLKWPSKDVASKYARIWLAEQQLDIGMRGVINANLGVIDLLKTELQQISQAMLDWKHCQKELELLQTISGFGPLVSRVFISEVGEITRFPTAKKLACYAGLVPGLHASGDKSRTGRLIKQSNAAIRRALVLAAWAAIRHDKPLRARYERLKARGKPAQKAIIAIARHLLCVAHTMITKQTTYWLAREKLRARDSPALP

SEQ ID NO: 204913 - protein, 481 aa, unidentified
MASTRPSGLSREQRRELARRLQAADPGLEVMHPHAAGIDVGNSTHYVAVRPDRDPDPVRRFDCFTADLHRLADWLQHCGVTTVALQSTGVYWIPIYEILEARGFEVYLVNARHTKNLPGRKTDVQESQWLLKLHTYGLLRNSFHPSVEIRAVRTYWRQRGDHVRAVSTCIQRMQKVLTQMNIQLANVISDLSGWTGQRIVRAILAGERDPATLAALSHPGIHATHAEIAKSLEGTWQPDLLFVLKQEVDLYDTYQLRIAECDQELERHLKSFADKTPDPPADPEPSPTLAPSDARAHQHHPKRRRKAGSHAPQFDLGRELHRISGVDLTRIDGIDVGVAQTVISEVGLDMSRWEDEDHFASWLGLCPDNRITGGKVLRRGTRHVINRAATALRLGASTLLRSQSYLGAQYRRFRGKLGAPKAITAMAHKLAVLVYRMLRWGHAYVDKGLQYYEERHRQQQIHLLKKRAAKLGLQIVEPQVA

SEQ ID NO: 204914 - protein, 354 aa, unidentified
MQITNNGFINLNLEKIELIKTGIIYDHFIAIDWSQKSMGIARISNKNPDKVKITIGPANLSGLKEHLNKIKGTKILTIEESTPAHWLYVELYDCIEKIIICDPYKNRLLGDGAKNDPIDAKKLCLLLKGGLLHEVFHTTENIYKLRKLVSSYEDIISQSVRLKNQRAGFLAQNGKSKKTKELPKETIEKLIQESQDKLINGYTEVKEKYLEEISIFCKRDKRLRFMKTIPGIGEILAVKILAMTVDPRRFKNGGKYLAYCGLVKHAKESGGRIYGRRNTRYNRVLKSAYKTAALAAIGGNNPVREYYEVLIKNGLAEYNARHTIARYIARLCFGIMKNPKKYEPYLWRKNRCEK

SEQ ID NO: 204915 - protein, 423 aa, unidentified
MTSTNILYIGIDLSLGSNHVVALDGEGRKLASFSVGNDLPGATLLVERMLELAKSYQAEKVMVGMEATSLFWWHLHQFLSSHKKLNEELDVSVYTLNPKLIKKFRDLHSDLDKTDPIDAMVIADRLRFGKLPISHLIDEQYEPLKRLTRFRYHLIKSLRTEKNYFLVHLFLKYSSWQKVSPFRSAFGVTASELISEYDPEELAQTSLEELAKKMADISGNRVVDPNKTAQLVAKVIKTSYALEPKFKEPVDVILSNSYDTIHFFEKKIKVLDEVVEKEFNRFPNPLLSIPGIGMVFAAGITAELGSVSRFTGQSAIGKYAGLAWRKSQSADFEAEETPRKPGNQYLRYYLVQAANSLHVHNETYKQYYERKVGEVPRHAHKRALVLTARKLARLCFAMLRDGRYYNSEQERRKPDIPNSTGIE

SEQ ID NO: 204916 - protein, 353 aa, unidentified
MDRYAGLDAHAETCTLGVIGPSGRRLTSKVIETNGRALVEAIRSIPGRVHLCLEEGTQSAWLYEILEPHVAEIVVTTPPEAKGAKDDLRDALARAEELRIGAIRTRVYKAPQHLAGLRSAARTYRIATQDVVRVKNRLKAVLRSRGIQAGSGVYDKETRAEWLEQLPAFGHRSAAEWLARELDELQPLREDAEDWLLKEAKAHPIIRKLSTAPGMGPLRTAQVVGIVGTPHRFRTRRQFWSYCGLAIVTRSSSDWVQDKRGHWVRAEVRQTRGLTRKRQPVLKAIFKGAATTVITQLGTHPLHADYERMLRSGIKPNLAKLTLARRIAAMVLSMWKHEEVYDPERHKPVIEKT

SEQ ID NO: 204917 - protein, 403 aa, unidentified
MKSVGIDISKGRSTIAVMRPFGEVVISPFEVRHTGSELSKLAKQLKSLDGETRVVMEATGNYHASVAKLLHNAGLYVSVINAKLVHGYGNNELRRVKTDRKDAVKLANYGLDRWLTLPRYIPEEDTRLLLKNCYRQYRQYSKVQTVLKNNLISLLDTVFPNANRLFSSPIRGDGSEKWVDFVAEFWHCRCASEKSERAFTSKYLRWCRKHGYNFREAKAHTIYAEASGHIGVMPKSETTKLLVKQAVSQLRATSTALAALKQEMQSLASVLPEYPVVMDLFDVGPTLGPQLIAEIGDVRRFYSKKALVAYAGLDAPPNDSGDVTGRHKSMSKIGASSLRRTLFLVMSVYLQTAPLDEPVCQFMDRKRAEGKPYRVYMMAFANKFLRIYYATVKAYLESLEHTA

SEQ ID NO: 204918 - protein, 392 aa, unidentified
MRFAGIDIASEKHVVAVVDERSEVVVKPKAFSEDADGYRKLVELLGAPGELLIAMEATGHYWKNLFAALVAGGYTVSLVNPPRTHRFAGEDLQRTKTDAIDALGIARFAAQKRPVATKLPDSATEELRELVRLRDRLVQDFGDRVRQLHRLVDLGFPEFTRYVRSLDSELATSILKDYPTAEAFVGVRPRALSNLKYDGVHFVGLELATQLLEAAKTSVGRHHGYAYRIQVKFYCEDLDILRRRLKDLDRDIETKLGEHEVGTLLTTIDGIGTQTAAKLVAVLGNPADFRNERALAAYIGAVPGLKLSGKAISMRASLTPIGNAALRSALYMPTLTAVKRSPWLRAFYQRLISAGKPPKVALLASMRKLITAIYSVAKNRKPFVPRPVEGTA

SEQ ID NO: 204919 - protein, 338 aa, unidentified
MKKFFIGIDFAKTKFDVVVLSCDDLLSKGEHSQFCNTKDGVKQFEKWLRQMYGTSVITDSVICGENTGVYSLLAAKILSKDGYTVCLESALRIKRSLGISRGKNDKKDARDIAEYAARHHDKLVVYQAPSQTTEALKTLFTQRRLMVKQKSDLQRRNKELTALYKDNPLLKKMLDSDKRIINVIDKEIEKIEAQMKSIIGSDPEVNKVYNILTSMKGIALVNAVALIVYTHNFKRFDYDARRICSYWGIAPFANQSGTSINGKPHVSHFADHYLKSLLSQAVLCAIRYCPDIRKYAQRLMAKGKHISIVHNNCKNKMIHILVAMVKNGTYYGDTQKKS

SEQ ID NO: 204920 - protein, 315 aa, unidentified
MSEMPCFVGIDVAKAQLDIALRPSGARWAVPNAPDGCMTLVERLQAVQPTLIVLEATGGLERAATAALATAGLPVVVVNPRQARDFARATGQLAKTDALDARALAHFADVIRPTPRPLPDTQTQALRALLGRRQQLIGMRTAEQNRLAGPNAYLAKDIEAHITGLNERLATLDNDLETLLRASPVWRENDDLLQSAPGIGPVCAQTLLLELPELGTLTRQQIAALVGVAPLNCDSGTLRGRRMIWGGRAHVRTVLYMGTLVATRYNPRIKAFYERLLAAGKVKKVALTACMRKFLTILNAMLKHRTSWQCQEVQG

SEQ ID NO: 204921 - protein, 337 aa, unidentified
MKRYLGVDLHRTQFVVCTRLENGKQEVRQWRIAELPKFVEQLQPEDQIAVEAMGTTARFHEAVVGRVGRVVVVNPHQFKVISESVKKTDRKDAEALALYLAKDLLPEVRMKPKPNRELMHLAETRDLLVKQRSALKNKINNLLAMQGIELKREALSSKIALERVLASPVRGMVQLELRILVEQIRSLSDSIAELDERLEEEGQQLPGYENLTSIKGIGSLSATVLLTVIGKISDFADENKLAAYLGLVPKIANSNEKESSGGITKQGNKLARTALVQCGLVAKRYSPYLKRFYERIKQRRGGGKAKIALARKLVKIVFDTLKNQWVFEDFPSFTLAA

SEQ ID NO: 204922 - protein, 333 aa, unidentified
MKEKLRFLGLDVHAETIAVAIAESDGEVRSLGTIPNRLESIRKLIKKLGPAEKLRACYEAGPTGYVVYWQLAELGVKCDVVAPTLVPVKAGDRVKTDRRDAEKLARSHRSGDLTAVWVPDEGSEALRDLVRTREAAKQDQLRARHRLSKFLLRSGQRPPAGIRPWTRPYLIWVAQLRFTQMAQEATRLDYLHEVEHMRERVERLERAITEAVKLASPCGAVPSEDSSGKRTRRGSITKTGNAHLRRIVVEAAWSYHRPPCIWYGLRKRQESISEEVKEIAWKAQHRLHKRYMRLAAAGKDKRKITTAVARELLGFIWAIGTRAETTVRQRIAA

SEQ ID NO: 204923 - protein, 402 aa, unidentified
MNAVGIDVSKGKSMVAIMRPFGEIVSAPFEIKHTASGINSLVELINSVEGESRIVMEHTGRYYEVLAHQLSKANLFVSAINPKLIKDFDNDSLRKVKSDKADAVKIARYTLDKWQNLKQYSVMDELRNQLKTMNRQFGFYMKHKTAMKNNLIGILDQTYPGVNTYFDSPARSDGSQKWVDFASTYWHVDCVRKMSINAFIDHYENWCKRKKYNFSQSKAEEIYGKAKELVPVLPKDAITKLIIKQAVDQLNSASITVESLRTLMNETASKLPEYPVVMAMKGVGTSLGPQLMAEIGDVSRFTHKGAITAFAGVDPGVNESGSYEQKSVPTSKRGSSDLRKTLFQVMDVLIKTHPQDDPVYQFLDKKRAQKKPYYVYMTAGANKFLRIYYGRVKEYLASLPKS

SEQ ID NO: 204924 - protein, 423 aa, unidentified
MRFIGLDVHRDFCEVAIAEGGGVRLAGRVRTEPAALALFAQSLGVDDQVALEATGNALGIARIIEPHVGRVVLANPKAVKGITRAGAKTDKIDARTLAQLLAGGFLPAVWLPDEQTRILRRRISARAQLVRQRTRAKNQVHATLIRNLKGKPPVSDLFGLRGRRWLAAQDLPADEQETIAACLRQIEFLDGEVELVERALAEQVLASAQMRRLLTLPGVNFVTAAALLAAIGDIHRFPTARQLVSYLGLDPRVSQSGTEPARHGRISKQGPGETRHVLVEAAWHSTRTPGPLRAFHQRIAGRRGSNIATVAVARKLAVIAWHMLSRGEDYAFARPSLTREKIRKLELATGAERQKGKRIGVFATKEQHDLDKQLAAQAELAYRRLVQDWQPAIKGAGAAPGRASRRPSSGQAARQETAPPPAL

SEQ ID NO: 204925 - protein, 343 aa, unidentified
MKIAILGIDLGKNSCSLVGLDGQGKVVKRRRMRPASIVGFTKSLPPCIIAMEACCGAHHLGRLLKAQGHEVRLMSPEYVRPYVKAQKNDDRDAEAIAEAATRPTMRFVELKSEEQLDMQTLHRARDRLVGERTALINQLRAILLERGIVIAQGRRNLERELDAMLCEEQGLAVSPRLRKLIEGIREEWRGLDRRIAAFDDEFAARAKTDEAARRLATIPGIGVLNATALAAAIGEGQTFARGRDLAAWLGLVPRQITTGGKPRLVGITKRGNCYLRKLLIHGARAVLPTLCKSETPLGGWLCALLARVHKNAVVVALANKLARIAWAVLRRKETFNPSATALA

SEQ ID NO: 204926 - protein, 423 aa, unidentified
MRVVYPVCCGVDVHKSFLVATMVTTHSHQAEPVYHKRRFSTFHRSLAEFRDWLLESQCLDVCMESTGKYWIPVFNVLEGHVRVTLANPKWVSAVKGNKDDAKDSKWIGDLFRLGLVPGSFIPCKEIRVLRELTRYRTKLVACKASEKNRYQNALTVCNLSLDSVASSMFGKSAAAIVDHLVSGQPLGPEQCKSLLYGAMRRKADQVLEAAEGFQMRAEQKTRLRVIQSHMAYLDEAISLLDEEIGRLTESFSSYIELLCGIPGVKRLTAVVILSEIGTDMSVFGSSKRLCSWAGLVPGNNQSAGKKKSVRISHAGVYLKPALVQAAHAAVKDRQCDYYGQKYRQIARRRGKKRAIIAIARMILTAVYAMLQTGETFCPRDMIAGKETSKLKIQKHHQALKAAARLLQAEGIEIPEALALGMTG

SEQ ID NO: 204927 - protein, 428 aa, unidentified
MDGQEHSRLEDFRQLKREIRGSKEYLIVGIDVAKDRHHAFFGTATGTTLLKRLVFENTHEGFDTLLIQTEAVKVQHGLQKTVFGLEPTADYHKPLGEFLIKADHRVVLVSGVAVKRNRELLDGRWDKHDTKDSANVADLISQGKCLFYDHPSLSLRELRALVSLKRRLKKQEHGIKARIRNHLLAQYFPELDRYYRHWGSEGLAIVRWCLNPSVIAAMDYGHFTQFVAPQGRSLAQQERLKAIWTRAIDSIGCEAGEALGFEATVMVEELEHIRNAIRATEEKIEEICLQFPEYRYLLTIPGFGPDVSSKVLSAIGDPFRFTTGAQVLKMAGLDLSAERSGDRSDAARPVLSKKGKADLRYALYQAALIASTRNRSFVLYFTNKLRGREREKGIRIKMRVKLAAKLLIIAWTLMKRKEPFNPEYLTTE

SEQ ID NO: 204928 - protein, 356 aa, unidentified
MSKILAIDLGKFKSVTCLLATETNETEFWTMSTDRQYLRTVLKKYHPDLVVIESCSISGWVHDECVAIGYKVLVCNPNQEAWKWKNVKRKTDRDDALKLAKLAALGQLVPVYIPCERQREYRSLVKYRKVVLGRLNRVQNNIRALFNARGMKMTSGQKAWALERWEQISQHRKPLEDCSPDELWRGELDLELMEYQRLSEHHKQINDKLCKLAAKDKRVQLLQTIPGVGRKTAEVVVAYVDDPHRFQNARQVSSYAGLVPKRYQSGQMDRHGKIHKRGPRLLRGALVEAAWLMLRYNPWAKTVYQRICGNRKTRKKKAIVAVARKLLVRCWVMLLRGERWNQAALPRQPQVSIAAG

SEQ ID NO: 204929 - protein, 347 aa, unidentified
MNFYNNTHPYYCGIDLHARSLYVCIIDQAGNNCLHKEISANPDKLQELLEPYIGNIVVGVECMHCWYWVADFCEEAGIDFILGHALYMKAIHGGKAKNDRIDSFKIANLIRGGNFPLAYVYPKEMRATRDLLRRRMKIVRHGADLKAHVVNTTSQYNLPPNKVNLKNHDAREQLRNTFSEKAVQKNIDLDMTILDCYAEQLSKLEWYIQQQARQHKPNHLHLLKSVWGIGPILALTIIYEIGDVERFDSVQKFASYARLVKCKAESAGKTYGTSGNKIGNAHLKWAFSEAAVLYLRGNEKAQKYLLKLQKRMSKAKALSALAHKLGRCVYFMLKNERVFDENRFLKG

SEQ ID NO: 204930 - protein, 319 aa, unidentified
MNPSVMPTPRVIGCDVGKNTVVVCDSRTGRTTELANRPEALTAFLADLPRTCLVVCEATGGYETALLLAAAELGMPAHRADARRVKAFIRSLGRIAKTDRIDAHGLTRYGQDRHADLPRWQPADTARDDLRTLVRLRTQLVKQRAALTNQIKAPGGAVAKHRLRALLAAATEQIDAIEADIANLVERQPTIARTVDVIRNIPGCGPVTAVTVAALMPELGSMTSRQAASLAGLAPHPHQSGQRDGYRRTRAGRPDLKRALFMAAMAARNHNPHLRTVYDRLVANGKKPIVAITALMRKLITIINARVRDALGTNSCQLS

SEQ ID NO: 204931 - protein, 352 aa, unidentified
MKIIGCDFHPGFQQISMLDVETKQRVKKKLHHASGAAEQFYRSLQGQRVRVGIEACGNTRWFERLLQRWGHELVVGDAARIRAAAVRKQKNDERDADHLLELLATGRFPAIWMPSPEERDLRQLLLHRHKLVQMRTRIKNQLQHVALDQGLQKKRQLWTERGRQWLLELSLPPWTERRRSDLLVLLDGLEPAIAELSQAVEMAAQQDPRVQLLRTHPGVGPITALAFVLVIGDVQRFAHSNQLASYLGLIPSEDSSAGRRRLGAISKQGNTLLRTLLVEAGQSAARCDPQLKRAYQRCCHRKSLTGIGKVMVARKLAVRLYWMLKSNQPYTPARMQGSPSHPVSTREGSSIV

SEQ ID NO: 204932 - protein, 310 aa, unidentified
MIINPSVVGIDISKHRLDIFDTLNDVATRIDNTRPAIKAMVSRLQANSAFVVFEATGSYDRALTLALEASGIAFARVNPAQARDFARACGRLAKTDRIDARMLADMGSRLALTPTQAICPKRRKLTGLAGRRDQLVAMRTKEKTCIKEVDDDQLKQNLQDHIDWLTTYIEDLERQIETLIKDDRDLINQATLMRSVPGVGPVTATTLLTLMPELGTRSRRTIAALAGLAPINADSGQYRGTRRIRGGRRRVRKALYMTAVSAVRTKSRFKTAYQAMVEAGKPPKTALIAIARKILVTLNAMLREQKPFRA

SEQ ID NO: 204933 - protein, 423 aa, unidentified
MLNVMSNNFKFFKGSDILSDVIALDVSKNHSYVVWYRNKQCMDEFDCLHNQVGFKHLKAVTDSADNPAVYFEATGVYSRPVVRFCQDNHLPYTQLNPLELHLRSENLRRVKTDQLDAHKIARSVTENNYRQTEIWSRDYRQLRELTRFCDQITNDIKLAQGKLYTALEQTFPEEEQLFKNKISKLALNVILLFPHPDSVHGLSRTKLKNKLMSQTDKRLSKTKGLKYAEKLITFAQISYPASDINSIQVQEVRYYCRQLIDLIKQKEILIDQMRMLSDPLPAYQIFISMPGIGPLSASQLLGELGDITRFDDANQLNAYIGIDLNRYQSGQYQRQDHINKRGNPHARALVYLIVRNMIRQQASAPNHIVDYYYRLKKRPIPKRDKVAIVACMNRTLKCLYAMTMAGTKYVYAYTDSKSNNVQE

SEQ ID NO: 204934 - protein, 365 aa, unidentified
MQKAELSCEADSENYLGGSSETMYYIGLDVHKRTISYCVKDAAGKIYQEGKIGSTRRELDSWIKTLPQPRTIAMEATIFTGWIYDHLLPHAEQVKVAHPLMLRAIAAAKRKNDKIDASKIDDCLRCDFLPECYMTSTEIRDRRRTLRYRGLLVKQMVQMKNRISGLLMEKGVTHTKRRLHKVGYFAELMGGNEEIDQSIRPLLKLSREHIVRAQKLDYALVSSLERDPLLAERLKRLRTVPGVGPITALTWALEIGDVARFRSIKQAISYCGLCGAEKSSADKMLRTPISKQRNKHIQHVLVEAAKLAPRQCHELALIYEKEMQRGNRNRATLAVARKIVAYLLAVERREKDFVPTEEFGGTAAA

SEQ ID NO: 204935 - protein, 394 aa, unidentified
MERLFVGADIAKDSFSAGLDAEGNECFSGSYSMDSDGFGKFLEIITAHCRDLQKMLIAMESTGCYHINLFSFLTSRGIRALIINPLLIANFAKRSLRKTKTDKKDARTIAKFIKEHKEEISQLSVSQDLQDLRDLARERESVSHLITASKVEIKRVLRTTFPELESVGDVFTRSMLQFVKEYPSARRVKMARLKDLAKALNPPHVGNKLSFSGEDILRAAHRSIATTSPAKEEILQGKIATLLHLQERLEDLTKLLTDLCKATRVEDWKILRSIKGVGPKTAVPFLAEMGSVENFSSHKKLIAFAGMDPSVCQSGKFIGKSKLSKRGNRHLRRAIYLMASAVVSQNAFFKAYFVKRKREGLTPQRALLATAHKLIRVIFAMLSHRTYFQPKMAN

SEQ ID NO: 204936 - protein, 344 aa, unidentified
MPTEADRTLYAGLDLHKHNVFCGIKDQAGKPIYRQRLPAELPAILEALTPYRSQLRALAVESTFNWYWLVDGLQAAGYPVRLANPAAMEAYGGLKQTDDESDALWLAELLRLGILPEGYIYPAAERPLRDLLRRRLLIVRQATQSLLSLQSMVTRHTGRSVSAAVLQRWTANEVQATFAEAYTQAAAGGLLELLGAQRALQHRLEKQALAAVKRHGPFVRLLTLPGVGNILGMTITLETGPIARFASAGRYASYCRTVESRCESDGKKKGENNRKNGNKYLAWAFVEAAHFAQRYNPRAQAWFARKTARAGRTVAVKALACKLAKAAYYVLRDDVEFDEQRLFG

SEQ ID NO: 204937 - protein, 445 aa, unidentified
MSESLISAASEPEWAAFAAIDWADQKNFWRLVPAGSQHFEQGELENTPEAVEAWAAGLEQRFGGRPIAVCLEQSRGALVYMLTKYPHLVLFPVHPTTAAHYRETFCPSGAKSDPNDTASLLDLLLRHRERLRPLQPDTVETRLLHFLVEERRRTVDEKTRQSNRLTDCLKLYFPQILRWFDDVTTPLVGDLLGRWPSLDQLQRAHPGTLRRFFHEHNCRSQQLMEERITAISQAVPATRDQAVLEAGTMMARGLVALLAVLRSNIAAFDKRIAELVRAHPDGAIFASLPGAGPALVPRMIAAFGTRRDRYQNADEMERYSGIAPVKKGSGKTELVHFRFACPKFLRQTFHEFASHSIEQSEWAKAYYEHLRNDEKKDHHPAVRALAFKWIRIIFRCWKDGKPYDEQVYQQSLRRRGSMLGAALASATSVGWKPIAGFQKLSENNA

SEQ ID NO: 204938 - protein, 388 aa, unidentified
MNVGADKSEPLTAIHTDLGAIFVSLELSRSSWLITSLSPGGGEKMSKHSVPGGDFAGLMERFAQLQEKARRRTGQSFRIIVVQEAGLDGFWIHRALQNEGIESHVVDAASIATSRRRRRAKTDKIDGETLVRALLAYKRGEPRVCAMVKAPTPGEEDRRHLCRERKALIAERVRHVNRIKGFLFSQGVSGYQPLRRDRRQRLEELQTGDGRAFPQHLKALINRELDRLELLLKQIKTVEAARDALLAVGQTGKPAPAAMLLDIRGIGPEFAAILWSEGLFRHFENRRQIAAYAGLAPTPWQSGAVDREQGVSKAGNPRLRTTLIQLAWLWLRNQPRSALSVWFHERVSRNGGRLRKTTIVALARKLLVALWKYVTAGVVIEGVTMKVA

SEQ ID NO: 204939 - protein, 430 aa, unidentified
MHNKNYISVGIDVGSAFSFMTILAPDETVILKPFKITHNNKDSLERAVSEIKKAEELYSLESRTFLESTGIYHFPLFCYLVDCGFNASIINPIITHSTKNGNIRKVKNDKIDSKGIAKLGLSKDISVSQFPAKLVLELRSLTRKYYDLTDERSAHINKLKGDLHTVFPQYLDVFCDVTGKTSTMILRQYGTPDKILRGHKKTMIEKISKASRKGLAKASERYEKLCAAANAAKTFGCQIDSIYFNIFLTLDLVEKLDSALDSILNRIRQLITFNKNEKFIQQIKLLNTIPGVGFLTAVTIMCEIGDFSAFRNPKQLFAYFGLDPEVNESGKFVGTQLHMSKRGSRIARRAIFAVALASIRTKRNGEGINPYLRKYYELKSGQKPKMVAIGAVMHKVCNIVFAVLRDEKAFELRSPEEHCKQYQRPALAAA

SEQ ID NO: 204940 - protein, 371 aa, unidentified
MLKKQSTIYVGIDVSKDKLAVAIAGGGAPDDVLSLGTFENTPASVDRLLKKLAGRGSLISVCYEAGPTGYGLYRQVRAFGFECCVVAPSLIPVRAGDRVKTDRLDAIRLARLLRAGELTPIWVPDETHEAIRDLVRARESAAGDQRHKRQLISAFMLRHGRIYHRSKPWTMRYRRWLQRQAFDHPAHQIALQEMVVAERHTAERLDRLTRHIEELIQDWHLGPVVNALRAMRGVALISAVTFMAEIGDIRRFESPRKLTAYLGLVPSEYSTGLTTKRGGITRAGNSRVRHKLVEGAWTYRYPAKIGERKLYILQELPADVQDIAWKAQTRLTARYRKLNGRGKKKTVITTAIAREMSAFMWDIARRTMPTM

SEQ ID NO: 204941 - protein, 353 aa, unidentified
MTNDKYVGMDTHPASITAEVLNANGRVVSRSIMETHPEQIRDYFRGMSGTVRVAFEEGAQAAWLYEIIKPLVAEVIVCNPRDSKLSRSGNKSDKIDAHKLASLLRMGELKAVYQGDARTRGLKQVVRSYSALAKDSRRVMNRIKAIYRGRGIVCKGTEVYHPELRQQWAIRLADSNTRNRLELLYRELDCLSCLRKAARAELVKEVRRQPAWKILKEVPGLGPIRTGYIIAIVSTPFRFRTKRQFWPYCGLAVVTSSSSDYEVVGGKFRRSKKPIGTRGLNRNYNRDLKYVFKSAAHHASSRDPFKQYYDRLIANKMKPELARVTLARKIAAITLAMWKKGEGFDADRLIQEA

SEQ ID NO: 204942 - protein, 335 aa, unidentified
MKDNYFVGIDVSKETLDISVVQLNREVFYLRVANSVHGLKQFFKSCPKHITIDEAVFCMEYTGIYNFYAIEFLTEKKARVWVESANKIKKTLGLQRGKSDKVDAFRIAQYAFKNRDEVKLWESPRQAVKELKKLLTMRARLVNIKKIVQVPLKENAGFCSSKEAKVERKMFSRSLKAIQQDLAQIDKSILTLIYNDEELERIYKLITSVVDVGAIVAANMIVITNEFKSFSNAKKFACYSGVAPFEHTSGKSIKGKTRVSHLANKNIKALLHLAAISSIRFTGELKTFYKRKVEQGKNKMSVLNAIRNKIIHRIFAVVRDGVYFEKKYIHPLQVS

SEQ ID NO: 204943 - protein, 356 aa, unidentified
MRGKNQSEEIAVRGKEVFVGIDVHKESWQVTVRAEGEEVFHGRISSEYRVLRRILNRFVGSEVKVAYEAGPCGFGLHDQLREDGIEGVVVPPSLIPVESGNKVKTDKRDSRKLARLLESNMLKRVQVLTPEDRADRELLRTRRQMVEHRNDVARQIKSKLLFYGIRSPFSAKAGWSRKFIRWIKDLNLEWGSVKVSLQSLIELYEYLSGQIVGLNRKVAELCRSDKYRGRVKLLRSVPGIGVLIAMEILVELQDMERFQRADELASYIGLTPSEFSTGQYVRQGRITRCGNKRVRTCLVESSWHLITKDPWMRRKYERLKQWKGGKRAIIAIARNLIIRIRRILLNEEPYVIGAVA

SEQ ID NO: 204944 - protein, 400 aa, unidentified
MLSIGIDVSKGKSTVCGMKPGGEIVYAPFEVQHTREGMSELVSLLRSSGEEVRAVLESTGSYHCPVVAALLENGIFVSVVNSLRMKRFCSQSIRKVKTDRIDAMQIALYGLAYWQELQPARLPEDTYRELQLLARQYYQMTSILIKAKVDFNAICDQVLPGMQELMNDHAGRHKLSDFVLRYRHTTHILEMGETRFRKDYCKWAEKKGYRNCERMAALIFATAQNGIPVLPNAPSTQIVITEAIRVLHTVEASRDAILTQMQALAKTLPEYSLVREMPCIGDTLAPRLIAEIGDVRRFHSKRALIAYAGIDAPPYQSGKFCANNRHISKRGNRYLRKTGYEVMQSYVMHKPANDPIFTFIEKKRGEGKSGKLAMVAGLNKFLRVYYGKVTELYRSLPAIE

SEQ ID NO: 204945 - protein, 348 aa, unidentified
MAIVGGFDVHRAQITFDYVDTDSGQVTAGQIRPATRPALRNWLQRFEGRDDVAFAVEGCTGWRFVVEELVRARVEPHLAEPADTATLRGRKKRAKTDRADARLLREVLAQHRLPESWAPPSHVLEVRTLGRLYVALMDERRAWQQRIHAQLFHQGVPSVRALLTSDGRVALAKAELSPAGVQLLQTALATVESLTLQILPLRAQLQTIGCNQPAVVALTQQYGIGLLSGTIVWAELGDCRRFSNSDQAVRFAGLDVTVWSSDTKRSAGRLARQGSPELRWALFEAAKCAARRTSPDHDYYQAVRDRLGGKRPALSVARKLVRRCYHALRDLGDQAWQAPITNPTQAAA

SEQ ID NO: 204946 - protein, 347 aa, unidentified
MPQYIGIDLHKATSFITRMDQRGRILEQLQLRNDAPTLQGYLTRLRPDTRIAVEATGNWTYLYELIEDRHPDLVLAHPLKTKAIASARIKTDKIDATTLAHLLRADLLPAAYIPPRPVRDTREVLRTRASLVRLQTQVKNKVHALLAKTGLRTPTKNAFGKKAQRFLAQVPVRPCYRLALDGYLRLLAALTTELATVTATIEAQVQRDPQAQLLCTMPGIGPYSALLILSEIGDVRRFPDARRLCSYAGLVPSVHASGGTTRHGRLTKQGSKWLRWILVEVSVHAITGAPQFRSLYHRVAKKHGANVGRVAVARAMLKTIYAMLRKGEAFRSIGTGTTGQRRGVMAG

SEQ ID NO: 204947 - protein, 338 aa, unidentified
MQLTTVGLDIAKNTFQVHGIARHGQPLLKRKLSRGRVLEFFANLPGCVIGLEACAGAHYWARELIKLGHEVRLMPPQYVRPYVKTNKHDAADAEACCEAVQRPGMRFVPVKHEQQQALLMLHRIRDRLIAERTGTINAIRGHMAEFGMVAAQRGAGLKDLVAIISDLDDPRLPALARELLVLQVEHLYQIEARITALDGRLARQAREDEACRRLTEAPGIGPVIATAMVATVGDARLFSSGRSFAAWLGLTPRQHATGGKQRLLGISKRGDGYLRRQLMHGARSLVRLAQGRECHPWAWINALLARRPFNVVVAAVANKLARMVWAMLSRGEAYRAAA

SEQ ID NO: 204948 - protein, 390 aa, unidentified
MSQQHFDASRSLTALDQDSTIIAVIEMSQSKWLVSALVPGVERHPLKKLDAQEEVLLKLLHRWRAEASQAGREIKRIVVAYEAGRDGFWLARWLRARDIEAYVIHPTSIAVSREHRRAKTDRLDTELLMRAFLGWLRGEKRHCSMVAIPTIEEEDARRPNRERQNLVTEQTRIVNQVKAIFARFGICRFRPTLRKAEEKLKGLRTAEGTALPENTRAELCRHLARLRVVREQTRAVEQERLRKLAAAPTTEKGSHAMVRLIAQVLGVGIETADMLVNEMLLRHWRDRKAIARYAGLTGSPDESGKRRRERGLARAGSARVRCAMIQFAWRFLRFQKNSALAQWFAARTTDRRASTRKTMIVALARKLLIALWRLVTRGEVPQGVILRPAL

SEQ ID NO: 204949 - protein, 344 aa, unidentified
MEHFVAYLALDWSDAKHDVCLVDAATGKKESFVLKHTPEALNEWATALRARFAGEKIAVCLEPSRGPLIYALLKYDFFVLYPINPTTLAKYREAFSPSRAKDDPQDAEDLVELLIQHRDRLKAWLPDDEKTRTLQVLVEHRRRLVNDRTRISNRMTALLKAYFPQVLLWFDDIRTILVCDFLLCWPTLESVKRVKPKTLEKFFHEHNSVRRETNEKRLAELKEAVPLISDRAVINSSVLMIKALAAQMKTTIEAIREFDSEIEALCQSHQDFFIFDSLPGAGAVYSSRLLAALGTDRNRWTSVDELLCFSGVAPVIERSGKSTWIRWRYFCPKFLRPILHRVRR

SEQ ID NO: 204950 - protein, 441 aa, unidentified
MHVIYERCCGLDIHKKLVVACLIILAANGHRHKEIRTFRTTTQDLLLLKDWLATAGCTHVAMESTGVYWRPIFNLLEGAFDLLLVNAQHIKAVPGRKTDVRDAEWIADLLQHGLLKGSFLPPTPQRELRELTRHRTSLVEDRARVVNRLQKVLEDTNIKLGDVATDILGKSARAMLEALLAGQTDPKVLAELARGRMRSKIPALEQALVGVVKPHHRFLLTELLTQIDALDEAITRVSNEIATRMQEEEAVEQHQAEPPAPLPQEPPRPQEQPVLTWAQAITLLCSIPGISRRAAEGILAEIGLDMTRFPSAGHLASWAGMCPGNSESAGKRLSGKTRKGSPWLRVLLVEAAHAAAHTKNTYLSAQYHRLAARRGKKKAMVAVGHTILVIIYHLLQQQKSYEELGGNYFDERERRDTEKRLVRRLEKLGYHVELQPDTPGA

SEQ ID NO: 204951 - protein, 360 aa, unidentified
MEVGQTVADHGVVGGVDTHKDLHVASVVDELDRVLESRCFATTRHGYQQMLTWMRSFGQLRRIGVEATGTYGAGLLRYMQNAGVEVLEVTTPDTHDRRKRGKNDDLDAQNAAHAAFAGRRTVTPKSRDGMVESLRVLKACRKTAVAARRVALQMIHNTIVCAPDELRETLRRMTRMQLIRTLAAWRPDLTDYRSVVSAYRITLKSLGRRYLELHDEIADLDTMIVAIVDELAPALVARNSIGHGSAAQLLVTAGDNAERLQSEASFAALCGASPVPASSGKTTRHRLNRGGDRAANSALHIIAIGRLRTDPRTKAYIAKRVAEGHSKLEAIRCLKRYIAREVFSLISQRKREINQGRNAA

SEQ ID NO: 204952 - protein, 400 aa, unidentified
MDERERFRWFLGVDVSKETFDACCINSKGEKVFSLSASMDRKGFEELINQLSALSIAQGSVLVGMESTACYHINLYSFLVSLGYPVMVINPLLISNFVKLQLRKTKTDKKDASVIAQFLLLNRNSLSRNIVSSDISDLRDLSRQRESLVDQMSSIKTEIKRLLTITFPELEQVAGVFTKSMLRLLCQYPSAASMRQLKRSKIAKILIPGSYGKQTAASVDRILKAAQGSVGTSSPTKEILLKQKASILIQLEGHLQELTEVLMELCQGKIDEDMEILTSMKGIGDNSAMNFLIEMGGNIKQFVSHQKLIAMAGLDPALYQSGKTDRKGKISKRGNRHLRRIIWLMTTKVIQFNERFKQYYLKRINDGLPYKMAVLATAHKLIRVMFAMLTNRTLFNPRMN

SEQ ID NO: 204953 - protein, 339 aa, unidentified
MKLTPFGVDIAKHVIQVHFIDEFTGEVIDKQIKRVSFLDFFSNKPPSLIGMEACGGSQYWARELEKLGHKVRLLPGKFVKAFVMGNKNDVMDARAIWMAVQQPCKSVAVKNEEQQAILSLHRMRNQLVKFRSAQINALHGLLLEFGETLGKGRAALDQSMPIVLERLGLKLPPFLLRQIEAQHQRLKDYDDQITNIERQLTAWAKQNDVCNRLINIVRLGSTVATAAVSVMGDAGAFKSGREFASYLGLVPKQTGTGGKVKLLGISKRGDTYLRTMFIHGARSAATLQKEPGQWITELKQRRPACVAIVAMANKLARTVWAIAAHGREYEKDYVSVRPY

SEQ ID NO: 204954 - protein, 342 aa, unidentified
MYYIGLDVHKKTIGYCVKDAAGRVQQEGKIGSTRCELDAWIKTLPQPRMIAMEATIFTGWIYDHLLPHAEKVKVAHPLMLRAIAAAKRKNDKIDASKIADCLRCDFLPECYMTSTEIRDRRRTLRYRGLLVKQMVQMKNRISGLLMEAGVSYNKQRLHKVGYFTELMAGNEEIDCVRPLLKLSRETINRSQKLDYALLSSLERDPLLSERLKRLRTVPGVGPITALTWVLEIGDVARFQSIKNAISYCGLCGAEKRSADKVVRTPISKQRNKHIQQVLVEAAKLAPRYSHELSLIYEKEKQRGNRNRATLAVARKMVAWMVAVERRKQDFVPAEERGGTVAA

SEQ ID NO: 204955 - protein, 361 aa, unidentified
MSESTFSTFIGLDVHARSVVAGVLDAESGEVRTVDAPVATAELVAWLGAQGEAVSVAYEAGPTGYLLARACEAAQIPCIVAAPSKIAAAPGDRVKTDRRDALRLAKLLRLGELTPVRVPTPAEEAARDLVRAREDARADLMRARHRLSKLLLRQGLVWEATTWTQAHERWLAAQRFPEGGLQTAYHESLAAVASVEARRDALDAAIAEEAGKEPWAEVVSRLCCLRGVSTLTAFGLASEIGDWERFDGRSIGAYLGLVPSESSSGERRRQGAITKTGNGHARRLLVEAAWHHRRRPYPSRELARRREGLPAPVRERAALAERRLHCRWRSFDARGKRSTVTAVAVARELAGWCWSLAVMDC

SEQ ID NO: 204956 - protein, 350 aa, unidentified
MLIGVDYHPSFQQIAFLVEETGECSERRLNHSDGEADKFYRDLQLRGVQVRVGMEATGYSRWFERLLAELGFEVWIGDPAEIKTKRVKKQKTDRQDAQLLLKLMMEDRFPRIWVPDAENRDLRQLLWHRHRLVQMRTRVMNQLHVVALNEGLRRKKALWRPAGRAELEGLALAPWASRRRQDLLDLLDRLTPKIHELNGKLEQIVEQRPVTRQLSTHPGVGPLTALAFELVIGTPERFQCAKQIASYVGLVPVEESSGDRRRLGHISKQGNVLLRFLLVEAAQVTVRSDPQWRNQFFHLAMRRGRKIAKVAMARKLAVELYWMWRRGWNYNDMQQLGSHAGEPGNPHGVQ

SEQ ID NO: 204957 - protein, 310 aa, unidentified
MERLFIGLDVAKDRLDVHIRPTDERTSFPYDEAGLGALVKRLQSLAPTLVVLEATGGYEIAVAAALATGGVTVAVVNPRQIRDFARATGQLAKTDALDARALALFAEAVQPPARPLPTEQAQVLGELIARRRQLVEMLGAESNRRLQVRDPQVQRRIDEHITWLRKALEKLEEDLGNTIRSSPLWRERENLLTSVPGIGPITAYTLIAELPELGQLDRRAIAALAGLAPMNRDSGMLRGRRMITGGRPTVRRVLYMATVSALRCNPTIAGFYARLTADGRPAKVALIASMRKLLTILNAILRDRRAWQPA

SEQ ID NO: 204958 - protein, 344 aa, unidentified
MNCKAISIDLAKNVFQILGVNERNTPLFNQKIQRKKFLSFMVRFSATTIYMEACYSSSYWARQLQALGHTVKLIPAQHVTPFVRGNKNDANDTIAIFEASQRPYIRFVPIKTEYQQEISCLHRIRERLIKTKTAVCNQTRGLLSEFGVIFNTGQSEFIQGMNSFLDSDQHRHGLKVLMKAQFEEYNALRERISIIDKELTRFVCDSPSGKILMSIPGVGPIIASAILAAIDKGQAFKNPRDFAVWLGLTPQQYASGNTSKMGGITKRGDRYLRKQLIHGARSVVNNTQDKVDQLNVWVRQLRERKSYNQTAVATAHRMARVIWVLLQRQELYVPQPAICGVRHA

SEQ ID NO: 204959 - protein, 391 aa, unidentified
MECRMPQPNDLGRSLVALDQDSTLIAVIEMGQASWLIAAIVPGLNRHPLKKIAADEEQLLQVLRRWKKEAETAGRMIKRTAVAYEAGRDGFWLARWLGARGIEAYVIHPSSVPVSREHRRAKTDRLDTELLKRAFLGWLRGEPDHCSMAAIPTLTEEDAKRPGRERESLVSERTRIVNRIKGALARLGIRNFRPMLRNASQRLETVRTPEGAALPPNTLAELRRDMARLSFIKQQIKEVETARLERLQRAPGEGANAMVQLLTRVVGVGVETADMLVHEVFSRNLRDRKAVARYAGLTGAPDESGKRRGERGLAKSGNARVRRGMLQIAWGFLVHQKDSALAAWYRTRTADARGTTRKTMIVALARKLLIALWRLATTGEVPSGLVLRAAA

SEQ ID NO: 204960 - protein, 380 aa, unidentified
MRVLYPRCCGIDVHKKSVVACVITPEGRETRTFGTMTADLLELADWLLEKGVTHVAMESTGVYWKPPYNLLEGTGLELLVVNAQHIKAVPGRKTDVKDAEWIAELLQHGLIRGSFIPDRPQRELRELVRYRTQIIRERARAVQRIQKLLEGANIKLSSVATDILGVSGRAMLTALAAGEADPAALAEMAKGRMRSKRAELEAALRGLVGEHQRRLLQSGLRHVDFLEEEIARLDGEVAERMTPFEKELEALDTIPGCARRSAESFLAEVGADMSRFATHRHLASWARLCPGNDESAGKRRSGATGHGNPWLRGTLVEMAHGTARSRSYLGAQYHRIAARRGKKRAAVAVGHSILVIAYHVLARRHALPRARGQLLRRARA

SEQ ID NO: 204961 - protein, 383 aa, unidentified
MLPTQEKDFTRGDEVLAVSLELSKGSWKVALHDGKRDKPAIHAVSSEAADARLGQVVGVIEATRKKWGLAAGCRVVVSYEAGQDGFWIHRALTKLGYEVLIVDPASIPVERRARRAKTDRLDVIKLVTSLRAWLRGERDRMHVIRVPEVAAEAQRHLVRDRGELQKEVQQHRDRMRKLLRTVGCWVAVERDFAERLAQGEVRCYDGAALPPEMHQRLAREGQRLALVQQQLAELEAALVGQLPQPVRERITQLTRLKGVGQVGAMRLVLELFWRNFSNRRQLGACVGLVPQPYDSGESRVDQGISKQGNRRVRALLIEMAWMWLRHQPHSALARWFAQRTQGTGANKRSRRISIVAVARRLAIALWRYLKDGVIPEGAQIKGA

SEQ ID NO: 204962 - protein, 489 aa, unidentified
MKKQVAKKVQRDKTQNEKASGQRTPSKWAEMNRKQRREMMRKMQSEDFDLEVVHPHAAGIDIGNESHYGAIPPSLDLQPVRCYGCTTAELKKMAEWLTQCGIRTVALQSTGVYWIAVYDILEAAGLEVYLVNARETKNLPGRKTDVQESQWLMKLHTYGLLRNSFRPSQQIRTLRTYWRQRQDLVRSTGRHIQRMQKALTQMNIQLANVISDLSGVTGQAILKAILDGERDPRELAAYRDCRIEASEEEIAQALEGNWQEDQLFVLRQEQAGYEFCQKPITECDQQLAQYLAQLEDRTQGATLPEETRKGRRNKRKGQPRFNLREELFRMTGTDLTQIDGIDVMAAMTVVSEIGWDMSKWKTENHFVSWLKLCPDNKISGGKVIGKGRMPTNNRATTVLRMAASTLLTSESYLGAQFRRLRTRLGPPVATKAMAAKLARLLYRMLRYGMKYADQGAELYDAQYRKQQVIHLKRKATQLGLQIIELAPAA

SEQ ID NO: 204963 - protein, 382 aa, unidentified
MDTLSNTVAAIDSEQQKAKLFVALELGQATWVVALHSPIADKISIYRIEGGDTDQLMALIEKKRVQAARRLGRAAQVVSCYEAGRDGFWLHRFLIRRGIDNRVLDSASILVDRRARRAKTDRLDARALLRVLMALVRGEEQVCRVVRVPSIAQEDERRLSRERERLLHERNSHIARIKGLLILHGVRDYRLIERDWKERLDAVRTTEGQALPARAKTEIERECRRLWLAKQMLAEVEREIEQMIAHDGAVAGKLIRVRGIGPTFASVLTHEVYYRSFDNRRQVGSYLGLVSIPWQSGSVRRDQGITRSGNARARRCAIELAWLWLRHQPGSALACWYRTRVGTMTGRMRRIALVALARKLIVALWRYLQNGIVPEGAVLKAA

SEQ ID NO: 204964 - protein, 410 aa, unidentified
MRRTSVELTQQCSMIGGVFMTYYVDIDLAKYQHECLIMYQDGEVVSNAFTFDNNKQGFTSFLSVLSCLNASHQIRIGFEATGHYGTNLKNFLTNHGYDFMEIHPVLISRFSKASSLRKTKTDKIDVHLISSYLTTVEYKPYLTQSYHNTSLKSLTRSRDALVKERSLQLQRCTNLLDHIFPEFKPFFNQSLASATCQYLLINYSTPSKMSRMNQNSYDKMKSKLRRTISYVKFLKLRELAKNTVGVENPLLEFQLVNYITLYTTLDRLVAETETLIVHEFSKVPAHLQSIPGVGIISAASIYSEIENFNRFNHPDKLVAFCGLDPAFYQSGESAFTGKMVKRGSSYLRQYIMNSAQTVIIHNPTMYEFYLKKRHEGKQHRVALSHVAKKLLRVIFKLENDHINFDSTKMI

SEQ ID NO: 204965 - protein, 339 aa, unidentified
MKKKPQKKTAAGSYLGLDLAKDKFDAALRAAGGELQHKVFANSAEGLKELGRWLSAQRTGKVRCVMEATGIYWEEVTAWLHARGHTVHVLNPAQARRFAESQLCRQKTDAVDAALLCRMAQIAVECEFHVWAPPAEEVLVLRRLSRGRAALVDHCASLRQQRLECREKAVKKALDAAIATVVVQIKRLVEAMKEHVAAHPSLSEEVALLKSIDGIAFVSAAAILGELAPLPEDTGVRQAVAYAGLNPRQWQSGKSVQAQSRLSKTGNARLRKALYMPALTGWQCNPLLKAFAARLLAKGKKKMQVLGALMHKLLALCCGVLKTRQSFDASWLEPEQTSA

SEQ ID NO: 204966 - protein, 343 aa, unidentified
MEECSIVGIDLAKNVFQVHASDEVGRRLFSKKVSRGQLLKLMSTIRPCVVALEACGGAHHWGRQIAKLGHGVKLIPPIYVKPFVKRQKNDAADAEAIVEAASRPTMRFVAVKSADQQAAGMAFKTRDLFVRQRTQLINALRGHLAEHGVVAPQGVVHLKRLRTALADETTGLPTAVVLHAGMILDQISVLQSRIEELEKEIFAVSRKEELAVRLMTIPGVGPITAAALLAFAPDPATFRRGRDFSAWMGLTPRQHSSGGKERMGRTSKMGHRDLRRLLITGAMAVVRWAARKGAQAGSWLARMLDRKPKMLVAVALANRMGRIIWALMANGGTYNSHRDTAQA

SEQ ID NO: 204967 - protein, 378 aa, unidentified
MENTVGELGSPSPKLRRGARTVAGAQARISQEWADAGYLRKRRASGKMQSQTFVGIDVSKDKLDIAIGSEGELWQVTNDSAGHSELVEKLSGVKPALIVLEASGGYEAVVAGVLWEAGHPVAVVNPRQVRDFARGQGKLAKTDQIDARMLAMFGEKVPIEVRAPLDPEARELQILVLRRRQLIEMLTMEKNRRRLIPTGRARRNLDKHIAWLEEAIRRASDDIDQAVRQSPMWREKEDLFRSVKGIGPVNARTLVAELPELGRLNRKKIAALVGVAPFNRDSGKFKGKRAIAGGRSHVRTVLYMAAVTAARCNPLIRPLYQRLIAAGKPKKVAIVACIRKLLTILTAMVRDGVYFSAAPHPNPLPAAAAAGRGGKISP

SEQ ID NO: 204968 - protein, 371 aa, unidentified
MSNIYVGMDVHQETITIAVLPAVAPTPTRVEQVPNDLPKLQRYLARIAQDGAVQVCYEASGAGYVLHRAVTAWGYPCVVIAPSLIPTKPGVQRKHDRYDAAQLARLFRAGELTPVRVPSEAEERVRDLVRCRETVQRELLQSKHYLLKFLTRRGLEFRHGKHWTKAHLAWLETLTAPTSPLQAEDQLVFREYLALFHYKNDRRLVLDREIAARATLPALAPVVGRLQCFRGIQVHAAMVLATELGDWRRFATATPLMAYLGLVPSERSSGPRERKGAITKAGNSHCRHVLIQAAWSYRHRPKVAATLRARQRHQPAPVIAHAWKAQHRLHALFQHLAYRKQPRVAVVAVARELVGFLWAVMQEVAPTTAVV

SEQ ID NO: 204969 - protein, 350 aa, unidentified
MRQSSKVDTYLGKQVFIGIDVHKRTYSVVSSIDGIVIQKWATVASPEKLVKQLQTVYPQADIYSAYEAGFSGFVLHRALAKAGIENVVLNPGSIETAIHNRVKMDKRGTQKIASRLEAGRLKGVRVPTESVEHQRLLTRTREQFVQERTRIKNMIRMRSHPFGLLAPEDRRKMSHSWVKAILAKAPSPEFTTIIQAYWKIWQTLDAEIKALEVTLKQQAQLDPLEVTYRSAPGIGPLSSRILANELGDMSQFTNERQLFSDTGLTPSEHSSGDTIRRGPITRQGNPSVRHVLCESAWTAIRKDPDLRHFYERLYPRTGKKKAIVAVARKLIGRIRSAFRQGVPYHLNPIA

SEQ ID NO: 204970 - protein, 340 aa, unidentified
MRHVIGCDVHKRYSVFVAINTHGKLSKPTRVEHDRDGFRAFLQALPPHCEIAVEATGHWYWIIDEMEKAGHQPHLADPHESKKRMGKPNKHDAHNGTLPESWIPPGELRDVRELLRTRMALRDLRTALKHRIHAAIDRYGLHNDAISDLFGKAGREFLLHQLYGLPPETHAMLLLELDAMDDLTPRIETIEARIAEVIVPSPEVQLLLTLPGAGQILAPLLWLEIGDIERFPRAENLASYAGLVPRVFSSGGHTVLGHTNRYVNHYLRWAFVEAATCAAHLHAYRESHIGVLFQRLLPTRGYGRAIVAVARHLAEASYWMLRKRQPYRPPKPKLSSSRIG

SEQ ID NO: 204971 - protein, 355 aa, unidentified
MSSEKYIGMDVHQATISVAVMDSTGKVIMESILETKASTILEFLGGLRGTLSVTFEEGTWAAWLYDLLKPHVAHVLACNPRKNAALNQGNRNDKIDARELANRLRLNDLKPVYHGENGIRMLRELVRSYLTIVKDLSRVMNRLKALYRSWAIPCAGRDVYYTRHRRQWLEKIREAGPRHRAEHLYLQLDMLQHLRQQARRELLAESRKHSITTKLRKIPALGPIRSALAVALIQTPHRFRSKRQLWKYCGLALETRISGEYVYVQGERRRSKKQLSIRGLNKDHNHDLKGLFKGAATRASVIPGPFREFYQRSLAKGIKPTMVRLTLARKIAAITLTLWKKGENFNVEKLKSQAA

SEQ ID NO: 204972 - protein, 411 aa, unidentified
MVKENFIYVGIDLHKETHTAVMIDCYNQKLGEITFPNRPAAFPKLVTKVKKCNTDGKEVVYGLENAYGYGRALAVWLIDKGYLVKDVNTAISHRQAKHRGAMYRKSDSDDAEAIALATLNMLDKLPDAYPNDAYWSLGQLVHRRDNIMKQRTRLVNQLHEQLCIAYPSYKQFFNDISRPTALYFWEHYPSRKYLKGKSVEDLRAELVPVSHNKCSTKTCEKILDAVASDKVKNNAYQDARDMVTLSIVSDLQYYDKQLAEVDKMLEQMYKMLGCTLTTIPGVNVITAVKILAEIGDIKRFSNANKLAQFAGIAPLHLSSSGKGKDVATKQGNRRLQATIYFLAIQMVQVSSKGTPRNSVVRAYYEKRKAEGKTSQQALICISRRLISIIYGMLKHGTEYRMPVVENAGEKL

SEQ ID NO: 204973 - protein, 409 aa, unidentified
MTVTNQFAAHVGLDWADKKHDVCVQFKNGERVFDVIEHTAEALDAWLTELHQKVKGRIAIALELKKGPVVYALQKYPFITVFPVHALSLARYRQAFSPSGAKDDPQDAELALELMLRYPQKIKAIEPDNADIRLLQQLVEQRRQLVEDKRRFVNRIINTLKQYYPQPLEWFSHRGSLLLCELIIRWPSLQQLKRARRDTIRNFLNAKGGRAMALTEQRVASIDNAIPLTTDPSVIEANALMAAALATQIKVVSEIIKTYDERIETLFDTLPDAGLFKSLPGMGPCMGPRMLAALGDNRDRFNSAEEIQNYAGIAPVTERSGQKSWVHWRWQCAKFVRQTFVEWAAKTVNSSYWAKLYYQGLREKGKSHQSAIRALAFKWIRIIYRCWKARTCYDEAKYLLALEARHSPY

SEQ ID NO: 204974 - protein, 354 aa, unidentified
MEQIIKQCAGIDCAKKDFAVTFSVCDAMHEVQHLSCRTFANDELGFKAFNKWIGKYYKRSIQLSLVMEATGVYHEKLAYFLHALGYQVVIVLPKRAKDFSKTLKVKKITDKIASQYLAIMGLEKKLDVWNKPKKEYLDIRHLSREKDRIQHQISQLKNQMEAEISGAHPGKKTIKRMNETLKLLKKQKKEVLTEIEQVINANAELKEKVRKITTIPGIGLMTATTVIGETDGFNHVKNKRQLVSYAGYDIINHESGTSVKTKARISKRGNRNIRKAMHMPALTSIRREVNSKNLFIRLVTRTGIKMKGVVAVQRKLLVLIYTLWKKDTEYDPDYESKKEGSFTLPNELDQVRSL

SEQ ID NO: 204975 - protein, 311 aa, unidentified
MKTYIGIDVAKRFFDVYDLAGETHHRFDNDQLGITSYVKQLRRQVPKLIVVESTGGYERELGIALHDAGFQVAVVNPKRIRDFARAQGRLAKTDKIDARIIAEYAASMHPPARGVWDKHTRAIKALVARRRQLVEMRTAEKNRVEHADTTAIDRSITAVLKTIERELASIEQQLHDQITRIPELKQKMDQLKTVPGIADTTATMLVAEVPELGRLNRRQIAALIGVAPINRDSGTFRGKRMTGGGRREVRARMYMPTLVAIQHNPVIRTFYQRLVSAGKSKMTAIIAAMRKLLTIVNTMIANNQQWRTNTP

SEQ ID NO: 204976 - protein, 345 aa, unidentified
MKITTVGIDLAKSVFSMHGIDEHGKAVLRQAVLRRTVSRGKVMEVMAGIGPCLVGVEACSGAHHWARELGKLGHTVRIMAPRFVAPYRKSGKNDGNDAEAICEAVGRPSMRFVAEKSAEQQALLVVHRVRKGLSDERTALINQLRGLLSEFGVVIAKGRYQARHQLPVVLEDAGNGIPELARQCFLEVNERIRELDARILAYDRRIEALARESEPAQRLMAIPGIGPVTATAIVASAGHAVEFKNGRQFAAWLGLVPRQYSTGGKTRLGRITKQGDVYLRTLLIHGTRAVLARVGERTDRASSWVRSLIERRGYKRAAVALAAKNARTIWAMLAKNQAYRPAAAV

SEQ ID NO: 204977 - protein, 501 aa, unidentified
MTPLERLCKFRRPGRDALIINSEDNTVKKNGERKQALAGDQRRMNRRQRRELARKIQADDISLEVIHPDAAGIDIGNESHYVAVPPKRDSEPVRRFGCTTAEVKVMAAWLKKCGIRTVAMQSTGVYWIPVYDILEEAGFEVYLVNARDTKNLPGKKTDVQESQWLMKLHTYGLLRNSFRPTQEIRRMRNYWRQRSDLVRSAARHIQRMQKAMTQMNVQLANVISDLSGVTGQEIIKAILAGERDPHKLAAYRNPRVKASEEEIASSLEGNWQDDQLFVLQQEQDGYEFCQRQIAECDARLEQYLKESEDRSGGVSLPEEKRQGRRKKKKGNAPRFELREALFRMTGTDLTQVDGIDVMTATTVVSEAGWDMSKWATENHFVSWLHLCPDNRISGGKIIGKGRLTTNNRLTIAFKMAASTLRESKTYLGAQFRRLRAKLGAPIAIKAMAAKLARLVYRMLRYGMQFVDKGAEIYETQHRERQIKHLKRRAAQLGFQVLQVEA

SEQ ID NO: 204978 - protein, 404 aa, unidentified
MAKYHVGVDIGKQTHKACIRNLGQDSYSGVFSIDVSRQGFEKFTRTLEKHSINKVDFLVGIEATGNYGSTLVYFLISQGYKVVEINPYRADNYRKAQGKKAKTDRIDARSLAGFLSMEGHKALSIPDPIIDNLRELTRFRADLVKDRGTLLNQLHNVLTTLFPEFAGIFSKLDSATSLAILTAFPGPEYIQIAGEDKVSEVLRCSSRGRFGKDLALSLISAAQNSIGIMQRESALAVKLSILGERLISLKLAVERVEKEINELFRKLPYNPEDFPVGDVTSIATIISEVEDINRFSTIKQFLSHFGWCPKSCQTGTYNQEHPRMSHAGNKYVRRIIWMLSIVAIKNVTCYRDYFLRRVAEGKAKMDIIVAIGRKLLSVFYAILKTGIPFNPNLKVNGRYALARH

SEQ ID NO: 204979 - protein, 411 aa, unidentified
MHNRRNYLYVGVDLHKEHHTAVMINCWQEKLGEIQFDNKPSAFSKFLLEVETYVSDGITVVFGLEDVGGYGRALAKYLVDHERVVKEVNPALSFLERKSQVMIQKNDSWDAECVARILVNKFNQLPDAKPNDLFWSIQQLVSRRNALVKAQSALKNQLHIQLNHHYPSYKKFFSELDGKTALAFWQQYPSPSCLEGVSIKKLTAFLLDVSNNTCSVKKASDILKLVKEDGQTMKEYQEMRNFLVRSIVRDIEFKKKEMKYIERELKQLVKLLDYQLETVPGIELVTASALIAEIGDVRRFPNANKLARFAGIAPVYFGSGGKGKTHKSKQGNRALHALFYNLAVQQVQVAKGSKKPWNPVFHAYYQKKLKEGKTKGQALVCIMRRLVNIVYGMMKYKTAYELPVVEEKEVV

SEQ ID NO: 204980 - protein, 368 aa, unidentified
MQELITGFVGLDAHAESTAIAVAEAGRAAPRFVGSVGARLSELTKALSKLGAPQSLCVVYEAGPCGYGLARQLTSLGYRCEVVAPSRIPRRPGERIKTDRRDALNLASLARAGELVPVTIPDERDEAIRDLSRARVDAVRARLKARQQLKALMLRHGQRYSGKTSWSAAHERYLARVSFAHPAQDIAFTEYRQAVGEGEARVQRLRESLTREVEHWRMHSLVSAVMTLRGLDLVAATTVVAELGDLRRFAHPRELMGYLGLVPSEHTTGSKRRLGAITKTGNGHVRRVLIEAAWNYRFPARISPALQMRQERQPPDIRAIAWRAQLRLNHRYRRLKARGLHHNKICVALARELAAFVWDIGRHVAPSP

SEQ ID NO: 204981 - protein, 372 aa, unidentified
MKIAFPTLVYHWSDGIESLSMEKSLYAQGRPEQVQLQYNLTNLLIDTMTTILGIDISKAKFDVVLLYQGKQRHKVFCNTLDGFNKLQAWLIKQQVSQLHACMEVTGVYGENLAMYLHNAGYTVSVVNPARIKAFGISQLTRNKTDKVDAQVIALFCQTLVPEAWSPLPVEVRELQALVRRLDALMQMRQQETTRLQSGVHPAAVLASIQTVIAHLDQEIKILKAAIEQHLSQHSDLQQQQELIASIPGIGALTAAKILAEIPQLKSFSSARQAAAFAGLTPKQRISGSSVRGRTHLSKMGSARVRKALYMPAVACLKWNPLIQELYQRLRQRGKHSMAVLGAVMRKLLHLIYGVLKSGRPFSLDYAKSSMTT

SEQ ID NO: 204982 - protein, 353 aa, unidentified
MNNRKYIGMDVHQASISIAVSDAAGKVLMECIIETKAATVLEFIQGLRGSLWVTFEEGTSAAWLYDLLKPHVTKVVVCDPRKNALLKAGNKNDRVDARKLGELLRAELLTPVYHGESGVRTLRELSRGYLAVSKDLTRVMNRLKAIYRSWAIPCAGQQVYSPRHRAAWLEKLREAGVRRRAEQTYQQLDFLMEIRKETRKELLAESRKHPARKLLEQIPRLGPIRVALLIALLQTPHRFRTKRQLWNYCGLGLRTRSSGEYRYTGGQLQHARKPPALRGLNVNHNHDLKHLFKSAATQAGNDPLGAFYQNLLAGGMEPPMARLTLARKIAAIALKVWKKGERFDPAKLKQQAA

SEQ ID NO: 204983 - protein, 399 aa, unidentified
MINGHDQFAVFLGLDVGKGEHHAVAQSRPGKKLLDRALPNDEAKLRELYRRLRKHGPVLLVVDQPATIGALPVAVALDEGITVAYLPGLAMRRIADLHPGSAKTDARDAAVIADAARTMPHTLRALKLDDERIAELTVLSGFDDDLAQQITATSNRIRGLLTQIHPALERVLGSRMDHPAVLDLLETWPIPADLTKAGKSKVRSRLLKRAPRIGARLTEEIFAAMAAQTVVVTGTNAAAVVLPRLAAQLASLRAQRAEVAEKVEELVAAHPLSKVLTTMPGVGVRTCARLLTEVVGKGFPTAGHLASYAGLAPVTRRSGSSIRGEHPPRGGNKVLKRALFLSAFAALSDPVSRAYYDRKIAQHKRHNEALIALARRRCDVLYAMLRDGKPYLQPPATAA

SEQ ID NO: 204984 - protein, 371 aa, unidentified
MSESKGITYVGLDVHKSGINVAVILPGSKQVTEEWQLSNDARARARMVRKLKRMGGDQVHVCYEAGPCGYGLQRELCDAGLDCIVIAPSLIPAKPGERVKTDTRDARKLVELFKAGLLTEVHPPTPEEEAVRDLTRAREDAKRDQLSARHRLSKMLLRQGYIFRNGCNWTQRHRVWVKAIRFDLREQQEVLDNYILAVEQIEERLKHLGEKLEEVAKSETYADRVGWLCCLRGVDTVTAMTILGELHDVSRFRNPRELMSYLELTPSEHSSGGHTRRGSITKAGNGHVRRVLVEAAWNYRHRPAVSAYMARRRKGQPAEIIAIADRAQQRLHKRYYRMKEGRGKHHNVVTVAVARELTGFIWSILQYEKAA

SEQ ID NO: 204985 - protein, 421 aa, unidentified
MNQLAEIPFTVYVGIDWADAKHDICVQAAGSEDREFDRIVHKPEEIEVWAQALYQRFGGPIAVALELTKGPIVSALQKYDFFVIVPIDPIRLASYRKTFTPSGAKDDPTDAEFALDYMMRHPERLQVLKPQSVPMRKLTYLVEARDRLKGDQSRFVNRLIQALKQYYPQTLDWFNERNTVVFCDFLVQWPTLEKAKRARKKKLEAFFKNHNVRFAHVIEARIDAIKAATPLTHDEAIITAHRLQVEALVEQLRLTIQAMKRFDKEIVATAEHLPDYELLFKPLPGAGKVLAPRLLAAFGEDRERYPCAEELQRRTGIAPVTKRSGQSQWVHWRWQCSKFLRQTFIDWSAQTINKSAWAGAYYRQQRAKGSSHQAAVRALAFKWIRILYRCWQDRSPYDESKYLEALRRSGSPLLKQLAEAV

SEQ ID NO: 204986 - protein, 341 aa, unidentified
MKKFIRTAVDLGKNYFQFHGLAGEGGAPVSRKLKRSKVLEFYAQIEPCRVGMEACGSAHHWARELIAMGHEVVLIPPAYIKPYVKRGKNDAVDAAAICEAMAHPDMRFVPVKSADDQAVLMLHKSRELLIKQRTMSVNALRGHLAEFGLVVAKGIGRVDELLALAQADARLPQIAKATVTELAQHLEGLDQSIDAIDDDIARAHRKNPKSCLIDQVPGIGTLIASVVAASAPDPGVFKSGRDFAAWLGLTPRQHSSGGKEKLGAITKQGNRYIRKMLVVGATSVLRVVGKRKGALADWINALRARKPERLAAVALANKLARICWAIMTTGESFRTETYVKA

SEQ ID NO: 204987 - protein, 372 aa, unidentified
MTSIIYIGMDVHTTNYTLCCYTVDSDDAFAVVNVKPDYHEILKYMERVRSTRGGNCDFICGYEAGCLGYSLYHQLAKHGVACIILAPSTMPQQKGKSIKTDKRDAKNIAKCLAFNLYSPVYVPTAEDDAIKEYIRMRDDVKADLKRTKQQIISFCTRHGFHYEGKSRWTQAYFKWLDSLVFENALYKETLQEYLALYYTLDEKIAVYDARIEELAHQKRYEENVRKLCCFKGVSTHTALPLLVEVGDFHRFRTAQHFSAYLGLVPGESSSGEKVIHTNITKAGNSHLRTLLVESANSYSRGVVGKKSKVMKDKQGGNSPEIIAYADKANERLHRKFYKIAIRSKKNVAKTAIARELSCFVWGMMTNHISRAV

SEQ ID NO: 204988 - protein, 295 aa, unidentified
MVTEDGTVVLNKNVVNRSTPFLQLIGDLPSGTPVAFEAAFGWSWLAELLEDYGFEAHLVHPLRCKAIASARLKNDKVDAAILAQLLRADLLPEAWLAPAKVRQLRALLRHRVSLVRLGTQLRNRIHAVAADHGYDRSASYWTGPGRGWLAELDLPAASREIITDALAVIDGLAPVIDRIDGELHAHAKADPRVKVLRTLPGVGEFTALVMVAEIGDITRFPSARKLASWAGLTPTVRGSDLKIRHGHISKQGSVWLRWALNQAAQTAKRSPEFAASYAAIAKRRGKKIATIAVVI

SEQ ID NO: 204989 - protein, 415 aa, unidentified
MALKIVYKICCGIDVHKTFVVACIASTDKHGVTSYERHRFSTYTKGLKNLLQWLLEHNCKDVCMESTGKYWIPVYNILEKDCSIVLAHPKYVKAIRGKKTDKKDAKWIADLFKHDLVSGSFMPPADIRQLRDLMRYRFKLTCFKSSEKNRLQNCLTVSNIQLGNVVSDTFGKSAQAILDKILENPADTSFDLEPLVFKSLKKKLPELRDAIDGYITPEQAGKLKVIKSHYENLEARKAELEELILALATPYQQELAILQTAPGISSDFTAIGIISEIGTNMEAFPSAKHLCSWAGLTPTNNESAGKKKSVRVSKAGCYIKPLLVQCANAVVKSNKHPEIRNRYLRIKKRRGHKKAIIAIARMLLTAVYHMFKNGENYNAELYRKSDLPPVDREITVEQAILIARNQGYKIKSATA

SEQ ID NO: 204990 - protein, 353 aa, unidentified
MVHSSRVEAQEVVGLDVGDRSSQICRMDRQTGTVLEERRLSTTTASVQRYFGALAPQLIALESGTHSLWLTRLLKSLGHEVIVANPSKVRAISSSLQKTDERDARFLAQLVRVDPQLLSPVHPRSEESQQAIAVVRAREGLVKARTMLINQIRGMVKSFGLRLPAVSSAGFARKIQKEETLPSSLKTTLEPLLRVIAEVSQEIARFDKEVEALARRWPVTQRLRQIKGVGALTALVFVLTLGDPHRFARSRAVGAYLGLVPGNRSSGQSTPQMPITRQGDRMLRRLLVQASHYVLGPFGQDSDLRRFGLRLAERGGKSGKKRAVVAVARKLAVVLHCLWVSETDYLPLRATAA

SEQ ID NO: 204991 - protein, 417 aa, unidentified
MKKNSKSPTKKEQTSKRTRSQRPVQRETKEVLAELVEKLRGKLELKATPASLGEAGQGPELRPNLDRLTVGVDLGDQWSHYCILGLVGETLSEGQLRTTQADVAEFFQAITPARVVIEVGTHSAWVQEIIAGCGHDVLVANPRLMEGSKRRKRKNDRIDANKLARLGRVDPQSLHPMQHRSREVRQDLVLLRARDALVAARTELINTTRGLVKSLGTRLPKCSSRSFAHKVGEAIPEEVRDALLPLVQLAEGLSACIQGYDRRIEELAGEKYGHTKLLLQVKGVGPLTALAYVLTLEKPERFAKSRDVGPYLGLVPKQEDSGEIQPQLGISKAGDTMLRKLLVGSAQYILGPFGPDTDLRRYGLRLCERGGKNAKKRAAVAVARKLAVLLHRLWVSGEVYEPLGYRVSGTIVQPAAA

SEQ ID NO: 204992 - protein, 386 aa, unidentified
MTNNVDASRCSIPLDQSATLIAVIEMGQASWLVAGLVPGLERQPLKKIAVDQDGLLQLLHRWRVEAVRAGHPIQRVAVAYEAGRDGFWLARWLQAQNIEAYVIHASSVPVSREHRRAKTDRLDTELLKRAFLGWLRGETNHCSMATVPSQEDEDARRPSREREILVGECTRIVNRIKSNLARLGIRGFKITLSRAVERLAALRTPEGTAVPPNTLGEMKRAIARLQSVKQQIKEIEAARITHLDQSSSTERGIMVQQLTQVVGVGVESADMLVQEVFLRPLRDRKAVARYAGLTGAPDESGQKRRERGLAKGGNARVRRAMIQLSWGHLVHQPNSPLATWYRQRTADARGGTRKTMVVALARKLLIALWRLATCGVVPEGFALRTA

SEQ ID NO: 204993 - protein, 428 aa, unidentified
MDEVNRNRLEEFRQLRQEIRHSEEYLIVGIDIAKDRHHAFFGTATGRTLLRRLVFSNDHEGFRKLLDQAEALRVRHGLKKVVYGMEPTANYHKPLGEYLITQGRMVVLVSGVTVKKNRESLDGRWDKHDVKDSANVADLISQGKCLYYEHPSAELRGLRGLLSLKRRLKKQEHGYRVRIRNHLIAQYFPEMDRDYDRLGAAGLSVVRWCFPASQITELDVEPFIERVTSRRIRMETRRRLEGVWEKAGESIGCEGVPGVEHEAKVMVEGLRQIREMIKETEDKIQELCQEFPEYSYVLTIPGFGPDVSAKVLGAIGDPDRFQNGKQVLKLAGLDLSADRSGKDSAKAIPEISKRGKADLRYALYQAALIASTKNHDFMHYYASKLEGRQKEKGIQTKMWVKLSAKMLLIAWTLMKKKEAFDPAYLNAE

SEQ ID NO: 204994 - protein, 420 aa, unidentified
MKAFKTSDFAALIGIDWAYQKHDICEIPLDTRKVNLSVISSQPKSIYTWATDLLKRYPNQKVAVACELKKGPLVYALEQFDHIVIFPLNPATVAKYRKAFAQSGAKDDPSDAFIQAEMLDRHMDRLRPIEPEDPDIRSLKLLLEYRRKLVQDRVDITNRMSTFLKCYYPQALDWFKEKDTMIFCNFLTKWPSLTQVTRARKTTLIKFFNDNNSRYNAVNERRIEAIKDAFPLTEDPGIIEPNRIMIELLVPQLRCLLEAIERMDDEIKVRYKQQNDKNIFDSFPGAGPQLAPRLLVAFGSKRSRYQDASEIQRYAGIAPVLERSGQKSWTHWRHSCPTFLRQTFVEWAGQSVRFSFWAKAYYQQQIEKGKPHNTAIRSLAFKWIRIAFRCWKTNTPYNETKYLEALKQRGSPLLEYALKS

SEQ ID NO: 204995 - protein, 303 aa, unidentified
MGIDISKKTLDVYVSGTNKIKQYLNSEAGISALIMDYEVAPDLVVCEATGGYERLLMKKIIEYGWSISLVSPRQVRDFARAKGILAKNDSIDAKLLSEFGKIMSPAPAEYHVCEHLSDLLRRREQLVDLIKKEKQHLDKSIDQNIIQDIKEHILFMEQQKDKMDLEIQQGLASDTKIKERVDILESIKGVGKQTSALLAVFMPELGSATHSQVTALAGLAPFSYESGKFKGKRHIRGGRKRVRNALYMASLSAIQFNPDIKSFYQGLKERQKPFKVAITATMRKLLKIINALIKNNRKWSSPK

SEQ ID NO: 204996 - protein, 339 aa, unidentified
MDKLYGGIDLHANNSVVVVLDEQDQVVSHKRLPNELEKILQGLLPFRAQLQGLVVESTYNWYWLVDGLMEAGYRVHLANPAAMQQYAGLKYTDDHSDARWLAHLLRLGLLPTGYIYPKEERAVRDLLRKRSQLVRQRTANLLSIQNLLTRNTGQTMRGNQIKQLTPVTVSELVSLPEHALALQCTVAVMRHLTEHITLIERAVHARVKLRPTFQSLLTVPGIGHTLALTIMLETGEIGRFPTVGQFASYCRCVGSTKLSNGKRKGQGNTKNGNKYLAWAFVEAAHFAMRYEPQIRQFYQRKQAKTNVFVALKAVAHKLARACYYIMRDAVAFDVTRAFV

SEQ ID NO: 204997 - protein, 457 aa, unidentified
MSQTKRSRKSRGLSPVHPAAAAIDIGAAIHVAAVGPDRDKEPVRTFQTFTDDLHRLADWFAQCGIRTVVMESTGVYWIPVFEILEQRGFEVMVVNARDAKHVPGRKTDVSDAQWLQRLHEYGLLRASFRPQAEIAGLRTYLRQRERLLDYAAAHIQHMQKALMQMNLQLHHVVSDITGVTGMTIIRAIVAGERDPNVLASHRDRRCHASVEMVCQALVGNYREEHVFALTQALELYEVYQTKVAACDEQIEAILKRLKKNAPPPASKLLPVRQRTHQPNAPAFDARGALHAILGVDLTQINGLGPYLALKLVGECGTNLAAWPTAKHFTSWLGLAPHNKISGGKVLSSKTRRTSNRAASLLRLAAGTVGRTDTALGAFYRRLSARVGKAKAITATARKIAVLFYNTLRHGMAYTDPGAEYYEDRYRQRVLSNLQRRAKSLGFVLREMEPDAAQVGVS

SEQ ID NO: 204998 - protein, 342 aa, unidentified
MGEISIIGVDLAKNVFQVHGAAADGSVVFRKKLSRPQFARFMSEQPACVVAMEACASAHHWAREMARHGHEVRLITPHYVKPFIKRQKNDAADAEAIVEAAQRPTMRFVEPKSADQQARAVAFRTREQLVKQRTEAVNALRSHLYEFGHVAPEGIGYLPRLAKVVDEPNTGIPELARDICRMLLEQIAHLTDRMNALKARIAAMSNEAEMPRQLQTMPGVGPITALAVETFAPPMEQFRRGRDFAAWLGLVPRQHSTGGKQKLGKTSKMGQRDIRRLLVIGATAVIRWASRRGAPKGSWLARMLERKPIPVVAVALANKMARGIWAMLTRGEDYRGPVLIGA

SEQ ID NO: 204999 - protein, 428 aa, unidentified
MTTDNYVAYIGIDWADRKHDIALYDCASGAWQERVIQTRPQDLLDWVNQLRARYGEGRIAVGMEQKRGPLLYTLCQYDNLVLFPINPRTVANYRKAFQPSRAKSDPVDARLLVELMQKHPDKLERWVAGCPQTRALRQWVESRRMLVGEKVRLTNRITASLKSYFPQVLDWFEDKDTLVFCEFVEQFSEVQTAQSATPQQLTQFFHAHKVTRKSAITRRIQQIQEAGVPLTTDEAIIVPAQALTRALIALLKVILHQLADFNAKIAALFEALPDAELFSSLPGAGPYLAPRLLVAFGAERDRFSSAQAFMSYVGIAPVKEESGKKRWVHWRWSCPIFLRQTFVEWVNQARRFSPWSQAFYLQQKRAGKSHQKAIRALAYKWGRILWRCWQSNTAYDEEKYLAALTRKKSPLIKLLGVESSDVLPLKEA

SEQ ID NO: 205000 - protein, 340 aa, unidentified
MSLYGGIDLHANNSVIVLLNEQDEVIYQKRLPNDLTMILGQLAPYHAELQGLVVESTYNWYWLVDGLMEASYRVHLANPAAMQQYNSLKYTNDHSDARWLAHLLHLGVLPEGYIYPKPERAVRDLLRKRTHLVRQHTANILSVQNILARNTGARFSGKRIQELTQQDLTTLLADETQVLAVASSLVVLDCLRQQIKTLEKSVHKRLHHTPSYEQLLTVQGIGTILAQTITLETGAISRFPTVGHYASYCRCVDSTKLSNGKRKGTGNVKNGNPYLAWAYMEAAQFALRFQPAAQRFYQRKLAKSRNNTILARKAVAHKLVRACYYMMRDLVPFEETKAFG

SEQ ID NO: 205001 - protein, 345 aa, unidentified
MENMYYIGLDVHKKTISYCVKDGSGRIHAEGKIPATRFDLDRWMKTLPQPWTVAMEATIFTGWIYDHLRPHAAAVKVAHPLMLRAIAAAKKKNDRIDAKKIADGLRCNFLPECYMAPTAIRERRRTLRYRNLLVRQTVQLKNKISGLLMEAGVNYNKEKLHKVGYFRELLKSNPDIDESLRPLLQLCRETLVRLQKTESALIRSLARDRFLVERVEHLMTIPAVGPITALTWALEVGELSRFSSIKKAISYCGLCGAEQSSGEHVKRTPISKQRNKHLQCVLVEAAHMAPRLSPELALLYDREKQKGNANRATLAVARKLVAYLVAIDRSQRDFLLVEKENQAAA

SEQ ID NO: 205002 - protein, 323 aa, unidentified
MQGWDPTIAVQIWNAGIDVGKETLEVAVWHSPVLLFQTTRDADGLARLIGWLREHNVARIGLEASGGYEREVLDTLQDAGFMVACLNPRQVRRFAQAKGRLAKNDRADARVIAEFMAKMTDRDPIRRDRSFDVLVEHLTVRRRLRDWISDCDTTLEHLRDPLMRKTIVAKRKTFETALRHQDKAIAALIAAHPDWCETERRLRTVPGVGPVLAGTLIALWPELGQLSRRAIAALAGVAPFDDDSGKRSGARAIAGGRDTVRHVLYMAALVGKTHNPVLAVFAKRLAGKKPKVIIVACMRKLLVTLNAMMRDKRDWEPCRQPAS

SEQ ID NO: 205003 - protein, 343 aa, unidentified
MDHFAGLDVSVKETSVCIVDDTGRIVREVKVASEPEALLAVLTNPNYHFKRIGLEAGPLSQWLYSALAEAGLPVICVETRHMRAVLKAQINKTDRNDARGIAQMMRVGPYRPVHVKTLRSQKLRMLLTHRKLLQAKAIAIENDLRSTLRNFGLKVGMVGNVKFEGRIKELVENLPDLAILVEPLLIVRRVLHEQLGILHRRLLDIVRNDDVCRRLMTVPGVGPVVALTYHATVDVPARFKNSKAVGASFGLTPSRHQSGESDRPGSISRCGDEMMRMMLYEAAQVMLTRTNKWSWLKAWAMKIARHRGMKKAIVALARRLAVIMHRMWVDGTEFRWTQDVAAA

SEQ ID NO: 205004 - protein, 355 aa, unidentified
MTSTQYIGMDVHKESISIAVRNTAGKIVMECVIETKASTILQFLGGLRGDVHVTFEEGTWAAWLYDLLKPHVTKVVVCDPRRNALLQEGNQNDRIDARKLAELLHNNQLRSVYHGDHGLRTLKELVRSYLTITKDLSRVMTRVKAIYRSWAIPCTGKQVYASRHRAEWLGKISEPGVRRRAGFYYQQLDALRSLRQEVRRDLLAESRKHPAWKLLCQIPSIGPIRAAVLLGILQTPHRFRTKRQLWTYGGVGIETSSSADHRVVKGQLERKKKQVEIRGLNENCNHDLKNLFKGAAIVAATKPGPFAEFYAELLARGMRPEMARLTLARKIATIVLIVWKRGVSFDAQHLKPQTA

SEQ ID NO: 205005 - protein, 341 aa, unidentified
MEKFIRTAIDLGKNYFQVHGLESEGGRSISRKVKRSKMHEFYSQIEPCRVGMEACGSAHYWARQLTAMGHEVVLIPPAYIKPYVKRGKNDVVDAAAICEAMSRPDMRFVPIKSADQQAVLMLHKTRELLVKQRTMAVNALRGHLAEFGIIAAKGIGRVDELLALAQMDATLPHIARAAVACLTQHLEGLELSIDTVDEEIAKAHGQNPTSCLLDEIPGVGTLIASAVAASVPDPGVFRSGRDFAAWLGLTPKQHSSGGKEKLGAITKQGNRYIRKMLVTGATSVLRVAGKRKGALADWINALRARKPERLVAVALANKLARICWAIMTTGEGFRTATYVKA

SEQ ID NO: 205006 - protein, 365 aa, unidentified
MNQITNGSIEQEGTERKGNWVLKLGLDVHYRQVTVAMQEGDGRIKAVGKMGHDAFGNWVEKKLKAGFEIYSCYEAGASGYWLHRDLAELGVKNLVIAPKAMGQDKRQKTDRRDSTQLCDALDRYLRGTRTALSPVAVPTAEQEEKRALIRYHRQIMADRSRCEARGKGLLCAQGIEVGGKWWQPKTWKELKTHPRFKSWMEQALQAWRSKLLAAEAEQQELRRQVEALAPALLPKGVGAYSAVALEYETKGLARFKHAGQISSYTGLCPGIYSSDGRAKEGSINRCGNAAVRWNLVEMVWRLLKWQPYYRPVRQLAAELVKSKRAKKRLVVKAARHLAIDLWRLQTGRTTPEALGLIMQPTAKAK

SEQ ID NO: 205007 - protein, 309 aa, unidentified
MTANQKFSRFIGIDVSKAKLDIYDDATGEFLTVENTAKAIEKYVSALSPDPELLIVVDLTGGYEALCVNTFYNRGFTVHRAEGRRVKAFMRSYGEHAKTDRIDAYALALFGRKLHETLRMYTPLPLNLKPVTERISDLKTMLLQEKNRSTAPSLPPDMKKEIVRHIAYLEKEIERLYQKCLDIIKNDPPLAEAFYKIIAIKGIAEKSAVLLLTTLPELGCANRRQIAAIAGVAPYAKDSGTLSGYRRIRHGRTTAKSALFIVTLVAIRHNAQIKEFYERLLKKGKSKMTAIIACARKLLIIVNATLKTC

SEQ ID NO: 205008 - protein, 442 aa, unidentified
MKNSTTVFNGGLAIEQLVAWIGLDWADNQHQISIYDIASEQVENYALTHSAETLQRWLDDLRKRYNGGKVAVVLEQSRGAVLYALMSCDFVVLYPVNPHALASYRKAFYTSGAKDDPKDATLLMEMVRKHPERFRAWVAEDPDTRSLRLVVEARRKLVNQLTRCTNQLTSHLKSYFPQAIEWAGDLDSRQACDFLLEWPTLEALQQVRPSRLRKFYFNYGRPRTEKIEARLEQIKQALPLTEDPAAVLAGSLMVRALAAQIRPLIVVIEEFDDEIKRLFQKHPDRQVFESLPGAGAVLAPRLLAAFGADRERWESAAEIQTLSGIAPVTEQSGKKRFVHRRFACSKFVRQTFHEFAGSSIVWCNWAKAYYDHLIAHGKGRHAALRALAYKWIRILFACWKNRTPYQEEIFLKSLAQRGSPLSQLTQSGQQIKPTKKRVAKSV

SEQ ID NO: 205009 - protein, 337 aa, unidentified
MKFCGIDLHSNNSVVVVTDETDRVLVSRRCPNQLTPILSLLEPHRAELVGVVVESTYNWYWLVDGLKAAGFEVKLAHPVAMKRYDGLKHSDDKDDATFLAHLLRLGILPTGYIHPPQERALRDLARKRIQLVRSRTQHILSVENIMARQFGQRLSCNEVKGLSATSVDRLGLPTDVALAMKANVAIVQALQTQIDFLEERLLHEACLRPEFSLLKTMPGIGEVLATVIMLETGNIERFADVGHFASYARCVKSAHYSNGKKKGEGNAKNGNAYLIWAYIEAANFARRFSEDAKRFFEKKKAKTNAVVATKALAHKLARASYHILKEKQPFDARRCFA

SEQ ID NO: 205010 - protein, 407 aa, unidentified
MQVLYGVCCGLDVHKKVITAALLTGAEEVTVKEFSTTTMELRAMVEWLKEAKCEYVAMESSGVYWKPVYNILEMEEIPAMVVNASHMKAIPGRKTDVDDAEWIADLLRHGLLQASFIPEKDQREYRELVRYRSSRTEERAREINRLQKMLEGMNIKLGDFVSNIIGKSASRLLTLALTKDELTDEEIAEASDIRLKASLEDIKASLEGIVTSLQRELVMLVIKVIGEQTKQIAEVEALIKKYTKEAYEEAAKKLEVIPGIGAKSAQSIIAEIGIDMSRFPTANHLCAWSGLAPGNNESAGKRKSARTRKGNKHLKKTLTQSATSAIKNRSSFFHAQHQRLVVRKGSNKATIAVAHSMLIAIYYVLSGAEYNDLGADYYTKFNKDKKIQSHLKQLKKLGWTPPASEAA

SEQ ID NO: 205011 - protein, 354 aa, unidentified
MPCLPVEVILGVDTHRDTHAVVLVDLVGRLIATATFPTTRPGLRALIKWAQQRGNVRRAGVEGTGSFGAGLTRALHHEGIEVVEVTRATRVGGRHRGKNDTRDAEAAARSVLSGQATAAPKARDGIVESIRVLRNTRASAIKARTQAILHIKNLIVTAPDELRETLSPLTNRQLVKHCARMHRSSRRDSLAATRHAMRSLARRHQDLDCEIAELDELLGDLIAQAAPRLLKQPGIGPEIAARMLLVAGDNPTRLRSDAALAALCGASPIEASSGKTIRHRLNRGGDRQGNSALWLIATNRMIHHPETREYVKRRTTEGKSTKEIRRCLMRHIARGIYPLILADLHDAYQQSALT

SEQ ID NO: 205012 - protein, 318 aa, unidentified
MPEPIHVGIDVAKDALEVAFGPEAATRSFANDDDGHEALVTALNAPSVELIVMEATGGYETSCACALQAAGFAVAVVNPRQARDFAKAMGYLAKTDGIDARVLAALAAVLARRLDREKVVRALPSEEQQRLHAMVLRRRQLVQMLVAERNRLATSHRAARGSIEVLIKAIRKQIVEIEGELARHVARHHADLAKLLQSAKGVGPNTCMVLIADLPELGKLSSREISALVGLAPFNRDSGMMRGKRMIFGGRTQVRCALYMAAIVAMRHNRVIKQFYERLLAAGKPKKVAIVACMRKLLTILNAMVRTGKKFDETYHFA

SEQ ID NO: 205013 - protein, 331 aa, unidentified
MKTNEIIGIDVSKLLIDVCIYSKQIVEQFENNKSGFKSMLKWVFKNSSFSKEETMFIFEHTGMYSHLLSVFLTEQKTSFFIASGLEIKRSIGIARGKDDQIDAKRIAQYGYRLKEELKLSNLPNSNILQLKSLLSLRTKLNKQRAGFKVTLKEQKRIYKAKEYKIIFDVQQKMIVELTKQINKINTQMQSIIDQDISLKETYKLVTSVKGIGMQTAIMIIVFTDNFSKFENWRKFASYCGIAPFPYQSGTSIKGRTKVSHLANKKLKAIINMCAISAIQHNPEMKVYYQKRVEQGKSKMSTVNIIRNKLIARVFAVVKRQTPYVDILKYAA

SEQ ID NO: 205014 - protein, 387 aa, unidentified
MTVCTVNHQPAATHGETARCLFAIELSRKSWVIGIITPLSAKISRRILSGGDWRGLLELIEEVRARVSRETGRAVEVISCYEAGYDGFWLHRQLEAHGIRNYVIDPASLQVDRRVRRVKTDRIDTERLLRSLMAYLRGEPKVWSVVRVPSVAEEDARRLHRERDRLVSERVQHVNRIKGLCALQGIYNYQPLRPQAMAGLEQLRTAQGAALPPRLKSEIKRELHRLELVVEMIASLEAERDTIVEDKASTHVNAKKIQNLHKLKAIGPEFAAVLVGEIFHRDFNNRRQLASYVGYAPSPFQSGNVAHDQGISKAGNRKGRTTGIELAWLWLRYQPDSDLSVWFRARVGTVKGRIRRIAIVALARKLLVALWRYLETGLVPRGAVLKG

SEQ ID NO: 205015 - protein, 417 aa, unidentified
MNKHNNSGKKSEPTTKRAKPRDPMRRDTKEVLAELVGKLTEKLDPKKPAATSVGEKPKRGELRPNLDRLTVGVDLGDQWSNYCILDLEGETLAEGQLRTTQEDLAEFFQALNAARVVFEVGTHSPWVQEVIGGCGHEVLVANPRMMDGSKRRKRKNDRIDANKLARLGRVDPQSLHPIQHRSREVRQDLVVLRAREALVAARTELINATRGLVKSMGTRLPKCSSPSFAEKVEGTIPAELSDALSPLVRMAAALSDCIQEYDEKIEKLGEKYGHTALLRQVKGVGPITSLAYVLTLENPDRFVKSRDVGPYLGLVPKQEDSGEIQPQLGISKTGDTMVRKLLVGSAHYILGPFGPDTDLRRYGLRLCERGGKNAKKRAAVAVARKLAVLLHCLWASGEVYEPLRQGTSATMAPAVAA

SEQ ID NO: 205016 - protein, 404 aa, unidentified
MNAVGIDVSKGKSTVAVLRPYGEVVVSPFDVAHTGSDLRALADLIKKLPGETKVVMEATGNYFESIARYLHEQNIFVSVVNPVLISDFGGNTLRKPKTDKKDSVKIASYALTYWLDLKEYTPQEDLRKSLKLLNRQYQQSIKLKTMMNNNLISLLDLTFPGINKLFTSPSRESDGHEKWVDFVLEFSHCDMISKLTIKAFAKKYKKWSDKNSYHFTESSCEKIYAFAKDCVSSVSSDKAIVFSVVQAAKMLISATENCHAIQSEMNRVASKLPEYDTVMNMYGVGKAVGPQLMAEIGDPRRFHSRKAITAYFGYDSENNDSGQKTTRSNPMTKKGSGALRRTLFIIMQVLLQTKPQDNPVYDFLIKKKSEGKHYYSYINAAANKFLRIYYARVKEVLIVSEQMT

SEQ ID NO: 205017 - protein, 346 aa, unidentified
MMIIGCDFHPSWQQVSWLDSETGECGERKLVHAAGDAKAFYQQLGTPVLIGMEATGNSQWFIELVQDMGHEIWIGDAAQIRASYVRKQKTDKRDAAHILKLVVEGRFPKLWTPDREQRDLRQLVLHRHKLVEIRSRVKNELQHLSMNKGMQKKRTLWSQAGQKMLRELPLRPWASCRREDLLGLLGMLNEQVGKLDEAVQVAAEEHPQARLLMTQPGVGPNTALAYVLTIGDVSRFPRGKQVASYLGLIPREESSGGRQKLGAITKQGNRLVRSLLVEAAQIAVRFDPGFRKQYLHRCHQKPKGVAKVAAARRLAVRLYWMLRTETPYPEIVRIESSPRVPLVGAS

SEQ ID NO: 205018 - protein, 360 aa, unidentified
MDKHKYVALDVDSANIVAGVYDSKGKTVMQCCLRNEGQAIQEFLKLLPGTVHVTFEEGTQAVWLYELIRPLVAEVVVCNPRQNKLLKAGNKSDRIDVAKLGKLLRLGELRPVYQGPSATQGLKQLVHGYAALVDDTTRVKNRLKALYRGRGLSCKGEMIYGREQRQQWLSQLETKELQRRATYLYEELDCVMRLRVEAEKVMCRAARKIEAYKWISSTPGLGAIRTAQILATAITPHRFRGKRQFWPYCGLAVVTRSSSDYEWVDGGARRKQKPIQTRGLNQNYNRTMKAVFKGAAVSALQQHQEFQEYYQRLCGKGMRPEMAQLTLARKLAAIVLILWKKGELYDSERLNQAAPGAGQQ

SEQ ID NO: 205019 - protein, 311 aa, unidentified
MEHATFAGIDVAKDHLDVHIRPSDEAFRVSHDDAGFAVLLARLRAVTPTLVVLEASGGYEVPVAAALASAGLPLAVVNPRQVRDYARALGQLAKTDRLDARVIAFFAEAVRPAARPVPDAQAQALGELIARRRQLVDMLVAEQNRRRLLRDRRLQRHVDAHITWLEEALRRLDHDLTTLVRATPAWREADDLLRSVPGIGPITASTLIADLPELGRLDRRRIAALVGLAPFARDSGAFRGRRMIRGGRAPIRRVLYMATLSAIKCNPAIRGFHHRLLTAGRPGKVAITAAMRKLLTILNAMLRDRRPWQPA

SEQ ID NO: 205020 - protein, 372 aa, unidentified
MNYNTVYVGMDVHKESFSLCAYTIEAEKASHYQRTEADYKKVLNYLEFLRTIYGDDANFICGYEAGCLGYTLYHQLTANNVKCIILAPTTMLEQRSKKRIKTDKRDVEIIAKCLAQHNYSPVHIPTAKDEETKEFLRMRDDHKLALKKVKQQILAFCLRHNYRYDGNSHWTAAHLKWLKALTPEALYKEILDEYLLTYHTLSDKLERLDKRIEELSTQDEYKEAVKKLCCFIGVKTHTALSVLVEVGDFNRFASAQHFASYLGLVPGEDSSGNDQNRLGITKAGNRHVRLLLTEASQCYARGQVGFKSKELKARQSGNTPAVIAYADKANERLRRRYYKMVLNKCKKHNVAKTAIARELACFMWGMMTDNIA

SEQ ID NO: 205021 - protein, 359 aa, unidentified
MLSQSNKIDFNGQHFYVGLDVHLKSWKVSIMAEKLTLKTFSQDPKPELLYHYLVKNFPNGTYHSAYEAGFCGYWIHNKLKALGIDSIVVNPADIPTTDKEKSNKTDKRDSKKIAKSLRNGDLKGIHVSSLKTLEDRCLVRTRGTIMKDLTRNKNRIKSFLYFHGIEIPETFTHSSNHWPNRFINWLRSIELVENSAKKSLTFIIDESDHLRLIILDANKGIRELSQSETYSNQVHLLQSIPGIGILTAMIILTEIESINRFSNFDQLCSFIGLIPSTNSSGEKEIIGRLTHRGNNFLRSAIVESAWIAARKDMALNKSFHDYCRRMEPNKAIIRIARKLLNRISYGLKNNEPYVYSVVK

SEQ ID NO: 205022 - protein, 328 aa, unidentified
MYTHILGIDIAKATFDVALRCGEGDCDTGHFDNTLNGYRSLRQWLSHRKVGSVHACMEATGRYGHSLATFLSAEAYAVSMVNPARIRAYGQSKLRRTKTDKMDAILIADFCATQAPSLWKPPSAYQSELQSLTRYLDELKKSRTREINRSKSGIPSGAVQRAIQDHIDFLENQIEQVDEEIQVLVRENDEHRRQIKLLLTIPGIGPTTAARFLAEVPDVSAFPKIKQLVAYAGLCPSHHHSGTSVRKKSRLTKTGNKYLRTTFFMPALSVKRGTNPLVSPLIERLEMEGKPPMVIIGAIMRKLLHIAYGVLKTGKPFDPNYLSGSVGA

SEQ ID NO: 205023 - protein, 400 aa, unidentified
MRAVFGIDVSKASSEVAILVNGEKVHGYTMSNDALGFARLLGDLRTVHKPEIIFEATGVYSRRLQAFLDEHGYAYTRLNPLEAKKQLDSLRVRKTDQIDAEKLAQSQFVLNRKPTYVQEEVYQNLRDLSRFYQNLTEDIVRAKNRLHKVLQVTFPELENILSTPSGEQYWNLVIAFPCKDFVLDLSKDELSESIRQSTSKRISDKRVAYLAEKLIALANQSYCAVKKTSSMLEEVRYYTKELLRLSEQRQAVLDQMVELAQPLPEYDILLSIPGIAETTATSIIGELGDIRRFQSANQINAFIGIDLRHYESGNFLAKEHITKRGNPYARKILFKCIHNIASASHTNPCHIADFYEKRKRQSQTTSTKPHTIASIHRLIRTMYYLIMHNKLYDYASTQNR

SEQ ID NO: 205024 - protein, 380 aa, unidentified
MGWPGRAQRPKTTVERDGEASKLNELTMHTHQKSSDPVATIGLDIGKNTFHLVGLDKRGSIAMRIKVSRNQLARRLANLSPCLVGLEAGSGSHHIARQIQALGHDVRLLPAQYVKPFLKGHKNDYRDAEAIAEAVQRPTMNFVAIKTPEQSDLLSLHRVRSRLVRQRTAVINQIRGLLIERGITVRQAPGPLRKVLPEVLSSPPEALSPRILRLIAELDQDWRRLDQRLEALSAEIASLSEDDCACQRLMSVPGIGPIISSAVVAAIGTGSGFKQGRDFAAWLGLVPKQESTGDRTKLGRISKRGNKYLRTLFVQAAHVVLERRPAAATRALLPWIDQAARRLAHRNLLAVALANKLARIAWAVLARGRDYEPRITSNAA

SEQ ID NO: 205025 - protein, 352 aa, unidentified
MQHFIGCDVHTRNQVVAWIDAETGEIRTRRLDHDGGEVRKFYEKFEPGTVVGIEATFPAHWFERLMGELGHELWVGDAAGIRASVVRLQKNDYFDAEHLLDLLRTGRFPRIWIPSLEERDLRQLRVQRMKLVRMRTQVKNQLWALATSQGSCRKGKLWTVKGRAELEKLALLPWAARRRKELLESLDRLDEQVRELDRAVEEAGRGRPEVELLRTHPGVGMVVGLAFALTLGPVERFANSRCLVSYLGLNPREASSGGRQRLGAISKQGNSMLRWLLVEAAQTAARFDSQLGRLYQRLKKKRVSAVAKVAVARRLAVRLFWMLRTRNNYAQLVRMSGSPSSAVVPPPVEPTV

SEQ ID NO: 205026 - protein, 332 aa, unidentified
MDNFYFIGVDVSKKKLDFCVLFEGKVLREEQVSNHQQAVARLIGELKNDLEMDNEQFLICAEHTGQYTFPLVCACKSVECKLWLENPSQIKYSSGMQRGKNDKVDAKRIAIYASRFGDKVKYYDRPSEEIERLKQLERERALYVTDLAKYKGQMYDQKDFMPAALYRKKTKRMKGLIQELQAAIDAITAEMEKIIGSTEVLARQMELLMSIDGVGKVVALNVIIETEAFSRFDNPRKFCCHAGVAPFSYTSGSSQHSKNKVSHRANKNIKKLLHMPAVSVTHRKEGELKAYYMRKVEEGKNKMSVINALRAKIVARMFAVIKRNEFYTPIYS

SEQ ID NO: 205027 - protein, 426 aa, unidentified
MDIVHPRVAGIDVHKKVAWVAVRLPGEAPGERKVVTKRFKTFWRPLQKMAAWLAELGVTDAAMESTGVYWWPVYHALAGGGIEVCVCNAAHMRNVPGRKRDIADCQWIAELHEHGLLRASFIPAAEVAALRQRTRYRKRLIEQRTAEGQRLAKVLEDAGIKIDSVASRLLGKSGREMIEALIAGERDPGRLADLAKGVLRRKTDDLQMACDGRFTGGHGQMCRLHLDAYDHLTVKIAELDALIAEAAAPFAAVIARLMTIPGIGRRTAEVIVAETGGDMTRFASGARLAAWAGLAPGDNESAGKRRHAAARQGNRHLRAAMAEAAWATARTRTRPGARFRRLARRFGKGHEKKAAIAVARTLICIAWAVMARGQDYADAGEDYYDQRDQRNREHLIRRHQHALARLGCQVTLIPPGDGSPPPGQAA

SEQ ID NO: 205028 - protein, 354 aa, unidentified
MVYIGIDLHRKRSQIAALNGNGELLFNRRVATRANELFKAIGDAGEEPVEVVFEATFGWGWLADMLAEAGIPTHMAHPLATKAISSARVKNDSVDAKTLAHLLRTNLLPEAWLAPPPAREARRLVRMRAGLVRIRTKLKNQIHAVLGEHGVEVEMTDLFGAAGRRLLAELRLPVVSQQRVEACLRVIEELTEEVAVADQQLKALFGQDHRLERLLPIPGIGITIAATIVAEVWDVTRFPSPDHLCSWAGLTPNEHSSADHVRRGHISKQGSRWLRWVMVEAAIHALRDPELREFFGRIARRRGSKIARVAVARRLLTLAYYALRSENGCRSYPVNPTSTVEARSLAVMASADGR

SEQ ID NO: 205029 - protein, 387 aa, unidentified
MTQVNDLSRSLAAFDPISTLVVVVEMSKASWLVRSVVPGVERQPLKKLEPDATALLRLVERWRSEAVRAGRPISRVALAYEAGRDGFWLARWLIARGIEAHVIHSASVAVSRERKRAKTDRLDTAMLMRVFLGWLRGERGHCGMVAIPTIEEEDARRPSRERESLVNDRSRIINRMKSALARLGVRGFKPYLRRAPDRLACLRTAEGTGLPANVMDELRRDMARLALVREQISSIEKSRAERLKRAPHTGPHTMVRLLSRVIGIGIETADMLVREILSRKLRDRRAVARYAGLTGSPDESGLKSREKGLAKAGNARVRRGLIQLAWRFLMFQKDSALARWYRMRTEGPSGARKTTMIVAMARKLLIALWRLVTTGEIPDGVELRPTA

SEQ ID NO: 205030 - protein, 386 aa, unidentified
MIVIGADTHKGSHALAAVDEGTGRVRGGREIKADDAGHLAAVRWARGLDEDRVWAIEDCRAVSRRLEQALLAAGERVVRVPPHRMGASRKGEREPGKSDEIDALAVARAVVKDGVEQFPLAYLDEQAMEIRLLNDHRDDLVAQRTRTVNRLRWHLLQLCPELERSVKRGAFNQAHVLDRVDRALRKLPASARVRVAREQIAQIRSLNRQAGQLEAELAELVETHRPKLLAEQGCGPLTAAILIGHTAGVKQFRKHSSFGLQTGTAPIPCSSGQRTQHRLNRGGDRQLNHALHIIAITRAQRDPATKAYLERKEAEGKSTKGAIRSLKRHLARRFYHLLAEPPADQPQAVNGKPTLDPERRAIPERPHPEREVLQTSTAPNPMACIG

SEQ ID NO: 205031 - protein, 437 aa, unidentified
MPRQCPQKSAARRVRPAATTATPGRPCPYAAFLGIDWADQQHEVAELDGETVHRQTLLQTPEGLDAWAGALHKRFGGRSVAICLEQAQGGLIYALQRHSHLVLFPINPAKADAYREAFAHSGAKNDQVDAELLARYVREHHPRLRAWKPDTEQTRQLARFVELRRNLVEERKQTMQRITALLKLYFPLALVIAQEYSEKLMLALLARWGTLREWQRANPRTLKQVATPFLKHAETRDQLVQQIRAALPLTTDQAILKPNALYLQTQVAKLPGLNQAIAVFDQEIAQLFHTHPDAAIFSSLDGAGEALAPRLLVAFGTDRERFQSAADVQAYSGIAPVTKQSGKSRSVHSRFACNKFLRQSFHEFADHARKHCDWAKAYYQYKRDHGMRHNAAVRSLAFKWIRILFRCWKNRSLYDDQTYTNHLRCKQVPYLPASHTA

SEQ ID NO: 205032 - protein, 409 aa, unidentified
MRYYLGVDWADQTHAVWVVDEGGTKVAMRTVPHTAEGLTEWGRELDEWRAQGIELWAAIERPEGRVVDFLLDHGVVVYAVNPKTLDRARDRFRQSAAKSDPFDARVLADFLRTDHAHLRAVQPSSEAAQELKLLTDDYHRQIRQQTRLVNQLTTTLKAYYPRGLEVAELTTGLAREFLQAYPTPATITALTERQWQRWAHAHRLSETRTQQLWVVLQRPQLPVPPHVVRAKARLMQSLVAQLMVVMEGVGAYREAIEDFFARIPAAQWIRTLPIGDHGITAPTLWARLGDAPGRWESFRHLQAQAGTVPVTIRSGKQQVVRFRFACDKSLRYIIDHVAFLSLRWSEWAHAYYAGQRARGHSYRQALRALSAKWLKIIFVMWERQIPYDEQYHLAMMTRQQLRQRQEKVA

SEQ ID NO: 205033 - protein, 338 aa, unidentified
MKIFAALDVGDKATHICVLDSEGAVVWRGVCATDPDVVASTLKRHAAGVERVVLETGPLSAFLYHGLVEREVPVVCICARHAKGALSVRVNKSDVHDAEGLAQLARTGWFKAVHIKGSATHLDRAQLKVREQLIHARLAMANQLRGLLKLFGLRMGKVTTPGKRAERLEALLVQKPELRPILAPLVAGLEALDVQIATSTRSIKARAAADPVVALLMTTPGTGPITALTFKSSIEDPTRFERGEDVGAFAGLAPRRSQSGERDVHGRISKAGDPMLRSALYEAANNLLCRVKRPCHLQTWGKALVATKGAKRARVAVARKLAILLHRLWISGNSFQWA

SEQ ID NO: 205034 - protein, 377 aa, unidentified
MLHSEVLVLAVSLELAAAKCKIALHDGRRDNPAVHTVAEPQAASRLQAALALIAHHKEKWALPTDVRVVVSYEAGQDAFWICRALRALGIECHVVDPASIPVERHKRRAKTDRLDAIKLVINLRAWLRGERDRMRVIRVPSQQDEASRHLMRDRGQLQKEVLQHRDRMRKLLATLGCWDEVDSRKFAGRLARSEVRCHDGAPLPPEFHERLVRECERLALAEEQLAALEKSRQASLPEPARVRVDHLTRLNGIGTVGGSRLVLELFWREFSNRRQVGACVGLVPQPYDSGESQVDQGISKQGNRRVRALLIEMAWSWIRYQPASALTQWFNQRTQSTGANRRARKIAIVAVARRLAIALWRYLKDGVIPTGAQLRPV

SEQ ID NO: 205035 - protein, 356 aa, unidentified
MTMMLIGVDPHKSTSTATAVEPESNREVASIRIEATLREYRRLLTWAGRWPQRRWAIENAEGLGRHLASWLLARGEQVVDVPTTATARVRQLSRGGGRKNDRIDAAAAACVAALQGDARPLEAEGTTDVLGLLDERRANLSQARVRAVNQLHALLRALLAGGAPRGLSAGAAAALLRTVRPAGAAERVRKQVAGDLVVEIRSLDSRLKANEAAMAELVKSSGSTLTETVGIGPVTAARLIGRSGRPSRFPSSAAFAAYSGVAPVEVASAEHARHRLSRSGDRQLNSALHTIAITQIRTAGSLGDIYYQTKIAEGKSPREARRCLKRRLADHVWRTMIVDEKRHRAKTSNSAPASVA

SEQ ID NO: 205036 - protein, 346 aa, unidentified
MKKIAYLAMDVHARSCTLGQMDDDGTFRGNLHFTTSEKNIIDALQSIKAKNKFLTIEESTLTQWAAQVASAYVTEVIACDPRENALIFKSPNKKDKVDTRNLCRLLRLGELKHVYHPQDDKRAIFKASVQHYLDLRDQLTGLKHKIKAIYRHWGVINVFGFSVYSPSGRHTYLKQLKHQPIRNQLRRLYHLMDQTEAMRTAASETMKQLGGRYPEIREFKKIPGIADINAHIFDAFIQTPHRFAKKNQVWKYCRLSITDRSSDGKPLGFKRLDASGVSELKALSFRAYMAAMKGDNEVKRFFLNSLKRTLNRQHARLNTQRKILTVMYSIWKKGDAYRPELFSGSA

SEQ ID NO: 205037 - protein, 356 aa, unidentified
MSRKLDTSPAVIGIDIGKNSFHIVGQNQRGAIVLRQKWSRGQVEARLANLPPCRIGMEACVGAHHLSRTLRALGHDARLMPARYVRPYSIGQKNDYRDAEAIAEAVQRPTMKFVATKTTDQLDLQALHRVRERFVGQRTGIINQIRAFMLERGIAVRQGLRFLRAELPGILATRTDALSPRMLHLIEDLTSDWRRLDTRIEHLSSEIEALARQDKGCERLMSVPGIGPIISSAMVAAIGTGDAFSKGRDFGAWLGLVPKQLSTGDRTILGSISKRGNRYLRSLFVQAAWVVLVKIGPKYWDRYGLQSWIEAAKKRLHHNVLAIALANKLARIAWAVLHKGRAFECVKTNEAAYRPA

SEQ ID NO: 205038 - protein, 428 aa, unidentified
MKIELLCVIIEPNTKYMGKRTVEFEQVIERGCGLDVHRDTVVATVMGKGLQTETRTFGTTTSSLKELGEWLESLQVTDGAMESTGIYWKPVLHVLREYPLNLLVVNARHIKNVPGRKTDKADSQWICKLLISGLLKGSFIPPENIQALRDLHRYKKKLVGTVASEKNRIIRVLEDANIKLSSVVSDTSGVTATYIINGLIAGRKDLEKLVSECYHKKLQASSEQIVDAINGRLTPHLAFLLGSMQKHIQSVQAQIAEIDAEIEKHIKDFEKEIELLQTIPGVGKEGAIGIVAEIGVDMDVFPSEHHLASHSGMCPGNNESAGKKKSSRTRQGNKHLKATLTELAWGATRTKKSFFKAKYESLVVRRGKKRALIAIGHKILCASYHIIKNKEAFKELGYEYLAERKKKNRLEYLKRELKEHGFKIEKAA

SEQ ID NO: 205039 - protein, 333 aa, unidentified
MNQPAIYYGVDVSKETLHISYQIGIDANGQPQWAYQTLPNQADSIEQWAAELPANSHLIFEHTGTYSARLAWVLALQNRPFSLLTPNQSKGFAATLKSISKTDRSDAALLARYGQVFQPQPSQLADESLHQLRQQHKHLNDLRISQQAVANQLHALSFDPRASQKVKASLLVLQQSYLTQIALFEEELDQLSQQELQAISERMQRVKGIGPASSQALCTATNGLAGFESAKAVAKFVGIAPSQTQSGSSVRRRGRMARTGLGYVRGLLYMAARSARKYNLGCKALYDRLRAKGKCHKVAMVAVMNKLLHQVFVVVKKNIEFVNGFSLSKQNLA

SEQ ID NO: 205040 - protein, 411 aa, unidentified
MTEGPTRFFGLDVHKEYFVAVGVNPQREVVFGPQRVSNYQLDDWVCRVLTPQDAVVLEMTTNTYLFYDTLLPQVHSVIAVHPPSVPLVTNVAVKTDKKAALALAQLYAAGMLTGVWIPPHAVRDLRALIARREKMVHLATMAKNRLHSLEHRNHLILPEENPFSLEQRTWWESLPLSATEEFLMRSDLDTLAFAQKQLEQAEEQIQQESAQDERIPLLIQLPGVAMLTAITILAAIGDITRFPTAKKLVGYAGLGTRVHDSGMTHNSGRITKAGRKDLRRALVNAANHAVEHHPHCEVTATSSRKKEFERMEPHLGRSKAVVAIARKLLVAVWYILSEKVADRFADPQNVASSFLHHAYQVGARNLPNGQSALAFTREQLDRLGVGKDLQQINWGSKPLRLPPSRLMIEKE

SEQ ID NO: 205041 - protein, 370 aa, unidentified
MATTRPGVTVIGGVDTHKHTHYAGVIDDQGRLLGHREFAASDAGYRQLLAWMCSHGEVRSIGVESTGSFGATLTRFLTAAGVEVIEVNRPNRLARRMDGKSDRLDAEQIARAVLGQTSTAVPKTKSGIVEVIRTLRVTRASAVKARTQAFNTLWGVMIGAPSPLRDELVVLTKRTLVNRCLRLRPETEDLLSLAGDPERMLTAGIKTALRDLARRWKALDNEIKALNKNLESLVRTAAPELVALHGVGVEIAGQFLVTAGDNPERIHSEAAFAKLCGVAPQPASSGRTTGRHRLSRSGDRAANSALYIITIVRMRHHQPTRDYLERRTTEGRTKREIIRCLKRYIAREIYNNLPAATRTTPPTPELRTAP

SEQ ID NO: 205042 - protein, 338 aa, unidentified
MTIETLGVDIAKNVFQLHGVNRNGRVVMKRRVMRDQLLAVLAQIDPCTMVVEACTGAFYWARKFEALGHQVKIISPQYVKPFVRRQKNDGNDAEAICTAARQPHIPFVPKKTIPQQDIQALHRARQRMVNHRTAVVSQIRGLLLDRGFAIAKCITRARRAIPEILSDLENELTTLAREAIAELYDLFRDLDRRIFSFDKKIDRVFRENEDCQRIAKIKGVGPKTATAIVAAIGDGSEFKNGRHLAAWVGLVPRQHSSGDRKVLMGISKRGNQHLRSLLVHGARAVVRTAPNKTDLNNLWVNQLRERRGFNRATVAVANKNARIIWAVLQTGEPYRAAL

SEQ ID NO: 205043 - protein, 368 aa, unidentified
MKRYADVEQYTGQQYVGIDLHRRRTVIARTTDAGELLEAVQITNSPLALAEVLTRAGEHPEVVLEATYGWYWAVDTLAEIGASTHLAHPLGVKAFEYRRVKNDLRDSCDLADLLRMGRLPEAWIAPPATRELRELVRHRAKLVSMRSRCKAQVHAVLAKCGVAVPMSDLFGVAGTDLLNRLALPAAYTARINSLRRIMDLLDFEIDVFANLVKGRLARDPGYTAVQVIPGIGPILGSVFVAEIGDVHRFPGPQKLTCWAGMTPLHRESDTTVRRGKITKQGSRLVRWAAVESVQRLPATTRLGAFRDKLALKRGHNIAVVAAARRQLEYVFYALRDHHVTADLRTPVTSTACPPSAADAVPASTRLAS

SEQ ID NO: 205044 - protein, 406 aa, unidentified
MRVFIGVDPHKLSATIEVVDHRETVLTTGRFGTDKAGYTSMLKHVAAWPERVWAVEGSNGAGRPLAQRLLADGEHVVDVPAKLAARVRLFDTGHNRKTDAHDAHAVAVVAVRTQNLRVLSYDVELEALRMLVDRREELTRTRVQTVNRLQRLLSELTPGKAKKDITALQAKAILSSVRPRDLVGKTRRRLAVEQLAELVAADKKIKALTKALKAMVLARRSTLMDLPGVGPVVAARILADVGDVARFADRNRFASWTGTAPLDASSGEQIRHRLSRAGNRKMNHMLHIAAATQARLDTEGRAYYRRKIAEGKTRMEAMRCLKRRISDAVYRQLLADARREALVELGPSSGADPGGHCGATQESSAVDLPPHIDTSDQPLPGPANPTLQPHPEHRKTTANRSLRRAG

SEQ ID NO: 205045 - protein, 353 aa, unidentified
MTQQRPRVVAGVDAHTDTHHAAVLDLNGRLLASATFPTTGDGYVALIAWVSGHGELDRVGVESTGSFAAGLVRALVARGISVVEVNQPHPHARQRLGKSDPIDAELAARAVLSGTAVAVPKDTSGIVESIRQLTVTRQSALKARTAALHQLDDLLITAPEQLRAEVRCRRSLRRRASLCLELRPDRKRAHEPLQAAKLALRSLARRIRNLDNEIQELDRQLEQLVSTAAPRTLSLLGIGTHNAGQLLVSAGQNIERLHSEAAFAKLCAAAPIPASSGRTTRYRLDPAGDRQANRALHMIAVCRLRYCPRTRAYAARRTTEGLSKREIIRCLKRYIARETYHTLRADLEALNGP

SEQ ID NO: 205046 - protein, 360 aa, unidentified
MTHRTWKLGNVKWLRVSEGDAMTVGLDVHKASVHAALRRNGQEIGTWVMPMENKTIVASLNRFGPALKKVVYEAGPTGYGLARALKKAGLPVEVIAPGKVPQAPNPDSKTDRLDSRKLAEEAEKGSLKKAVIAIPTEQEEADRQLARLRDQLIGKQRRVKQQIKSLLLQQGLAEPAGLAHWSAEGLAALKMMRLRHQWQLSLEVMIEELEHLVALRKRVERHEAWLMKQRRHRKSARVLQTHPGVGVVTATAFRLEVYQPERFATPEQLAKYVGLAPRVRQTGPKRRGGPLIPAGRGSLRSLLIEASWRWIRDDAAAAKTYRRLVRNTGSGQKAIVAMARRMAVHLWCMLCRGEVYHRAA

SEQ ID NO: 205047 - protein, 423 aa, unidentified
MAKAKKRKYRKLDRNLPVMRPNAAGIDIGATEIFVAVPADRDAESVRSFPAFTQDLHELADWLQRCHVDTVAMESTGVYWIPLFQILEARAIEVHLVNAQHVHHVPGRKSDVMDCQWLQYLHSVGLLRASFRPEQAVCEILALMPHRENLVQMACVHVQHMHKSLDQMNLQIHHVISDITGVTGLAIVDAIVAGETNPEELAKLRNHRIKASLETVRKSLVGDYRPEHIFTLKQSLTAYRYYQQLIADCDREIQERIERFQNHADPSAPAESCNKSPLTTDSTFDLRTHLERIFGVDLTRVPGFDVLRIQTVFSELGVDLSGKFSTEDAFSSWLNLSPKDGFSAGRRIRGPKIKTKNRVTQVFRMAAQSLHNSQSYLGHYYRSQRARHGAPKAIKNTAHKTRPYFLSPGDHLSAVRRNPVCKT

SEQ ID NO: 205048 - protein, 442 aa, unidentified
MVHPNAAAIDVGATIHMAAVSADRTPEPVRSFGTFTTDLHRLVNWFKECGVETVVMESTSVYWIPIFELLDARGFTVFLVNARDAKHVPGRKTDVSDAQWLQRLHSYGLLRASFRPKGQIAELRAYVRQRERLLEYAASHIQHMQKALTEMNLQLHHVVADITGTTGLRIMRAILAGERDPKALAHLRDYRCHASAETIEKALTGSYRAEHLFALDQALALFDAYHEKVSACDVRIEAVLKELSISRSRGSGSLPSSRRRTDQTNAMAFDVRAALFALLGKDVPQISGLGPYLSLKLIAECGDDLSAWPSAKHFTSWLCLAPSNKISGGKVLSSRTRRSGSRASALLRLAAVTVGRTDTALGAFYRRLSARIGKAKAVTATARKIAVLFYNAVRHGMEYVDPGASFYETRYRKRVVENLHRRAKAFGFVLHPAEPTPSVAVS

SEQ ID NO: 205049 - protein, 420 aa, unidentified
MEELTEEPAELVERVAALDIGKASLVCCVRVPHESRPGARRQEVRTYDTVTPALLELRDWLICQGVTRVVMEATSAYWKPPFYLLEDDIECWVVNARDVKNVPGRPKTDKIDSVWLCKLAERGMLRPSFIPARPQRQLRDLTRYRRTLTQERTREKQRAEKLLEDAQVKLSSVISDIFGVSGRDMLAALIAGQRDPYALADLARKRMRAKTSVLRQALTGHFTEHHAFLLGMMLDRTDALTAQIDALTTRIEKAIAPFAAQVAQLDEIPGIGVITAQEILAEIGTDMSRFPTPGHLVSWAKFAPKARQSAGRSKAAATGKGNPWLGGTIGEAAAGAARTSTFLASRYKRIVKRRGKKRALVAVGNSILTICWHLLSDPGARFTDLGPDWHDRLAPQRRKRQLIAELERLSGKKVTLNDAA

SEQ ID NO: 205050 - protein, 311 aa, unidentified
MPANADPHYVGLDIAKDQLDYCLSDTDEGRFPNTVAARAQFIKQLLSLRTARVVCEASGGYEKIIVAELLAAGLEVCVVQPGRVRAFAYAEGLLAKTDRIDARLLRRFGQKIAPRLAVPTDPAATTLRELLEHRRQLTTQLTEVEGRLALAGATLRKLLLRQKTFLQKQLKMVETMIDDHIDHDPDLRAKSERLQQITGVGPVLSATVLAYMPELGQITDAQLSALVGVAPFSKDSGLLHAPRHVRGGRSQVRHVLYMAAVSAARSNPILTAFYQRLLDDGKPAKVCLVAVMRKLVCLMNRLIQDPDFVLA

SEQ ID NO: 205051 - protein, 313 aa, unidentified
MTDTTRFVGIDISKSSFDVCVLPDGRSTSFANSAEGIADFLVFIEPFCGIERLVLEPTGGYERHVFAALQAAQLPVARVNAKQARQFAKACGQLSKTDKIDAFILADYARRMETRIVPQRSSQEGALVDLVRRYRQLSRMIVQEKNRREKQNETLKDWIEEILHVLLEQRQAVVDAMEACLKADLELARKADILMSLKGIGLRTACFILADLPELGRIGKGQIAKLVGVAPLNRDSGLMRGKRMIGGGRQPVRDALYVAALPAIRFDPAMKTFFMHLKQKGKPGKVALVAVMRKIIIILNAKMRDEYATVLDH

SEQ ID NO: 205052 - protein, 356 aa, unidentified
MGLAYDGRQVVGMDLHRRRSVLVRMTEDGRRLGTARITNSPAELRAQIARAGKNPRVVLEATYGWYWAADTLAAAGAEVHLAHPLGVRAFSYRRVKNDERDAADLADLLRMGRLAEAWIAPREVRELRELTRYRQKLIALRSNTKDQVHAVLAKLGIPVTHSDLFGTGGLQWMDGLGLPQPYAGKVTSLRQLTGELTAEITMLSEVIADLLAGDRSYQVIQRLPGIGPVLAAIIIAEIGDVTRFRTAAQLCSWAGLTPEHRESDVKVNRGRVTKQGSRMLRWALVEAVQRNGPGTPAGAVKAAIIARRGKEACGIAKVAAARRLLTLVYYGLRDGEIRCLAHAPDSPPPAEPRAAA

SEQ ID NO: 205053 - protein, 347 aa, unidentified
MEKVIRIGMDTSKSVFQLHGVNAAEEVVLRKALRRRKVLEFFARLAPTKVGMEACGGAHYWARELRALGHEVFLLPPQYVKAYVKRGKNDRADAEAICEAMSRPTMRFVPVKSAEEQAALMLAGLRDQMVRRRTQLTNAIRGYAGEFGLVAPRGLSKIEPLLVRIAEDESVPELAKDIFAAYGQEYAELERRIAKVETRLMAWFRQSEPSQRLTQVPGIGPIIASMLVMKIPDPGAFHSARHFAAWLGLTPTDHSTAGKHRLGVITRAGDEDLRRLLVGGAMSVIQQADRGRGSPSPWLLGLLKRKELKLVAVALANKMARIAWKLLVSGENYDPRRSKVRALDKAA

SEQ ID NO: 205054 - protein, 368 aa, unidentified
MQQAITAFVGLDAHAESNAISVAEAGREVPRFVGTVGPKFTELSKALAKLGDPSKLLIVYEAGPCGFALAREFKRAGYHCEVVAPSRVPRRPGDRVKTDRRDALTLAGLARAGELTFVVVPDERDEAIRDLSRARIDAVRARLKARQQLKALLLRHGRRYTGKTSWNAAHERYLAKVTFEHRAQDVAFVEYRQAVSDAHARVERLSEALIQGLDSWHMRPLVQALMTLRGVDQLVATTLVAELGELKRFAHPRELMGYLGLVPSEHTSGDKRRLGAITKTGNSHARRVLIEAAWNYRFPPRITLPLQKRQERQPAAVRAIAWRAQLRLNHRYRQLTARRLQHNKICVAIARELAGFLWSIGQQVTIAN

SEQ ID NO: 205055 - protein, 412 aa, unidentified
MDVFCGIDWAEDHHDIALAGRDGQLLARRRISDDAAGLAALLELLAEHGDSADDPVPVAIETPRGLLTACLRATGRGVYPINPMAVARYRDRHSIAGRKSDHGDAVVLANILRTDLHAHRPLPADSELAQAIAVLARAQQDAVWARTATHNKLRSHLREYYPAFLAAFADARGGIMRPEARAILAAAPAPAAAAALTLTQLRALLRKAGRSRGIDAEASRLREAFRAPQMRQLPLVEQAMGRQAQALLRQLDAACDSASDLEQAAIESFNQHPDAGIIASFPGLGPLTGARVLAETGGDRFRFSDAKGLKAYAGAAPITRASGKTTAVLHRRVKNQRLAAAGYIWAFAALTASPGARAHYDRRKKDGDRHAAAQRNLFGRLLGCLHHCLATGQHYDENAAFPAPSAKLPQAA

SEQ ID NO: 205056 - protein, 416 aa, unidentified
MSEYAALVAIDWADQQHAVCLLDPSSGKREHSIVKHTPQALQEWALSLRQRFAGPIAVGLEQSRGPLIYALLQYDFFVLYPINPATLAKYRQAFSTAHGKDDPSDADYLLDLLEHHRNRLRPWRPDDEKTRTLRLLVEQRRRLVSDQTRFSNRLTALLKGYFPQVLGWFEDIRTVLVCDFLERWPELAALQRARPDTLNKFFRSHHSTSNSTNQRRLAEIKSALPLTNDAAVMTSSVINVKALVAQMKTVIAAISAYDRHIEALCQTHDDYHLFAALPAAGAVHAARLTAALGSDRSRWQSADELVTFAGIAPLIERSGKQFRIRWRYFCPKFFRQTFHEYAAQSIQDSFWARAYYSSQRAKGKDHHAAVRALAFKWMRVIWKCWQTRTPYNEVIYLESLRKKGSSLLKFAADHQK

SEQ ID NO: 205057 - protein, 427 aa, unidentified
MTTREKVGEPEFVAFVGIDWADQKHVWCLQAANSAKREGGELEHKPEMVEAWVSELCRRFGHGPIAVAVEQVKGALVYMLGKYECLHLYPVPSTMSASMRKALYPSGAKDDPRDADLLLDLLLQNRDKLRRLTPDNEATRRVQNLVEERRKLVEEKTAQLNRLIGYLKVYFPQMLEWFAKLDTKLACEFLERWPSLEELQAAAPAEVRKFFRQHRGRHPELTEWRLQGIGQAMSAIRDRAVIEAKRMVVQVIARLLRTLLEGIAALDDKITEAAEAHPDFFIFQSLPGAGAALAPRLLAALGSQRDRYASAEEVQKYSGIAPVTERSGKKKWVHFRWACPKFLRQSFHEWAGHSIVQSVWARAYYQQQRQRGKDHHAAVRALAFKWIRIVFRCWQDGAAYDENRYLATLAKRGSLLIPVPAAAATSL

SEQ ID NO: 205058 - protein, 411 aa, unidentified
MHERQKHFYVGVDLHKQHHVAVIINCWQEKLDEIKFENKPSAFSTILLDIYKHIKDGLTPIFGLEDVGGYGRALAQFLTDHGQVVKEVNPALSYAERKSHMTTQKSDSWDAECVARILVNKLDQLPDAKPQDLFWSIQQLVTRRNALVKAQGALKNQLHIQLSHHYPSYKKFFSEVDGKTALAFWERYPSPHCLEGASVKQLTTFLLEASHNTCSVKKASEILKLFKEDGNTIKEHQEIRDFLVRSIVRDILFKKQEIRYVERELKGLMNLLDFQLDSMPGIELVTASALIAEIGDVRRFPNANKLARFAGIAPVYFGSGGKGKEQKSKQGNRALHAIFYNLAVQQVQVAKGSKLPRNPVFHAYYQRKLKEGKTKGQALVCIMRRLVNIVYGMMKHKTAYELPIIKVEKVV

SEQ ID NO: 205059 - protein, 355 aa, unidentified
MSKVKYIGLDVHQESISAAVLDESGKAMMQCILPTKSNAILEWIAGIRGTVQITFEEGTQSAWLYALLVHRVSKVVVSNPRKNALLKVGNKSDPIDALKLAELLRGGLLSGVYHGENGLRSLQELGRSYTTLTEDTTRVMNRLKALYRGQAIACKGKKLYSVRFRGEWLQQLVQEGLQQRAQGLYEQLDGLEKLRRKARQLLLQESKKHAICARLRTIPFLGPIRVALLVARVQTPHRFRSKRQFWAYCGLALETRSSADYQQIEGKLKRSSRKALIRGLNADHNPTLKRIFKSAAMSASVFPGPWRDFYRERVEAGIRPEMAQLTLARKIAATALTLWKKGESFDPTYLKAQAA

SEQ ID NO: 205060 - protein, 462 aa, unidentified
MTIDKKRNRKERKELARQLRSEDPGLEVVHPHAAGIDVGNGAHYVAVRPGRDSQPVRRFECFTADLHRLADWLQSCGVKTVALQSTGVYWIPLYDILEERGFEVYLVNARHTKNLPGRKSDVQESQWLLKLHTYGLLNNSFQPTSEIRVLRTYWRQRAEHARGIGTCILRMQKALTQMNLQLANVISDLSGVTGQKIVRAIVAGERDPRKLAELSDPRIHASKEEIAKSLEGNWRQDLLFVLHQEVKMYDIYQQRIAECDQQLEKHLAHFADTGPPQATEEAKKKKGKPSKNNPQFHLADELQRITGVDLTRIDGIDVMVAQTLVSEVGLDMSRWKTEAYFASWLGLCPDNRISGDKVLSRGTRHVANRAATSLRMAATTLLRSQTYLGAQYRRLRSKLGAPKAITAMAHRLARLVYRMLKYGQQYVDKGAEYYERRNRQQQIEFLRKKAAKLGLQVTLAQA

SEQ ID NO: 205061 - protein, 334 aa, unidentified
MHTMTLIGIDLGKHSFHVHCQDQSGKALLRKKFTRTKLMKFLADCSPATVVMEACAGAHFMARRIADLGHEARLISPQFVRPFVKSNKNDFIDAEAICEAASRPSMRFVQPRTEAQQAMRALHRVRESLVRDKVKTTNQMQAFLLEFGISMPKGIAVIKRLSTVLAEHPLPPYLVQVLLRLQAHYHYLVEQITEIETALSQAIAQDDTGQRLMTIPGIGFITASVLSSQLGDGKQYACSRDFAASTGLVPRQYSTGGKTTLLGISKRGNKTLRQLLVLCARSFILHIEHRQGKLADWVKQQLERKHSNIVACALANKFARIAWAITTQHTVFSA

SEQ ID NO: 205062 - protein, 320 aa, unidentified
MRNAVGLDISKLTFDATAIVGNAEYSAKFNNDSKGLDQFSDWLKSLGCENLHICMEATGNYYEDVADYFAQYYSVYVLNPLKISKYAESRFKRTKTDKQDAKLIAEYCQSAKESELVKRQKPTDEQYRLSRMTAAYTQIKSECAAMKNRYQVAKDEEAAKAYSEIIKAMNEQLEVLKAKIKEQTEKPKCKEGVKRLETIPAIGRMTAAVLFHHLTSSKFETSNKFAAFAGLSPQQKESGTSVRGKGKLTKFGNRKLRAVLFMPAMVAYRIRAFPDFIKRLEAKKKPKKVIIAALMRKLAVIAYHVHKKGEDYDSSRYKSA

SEQ ID NO: 205063 - protein, 356 aa, unidentified
MSHKLNSAIAVIGIDIGKNSFHAVGQDKRGEIVLRQKWSRGQVEARLANLSPCLIGMEACVGAHHLSRKLQALGHDARLMPAKYVRAYSKGQKNDFRDAEAIAEAVQRPTMRFVATKTTDQLDLQALHRVRERLVGQRTGIINQIRAFLLERGIAVRQGLRFLRAELPSILANRTDALSPRMLQIIERLADDWHRLDERIEGLSSEITALACQDRGCERLMTVPGIGPIISSAMVAAIGTGDAFSKGRDFGAWLGLVPKQISTGDRTILGSISKRGNRYLRALFVQAAWVVLVKVGPKHWERYGLKSWIETAKKRLHHNVLAIALANKLARIAWAVLHKGRAFECVKTNATAPRPA

SEQ ID NO: 205064 - protein, 353 aa, unidentified
MASARSSTAPLKYVVGIDIAKDTFVACFGRIDTSQHLAFGKETTFANTPAGFAALLVWAAKQQVVAAPQWFVVEATGVYYEELAYFLADNTFALSVLLPNKVKHFAQSTEQKSKTDQLDARLLCRLGLERALPAWQPPTPALRQLRALSRERQSLTQQAARLKTQRHAYQHSYQPDTRTLDRLAVRIQLLDQQLKAVDQDLAALLETEPELARKLAHLTSVPGIGRTTAIVVVAETSGFGLMENERQLASYAGLDVVQRQSGLSAGATRISRRGNVRLRTALYLPAVSSLRFNPQQIAFYARLRARQSSGKPGVIAVMRKLLLLCYCLWKNDCAYDPHYHPARCLEKEVAPTS

SEQ ID NO: 205065 - protein, 346 aa, unidentified
MNATTVAVDLAKSVFELAVADERWKVLERARLTRRQFERWFENRVVRLVVMEACATAHHWARTLRARGIEVLLVPAQYVRAYVKRDKTDAADALALLEAARASDITPVGVKSVEQQGLQALHRLRSGWMGTRTRRINTLRGFCREFGMEVSVGAARGLAQIARLLADEHSAIPAMLRAPMRLALEEIRLMEARIEALERELAAIARTSAACQALASVPGIGLLTSTAMVAAVADPRSFDSARRYASFFGLTPREHSSGHTRHLGRISKRGNRYVRTLLTHGARSVLRAATVARRAGRNVDRLRSWALEVQARSNHNKATCALANKLARIAWAVWKRGVGFTPLPMA

SEQ ID NO: 205066 - protein, 317 aa, unidentified
MTVIGIDVAKQTLAIDAVLPDGKRRQKHCANSANGHAELLRWIGRHAVAPVTIGLEATGGYQELVAIALHEAGHTVSVLNPSIVAAYGQSQLRRAKTDPSDAALIADYVRTQRPPAWTPPPLEMRQLQALVRRLDALLEMHTQEQNRLELAAPIVRPSIEAVLAHLTRQIVAVKQQIADHIDQHPTLRTQRDLVQSIPGIGATTAALVLGELLDVARFTSARQLAAFSGLVPRLRQSGTSVRGRGPLAKLGSSRLRKALYFPALTALRHNAPLVRFAARLRAAGKPRMVIVAAVMRKLLHQIYGVLRSGRPFNPEAA

SEQ ID NO: 205067 - protein, 411 aa, unidentified
MELLVARCAGLDVAKDEVVACVRVPDGHGGRNQEVRTFQTFTSGLEALAGWLAGEGVTRVVMEATGQYWKPIWYLLEEAGFELLLVNARHVKILPGRKTDVCDAAWLAELLEHGLLRGSFVPPAPIRELRDLTRYRKRLIQAHASEGQRVQKTLEDAGIKLDSVAADVLGVSGRAMLGALVAGERDPQVLAELAKGRLRAKLPQLRQALRGRFGDHHALLVRLALAHLEHLEGAIATLDTEVDRVIAPFARARDQLATITGVGKRAAETIIAEIGVDMTVFPTAGHLASWAGRCPGNNLTGGKRRSGKPTKGNRWLGEVLIECAWAAARSRDTYLSAQYWRLARRIGKKKAAVAVGHSILVIAWHLLTSDCDYADLGGDYFVRRDTDRQRQRAVAQLQALGYRVTLEPLAA

SEQ ID NO: 205068 - protein, 337 aa, unidentified
MGEISTIGVDLAKSVFQLHGVDAEGRTVLRRQLRRSQILEFFQRQPPCLIGMEACASAHHWARELIELGHDVRLIHPSYVKGYVKRGKTDKADAEAICEAVSRPSMRFVPVKSEDTQALLMTHKAREFLVRQQTQIVNAMRAHLGEFGIVVAKGIHNIERLIMACEQASLPAPARKALRLLADQLVDTQEKIQTLTADIQADARGNEAAQRLQTIPGIGPITASALVAALPDIAEFKSGRDLSAWLGLTPRPHSTGGKERMGRISKMGNRYLRRLLYLGAIAQVSARRRRAAGEDWLWSIIQRKKPKQAAIALANRMARTAYALIKNRTEYRAAQTA

SEQ ID NO: 205069 - protein, 404 aa, unidentified
MIFVGCDWSRHKHDLLVMDPEGSTLLKLTIPHAAEALDDVAQQIAELEAEPAEVRIGIELHDGALLSWLLDQGYSVYGINPKSAERARDRYRPSGGKDDRSDAFILADTVRTDRGYLRPIRPDSDVSQELRAWVRFRARQVRDRTAASQRLRALLAEWCPALSALCDDLKRQWQRDLLRTFPLHADLSGAYGNRLRAFARKHRLRPATYDRLLATRSQKPMPIPASRIGALRAEILALIERIDRLTQSVNEIEAELQRLVADHPDAGIFQSLPAHGTATTATLLSAFGEDRDGAPSWRELAARWGVAPVTVQSGRSRHVKRRRACDHVINQALLFFAFRTAFMTGCWAADFYQAKRSKGVEHYTALRCLAQRWVKIIYRLWADRIPYDERTHQANRQRHRDIAA

SEQ ID NO: 205070 - protein, 427 aa, unidentified
MPYRIAGIDVHKKMLAVVVADVDVAGDWCFERRPCGTSPSQLQALAEWLTERDVEEVVMESTAQYWRPVWDALEQQWQPTRHGRAEAGPMAGALHLAQAQSNNGPRGRKKDFPDAERLVKRLVAHELTLSFVPDVTQRLWRTVTRRKYQSTCTRVQLRNRLECLLEEAHIKVSSLVSDLLGLSGRRMLRAVASGETDPAIVAALGSPRLHATPDQLRDALGACINLHPVYRRLLAMTLDELDVIDAHVRQLDEELAQLLREQQQAVERLAAVPGLGVDSAQQIIAEVGPTAATFPTAKRLASWVGACPGHDESAGVNHSHRSPNGNRQMRRLLNQAANAAVKTKGSIFELVYRRLVVRLGHAQAIGAIAHRLCRLVWKILHDGVAYEERGPAVTKARAQRRAAKLIRELRSLGYRVERMPSPASTLA

SEQ ID NO: 205071 - protein, 366 aa, unidentified
MNKISTVQRVSNEIFKEQKLTIGLDLRDRWSSYCVLEEAGQVLLEQKVPTTPEAMQQTFGKIPRSLIALETGTHSPWVSRLLTELGHEVLVAHAQKVQLITKSNRKDDRHDARTLARLARIDPALLGPVRHRSAKAQIHLTVIRARAELVSARTALVNAARGLVKSYGERLPKCGTQQVSRELAAELSTELREVLEPLLREIESLNERIQEYDERMEQIAKEVYPEVSLLQQVKGVGTQIALTYVLTIEDPYRFPKSREEGCFLGLRPGRRNSGESEPQKKISKEGDRYLRTMMVQGAHYILGPFGEDSDLRRWGLKLAERGGKNAKKRAVVAVARKLAILLHRLWVSGEVYEPLRNSQRTMQAVA

SEQ ID NO: 205072 - protein, 272 aa, unidentified
MDEVKRFVGIDVAKAALDVFIGSAGAAFSVPNHEGGIRELLKQLKPTDFVILEATGGLETPVASALAAAGIAVAIVNPRQVRDFARATGRLAKTDRLDAEVLARFGEAVRPEARPLADEQAQALEALVTRRRQLVEMLTAEKNRRASAPKVSYRSIDEHIRWLEKRLAGFDDELGELIRDTPLWRERDELLRSVPGVGKVLSSTLLAHLPELGALNRKQIAALAGLAPFNRDSGSLHGSRCIWGGRAQVRRVLYMATVAGVRSNPVIKNFYT

SEQ ID NO: 205073 - protein, 409 aa, unidentified
MKLFVGIDVSSTDLETVMMSSENNEVVFQGNFINDINGASDIKRTVLKLVTTNHFDQIIIGMEATSIYSFHPSFFFKNDDDLNQYNTETVVINPKETKRYHDIFEENKNDKLDAFYIADYLRIGRYTVGIVKQENYLALQRLTRSRYELVKSSVRAKQHFIENLYYKVNKLVTTDKPKTNVFGSTMMDMLTEDLSTDDLANLSIEDLTDYLSKKGHGRFSDPKALASAIQKAVRGSYRLGKVMADSVDTVLSVYATEIKTFKKMIAELDHAIADLVQTIPEERILQSIPGIGPVYAAGILAEIGQINRFDDETKLASYAGLSWRQKQSGNYNSSTTPLIRSGDNYLRYYLVEAANHVKLQDDVFKDYYNRKYHEVSNTPHKRALVLTARKLIRVIFFLLQNHQIYEERR

SEQ ID NO: 205074 - protein, 391 aa, unidentified
MIYVGIDVAKDKHDCFIINSDGEVLFKAFSIANNRNGFNDLYQKIESVMEDVTKVKVGLEATGHYSYNLLGYLIDKGLPTYVINPLHTNLYRKSLSLRQTKTDKVDARTIASMLMSDVNLKSYSDTSYHNEELKSLTRYRFDKVKQRAKLKSSVSRLVCILFPELEKLVPTLHMASVYTMLSEFPDAKQVANAHLTRLTNLLSESSKGRYGKETAITFRNAARTSIGSNMPAKSLELKHTIKLIQELSSEIDEIENEIKLIMDEINSPILSIPGINYRMGAMIIAEIGDFNRFDSPDKILAYAGFSPSTYQSGQLDGAYSHMEKRGSRYLRYALYNAAKYVCNWDPTFAEYLAKKRAEGKHYNVAISHAVKKLVRVIYHLEKTNQQYIKAV

SEQ ID NO: 205075 - protein, 485 aa, unidentified
MGDRRLVGVDLGIASAHTVRVLDGQGNVVAKRRAWPTVESLSDIERAALAGAVEGTRLEVVMEPTGPAWLPIAVFFTSRGHVVHRVSSAKSHDLRKFLSRHTKTNGIDADTLARIPLFDPSGVQPLVLATEERAGLDRRVRATDRLTRAGADHKRRIKDLTRQVMPMTPLTGAITRSDLAVLERYADPNALVRLGAKRLAKIIAKASANKHGTDRAVEWIAAATSALELYRDHPAVAFVAIAEEIATEVRLLRAVEAERARHAAAREDRYLVVDPDQLARSIPGFSTIGGPSLVACMGDPARFAKGKQFRSFTGLTPKASETGNTDRKGQPMSKAGSSLLRTTLIRAADIGRRHDPQLARIYYIQMVERGKTHLGALCVVAANLAERAWTVMNRNSPYIVCDVDGTPVTNEQAKAIIAACWTVPAEVRARRRSAKATPKGKAPQAISTRQPTPYANGADTRDDLPRSTSSTPRPHQIKTLAESPA

SEQ ID NO: 205076 - protein, 429 aa, unidentified
MNCTQNKKIEQVKETTMIVGIDVGSEKHYFRAYNWRGIELTRKPVAFSNSMEGFNSFYNTIVELMQKSELEEALVGIEPTGHYWFDLGQFMGEKDIKFVMVNPHHVHKTKELDDNSPSKNDRKDPRVIAGLVRDGRYFYSYMPTGAYAELRNASNRRFVLVEEQTRAKNRLQKWIAVYFPEYKGIYTHIDAKGGMLVLKKAPTPEEIVRLGVEGIIKIWKDAKLRGNGHKKAMLILAAAMRSIGLKAGLTEARMEIQDLIEDYELQTKRLERVNDLIKGLCQQVRYADKLLEIKGIGITTVAGFIAEVGDITRFDSTKELQKLAGLELVADSSGKHNGKTKISKRGRKRLRYLLFEAAISVVGKNEEFKEIHRYYTTREKNPLKKMQSLIVVACKLIRVFHAILTKGIRYDASKMLKDIRHPGEQLKAA

SEQ ID NO: 205077 - protein, 341 aa, unidentified
MKIFQLVLIQGKVTEGRPANSPKRLIGGFIMYYIGIDVSKKDLSVFDGKDLKFINQEGLTSFKKYLKKKYHLSEIVIIFEPTGVYSLYLKEFCAENSIKAYILNPKQSHNFTRALGKRSKTDKIDARILYQFHKHIDLEDIKVPKIDQEAKTLAGYLVSYEFALKQRVSLSNHLESLRDKGLIALLKKEQKRAKKLEDRIFNDIKEYVSKNQNLKEDYQRLSTIPGIGEKAAIALLTLFKTYQGTNRAQITALAGLDPIRRESGTSVKGKVKISKNGKGIYRKILYLPTLCATVHNQKIKIFYQRLLANHKPKKLAVIASMRKILLIAHDMYQDKTEYITV

SEQ ID NO: 205078 - protein, 347 aa, unidentified
MKDVTTIGLDLAKHVFQAFGADADGTPLFNRKLRRAEVLRFFEKLPPCMVGMEACASAHYWAREIAAFGHDVRLLPPQYVKPFVKRGKTDAADAEAISEAVTRKTMRFVPVKTAEQQAAVMVLKTRALLVRQRTQAINALRAHMGELGIIAPIGIANVKGLAVIIRDEADSRLPAAARFALTEMVEQIELLATRIERLEREIVVQARQDTDMRRLATIPGVGAIIAMAVKALVPDPGGFKSARHFAAWIGLTPKAHSSGGKERLGRISKMGNPELRSLLVTGAASVLRHVRADDKARPWLKDLLGRRPFKVVAVALANKTARMIWALLTRGGVYRNPMVTRANEVPA

SEQ ID NO: 205079 - protein, 349 aa, unidentified
MNNLSKSKLDGKISMFVGMDLHKNYLQIAVMNDKGNVLENSRINNDVKQVGRFFDENIKKSNEKVRVVMESSSVWYNIYSYLSEEKHLNVVLSNPIKTRAIASAKIKTDKLDAAKLANLLRGGYIAECYVPDRRIMDLRELVRHRAALVRMRTKLKNKIHSIVLMKGIQISSKHCSFTHLYNEELKELNDYRINGYLHLIESLDSEIKDVSKKILVLAKEDEMASLLMTIPGIGYYSALLIVSEIGDINRFPDSYHLCSYAGLVPSTHSSGGITYHGSITKRGSKYLRWIMLECAHAHIRTNKNSNITQFYTRLAKIKGNSKAAVAAASKLLKVVYWVMKEKRKYHHHS

SEQ ID NO: 205080 - protein, 309 aa, unidentified
MEHFVGIDVSKDRLDVHLRPSGESFAVARDGGAVAALVERLRTLAPALVVMEATGGYESVVASAIGAAHLPLAVVNPRQIRDFARATGRLAKTDRIDAAAIAHFAEAIRPPARPIAEPEAQALGELVARRRQVIEMIVAESNRRRMVSQRRVIRAIERHLALLQAELSELDRDIDGAIRSSPAWQADADLLISVPAVGPVTLRTLIAELPELGRLTRRKIAALVGVAPINRDSGTLRGRRTIAGGRSAVRAALFMAALVASRKNPVIAPYYQRLRAAGKTGKQALTACMRKLLVILNAILRDRKPWQPA

SEQ ID NO: 205081 - protein, 365 aa, unidentified
MGQNSMVCAGIDTGKYKLDVAIDGRVEQLQVPNDPAGHQTLVAWLRHRQVERVGIEASGGYEQAVVLLLRASGFVVIVFQPAQVRAYAKFLLQHAKNDKIDAALIARCTGAAEKVHEPADARLAPLAKHLTFVEQLTDDIALFKTRRESCHDARIREHWTQEIKRFKLLQTRELKQLITAIRQYGDLAKRFDLIASVDGVGPRTAVAILVRMPEIGRVSREQVAALAGLAPFDDDSASRQGVRHIKGGRDRLRRSLYAAALPAAFNWNPQLKAIYQRLIAAGKPHKLALVACARKLLIFVNTVVQRGTPWTSHAGDPNSQAVSAFDCEAVSSSRPAPAVTPRAAAVKAGRRSPGRPARRLCQATP

SEQ ID NO: 205082 - protein, 350 aa, unidentified
MPCKTVAIAHTIGIDTGKNTLHMIGLDKKGTIVVREKVSRTRIAARLVNVPQCLIGIEAGMASHHVARELLALGHEVKQVPPAYAKPFRQGHKNDFRDAHAIAEAVQRPSTRCVPVKTADQLDLQALHRVRSRLIGNRTAVINQLRGFLLEHGIPVRQGLRFLRQQLPQILAMRTDVLSPRMIRIIEELIGDWEHLDERIERVTDEIETLARADENCRRLMTVPGIGPIIASAMVAAIGNGAAFAKGRDFAAWLGLVPKQMSTGDRTILGRITKRGNRYLRMLFIQGARAILFRPAGWAKHSFGPWLAAAARRLHRNVLATAFANKLARIALTVLVEGRSYAARVEPRAA

SEQ ID NO: 205083 - protein, 332 aa, unidentified
MKLYGAIDLHSNNNVLVVIDENDNMLFRKRLPKDLPSVLTTLVPFKPDLHGVAVESTFNWYWLVDGLIEHDYKAMLVNTVAVQQYSGLKHTDDQSDALWLAHLMRLGILPTGYIYPKKERAVRDLLRKRLQLVRHRVTHMLSAQNQLWRTTGLNVPNNIIKKADHSVLNLIDDRTIQMAIKSNLTLIDTLNQQIELLENTVKKHMVLKPVFQSLLTIDGIGDILGLTIMLETGAISRFKHVGNFASYCRCVESKRLSNGKKKGTNNQKNGNKYLAWAFVEAAHSIIRHSKVAHRFYQRKRAQKNGALAHKLARAAYYVMRDRAPFRRELLFQ

SEQ ID NO: 205084 - protein, 386 aa, unidentified
MPGWLQNGCAVLPAPDREWRNRGLPGLEVGLPSWCFVAALEKGACMPVIIGVDPHKHSHTLAALDEHGRLLDRQRFPATLEGYQALRGWAERWDQRGWAVEGAGGVGRALAQWLVADAEPVVDVPAKLATRVRVLSTGHGRKTDPDDAAVSVAVAARSAASLRQVGVEDQAVVLHLLTNRREDLVRMRTQTSNRLHRLLADLAPAGAARTLTADGAAVLLDQVCPTGAPAVTRWQLASDLIADVRDLDRRIATVEECIQTAVKHSKTSLVELFGVGPVLAAKLLGEVGDIGRFPSKHHFAAHTGTAPLAASSGQVVRHRLSRAGDRKLSHALYLMAIVQIRHPTAGQAYYRRKRAEGKSAKEALRCLKRRLSDAVYRCLLADQPSL

SEQ ID NO: 205085 - protein, 342 aa, unidentified
MAQKMSVLGIDIAKLVFHVVGMDDTGHVVLRKRLARSELLDFIAQLPPLRIGMEACGSAHYWARRFREHGHDVRLIAPQFVKAYVKSPKNDARDAEAICEAVTRPTMRFVPIKQLEQQDLQALHRVRERLVKARTALVNEIRGLLSEYGIILPQSMTKFRTSVVRQLEDEQAKLTSLSTEVFWHLYDEFLALEKRVAYYNEKLQALARAHPVCQRVQAIPGVGPLTATAILAAVPDATHFKNGRQLAAWLGLVPREHSTGGKPRLLGISKRGDVYLRKLFVHGARATLRWVDTKQDGRSRWLTALIARRGKNRAAVALANKNARIVWALLAHNQEYRVRTIV

SEQ ID NO: 205086 - protein, 312 aa, unidentified
MNGKRVIGVDIGKHWLDAAVESSERVGRYSNDAAGIAALIEKLDPAQDVVVFERCGGWERNLEAALADKGVCWAVVHPQRVNAFREAQGIKAKTDRIDARLLRDYGRDQLNDGKLRLGRREDVTLDALMARQRQLKAMLHAENCRLATAALEAVRSSVEHMIAHLEEALAVIAAELVQHEDGHAELAFKEEVLCHQIGVAEHTARGLLAELPELGRLDRKEITALGGLAPRVHESGSIRKRRGLAPGRTTIKVILFNPARTAMRFDPQIKEFCSRLKARGKPGKVIMVAVMRKMLVRLNALLRDAMAQASAA

SEQ ID NO: 205087 - protein, 317 aa, unidentified
MTQISTTTAGIDTSKSKLDVAVHGQAGHWQVANSVAGWRKLRAQLAAAGVTCVGIEATGGYERGVVEHLRAAGLTVLVLQPIQVKAFGRVHLRRAKNDVLDAVLIAACAAALDQVRIAPDPRLTELAQHLTFLEQAEEDIKRCKTRLEHIDEPGLRRLVLGDIARLKARRLAQIRHIARQLRSHPDLAARLDLVLSIPGIGERTALALLIRMPELGRVSREEAAALAGLAPFDNDSGQQRGQRRIAGGRARLRRSLFAAALPAAFRWNKALIALYARLIAAGKAHNAALIACARKLLIYANTVVQRGTPWTEKPVHV

SEQ ID NO: 205088 - protein, 424 aa, unidentified
MAGVVIGIDPHKGSHTAVALDVHEKQLGRLRVRASSRQVDGLLEWASGWPRRRWAIEGARGLGQLLAQQLIASGERVLDVPPKLAARVRLLDSGQINKNDPNDARSVAVAALRAHELPELAAEDHAMVMRVWARRYHDLARLRTQVVCRLHAVVCELVPGGVRKYLRASQATDVLDRIVADSPVAQAKLELARELVADLERIDAQRREAKGRTARAVAATRTSINDVYRVGPIVAGTVLGYVRDIRRFPTRDRFASYNGTAPIEVCSGDRKIYRLSRRGNRQLNHAIHMAAISQIRHHDSEGRAYYEKKIAEGMTGKTALRALKRKISDALYARMIDDARRLAAKDPGGHTGNDSASSAAGSHPETPALRKSHSRATANSKTGTGQRPLTLRPAPDRRRTSRRATGVQVEPRPGPHRGRRQDRP

SEQ ID NO: 205089 - protein, 370 aa, unidentified
MLNTTTFVGLDVHARSIKAVALDAMTGEVRSATFAYDAAAVAEWAGSLDPAAKCVYESGVTGFDLQKKLTALGVDCVVGAVSKMIKPSADRKRKNDRNDAEFLARMLSVGNVVEVCVPDDECEAARDLVRALDDAREDLKRCKQRLSKFLMRHGYAFSETTPTGRRKGNWTAAHWAWIRSIEFPEKADDEVLAYYVDAVRQAMENKKRLEKLVEAEASKPRWKKRVDSLRCLKGVDAMTAADIVFEAGEFSRFKSARSFAAWIGLTPSEHSSGESARQGGITKAGNKHLRRVLVEAAWHYISASPHPKDLAKGQAPDPAARRHAAKGIRRLVKRREEMLGRGVHKNKANVATARELACWCWAVGRMIENG

SEQ ID NO: 205090 - protein, 341 aa, unidentified
MGEVSTVGLDLAKNVFQAHGSDAMGRAVFRKTLRRGQVLEFFSRLPRCVVAMEACGGSHYWAREIGKFGHEVRLIAPAYVKPFVKRQKNDAADAEAICEAAQRPNMRFVAVKSEATQASATVFRVRELLVRQRTQAISALRGHLGEFGVIAAQGATNATKLMVRVEDDSVVIPEAARAALSALIAALRRLEEQIATLDAEIARRAREDETARRLMTIPGVGPLIATAFATLAPDPATFRRGRDFAAWLGLTPRQHSSGGKQRLGATTKMGERSLRRLLIIGANAVVQWRERKGAKPGTWLAGMLARKPAMLVRVALANKMARIVWALMAKGGIYKAPAAAA

SEQ ID NO: 205091 - protein, 402 aa, unidentified
MLPKRACIALDVSKGNSHMQAFYSAGFKATDVMIIQHDKNGFNTLDELIKKIERETGDTAAIVFESTGSYSKPLEHFLWSIHKKYYLVPPLLSAKVRKSDIRPTKTDAIDCETIANVYYLKNLKEADRLSKTSLRLKNYSSYYLFYVNREVETKIKYRQYLDIVYPKIDEYFDVMALSFIEFIKNNPDPNKLIKRSHEDIYKRFLKFSYCGEIKSKARATSMKRYLSEAMITIDSDNPEITILADVAKVLLEDLNHLENMLNEIIVLAMKTEEYKYIVTIPGLSKNTAARISAEIAGIDRFSSASKFVAYIGIDPTVCQSGKLTGEHLNITHKGNQRLRCLLYLVCVGSLKNRSDYNPIRDFIIKKKNDGLAPKAAIVAGCNKLARIIYAVCSKREVFSIQQ

SEQ ID NO: 205092 - protein, 341 aa, unidentified
MMIIGCDFHPRFQQIAYVDRETGEFFERRLSHPEEAERFYRSLAGTQVRIGLEATGNFRWFRQLIDGLGHEFLLGDPSGIRAASPRRQKTDKRDARHILQMLLEERFPAVWQPSVENEELRQLLLHRCRLVRLRTRITNQLDSMGKNEGLLGSKSWSAERRRRIEALPLSGWYMRRRTDLLDLLDELEKRIEPLEKAVVEAAEKNQQACLLMTHPGVGPVVSLVYVLTIGDWKRFPRSKELASYLGLIPAEDSSADKRRLGHISKQGNTLLRWLLVQAAMGAQRSDPSWHRRYLRLSLNKHHGVAKVAIAHKLAVRLYWMLRSGQNYKQVMERGSHVGQPV

SEQ ID NO: 205093 - protein, 426 aa, unidentified
MQYALTQVLPDVPAGGVCAGIDWATADHVACVVDMTGRVTDRFAAAHDKAGIAGLIARLRRSGVSEVAIERGDGPLVAALAAAGLTVVVITSRQVKNLRSRFGAAGARDDRFDAFVLADTLRTDRARLRPLVPGTPATISLRMAVRARRDLVRHRVAACNQLRAHLAVAFPAGITLFHDLDSPISLAFLARFGSQDAAAELDEQAIGAWLATIAVRGRPAPASVLHARLQAAPPGATGADGAAQAGVTAALTATLTALSAQIKALETQIAGQLAAHPDAHIFTSLPRPGTVRAARLLAEIGDCRSRFPDAESLAGLAGVAPVTRRSGTRIAHGFRWAVNRQLRDAICDFAADSRHASPWAAAVYDDARARGKDHPLAVRITARAWTYVIWRCWHDGTAYDPAKHNALQAVLARHAAQTAGTRQQDQ

SEQ ID NO: 205094 - protein, 353 aa, unidentified
MKKIAIGIDFSKKTFDVTIIRRDGDSYIVLAYSKFDNEARGFKAFEKWVKASLKDTPEARNKSEWIFCGEHTGMCSIPLCDFLAKKQYFMWLESALVIKRKSGIVREKNDRVDSRRIADYALRNFSTDVKAYQLDSKDLKKLKSLYAAHDMLTKDKVAKINQLKSGSLDDSPSARHEIDKQLTTIRRSLKEIDDEIQNLLSESDEFSHNFTILNTFKGVGVMTITCLIIKTRNFKDMSDPRELGCYAGVVPHGHQSGTSIDKPARTSKYRDKGVNALLSICVTSALSHNNPIIRSYYDGLVKRGVNPCKAKNNCKFKILNVLLAMLRNGTEFSMEIHGKSKKLWKSGQTPEAS

SEQ ID NO: 205095 - protein, 318 aa, unidentified
MNTDTLQNINVGVDTGKSQLDIYIRPLDIYFTVPNTEKGIIDAIKTIRKHRPQRVVIEATGRLEMPFILACDKANLPYVIANPLHVKRFAGAIGQRAKNDRLDAALIAHYAEAIQPKLTQLKSENIRLMSDLVTRRNQLLSMQTMEKNRIQVLPQSLASSIKPILTALKNQITKIEEKITKLIDTCPEYQAKNELLQSMPGVGKIVAASIISNVPELGYITNKQASSLIGVAPITRESGRLKGKRMIQGGRAQVRTVLYMAMMSAIQCNPIFKATYERLLAVGKPKKVAIVACMRKMVVILNSMLRDGVMWDKNSAKN

SEQ ID NO: 205096 - protein, 343 aa, unidentified
MDYFAGLDVSVKDTSVCIVDGTGKVVREVKVASEPDALLQVLRNRAYRLKRIGLEAGPLSQWLFSALGEANLPVICVETRHMRAVLQAQINKTDRNDARGIAQMMRVGLYRPVHVKTLRSQKLRMLLTHRKLLQSKAIAVENDLRGTLRNFGLKVGMAGATKFEGRIKELIENLPDLAVLVEPLLIVRRVLREQIGVLHRRLLAVVRNDEVCRRLMTTPGVGPVVALTYRATVDVPARFRKSKSVGAVFGLTSAKYQSGEIDRSGRISRCGDEMMRVMLYEAAQSMLRSKKWSWLKAWAMQIARRRGMKKAIVALARRLAVILHRIWVDGTEFRWTREVVTAV

SEQ ID NO: 205097 - protein, 340 aa, unidentified
MGKRYIGIDLHRNRFTCCLRLENERTYVTEWELEDLGKFVKKLRPSDEIAVEITGNTRLFYDAVVPHVARVVVVNTTQFKVIRQSVKKTDPHDARALALYLSKNMLPEVRMKDKEHGQLASLTQTRDTLVKLRTALKNKVNNILSARGLNLPKEALGSEKALNEVLELPFDEIVRIELRVIVEQIRSLNKSIAELEKTIGEEGSKLEGHKGLTSIKGIGKITGAILLSVIGDVNDFADEGRLASYFGIVPRVSNSNETEHSGRIHKRGTKLGRTALVQSALIAANYSPYLKRFYEQVKARRGTGKAIIALARKFLGIIYRTLKNKWVFQDFPNFVLAEAS

SEQ ID NO: 205098 - protein, 424 aa, unidentified
MPEQVVTTHVVGIDIGMESCTMSCLTRDKRQIIKSTPFANAVQGFDWLFERLEGLGVAPKQILVGLEATSRYGENLLQALLKRGYQVCLFHPAQMHAFAQQRGLRAKTDQLDAVTIARALLSGEARFGYVPNEQVATYRELIRLQHQLSDDVVRYKNEIHALLVVLFPEFTQVFVDPTRPTALAVLKRYPSAQAIAQTEVETLSTCLHELAPRHYGRPPAQELVRLAKASISSGVAVAARSSSLRILCDQLEHTQTNLDQLQREIDQLLDQDPKATGLLGVPEFGPTTVAVLRAELGDLARFTRIDQVVAYVGLDLQVKQSGKWKGQTKLSKHGSGRVRRILYLAARREHSPGTIPLWGVLPAPGGAWDEKGHGGGGGDAQNVDCGRPSDPDGGEVRSGESGQAGRELAARLAPCLPGAPPPNG

SEQ ID NO: 205099 - protein, 338 aa, unidentified
MESYAGIDLHASNNYTAVIDDHDKRLYGKRQPNRLDVVLSALDPFKTDLKGVVVESTFNWYWLVDGLMENGYKVHLANPSAIKQYEGLKHTDDKWDAFWLAHMLRLNILPEGYIYPKEERPVRDLLRRRLLFVKHRTSHILSLQSMITRNLGVRMACRGIKQLMEEDAESMFDSPYLVLAAKNNIATIQFLKKRIKVIEREIRPLIKIREEFKHLLTIPGIGDILGFTIMLEVGQLSRFPKVGDYSSYCRCVKSEKLSDGKKKGKNNKKNGNKYLSWAYIEAANFIRMHCPKAERFYQRKKAKAGGIVATKALSNKVARASYYVMRDQVPFDEDKLFA

SEQ ID NO: 205100 - protein, 316 aa, unidentified
MEVTPLFVGIDVSKARLDVAIHPWDETESVNHDRAGIELLVKRFQEIGPVLIVMEATGGYERKLLRALASAELPAVAVNPRQVRDFAKATGQLAKTDRIDARVLARFAEAVRPAVRALPDEITVELRARVARRRQITEMIVAETNRLSGAPKALGKRISAHIGWLEKELQRADQDLDQSIRQSPIWCESQDLLQTVPGIGPVVSRTLLAELPELGKLNRKQIAALVGVAPLNCDSGTFRGRRSIWGGRATVRATLYMAALVASRCNTVIRSFYKRLRDAGKAPKVALVACMRKLLTIINAMLKHKTPWSETNYQTS

SEQ ID NO: 205101 - protein, 411 aa, unidentified
MKRVYDNCCGIDVHKKLIVACFRKGNEQELREFGATTRELLELADWLKSGNCEMIAMESTASYWKPLYNVLEASELSAMVVNAHHMKAVPGRKTDAKDAEWIADLLQHGLLKASYIPSKDQRELRELVRYRKSLVGERTRELNRLQKMLEGANIKLSGTVSDINGKSARSILEYLITGESIDSEKYDEMYEKKVIAHNLKASKEQIIDDLNGIMTPLQRRMMKELLTHLDELNIHIKNLDDEINDFMKPEEKQAAKDIQDITGIGNSSAQAIISVIGADMERFPTDRHLSSWAGLCPGDHESAKKRKYGKTRKGNALLRSTLVICAHSAVKNKKSYFYAQFMRISAHRGKKRAYVAVAHSMLIAIYHILKEGVAFKDLGAEYYNQFNRERKINAYLKKLKALGWEAQAVAA

SEQ ID NO: 205102 - protein, 360 aa, unidentified
MTTTAVSTAAGPILAIDLGKYKCVACAYHATTEHAFHTIDTSRTEVARLIQRTRPAVVVIEACSLSGWVHDLCLELKVPCRVANTAAEAWKFKHSKRKTDRDDALRLAQLFALGQLPEVVVPARATREWRALIAHRQALVTQRVAAQNRIRSILVGQGLPAPRGAKAWSATGLAGIGQFARPLAECGPEELWRGLLELALTAYRQAEERVAVAQAKLDAIGKADARVRLLDSMPGLGPRTAEAVVAHLDDPRRFRSGKQVAAYGGLVPRQFQSGEDDRRGRITKRGPAVLRKLLVQCAWAMIRYNPWAQAVYVRLSRGQARKKQAVVALARKILVRCWAMLRDGVPWRPDAATTIVVAAT

SEQ ID NO: 205103 - protein, 332 aa, unidentified
MKKKLIVIGIDVSKATLDCFIHGSAAKHFIVENGSRGFVILLETVLKSTKCRKEDLLICFENTGKYSKMLSVFLHTHEIPFVMAPALEIKKSLGITRGKNDKVDARRIALYAHQKMDQLVLTVLPGEKIDRIKSLLSLREKLIKHRTGYKNGLSDLYDCYQEGETNFIRDTQQRMIAVLNEEIESVEKEVETIIKQDPSMRKNFELILSVRGIGKIVAFYLIAFTANFTSFIDARSFACYCGIAPFADSSGKVIGKARVHPLANKQLKSLLNMAALSVIQLKGECQIYYKKRIDSGKNKMSTINIVRNKLLFRVFAVINRGTPYVDLFKFVA

SEQ ID NO: 205104 - protein, 321 aa, unidentified
MAELSHCGIDVSKDRLDVVVLPNEQCFSVVVNAAAGWAELIEKLRGLNIAAIGIEASGGYERGIVRALLAARYSVRLINPFKLRQFAKACGVLAKNDRLDARMIARFVATMPIRPMQRNVAVERLAELLTARRQLSEEKVAAENGSKLLEDSMLQRLYRRRITRMEADIMLLDKRLADMVAADAALAQRYELLISMPGVGPVLACTLVALLPELGQMSRKQVAALVGVAPYDFESGKLKGMRCIWGGRAPIRRVLYMAALIASRCNPALKVFHDRLQATGKKSKVVIVAVMRKILTTLNAMARDNVLWNDRRNGRCAVSAA

SEQ ID NO: 205105 - protein, 360 aa, unidentified
MNAAPAPAPETSTSPDVVIGVDTHKLIHMAVALSANGGWLGSLKLDAKRSGYEELIRWSAEFGRSPVFAVEGTGCYGAGLCRALQLAGLEVVEVNRPDRSTRHRRGKDDTIDAEAAARSFIAGQSTVIPKAGNDLVEMIRMLKLVKDSATDNRTAALNRLHAIVVTAPAALRERLQRLKGKELVECCSCLRSGEISTPLAAAKMALRALARRIQQLDQELKETLAHLDQLTMQHCPELRNTYGIGVDISATLVVAVGDNQERLKSEASFAALCGVNPLPASSGKVVRHRLNRSGNRQANCALHRIVICRMQRHQQTKDYVERRTAEGRTIREIIRCLKRFVAREVFGILRGGPAVRSAAA

SEQ ID NO: 205106 - protein, 412 aa, unidentified
MRVVHERCCGLDIHKKFVVACLLATESDGTVHKEVRTYSAMTNDLLALADWLRGEDCGPVVMESTGSYWRPVFNLLEEQCEVLVVNAYHVKAVPGRKTDVKDAEWLADLLRHGLLRASFIPAPAQRHLRDLTRYRIHLVDERARLINRLQTVLEDANIKLASVVSDVRGLSAREILQRLLEGETDAQALAELARGKLRAKRDALAQAVVGRLQEHHVFLLREQLAHLDYLDAAIARLDAELAARLAAEQEALALVQTIPGVARRTAEVLVAEIGTDLTRFPSAEHLASWAGMCPGNAESGGRRLSGRTRRGNAWVRRTLAEVANVVSRMKGTYLAAQYRRIAARRGKGRAVLAVGHSVLVAFYHMLTRHQAYRELGADYFDDRQRDQVQRRLVHRLERLGYAVTLEALTTSS

SEQ ID NO: 205107 - protein, 336 aa, unidentified
MKKNVIGVDVSKEKLDFCFLQNEKISKEWTLPNSTAAIKSSLKSLLKGSKLDVSEVLICAEHTGQYSYPLSCACEELELSLWLENPAQIKHSSGIQRGKNDRLDARKIAAYAHRFQDKVRLFSLPEKNIASLKQLISERDMYIADKAKYQGQLTDQKRFMDPKDYQKKSARLKKLICGLEKSLALIEHEIQEMIDNDDTLSSQHKLLCSIDGIGDRTAVKMIVSTNAFKDFDNARKFSCYAGVAPFQYISGSSIHSRNRVSNRADKSIKSLLHLAALVVATRKKDGELREYYLRKVAEGKNKMLVLNAIRAKLIARMFAVIKNNQPYEKNYSFSLA

SEQ ID NO: 205108 - protein, 321 aa, unidentified
MTYVGIDVSKATFVVAYSSAKSSETKTFKNTTKGIREFIRTISPEENHCVLEATGNYSMLFVYLLSKAGFTVSMENPLKIKNFARVMLSVVKTDEIDARLIALYGERMQPAPFKLRSDSLLLLKQKRTVLRQLKKQLTANRNLEGSLKILPFIDSKCKKVLEKTIKFLEKQIEEMEEELTSLAEIEYKKQMDLLTSIKGIGATLAAALIIATGGFTYFDNAKQLTRYLGLSPTYQQSGTSVNVKGHINRNGDAYLRSQLYIGAMASLRCNTECKACFERLRSNGKPGKVAIVAVANKLIRQAFAVVTQEKIYIDGYKSVKP

SEQ ID NO: 205109 - protein, 343 aa, unidentified
MEITIKWRFIVGIDISKKTLDISLFDRQNGHGSNWQVPNTREGFRTLAEWMEDHKVTKSQTILISEHTGRYGEQLLRWSTQTGWPHAVVKTTALKKVSWEHHRKTDEFDASQLAEYGVRFSDRLRLEEAPKPTAGQLKRLQAERRKMVDRRAALKSKLGEADFHDADMSQLTKMWNQQVHLLTQHIEQLEYTMDELIRQDPTLCKRHQTMRTAPGIGPVIGRFWLCLFAGKDQLNPRKISSRFGFAPHGRSSGSSVKSPDRSTGYGNSEMRRLMHQAARSVANHKPHYHDYYEQKIDEGKHELVAINNIINKLIRLYCAMWNNQAKYDPKHIQKMIKKYKKSA

SEQ ID NO: 205110 - protein, 489 aa, unidentified
MSQGKRSVPRAASSKVKAEARPKAASCPGGAPAGALTVLNRNAAGIDVHSDMHMVCVPAERALPEGEGASEDLPANVRKFGANSCDLAAIAAWLAACGVTTVAMEATGVYWIALFELLEARGFEVYLVEPGQLAHCGARPKTDVLDVQWIQRLHTYGLLRPSFRPANSIVALRGYHRQRQMQIRYAASHVQHMQKALEQMNVKLTEVLADITGLTGRRIIEAILAGERDSRKLAALRNVQCHNDETTIAKALEETWRPEHLFALRQAYDLYRFHHQQIAECEQMIKTELAQLPNRAGNKPFSPKPRKGGRKQNDLTFEACGPLFKALGVDLTEIEGIDVRTALVILAELGVDVSRFPTEKHFASWLGVCPRQYESNHNKKKRGPRKGKNRIAIALRMAAQGLGKTKSPLAMYYRRIKSRIGGKGAITATAHKLACLVYRMLKYGKEYVTQSMEEYESRIKQQLERSLRRKATALGYELVAKPAPEPAPA

SEQ ID NO: 205111 - protein, 358 aa, unidentified
MVDKVTKAAVVGGVDTHKDLHVAAVVDQNNKVLGTQYFSTTRQGYRQMLAWMTSFGTLKRIGVECTGTYGSGLLRYFQNAGLEVLEVTAPDRMERRKRGKSDTIDAECAAHAAFSGIRTVAPKTRDGMIESLRVLKTCRKTAISARRVALQIIHSNIISAPDELREQLRNMTRMQLIRTLGSWRPDASEYRNVTNVYRISLKSLARRYLELHDEIADLDVMIAAIVDELAPELIKRNAIGYESASQLLITAGDNPQRLRSESGFAALCGVSPVPVSSGKTNRYRLNRGGDRAANSALHIIAIGRLRTDAKTKEYVARRVAEGHTKMEAIRCLKRYISREVYTLLRNQNRRINSIPITA

SEQ ID NO: 205112 - protein, 343 aa, unidentified
MKLTRVGVDLAKQVFQVHGVDRAERPAWCQRLKRGRWIAELERNVEPGCEIGMEACGGAHHWARLLQSKGYVVKLIAPQFVKPYVKSNKNDANDAQAICEAMSQPSMRYVTVKTVEQQDIQAVHRVRASLISERGAKANQLRGLVYEYGLVAPREIASLRRAVPAWLEDATNGLSVRFRALLAALYRDLLWLDERIHELDREIASIVRENEAVRRIEQLRGIGPLSASALVAMIGDGRQFKNGRHLAVALGLTPRQSSSGGKEKLLGISKRGDKYIRTLLIHGARSALRTAPGKTDRLSRWALALAQRAHPNVAVTALANKTARIAWAMLRHGTNYEPERTAA

SEQ ID NO: 205113 - protein, 323 aa, unidentified
MSSIVGIDIAKHSFDIATLQTNGKYRTKAKLANSAAGFQVLQEWLQQYAEPGAWLVMEATGTYHEALAEHLHGLGYRVCVMNPAQLASYARSQLQRVKTDQVDAKLMASYGQRHVDELRAWQPEPPAIRRLRALVRRLQDLKEIEQMERNRLDVADASVQDSIRSVLEHVEQQIAETLQAIRAHIDDDPGLRGKRDLLVSIDGIGEQTAALLLAELGDPLQFKNARAITAFAGLNPKLQESGQHKGHVRISRVGSARLRTGLYMPAVVSLTHNPAIKALAQRLRARGKAGKQIVCAAMRKLLHIAYGVLKSGQPFDARLALAH

SEQ ID NO: 205114 - protein, 411 aa, unidentified
MDVLIERCAGLDVHRDTVVATVRRPGSGGARRSQTRTFSTMTGALEDLADWLVSEKVALAGMESTGIYWKPVYYVLEERLSVWLINAEHLRNVPGRKTDVADSMWIAQLIEHGLVSPSFVPPRHIRLLRDLTRHGRRLTEERTRTIQRLEKVLQDAGIKVTSVASTILGKTGRAILAALLAGQDNPAVLAELAKGRLRPKIPALREALTHRFRGEHHGLLVAQMLAHVDFLEASIAETYQQVDVLLRSHHSVLELIMTIPGVGRRVAEVMIAEVGVDMEVFPSAGHLASWAGICPGNNSSGGKRRAGPTRHGSVWLRIALTEAAQAAARTKGTYLAAHHTQIRGRRGTQKAIGATRHDILIAYYHVVRDRVAYHDLGPDWNNRKRATDQQTRRLVRQLEKLGMNVTVTPAT

SEQ ID NO: 205115 - protein, 338 aa, unidentified
MFFVGIDLHKKTIMVCVVNQQRQVVERKRFYCCQPETIRSYFAQLESFQAVVEATASYEWLWQLLEPLAQRLVLAHPKKLRIIAESTRKSDKLDAEVLAQFLALDMIPEAYRPTPRQRQHRTLVRQRFYLRKQITAAKNKLRRILSNYNADRKDLFSAEGLAHLAEVKVSPADRFVLDQLRSLWECLENQLTALDKELRSFARQAPAREQEARAVLESIPGVGDVTVDVVISEVGDVRRFRSAKRVSAYAGLAPGQRESAGRSKSLGITKEGSRLLRWALVEAAWRLVRQARWQRVYEQLRKRCGKKRAIVAIARRLLGVMVALLRSGQAYRLAGLSG

SEQ ID NO: 205116 - protein, 371 aa, unidentified
MKKSTNATGSKAKTAAKMKTIDWRRAETIGIDLGDRFSHYCALDGDGAVVGEGRVATTPGAIELLFKTPRKRIAIEAGTHSPWMSRLLARLGHEVIVANSRKLRLIYENQHKSDRVDAEYLARVARLDPKLLGAIEHRSEVGQCHLSLIRARDTLVRSRARLIQHVRSAIKSLGERIPSGTAEAFHKRAADSIPEGLREALMPLVAVIEQLTTRIKEYDRKVEQLAEDRYPDTAALTQVCGVGSLTALAYILTLEDEQRYRRSRSVGAWLGLVPGQHDSGESQPQRRITKEGDAYLRRLLVGCAQYILGPFASDSDLRRHGLLIAARGGSNAKKRAVVAVARKLAVLLHRLWRTREVYEPLHNAGEQTAAA

SEQ ID NO: 205117 - protein, 341 aa, unidentified
MEHTTIAVDLAKSVFQVAVSHRPGHLDEERRLPRDRFLAFFAQRPPATIVLEACGSAHYWARQLQPLGHAVRLLPAHDVRPYVRRNKTDRTDAKGLLEANRNEEIHPVPVKTIEHQAIASLHRLRSTWLATRTARLNTLRGLLREFGIFIPTGSQRVVPRVRALHEAPAVPPLLHATLAAACDEIEMLEVNMRAVERQLAALADDLPDVQLLQTVPGVGLITATALVALVTDIRRFPSGRHFASFLGLTPREDSSALRRRLGAISKQGDVYVRMLLTHGARSLVWHAKAAGRPTSLQQWAVETELRRGRNVAAVALANKLARIVWAVWVQQRPFTANHRLG

SEQ ID NO: 205118 - protein, 326 aa, unidentified
MQGKVPSQRSAAAPVYIGIDVCKARLDVHIHPLGESLVLPNDAGGLKRLKKILARYDVVIVVMEATGKFHRPAHRSLHASGFKVAIVNPLRSRRFAEAIGTLAKTDRVDARMLALMGESLKPEALEPTPELMETLQELARGRESAVDSKTAIGNQIQTSNSKVLVRELKRQLTAVETAIENLEAELQRQIDADPVLARRFEILTSIPGIGLVAAVALIVELNEIGRLSSKEAAMIVGLAPIACDSGQKTGRREIRGGRKHLRTALYMPANSAKQHNPDLKIFHDRLIKAGKLAKVAITAVMRKLLVLANTLVREDRLWQPKHVIAR

SEQ ID NO: 205119 - protein, 343 aa, unidentified
MQTITTIGLDIAKSVFQVHGVDAGGQVVIRRQLKRRSVLAFFQKLPPCLVGIEACASSHYWSRELQALGHTVRLMPPAYVKPYVKRQKNDMADAEAICEAVTRANMRFVPTKRPEQQSCLMLHRTRHLFIRQQTAVINSIRAHLAEFGIVAPVGRRGVTELLHIVADPSDKRVSEIARACLAALGTQLLSLKEQILEFDRMIMAWHRSNQTSKRLHYIPGVGPMLATALVASVADPKTFRSARNFSAWIGLVPKQHSSGGKERLGSISKQGDRYLRSLFVAGALAVIRYAKIHGTKHRPWLTALLGRRPTKVVAIALANKIARMAWAMMAKGERYKQPVALAA

SEQ ID NO: 205120 - protein, 344 aa, unidentified
MLKSTIFGIDLAKNIIQVCEISKHGELVSNKAVSRQKLKELLAKTKPAVVAIEGCGSSHYWGRYAQSFNHDVRIISPKKVKGFLQGHKTDANDALAIANASLQIGMKSSKPKSEQQQTIQTLETSRFHLSRSITSLSNHLRAMLYEYGIVSARGVKALTTVVQDTLNDADSIPECLRSTVNQLWSTYLHLREELAQLIKTKNALIRQLQPCKKLMDLEGVAEVCAGMLYSSIGDGKQFKSGREASAFVGLTPKQHSSGGKVFMTGIDRAGGIRELRSALYQGALSYICNLPDEPKTAKQAWLIKLVQRAGIKRSCIALANKTVRTAWAMLRYENKYQQQPLLAI

SEQ ID NO: 205121 - protein, 366 aa, unidentified
MHEYNTVVGLDLSDKKANFCTLDWDSGEHLQEGKVALTKSGLKNMFGGMERALIVCETGTHSPWVQHTLEALGHAVFVADARRLRLISENDRKSDKHDAELLARLARADLDLLVAVHHRGPKAQADLSVIKAREQLVRCRAKTINAVRGIVKSNGDRLDSCAASSFTKRVREQIPKALRTAIFPLLEAIEQMTKSIQQYDRRIEHLCKEYPETEYLRTVQGVGPVTALSFILVLEQPERFGNGRDAAAYLGLVPRRDQSGDSDPQLRITKSGNKLMRKLLVQCAQYILSRGRDSELRQWGQKLAGRGGTKAKKRAVVAMARKLSVILYALWRDESDFNPFHLTKPPEREDIAEELEEAREEIAVPA

SEQ ID NO: 205122 - protein, 414 aa, unidentified
MDVVHNRCAGLDVSKRDAKCCVRIQSEGRARAKSTVTTWSSMTSQVLALRDHLIDEQVTLVVMEATSDYWKPFFYVLEDGPFEVMLVNARHTKNMPGRKTDVNDAQWLAQLGAHGLVRASFVPPEPIRQLRDLTRTRTAIVRERAREFQRLEKLLEDAGIKLSAVASDLTGVSSRAMLEALVEGERDPAVLAELAKRRLRAKIPELTEALQGRFGDHHAFLVKLHLDLIDQHTLAVEQLTARIEEAMAPFRGARDLMVTIPGISTGVADVVIAETGADMSRFPTAGHLASWAGTCPGSNESAGRVKSTHTRPGNPYLKGALGTAAMSAARSKNTYLSAKYRRIASRRGPLKAVVALEHAMLVAIWHMLSDGTLYSDPGDDFYTRRTPDRSRLRAVEQLQRMGYKVTLEPVSEVA

SEQ ID NO: 205123 - protein, 319 aa, unidentified
MGKSKVEYEQVIDRGCGLDVHRDTVVATVMGKGIKTETRTFGTTTSSLNELGEWLQSLKVTDGAMESTGIYWKPVLHVLRAYPLNLIVVNARHIKNVPGRKTDKADSQWICKLLISGLLKGSFIPPENIQELRDLHRYKKKLVGIIASEKNRIIRVLEDANIKLSSVVSDTSGVTASYLIKGLIEGRKDLEKLIAECYHRKLQANPQQIKEAINGRLTSHHGFILKSMQRHIASVEEQIAEIDLEIEKYIKDFEKEIELLQTIPGVGKEGAIGIVSEIGVDMEVFPNEHHLASHSGMCPGNNESAGKKKVQEHDMEIKI

SEQ ID NO: 205124 - protein, 347 aa, unidentified
MSFIGVDLHQNSFTVCRRKTDGAESFETLTLSAADLERFCLSLDADDELAVEATGNSAWFRDCVRPCVGRVVVVNPSQFKVIRKSVKKTDRNDAAALALFLAKDMLPETRARTQGENELASLTQTRDLLVKQRTRLLNKIHALHVRKGLKLRKESLGSKRALASIDLALFSACEVIEIEVLREQALSLTASLARLDREIEGVASTFKGYAGLTSIKGVGPRSAAVLLSTIGNVHDFESADKLAAYFGIVPRVSQSNETDNRGRITKRGNKLARTTLVQCSLIAMRYSSYLKTYYDRIRQRRGTGKAIIATARKLLAIIYDTLKNGWVFDDFTQFSRRDPLIPAGQTS

SEQ ID NO: 205125 - protein, 376 aa, unidentified
MLDHTHQNTKPTIYAAIELSKKSWVVAILRPNKDQPSIHRVKGGDVSELIAKLRGAAAHGERLLICYEAGYDGFWLARSLDRAGIDCRVLDPASLQVNRRARRVKTDRLDVLMLVRALVAVDRGDRHVCSIVRVPTIEEEDARRSHRERQRLIRERTAHINRIKGLFFGQGIRGIEPLRKRSRVNLSEIRTAEGLPLPARLRAEIEREFSRFDHVEEQLKAVEAERDTADAQDPAVNQKREMLIRLRGLGPASAAILSREVFGRSFANRKQLGSYLGLTPSAYDSGSSTRCQGISKSGNSHARHMMIEVAWLWLKYQPQSALAKWYTQRAAGQSPRIRRIMLIALARKLIVSLWHYVEGGIVPEGAVSVVEGAATA

SEQ ID NO: 205126 - protein, 336 aa, unidentified
MSHYCGIDLHSNNHVLVVIDEEDKRLYEKRLGNDLSQTLKALSPYRETLHGIAVESTFNWYWLVDGLQEHGYDLQLVNTAAVKQYDGLKYSDDHHDAFHLAHLMRLGILPTGYIYPKEQRAIRDLLRRRLSLVRTASAQLISVQSQLWRSTGLRIKSGELRKLEFAPPLVDDYTLQAVQAGLAVYQVIQREIDALEQTAHQAVKLTDAFKILQTITGIGKILGLTIMLETGTIDRFAGAGNFASYCRCVDSKRTSNGQKKGEGNAKAGNKYLSWAFSEAAHFAVRFEPLAQRFYERKKAKTNGIIAIRAVARKLARASWMMLKHQVPYDARRMFPG

SEQ ID NO: 205127 - protein, 393 aa, unidentified
MYLVGIDIGKLKHSFCLLEKETGEILVEPVFFKNNRDGFNALLSSFKHLPQKDILIGMEDTGHYNLALLKFLLDRNYQVALINPVATNLTRKMQGGISKNDKLDTLTICDVLSSNQRVKSYRISKYSSFDLYEQKLLTREHHNLKEEENQLSNRLQKCIDVVFPEFNSLFKSKYGIVYMNVLKEFGSADAIAHADIRTLRKCFDTGRGKKIALTAEELKEAAKNSIGFPSASEATQIKHLVARIELIKEQIAEIDKKIEEFSLQNNSPILSIPGISHFSGTSILAELGDIHNYSKPSQIIKFAGVAPLTYESSQFTAQHTAITKKGCKYLRKTLYQIITAVIQYNPVFRKFYLLKIAQGKGHRCAQGHCVRKLMRVIYHLLSTGTQFDPALLR

SEQ ID NO: 205128 - protein, 418 aa, unidentified
MATKAKEGVFVNGKALVVAVDIGKDLHYGYFRSPTGFEVKPFGFANGRAGFERFWERMVRFKRTEGLIDIVIGFESSGPYGEPLVEFLRRKPVRVVQVNPLHTKRVKELTGNSPNKTDRKDPRVIADVICLGHALNLVIPRGPAAQLRRVTQAREAALRSRSAMMNRLGQLVFVLFPEFGTVMKNLNSKTALSLLKRCASPERMVEMGLESLTTLMKRASRGRLGQRRAEKLFRVAQISVGIKEGIEGLVLEMEHLVSMIEQQNRFIGFAEEQMAVYLGQIDYSWTILSIRGIGRVIAGGLIGEVGDFGQFQTIGQITKLAGLDLYEISSGRHRGQRRISKRGRSLLRKLLFFAAINVIRTGGIMHPQYRGMVNRGMPKVKALVAISRKLLALIFALVRDRSIYRSDYADTIHQKVAA

SEQ ID NO: 205129 - protein, 457 aa, unidentified
MRTLGIDLGVSAAHKAIVVNEYGQFVTSPISFHTRWDEIERVVARAREGVTPDYPLRAVLEPTGMAWYPVSVALDQLDVLLYMVSGQKAYDPRRFYKRHSSSDRISARVLAKMPFVDEESLYRLEIPSDTHLACQRGCKELDRLQTRITAIKNRLRDTDRFAWPGLEGIFKNIYSPTARFFRETWYDPACVVAAGVEKVRCTFEALSDPQGDIHWVDYLLTLAAEVAQLYGLAPPDYARLQAEVSREQQQLAYLEERAEVVWQDTVRPLYRQLHPSRHMETLLGVGEQGAAVYASYIGRVGRFPDNRHFRGWHGLIPDSRQSGDAESKGLHISQAGPDLVKKFGFLNADVARKYDPQIAVIYHDQMMHKGKHHTQAICTCATHLLDRVYVILKEDRPYELRDVDGTPVTREQARAIIAERYTVPQEVRRRNNRRARKERAERRMERKQKQRGSRRRR

SEQ ID NO: 205130 - protein, 377 aa, unidentified
MADYGEAFVGIDTSKLRNAVAIADGGRGGEVRFLGEIENTGAATAKLVRKLAAKYKRLTFCYEAGPTGYGLHRQIKGLGFECAVVAPSLIPKRRGDKVKTNRRDALSLAKLLRADELTAVWVPDGPHEAMRDLTRARETAMLDLRTKRQHVSAFLLRLGRPYPQSKKTWSKTHVSWITSQKLEHPQQRLVLEEMMLAIRQAQDRLARLEQAIAAAVPEWSLAPLVAALMAMRGIDLISATTLLAEIGDLSRFQTPTELMAYLGLVPSEDSTGDTVKRGPITKAGNRRARRMLVECSWSYQHPPRVGQAKQPKVDAAPPAVREIAWKAQCRLYRRYRMLIRKGKLKTVAIVAIARELAGFIWAVARAVSTMRVAAAAT

SEQ ID NO: 205131 - protein, 339 aa, unidentified
MTDYHYIGLDVHKKIIAYCIKDQTGEIVKEGNLAANRRTLAEWVKGLYHPWAGAMEATLFTGWIYDFLLPHADELKVGHPAMLKAICASKKKNDRIDARKLADALRCDLLPECYMPPAEVRELRQILRYRNLLVREATRLKNKCSGLLMEAGVEYDKRRLHGKRYFRELLEGLDCVPDSVIDLLWMNEDSLRVFEFNQGLLVERLEAHPTLSERVRRLRTIAGVGELTALTWALEIGDPHRFRSAKKASSYCGLCGDYSMSAGKVKRSPLSKKRNPHLQTILVEAAKLAPRWNPQLAEVYEKEVARGSNRNEATLAVARKLVSYLLYVDKSGKDFAPRS

SEQ ID NO: 205132 - protein, 343 aa, unidentified
MQVVRIGLDLAKYVFAVHGVDARGKVVLRKTLRRDSVSCFFANLPPCLVGMEASNGAHYWARVLTDLGHQVRLISPQFVTPYVKSNKNDRNDAEAICEAVGRPSMRFVPPKSAEQLAVQAIHRIRRRLVSDRVKLVNQVRGLLAEHGIVIPRDITQFRRGLAQIIASCAGGLSELVRSLMRELQEELVELDRRIASYDRRIREIFRNSEPCQRLGKIEGIGPITATALIAALGDRTCFKNGRQFAAWLGLVPKQRSSGGRARLFGISKRGDRYIRTLMIHGARAVLGRARGKQDPRSLWLGKVRQRRHPNVAAVALANKNARIVWAMLSGDTAYEPALSVKAA

SEQ ID NO: 205133 - protein, 417 aa, unidentified
MNSPPETIPIQRYIGIDIHKHYLMVGGQNANQEWILRPRQVQMVHFRSWAEKNLKEGDAVVVEATGSVWDIYDIVAPLVSKTVVANAHKVRQIAEARVKTDKEDIRRLITLLIADIVPDVWAPPQHVRELRSLISFRWRLSKQITMSKNRLHSVVQRFNLNAPEGGLLTDKNQSWWERQEFSELTGFQVQRDLEIVAHLEEQKAAIDQKLMELSNTEPWASDMAFLMQIPGFGLIFSLVVLAAIGDISRFSDPKKLVGYAGLGAGVHASGEKYQEKSITKAGRKELRWALVEAAWVAVRSDQYWKAQFIRLKKRMHVNKAIVSIARRMLVSIWYILTRREPYRHFDEETIAYKMLIWSWAMNEKSRHGMTPQQFAKYGLLRLGVGQDLERIHRGGAPRRIAPTEEILALKPELSPPR

SEQ ID NO: 205134 - protein, 327 aa, unidentified
MEVYAGIDLHSSNSFVGVIDGQDRRLYKKRLPNDLDTILSALAPFRKDLVGVVVESTYNWYWLVDGLQEDGYKVHLANPAAIKQYEGLKHTDDRWDSFWLAHMRRLNILPEGYIYPKEQRPVRDLIRRRLLFVKHRTAHILSLKSMIARNLGTRMSVNGIKKLTEADADDLFNSPTLAFTAKNNIAVISHLTKIVKSIEKEVVSQVKLRKEFKPLLTVAGIGNILALTIMLEVGDIRRFPNVGNFSSYCRCVRSERLSNGKKKDENNRKNGNKYLAWAYVEAANFAIRYYPRAQRFYQRKKAKTNGIVAIKALSNKLARASYYVMRD

SEQ ID NO: 205135 - protein, 359 aa, unidentified
MEQKRFVGIDLGKRTYEMKIIGINGKVTGTNGQTNPSGRKLLYRKLLATDRVAIEVCSLGMVMAKEIQKEVGCEVVLLNPSQLVLIYRSLKKNDKEDALKLARLVQKYTNEELPKVELPTEHEENLRQILTEIRQLKNDRTKEINRLHAIFVECGITEIKKKDLATIDNRIKCIKMLKGIALAQAERILKKLELVETQTEEVEELLDKEIDGDKNIEKLTEIPGVGKQLASAYVAFIGDGSRFPNASTIGAATGLVPRLDMSSTVCRMGHITKCGNKNLRTLLILAAWSHVRSRDGGALKDKFLFMTRFQSKGKKIAIVAIARKLAELMYILLKNDTSYEKRPSPTISQLVDEAMKFSS

SEQ ID NO: 205136 - protein, 391 aa, unidentified
MLYVGIDIAKYKHDCYIRNAQGDKVIAPFIIENSLSGFNLLWDNITATALQDETIKVGLEATGHYSYNIIGFLLSKPLELYIINPLLTHIHRKGLSLRKTKTDKVDAKTIAHLLMSDIDLKPYSLSSYHNQTLKSLTRYRFNMVKQRAKLKTTIARLLNIVFPELESLVSSVHLKSIYTMLEAYPSAKSLSKAHIKRLGRLLQTNAKGHLNETDALRFKKAAKASIGLASPAETLELQHTIKRIRLLNQQIEQVEEQIKALMDQTHTVILSIPGIGYRMGALIVAEIGDIERFSSADKLLAFAGMVPSVYQSGQFTSTHAHMEKRGSKYLRYALFNATKHVCMHDKTFATYLAKKRAEGKHYNVAITHAAKKLMRLIFALIKSNQTYTPAY

SEQ ID NO: 205137 - protein, 453 aa, unidentified
MKKNNKKEKKRVSLNQAWPLINPHAAGVDLGAREHWVAVPENGDAPSVRSFGTFTRDLEALADWLQQGQVTSVAMEATGVYWIPLFQILERRGFQVLLVNARQIKNVSGRKSDIADCRWIQRLHAYGLLGASFRPADPYCVVRSYLRYRDELVAARSVQTQHMQKALQQMNVQLTQVLSDVNGVSGLAIIEAILQGQRDPLELAALVDRRVKASLAKIARALVGDYRAEHLFVLKTACELYHAYEAKIADCDQELARQLAQLPDRVDVSTRPLPAKVGQTHISEQMRLGLYRKLGVDLTAVEGFGPLVGLTVLSEVGPDLTKFKTEKQFASWLGLCPDNRVSGSRVLSCRTRRVVNRLSDILRLAATTLERSQTGLGAYYRRMKAKLGAAEGVTATAHKLARLLYRLLKHGEAYVRQGLADYEKKHADRKLKALKKTAASIGFDLVQRQAVTP

SEQ ID NO: 205138 - protein, 388 aa, unidentified
MYLIGIDIAKYKHHCHIATSDGVFINEFSFDNNSIGFNEFLNHLKSLDQSNEIKIGLESTGHYGNTLKQFISAKGYTFIEFNPYLAKQFFKSTTIRKTKTDKVDARLLSNMLASVDYKTLHTKYYHINDLKSLTRARNSLIYQRSKHLVQITNALDVVFPEFKPFFSNKLGSTALFILSKYNSKDKISKITSEQYKKLHSISRGKFSYPKFLNLKELANTSIGIKSKTYFMLIKTYIGLIDSLNNALSKIETEIIKVMNMVDTKITTIPGISIFSAANIIGEIEDINKFSNSAKLIAFSGFDIAIHQSGEKEFYGRLVKRGSTLLRTTIWNLVLGTVRMIPQIADYYHLKRKQGKHHKAACAAISRKLLRLIFHLESNKIDFNINKYR

SEQ ID NO: 205139 - protein, 337 aa, unidentified
MVYVGIDLHKKTIVLCVVDQQVVVQTRKTLSCAEPKKIVAFFRELGEFQAVVEATASYEWLWQLLDPLARRLVLAHPKKLRIIAESRRKSDRIDAQVLAEYLARDEIPQAYRPTPRQRQHRVLVRHRCYVRRRAASTKVKIRRILADYNADRAPLFSVEGRKYLSKVKLAVTDRFVIDQLQDELDHHLKQLKSVDQQLVAFAKKASAAEREARASLGSVPSVGTVTVDVVLSELADVQRFPSAKDAVAYAGLAPGFRESAGKRRNLPISKEGSRLLRWALVEAAWRLVRLSNKWRSVFEKLSQRRGKRKAIVAVARRLLTILVAVWRSGSCYRPVTV

SEQ ID NO: 205140 - protein, 370 aa, unidentified
MKMSIGVDLHKTQFTVCFLGESRKIQESGMYPVSEKGFEEFLAKTADFTEKGYEVSAAVESTGNARYFRNRLLTAGIDVTVVNTLKFKVVNESVKKTDKHDARTLAEFLEKEMLPESVLCSQESEDLRRILKTRTLLVRTMVSVKNQIHGLLLGYGIETKRGQLQSKKERQRILVGLADHRYIGGAAKAVEPLFETIDQLSAQVKNLEKVIVSLVEKDEDVELLMTIPGVGIITATTIRAYMDEISRYDSPKKFASYIGLAPWVQNSNETIHHGHITKRGPEELRTAMVQSVLGMVRNSKKTGEYRIMSKYRVMKKIKGSGQSIIATARKMSTIVYMMLKTREPFHPLRMAPDKKYLEMQTAAWNAVKAG

SEQ ID NO: 205141 - protein, 321 aa, unidentified
MLAKRSRRSFIGIDVSKQLLEIGVHKSNYRLCCPNDPKKFPALIAELIALRPARIVLEATGGLETPLLQGLHAVGLPAVRINPRQVRDFAKALGLLAKTDRLDACVLAHFAAAVQPPLRPIKATEDIELDALMGRRNQLSDMLGAEKNRRGSAATDAARADVEAHIEWLEQRLKALDKQLKDQLKCSAVWQQKDKILQSVKGIGFVTSVSLLADCPELGKLNRHQIAKLAGVAPLNRDSGKQRGARHIFAGRAQVRAKLYMATLTAIRCNPLIKAFYQRLLAKNKLKKVAIVACMRKLLTIINVMVRDNKLWNVKAQSVSA

SEQ ID NO: 205142 - protein, 387 aa, unidentified
MQKPHDNSKASPAAFMQDNTLIAVIELSLSNWLVAGLIPGVSREPLKKLEPNPEDLLKLLHGWRDEAIKAGRPITRIAVAYETGRDSFWLARWLRERGIDAHVIHATSVAVSREHRRAKTDRLDTAMLKRGFLGWLRGERGHCTVAIVPTMEEEDAKRPHREREGLVHEQTRAVNRMKSALIQYGVRNFNPKLRKASVKLETVRTPEGKSLPPNTIAALRRDMERLKIIKEQIKAIEQARLQQFEQKPEALANRMVYLLVRIYGLGLETADLLAHELLSRTLRDRKAVARYAGLTGSPDESGSKRREKGLSRSGNARVRKIMIQLAWRMVKFQPDSALVQWFKQRTESAKGSRKPMIVALARKLIIALWRYANDGVIPEGFRLHSAA

SEQ ID NO: 205143 - protein, 436 aa, unidentified
MASHCQFYNYKFQEVILLSFKILKFKCCGLDVHKTWIYACIGITDSNNRTEYKQARFSSFTKGLNELCDWLAKYNCTDVCMESTGKYWIPVFNILEQHNLWVTLSHPKYTKPMKGNKTDRKDAKWICDLYMCGMVKPSFIPPADIRELRDLVRYRYKLTCMITGEKNRAQNCLTVSNLKLDDVFSDVFGKSSRSITEQILQHPGEKFDVAPFVHGRCKTPIEEIQAAVDGAISKEQAVKLRQCLDHIDELNKHISELEQEILRLSDKYEAALNLIRTVPGFDKNPLTAIQVLSEIGGDMSVFPTAKHLVSWAGCCPRNDQSNQKIKSTRISRAGSYFKPVLVQVANALIKSKKHSEFTNRYKRIKARRGHKKAIIAICRMILTAIWHILSDLKPYTPEGFLESHPVKEGKVLSSSQALNFFKQRGYIIKDEPLSVS

SEQ ID NO: 205144 - protein, 371 aa, unidentified
MKGKRASGTTHSRMVMVHPNAAAIDIGSTMHMAAVGADRTSEPVRSFGTFTGDLHRLADWFAECGVETVVMESTGVYWIPIFELLDERGVDVFLVNARDAKHVPGRKTDVSDAQWLQRLHSHGLLRASFRPKGEIAELRAYLRQRERLLDYAASHIQHMQKSLTEMNLQLQHVVSDITGATGMRIIRAIIGGERNPAALALLRDTRCHASVDTIEKALTGHYRAEHLFALEQAVALYDEYQQKVSACDMRIEAVLKQLSSHRGRKEEAIRLPRRRTIRQSNGPAFDVQAALYALLGKDVTQIHGLGPYVALKLVAECGDDLAAWPSAKHFTSWLCLAPSNKISGGKVLSSRTGRSGCALNACVRGERACQL

SEQ ID NO: 205145 - protein, 351 aa, unidentified
MSNTAARSKKRITIGLDLGDRRHTFCVLDETGKVAREGTLGNTREELATMARSYPGATAVMEAGMHSPWVSCFLQELGLRVIVANPRKTRAIYQNERKSDRRDAMMLARLARMDATLLHPVKHGGQQAQQDMLQLKLRDSLVRTRVALINAMRFSLKSLGYSVSNPSSESFHKFVLKEVPESIGEMIAHNVAAIAELTQRIRALDASISRLAAKRYPETIYLQQVSGVGPITSLYFVLKVGSPERFGRTRDIGAFLGLCPKRDQSGETDKELRISKCGDRYLRRLLVGAAQYILGPFGADSALREHGLRLAQEGTAKAKKRAVVAVARKLAVLLLTLWKSREPYESFPTMA

SEQ ID NO: 205146 - protein, 426 aa, unidentified
MRAIGLDVHLEFCEVAIAEGGELRSAGRIATKPEEIELFAQSLGARDRVALEVTGNAWEIKRLIEPHVAEVIVVSPTDTGIRGARAKTDRLDARALARLLAAGELDPVWHPDRETQVMRRRLQRRGQLVGARSRAKNQIHAALMRSLIGRPPFADLFGVKGRRWLSGLELPEEERESVDSGLRQIEFLDSELEAVERLIAAAALESAEVKRLMTVPGVNVICAASFMAVVGEIRRFPSTRKLVGYLGLDPKVRQSGSGPAAHGRVSKQGSVAARHALVEASWSAVRQPGPPHAFYERIRARRGHSVAIVACARKLACLFWCLLTRSEDYAYGQPSLTQKKLRRLELAAGAPSKRGTKSDPMAANAAMRKAERELAQQAEAAYRRSIRDWHATQAKRKGAGATPGRASRGPSSGQAARQVQAPGPAL

SEQ ID NO: 205147 - protein, 391 aa, unidentified
MIYVGIDVAKNKHDCFITNSDGEVLFHVFTIQNNRDGFDDLFAKIHSISPDVSNIKVGLEATGHYSYNLLGYLIDKGLPTFVINPLHTNLYRKSLSLRKTKTDKVDARTIAMMLMSDVNLKSYSDTSYHNEELKSLTRYRFDKVQERAQLKQSVSRLVTILFPELEKLVPTLHIASVYALLSELPSAGKIASCHLTHLTKLLENASKGRYSREKAIEIRNAARTSIGSTMPAKSLELKHTLRLIRELDSEIAEIESEIKRIMDQISSPILTIPGIGYRMGAMILAEIGDFSRFDSPDKILAYAGASPSTYQSGQLESSYSHMEKRGSRYLRFALINATKYVCHWDKTFGAYLQKKISEGKHYNVAITHAAKKLVRLIYAMEKSGKSYIKTA

SEQ ID NO: 205148 - protein, 343 aa, unidentified
MQVVTTVGLDIAKSVFQVHGVDAAGQVVIRRQLKRRYVLAFFQKLPACLVGIEACASSHHWSRELKVLGHTVRLMPPAYVKPYVKRQKNDTADAEAICEAVTRANMRFVATKTPEQQSCLTLHRTRHLFIRQQTAVINVIRAHLAEFGIVAPVGRKGVEELLNVVTDASDKRLPVVARICLAALGVQLCRLKEQILEFDRMIVTWHRSQETSKRLDAIPGVGPVLATALVASITDPKAFRSGRNFSAWIGLVPKQHSSGGKDRLGNISKQGDRYLRSLFMAGALAVIRYAKIHGTTHRPWLTALLARRPTKVAAIALANKMARMVWAMMTRGERYKDPIALAA

SEQ ID NO: 205149 - protein, 346 aa, unidentified
MTILEDTRVITGGVDTHADMHVAAALDPLGGLLGVREFPATVAGYADLLSWLSGFGSVALVGVEGTGSYGAGLARYLAAARVRVVEVDRADRQDRHRQGKSDPLDAISAARAAQSGRAGGAPKGRDGAVEAIRALMVAKRSARNERTQAINQARALLVTGPDDLRARFAGLTAAALAEAIAALRPRPGDAAQYAVRMALRELGRRVEFLDGQIERLDDLIIPLVTARAPGLLSLYGVGPDTAALLLVAAGDHPERLRSEAAWAHLCGVAPVPASSGKTRRHRLNRGGNREANHALWRIVITRMSAHPATRAYIERRTKQGLSKKEIIRCLKRYVAREVYHHLRDGG

SEQ ID NO: 205150 - protein, 338 aa, unidentified
MKITTVGVDLAKSVFTVYGVDEHGKPALRKTVRRGKLLELFAQLPACVVGMEACSGAQHWARELRELGHTPRIMAAEFVEPYRRGGKNDTNDAAAICEAVARPQMRFVPIKSVEQQAVLAVHRLRQGLGEERTALANRIRGLLTEYGLVIGVGLDRLRKALPSILEDAENGVPGIAREVFADATRQLIELDARIGEYDRRIAALARASEPAQRLMKMEGVGPVTATAIVASVGDAKMFRNGRQFAAWLGLTPRQHSTGGKQRLGAMTKHGDVYLRTLLIHGARAVLRVTPTHSDAKSRWAESLRHRRPDNVAAVALAAKHARIIWALLARGQHYHPAV

SEQ ID NO: 205151 - protein, 375 aa, unidentified
MTTQTALEPEPTVVIGGVDTHKNTHYAAAVDDHGRLLGHHEFPANDRGYADLLTWVQDHGDVAGIGVESTGSFGATLTRYLTAHAVRVVEVNRPNRLARHMDGKSDRLDAEQIARAVLGQTSTAIPKAKSGMVEVIRTLRVTRSSAVKGRTNAFNTLWGVMIGAPSPLRDELVVLSKKTLVNRCLRLRPESEDLLGLATNPDRLLMAGVKTALRALARRWKQLDDEVKTLNKQIEALVRAAAPELIELHGVGIEIAGQFLVTAGDNAERIRSEAAFAKLCGVAPQPASSGRTSGRHRLSRGGDRAANSALYIVTIVRMRHHQPTRDYVERRTAEGLSKREIIRCLKRYIAREVYANLPRSAQAAATTPPPLQSAA

SEQ ID NO: 205152 - protein, 354 aa, unidentified
MKGTAVTIVEDKPVITGGVDTHADLHVAAALDPIGGLLGVRQFPATAAGYADLLEWLGGFGDVGLVGVEGTGSYGAGLARHLAAAGVAVVEVDRADRQDRARQGKSDPLDAVSAARAAQSGRASGVPKGRDGAVEAIRALMVAKRSARHERTQAINQARALIVTGPDGLRTRFAGHGPASLAEAIAALRPRPGDVPGYATRVALRELGRRVQFLDAQLERLDELIGPLVTARAPGLLSLFGVGPDTAALLLVAAGDHPERLRSESSWAHLCGAAPIPASSGKTSRHRLNRGGNREANHALWRIVITRMGSRPGHPATRAYVERRTREGLSKKEIIRCLKRYVAREVYQQLRDGT

SEQ ID NO: 205153 - protein, 400 aa, unidentified
MSMENKSVFYLGVDIGKYHHQATLIDERRNQIGESLRFDNSLTGFELLTQTIKKRLPKNATVEIGMEATGHYYWHLKNYIADIGFGSLQIFNPIETQKLSKTRIRKVKNDKVDSLIIAQLVSQKTNNHPAIKENFELRQLKDLTRFCEKLKAQKRFYQQELSVLMERLCPEFSAYFSNIFLATPLMIIKKHFLGNIKSEQLVEAIMKTSRGRTSKAKAREIINMLENSIGKEYRCSNAKLQLKMLLESLDLSCKQIAKIKKQVEKASQQFEEIKYLNSIKGVSNYLASVILCEIGNINRFSNKGQLTAFAGLDASVKESGEYRRKQGNHISKRGSKHLRRQLYYAAKTAIMFDPELTAYYQKKKEQGKHYNVIMIAVARKILMRCYAVLKQKRLYELRNS

SEQ ID NO: 205154 - protein, 400 aa, unidentified
MLSIGIDVSKGKSTVCGMKPGGEIVYTPFEVQHTREGMSELVSLLRGSGEEVRVVLESTGSYHCPVVAALLENGIFVSVVNSLRMKRFCSQSIRRVKTDQIDAMQIALYGLAYWQELQPTRLPENTYRELQLLARQYYQMTSLLIKAKVDFNALCDQVLPGMQELMSDHAGRHKLSDFVLRYRHTTHILEMGETRFRKDYCKWAEKKGYRNHERMAALIFATAQNGIPVLPDAPSTQIVITEAIRVLHTVEASRDAILTQMQALAKTLPEYSLVREMPCIGDTLAPRLIAEIGDVRRFHSKRALIAYAGIDAPPYQSGKFCANNRHISKRGNRYLRKTGYEVMQSYVMHKPANDPIFTFIEKKRSEGKSGKLAMVAGLNKFLRVYYGKVTELYRSLPAIE

SEQ ID NO: 205155 - protein, 314 aa, unidentified
MADKSYKFYIGIDVSKLKLDILVSNGASLFQVANNDKGLKDALKMLPSGKNSLVILEASGGYEQFAANYLRRKKFNVAVVNAKRVRDFAKASGKLAKTDSIDASVIMAFGKAFNPAPQPLPTAEEESRQAHLNRRSQLVKMIATEKQHIEKSPKSLHRYIERHIEYMEKELSIIERSLKEQIKQDECLKNKVEKLDQIKGVGEVTAMNILLNMPELGQLTPKEVAALAGVAPFNKDSGQMKGKRQIWGGRAPVRAALYMAVLTARKFNPWIKKFYDRLILKGKLNKVAMVACMRKLIVMMNAMMRDNAAWQPNN

SEQ ID NO: 205156 - protein, 390 aa, unidentified
MTTLMKYSVGVDVSKDTLHACICEIDSQQQVKIKTSHRFLNSKKDYTALMQWFTKHRKQDVPLVICMEATGIYYEKVALELYQKGYSVSVLLPSKAKRYMQSLGLKTKNDKIDASGLAQMGAEQSLALWQPLGDYFYKLRQLTRHHEQLQQSRTVFLSQLHAIQHSMIEVKEVVKHQKKVLELIEKQLQETLKAIAGHIKANVDVNRKVKQICQIKGVGLLSAATVIAETNGFALFNSIGQLVSYAGYDVIENQSGNQHGKTRISKKGNSHIRRIMHMPAFVAIQHHQQPFKSLYNRVYDRTQIKMKGYVAVQKKLLALMYTLWKNDCAFDPEYKGKSGNDEPKPLFLLGSEGATAEQDEIKIVPIKTGTTQDELPYNESPEALFLLDQK

SEQ ID NO: 205157 - protein, 397 aa, unidentified
METLYAGLDVSKDDFKASVIDFRNNPVSPVGAYTHDRESLDAFLRDIQALRGELGCDVIFGMEATGIYHLPLYHYLLDAGCTVRVFNGLEVKRYKRRIRKTKTDNLDSLAIAEALLFSGELPPHGVTGPETGCLRELCRFRDRLMKKASKCKNEAIRDMDLLCRGYSDAFEDIFSPSSIAVMKAVVRKTRLFEIDKESLTKLLRVYMPQPLAEKKAHRLIRLFESAVVPSYVRDAVIFELHMLVQQHEQLRHQLKRVEREIESSVRKAGTHLLSIPGIGKLTAGVILGEWGDISRFKNLKQLTAYAGLDPSVAQSGRSKRTGRISKRGSPLLRAALYRASLSAIRFNPACRQLYTRLKARGKHHKVCLVAVANKLLHIAYSVEINQRDFYVPAYVTD

SEQ ID NO: 205158 - protein, 315 aa, unidentified
MQTPLDIGADVSKDYVIVACAKQSLPMCKLANKRAALWAWLKSLPAASRIGMEATGTYHELLAILALRLGLVVYVLNAKDVHHYAKGTGQRAKTDRVDTALIARYVAKEHSHLHPWHPASPAQRQLQRLVRRRAKLTSARATLRSSLQTLPSLRSDLRALLNDFDVLLAKLDAQARKLIEEAQERAQHFRRLNSIPAVGNTVGIGLLAALERWSLPRADAFVAFIGLDPRPDDSGKKTGRRRLSKRGDPELRRLLYVAAMSASRTRAWKPLYQRALARGLSRIEALVTLARHIARTAWSIYTHKTNFDPVRLHSH

SEQ ID NO: 205159 - protein, 342 aa, unidentified
MRYLKKVIGIDISKDSFVIRFGTLNNELQQKIGEAFTFSNDLKGFKKFSNTLSKIPAYQDNVDTPCWFVMEATGVYYENLAYFLISKKYLVSVILPNKTKYFFKTLNIKSKTDKLDASALAQFGLEKQVPAWTPPSGLMKDIKELTREYHNLVVMSTQIKNKIHAKEYSYQASKDNVKRLVQQLNLLKKQITQVKKQLENLVRSDEDLSNRINNIMTAKGLGFLTVITIVGETNGFVLIKSIKQLTSYAGYDVVQNQSGKFSGKTKISKKGNKFIRNALYFPALAAVRCDDTFKEFYKRLCIKKVYKKIAIVAVSRKLLALIYTLWKKNEVYNPNYKIAICS

SEQ ID NO: 205160 - protein, 341 aa, unidentified
MYRTKVGVDLAKNIIQVCTLNGKKVTSNVEMSVDEFSAWLAKSNPLTVAFEACSTSNYWYQQAIKAGHDARLISAKLVKAVRQNQKTDKNDALAIAQTLFLPEVSFINGKGIEQQQLQSIQRLRELAIKSQNASQKQIVSLLLELNIRLPNTQGGILRGLEGVLEDGEINLSDTFRATLSVAKVQLENMISAIREYDKYLEQSIQLLPDCKKLLKLEGVGPVNAVNLYIALGANQSQPFKSGKNASACIGLTPIQHSSGGKEVMGTIGKYCKNGSLRSQLITGAMSVVIKVIKYGAKTKKELWLQGLMQRRGNRCAAVALANKTVRTAYSMLQNNTEYHAA

SEQ ID NO: 205161 - protein, 358 aa, unidentified
MHFITKFVGLDVSKEKISVAIADSGNEAPRYYGSIPHTPEALRKLIKHLGPAETLSFCYEAGPTGYATYRWITSMGAHCTVVAPSLIPKRPGDHVKTDRRDAEQLARLFRAGELTPVYVPDQADEALRELVRIREATKADLHRARQRILKFLLRHHIEPPVTIKRRWTKKYLDWLRQLSFPYASMQLAFDEMLHALFEIEQRMERLGKELARQMESSPKAPLIQALQSLRGIGRLTAITLVAEIGTFSRFRSPAQLMAYLGLVSREYSTGLSTRRGSMTKTGNGRARRAVVESAWSYRYRPAVKGDLAERLEGMPAEVQRISWKAQERLHGKYRRLVYAKNKHKNVAIGARVPLKRRA

SEQ ID NO: 205162 - protein, 369 aa, unidentified
MDVSIEKVINQTPNFMNYKLQTLAGENLFIGIDSHLKSWKISIYSDMLELKTFTQPAVSSKLMDYLHKHYPGANYHCVYEAGFSGFSVHRELTQMGANCIVTHPADVPTSDKERKSKSDKVDSRKLARGLKNGELKAIFIPDKLQEQDRALLRTRDRVIRNRTRVKNRIKSFLMYWGITLPEGFQGKTWSKDFLLWLKKVPLSSSCRSALNTYLAEVNHLSQSLGLLDQDIKQLSNSSRYASKVKLLMGIPSIGLTSAMILLTEIGDINRFKTFKALCCYFGLIPNTKSSGETERTGRMTKRGNRHLKYILIECDWTAMRKDPALLMSFKAAAVKTTPNKAIIKVARKLLNRIRFVLKSEEQYVIGVVQ

SEQ ID NO: 205163 - protein, 348 aa, unidentified
MRFYTKQHKYSCGIDLHARSMYICIVDEQGKTVFHRNRKASAEALLKAIEPFREDIVVAVECMFVWYWLADVCAKEKIPFVLGHALYMKAIHGGKSKNDKIDSKKIATLLRGGNIPMAYVYPRKMRSTRDLLRRRNHLMRKRSELLAHIQNTNSQYNLPEFGKKLAYKANREGVAEHFPDPSVSKSIEVDLQLLDFYDQLLNDLELYIVKKAKVDDAYSWYRLRSIPGVGKILGLILLYEIHDIKRFPRVQDFVSYCRLVKCPRESAGKKFGTKNSKIGNAHLKWAFSEAACLFLRGNEQAQHYHARLVSKYGKGKALSILAHKIGRAAYFMLKRKEPFSMKAFFNET

SEQ ID NO: 205164 - protein, 368 aa, unidentified
MKQQTSATTETLSKGRTMIDFTGKTIFVGIDVHQKEWQVGQFHGGLVLGNHRITGSGQELIDFLKKRYAGANLKCVYESCAWGFNLQRQLTAAGLECIVVHAGDVPGSDKEKKNKTDKTDAVRLARHHAAGLLKAIHVPDEELQKERNLIRFRKKLVGDLTRAKNRLKSLLKFQGITIPAEMDNSHWSQNFIKWIEKQAAKDSLLKETVELMVEQVKLQRQLLLKCERKIRALMGSEKYAAKSKLLRSVPGVGPTMSTLFLLEVGDIKRFKGFDQLNNLIGFYPGSNSSGEKDIDTGISKRSHRELRTMLVEAAWQAVRQDPAMLNAYEQLTKKMKGNEAIIRIARKLLRRMRAVLISGVEYQKGVVE

SEQ ID NO: 205165 - protein, 365 aa, unidentified
MTESTTNPTTLTIGIDLGDRKSHVCVLDADAQIIEESQLMTKPTSLRARFEGLAPTRIALEVGGHSAWVSELLKELGHEVLVANPRKLRMIFQNDSKNDRLDAEQLARVARLDPRLLYPINHRDRSARADLSVMRARDALVSTRTRLVNHIHGVLKSFGYRVNKYAARGFHRQVAGQIPEELQPALQPLLDTLAALAQRILEFEGEIRRLSSKAYPETALLTQVSGVGPITALRYVLTIEDPRRIERSRNVGAYLGLRPRQRQSGQGDPELRITKAGDRELRTLLVQCAQYILGPFGKDSDLRRWGLKLASRGAATAKKKAVIALARKLAVLLHRLWLTGEVYEPLRNANRSRAAKAHTPAAAAI

SEQ ID NO: 205166 - protein, 346 aa, unidentified
MENIALDVHKKYTWARVEDSEGRELYASRLAHSRGCIKNFIGRWTRGCSVAVETVGNWYWVVDEIEAGGGKPQLVNARLAKLMMGNVNKSDKLDAKGMNRLQRTGTLPTVWVASSAVRDARELARTRMVLSRQRTQLKNRVHATLSKYGHVVDEVSDAFGKRGREIINELLTKLPPHTGQALQHVLDQLDEVVKNLQAIERDMIGAFSPCSQTALLKSLPGVGEILAVVIWTEIGIIERFNRAEQLASYSGLVAREHSSGGTFYRGAVRRDVNVYLKWAFVEAANSSILNRERSNYQHIDRLYQRIKGRRGHQRAKVAVARHLAEATFWMLKKGEPYREPMLSTQR

SEQ ID NO: 205167 - protein, 388 aa, unidentified
MNVGADKSEPLTAVHTDLGAIFVSLELSRSSWLITSLSPGGGEKMSKHSVPGGDFAGLMERFAQLQEKARRRTGQSFRIIVVQEAGLDGFWIHRALQNEGIESHVVDAASIATSRRRRRAKTDKIDGETLVRALLAYKRGEPRVCAMVKVPTPGEEDRRHLCRERKALTAERVRHVNRIKGFLFSQGVSGYQPLRRDRRQRLEELQTGDGRAFPPHLKALVNRELDRLELLLKQIKTVEAARDALLAVEQTAKPGPAAMLLDIKGIGPEFAAILWSEGLFRHFENRRQIAAYAGLAPTPWQSGAVDREQGVSKAGNPRLRTTLIQLAWLWLRNQPRSALSVWFHERVSRNGGRLRKTTIVALARKLLVALWKYVTAGVVIEGVTMKVA

SEQ ID NO: 205168 - protein, 404 aa, unidentified
MQGRCIGMDVHREFCEVAIWEAGEISHAARVAARPEQLEEFARQLRPTDRIAMEATGNALAIARIIGPHVASVEIVNTRRLRAISESKQKTDRHDAKTLAQLLAAGMFEGSWQPDETTRMLRRRVARRARLVTHRTRSKNEILAVLHRNLKPRPPMTDPFGVAGREWLARHVLPEDEQDTINAALRQIDFLNEEIATIERDLARFATDSAEARQLMTVPGVGLITATAFLAQVGDVTRFRDPNRLVSYLGLDPRVRQSGESAAHTGRISKEGSALVRHVLVEAAHTAIRSPGPLRAFFERVRARRGHAVAIVAVARKMAVLFWYLLTTGQDYAYSMPTATAKKLRGVELKAGAPSRKGGGSQHPLNREERRRLERRSAEHAENAYRRNVVDWQRQQAKVARLAT

SEQ ID NO: 205169 - protein, 408 aa, unidentified
MEVLYPRCAGLDLGKDALVACVRIHGREVQQECRTFGMTTRELLALSGWLTGYGITPVAMEATGTYWKAVWHLLEPAFALVLANAAHVKGVPGRKSDVNDAMWIADLLAHGLIRGSFVPPEPIQDVRDLTRTRKQLVREIAQHTQRIQKTLDIANLKITGLISDVLGVTGRSILRALIAGETDPVRLADLARGTLKAKRAALIEALTGRVTAHHRRLLKLHLHLIEQLEAAVAEIDQQLGETLAPFREAVTRLDGVPGINTIAAQAILGEIGLDMTRFPTHEHLVSWACLCRRLDDSAGKRKSTRTRKGACWLKTVLVQCAWAAVRTKDSYLRAQFLRLRARRGPQKAIVAVAASILTAIYYIVRDGVEYRDLGGRYFETLDQAQITKRLVQRLERLGYRVELQHVAA

SEQ ID NO: 205170 - protein, 449 aa, unidentified
MMEPVEVPDEEHEQILERVAAIDVAKATGMVCTRVPHDSRPGRRLTRVWEVPATTNAIIELGECLAGLGIERVTLEPASDYWRPFYYLLEAAGLDVQLVNAREARGVPGRPKSDKLDCVWQAKLTERGMLRPSFVPPAQIRQLRDYTRLRVDLTRDRSRHAQRLEKLLEDALIKLSTVATDIMGVSGRAMIEALIAGERDPQVLASLARGRMKVKHAALVQALTGRFDEHHGELARMLLDSYDALTAQAGKLTSRIEELIAAIPEARGVDAGGATGPGAGEGPDAAVRSAIARLDEIPGVGRHTAQVILAETGLDMARFPTAAHLASWAKLSPRTIQSGARSRGGKTGQGNPYLKGVLGEAAAAAAKTDTFLGERYRRIVRRRGKLKALVAVARSILVIVWHLLADPAATFHELGAGYYASRTDKDKKTRNHVRQLEALGFTVTLAQAA

SEQ ID NO: 205171 - protein, 504 aa, unidentified
MVHLTQPKVRIMNTPPSSRSTKRHVRNARKLKSQSTKARSEAPAHLSDELKPVHRRAAGIDVGSAENYVAIPAEGLAPGESAVRVFGVFSEQQDALVEWLRAHQISTVAMEATGIYWLSLYDKLEAAGIEVYLVDPHGVKAVPGRKSDWIDCQWLQKLHTYGLLQRAFRPDPPIRRLRILTRQRAELVLCGVAHQQHMHKALIAMNLHLHLVVSDLHGETGMRIIEAIVAGQREARELVKLRDGRCHKSTLEEMEAGLKGTYDEEQLFVLEQALKAWKFYQEQMAQCDVRIEKVLAQLPTAKPAQAPVPPKPMATVPAPKQALRKRTQHGPNAATIDFRAALTRICGVDLIKVCGLNLMSVLMLIGEIGTDMSQWRSAGAFCSWLGLCPGAKISGGKILSRRTRKVNNRASTILRLAAWAAGKTDTWLGRFYRRIKARRGAPKAITATARKLACIIYHMMKYGEEFVWLDANQCEGRAREFRLRRLRKEAKMLGFELQELQQVA

SEQ ID NO: 205172 - protein, 385 aa, unidentified
MVYVGIDIAKYSHFASVVSSDGEVIVKPFSFQNSREGFMKLVEEIENFQDCLIGLESTGHYAENLIYFLYEMDYKIALINPIQTDSLRDSNIRKTKTDKLDTKLIVECLMLKKYSLVNFQDINIIKLRRLSRFRMELIQQQTRIKTQLTGCLDIVFPELSSFFKGNLHLKTSYALLEKYSSAKTIRSARIDGLTNLLYNNSKGKYTYDDALRLKNLAKDSVGLDNPSIDLQIKCLITQLRLYKEQIKDIDLGIETLMEIINSKIITIPGIGYNLGAMIISEIGDIKRFSNPSKLLAFAGLDPVVKQSGNFQADSMKISKRGSTYLRYAIYRAAFLIIYNNETFHKFYLDKRAQGKTHRVALGHVCNKLVRVIFKILTDNISFNLS

SEQ ID NO: 205173 - protein, 339 aa, unidentified
MNEITTIGLDLAKHVFQVHGIDAQGRTVLRKRLRRGQVLAFFSRIPRCVVGLEACATAHYWARELGALGHEVRLMPAQYVKAYIKRNKHDAADAEAICEAVQRPTMRFVPVKTAEQQATALLHRGREQLVRQRTMLVNALRAHLAEFGIVAAQGLRNVGELIAIVRDDGDRRLPDVARQVLQVLAAQLEQIEAAIAALEKQLMAWHKANAVSQRLASIPGIGPIIATAIATTVADPGVFRSGREFAAWLGLVPRQNSTGGKTRLGGITKRGNRYLRRLLINGASANLLRSKATKADPWVIGIRRRRPPLVVAVAQANKTARIAWAVMLRKEQYQRVLAA

SEQ ID NO: 205174 - protein, 350 aa, unidentified
MASKTVHRATRLSSIGVDIGKDVFHIVGFDPDGKMVLRRKFKRLALDAEFEKLPRCIVGMEACLSAHFVSRRLRALGFEPRIIPAIYVKPFAKGQKNDYNDAEAIAEAALRPNLKVVKEKTQHQLDLQACHRIRARLVSRRTATINQIRAFLIEQGIAVRAGAHALRNSLFAILQNRRDEISPRMSNLIVGLYEDWLWLDERIETITREIVEISKQERNCQRLMSVPGIGPIISTAMVAAIGTGEAFERGRDFGAWIGLVPRQYSTGGRPILGRISKRGSRYLRTLFIQAAHVILMRPQNWEKFSFGPWLAEAVTRMHRNKLATALANKLARIAWSVLRHNKRFDEALAV

SEQ ID NO: 205175 - protein, 306 aa, unidentified
MKQRYFIGVDVHCKFSEVAAVDRNGAVVYRGQCATSIPALVQELDKVARPRLLVIEEGPLADWLWRNLRPHVEEMVVCNPRRNHLIAKEGEKDDPIDAEKLAQLHRGGYVKAVHHGESLARALLKQHVGLYHDRVRHRVSEALRISSLLRRHGVFVREKHFVDPADRPALLARLPARGVLRADVRLLWKGYDLAVAQEEWLRRRLVRLAKKEEVLRRFVELPGIAWIRAATLLVWLDTPWRFASKSHLWKYLGIGLERRRSGTGPERLRVPSLVNRPLKSTILGAAKSAVAQGDNPFADHYRRWLE

SEQ ID NO: 205176 - protein, 382 aa, unidentified
MRTDQTTGTEERVLAVSLELAAAKWKVALHDGHREKPAVHTVAQPQASARLQAVMELIEQHKDKWSLPAGVRVVISYEAGQDGFWICRALQARGIECYVIDPASIPVERHKRRAKTDRLDVIKLVISLRAWLRGERDRMHVVHVPSPQDEASRHLMRDRGQLQKEVLQHCDRMRKLLATFGCWDEVHHRHFAGRLARDEVKCHDGAPLPPEMRERLLRECDRLALAQQQLAALEKTRQASLPAPACQRRDNLARLKGIGEVGASRLALELFWREFGNRRQVGACTGLVPQPYDSGESQVDQGISKQGNRRVRALLIEMAWCWLRYQPDSALTRWFNERTQSTGPNRRARRIAIVAVARRLAIALWRYLKDGEIPEGARLKSA

SEQ ID NO: 205177 - protein, 314 aa, unidentified
MVIIGIDPHPASLTLAVMEHTGEVLLTRTIANDSDAVPFVLELARGFPERRWAIEGAGNRYVTELVRALVALGEDITDVPPGLTSQYRAKRGRRKTDTVDAGVIAKAALANPTLPRYTRDETNEQLKQLTRARQRLAKHLQSERAALRALPAETPIRTVLEGVVASLERAIDDITGRIERLVKKIEPRILREHGVGPVVSGVVLAETGNVRRFRSADAFAAYCGAAPVERSSGQIKRVQLNTGGNRRLNHALHIAALVRLRSHPESQAFVARKIAEGKTQRAAIRQLKALIARRLYRVLNEPNPSTPKREPLTA

SEQ ID NO: 205178 - protein, 315 aa, unidentified
MQTPLDIGADVSKDYVIVACAKQSLPMCKLANKRAALWAWLKSLPAASRIGMEATGTYHELLAILALRLGLVVYVLNAKDVHHYAKGTGQRGKTARVDTALIARYVAKEHSHLHPWHPASPAQRQLQRLVRRRAKLTRARATLRSSLQTLPSLRSDLRALLNDFDVLLAKLDAQARKLIEEAQERAQHFRRLNSIPAVGNTVGIGLLAALERWSLPRADSFVAFIGLDPRPDDSGKKTGRRRLSKRGDPELRRLLYVAAMSASRTRAWKPLYQRALARGLSRIEALVTLARHIARTAWSIYTHQTNFDPERLHSH

SEQ ID NO: 205179 - protein, 346 aa, unidentified
MPIVGGLDIHRKQITFDYVDTATGEVQRGQIAPADRVHLAGWLARRFPGGQDTDFALEGCTGWRYVAEELAAAGIGAHVGEPAETAALRGPKKRAKTDRADSRHMRQLLADGRLPECWIPPSCILECRALLELYHDLRTAHTAWVQRIHAVLFHQGARQLGEGHLRTEEDLAQLRAIAAAQLSPAGQLQVATALDMLTALEDHRDAVRRRLLEAARHLAGAKVLQQRLYGVGPITALALTCWLGGAGRFSSARKAVRFAGLDVTVYSSAGKRSPGHLSRQGPEVLRWCVYEAGKAHARASAPDHAYYAAVKDRIDGKRAAISEARKIIRRACHILAELGDDALTMT

SEQ ID NO: 205180 - protein, 381 aa, unidentified
MRQVCGLDVHKDSVFACIVNEKGVVFQEKFGVLTPELEQLAAALQEHDVDEVCMESTSVYWMPVWRVLERYVMDLKLVNPYFIKQLPGKKSDMKDAEWIATCLLKDLIRGSYVPADIIQQLRQYDRRISDLNVECVRKLGKLDAALQRCNIRISNYVATTDGKSYKEVVRLISEGVRDPAELLKVIHGRITNRVGKNVIISSLTGVISDTDIDVIRQLREEVDLAQRHKDECQSKMDAICQQYFPEQLKKLQTIPGVKGRSATAIIAEVGSDVSSFQDAAHLVSWCGLKPRNEESAGKIKARSITHGNRYLRKTLIECSWGASKTQGCYLNKFSYYQTVVRRKNKMKVQVAIARKILIAVWYVLHDNVAYRDYTPDIAPAA

SEQ ID NO: 205181 - protein, 346 aa, unidentified
MGKSIINLSSVTTVGLDLAKHVFQVHCVDASGCVVVARAIRRNKLLEFFASLPPCLVGLEACGSAHHWARELIKLGHDARMMPPAYVKPYIRRQKNDASDAAAICEAVTRPSMRFVGVRSLENQATLMRHKTREMLVSQHTQLLNALRGHLTEVGVIAAQGPRHGRELAELIEACDETIPFEVCEALAPLVVQLRNLDEAIARLDRTIAKMAQKDETARRLMSIPGFGPITASAMAATIQDASSFTGPREFAAFLGLTPKQNSSGGKQKLGRISKMGNRNLRKLLVVGAHAVLFHRKPHTDPLRMWAKRLLEKKPFKLVAVALANKMARIAFAILRGKTIYRKIPA

SEQ ID NO: 205182 - protein, 430 aa, unidentified
MGLIVPTTIHPEREDQPLPYEWFVGIDWGSQQHQVCILDRDRRLVGERTVDHDGASLAQRAAWLWTVSAGHPQRVAVALEVPRGAIVEGLVERGFHVFAINPKQLDRFRDRHSVAGAKDDRRDAFVLADSVRTDRPSFRRLQLDAPHLLLLRELSRVEETLLEEFRRSANRLREQLHRFYPQMLQLCSAADEPWLWDLLHLAPTPAHAMLLSEAQVQRVLKAHRLRRLKAPAVLACLQAPALPVAPGTAEAAQAHCGFLSPCLRVLAEQRQACGQQVSALLHTLAEQPDDGEGPSDVAIVLSLPGVGRKITAWFFAEAAQPLAERDYQMLRTHGGVAPVTKQSGKRRLVVMRRGCNPRLRHALYHMARVAMQRDAHFSSVYAALRAKGQRHGQALRNIGDRLLRILMAMLRHRTCYDASRIRREPVVQRG

SEQ ID NO: 205183 - protein, 355 aa, unidentified
MPSKADTAVARTIGIDTGKNTLHMIGLDERGAIVLREKISRARIAARFVNLPPCLVGIEAGMASHYVARELVALGHEVKQVPPAYSKPFRHGHKNDFRDAHAVAEAVERPSTRCVPIKTDGQLDLQALHRVRSRLIGNRTAVINQIRGFLLEHGIPVRQGHHFLRKQLPLILATRTDVLSPRMIRIIGDLMADWKYLDERVERVTDEIEALAHADEGCQQLITVPGIGPIISSAMVAAIGNGAAFCKGRDFAAWLGLVPKQMSTGDRTILGRITKLGNRYLRMLFIQGARAVLLRPASWVKHSFGSWLTAATRRLHRNVLAVALANKLARIAWTVLAQGRRYEARVEPRVEPAAA

SEQ ID NO: 205184 - protein, 343 aa, unidentified
MTRFVGLDVSQKMTVICVVDDAGRRLWRGQCPTVPEQITVLVRRHAGDDARIGIETGAMTPWLVHELRNLGLEVVCLDARHARAALKMQINKTDQNDAEGLAQIVRTGWYRSVHVKSFESHRARALLGARIQLIGMTTRLSNHIRGVLKTFGLLPGAIRGLPFDRKVEALLLDRSDVALIVRPMLVAWRQLREQIAVFDKAIRVLVKSNSACRLLMSVPGIGVLSALAYVSTVENPARFVRSRSVGAHLGLTPRQYQSGEVDRSGRISRCGDTLARTLLYEAAVVILSRVKRASSLKDWARAIAKRSGNGKARVALARKLSVILHSVWRSGEPFRWSEHARAA

SEQ ID NO: 205185 - protein, 401 aa, unidentified
MSTRQARIWVGIDAGKGHHWAVALDADGDTLFSTKVINDEAQILALIETARERAGEVRWAVDISGRASTLLLALLVAHDQNVVYVPGRTVNRMSGAYQGEGKTDAKDARVIADQARMRPKGFAVLNTPPELVSTLRVLTNYRADLIADRVRLINRLRDLLVGICPALERAFDYSAAKGPVVMLTEYQTPAALRRTGVKRLTTWLERRKVRSADTVAAKAVEAAQSQQIALPGEKRAAKLVCDLAHQLLALDERIKDNDREIRETFRSDDRAEIIESMPGMGPILGAEFVAIVSDLSGYRDAGRLASHAGLAPVARDSGRRTGNHHRPKRYNRRLRHIFYLAAQTAMMRPGPSRDYYLRKRSEGLIHTQALLALARRRVDVLWAMLRDKRLFTSAPPVTQAA

SEQ ID NO: 205186 - protein, 344 aa, unidentified
MTIVESTRPVTGGVDTHLDVHVAAALDHNGGVLGVESFATTPAGYRNLHGWLVGFGQVERVGVEGTGAYGAGLARFLQRAGVEVIEVDRPNRQERRRNGKSDELDAVEAARAALGGRCRAVAKTGDGSMEAMRALLVAKRSGRDARVRSLNQIRHLSFTAPDDLRARLQPLRTYQLAATTARLRPSGDVVSSATKLALRTLGRRVLDLDAQLAVVDDALIDLITATAPQLLALHGVGVDTAATLLVAAGDNAARIRSEASWAHLCGVAPISAGSGKTNGRVRLNTGGNRQANHVLWRIVIARMSSDPRTRAYVARRSDEGLSKREIIRVLKRYVARETYRHLPR

SEQ ID NO: 205187 - protein, 442 aa, unidentified
MPVTHPNAAGIDIGSQFHVVSVPPDRTDKSVQTFKSFTGELHAMAKWLKECRVDTIAMESTSVYWIPAFEILESYGFEVFLVNAREAKTVPGRKTDVNDAQWLQKLHQFGLLRASFQPSKEIAGLRAYIRQREKLIEYRAAHVQHLQKAFMQMNIQLQHVVTDITGKTGIAIIRAIVNGQHNPDELVKLRDPHCKNSVEVMKAALTGNYKAEHLFALTQALELIDTYTEKIEACDRVIESTLQGLHKEADSMHTTLPKPRSKENSKNAPSFDVRQSLFKMIGTDLTQIHGIGSSIALKLVAECGTDMTKWPSAKHFASWLCLAPGNKISGGKVLSSKTRRSASKSATDLRLAAMVVGKTNTALGATYRRYAARIGKAKAITAIARKLATLFYNALRYGMEYVDLGADYYEEQYQKKVFKNLKRTAESFGYTLLKNEQTISAA

SEQ ID NO: 205188 - protein, 316 aa, unidentified
MKTLPSLSPGVHLGVDVAKAELVLDLAGSIRRFPNTAKGIASLLKASTILPGSHLVCEATGGYERELVNRAQLADVPISVIQPKRVRCFATALGQIAKNDPVDAALLSRFGNQTSPKPLMGKDSARQQLDAILRARAEFQDSMQRELNRAEHETNAAIGRMRQTMIACYRKQIDKLDKQAAALIASEQKLSLAEAVLRSVPGVGPQTSRTLLAFLPELGHCGRRSIAALVGVAPYDRDSGTARGRRFIKGGRSQVRKVLYMAAVVSLKHNDYLKKVYLHLRAAGKPGKVALVAVMRKLLIHLNTLMANFHQTAVAS

SEQ ID NO: 205189 - protein, 396 aa, unidentified
METVCGLDVHKGIILMCILQDNGVKIIEEFSTLTCDIQKMRDIMIKHGVQVVGMESTGVYWIPVWRILQGHFHLKLINPYFIKQLPGRKTDVKDSEWIATVIQKDLVRGSYVPGKHIQELRQFERRYVRLCEQSTRIEQEIDRQLHRCNIQITNYVTKIGSSSVIKVVRAIIKGVTDASELEKSVHGRVRNKHKDKIPASLTGVISPVDRFLLEQSIREYDLILAQQEECLKAMREYCNQYFKKELGLLCTIPGIQELSAMVIIAELGVDLKTFATAAALTGWAGLRPRNDESAKKIKSTKITKGNKYLRRILVQCAWGASRQKGCRFKSKYEQLCVRKSNRKALIAVARKLLVTIWHVLTKKEAYIEQVPKTDPRLHERKLRYYQKKLEQLQVQA

SEQ ID NO: 205190 - protein, 528 aa, unidentified
MPDIERGYRETATTSLVMYCEVQSRLRECRSKSLSAHNEYHLFNQYGDDNMVKDTTKAIGRSNAKRVNLSQLESSEFERMNLNAAGIDIGNGFHCVAVPAGRDTETVREFDCFTSDLDALVNWLLKCRIETAAMESTGVYWIPLYEKLEAAGIEVLLVNARQIKNVNGRKTDVLDCQWIQRLHTYGLLQGAFRPDAQICELRGYMRQRSMVIKMGSMHIQHMQKALSLMNLQLANVLSDVTGETGMRIIRSILNGERDPGVLAAHRDPRCKSSLEKIKKSLTGHYKKEQIHALRQAVDGYDFYQTQMIACDFEIERHLLSFATVLEEAPALEEKQTKGFAIKPKKKKKKGGNAPVFDVRSALRRVLGVDLTTVPGIEEGTALCLMSEIGMDMSRFRSGKAFAAWLGLSPDNKISGGKVLSSKTKRTGSRAARALTMAAFTLHKNKSALGAFYRRLKGRIGPSKAITATAHKLALIIYNMLKHGEEYVEKGQEFYENMYKERAINSLKKRAQALGFAIVESQVNSALGI

SEQ ID NO: 205191 - protein, 408 aa, unidentified
MQLSPMYKRAIALDVHQAKISACAIVEHDDGRVEVTMREFGAFKRDRRALAQWAVEIRPEVVVMESTGVYWKSPFAALESVGITAWVVNARHVKAVPGRKTDIADAQWLATLARAGLLRASFIPPLLMRQLRLVARQRQKLVGMCSAEKNRLHKVLVDAGIRINVVVSDIHGTSARAMVKALIADKPMHEVLDCKGRLRASRQELFEALSTEQFSTVHRFVADEIVQHIEQIEQRIARLDAYLLEGLKAYAPQLNLLQTIPGIDLQGAAMLLVEIGADMSHFGSAERLASWVGICPGNNESAGKRKTGKIRKGNAWVRRLLCEFAQAAARTRCALRAKFDALAIRKGHKKSIVALAHKMLRTVYAILARGTHYQDKTVDYEALSVARNAPRWIKMLRKHGYIATPAAA

SEQ ID NO: 205192 - protein, 366 aa, unidentified
MPDYRIGCDAHKHYSHFAVLDQDGRLLTQHRVEHQPGAIQAFLENLPQGTPVALESVGNWYWIADEIEAAGCLPLLTHAAKAKLLMGNVNKTDKLDAKALAKLLHLDSLPTVWLPPREIRDQRELHRTRTPSRCSFGMALSKLRTALKNRIHATLAKYGISTSEHSDIFTGAGSTWLQSALSRLPPETGRCAGQELEALDALRDQIALLERRIRERVTLTPSIQLLKTLPGVADILAIVIEREIGSIDRFDTSGQFTSYAGLVPTVHASGGKTRFGHIRKPSNQYLKWAFIEAANVVVRHRHHPAWKTKYVCRIYDQVSRRKGHAVAVGAVARHLAEGAYWILKRQEPYRPPAIRQATPKQVRGRA

SEQ ID NO: 205193 - protein, 401 aa, unidentified
MKYVLALDIAKGKSMVMLSSDVGEVLLEPTEYTHNKSDFERIDSYISKLNIKDNLTVIMEATSIYHKAPERFFKENNYHVIVFNPLIGKEITNTIRKTKTDKQDCIKLTNLFWKSSIPDRKYTEDEIYTKLNELSRQYYHLDEGLTRHKNRYKELLHLCFPEFELCFKDGKIYDLTALNFIKEFPHAYIIKDKRVDALAYNMANTNDRHLNYYKRKANIIKEYAINSYPGVNQNSNDVDNLKQLVEIIINLTKQKDSVKNKMIELAKQTKNFDTIVSIFGIADLSASLIIAELKDITRFNNIKQINASCGLDPTIVQSGKSINYHGPISKRGNKYARKILFNCSRNIVTLSAKCDKENPIYVYYLKKKQEGKHYYACLTACSTKLIRIIYALCMNNSQIQN

SEQ ID NO: 205194 - protein, 331 aa, unidentified
MKFKHAIGIDVSKDTLDAVCHLSGAYLQVSNNSAGFKQLLSCVKKQVNKELEQTLFCFEHTGLYSLELALFLEGQQLSFAVESPLSIKRSLGLKRGKSDKVDAREIAHYAYLRREELKQYKMPSAHIRQMHVLLTQRDLLVSQRAALKNAQGEQRNILAIGENKVLFDVYQQTIAHLSKQIKKVEAALNALVTSDPQLRKLFRLITSIKGIGDVIGYYMLVYTNGFTQFETWRQFACYCGIAPFDHQSGTSIKSGKQVHQMAHRKIKSLLFLAASTAIQFDPELKAYYERRISEGKNKMYTLNAVKNKLVARIFAVVKRETPYVQMHLHAA

SEQ ID NO: 205195 - protein, 325 aa, unidentified
MTLSHPLDNTFIGIDVGATTLDVAWHRGDSAHYANRPDAIAALIKRLQTQAVTRIVIEPTGGYEKVLVKALRQAELPVEIIHTTRFAAYRALVGVKAKSDTSDTRLLAAYAAAPDEVRGRKPDYVQMPEDAIREELSELASRRDQLKHMIHAEACRLATVRLPELRQSITAHLEALRAEDKQMHRMMLALVRRRADLKRDQTLLKTIKGIGMKSALVLLASVPELGRVGNKAAAALVGVAPFVHQSGTMKAPARIHGGRAAVRIILYMAAVAASRHNPVLRPFYERLVAKGKPPKLALVAVLRRLVVFANAVLRSGQPWRGVHAT

SEQ ID NO: 205196 - protein, 333 aa, unidentified
MNKKWFIGIDISKLSLDVAIHSDEGVKEANHIKVTNDIPGFKKILEWLRKKKVDYKQSFFCMEHTGLYGLEIQTFLAKEGIACCVESPLRIKRSLGLVRGKNDKVDSHRIAWYAYTFRDSIKASLLPPGALLALQRLLAERKHYVKQAASFRQQESDVIRHETKQASRRKKKMVGYLEEMISQVESQMMEIVTADSMINDSYNLLLSVPGIGIINAITTIVNTQNFKAFENARQYACYIGIAPFEHTSGTSIKGRTRVSKLGNKQAKVELTQAARSAVMHDPGIRSYFQRKFNEKGATRDAYGVVLNAVKFKLLLRMFAVVKRGSNYVKLAYA

SEQ ID NO: 205197 - protein, 388 aa, unidentified
MIKQDLEESNGGRTVVGIDPCSEFLQLAILAPNKATEFKKLPLSPSITEEIVKSTDPATTQIAIESYGSYGKLFVYDLLRKGYDVREVNPHISKKLSSLYSEEHSDQKDAESLAKALLLIPDLPKILITDKKQWLAKLTRTRKKLVKDLNGYLNRLHIALTESYGVVYKSLFKTLFAKKALMFFEDNPTINDSISDEDAKKRLGEEKWDLLIEAGKWKDDYYLETLRTEIRGLIGIIRSINSTKIALEENIQEIADQVEEMRILKTFPGIGGISGATLLSEIGDIDRFGKESYLSAYCGVSPVIWQSGTGRIRTKRRKRFSRRLKGILYFISLSQIRINPESKAYYQRKRKEGKTHWQAMNALSRQLIKIIYYMLKNMEPYRRPMLAN

SEQ ID NO: 205198 - protein, 318 aa, unidentified
MSDSVFIGIDVSSQTLEVASSAQAKTWQASNDAHGIESLCSQLTALGPALVVLEATGGYEFEAACALQAAGLPTAVVNPRMARDFARAMGALAKTDALDAHMLAAFARVLHQHPERERFVKPLADAQLQQLQALVLRRRQIVQMLTGERQRLRISHAAARPSIERVIEFLKQELGDSDTEVAAHVQHHHAQLAQALTSVPGIGAASVAVLLAELPELGKLDRRRVAALVGVAPLNRDSGQMRGQRSIWGGRAQVRRTLYMATLTAVRYNPVLKPYYEHLLAAGKRKKVALVACMRKLLTMLNAIAKHGCTWNPNHHCA

SEQ ID NO: 205199 - protein, 480 aa, unidentified
MDDRRLVGIDLGIISAHTVRVLDGDGSVVCRRKAVPTVASLTEAEQAALQGAPPGTCLEVVLEPTGPSWLPIAVFFTRRGHTVYRVSSAKAHDLRRVLSRQAKSNGIDADTLARLPLVDPAGLHPLQLPSAERAALDRRVRACDRLTQQGACHKRRIKDLVRQLLPISPLVGELGMADLAVLERFGGDPHALLAAGPARLARLIGKASAGHHGAQRATQWLAAAHAALELYADHPAVAFTDLAAEVQTEVRLLRATQAELARHATQREYCYRWVDPLGLARSLPGLAEVGGPALVATMGDAHRFACAAKFRAFTGLAPKASETGNTDRRGQPISKAGNRLLRTTLVRAADNARRLDPQLAHLYYVQMVQRGKDHLGAVCVVAAHLAERAWTVMDRGMPYVICDTDNTPVTPEQAKQIIAERYTVPEEVRRRRRSRKAAGKAPHQVLAGHAHSAQGATRRPSPPASLGRQDPNVKPVHQPA

SEQ ID NO: 205200 - protein, 473 aa, unidentified
MSRCFPLERFVLFGSWPGTAPRIVAQRKTKQIKPMTTPSLLVLDPTAAAIDVGSEQLHVSVAGGPPKVFGTTTGQLRELRDWLKAQGVQSVAMEATGIYWLCPYEVLEQGGLRVVVVNGKYVKNLPGRKTDMKDCQWQATLHAHGLLQPGFVPPEHIRRLQDYLRVRADHVVLAGSHEQHMQKALDRMNLKIHDVISDLTGMSGLQMVAAILKGERDPAALLALCDPQIQKRKASQLRAALEGNWKEEHLFALRQAHELWQFYQQKIAECDVAIEKVLQEIAGPEDPAKPAPPASKRGGVNTPQIAGLHALLFRLCGHKDLTTLPGVADHVLLQLLGEVGTDLGNNWQSEKHFTAWLGLAPGSRQSGKRRGNHKRGRNRAGRLFCVIARSVGRSVDKALGGFYRRLKGRRGGLVANLALARKLAELFWRLMVHGKAYVEQGLKQYEEKVAQTEQRLLQKLARKYNLVLQPKAA

SEQ ID NO: 205201 - protein, 347 aa, unidentified
MDHIGIDVHKKESQICILAERGELLERRIPTQPRRFAEELGARPHARILLESSPESEWVARCLEGLGHEGMVADPNFAPMYATRTRKVKTDRRDARALAEACLLGAYRPAHRLSDAQRHVRARLTVRDPLVRTRTRYLSLTRAVLRQHGWPVPTGSAEAFPRRVMALPLPGRLRSAVAPLLAGMRPLQQQLAYSDERITAVTQTDGRVRRLRSVPHIGPVTAAAFVAALDDVQRFRRAHEVDAYRGLVPRALSSGETQRRGRITTAGSSRVRWRLIQAAVSRLRLHDPRTAWLREWAGRIAARRGKGIAVVALARRLAGILCALLRDETVYHSARRQPRTLQDAVPA

SEQ ID NO: 205202 - protein, 343 aa, unidentified
MGEVSTIGLDIAKSVFQVHGVDVDGAVMIRKRISRAKLLEFFATLPTCLVGIEACPSAHYWSRRLQGLGHTVRLMPPSYVKAYVKRGKNDANDAAAICEAVTRPSMRFVATKSEQQQSGLMLHRSRQLLVCQRTMLSNAIRGHMAELGIISAKGRNGTAELLKIIADEQDDRIPAAARFSLNVLARQYAAIRAETVAIERRIHAWHRSSEESRRLEEIPGVGPIVATALVAEVGDWKEFTSGRSLAAWIGLVPRQHSTGGKERLGRISKQGNRHLRWLLVAGAMAVIRYARQHGTKRPWLARLMDRRPIKVAAVALANKIARMAWAMMVRGERFKEPKLLPAA

SEQ ID NO: 205203 - protein, 421 aa, unidentified
MVTDQDVAAPELVACIGLDWGDERHAVHLQAAEGGPVERVELEQKPDVLHAWVAQVRERFHGRPVGIAIEQRKGAVMHALMMYEFFVLYPVNPKALARYREAFRTSGAKDDPADAELLLDLLRKHRDQLRPWLPDTVEARTLQSLCEQRRKLVNHRVALTNRITSLLKQYFPQALDWVGDVASLQGCDFLRKWPDLAAVQRVRPSTLRTFYQQHNCRKVAVIDERIRQIASACPLTSDPAIVDPLSLSVQTYATQLRVLIEAVQAFDTRIADVFAHHPDQALFDSFPGAGPVCAPRLAAAFGTDRSRWQSATELQSHSGIAPVTERSGKALWVHHRLACPKFVKQTFHEFADQSIRFSQWARAYYDQQRGRGNDHHAALRALAYKWIRILFRCWKDRKPYDEATYLDALRRHGSSLVKNNA

SEQ ID NO: 205204 - protein, 315 aa, unidentified
MGTDLWVGIDVSKERLDVGFWPQGEGFSESNDAAGISRLAQRLLALKPRLVVLESTGRMEVPCALELGEWGVPYRIVNPRQVREFARAMGKLAKTDRIDAVMLARFAESAKLDPKLLPDPQRRELRALVMRRAQLIENKQAEDNRLAGETVSKVRRSLKDSIAWHERQIAALDRELDRTIKGNPEFDALSGLVQTVPGVGPNTARMVAACLPELGTLTRQQIAALVGVAPLAKDSGQYRGKRFCWGGRKGVRCALYMAALAATRFNAIIRTLYQRLRARGKPAKVALVACMRKLLVILNAIVRDQTPWRQTSPAA

SEQ ID NO: 205205 - protein, 360 aa, unidentified
MKVQRTSVGLDVHARSVIACGLDGDTGEVFERRLTPDHGEMMAWLEDLPGPVAVTYEAGPTGFGLARRLNSAGIRCAVAAPSKLQRPVGDRVKTDSRDARHLARLLHLGEIVEVTIPSIEQEASRDLVRAREDCRGDLMSTRHRLSKLLLRHGLVYYGGEPWTVKHEQWLRRQRFNTPALQMAYDAAFDAMLATIDRRDRLDDAIAEMAAHSPFMPVVDRLQCVRGISTLTAFGLAVEIGDWHRFTGRTIGAYVGLVPTEYSSGATRSQGGLTKTGNGHVRRLLIEASWHHRKPYRPGRRLRQRWESATPAARARGHQANRRLHARWVGFDQRCKRAVVANAAIARELAGWCWSLAVLDG

SEQ ID NO: 205206 - protein, 377 aa, unidentified
MPDVSSKAPAAVRLWVSLDAHKLSIVAATLPPTGGEPVVQRIETTEKAIRRLVERLGGPEGLAVCYEAGPGGFELYRLLSSMGVACDVIAPSLIPVRAGDRVKTDRRDAKKLVRLYRAGELSFVAPPTPETEGLRDLLRCRDDLRRARISARNRVVKQLLRYGRVFREGRYAWTKKHREWVDRQRLDDPLAHAALEQMLIHVDSLDRQLALLDASLERLAREGRWADQVQVLVRFRGIATLTALGLIAEIGDFARFANARELMSWLGMTPSEYSSGQQQHRGHITRAGNTHARRLLVEAAWHYRHPPRRSTRRPEPDERAWHAQVRLFARWRHLTGHGKRSTVANIAIARELAGFIWAAMTDQPGQARESEPQEVAA

SEQ ID NO: 205207 - protein, 341 aa, unidentified
MQVATIGIDISKHVFQVHGVSAAGEVAIQKRLRRAELLSFFEKLEPCLIGIEACGTSHHWARQLTLLGHEVKLMPPSYVKPYVRRNKNDAADAEAICEAVSRPTMRFVPIKTVEQQGVLIIHRVRSVLIRQRTMMANALRGHLAEFGIVARQGLKAVRELGRMIDDIRQPLPDTVRYALHALVAQLGEVEERIREIEVQLLAWHRTDETSRRLASIPGVGPITASAIAATVADASQFRSGREFAAWLGLVPRQRASGNKNVLSGISKRGDKYIRRLLISGATAILRYSRAKPTPQRAWVNSLLERRPAKVAAVALANKNARIVWALMAKKEFYQPPIAVAA

SEQ ID NO: 205208 - protein, 351 aa, unidentified
MKVLADVVDAIVGADTHRDTHHLALAAPTGVVIAELEIGNHDAGFAQALRWIERNAPGPNVVAAVEGTRSYGVGLCRAMSGAGRVVVEVERPRRQDRRRGKSDAGDARLACLAGLRMPVDRLPTPRRDGVREALRILLAARRDLSIGRTAQVNRLRALLLTGDDADRAVSRGVLNDRVLAGIARRRGPTGDHDVQRVVARGEAKRLARAIRLANTDLAENKRALQGLVAGAAPGLLELTGVGPVSSAQALVSWSHPGRCRSEAAFASLSGASPIPASSGQTHRFRLNRGGDRALNRALHDIVLTRWRVCPRTQAYVARRRAEGMSDSDIRRCLKRYVARELFRVMEASSMS

SEQ ID NO: 205209 - protein, 345 aa, unidentified
MEKFSLFIGIDLGKKEFFAAFRQKGMLIKVVCYENSASGIARFIEEIKTFGLEFSQILIALEHCGVYLEKLVMALHSEELVCWLWDPLIAKNAPLDLNRHKDDIRDAKAMALLAEMHQARAKQYLPPTAEQEELKALFRLRAQLVKHRTKFYNQYHANQDKAIPHPISHQILEQWIQNSSEQIQEIEQKIKELIFQSERLKRMHQILLSIPGIGPVLATQLIEITQGFTSFQSEKALAKYAGTLPLEHLSGSSVKRKPRSSKKCYKPLKVNLTMGATSTIREGLFFDKFYRYKTQVQKIEHLKVINIIRNIILKLAVKLVKLDQEFDPEIFKKNKKSWQVFLDLS

SEQ ID NO: 205210 - protein, 367 aa, unidentified
MEKSSTTFVGMDVHKESIDVGIAAAGEARHYGRIAGDAASVDKLTRKLRSVHRDLVFVYEAGPCGFWLYRRLKAQGLECMVVSPSMTPRNAADRVKTDRRDSLKLARLARAGELEPIYVPDARDEAMRDLVRTREDAVCMQRQARQRLQALLLRNEIRYVGKSAWTQAHRRWISGLKLPNAAQQIAFEEYVQAVHEASERLERLAKAIAAELEHWRWRPVVEALQALRGVSAIHAVRIIAELGDLGRFESPRKLMGYLGLIPSEDSSGPRRRQGSITKAGNSSARRALVEAAHGYAYPARVSWVIARRQTGLSKSICDTAWKAQLRLCARFRRLAARRVPRNKIVVAIARELSGFVWAIARQVKPAL

SEQ ID NO: 205211 - protein, 329 aa, unidentified
MSNPVPLCVIFGADVSSTEIVIACADPNQTVKTIANNQTAIEAWLKRLPKEAVIGMEATGRYHERLADGAARRGHRVYVINPKRLSEYAKGVGQRGKTDPLDARVIARYVARESDKLHPYTVPTATQRTLRDLLSQRANVVRHRGAIQQCLRAMASNGNAALRAAQQTAQQGLRALIAEIDAQLKAIVMANRTLESKRVLLHTIPGIGPLNSVALTHRFDRTPFANSDAVVAAYGIDPRPKDSGKKNGKRYLTKQGNAEDRRLIYLAAQSAVKTKLFKPLYQALRAKGFASTEAIVIVARKLIRIAFAVWTSNKPFNPEKLGFLACKKP

SEQ ID NO: 205212 - protein, 348 aa, unidentified
MLADELDYVLGVDTHRDEHVLAVVTAPAGAVVAGAAAPANTRGYRELLRVAERHALGRRVWAIEGTGSYGAGLARYLAERGEVVLEVSRIPRSERRLRGKDDVLDATRTARTALASDTAALPRSGERREAVRLLLVARRSAVDVRREALTQLRAVIVTAPDELRQQLLRLPEGKLLDRCSRFRRTSSAAADELATRIVLRSLARRIKAATEEASQLESEILTHVRALAPALLNEPGIGPIVAAQLIVAWSHRGRLRSEACFARLAGVAPIPASSGQTQRHRLSRGGDRQLNRALHTIVLHRRQHDPATRDYIARRIAEGKTAREATRLLKRYLARHLYRLLQQQPLIT

SEQ ID NO: 205213 - protein, 407 aa, unidentified
MNAELPAKTLVVAIDPGKVTNRVLLANGEQGLIGEPVSLPTLREGVERLFELIESQAAPETVIAIEATGSLHLPWVSEIERRLPGSTRLFAPSETQAARTQLGSRRFKDDDRDCAALVSLARQGRGRPAQSGTLDALLDAVRHRRRLIAQRKVARQHLHHQLNALCPGLSAPAGHGRVLGLETPTGQAALACAVDFAGRAPAARSLTARAPGRLSRAGATYWSERWRGCLPPPADAELRAERLGRDVKRWRALEADVLAVEDQVSMLLAETPGQVLTTLPGVAATRAAALAVHALPIERCPTAEHLYSFTGLAPARYESATIRKARGISRQAPGERRDALMGIAWGLSQHSAAFRQRDRELRGRGMRPIEARVALARHACRLCHRMLQSQQPFDEERYARTRHRRGR

SEQ ID NO: 205214 - protein, 438 aa, unidentified
MSNKVIFNLDELFISVGIDVGADFSWMSIALPNQQFVGKPYKILHNSIDSLTTAVSKIKEAEELYSLESRIFLESTGIYHYPLFCYLRDKGFNCSVINPIITKNSTNINIRKVHNDRFDSKKAALVGLKPDLKVSLMPSDLALNCRNLCREYYDLMDNRSAYVNKLQGELRMAFPQYLGIFSKVTINTSLTLLETYTSPSAFLEADKQEIIDIIKSTARFGLTYAQNKYNAIIQAATDANQFGYIIDSNIKRIRLYISFIRKYDEEINSILESLHELVNANEDADFVKQIHLIETFKGAGFLSAVSIMGEIGDFSAFSKPKQLFAYFGLDPAVKQSGKFEGTKVQMSKRGSAIARRVIHTLTLQSISIYRNGEAKNPVLREYYLKKCDSKPKLVAMGAVSHKVCNMIFAILRDNKPFKIIAPQEHIKQYNAAKCDIAA

SEQ ID NO: 205215 - protein, 315 aa, unidentified
MSETGKIFVGIDVSQAQLDVARLPDGKVAHFTYDAVGLEALRGWLLEQSPSLIVLEATGGFETSVTVDLAAAGLPVVVVNARQVRDFARSIGRLAKTDAIDAAVLARFAQDVRPEARPLRSEQERELAELVTRRRQLVKWQTSESNRLKQARSRSVSKSIKNMLELLKKRIAAVDRELEQQLRDSPVWREKDQLLRSVPGVGPVTSRTLLALLPELGRLSRRTIASLVGVAPINRDSGKMRGRRTTWGGRANVRAVLYMATLTASRANPAIRAMYQRLTQRGKAPKLALTACMRKLLTVLNAILKTNTPCRLPSA

SEQ ID NO: 205216 - protein, 410 aa, unidentified
MYSLIKLILKHILMITVGLDVHKDTIFCGIHNGKQCGEVKEFTTLTCDIRAMGEYLQSQKANKVAMESTGHYWIPVWNILEDMGFELMLVNPFLIKQMPGRKSDVKDAQWIATLYQKNLLRASLVPDKIIRELRFYSRKYNKLQKRLTSLLQETERILEMSNIRITSFVSNISAKSIRNVVNTIIDGTDDIEHLEELIHKRIRNKHKENITKSLDGFVTEHHRFALELVRDEMLLIEKQAEMCLSKMRTICKEHYEQEITLLQTIPGISEVSSMIIVAETGADMSKFENSSKFTGWVGLRPRNDESAGKYKSTAITKGNKYLKAILVQIAWAASRTKGGYFMDKFNRLAMRKSRKKALIAIARKIAVVAYNLMKNKEEFNPSLLPVYDPVKIQASIFYHQQEIERLNKLV

SEQ ID NO: 205217 - protein, 381 aa, unidentified
MNTSITYMAMDVHKKQHEVAWVNPKTGEVQTFSVRNTEAELTKMVQRIRRQVSGEIHLCYEAGVCGFVLQRRLKKLICVCQVIAPSLVLRKPGQRACLPWRHRQIKTDRRDAKKLLSQFIAGQLTQVYAPDAAQEADRELTRCRHSAQEDLQRARQQLNSLLVRHGYIYQEGDLWTGKHEQWLGAIEIDEPTLRTVFDEYSSHVRHCLTRVESLDKQVKQLAESERYRVAVSALRCFRGIDTLTAITVLTAIFEFGRFESPRALMAYLGVVPSEQSSGESRRSGGITKTGNWRVRRILTETGWHYRHGHRVSKALKARRKEQPTWAIDIAERAGVRLSKRYRHLVERGKASPTAVMAVVRELVGFLWAMLRQVQENERQVA

SEQ ID NO: 205218 - protein, 355 aa, unidentified
MDSTKYVGMDVHKDTMSIAVMNSAGKVVMESVLETKAVTILQFIQGLRGNLLVTLEEGTWAAWLYDLLKPHVTKVTVCNPRKNALLKSGNKSDRIDAQKLAERLRHGSLSAVYHGENGLRMLKELARSYLTVSKDLTRVMNRLKALFHSWGIACAGTQVYAPRHRLEWLSKITEEAVRGRAEFTYQQLDGLQALRQAVRRDFLAESRKHPAIKRLREIPGMGPIRAALWVALLQTPDRFRTKRQLWAYSGLAIETHGSGQYCYLEGQLRRVKKPVALRGLNRNHHHDVKWIFKSAAVKASSPTGPLHEFHEVLLAKGIKPSLARLTLARKIAAITLTVWKKGVRFDAEHLKPQAA

SEQ ID NO: 205219 - protein, 324 aa, unidentified
MIDGILGIDVSKNTLDASMSSCNKVRAKSFANSPDGWRHLLDWLIGQKIRRVHACLESTGLYSLGIACKLNEAGHVVSIVNPAQIRDFARTKLGRNKTDAVDASHIREYCELFKPAPWSPPSHAHRQLGELQTIRAGIVAGLTEWKNRKNSGMVDVVAQSLADATISHFTSQLGAVEKAIAQAIDNDTDLRRKRDLLLSISGVGETLASVVLAELPGPDVLRSSAEAVAYTGLNPRRHQSGTSIDRLTRISKIGNAVLRAALYMPAMSAMRYNPAIVALVTRLKARGRLNPKQIVVAAMRKLLVLCFGVLKTGKPFDPALAMGC

SEQ ID NO: 205220 - protein, 404 aa, unidentified
MWYAGIDWASEHHDALVIDEKGRQVGSVRVDHNPEGMMKLNTFLEQIIGTESKEQMACVIETTHGLLIAHLLEAGWPVYPVNPRTVDRRRSASGAKTDTIDAYLLAKTGRADLADLHRLTPDSDKITELKLLTRDQDALIQMQTRLVNQLTACLKAYYPVALELFGKLHQKSTLRFLQTYPTPQEAMRASTEQIKEVLRQTKYPNPTPVAASIFERLHQPHLQANAVVTRSKARLMLALVSQLLPLVEQIAQYDKEIETLFLTHPDHEIFESLPRAGKRLAPRLLAEIGDDRERYQDASSLQALGGTSPVLFQSGMYSKAHRRLGCIKPLRNALHQFAWQTTKSEAWALDYYQRKRAEGKSHTVAVRALANVWVRIIFALWTNRQCYQAAIFERAQQQHTPRAA

SEQ ID NO: 205221 - protein, 423 aa, unidentified
MTKFAATIGLDWADQKHDLWIQPADGSKAEHRQLEHTPEALHEWVAKLRERFGNRPVAIGIETCRGAVISALMAYDFIVFFPINPKALKDYRAAFAVSGAKTDRVDASLLEEFVRLHGDKLHALEPDTELTRKLAGLVQNRRLLVDERTRLVNQLHATLKTYYPLAQSLLGAQMNTSMAAEFLARWPELQSLKKATVETLRAFFYKHNSRGAQLMEERLEAVQKAKALTTDPAIIEPARALVTALAAMLKPLHKVIAFLDKQIELTMDQHPDAAIFRSFPSAGPALAPRLLVAFGTNRARFASATEVAQFYGLAPVVEQSGNSKTVRMRYRCPKFGRQSFHENAACAIRKEPWANCYYTQQKARHDDKHHLACRALAFKLIRIYFACWRDRQPYDPARYLSALEKNGSPLLAKLEASTTTARE

SEQ ID NO: 205222 - protein, 422 aa, unidentified
MLGIGIDWAEEFHDVAFGTPEKGVVEQFRISHGPDGVGALIDRALRLEPDPAEVRVVLETRHGLLVEALIDAGFTVLPVNPDLVARRRGPARKKDDAEDARICCLLALDRHAGLKALVPHGEFGGELRAIARDDERAARDQRRLLNRLRADLQTTYPAALTLAGADLGAPTVLRLLQRWPTQPELAQASRDDLISFARAGRHGWPDRFADQVAAALATPSLPTRDYLVRAKAAGIRLAAVQLLALHEARRGWEQRMAELLLGGRRTGRDHTVTDPDPGNAFPGGAIYLSMAGLGDRLAARVAGEIGEHIEQFTSPNGLQCYAGQAPVTRRSGKSDLVVARRLAHNRYLGDAVHQWAFCSLRQSGWAREFYDQKIAAGKSHHNALRALGNRWLEILWHCLIRSQLYDEATHIANRNRALGRAA

SEQ ID NO: 205223 - protein, 454 aa, unidentified
MRHGKKKQKPGQVQEDMPVINSNAAGIDVGSAEIWVSIPPDRDEEPIRRYATFTADLYALADWLKQRGIESVAMESTGVYWIPVFEILERKGLHVVLVNAKYAKNVAGRKSDWLDCQWLRLLHTFGLLPSSFRPAAAIATLRCYLRHRQMLIEYASAHIQHMQKALTQMNLQLANVVADITGDTGMRIIRAILGGERDPQRLAQMRDYRTKNDEATIAKALQGNYEPQHVFALKQAVELWDFYQQQRTTCDQEIAQYLHNLDSAVDVDSHPIPPPRAPKKRRNSPGFNCRLETYRILGVDLTQIDGISESSALTILSEIGTDWSRWKTEKHFASWLTLCPNNKISGGRILQRRTRKSSNRVHDLLCVCAQTLFNSRSALGAFARRMRSRLGPQKAIVATAHRLALWIYRLLRFGKTYVDIGQDAYEQQYQQRKLKTLTRQAKHFGFQLVALAES

SEQ ID NO: 205224 - protein, 359 aa, unidentified
MATKIYVMILSQITATPKLFIGMDVHKKSWTCHFKTDLFDYKTVTMPADANCLHDYVEKNFADHEVTCCYEAGCCGYWIARTLQQHKWKVLVVNPADVPRTNKQDWQKTDKIDCRNLCDHLRKNDLHSIYIPAEEQEQLRSLFRRRNHLARQLRTIKNHIKSQLLYYGIKLPDEYDNPNWSHEMKTWLSKINWKYCSASLAMQSRLKQLDFLWYEVLHISTALRAYCRKHHKKDYYLLKSVPGIGGITAAGILAELGDIRRFNRIEDLAAIVGLVPGIYESSENKICLGLSKRSNRYIRSLLVEATWVAVRTDMALQTYYRKHSAKEPNKAIIKVAHKLLSRIRSVIITGMPYQIGLVK

SEQ ID NO: 205225 - protein, 411 aa, unidentified
MSQMLVGVDVSLKSHHVHFMYEDGSSLADFSVPNDQNGAETLVKKMLETAEKSQADQLKIGMEATDLYSWHLAHYLQDQLKGYEPRFQSFIYVLNARKVARFKKGYDSLVKNDRIDAWVIADHLRFGRLLIQMKDAIQYEALQRLTRTRFHFMKEIARNKTYFLNQLFLKFSGLRQDNPFSDRFGATSLAVMEELEPETIAEMSIEELVEFLQDKGKNRFDNPEEIAAYLQKLARSSYRLNKVMQDPVNISLSVTLSTIQHIESQVKRLDKEIAKLMKGITQTLTSVKGIGDVYAAGLIAEIGDIKRFKDHHALAKYAGLVWSQNQSGEYESEETMRMRTGNKYLRYYLIQAADKIRKYDSEYKAFYTKKYNEVPKHKHKRALVLTARKLVRLVYSLLRTNQLYTPPERRD

SEQ ID NO: 205226 - protein, 348 aa, unidentified
MTQTILLSVDYHDQNCVIRQHAVATGQEQVISVPTTEGDLLRVVAQARAAAGRRGRVIWVQESTTGWARVKATLGERVEFQLANVLQMPLPPKARRCKTDKVDTARLQREYLNGSLPRAHQPPAWWRQVRRLVAYRENLVARRTSLQNWLNRYLAHETWESRVGLWSAKGRRRLQRLVESWPRRDGLVASAKLRELDELEKALSSVLVELLAVHRECPEARRLDAIHGIGLVSAVSIVARIGPVDRFKSAEQLIAYAGLAPGVQQSDQTRRNGRIGGGGTDRHLRHYLIEATMWARRFPRYHSTYDRVAKRRGNKIGRLVVSRLLLRSIYKVLKDGVAFEPAVATASV

SEQ ID NO: 205227 - protein, 356 aa, unidentified
MSRAIQYIGMDVHKEAIVIAVLNGSGKLVMETILETKASSILQFIHGLRGELHVTWEEGTWAAWLYDLLQPQVHEILVCNPRRNALLKKGSKSDKVDARKLAELLRTGMLRPVYHGENGLRTLRELARSYQTISKDLTRVMNRLKAVYRGWGIPCAGTQVYAPRYREEWLSKIPQTGVRRRAELLYQQLDGLQALRRNLRPEFLAESRKHKAAKLLRQIPCIGPIRAAHLIALMQTPHRFRSKRQLWTYSGLGIETHDSAQFRFVRGQLQRSKKPQQLRGLNQNHNHEMKEIFKSTATRASCGRGPFHNFYAALLAKGMKPEMARLTLARKIAAITLTLWKGGKRFDAEQLKTQAA

SEQ ID NO: 205228 - protein, 364 aa, unidentified
MDTHKKEHVVALHYPGQEEVIRFSVKNTVSEIARMVKRITKQARGDVAFCYEAGICGFALKRRIESLGCKCVVIAPSLTPIKPGERIKTDHRDAVRLLGMFKSGLLTEVYPPDQQQEAARELTRCRDVVRQNLNRVRHQLGKLLIRHGYIYTDGDHWTHKHLNWMRHLEFDQPMLRDVFDDYFTEMLHCLERLASLDKQLERLAQSEPYKDVVGLLRCFYGIDTLAAITIVTEIFDFGRFAGPRELMSYLGLTPSESSSGEKEKKGPITKAGNKRVRRILAEISWHYRHPAGISKTLRRRRKGQPQWAIDIADRAGQRLRRRYWHLVNAGKIPCKAVIAVARELADFIWVLFREYITRNMEQPA

SEQ ID NO: 205229 - protein, 413 aa, unidentified
MEWIACVGIDWADQEHSYTVRTRQGEKRAGVVRGSSEELHGWVRGLRAEFPEGRIVVGLEQGRGSLIDALSGYDFLTIIPINPRASKAYRESLRLSGSSSDPVDAELICEFTLKHLDELRVWQPDEPATRKLRALVETRRTLVDQRTAQTHQLSAMLKCYFPQALQWFNGATSPLLRSILRLWPTLADLRGATAEQITGIMRAHRTRGVARRVEQLFEQMRQAVPLTNDCAIVDSSSMYAQALVAMLDVFDEQIDKYDQAIDAEWAVHPDRSIFESSPGAGPILAPRLAVAFGTDRSRYQHANEVQCYSGIAPVTEESGKYRSVHARWGYPTFMHQSFHEFAASSLPHVPWANASYRLQRERGAGHHAAIRAVAFRWIRILFRLWKDRLPYDDQTYTTALARRNSPLVSRIAA

SEQ ID NO: 205230 - protein, 392 aa, unidentified
MIYVGIDVAKDKHDCFITNSHGDVLFKSFSISNNRDGFETLFQRIESVSDELNKVKVGLEATGHYSYNLLGFLLDKGLPTYVINPLHTNLYRKSLSLRKTKTDKVDSRTIASMMMSDMNLKSYSDTSYHNEELKSLTRYRFDKVKERAKLKTSVSRLVNILFPELETLVPQLHMASIYALLSEFPGSSYIASAHLTRLTNLLSASSKGHYSKDTAIIFRETAKTSIGSVMPAKSLELKHTIKLIQELTIEIDEIEAEIKRIMDEEIDSPILTIPGISYRMGAMIIAEIGDFSRFDSADRILAYAGMSPSTYQSGQLDNCYAHMEKRGSRYLRYALYNSTKYVCQWDESFAAYLAKKRAEGKHYNVALSHAAKKLVRLIYAMEKSGQPYSKAA

SEQ ID NO: 205231 - protein, 338 aa, unidentified
MKKRYFLGNDIAKETFDFCLLNAKKICLWRGRLSNNAAGFKALLEGLKARGIKLKAIHFALEATGVYGRALIGALHRAGLAVSVLNPAQVKFFATSYNRRTKNDRVDAELIALYCLERQPMATRPLRPVEEQLKVLVHECETRVNEQTRERNRRHKDHYQSAGLPPILHLQRRQRLEQLQSQIGQLDRAIDALLGSDPQLSQHAKLLCTIPGIARRTAAKLLAELAGKEVSSARQLAAYAGLTPEERRSGQNLYGKTRLSKIGNAFLRKALFMPASVTRRWCMPIAKWANSLEARHLEPLQIRGAVMRKLLHLVFGVLRHQQPFNPIRTSRPTLTHVA

SEQ ID NO: 205232 - protein, 436 aa, unidentified
MRGCRCSMIMGFTKPIEHFNLQRKKVITMNTLYVGIDVSSKSNVIYLMLPNGDKHSNFSVANSHEGSTQLVKRILSALTSHSLDTVLIGLEATSVYGDNLVYFLREDATLAPFNRKIHVLNPKQVKKFHDAYNDLPKNDYVDSFVIADCLRFGRINKEVYMGDYRYKALQNLTRARFFAVQNLVKEKQRFMNVLFKKYSTMTQEKVFSDTFSTTALAVYDEFESAEALANMDLHELTDFIIEKGKNRFPDPDAVAKAIQKAARSSYRLPKTMNDSVNQVLSISITSMKALESQIKEFDKAIKAQMELLPNVLISIPGIGPVYSAGIMAEIGEIDRFNSQAALAKYAGLAWKQHQSGGFESEVTRLIPSGNRFLKYYLCEAAFSLVRCDKEYSDFYHLKYKEVNRYQHKRALALTARKFVRLVFRLLKDNRLYTSAE

SEQ ID NO: 205233 - protein, 324 aa, unidentified
MTTHAYLGIDIAKRTFDAVLLQQEHTRHRQFANTAAGFAQLHTWLRDHAPAPIHAGLEATSRYGDAVALFLHRHGVRVSVINPARTHAFAKSELARTKTDKADAALIARFVASQHPPAWTPPPPEQRQLQAFVRRLDALQAMRQAERNRWDLEEPTSVLRELITAHLAQLDEQLQQLQQRLQQHLRAHPALQHRSALLQTIPGIGQCTALKLLAELPPTDQCRSARQAAAHAGLSPRRRDSGSSVHGKTRLSKTGNARLRKALYLPAVVAMHHNPILKAFAMRLLERGKPKMAVVGAVMRKLLHQAYGVLKHSQPFDPNYARTA

SEQ ID NO: 205234 - protein, 391 aa, unidentified
MTFFIGIDIAKYKHDGFILDHAGEVIRESFSFTNDRSGFACLKEILSALDSNQNCRIGFESTGHYAMNLKIFLEENGFTYMQFNPFLINRFAQATTLRKTKTDKVDARVIATYLMSVDYKPYPSQSYHIKNLKSLTRDRNDLVKQRSHQLVKLTNLLDLIFPEFKPFFNHSLTSSTCLYLLDHYLTQSKIARMNLESYQKMKFKLRRTFSYARFCTLKQLARDSVGSEDPTLSYLLKKALDLYHTIDDQITEIESLIQETYTHLESHIHTISGIGLQSAACILAEYESIDRFDTADQMLAFAGLEPSRNQSGGSESKGRMVKHGSPYLRQAIMNVAAYSIMHNPILYEFYRKKRTEGKLHRVALSHVAKRIVRLIFHLEKHHLDFDRAKMR

SEQ ID NO: 205235 - protein, 385 aa, unidentified
MMEDAMGGGVDIASIVRCEPMELPMQTLNNLSRSLIALEPASTLIAVIEMSLSSWLVAGIVPGIERQPLKKLAVDESALLRLLHRWREEAEKAGCRIERIVVAFEAGRDGFWLARWLKARSIEANVIHAASVAVSREHRRAKTDRLDAELLKRAFLGWLRGERDHCKVVAIPTLKDEDAKRPSRERESLVGEQSRIVNRMKAALIRLGIRGFNPKLKRAAGRLDDLRTPEGEPIPPNTLAELRRDMERRRLISNQIRQIEEARLKHFAQAPNDGPHAMVRLNRRAVARYAGLTGSPDESGRKRREKGLSRSGNGRVRRGMVQLAWRFLTYQKESALAQWYRARTENALGARKPMIVALARKLLIALWRFVWQGVVPDGIVLRPAQ

SEQ ID NO: 205236 - protein, 377 aa, unidentified
MKNTRFVGLDVHAATIAVAVAEAGGEVGSLGTIPNEPDAVRRLMKRLGPAEQLRVCYEAGPCGYTLYWHLVRLGVACQVIAPTLVPVKAGDRVKTDRRDAERLARGLRSGDLTPVWVPDAAHEALRDLVRAREAAKKDQLRARHRLQKFLLRHGQRPPAGTTAWTDTYHRWITTLRFEQPAQDATRLDYLTEVDHAQARIVRLDQALAEAVQTAPASMRAVIAALQTLRGIAQVAAVTIVAEVGRVARFARARQLMGYSGAVASEHSSGSQIRRGHITKTGNGHLRRIVVEAAWAYRHRPAIGKKLRQRQAGQSEAIKAIAWKAQHRLHQRYRRLTGRGKPPQQVVTAVARELLGFIWAIGVAVERQQAEAGRPAVA

SEQ ID NO: 205237 - protein, 319 aa, unidentified
MKTTKLANIKNDEINIGVDIGKDTLDICVYELDLHWQESNTEIGIRRLLKLLCRFDITRLLVEATGGYERALVEAAVERSIPVLIAQPIQVRQFARAQGVFAKTDKIDARLIAEYGVMLRPEVKTLPGKKVRRVKDLLARKRQLNLMRTQELNRSHKAQKITAASHRRLVKLFDKEIAEVNVKLAKEVADINEWQRTYDIISSVPGLGDGVAFTLLGELPELGQLTNKQIAALCGLAPFNRDSGRFKGKRRIRGGRAPIRTVLFMAMLSAIQHNPIIKAFYKKLVDQGKCRKVAIVACMRKMMTFLNAMVRDDQEWKIN

SEQ ID NO: 205238 - protein, 410 aa, unidentified
MDVLIERGAGIDVHKNLLVVCLLVIAGRKRKKLKKRFGTFKADLIELRDWLVGEGCTHVVMESTSVYWMPVYEILEGHVQIVVGNAQHIKNVPGRKTDENDAEWLAKLLCYGLIRNSFVPPKPFRHLRQLSRFHNSVTKTATQQKNRIHGVLETGNIKLSSVATDIFGTSGTEMLEALVEGKLKPAAMARFARNKMKTKIPQLTLALDGTMTDHHRNLLRIELSLHGKIDASLAEVEIAMIEAASPFSQLLGRLDAIPGVNQLAGIGVIAEIGVDMSVWRSDGHLTAWAGLCPGSHESAGKHRKVGVRKGNPHLKRRMIQIATSAVKTNETYYQHKYQQLAKRRGHKRAIVAIARIILTTIFHMISRGTDYAEVGLPVSRPVNREREANQIVMRLHQLGFNVSLSPAANG

SEQ ID NO: 205239 - protein, 378 aa, unidentified
MRIVCGLDVHKDSVYLCILSSTGEIVEKVFGVLTFQLAKMRDLMLKHHVQEVGMESTSVYWIPIWRILEPHFKLKLVNPYFIKQLPGHKSDVKDAQWIAECMLKELVRGSFVPPERIQQLRQYDRRIFDLDDEINRKLSKLDAALQRCNIRLSNYVSNTDSKSYKEVVARISEGITDPKVLVEEIHGRIINRHGRKTIIAALTGVITQADSDMMRQIREEIDIAERHKQECIDKMQEICEKEYSDQLRNLQTIPGVKLRAATSLIAEIGIDMSHFETANHLASWSGLKPRNDESNKVIKSKRITHGNRYLRRTIIECSWAASRTQGCFFSRFSYHQTQVRKKTKMKVQVAISRKLLICAWHILSKNVPYQDFYERGIS

SEQ ID NO: 205240 - protein, 476 aa, unidentified
MKLSQAAKQVSTHQAPHRSKGKQKSPKITAQDLEGLPPLHLNAAGSDVGSAEHYVAVPAARDPEPVQKFGSFTADLHRLAQWLQACHIDTVVMQATGVYWIGLYQVLEDYGCEVRVVNARHTKTLPGRKTDVQECQWLQQLHTFGPLNHSFRQSEAIRVLRSYIRQRENLVAAGSVCIQQLQKALTEMNVQLANVISDLSGTTGMAILRAIVHGERDPYQLAELKHSLIRASREEIAQSLQGNWREELLFVLRQNLELYEMYQQKVRECDQHIAAHLKTLPDQVDGAQHPIPPPRRVSWSRQRQPGFDLRGELYRLTGVDLTQVDGLDVPTIQTVISEVGMDRSAWKTEKHFGSWLGLSPDNRISGGKVLKRGTRKAVNRAAMALRLAAWNLIRSQSALGAKFRPSAHPPGSPKAITAMADHLPRLVYRMLKFGHAYVDRGIQHYATKYRQRQLAWLKKQAASLNLQLVPLTEVAA

SEQ ID NO: 205241 - protein, 362 aa, unidentified
MEFFSGLDVGMDETAICVVDDKGKVALEITVVTDPETIKAALKPYFGRLRRLGHEAGSLSPWLHPELLKLGLPAVCLETQHVRAALKAQRNKTDKADALGIAHLMRTGWFRQAHIKSEACYRLRLLLTHRRNLKRKCLDLENAIRHSLKAFGVRISGTGRGGFAQAVREAVAGDALVAELIDAMLNARGALWKEYCRLHDLVVKLVASHELCRRFMQIPGVGPVAALSFMTAIDDPSRFKRSRDVAAYFGLTSRRWQSGSSIDVQGRISKAGDGDVRRALYEAASALLTRFKRKDKVKTWGLAIAKRTSHRKATVAVARKLAVIMHAMWVDGTFYCGDPDAPKADVSARAAAKRRKLLGAYA

SEQ ID NO: 205242 - protein, 373 aa, unidentified
MPSNLRYLGLDVHAETIAVAVAEPGGEVRPMGIIPHRPDAVAKLIRKLASREQLRVCYEAGPCGYVLYWQLTKLGVHCDVVAPTLVPTKPGDRVKTDRRDAAKLARCYRAGDLTPVWVPDAAHEALRDLVRAREAAKGDQLRARHRLGKFLLRRGIRPPAGAKPWTQAHRRWLDSLHLELPALEATLADYLHEVDHAAARLDRLEQALDAAIAAAPETLRSVIAALQCLRGIRQITAATIVSEVGPLSRFTHPRQLMGYSGTVPSEHSSGASVHRGAITKTGNAHLRRVLVEAAWAYRFSPKCAKGLRQRQRGQPEAITALAWKAQQRLCSRYRRLLARGKPTPHVITAVARELVGFIWAIGVAVERAQAMAA

SEQ ID NO: 205243 - protein, 410 aa, unidentified
MEVLYTCCAGLDVHKQTVVACLLCPDGDGERTEVRTFGTATASLEDLREWLLAAGCTHVAMEATGSFWKPVYNILDGHVEILVVNASHMHALPGRKTDVRDAEWIATLLKHGLLRASFIPSREQRELRDLTRTRTSLTDERSAAVNRIQQVLEDANIKVAGVATDIMGKSGRDILAALLEGEMDAAAMADLARGRMRSKRAALEQALRGRMGDHHRMLIALHLEHVDMLDEQIERLSAEIAERLRLFEADLARLETIPGVGRRTAEILAAEMGRFASAGHLASWAGMCPGVHESAGKRKGGKRRAGNKALRRALMEAAQAAARTKKPGRTYLRGQYRRLVVRCGKKKAAVAVGHTILRIAYRLLKEQETYQEGVLVHLDEHRRARVQQRALDQLKALGFDVTITPKEPAA

SEQ ID NO: 205244 - protein, 341 aa, unidentified
MDKELYFGVDVSKKTLDLAYYDGETIDWKNAHIKVSNDDAGFKKIGSWVAKVGKDFDTFLFCMEYTGLYNQNFRLWLESKEYIYGMVEPRKMHRFEPDLDDDQRSLDRIKTDELDAFRIAIYCEQNHKKILRNPSKLPSPVYFKLKRLLAERKQNTKQSTLYKQQLHDICAYDTDLSVERKKLQLKNMQENQKAIDKEIDSYMNEDTSIRKNYNLLTSIPGIGRIIALETIVLTENFTAISNPRKYACYIGIAPFKKESGTSVRKKTGVSKKGFSEAKADLSIAVLSAIRNNPSIRDYWIRKRKEKCGGIVLNAVKFKLVLRMFAVIKRGTPYVETDAYKN

SEQ ID NO: 205245 - protein, 416 aa, unidentified
MNAAGIDVSSRKSTVAVLRPFGEVVRLPFDVAHSTEGLASLAEQLKALDGETRVVLEHTGRYYEPVAKALHEAGLYVSAVNPLLIKEYGANSLRRVKTDKADALKIARYALDNWTDLRDYTPMDTIRYDLKTLNRQFQLASKQRTACSNNLIALLEQSFPGIRRCFDSPVRSDGTQKWVDFAHTFWHVDCVRKQSYNAFSERYRKWCKRHGYFFKQSNAEEVYALAKNAVVLVPKSGVTKVLVQEAANQLTSTSRSVETYRAEMERLASMLPEYPVVMKMYGVGKSFGPQLMAEIGDVRRFERKQALVAFAGIDPMPNQSGDKNVRSNRSSKRGSPYLRKTLFNVMGIYLKCAPLDEPVFQFLDRKRSEGNPFYVYMTAASNKFLRRYYAQVRDYLAALDDLPPVDMDSTGLKTSD

SEQ ID NO: 205246 - protein, 377 aa, unidentified
MIVIGADTHKSSHTLVAVDAATGRLVATKTVSARREGMLDAWRWAHGLEDERVWAIEDCRHVSGRLERCLVAQGERVVRVPPKLMGQSRRGERRPGKSDEIDAAAVARAALKEGVDSLPAASLDERALEIRLLHDHRADLVAERTRHQNRLRWHLVELDAELEASVPARQLDRACWLDRIARRLAAMEQTARVRVARDELRRIRELTRAERALERELVTQIKALRPDLLAEHGVGPIIAATLIGRAAGVERFPTDGHFARQAGAAPIPVSSGRRDRVRLNPGGDRQLNCALHRIAITRARSCPDTRAYLQRKLAEGKTRPEAYRCLKRHLARRVFKLLHPPPLTPPPSTPIGGRPPVIATAGRMIHCNTPAGTPVLT

SEQ ID NO: 205247 - protein, 475 aa, unidentified
MEEVEFKFSVDWTKPAFFCGLDIHKYELTVTVYSKDDSQSEFLKINVFSTDSAGLRMFWQFVKKYNPQGFVMEATGIYHHVIFRFLQKMRTKVHWPFKIVVINPADASGIPGRQKFDRIDAENLARYLSMGLFRNGKPIIEVLEDLKAIFRSASRIEKDRTALKNHIKKTLDRVGIRPRGLNMNREWVREFLHHFIGQNISLGECLNEIIADKNILKGHRNKILKNLKIFIPYFEFSLTSAQKALIRQDLVELDFKTARKSILAVEIDQMMLDRPGLRQRAYALSSIQGTSPFSAVWILAEIGNIQEFPTKRQLLAYCGCCPRIISSAGKVYSAQISRHSNSYLRTIFYNAAVVACNFLKKDSALKEYARHVRNRKGSYSMKLVYCTVAAKIVKIVYAILRDNVVFEPDHGSTLRKQTPSCVKEDFAVSDRKLIHRARNSLKRVNEVANIGLLGEHSIKLAEQLDCILQRKKFSD

SEQ ID NO: 205248 - protein, 444 aa, unidentified
MAGVMIGVDPHKASHTAVAISGAEEQLGQLRVRACAAQAGRLLAWAAAWPERTWAVEGAGGLGHLLAQQLLSAGERVLDVQPKLGARVRLLATGNVNKNDPNDARSVAVAALRSPAVREARADDHAAVLKVWSKRHRDLGSARTQVVCRLHAVLCELVPGGVPKKIIAPHAARLLDSVKPPDAVAAARWELAAALIEDLRRIDAQLRDTRKKLDTAVRASGTTLTGLFGIGPVTAAVIIGEVRDASRFKNRDHFAAYNGTAPIEVASGGRKVHRLSRRGNRRVNHAVHMAAVTQVRQPHSEGRAYYDKKLAEGKTRKEALRALKRQVSDAVFACLQADARRARARDPGGQQGNGSAASAAGSHPKNRLFGQATPGPSPHPTTPAASQVPGTTGHSSTAANLPPTAPQVQVERPQRSEDERPGGAAPPAAAPGREEGRGTPRPAS

SEQ ID NO: 205249 - protein, 435 aa, unidentified
MASMKKCCCGVDVHKSFIVAVIAKFSTNDREVTFTKYTRFSTFTYGLRRFKEWLRSHNCFEVCMESTGKYYIPVYRIVSDEEFHVDVVHPKYVKAPRGKKNDKRDAKRIADMYMRDHIAEYSLIPPAEILAIRDLVRYRRKTVNTITAEKNRMSNCLTVSCIKLDEVLSDVYGKTGQAIIGQIIEHGGCNFDPRPHIDRRVKASVEAFDLALDGNVTPSTLTNMKIIQERLAYLGKQKAELELCMESSSKDFSRQLEQLVSAPGIDTISAISMISEIGVDMKVFGSVKKYLSWIGLVPQNNESAGKKKSTRIGKGNAWLKPVVIQCANAAIKDKKHPEMREKYLALKKRRGHGKAIVAIAKRLMTAVYYMLLRDEMYAPHSGIDPAPHRGHLFVKNLVKYYQSKGYTVLDDNGEVLGAENAQTSKINTIAPEEVA

SEQ ID NO: 205250 - protein, 406 aa, unidentified
MEVIYECCGGIDVHKKLIVVCLRSGRKNEIRQFGSTTKELREMTAWLKEAGCQMVAMESTGSYWKPLYNIFELSDLDAIVVNAQHMRNLPGRKTDIKDAEWIADLLQHGLLKSSYIPDRDQRELRDITRYRKSLVGEKSREINRLQKFLEGSNIKLSSYVTNINGVSSLALLKLSLSGKTIDRETVIQTVDPKLKSKADDIVLSLEGVFSSLQKALVLQIISHIEDMEKRVKELDDLINRHLGKFEKAIQKADQLPGIAENSAKTIIAEIGIDMSRFPTDAHLASWAGLSPGNNESAGKKKNSKCIKGNPTLKSTLIQCAVVACAQKGTFFHAQYQRIALRRGKNRAHVAVAHSMLIALYHMIKENIDYVDLGDNYYNQFNREAKINHLLKRLNALGWQEPAALPV

SEQ ID NO: 205251 - protein, 345 aa, unidentified
MEITTIGVDLAKNVFQVHGVDQRGKVVLRKQLRREQMVEFFARLSPCLVGMEACGSAHHWARVLQGQGHTVRVIASQFVKPYVKSNKNDAADAEAICEAVARPNMRFVPVKSVEQQAVLAVHRARQGFVKARTAQANQIRGLLAEFGLVIPRGLWHIHPRVPAMLERAADTLPLAFRHLIERLLGQLKELDRQVAELEAQIQAWHRSSELSRRLEKIPGIGPLTASALVASIADARSFDSGRQLAAWLGLVPRQSSSGGKPLLLGMSKRGDVYLRTLLIHGARSALLAAQRKVGAADTWLGSLLRRRHFNVAAVALANKNARTVWALLAHDREFRPDYRPRLAAV

SEQ ID NO: 205252 - protein, 423 aa, unidentified
MLEETQEREEIIERVAALDIGKAELVCCVRVPGPPGQSRRVQEISTYKTMTRTLLLMADRLTGLGVTRVVMEATSDYWKPVFYVLEAAGFQTWLVNAKDVKHLPGRPKTDRLDAVWLCKVAERQMLRPSFVPPAPIRVLRDLTRYRWDQVAVRTAEKQRVEKLLEDAQIKLSAVVSDIFGVSGRDMLAALIAGQRDPRVLAQFARGRMRGKITDLQEAFTGRFTDHRAFMLTKMIQRIDTGSADIADLEARIDQEVAPFRAAVDRLDEIPGVGHTGACVIIAEIGVDMSRFPTPGHLCSWARFAPGIKESAGRKKGNATTGHGNRYLARVLGEAAVVAGRTDTFLGERYRRIARRRGKKRAIVAVGRSILIIVWHLLNDPEARYHDLGADFYDTHRSTATKRRQHVRQLEALGFKVTLEEAAA

SEQ ID NO: 205253 - protein, 332 aa, unidentified
MKYKVFIGIDVSKLTIDVHLHGIGASKTFSNEEKGFALFLSWVKKYIKQSEPAEMIICFEHTGMYSIKLATYLNDIGIPFAMLPALQIKQSIGIRRGKNDQIDAQRIAEYAWLHRETIQATLLPAKSILKLQSLLTLRNRLVCDRGGYEATWKEQKKALEGKEHMGIFQVYKSLIMNLTVQVKKIEEQIKAVIESDETVKLNYQLLTSIKCVGPVLAANMIAYTHNFTRFATWRKFACYVGTAPFEHQSGTSIKGRTRVSSLSNKQLKKLIHMVAICACAYNPEMKSYYKRRVSEGKNKMSTLNVIRNKIISRMFAVVNRGSGYVDLMKYAA

SEQ ID NO: 205254 - protein, 338 aa, unidentified
MQKNYLGIDVSKLCFDVSLIVTVNQCRQPMVISQFDNNSSGLKSFKAWLEKHQVSFDENSLLVIENTGIYHRLIWNFCTTNLLPVFIGNAADLKWSFGIARTKNDKVDSMRLCEYAYKNHEEIKPTTGLNKSLITLKDLLSNRSKLLRQKNAIKQTLGELKVSNDKTTQLLLENLNKAALDGLKTSIKLIESEMLRLVKQDDAVSANYNRMITVPGIGKITAIFIICCTNNFAIKITGKQLANYTGVVPHEHKSGTSVKGRNRVHFMANKELKAILTMGALSAISAYPEFKDYYNRKINEGKKPLQVLNAIKNKMLLRVVAVINQQKNYENKYQSACA

SEQ ID NO: 205255 - protein, 362 aa, unidentified
MRTQTYKKSEPELVNFAGKTIYSGIDVHKNSWNVSICLDDMFVKRFHQEADPKALHAFLTNRFPGAKYVACYETGFSGFSVQRELAELGIECVLAHAADIPQTNKEKLNKTDKVDSRRIAEALSKGMINSIYILDKQSEADRAFVRYRRGCKVRLKARKAVIKMKLFTLGIKIPPQFDKSHISKKYISWLSSLTFDEPITKFTLDFMIEDIEALRKKEYELNKCLRKMSVSDRYKDIYIELNKIPGIGLISIMTLLTELVDINRFGSFKKINSYVGLCPTEFSSGEKSMHGKITPRANKGLRTVLVEAAWTAVSCDPAFTQKYSELCKRMKKNDAIVSIARKILSRIYAVWSKKIDYKIGVR

SEQ ID NO: 205256 - protein, 355 aa, unidentified
MQTQSTSISFKGQNIYAGIDTHLKNWKVSIYLDHSTYKTFSQEPCAKALLNYLQKRFPEGNYFSAHEAGFCGFSVHHELTRHGISNIVVNPADIPTTDKERKQKEDKRDSRKIARSLRNGELKGIYIPSKAGMEFKSLVRQRKTLVKDINRNKNRVKSLLYLYGIKIPVELWISSRHWSSRYTEWLRTVSFDSAYGKNTLDLLLNSTLFHRQQLLALNREFRSLAKDPVGGKLIRLLMSIPGVGLVTALTILAEIEDINRFRNLDQLCSFVGLVPSTGSSSDHEVSKGITPRSNRPLRNVIIEAAWIAIRNDQTLALKYNELRKRMDGNKAIVRIAKQLLNRIRYVLKSEKEYVG

SEQ ID NO: 205257 - protein, 344 aa, unidentified
MTHYAALDVSLRSVHICVIDTDGKIKAETKLPSEVEDICTYLQGLNLEIVAVGFEAGTLTQYLSYGLTAAGFEVICMEARQVKAALSAMRNKTDKHDARGIAQILRAGWYSPVHVKSLESHQIRGLLASRKAVLAKCVDLENEIRGLFKVFGIKLPPRLGHGAFDGAVRETIETDEALSHALLPLLDVRLELYHAFRELDNRTRKLAHADEVCRRLMTVPGVGFITALTFKAAVDDPSRFRRSRTVAAHFGLTPRRFQSGELDIDGHISRCGDREVRSALFTAANAMMTRSSTHSPIKTWGRQLAKKRGHRRAVIAVARKLAVILHRMWIDETPFQWSTEGQSA

SEQ ID NO: 205258 - protein, 408 aa, unidentified
MKVFVGDDWAEAHHDVHLMGETGEKLAAKRLPEGLDGIAGLHALIAEHTTDPTEVIVGIETERGLWVQALIAAEYQVYAINPLSVSRYRDRHNVAGAKSDPGDAKLLADLVRTDRHNHRPVAGDTDQADGLKVLARAHQNLIWDRTRHTNRLRNDLREFFPAALLAFESLADRDTIAVLTKAPHPDQARRLSIAQIRSALRKGGRQRNLDRRASEIQQALRTPQLDAPPAVTTAFAATTKALVEVIAGLNTSIAELETELAAHFDEHPDADIYLSLPGLGVVLGARVLAEFGDDPDRYDNAKSRRNYAGTSPLTIASGKKHAVLARHVRNRRLYDAIDQWAFCAITASPGCREFYDQHRAAGDLHHQALRALGNRLVGYLHGCLRTRTHYDEHTAWAHRQPAQTQTAA

SEQ ID NO: 205259 - protein, 357 aa, unidentified
MNIKGQKIDFSKQELFIGIDVHKKSWTVTIRIQSTVLKTYSMRPSSKELKKHMEKHYPHGNYHSVYEAGFSGFWLHRELTELGFDNIIVSPSDIPTSSKERLTKTDKVDSRKLARELSNDALKGIYIPNIMEENLRGLSRQRYQQARKLARVKNQIKSYLNFCGCELPENSELQHWSKRFISHLQNIKFENEIGKEKLEFYLDELEIIKKRKLQLLNSLKKHLKEKSKYNLVELLLTVPGIGFITATTFLTEIIDIYRFSNSDKLASYLGLVPAIQSSGETEKVLGLSFQYNKYLRQLLVEASWIAVRNDPALTLVFNKYLVRMSKQKAIIRIARKLLNRIFYVLKNKHNYVHSVVA

SEQ ID NO: 205260 - protein, 426 aa, unidentified
MSIAPDPGLLPSAPIAPTAPIAPRVTAGVDWAKDDHAVCVVGDQGQVVDRFTVADDAAGLKRMAAWLLRAGVQEVGIERGDGPVVDTLLAAGLRLYVIPPSQVKNLRSRYGSAGNKDDRFDSSVLGDVVRTDARRLRPMVFDTEQTLALRCACRARKDLVTHRVAAANQLRAHLQIVFPGATTLFTDIDSPITLAFLDRFPTQEAADWLSPKRLATWLKSVHYSGGTDPAVLHARLLAAPRGKTGPRAATQAVTTPALVAVLRVLTAQIRALTTSISQQLDAHPDAEIFQSLPRSGTVRAARLLAEIGDARGRFPTPDSLTCLAGVAPSTRQSGKVKTVTFRWAADKQLRDALCDFAADSRHANPWAAALYNQARARGCDHPHAVRILARAWTHIIWRCWQDGAPYDPATHNTLQTILNQDQHTAA

SEQ ID NO: 205261 - protein, 412 aa, unidentified
MKDLLEISCGLDVHKEKIVACILTGPLGKPTRSEIREFSTLIPDMIALRNWIVSKNCHHVAMESTGIYWMPIYEILEDAFYGDITLLVVNARHMKNVPGKKTDMRDSEWISTLLRAGLLNGSFIPEKRIREFRDLNRYRKSVIRDITSQKNRIEKFLQSSGFRLSSFISDIFGASGRNIILHLIEHGQIDKTALDSCLKTKTRNRIDEILMSVNGTLSEHQKAFLRILMTHYDSLKKHLAEIETSLEEDMAPFALQVEQLNSIYGINTTASCAIIAEIGIDMKPFKTAEHICSWAGLCPGNNESAGKRKSTSVTKGNPYIKSMLCEIAWVIAGKRNTYLSAWYWRIKQKKGAKKAIVALARKLLVIIYTMLKQGTLFDESCFETRRKHCEQKQLSRYIRELEKHGYHVEAQS

SEQ ID NO: 205262 - protein, 447 aa, unidentified
MAQRKRPTTQSAISLTHPNAAGIDIGSAAHFVAVPPDRDDEPVREFASFTTDLHRLADWLDACNVDTVAMESTGVYWIPLYDLLESRGFTVLLVNARHVKNVSGRKSDVLDCQWLQQLMSFGLLHGAFRPAEQVCVLRSLSRQRTMLLRSQGRFVQHMQKALTQMNIQLANVISDVVGETGQKILRAIVAGERDGMALARLKNSRIHASEDEIAKSLQGSWRAEHLFALKQALDAFDFCGTQLAECDAQVQAQLQALHVREDEPAKGKKRGRARNAPKFDLRTQLFQMCGVDLTRIDGIDVTTALVVVSEVGADMGKFPSDKHFASWLGLCPGTKITGGKVMSGRTKRCANRAAQALRLAAAALRSSQSALGAYYRRMCARMDKPKAVTAAAHKLARLIYAMLTHGQEYTDRGQDYFEERYRQRVLHNLAHKAKTMGMQLIPVETTV

SEQ ID NO: 205263 - protein, 386 aa, unidentified
MQKLNDLSRSLTALEPNGTLIAVIEMSLSSWLVAGIVPGVERQPLKKLAVDESALLKLLHRWREEAEKAGRRIERIAVAFEAGRDGFWLARWLKARGIEVYVIHASSVAVSREHRRAKTDRLDTELLKRSFLGWLRGERDHCKMVEIPTMQDEDAKRPNREHDSLIGERSRIVNRMKAALVRLGIRGFNPKLKRATTRLDGLHTPEGEPIPPNALAELRRDMERRRLVNNQIRQIEEERLERIEQAPCDGAHVMVRLLARVMGVGIETADMLVHEVLSRNMRDRRAVARYAGLTGSPDESGRKRREKGLARSGNARVRRGMIQLAWRFLLHQKNSALTKWFRSRTENARGTRKPMIVALARKLLIALWRLMREGIVPDGVVLRPAQ

SEQ ID NO: 205264 - protein, 350 aa, unidentified
MDTNTPALASIGIDIGKEVFHIVGFGTNGKIAFRRKIKRLALVDTFKGLPSCVVGMEACLSAHFVSRALRQLGHQPRIIPSIYVKPFVKGQKNDYNDAEAIAEAALRSNLRTVREKTQDQLDLQALHRVRSRLVSRRTATINQIRAFLIEQGIAVRTGARALRNSLMAILENRQDEISPRMRGLIADLYEDWVGLDERIETIAGEIETIGEKEANCQRLMSVPGIGPLISTAVVAAIGTGEAFERGRDFGAWLGLVPRQYSTGGRSILGRISKRGSKYLRTLFIQAAKVILMRPHNWERFSFGAWLLNATPRLHRNKLATALANKLARIAWSILRNEKVFDVPRREAMAI

SEQ ID NO: 205265 - protein, 471 aa, unidentified
MAAGKGKADGTGVPGHGGDGAEVAEDSTQVVEYAAAIDVAKGSGMVCTRVPGSRADRRRQRTWRVEATFQEVTALMDHLRCEGIQRLVLESTSDYWRIWHYLAEAAGLEVWLVNARDVKHLPGRGKSDKADCVWLAKLNERGMLRRSFVPPQPVRDLRALTRTRARLAQDQARHQARVEKILEDALIKISVVISDLFGASGRRFLDALAAGERSPAALAALGDKRLRATRAELAEALTGRFRDIHAFEISVHLRLIDTINAEITALDEQIEQQLARVPRTGAVCTACGLAGGGHVPGCAGQDTGTLDLAGRLDEITGIGAVNGRAVIAELGTDPSQFPTPGHAAGWARLTPRTQQSGETAKPGRTGKGNRYLRGALGQAAMTAARTDTRLGAMYRRIARKRGKQKAIVAVSRIICEIAWILICDPSARYTELGPDYHHPLSAARQTGAKIREIERLNPGKKVILADVGAAA

SEQ ID NO: 205266 - protein, 352 aa, unidentified
MITIGVDAHKRVHVALALDEAGREISQWQGPNSSVGWRQMRLWAESTGITREWGIEGAWGYGRGLAQHLVAAGDTVYEVNPRWTALGRRSARRPGKTDRLDARAVALLVRQESSALPAVQPEDQTAVLDLLTTERDSALAEATRLRNQIHALLVQLDPEYHARLPTLKSRAGLAALETYASLGVDSLSLARAATVRRLAQRLRLALSQAEDLASQIKRAAAAFSVLTRLCGVNLLTAGALAGVLGPGRRFQTDAQLASYAGAAPLEASSAGLVRHRLNRGGNRRLNAILYRIVLTQAHHSEEARAYLDRRVAQGKTKREAMRALKRYIARAIWRLWQECCSIGFAPRAALVA

SEQ ID NO: 205267 - protein, 351 aa, unidentified
MLIIGCDFHTRYQQIAMANDETGELLLERRLDHESGEARAFYRSLPEPVRVGIEATGPIHWFERLLAELGHELWIGDSAKIRASEVRKQKTDERDAALILDLLLAKRFPRIWVPTPAERDLRQLLWHRHKLVSMRTMLGNQLQALAMSQGLCRKKKLFTRKGRVELVSLGLGPWASRRRAELLKLLDQLDPPIAELDCAVLEEAKRREDAVRLMTHPGIGPVTALAFVLAIGPVTRFHRSKKIASYLGLNPSEESSGGRRRLGAISKQGNTMVRWLLIETVHHAVRQDPELRQDYQRLKFRRGHAVARVAIARKLAVRMYWMLRSGADYAQLVRRQSSPGATLVDASSSLA

SEQ ID NO: 205268 - protein, 445 aa, unidentified
MKTKVHQLDTILPGFAALDLGATSIHAAAAGVPVAVFGTTTAELRRLSAWLRERGVERVAFEATGVYWIPVHDQLQAAGFEVLLFHGAHARNLPGKKSDFSDCQWHGVLFSHGLLHACFIPPEEVRALRTYARLREDHLDQAAMCVAHMQKALDCMNVRLHTVISQLHGVSGLRVIEAILAGERDPKTLTALCDAQILKRSRREVEASLEGHWQEQHLFALEQALEAYRFHHRQIAGCDARIEAQLQRLNAFRPAVEPVEKKKIKKVRHNAPAIEGLHSYLHQLCLGRDASVLPGLTPLSWMKLTAELGPDLSAWPNEKAFESWLGLAPNRHQSGQRRRRVPRRHTRAGQIFREAAMSIARSKHLALGACYRRIRGRRGEAVAMVAIARKVAGLYYLAMTRGLDYVEQGLAAYELRCRQQEEHRLNRFAARLGYRLVPATPSDSN

SEQ ID NO: 205269 - protein, 443 aa, unidentified
MSKFKKTFDLTYSNAAGIDIGASSHFVAVPADRDDQPVREFASFTEDLHALADWLSICGIDTVAMESTGVYWIPLFELLESRHFTVFLVNSRHVKNVPGRKSDVLDCQWLQQLMSFGLLSGAFRPQGDYAALRVLARLREMLLRCQATHIQHIQKAMLLMNILLTEVLSDVMGETGQKIIRAILAGERDGETLAKYRNSHVRASEEDIAKALQGSWRDEHLFSLKVAVKSYDFYAEQLVACDQEIEQHMKDLARYDLTPEKPKRRGGKSRNAPKFDARLLLMQMCGVDLTRIDGIDVTTAFKVLSEIGADMSKFKSAKHFTSWLGLCPGTKISGGKVLSAATKRTANKASQALKMAAVNLRNSQSALGAYYRRLCGRMDKGKAVTACAHKLARLIYAMLTKGEEYVDQGQTYYEEKYRERVLKNLTKRAEALGFQLTPAPEMA

SEQ ID NO: 205270 - protein, 348 aa, unidentified
MMIIGVDYHPSSQTIAFFVEETGECGEQELNHSDGQAEKFYRDLKQRGIRVRVGMEATGYSRWFERLLAELGFELWIGDPAQIKAKRVKKQKFDREDARLLLRLMREDNFPQIWVPSPENRDLRQLLWHRHRLVQMRTRIMNQLQALAMNEGYRWEKKLFSKQGRAQLEKLSLAPWASRRRQELLDRMNPTIEELTAAVEREARKRPEVLRLMTHPGVGPLTALAYVLIIGTWERFPCGKQIGNYVGMIPCEGSSAGKQRLGHISKQGSSLLRFLLVEAAQAAARINPEWRRRYMHLAMRRHRNIAMIAMRRRMAVRLYWMWRNGCEYSPSLEFGSYVGQLGTGHGVK

SEQ ID NO: 205271 - protein, 427 aa, unidentified
MTDLTKIKAYASWMAIDIAKDFNAVMVETQDGTIRKFKMANSVSDHNRLIDLIKTLPQPCRIGFEATGNYHRTLGYRLSAEGFDTCLISSVAGARYREVMFNSWDKNDPKDAHVLLQLLKQGITQRYVDPLIAGHHDLQELSKTYYNVTLSRTRLQHSILTHYLPLYFPEMGKWWHSTRADWWINYLLHFPVPGSVTRYSLEEYCEVASPIIGRKVNKQAKLVELYETAKASMGLPITEESLACQTFKLQLRRYQDLNQQREQLETLAKHYLADNSDYAVLKTVPGIGPINALTILAEGGDLRRFGHHRQFLKYCGFDLAKNQSGTYCGQEKISKRGNARLRMALWMAAVIAIRQPENSFHNKFRRYIQSAPQNADLRRKAMTAVAAKMARVIYGLIKSNRPYQGYFEALPSGSIPLFRAVEANRTS

SEQ ID NO: 205272 - protein, 436 aa, unidentified
MEPNAAGVDIGATEIYIAVPPDRDMQPVRRFAAFTEDLKAAADWLERCRIETVAMESTGVYWIPLFQILEARGMKVCLVNARHVKNVPGRKTDVSDCQWLQYLHAVGLLRASFRPSGQVCAVRSLMRYRESLVGMAAVHLQHMQKALDQMNLQLHHVISDLSGTTGMAILDAILGGERNPLKLAQLRDPRIKASPETIAKSLVGDYRREHLFTLRQSVTAYRSYQQLLACCDVEIEQMLGEFSDGAGPDTPVLADPKDRHRPRRNEMKFDLRGHLYRIFGVDLTEVPGLNALTAHTLLTEVGPDLSAFPNVGAFASWMGLCPDNRVSGGKVLSSRTRKVNNRVARALRMAAQSLFRSQSWLGQYYRRMRAKLGAPKAITASAHKLARIVFHMLTNRHAYDETVFAQQEIQNQHRLQQKLLQQAKKYGFQLIAITQN

SEQ ID NO: 205273 - protein, 375 aa, unidentified
MTMMQHRQIRYIGLDVHKATISVAIAEGAGTPTSYGRVPNDPAAIRTLMTRLGDPQAALHVAYEAGPTGYALHRQLAKLGIECMVVAPSLIPKRPGDKVKTDRRDALKLARLLRSGDLTPVWVPDEAHEALRSLVRARADAKADQLRAKHRLSKLLLRQGCWPPIGVRNWSQRYFTWLRQLTFKHLPDQVVFADYLTEVTAAGERIKRLETALHQCAQSSSQVALIRGLQAFRGIGFLGAVTLVAEAGDLRRFRTAPQFMAYVGVVPTESSSGGKQQRGSITKTGNRLLRHVLGEAAHHARHAPRVSSALKRRQADQPRELVELAWRAQVRLHTRYRHLSTRIGALKALTAIARELAGFIWAAGDVLQEEVLTTA

SEQ ID NO: 205274 - protein, 322 aa, unidentified
MRYIGIDVSKATFVVAYSSDKGGEIRTFNNTTTGIKQFIGALPKDSSIHCVMEATGNYSAMLLYLLNVAGIAVSMENPLKIKNFARAMLSTVKTDKIDARLIALYGEKMNPQPFKIQGEAILRLRQKRTVIRQLTKQITAMSNLRGSLACLPVPDKGATHTVDETIEFLEKRRDRLQSELTDLVEVEFSRQLALLTTIKGIGITLATALIITTGGFTYFQNAKQVSRYLGICPTYEQSGTSVNIRGHINRNGDAYTRGLLYVAAWTASRFNTKCGETYTRLRQNGKPGKLAMIAVANKLVRQAFAVVTHDKEYVDGFVSNRP

SEQ ID NO: 205275 - protein, 309 aa, unidentified
MDVIVGIDVSKDRLDVHVLPSAASFAVGNDDAGLDELVVRLRAVKADIVAVEATGGYEMLVVAGLSSAGLAVVVVNPAQVRSYANALGKRAKTDPIDAAVIAAFVAATKPDIRPLRDAQSEAFSAIVSRRRQIVQMITAEENRARMALTKETQKSIRRLLAALRRELASLDDELDGRIRASPLWRVREALLTSVPGVGPTTARTLIAEMPELGTLDRRQIASLAGIAPFTRQSGKWRGRSFIGGGRGKVRAVLFMAALVASRHNPVLKAFRDRLVTAGKPKILAIVATMRKLLTILNAIIRDGRPWQSA

SEQ ID NO: 205276 - protein, 357 aa, unidentified
MKQQKNNKKISFKGKDFFIGIDVHKKTWYISIRHNGLLIKSFAMDPIPEILVNFLNKNYPCANFFVAYETGRFGFWIYRKFKKLGINCMVVNPADIPSTHKEKDKKSDKIDSIKLARELENNNLKPIYVPPPEAQHLRSLVRLYLNYTKNITRTKNQIKSFLDYNGITLPKHTSYWSNNFINHLYSITIDNGPGDKTLHSLLNILCFFRKEQNDILKQIRKFINNSYFKEIFYLLKTVPGIGSKIAFIILSEIIDMKRFKNFDQLKSYVGLTPSVYSSGDTHYEYGLTYRKNSRLKYALIEASWVAIRKDPALLESYNKLITRMKKQQAIIRIAKKLLSRIRHVWLNKQPYVTGIVE

SEQ ID NO: 205277 - protein, 510 aa, unidentified
MPVEKRGLGLATQSLVTHSDPVQENAYHSTTPCPYVLSTKQTEGISMKGDKRRRQIKQRRISSHLEQINLFAAGIDIGSQSHYVAVPKELDSEPVREFSCFTGDLNRMADWLVEIGIQTVAMESTGVYWIPAFEILEARGLVVLLVNARHVKNVPGRKSDVQDCQWLQQLHTYGLLEGAFRPPEETVALRTYMRQREMLVQRASDHIRHMQKALRQMNLLLDNVVSDIDGVTGMKIIRAILAGERDPAVLAQFRDKRCKQDKKTIAASLEGHYREEHLFTLKQSVELYDVYQQQIASCDATIQAQLDRMESRGDKDDLPPTKKRKTKSSLDFDVRGELYRMTGADLTRIDGLNETSVLKILAETGVDITPWPTEKHFASWLGLSPGNKITGGKILTSKTKPSANRAAAAFRMAAFGLFNSKSALGAYYRRQRARLGSPKAITATAHKLARIFYSMLKNGSEYVDQGQDYYEKQYRDRATKNLKKRAAFLGFDLVPNKEEENMPDAVLSTT

SEQ ID NO: 205278 - protein, 353 aa, unidentified
MMLIGVDPHKSTHTATAVDPATNADCGSVRIEASYAGYRKLLAWARQWAERSWAVENAEGLGHHLAMWLVAMDEVVVDVAPAATARVRQLSRGGRRKNDRIDAAAAASVAALQGDARPVHAETHANALGLLDERRKNLSTNRTRSVNQLHALLRELLPGGVLTDLTAPKAAMVLRGLRPVTATDRVRKSLARDLVADIKRYDAQLAENAAAMDELLDAHGTTLREIPGIGPVMAARLIGRTRRATRFATAPAYANYTGTAPVEIASADSTRHRLSRYGDRELNSALHTIAMIQIRMRGSAGRIYYDKKVAEGKSPKEAKRCLKRRLAGLCWRTMIRDERRTVATSLANSAEAA

SEQ ID NO: 205279 - protein, 324 aa, unidentified
MLPRHGVAFKRGATLLNRQTVPPPDVHVLPNEKTLRVSNDSVGIRKLKRWIVQFDPALVVVEATGKWHREVQRSLVASGIKVAVVDPYRVRMFAKAQGILAKTDRLDARVLALFGLLMSPDVRLPASAAVEELQELVIARASTVEEETSLKNQFASSTCRFLKQHLKRRIARLTNDIQALGREILKSIRADEGLARRYEILISVPSFGFVVAATLTACLPELGACNTKAIAMLAGLAPIADESGERNGRRVVWGGRPALRRILYLAALTAKRLNPSSKALYERLIAKGKPPKAALIAVARKLVILANALISQNRIWQHDAPKHA

SEQ ID NO: 205280 - protein, 357 aa, unidentified
MNNVAGIDVSKGKSMVSVLRPFGEVVAKPFSIGHTGSELKELADYLKSLDGETRVVMEHTGRYYEPVARFLHDEGVFVSAVNPKLIKDYGNNTLRKVKTDKADSRKIARYGIDNWAELRQHTPMDTIRMQLKTLNRQQSLYTKTKTMMKNNLIALLDQTYPGVNALFDSPVREDGSQKWVDFATTFWHVDCVRNMSLTAFAERYRKWCKRHGYNFSQSKAVEVHAGAQDLIAMLPRDALTKTMVRQAIDALNAISASMERLKAEMQALAAQLPEYPVVMAMHGVGDSLGPQLMAELGDVTRFTHRNAITAFAGVDPGADQSGTHEAKSTRVSKSGAPELRRAFIPGYGLPTENTAPG

SEQ ID NO: 205281 - protein, 331 aa, unidentified
MEKYKIFVGIDISKSWIDVAVLNDSLAAHRNYGNNKKDFKLMLSWLKTFARPNEMLLCMENTGIYTMPLWEYLAAHKIPFVVENALQIKLSMGIRRGKSDKADAKLIARYIKLHHTECRLYKVPAQIITRLKVLFGYRERLLKIKHQLWVSNKEIRGFMSAELCKEMSHDSDLLVNNIGNKIDKAEKLILSIIMSDDEAKRIYQLISRVPGIGLITASYLIIVTQNFTIIENSRKLSRYGGMSPEKNESGIIKRKAKVSGIGNKKLKSLLSNCVGTNLKYDPETKEYYNRKILEGKPEGVVINNLKNKILHRVYAVVNRGTYYVNTRKYAA

SEQ ID NO: 205282 - protein, 484 aa, unidentified
MAKRKESTYERLRKGQPLNRREKREVAQRLNAADPGWEVINRHAAGIDIGNESHHVAVWADRDEQPVREFGSWTGDLERMAEWLKSCGVESVVMQSTGVYWVAVYDVVQRHGLQVHLVDARGTKNLPGRKSDVQECQWLLKLHTYGLLRSCFLPPEAIRRLRTVWRLRDQQVKEAGRAVQHMQKALTEMNVQLHNVISDLAGVTGQAIVRALLKGERDPLQLAGLRDGRIQAREEELVASLRGNWKDDALFELQQAVDAYDFHQKQITQCDERLQEYLAVLPSREVAAPEAPGEATEASGRLRRRTSKPRKPKGNQPAFALKPELERILGVDPTTIAGIDVMTVQTVLAEVGADLSAWKTERHWTSWLNLAPKRDVSGGRVIRHVREHRTNRVGNAFRMAAQSLLRSESYLGARLRYLRAKLGAIKAVKAMARHLACLFYRLLTKGQAWVDRGAAEFERRRQEREFAMLQRKARDFGMTLVPAA

SEQ ID NO: 205283 - protein, 412 aa, unidentified
MKDLLEISCGLDVHKEKIVACILTGPLGKPTHSEIREFTTLIPDMLALRDWIISENCHHIAMESTGIYWIPIYEILEDAFSGDITLLVVNARHMKNVPGKKTDIRDSEWISTLLRAGLLNASFIPEKRIREFRDLNRYRKSIIRDITSQKNRVEKFLQSSGFRLSSFISDIFGASGRNIILHLMEHGQIDKMSLDSYLKTKTRKRIDEILMSVNGTLSEHQKSFLKILMCHYDSMKEHLIEIETHLQEDMLPFALQIEQLNTIYGISTTASCAIIAEIGTDMKPFKTAEHICSWAGLCPGNNESAGKRKSTSITKGNPYIKSMLCEIAWVIAGKRNTYLSAWYWRIKQKKGARKAIVALARKLLVIIYTMLKQGTNFDENCFEVRRKNCEQKQLSRYIRELEKHGYTVEAQV

SEQ ID NO: 205284 - protein, 354 aa, unidentified
MSQTPNTAIAVIGIDIGKNSFHVVGHDARGAIVLRQKWSRGQVEARLANIPPCLIGMEACVGAHHLSRKLASLGHDARLMPAKYVRPYSKGQKNDFNDAEAIAEAVQRPTMKFVATKTAEQLDLQALHRVRERLVSQRTGIINQIRAFMLERGIAVRQGIGFLRTELPTILATRTDALSPRMLRVIEELAGDWRRLDQRIDGLSGEIEALARQDQACSRLMTVPGIGPIISSAMVAAIGTGDVFSKGRDFGAWLGLVPKQISTGDRTILGKISRRGNRYLRVLFVQAAWVVLVRIKNWERYGLKSWIEAAKRRLHHNVLAIALANKLARIAWAVLAKGRAFELTRTDDAGVQPG

SEQ ID NO: 205285 - protein, 265 aa, unidentified
MAIIGMDIHRAFAEVVALEGKSRRRLGRIAMRCDRLAAFAAGLTKEDIVVVEATGNATAVAEVLAPHDGRVVIANPKQVRVIAHAKIKTDKIDAAVLAELYASGFLPEVWIPDKDTLALRRQVTRRNQIVRQRTRLKNIVQSILHAHLIPAYAPGNMFGRKGRAWLAAQTLPEDERMAIERHVREIDRLGEDLKVSRFGSPQKLVSYLGLNPSVRQSGSGPAYHGRISKQGPGRARGLLVEAAWAAARSPGPLRAFFLRIRGRRG

SEQ ID NO: 205286 - protein, 350 aa, unidentified
MNTIHTTLEHDPVCVGLDVSRDTLDACLLHPNRLHPNRLHPNRLPLNKQFLNDEAGFALLLQWTHAQAPDKSTHFCLEATGSYSTGVALYLAQHEQRVSLVNPARIRFFGLCQRQGNKTDKADALLIARFCQREQPALWRAAAPEVQQLLALVRPLHALGELATQEQNRLAAPAQPEEVLDSLRRTLAFLHEEQKSVQRLIGAHIKQHEQLSCDAKLLQSIPGIGEKTAWDVLAELPDITLFDSAQSVAAYAGLAPREHRSGSSVRKQTRLSKQGNSRLRRAFYFPAVTGLTWNPLIKAFYERLRENGKGKMVALAACMRKMLMIAYGVLKHQKPFDPAHQGQPQLNPSS

SEQ ID NO: 205287 - protein, 319 aa, unidentified
MNTVSSEQVIGIDVSRDWLDIYCLPDRKRLRLPNTSEGHAHVVSLARRRGALVCFEATGGQEWRLWASLDAARIVARQLPPAQVKAFAASRGTRAKTDRIDAELIARFMVFRPEAGRRHPAGKLRAIRALTSKRAQLVEMRKRLLVQIKAHEKLATSGMFTDMDVELKALLDTRISELEERIEQAVAADGTLAETARILRSIPEVGPVASTMLIAEMPELGTISGEQAAALTGFAPIAHDSGALRGKRTIAGGRRALRHVLFQAALVAANYNPTLKAFAQRLRDAGKPHKVIITAVARKLVNIANALCKARKPWGLQGA

SEQ ID NO: 205288 - protein, 318 aa, unidentified
MNTNTLQNINVGVDTGKSQLDIYVRPLDIYFTVPNTDKGISDAIKIIKKHKPQRVVIEATGRLEMPFILACDKAKLPYVVANPLRIKRFAEAIGQRAKNDRLDAELIAHYAERVQPELTKLKSENIRLMSDLVTRRNQLLTIQTMERNRLQILPKNISSTITPILTALKNQLEKVEAKIEKLIESCPEYQAKNTILQSMPGVGKILAASLISNVSELGFITNKQASSLIGVAPITRESGRFKGKRMIKGGRPQVRTVMYMAMMSAIQCNPVFKATYERLLAAGKPKKVAIVACMRKMVVTLNSMLRDGAIWDKDSVKN

SEQ ID NO: 205289 - protein, 364 aa, unidentified
MLIIGCDYHPGFQQIACVDTDTGELSERRLEHREPTEQFYRELKQENIAVRVGMESSGHSRWFERLLHELGFELWIGDPAEIRTKRVRKQKTDRQDAQLLLRLMLENRFPRIWVPDAENRDLRQLLWHRHRMVQMRTRVMNQLHVVPLNEGLRRKKALWRLAGRKELESIALAPWASRRRQDLLDLLDQLTPKIQELTRALEEEVEKRPVTRLLRTHPGVGPLTALAYELVIGTPERFHCGKQLASYVGLVPEEKSSGDRRRLGHISKQGNVLLRFLLVEAAQVTVRSQPEWRNKFFHLAMRRGRKIAKVAMARKLAVHLYWMWRQGCDYGQTQKLGSHAGEPGNPDGVQSNTDVMIGHPAPSK

SEQ ID NO: 205290 - protein, 413 aa, unidentified
MRVHHTVCCGIDVHKKSVTACLMWGPADQEPQCEIRRFGTMTSQLKALGEWLKQAHCEMAAMESRGAYWKPVWNVLEGEVPLILANAKHVRALPGEKSDNKDGKRLASFVRHGLIRASFVPPRDIRELRDLTRYRTKLLANGSAERNRIQKVLEDANIKLGSVLSDVFGVSGQKMLHALVDKPALNVEEVAALAHWRLQPKIEQLKLALEGRITAHHRFMVDLSMGHMQYIEQQILRLDEEIARHIAPYQQQFELLQTIPGIGETASASILSEIGPDMSPFDDDGKLASWSGICPGNNESAGKKFNTNTRKGNRHFVSTMVECAWASTRKKGSHFKARYYRVRARRGSQRAILAVGHGLLRTVFVVLKTGKPYQEPIRPLLTEKQRHRKAERLSRELGQLGFAVTLKPKTAQP

SEQ ID NO: 205291 - protein, 458 aa, unidentified
MSSSNTHPHPRVAEALPHLNPDAAGLDIGAEEIWACVPADREAQPVRRFGTFTPDLHALADWLAQCGVKTVAMESTGVYWIPIYEELETRGFEVYLVNARHLKTVPGRKSDVQDCQWIQRLHSYGLLTASFRPAEEMRVLRAYLRQRALLVEHRAAHIQHMQKALQQMNVQLPQVVSDITGHTGLQIIRAIVAGERDPHVLAQLRHGRCHASQAEIATALSGQYRPEHVFALKQALALYDCYTQQVQDCDAYIEQHYAAIRPTYDDTTPPPPLGPAPKPTAHAKNAPSFDVRGCLYRILGIDLTAVHGLEASTAQTLLSEIGTDMSPWPTEKHFASWLGLAPHNDISGGKVLRSHPLKVRNRAAQALRLAAQALGRTQTALGAYYRRRRARQGPKAAVTATAHKLARIVYHLLKHRDPYHPLSPEAYEHHLRQRELALLKRKAARLGFTLLPRPATAA

SEQ ID NO: 205292 - protein, 342 aa, unidentified
MGQVTTIGLDIAKSIFQVHGVDPIGDVVVRRRLTRARVVPFFEKLAPCLVGIEACATSHHWARELGKLGHDVRLMPPSYVKPYVKRQKNDTADAEAICEAVTRPTMRFVEVKTPEQQSIMVLHGTRTMLMRQRIQLSNVIRGHMAEFGVVAPVGREGLLTLIDTLHEETDDRVPAEARYCLQMLAAQLRLVNAQILENDRRIRANARATDVGRRLMGVPGIGPVLASAFVATVPDPHAFRSGRSLAAWIGLVPRQNSSGGKERLGGITKQGNRYLRQLLFVGAMAVIRYAERHGTRRPWLVQLLARRTTKVAAAALANKTARMVWAIMTSGQSYREPELRAA

SEQ ID NO: 205293 - protein, 377 aa, unidentified
MSKVLFVGLDVHAETIAVAVAEQGGEVRSLGVFPNRLESVRKMVHKLGPEKDLRVCYEAGPTGYVLYWQLTQLGVACEVIAPSLVPTKAGDRVKTDRRDAEKLARCHRAGELTAVWVPNAAQEALRDLVRAREAAKRDQLKARHRLGKFLLRHGRQRPDGVKAWTKKHREWIKSHVRFEEAALEATLADYVEEVDHVAARILKLEKAIDEAIQQAPAEIRAVIEALQALRGVAQTTAASIVSELGSLSRFPTAPQLMGYSGLVASEHTTGNRVQRGGLTKTGNGHLRRVVVEAAWAYQHRPNVIGYLLRRQKNLAISDEVKAIAWKAQQRLHKRYKAMAARGKNKNQIVAALGRELLGFIWAIGVRTEQQQRLVKAA

SEQ ID NO: 205294 - protein, 427 aa, unidentified
MPYQIAGIDVHKKMLAVVVADVEVEGDYHFERLKVGTSPAQLRALADWLVEREVEEVVMESTAQYWRPVWEALEPYWRPVRRTRAGASPVSGTLHLAQAQSNRGAGGRKRDFPDAERLVKRLVAQELTLSFVPDAEQRLWRTVMRRKYQVTRNRVQLHNRLESLLEEAHIKLSSLVSDLLGTSARRMLQALADGETNPATLASLADTRLRATAAQLSDAFGACTTLHPVYRRLLKLTLDELRLIEEHLGQLDQQMADLLAEHHEAVQRLAEVPGLGVDSAQQIIAEVGATAATFPSPKHLASWMGACPGNEESAGVNYSHRCPKGNRQMRRVLNQAANAAVKAKGTIFAIVYRRLVPRLGHAQAIGAIAHRLCRLIWKILHQSIRYEERGPAVSEEAKKVRARKMIRELRSLGYHVELLSAPSGSPA

SEQ ID NO: 205295 - protein, 343 aa, unidentified
MKPTTIAVDLAKNVFEIAVSHRPGRVAKRHRLSRTRLLPFFAQQPQATVLLEACASAHHWSRQLHELGHKVVLLPARHVRPYRCGNKTDRADAKALLEAFRNDEIRPVPVKSVEQQTLAALHRLRSGWLATRTARLNAVRGILRELGLTIPAGARHVVPRLRTLLEDADSPLPQALRPALAEAGNDIRELEVRIHDLERQLKALARQIPAVAHLRTIPGIGLLTATALVAFVGDVRRFPSARHFASYLGLTPREHSSGNIRRLGRISKRGDSYLRMLLIHGARSVLWAAKTHKQPDRLRRWALHLEVTRGHNKAAVALANKLARFAWVVLNEKRDFQTTRRAA

SEQ ID NO: 205296 - protein, 343 aa, unidentified
MEHYAGIDVSLERSSVCVVDATGRIVREAKVASEPEALVDFFRRLGLPLARVGLEAGPLSQWLHAGLAGAGFEAVLLETRQVKAALSAMIVKTDRKDARGIAQLLRMGWYRPVHRKSPPAQEVRALLVGRKLLQGKLLDVELSIRGLLRGFGLKLGEVSKGRFAVRVRELVAGQPTLERVIGPMLRAREALRSEYLALHRAVLAIVREDAVCRRLMSVPGVGALVALTFASAVDDPARFRRSRDVGAHFGLTPKRYQSGETDVTGGISKVGDAMVRAALYEAANVMLTRAGRFSTLKRWALEVAKRRGARRAKVALARKLATVLHRLWADGSEFRFGKEAAAA

SEQ ID NO: 205297 - protein, 368 aa, unidentified
MNTVKFIGMDVHKKTITIAIIDEGRQKQSRIYGTIANDLDALDKFCRKMVSTSIRLYFVYEAGPCGYGIYRDLTDKGFDCMVAAPSMIPRKSGDRIKNDRRDATMLARLHRAGELTAVYVPDARDEAMRDLSRAREDAVMVAKKAKQRLKAFLLRNRVVFAGRSQWSKAYFNWLADIAMPYPAQQVALQEYIDAVHESLNRVGRLTDQIRQLVPAWRLAPIVSALQAARGISLVVAVTMLAELGDLSRFDKPSQLMAHLGLVPSEHSSGDSIKRGGITKTGNGHARRVLVEAAWSYRMQARVSRLLLKRQQGLPDQVCQIAWKAQLRLCARYRRLVAKGKVKQKVVTAIARELSAFLWAMAKQVQPLA

SEQ ID NO: 205298 - protein, 411 aa, unidentified
MDVVYTRCCGLDVHKDSLVACIVTPNDQGQPAKTIRTFGTMTADILAFGDWLAEHGVTHLAMESTGVYWKPVWNLLEGQLELLLVNARHVKAVPGRKTDVADCEWLADLLRHGLLRGSFVPDRAQRELRELTRYRTALVRERAREANRIQKVLEGANIKLGSVATDILGVSGRAILAELVAGTTDTAAMAELARAQLRNKRAELEQALAGRFDAHQRFLVAHQLGHVALLDESIEALSAQIAERLQPVDATIERLDAITGIGRWHAENLLAELGTDMGHFPTAGQCASWAKLCPGNNESAGKRKSGKTGQGNRWLRGTLIEAAKSAGRTKDGYLAAQYRRLRGRHGPNPATVAVAHSILVIVYSMLKHGTRFEDLGSDYFDRLHQDSLRRRLVSRLQQLGYRVSLEIDDAA

SEQ ID NO: 205299 - protein, 461 aa, unidentified
MRQKKPTGQPKRSVERKVDWKALAIVHPDAAGIDVGSSEHWVAISPDRDAEPVRRFRCFTADLREMGRWLLEKGVRSVAMQSTGVYWMPVFEVLERQGLEVYLVNAQHTKNVPGRKSDVQECQWLLKLHAFGLLNNSFQPSDEIRIARTLWRHRGNLVAEASSVIQRMQKVLTEMNVQLGDVLSDLSGVSGMNIIQAILKGERDPWQLAALVMPGVKATAEDIAKSLEGNWREELLFVLRQHVELYQIYQKKIQDCDLQLREHLQLLGSKLDPQTQPLGPRPKGKKSSQNAPAFDLRSELYRITGIDWSQVNGIDVLTAQTVIAEAGADLSAFPSEKQFTSWLGLCPTNQQSGKKILNRRTRKVVNRATVAFRNAASTLLRSQSYLGAQYRRLRTRLGAPKAITAMARKLACLFYRLIKHGQPYVDKGTEYYEARYREQQIRSLTKRAQKLGLQLVIPKPA

SEQ ID NO: 205300 - protein, 343 aa, unidentified
MEYGAIDLHMRRSEIRIETEDGMLVLARRIDTTRHAFEQVYGGRPRMRILLESSTESEWVAQCLEALGHEVIVADPNYLPMYGQRSRRVKTDKRDVAALTTACRQGTYRRASRVSAAQRTRRQELRVRRHLVQVRTRTISLIRSLVRQDGLRVPRGASEGMVARLDRMSLPPALQAVIAPLKEVTTQIQTTLDRMEERIEQISETDVAAQRLMTAPGVGPIVALTYLAVLDTPDRFGGDARRASAFLGLVPSEDSSAERQHKGRITKTGPPELRSLLIQASWVIWRGRSADGAALRTWAHALAARRGRRIAIVALARRLSRILFAMWRDETDFTRRAQTAVAA

SEQ ID NO: 205301 - protein, 315 aa, unidentified
MTQAERTVGIDCGKHFLDAAVFPSGERIHVPTTAAGIETLREWIVSHQVQVVGMEASGGYERPIRDVSCAAGLTVHVFNPARVRYFAKAKGRLAKNDRIDARLIAEFTATLGQDLEPATPDPAREELAGLVRARRRMVDTRCDLCKAREAAPEAAKTAFSDVIDTLATAIKALEAVIKERREANEGLDRKITDLCSAPGIGTVTATTLAACVPELGHTSNTKIAALLGVAPFDADSGDHHGLRRIMGGRAEARHALYMAALVAATHVPGVIADFYANLVARGKPRKVALTACMRKLIVRLNVMLRKGQTWQANHV

SEQ ID NO: 205302 - protein, 348 aa, unidentified
MTIVAETYDYVIGIDTHARTHTYAIINTRTGSREACQAFPTSPAGMNRTLAWITKRTTGTLLAAVEGTRSYGATITHALTMAGFPVVEVKPPRRQARARVGKTDEIDATAAAMGILYPDTERLLTPRAEGTRSALNVLVASRERIDAERTRNRNALTALAREIDLGVDARKALTDMQVKQISAWREHPTDSVAQRYARAEASRLATAVLDADKLLAANKTQMAELDEQMAPGLAAEFGYGPVTVAWILIAYSHTGRVHSEAAFASMAGVAPLQVSSGNTVRHRLNRHGDRMLNQAVDVIAKVRMQFDPQTKDYVEKRKAEGLSYREIKRVLKRYIVRKVFRRLRVLVP

SEQ ID NO: 205303 - protein, 416 aa, unidentified
MSGKREIACGVDVHNRFIMATILSSDGLKLQGRFETSLEDLLKFKSWLKENCCHKVALESTGNYWLPIYHILEGSANFILANAYQIKHIPGRKTDSLDSEWIAELCLKNLITPSRIFTKDHRELRSLTRARESLIKVRTKIKNRVTHELEAACIKLSSVIADVFGKSGRHILDGLLNGIDLEKILESIPSGRVRKNKEEIRGIIQANLSSSQIFLLRSHLNTIDAVTKQITEIDAKISDQISMRNEDMRIALSMPGMGFISASTILAEIGDFRDFSSANKLAAYCGLVPSVYQSAGKLINGHITKHGSPHVRRIIIEVAHAIILTKKLSKLKKFFLRVKARRGAKIGIVALARKVLCILYHLLVSRELYQDDLLNKPRCIKKPRMHPIAAMELDEMIRTIIRAGYEVRKNECIGGG

SEQ ID NO: 205304 - protein, 416 aa, unidentified
MEVLHPSRVGLDVHKDSVVACVRLAANGTVRTEVRTFDTTTPGLLALSEWLAGQGCTHVAMEATGVYWKPVWHILSDGDFTLILANAAHVKNVPGRKTDVADAQWLAELLAHGLIRASFVPEAPTQEMRALLRTRKQLVREAASHIQRIQKTLEDANIKLASVLTDVMGASGRSILQALIDGERDPEALLALVHRRVKAPPEKLLAALTGRVTDRHRFLLRLHMRQIDALDESITDIDREVNRELDPFRDAVRLLRSIPGVSDLTAQVIVSEIGIDMSRFPTAGHLVSWAGLCPRNDESAGKRRSNRLRKAAPWLKATLVQCAWAATRKKASYLRVQFQRLRQRRGPKKAVCAVAASILTAIYHMLRDGTFYRDLGPDHFQTVSSQTKAEQLARQIERLGFTCRIAPAPEGRVVSV

SEQ ID NO: 205305 - protein, 369 aa, unidentified
MELGNDKRKEGTAAMKDTANQYVALDVHQATLVVSVRDENGSIRMHATVPTEQKAIVDLLRGLRGRIHVAFEEGTQSQWLHDVIKPNAERVVVCNLRGQSQTTNKSDRIDADRLSELLRIGSLKAVYHGASELTTLKELMRSYVNLVEDSTRVMLRIKALFRARAIKTPGTSVYCAAQRKEWLAKLENRGARARAVGLYEELDVLQALRPKAKATMIAEARRQPGWKVLLSIPFLGPIRVSTILAIVATPWRFRTKRQLWSYVGLAVVTRSSADDEFVDGKLRRRKRAPLTRGLNRNHNPRLKEVFKGAANAAACTEGPLKDKYEKSVAGGVREEMARLTLARTITSIALRLWKKGELWDPSKVTMQGT

SEQ ID NO: 205306 - protein, 350 aa, unidentified
MDKELYIGVDVSKQTLDLAYYDGEIIDWKKAHIKVSNNNAGFKKIGSWVAKVSKGVDIVLFCMEYTGLYTQNFRLWLEEKHYIYRMVEPRKMHRFEPDLDDGLRSLDRIKTDELDSFRIAIYCEQNHRKILRNPSKLPPPVYFKLKRLLAERKQTVKQSVLYKQQLHDICAYDTDLSVERKNGQLKTLNDALKGIDNEIDMYIKEDADISKNFSLLTSIPGIGRVVALETIVLTENFMAIDNPRKYACYIGVAPFKKESGTSVRKGSSVSKKGFKQAKADLSIACLVCMQHIPNIRDYWERKRKEKCSGIVFNAIKFKIILRMFAVIKRGTPYVETDNYRNGKNKQPGVN

SEQ ID NO: 205307 - protein, 318 aa, unidentified
MSHGYDKYVGIDVAKESLDVSGLTADSPSQFENTAAGRAKLLSLLPQAGACLLVAEATGGYERELVAEVVAAGHHIAVVNPRQVRDFAKAIGLLAKTDRIDAGVIARFGEATRPTPQGFSEQQEQLRELIVRRRQLVDHRTAEKNRCEQAHSTLVRNSVRKSIEGIDKDLKRIDRAIIQLVESNDDWRGRYERLKSVPGVGAQTAATLMAELPELGRLNRQQVAALVGVAPFNRDSGQFRGRRTIWGGRATVRSGLYMAALSAKKHNPVIRAFAARLLAKGKPPKVVLTACMRKLLVILNAMLRSDEMWGPRLASLTP

SEQ ID NO: 205308 - protein, 411 aa, unidentified
MQVIYERCCGLDVHKRTITACRLKWSGREWQREVRQFGTMTKDLLGLADWLAQEGCTHVAMESTGVYWKPVYNILEGQFELLVVNAQHLKAVPGRKTDVRDAEWIAELLAHGLLRGSFVPPVPIRELRELTRYRSSLVRDRARTINRLQKVLEACNIKLANVVSDIDGVSARQMLEALVAGERDTEQLASLAKGRLKEKREQLVEALSGRLKAHQSFLIAEHLAQVDYLEGAIERLSQEIEERLRPFEQEIGWLDTIPGVSRRTAEVLWAETGGDMSRFASARHLASWAGMCPGNNESAGKRRSGRTRKGSPWLRHCLVEAAHGAAHTKNKYLSSQYHRIGARRGKKKAQVAVGHSILVIAYHLLTRKQPYSDLGANYFDERDRQAVTKRCVVRLERLGFKVSLEKLAVAA

SEQ ID NO: 205309 - protein, 340 aa, unidentified
MEVATIGLDISKHVFQVHAVDAQGQVTGRQRLRRSEIVSFFFSLPPCLVGIEACATAHYWAREIQRFGHDVRLIPPAYVKPYVRRGAKNDAADAAAICEAVTRANMRVVPSRSGENQGFLMLHRARGLLVRQRTMTACAIRAHFAEFGIIVGQGRQRVDGLAELLDDEEPALPANARTALAILVNQLKELDLQVDAIERELAQIQRVNPMAKLLSSIPGVGPITATALAATVPDPSMFRSGREFAAWLGLTPKQNSTGGKDRLGRITKRGDSYLRHLLVIGARNVVRYPKARSRVGGGWIEALLERHRPMVVAIAVANKLARIIWAMMTTGEFYRAKAAG

SEQ ID NO: 205310 - protein, 320 aa, unidentified
MTTKPTQPYVGLDVSKKVLELAIHESDYRHCYPNNPSGFAELIAELITLEPALIVIEATGGLEKPAVAAMNTAGLPIVVINPRQVRHFAKALGQLAKTDRLDARVLAHYAAAIKPPLRPIKSVPEQDLDALVGRRGQLVGMLIAEKNRRATAPNDRVRAEIDEHIEWLEGRIAALDRQLQELMKSSATWKHTNQILRSVPGFGPVVSFTLLADLPELGKLNRQQISKLVGLAPLNRDSGQKHGPRHIYGGRASVRSMLYMATLTAIRYNPVIKAFYERLIANHKVFKVAITACMRKLLTIINFMVRDGSQWKSAPSNISA

SEQ ID NO: 205311 - protein, 354 aa, unidentified
MNPIIGCDAHRRYSLFAVLDTSILSVEQTRVNHQPGAIREFLSDFPEGTPVALETVGNYYWIVDEIEQAGCVPQLAHAAKAKVIMGNINKTDKLDATGLATLIHLGSLPTVWLPPGETRDERELHRTRMAFSKVRTALKNRAHATLAKYALNSAEHSDIFVGKGRAWLDRTLKKLPPETGRCLYQEIELLDATMEQIAALEERMLERIQLTPDMQRLKTIPGVGNILAIVIEREIGTIDRFPSAGHLTAYAGLVPKVHSSGGKTRYGHMRKQANNYLKWAFIEAANVVVAHRHHPAWRQKKVSAVYERICRRKGHATAVGAVARHLAESAFWILKKEEDYQDPALRRQDSPKLA

SEQ ID NO: 205312 - protein, 323 aa, unidentified
METPQVSFKQVVSRGCGLDVHKKVVVATIDGEGLKKQSREFSTVTSSLKELRDWLLENGITHVAMESTGVFWKPVYNILEPAGITVWVVNAAHVKYVPGHKTDKKDSAWLCKLLLAGLLKPSYIPAKEQRELRDLTRYRTKLIQSNASNKNRIIRILEDANIKLSSVLSSTNGAVGTKLIDKICDGEEITMQDVDEVYHKKLAATKEEIYEACQGFITEHHVYMLQIIRQEIAGTQQTIESLTQRIKEVLSPYENALELLTKVPGISSKSVEDLVAEIGLDMGVFPTEKHLASWAGMSPGNNESAGKKKADEQPGETNKLKLC

SEQ ID NO: 205313 - protein, 392 aa, unidentified
MIYVGIDVAKGKHDCCILGPDGEVLRDSFTFANNRRGFEELLTAIQRTLPGKSREEVRAGLESTGHYSTNLVAFLRGNGFEPVVLNPLSVNLFRKSQTLRKTKTDKADARFIAAMLLTSDASPHASVSYHIEELKVFTRSRSRLIEHRGKLKISLSRLLDVVFPELATLVWSTNQNSVHHLLLELPNTQAIAHCRIDRLTNILSDSSRGKYGREKALAIRQAATESIGSNSPAMAFELQQTIRLIHNIQAEIALLEKQIARVVEADQSPLLTIPGIGFTLAGIILAEIGPIERFQTPAQLLAFAGMEPSTFQSGKFSANQTPMVKRGSTYLRWAVLQAARLVAMRDRTFHDYLLKKRQEGKHFNVALSHVGKKLVRVIFHMLQTNRTFVPQS

SEQ ID NO: 205314 - protein, 419 aa, unidentified
MRKRWIPVEIRVGGMQMNSVGIDISKGRSTIVVMRPFGEVVISPFEVRHTGSELSELARQLKSLDGETRVVMEATGNYHASVAKLLHDAGLYVSVVNAKLVHDYGNNELRCVKTDRKDAVKLANYGLDRWLTLPRYIPEEDTRLLLKNYYRQYRQYSKVQTVLKNNLISLLDTVFPNANRLFLSPIRGDGSEKWVDFVAEFWHCRCVSEKSERAFTSKYLRWCRKHGYNFSEAKAHTIYAEASGHIGVMPKSETTKLLVEQAVSQLRATSTALAALKHEMQSLASQLPEYPVVMGMFGVGPTLGPQLIAEIGDVRRFYSKKALVAYAGLDALPNDSGDVTGRHKSMSKIGASSLRRTLFLVMSVYLQTAPLDEPIYQFMDRKRAEGKPYRVYMMASANKFLRIYYATVKAYLESLEHTA

SEQ ID NO: 205315 - protein, 346 aa, unidentified
MNFYTGQHKFYCGIDLHARKMYLCVLDEKGEVQLHRNINTDREAFLKAIEPFREDVVVAVECMFAWYWIADLCQSEGIPFVLGHALYMKAIHGGKAKNDKIDSQKIAALSKGGLIPMSYVYPQKMRATRDLIRRRNHLVRKRAELLAHIQNTNTQYNLEDPFGCLTPVKNREGIAERFTDPVVQKSMSVDLAVIRSYDIILGDLERTIIRLARHHDPISYALLQTIPGIGKILGLVILYEIENIKRFSTVQDFASYSRLVKCSHESNGKKYGTGGSKIGNGHLKWAFSEATIIFLRGNEPVKKYLERLTRKHGKGKVLAILAHKLGRAVYYMLKNKEPFDEEKFMR

SEQ ID NO: 205316 - protein, 357 aa, unidentified
MQTQVNELNFNGENIFVGIDTHKKNWKVALYSNDIALKTFTQNPEPGLLVDHLRKNYPNANFSCAYEAGFGGFWIQKQLAAQGINCIVVNPADIPTTSKEKEFKTDPRDCRKIAKSLRSQLLTPIYIPSDRGLAFRSVVRLYNDAVKNQTRQKNKIKGHINFYGIRYPDEFKLETSHWTKSFCLWLSELKLDCEENTWTFQFYVQEYLKAQGEVMEVTKKVREIAKKAPLSKSVNRLISIPGIGVLSAMKILTEIEDIQRFKSLDQLCGYIGLVPTTKSSGEKENVGEMTNRGNKHLKTTIIECAWSSIHHDPGMSQKYFELIKRMDSNKAIVRIAKKLVARIIFVLTKEEEYKVIK

SEQ ID NO: 205317 - protein, 427 aa, unidentified
MKKRIKIDHLSTLCVGLDIGSRNNYITALDFDSNRLINMKPVPNAASGVESMEEMILAVLEANSQFKYLLIAMESTSFYGVHVANYLSTSDRLKPYGVKVFCLNPKEVANYKKSFTGLGKNDGLDSFIVADFIRVGRIAIEPWRGAQYLALQRLTRQRRHVTEAITREKNYVLNNVFLKFSEFALLDGEQSPLKNKFGATAEAILTEYKTTEDIANAPLEELVEFVATTGRGRFSDPNQVAELLQKAARDSYRLDKSLYEPITASIACSFNCIRAFEREKKALDKAIAQTVAGLNPTEYQILMSIPGIGPVYAAGILAEMGSVRCFKSNDALAKYSGIVWRDNQSGEFESDDTPMIKAGNRYLRYYLIQAAGSVATYCPEYAAFYEKKYAEVSKHQHKRALALTARKLIRLIFGLLDKNQLYSAAKG

SEQ ID NO: 205318 - protein, 399 aa, unidentified
MTLYVGIDVAKTFHVAAMVDEEGLVLHTLRVDNNATGYQRLQQLLSQYGPGHLIVAMESTGHYGHALRDWLLCQGFELHVFNPLKTNRFRDFYVQWRKNDERDAIALAHLLRLGERQPYHPLPFNLRSLRQMVRHRGLLVQARARTKNQIRAILDEVFPEYQQQALFSDPFGATSLALLSRYPTPAHLAALDEAQLYAFLHQHSRGRFGADQVQRLQQAAGHSVGSPEAGRAYTPILPAFIAGFQTLSAQVDQCTAHIETYLAETDQTLTTIPGIGSVLAATILSEVGDIRRFPSPDHLVSYCGLALSESQSGQSRSRRFLSRRGSTRLRTSFYQAALVAVKYDTHLKAYHQRRVSQGLPPKQSVLSVARKLVRISYALLKSGQPYQASRLGHTDPDDS

SEQ ID NO: 205319 - protein, 423 aa, unidentified
MNVSTLCVGADVHLDEIVLRAVDQASGHEVLERFRVTNNRPGAQAAATNIVQAATHGGYSRIEIGWEATGLFWVPFHRFLSTSPLLQPFQVELVCFNPKLVANFKEGLVLRRPKNDERDAYDVAARLRFGDWPVSYVPADYWQGLRRLTRYRFQLSRELTREEQRFQAYAFLKASDWKRVKPFAQVLGATSAALLTEFTVAELEALSHDELVDVITHRGRGRFDDPDATARAVRAALATSYPIDPQMDEMVTRTLATGWEHIRFIQRLMRQLDHHIAHYIEPFPNPLITVRGLGAVITAGILAEIVDITRFPEHKHVAQYIGLTWQKRATGQWVSQNTRLTKVGNVYLRYYIILGADKLPQFNLEYKAYYSRKFHEVSKYQHKRALVLTARKRDRLVHALLTKNVPHVRPQLLFEMEEQALLP

SEQ ID NO: 205320 - protein, 371 aa, unidentified
MIISDISEGFDVIIGVDTSKNSFYCCTITKVKGDQGKIKKLSRSKFERMAAETGSKTLIFMEACSGSNHWYRAFTAAGATVKLIAPQHVKKYLPNRRVKNDANDARAILECGLSATTHFVKPKTQDQQDLAILHTLRRTTISDRVGLSNRIRGLLTEYNVICARGRAAFENELPELMEKCESLCNQTVVKHLKSLFAEYYRLRDKEKELDEDIRRLAQKDPLVDIAMSCHGVGEVTASALVAEIGDASAFTRGKELAANYGLVPSQHSTGGRERTGSITKTGSVYIRSLMVQCANSIALYAKKRLDEGKDDQFDRYILRLMSRMSRAKAIVALANKLLRTLWAMLRSRKKFEPKSADPEKESPISDAACLL

SEQ ID NO: 205321 - protein, 400 aa, unidentified
MSTSGRRIWVGVDAGKGHHWAVALDADGETLFSTKVINDETQILSLIETAREKADEVRWAADISGRASTLLVALLVAHGQQVVYVPGRTVNRMTGAYKGEGKTDAKDARVIADQARVRRDFAPLDTPPELVSTLRVLTNYRADLIADRVRLINRLRDLLVGICPALERAFDYSAAKGPVVMLTEYQTPAALRRIGVKRLTTWLERRKVRGADAVAAKAVEAARSQQIVLPGEKRAAKLVCDLTHQLLALDERIKDNDREIRETFRTDERAEIIESMPGMGPILGAEFVAIVGDLSGYRDAGRLASHAGLAPVARDSGRRTNNYHRPKRYNRRLRHIFYMAAQTAMMRPGPSRDYYLKKRGEGLLHTQALLSLARRRIDVLWAMLRDGRLFTSAPPVTQTA

SEQ ID NO: 205322 - protein, 325 aa, unidentified
MSDSARAGVVVGLDVAKDSVHVAVRPGGQQWRAATTAAGLRQLAERLIALAPRLIVLEATGGYEQPVVAALTVAGLPVSVVDPARVRHFARATGLLAKTDRLDAQVLARFAEQVAPAVRPLPDAAQRELALLVQRRRQLLDMLAAEEQRLDQQALFPRSPITGSLVAHVAYLRQQLADTDQALTAQLAAHPRWDATHALVRSMPGVGPVTAATLLAELPELGTLSRQEIAALVGVAPLARDSGRWRGQRRIGGGRAAVRQVLYMASLTAVRCRQSPLRTFYQQLRARGKLFKVALVACMRRLLVILNAMVRDGQPWTPARCAANT

SEQ ID NO: 205323 - protein, 311 aa, unidentified
MNPQEFFIGIDVSKDTLDVAVRPTGEKMVFANTEDGLVMMTDFSKPFSPRLVVLEATGGWERSAVGALAAKGLPVVVVNPRQVRDFAKAKGILAKTDKIDAQVIAQFAESIRPEVRPLKTEEAQKLEALLSRRRQIVQMLTAEKNRLHSAPVWIRKDIQIHIQWLEKILDKFNKELDRLVKKSPIWQAKDKILQSAKGVGPILSLTLISGLPELGTLNRKKIAALVGVAPLNRDSGKFRGRRTIWGGRSAIRSVLLMATRVGIRFNPVIRAFYERLEKAGKKRKVAETACMRKLLTILNAMMKNRTCWQSV

SEQ ID NO: 205324 - protein, 342 aa, unidentified
MREPHYIGIDLHRRRFTCCVRLESGRNYLSTWNLEQLPQFVKKLRPSDEIAVEVTGNTRLFYEAVTPHVARVVVVDPNQFRVISHSVKKTDPNDARSLALYLAKGLLPEVRMKEKAQAEVASLTQTRDRLVKLRTALKNKVNNLFSARGIEIEKEDLSSEKGLCQVLEQTLEGLAQVELQIIVEQIRSLNRSIGRLEQVIKEAAQKLPGFSNLTSIKGIGALGASVLLSVIGDVKHFQEEGKLASYFGIVPRVQNSNETEHSGHITKRGTKLGRTTLVQCALIAKRYNPYLERYYEGIRSRRGTGRAIIALARKFLGIIYHTLRNNWVFEDFPNFVLAEVKT

SEQ ID NO: 205325 - protein, 356 aa, unidentified
MSRDIKYIGMDVHKEAVVIAVLNSGGKLVMESIVETKASSILQFIHGLRGELHVTWEEGTWAAWLYDLLQPQVARVLVCDPRRNALLKEGNKSDKIDARKLADLLRTGMLRPVYHGEHGLRTLRELGRSYQTLSQDLNRVMNRIKALYRGWSIPCAGTQVYAPRYREEWLNKIEHAGVRRRAELLYQQLDGLQGLRRTLRPELLAESRKHKAAKLLRQIPCIGPIRAARLIALMQTPHRFRSKRQLWTYSGLGIETRDSAQYRYVQGQLQRSKKPQQIRGLNQNHNHEMKEIFKGAATRASCGVGPFHDFYVALLAKGMKPEMARLTLARKIAAIALTLWKKEERFDAGQLKPQAA

SEQ ID NO: 205326 - protein, 350 aa, unidentified
MPTTALQTAITVVGIDIGKNSFHVVGLDSRGAIVLRQRWSRGQVEARFANMPPCLIGLEACVGAHHLSRKLKALGHDARLMPAKYVRPYSKGQKNDFRDAEAIAEAVQRPTMKFVATKTADQLDLQALHRVRERLVSQRTGIINQIRAFLLERGVAVRQGLRFLRAELPRILAAPPEVLSPRMVRTIEGLSEDWRRLDERIDQLSDEITALARQDVGCGRLMSMPGIGPIISSAMVAAIGTGETFTKGRDFAAWLGLVPRQISTGDRTILGKISKRGNRYLRVLFVQAAWVVLIKPQSWERHGLKSWIEAAKKRLHRNVLAIALANKLARIAWSVLARGRVFEASKLHAA

SEQ ID NO: 205327 - protein, 433 aa, unidentified
MLKLNYMSTLFVGIDVSSKTNAVYAMDFEENKYISSSFGNNQPGADKLVNMIAECMHKHKNLNTILIVLESTSVYSVHISNFLSTSEVLMPYRPYVFCVNPKAASNYRKSYIGMEKTDPTDAYLIADFGRVGRTKKLEPWRGGQFISLKRLTRHRMHLSECITREKTYMVSNLYLKFSELQLLEGDDKPFGSLYGATSSAVLTEFLSPQEIIDMPEEELLTFLAGKSRNRISDLSKTSELLRKAARDSYRLDKCMYEPLNISLASSFNCIHAYQKEIKLIEQAIEKCINGMNPNALLILQSIPGIGPIWASGILSEIGDITVFHSSDALAKYAGLYWPKGDSGDFTSEDNKMSKAGNPYLRCYLGEAANSVRKHIPEYADFYARKYAEVTKHQHKRALALTSRKLVRLVFGLLVKNQLYTGEKLDTEYNIESN

SEQ ID NO: 205328 - protein, 344 aa, unidentified
MLDACGDSLASFVERLKARCTSAGRKIARVILTHEAGRDGFWLARFLTRQGIEVHVMQPSSLPVDRRARRAKTDKIDVEMLLRTLMAWLRGEPRVCSMVPIPSEADEEARRANREREDLTKERRSIVNKIDGILATLGIKGYKALRRDRRGQLNCVRQPGGDPIPQMAKARIARLLDRLELVLKLIDHVESARDDVLKKGAPANESERMIRSLTALRSIGPDIATLLVREAFVRQFRNRRALAGYVGLGGTPFSSGGSEREQGIGKDGNRRVRAAMVELAWTWLRWQPDSALSVWFRARVGAMGGGRIRKIMIVALARKLLVALWRYLKDGVIPEGANVKVAVA

SEQ ID NO: 205329 - protein, 351 aa, unidentified
MFQQNLGVDVAGKTLQVCLKVRRADGSIKIKGSRKFANTPKGHHQLVVWLGKKQLTDVFMRVTMEATGVYYEALAYHLHDHGCQVHVLLPNRIKGYLKFLNLKSKTDPLEAEALAELGIQQELPAWQPASPQMYSLKGFSRERNTLIDQKTVIMNRLHAEEARQSPDRRILKRLGQQVRLLEKQIKEVEQDLKRMLEQDEQLQQKVEQICQIKGLGWISVLSIIAETNGFQLVSHKSQLVSYAGYDVVERQSGSSVKGKTRISKKGNRHIRRTLHFPALGVVKYHDEFKQLYLRVYDRTKIKMKGYVAVQRKLLVLIYTLYKKNEAYDPNYARKQMGQQTSRQGAMPAYTG

SEQ ID NO: 205330 - protein, 342 aa, unidentified
MKDVSIIGIDLAKRSFQLHGTAVDGSVMFRKKMSREQMINFLSQQPSCQVAMEACATSHYWGREITKLGHEVKLIPPIYVKPFVKRQKNDAADAEAIAEAASRPTMRFVAIKTEDQQAQSMVFRTRELLVGQRTQMVNALRGHLAEYVIITAQGIIHVHRLELAIEDGKSVLPEAARDLGRLYLEQIADYDEKIKALDKDIRALAKEDEEIARLMTMPGIGPISAMAIKAFAPPMENFKSGRDFAAWVGLVPKQKSTGGKQRLGRTTKMGQRDIRRLLIVGAMSVVNWASRKGAPEGSWLARMLARKPRMLVATALANKMARMVWAMITKNEGYRNPAMAAA

SEQ ID NO: 205331 - protein, 332 aa, unidentified
MSSFVGIDIGATAFEVVIRKNDKNGAVKSYQQTPKDHEKLAAQLLKLDPACVVMEATGIYYLNLAVVLFNNGLKVSVINPNSFNHFAKMTLTHSKTDGIDAALLAEYAQRMTPRLWTAPDPKLLSLRDIGRQINRLVGRRTEAKNNLHALQAKDSTYQPLIDDELEGIEYLELRIERMRNMALEIIANNENLKQKLENLTTAVGIGTNSAILIICELELLPEHLKSSQVSRFAGLDVRLTQSGTSINKPGRLSKAGNSYLRTALFMPALSAATHDANVRAFYQSLIQRGKKKMQALCAVMRKMLTGIWACLKLNTPFDSSKLFSAEHKKACA

SEQ ID NO: 205332 - protein, 371 aa, unidentified
MLRPCQQAKLARGAKDEERAMSYKLDSGIAVIGIDIGKNSFHVVGHDKRGAIMLRQKWSRGQIEARLANLPPCLIGMEACVGAHHLSRKLQMLGHDARLMPAKYVRPYSKGQKNDFRDAEAITEAVQRPTMKFVATKTAEQLDLQALHRVRERLVSQRTGIINQIRAFLLERGVAVRQGLRFLRAELPRILAAPCDALSPRMLRVIEDLAGDWRRLDERIEILSSEIEALARQDKNCERLMTVPGIGPIVSSAMVAAIGTGDAFSKGRDFGAWLGLVPKQTSTGDRTILGSISKRGNRYLRTLFVQAAWVVLVRIGPKHWHRYGLKSWIEAAKKRLHHNVLAIALANKLARIAWSVLACGRAFEASKIQAA

SEQ ID NO: 205333 - protein, 411 aa, unidentified
MDKIYDNCCGIDVHKKLIVACFRKGNKQEIREFGAVTRELLEMADWLREGGCEIAAMESTASYWKPLFNILEASGLNAMVVNARHMKAVPGRKTDVKDAEWIADLLQHGLLQPSYIPNKDQRELRELVSYRKSLVGERTRELNRLQKMLEGANIKLSGTVSDINGKSARSILEYLLTGASVDSAKYDEMYEKNIIAHNLKATKEQIIDDLNGVMSSLQRRMMKELLSHLDELNIHIRNLDDEIDSFMKPEEKQASQAIQDVTGIGNTSAQAIISVIGTDMSRFPTDAHISSWAGLCPGDNESAKKRRSGKTRKGNALLRTTLITCAHGAVKNKKSYFYAQFMRVSAHRGKKRAYVAVAHSMLIAIYHILKDGVVFKDLGADYYNQFNKERKINAYLKKLKALGWEGPVVAA

SEQ ID NO: 205334 - protein, 339 aa, unidentified
MSSVQLFVGLDYHQDSVQVCVLDQQGAVRLNRPVANDWRKIRDAVDAAAAPLDGRVCRVGVEACCGSADLAQELVENVGWDVSLGHPAYVAKLRGSPDKSDFSDGRLVADLVRVSYLPAVWLPPRQVRQLRQLVNYRRRLVDQRRAAKLQVGAVLREQRVKFPKELAKSRWSKGWVTFARRSDQLDEQARWVVEQTLEEVAHLDKRVAAADARLREATKDDAVVAKLMDQEGIGEVTAWVLRAYVGTFGRFKSGKQLARYCGLSPRNASSAARVADAGLVDGCNKLLRATVVQAAHRLIRTSQRWSKLAESLRARGKNGCVAVAAVGNRWLRNLHHAMK

SEQ ID NO: 205335 - protein, 330 aa, unidentified
MIVIGIDPHKQTHTAVAVDKATGHVVAELTVRARRPGFERLVAWARHLGPERLFAIEDGRHVSGHLERYLIGRGERQVRVPPRLMGEARRADRIRGKSDPIDATAVARAALAHPDLPQATLSGPERELGLLAAHREQMVNERTAIQSKLRWLLHDIDPDMAPGPRTLDRFATLDRLETRLRELAPTADVRICLDLVARCREITVRANELQREIGSVVKATAPALLAIPGCAELTAAKIVAETARIERFPTEGHFARYAGAAPVPASSGAVHRHRFNRRGNRQLNAALHRIAVTQLRIHQPAKDYIAKCVNPGERELFPRRRDSLTYMDGG

SEQ ID NO: 205336 - protein, 344 aa, unidentified
MVMLGTDAHKRSHTIVAVDPGGADIGSVTVTATTDGHLGAVQWAAQYTERQWAIEDCRALSRRLEGDLLGVGERVVRVPPKMMARARATARQARKSDPIDALAVGRAALREPDLPVAQLDGPSREVRLLVDYRETLVRQRTALQNQLRWRLHELEPGYDPPTGSLNRYCTLDDVIGLLEGHDSMVADLARRETRRIRDLTVEINQLERDIQQRVTVLVPTLLAIPGCGALTAAKLIGEAADITRFRSRDAYAMWAGVAPIPVWSANNTRFRLNRGGNRQTNAALHRIAITQIRMHPDAQAFIQRRIESGSTKREALRLLKRKLANVVYRTLQTDTQTTHLAQAA

SEQ ID NO: 205337 - protein, 311 aa, unidentified
MTGTNFIGIDVSKNRLEVHARPDGKSFFVPRDEDGLDELVSRLASLSPALVVLEATGGLQLRAAAHLAAADLPVAVVNPRQVRDFARAAGRLAKTDRLDAEVIAAFAEAMRPEARPLANAETRHMAALVARRRQLVDMRTAEKNRRAALETGPARRQLDEHIAWLTRAIEEIDNDIDGAVRASKAWRADEDLLRSVPGVGPVLCRTLLAELPELGSLNRRQIAALVGVAPFNRDSGTMRGRRTVWGGRGRIRAVLYMATVTATRVNPVIRATYKRLVDNGKPAKLALTACMRKLLVILNAIMRDKTKWKHA

SEQ ID NO: 205338 - protein, 347 aa, unidentified
MKYYTTNTEFNCGIDLHTKQMYICVMDREGNKLVHKNIKGNDFAFFLKQIAPYQHDLTVVCECCYNWYWLADACQDAGIEFVLAHALYLKHIHGGKNKNDKLDSEKLAHLLRTNLIPQSYVYPKERRPMRGLLRQRMSYVWERSTLLGHLQMNQQSEGLVPVAKGGHNRDVWEERILSQYSDPLHILAVKCDMDLIRSYDYRIELIDQRLADQARRVHGRDFSLIQTVPGIGRVLALTILFEIDTIDRFPTVKDFVSYCRLVKGSVASAGKVKGLCGGKMGNPYLRWSFGQAAIICKRNHPLLTPYADLLVSKHGKFKGNAIMANKLGRAVYFMLQKGTAFDAELVV

SEQ ID NO: 205339 - protein, 404 aa, unidentified
MSVHAAPVTSSTIVVAVDVGKTSAMLWATDSARHRVLGPVEFAMTRSGLVTVVHRLSTVIPPGAQVKVGIEAAGHYHRPVLDYRWPAGWEVLEFNPAHVAEQRRVAGRRRVKTDAIDLEAITELVLAGRGQVIAEREVRIGELVAWATHRSRRVATRTATKNQLLGQLDRAFPGLTRALPDVLGTKIGRLVAAEFADPARLSALGVTRLIRFAAARDIQLRRAVAERLVAAAAEALPTRDGVVARRVLAADLRLLCDLDTQIENAECELAALLPASPYTTLTSVPGWGVVRVSNYAAALGDPDRWPGPRQIYRASGLSPMQYESAGKRRDGTISREGSVALRRAVIDLGVGLWMSDPAAKAYAAELKSRGKPGGIIGCALAHRATRIAYALVRDHATYNPSRWA

SEQ ID NO: 205340 - protein, 335 aa, unidentified
MEGSPAQSSATHSPVATRPVAFVGIDLAKQSFQAATDADTPAARFNASFSYDAAGMAQLLERLKTFEVALIVMEATGGLERKLAAELSDAGHAVAVINPRQARDFAKALGTLAKTDKVDAAVLAQLARILKPQARPLPSAEQIRLKDLAARRRQLIHMRTQELNRAQQATLKDVSKSIKHLITTLDREIAKIEKQVADLIDSNSDWKKKVDLMDSVKGVGIDTAHALLAELPEIGTLSKRQVTSLAGLAPHAFESGKFKGKSKIWGGRATVRSALYMGTLAATRCNPAIKRFYDRLLADGKQKMVALTACMRKLLTILNAIVRTGVKWNPELVNG

SEQ ID NO: 205341 - protein, 406 aa, unidentified
MFIGWDWATETHDVTVMDNSGARVARWELAHTEEGIARTLAKLAKHGSPADLPVAIETTRGLVVDRLLAAGHPVVPVHPNAFHAMRPRWGASKAKTDAGDSLKLADYLRTDGHFLPRLEPTEQVTMELQALTRQRADHVAARIAAINQLAALLDTHWPGGKAVFSSLDSDIALAFLERYPTPAAAAKLTAGRLEAWCKRRGYSGKKPGSVLIERLRSSPKPASRLSDSVIAQLVRVQVQLVKGIRATIRSLDEAIADAVAAHPYAQLFATMPRIGTVNLGQIVGEIGPILERSKTSEQFIAETGVVPVTRASGKSRVVTFRYAANRRARLAVVGYADNSRHASDWAPKIYNDARANKKRHPHAARILARAWLRVMWACWRTGTCYDPDTHRANNKINQDPEAALAA

SEQ ID NO: 205342 - protein, 344 aa, unidentified
MKIAVLGIDLGKNVCSVVGLDASGAVVLRRRARRDTLIDLVAKLPACIVGMEACCGAHHLGRLFATQGHTVRLMSPEYVRPYVKAQKNDDRDAEGIAEAATRPTMRFVEVKTEAQLDMQTLHRSRERLVGERTALINQLRAVLLERGIVVPQGKRKFEQYLVAMMDEHDGEGLSARMRMLVADTRAQWRELDRRIAAFDAEFTRWAKENEDARRLATIPGVGVTISTALIAAIGKAETFEHARDLAAWLGLVPRQATTGGKPRLMGISKRGNKYLRTLLIHGARAALPHLAEKGTTLGRWAKNLLSRVHQNVAVVALANKLARICWAVLRSGQKFAAKEAPLAV

SEQ ID NO: 205343 - protein, 289 aa, unidentified
MKLRTYCALDLHFRHTVFEAQGAGGEVVGRRDVLTEARYLVEAVKGVPGPKGVVLEEGPMADWAMRVIRPYVSEVIACDPRRNRLISRDGDKTDVLDAGKLAELYRLGSLRVVHHPERQSMMDLRGWVWAYHDQVAWVTAAKNKVKAAFRSAGVSYGVGNIYGVAQREEWLGELKRSSVRERVKELYGNLDDLAARRDRIRKRLQRTARRHPVTKRFLAIPGYGPIRSLTFLVMVDTPYRFSTPQKLWRYSGLASRREQSGDPGRVRMVQGQQYNRRLKAVARGRELRR

SEQ ID NO: 205344 - protein, 428 aa, unidentified
MEPSISTGPSAAVTAYIGIDWADQKHAIALRSAAEPSKVQHQVVEQKPEALMQWIGQLEQRFGVQGKILICLEQSRGALIYHLMGYEFLELYPVNPLQLARYRETFSPGGAKDDRPDSELLCELLYCHRDRLRAWKADSTLTRKLAFFNEGRREAVDQRTALSNAIKSQLKVYFPLALELLNAESSTALAADLLLRWPSLEVLQKQSAHTLRKFFYGHNCRGETKMLQRLELIQQARPLTQDSAVIEPAAFRVQLLARQLKSLLADIARYDQKIAQLFAAHPDRLLFENLPGAGAALAPRLVTAFGSDPTRWDSAQEVATLLGIAPVRRASGKNTGKKASVHFRLACPKFLRQSLHEFAGCSIRYCSWARACYETQRARGKAHHASVRAVAFKWIRILFACWKQRTPYDPQRYQSALQHRGSPFASAC

SEQ ID NO: 205345 - protein, 358 aa, unidentified
MARNSLSGLHQFVAGFENEPFYAGVDVHKRSYHIALRRADGRSLSLVSPASPNYVVELLCGLGVTVGTVAYESGPTGFSLARALHRIGIPVIVAAPSKIPRAVTPGAKCDRLDCLKLADYAARGMLKPIAIPTPQEEARRTLLRRRHTLVDSVRRCKQRIKSHLLFLGIDEPKELEHWHNGVDTVLLALPMDATAHMTLESYLRELMFHQEELRRVELQLKALTKSRELATSMACLQSVPGVGPIVATTFALEIFRPERFNRPEEVASYLGLAPVVRHSGSKTPSGRLVPVGQTRLRSLLIEAAWMWKTKDTYADALYCRLLGKTGIAQKAIAAVARRLAIILWRLCIEQRVYRPTMA

SEQ ID NO: 205346 - protein, 401 aa, unidentified
MECIFGIDISKHTANVAVLIDRQVIKEFKLSSNREGFERLEDELNSFREPKIIFESTGIYSRPWRAFFHRNGWLYTEINPLKAKKVMDSFRIVKTDSVDAVGLAEAMSRNNFAPSFQEKPEYTELRDLHRIYQEHNDDVVRNKNRLHHELQLTFPEIEHFLSRTEGALYWHIVQIFPHPYLVLQHSSTELTSIILKATSKNMGPKRAQHLAEHLLELAKSSGPAVDIDSYALKRVTELAYEVERLDRSKKSLIEEMAKIGTNLPEVAILTTIPGIALKSALCIIAELGDIRRFHSANAINAYIGIDLTTYQSGDYTAEQRIRKRGNPLARKVLYRTVINIISASSYRPTRFNDFYQMKKQSSQSKGTKKIAVAVMSRLNRMIFHLVLHNEVYEPTVSQPRQ

SEQ ID NO: 205347 - protein, 406 aa, unidentified
MKQFNPNQPMAMCGSTALLNQSSIAPLHYELYIGLDVHKDTIAVSIAHRDGSKPRYYGEIANTPNAVKKLINKLSPTGEVISVCYEAGPCGYGLYRQIIALDHQCIVIAPSLIPSKPGDRVKTDRRDSESLARLHRANELTPVWVPGAEQEAIRDLTRAREDMKHLARQSRQRLSMFLLRHGQNYDSGKSKWTQAYFRWLERIKFTQPVQQIVFQEYIDCVKQQHARVKSLEQEMESALHGWALAPVVEALMALRGCKLNTAMTIMAELGDITRFDSARQLMAYLGLVPSEHSSGKSTRRGGITKTGNGHVRRVLTESAWCYRFPARKTAHLQRRAERTSESVQAIAWKAQKRLCGRYQHLLNRGLLKVKVCTAIARELAGFIWAIACDVMPKPSALMGQQAFITE

SEQ ID NO: 205348 - protein, 347 aa, unidentified
MSITMIGLDTAKSVFQIHGVNETGKVELRRKLRRSDLIAFFEKQERCTVVMEACGAAHHWARILSGLGHTVKLIAAEAVKPFVKKGKKNDAADAAAICEAASRPDATFVPVKSVAQQGILALHTTRSLLVKQQTMLANAIRGLASEFGLVVPKGLHNLEPLVALVEADEAVPAQARRAIAELYKRFGELATGIQAFETAIVAHARSDATARRLATIPGIGPITASLIAATVVDISRFKTARQFAAWLGLVPRQNSTGGKTRLGRISKAGNREIRKLLVLGATSMVGRAEGWHSAVGSWLRDILQRRPVRLVTVALANKMARIAWSVMTRNEVYRPQGGVAAKAQAAE

SEQ ID NO: 205349 - protein, 344 aa, unidentified
MLHAGLDLSRRRLNVCLLDGAGELVEHTAAPPDADGLCHLAERLKGERVRAVIESMTGARFIHDTLEELGWEVLVADAQKVKGLAPLACKTDKIDARVLAELSWRDLVPAIWLPDPSIRRERELARYRLHLVRHRTTLKNRIHATLMTFGHPCPVSDLFGHAGRQLLDRLQIPDPWRRTVDASLELIDDLELQIASLTVELRRQGADHRYIPLLVSAPGFGWINAYTVASEIGDIERFASPAKLVGYTGLCPRVYQSGASDRRGAISKHGSRYLRWALFEAALHACNHPAYAERYQRTKKRLGRQRGPKVAQIELSRKLTEAIWHMLTRNQPFAPAGAGFRLAA

SEQ ID NO: 205350 - protein, 392 aa, unidentified
MSQHFRFDASRSLTALEQDSTIVAVIEMSQTKWLVAALVPGVERQPLKKFDAQEEMLLMLLHRWHCEAGQAGRNIKRIVVAFEAGRDGFWLARWLRARDVEAYVIHPTSIAVSREHRRAKTDRLDTELLMRVFLGWLRGEKRHCSMVAIPTIEEEDARRPNRERQNLVTEQTRIINQIKAIFARFGLRTLRPTMRKLAEGLEDLRTAEGTPLPQNTLSELRRHLARLRFVRDQIHAVEQERLRKLAVAPAAETKSPDAMVRLIARVFGAGIETADMLVNEIFSRHWRDRKAVARYAGLTGSPDESGSRRRERGLARAGNVRVRCGMIQLAWRFVRFQKNSALAQWFAARTADGRASTRKTMIVALARKLLIALWRLVTRGEVPQGIVLRPAS

SEQ ID NO: 205351 - protein, 420 aa, unidentified
MCGKKLSGRSMPRCYGASGERGIFSAGHKPMERPRPKPNDCSRSVTAFEQNSTLIAVIEMSLSSWLVAGVVPGIERHPLKKLETDEDALLKLLLRWRDEAVKAGHKIERIAIAFEAGRDGFWLARWLRARGIEAYVIHPASVAVSREHRRAKTDRLDTELLKRVFLGWLRGEPDHCSMSAIPTLEQEDAKRPNRERENLVGQRTRIVNRMKACLIRFGIRNFKPTLRKAPEGLEALRTPEGAPLPPNTRAEMRRDMARLRFVQDQIKEIEATRLQQLEQAPAEGPHAMIRLLARVTGVGIETADMLVNEILARNLRDQKAVARYAGLTGSPDESGKRSREKGLSRAGNARVRRGMIQLAWRFLIFQKESALAQWYRVATKDARGAIRKTMIVALARKLLIALWRMVTIGEMPDGVAMRAT

SEQ ID NO: 205352 - protein, 418 aa, unidentified
MVEDVHWFIGIDWATQSHRAVLLDAEGSQVGEREFSHGGAGLTELCDWLLQKTGAAPEQIAVAIEMPHGPVVEMLLERGFAVFAINPKQLDRFRDRFTAAGAKDDSRDALVLGDSLRTDRKAFRKLATDNPTVIELREWSRITDELQQERTRLANRLRQQLWRYYPQMAELTDDVGDEWFLALWHKVPTPAAAAKVTEKAVARILKDHRIRRLDAATVLQTLRKTALFVAPGTTEAACVHIRSLVARMRLVNQQIKEACNALDSLCAKLGAPDEESPSGQSHEQCDVTILRSWPGIGRIVLATLLTEAAQALQARDYHALRALAGVAPVTRQSGKKRLVSRRLACNRRLQTAVHHWSRVAIQHDAAARRCYDALRQRGRGHARALRSVGDRLLSALCATLKRQVLYDANRRSPQPATP

SEQ ID NO: 205353 - protein, 365 aa, unidentified
MAMTNIKEKSKKRETISFKGQQINVGLDVHKKNWSVSIYLGQQFIRTYHQESNGSILLKYLQTNYPEGIYRACYEAGFCGFSLHRELTSLGIECHVINPSDVPQTSKGMLSKTDASDSRRLGEAFSKNMLRSIYVPVSSDEADRNLIRYRKRVQEDVRAKKQMIKSILNVLGIKIPVEHDKSYWTNNFMTWLKELTINDVSNKNTIMFLVEDVVLLRKRLFATNKQIRIMSQTERYSKVYSLLITTPGVGLITAMTLLTEIGDIKRFDNFSKFNSFIGFCPSEFSSGEHIHKGKITIRCHKTLRSLILEAAWIAMRCDPALTLKYHELLKTKTAKRAIIIIARKLLSRLYTIWKTNTPYEKGIVK

SEQ ID NO: 205354 - protein, 388 aa, unidentified
MNVTADQPEAPTAIRTDLGAIFVSLELSRSSWLITSLSPGGGEKMSKHTVRGGDVSGLLQRVAQLSEKARVRTGKVFRLIVIQEAGLDGFWIDRVLQNEEVESHVVDPASIATSRRRRRAKTDKIDGETLVRSLLAYKRGEPRVCSMVKAPTPEEEDHRRLCRERKVLTAESVRHVNRIKGLLFCQGISGYEPLRRDRRERLEELQTGDGRRLPQHLKAQVDRELDRLELLLKQIKTVEGERDALLAAAQTAMPAPAAMLLDIKGIGSEFAAVLWSEGLFRHFDNRRQLAAYAGLAPTPWQSGAVDREQGVSKAGNPRLRTTLIQLAWLWLRNQPQSALTIWFHERVRRNAGRLRKTTIVALARKLLVALWKYVTTGVVIEGATMKAA

SEQ ID NO: 205355 - protein, 454 aa, unidentified
MSSIRKKGPDHGLSVVYPHAAGIDIGSREHYVAVDPAAAEQPVRTFGCSTPDLLEMGRWLKSCGVTTIAMESTGVYWVPVARLLEDEFGLDVKLVDPHHVRSVPGRKTDVQDCQWLRQLHSYGLLSGVFRATPEVAPLRSLYRHRKSLVEAGAQHVHRMQKALEVMNVQLHKVLSDITGVTGMAILRAIVAGERDPVTLALHRKHGVKHSSDQIAKALSGNFLEEQVFMLRQSLEGYDFVHQQIAACDAQIEAYMAKLQTRSSGETVVTERPKHSRRKNQPHFDLRGELVRIAGVDLTRIPSIDATTASTVISEVGVDVSAFPTEKHFTSWLTLCPNHAITGGRIRKRKTRPGASRVAAALRVSAQTLHRSKTALGALYRRLRARLGAPKAITATARRLAVLIYRMLKHGQAFVEKGQDWYDAQYHERRLASLKRTATQLGFTLIPQEPTPTVS

SEQ ID NO: 205356 - protein, 349 aa, unidentified
MKIIGCDFHPSYQQIVVWDQATGEVVEKALSHERKEEVRAFYAGLQGPVRVGIEASGQSQWFEQMLGELGHEVRIGDAAKIRAATDRKQKTDRRDAELLVKLLDEERFPQIWVPTPAERDVRQLLLHRHKLVRMRTQVKNQLQALALNQGLQRKGKLWSAAGRKQLEALPLLPWASRRRAELLGLLDQLEKSLEELDRATTEQANTRMEVRRLMTHPGVGPVTALAFVLTLGPAKRFRRGKQVASYFGLIPSEYSSGEGKQRLGHISKQGSSFVRGLLVEAAQSAVRHEPQLRREYQRLAQRRCRALAKVAMARKLAVRLYWMLREEVDYAQLVQGSRAGQPESFRGRG

SEQ ID NO: 205357 - protein, 377 aa, unidentified
MKKELYLGLDVHKDCIITAVAEEGRKGEVRQSGSISNDLHAVEKWIGGLRKAHGKKTRLRACYEAGPSGFGLARRLGQLGVACEVVAPSLTPTRSGDRVKTDKRDARKLARLLRAGELTAVYIPEPTDEAIRDLCRARSDAVDDRRRSRHRLKGFLLRHGYRYQGKSSWSAAHERYLRELVLPHPAMKVILEEYLQGIAAAGERIARCEEAMRVLLEKWRLAPAVRALMAMKGFQTVAAMILVSELGEVHRFTHPRQVMAYLGLVPRENTSSERRRQGHITKCGNAHARWLLVECAQHYAAPPKVSKELSRRQQGQSAQVRAISWRAQNRLHSRYRRLLGRRLQRNKAIVAIARELCGFIWELLRTQDCYQAQSPPV

SEQ ID NO: 205358 - protein, 457 aa, unidentified
MMETKRRREQRSMLPVHPDAAAIDIGATVHVAAVGPARDPEPVRSFGTFTGDLHRLADWFAQCGIKTVVMESTGVYWIPIYEILEQRGFEVRVVNARDAKHVPGRKTDVSDAAWLQRLHEFGLLRSSFRPQGAIAALRAYLRQRERLLDYAAAHIQHMQKALTQMNLQIHHVISDITGATGMRIIRAIVAGERDPDTLASYRDIRCHSSAETVRQALIGNYREEHLFALAQAVELYEVYQAKVATCDEKIEGVLERLKQPGRAPAKPLRAARHKTRQPNAPAFDARGALYAVLGVDLTQIHGLGPYLALKLISECGTDLSAWPSAKHFTSWLSLAPGNKISGGKILSSRTRPSGNRAAALLRLAATTVGRTETALGAFYRRLSARIGKAKAVTATARKIAVLFYNAVRHGMDYADPGASYYEERYRQRVLTNLQRRAKAFGYVLQPTEIKVASMGVS

SEQ ID NO: 205359 - protein, 457 aa, unidentified
MMEAKRRREQRSMLPVHPDAAAIDVGATVHVAAVGPARDAEPVRSFGTFTGDLYRLTDWFAQCGIKTVVMESTGVYWIPIYEILEQRGFEVRVVNARDAKHVPGRKTDVSDAAWLQRLHEFGLLRGSFRPQGAIAALRAYLRQRERLLDYAAAHIQHMQKALTQMNLQIHHVISDITGATGMRIIRAIVAGERDPDTLASYRDIRCHSSEETVRQALIGNYREEHLFALAQAVELYEVYQAKVATCDEKIAVVLERLKQTCRAPAKPLRAARHKTRQPNAPAFDARGALYAVLGVDLTQIHGLGPYLALKLISECGTDLSAWPSAKHFTSWLSLAPRNKISGGKILSSRTRPSGNRAAALLRLAATTVGRTETALGAFYRRLSARIGKAKAVTATARKIAVLFYNAVRHGMDYADPGASYYEERYRQRVLTNLQRRAKAFGYVLQPTEIKVVSMAVS

SEQ ID NO: 205360 - protein, 359 aa, unidentified
MNNTIVGADLAKKVIQVCIYTNKKVHSNKEMTHKEFLAWLFKTKPTSIVFEACGTSNYWKQKATEAGHKAQLISAKLVATVRQNQKTDKNDALAIVQASQLPEIQFIKGKSVEQQQLQSMLRLRELAIKQKTASSNQIKALLLEFNIRVSPRNGGLKGVVQSTLEDGENGLSFAFREALDAAWKHYTNLLESIRIYDECLESSISEHADCKRLLKLEGVGTVNSINLYIALACGELGTFTKGKDASACIGLTPLQYSSGGKTTLGSIGKYVKNSILRSQLITGALSAVSQAMKRTAVTKKDVWIQGLVERRGKKCAAVALANKTVRTAYAMLTNGTEYKAEFLPVVKKELLPELKIECA

SEQ ID NO: 205361 - protein, 343 aa, unidentified
MKLSRVGVDLAKNVYQLHGVDRHGKTVWKRRLRRGQWLQALLDKAEPGCVIGMEACTGAHHWARELQSRGYTVRLIAPQFVKPYVKSNKNDANDAEAICEAMSRPNMRFVTMKSVEQQDIQATHRVRTELKEQRTAKANQIRGLVAEYGLVAPQTLLALRSAIPCWLEEADNGLTDYFRSLLHGLWGDLVTLDDRMAELDKQIKTLADSNEVTQRLQQLRGVGPLVATALVATVGTGEQYKKGRQMAAALGLTPRQCSSGDKQRLLGISKRGDVYLRTMLIHGARAVVSQAKHRDDRLSQWVTSIAKRKHPNVAAVALANKTARMAWAMLRNDANYDPDFAIG

SEQ ID NO: 205362 - protein, 343 aa, unidentified
MEYYVGLDVSLKQTSICVVDQTGSVVREGVVDSDPEAISVYVRSKAPGAVRIGLETGPTSTRLWTELKRLGLPVICIDARHAKAVLKMQINKNDRNDAIGIARIMQTGWFKEVHVKDIDSHSVRALLASRALLVKIKRDLENHVRGLLKNLGLVIGRATFNVFAARAEELIEGRPDLVAAVRPLLEARNAVEQQVSELDRKVMKLARRDAQVQRFMTVPGVGPITALAFKATIDDPARFARSRSVGAYVGLTSRRHASGEIDWSGRISKCGDAMLRSYLFEAAGVLLTRVPKWSTVKAWGMRLAKRNGLRKAKVAVARKLAVILHRMWIDGTEFNWPKKEIAA

SEQ ID NO: 205363 - protein, 400 aa, unidentified
MLLFFEVITMIFVGIDVAKDTHYAAVSDDSGAVLVKPFAFQNNAEGFCLLLKKLSEFDRSKLLIGLESTGIYSENLICFLYESGFRLAVINPIQTATLRKTAIRKTKTDKVDTMLIIKSLMVNSYRLYSQRDADSLKLRTLCHFRQNLKKSKTRLKIQLAGYVNLVFPEFGKFFKSGIHIAASYALLKKYSSPKEIAALRTSTLCTLLSKASHGRFGKDTAEALKSLALSSVGVKNPYISIPIAQTIAQIELLEQQIKDLNSAIEEAMESLNSVLMTVPGIGAVNAACILGEIGDIKRFSKPCKLLAYAGLDPTVRQSGQFTAKSTSMSKRGSALLRYALINSAWQLTLNDTTFKAYYDLKRSQGLNHYGALGHVAHKLTRVIFKLLTSDTPFNPAKLVA

SEQ ID NO: 205364 - protein, 320 aa, unidentified
MQDVLNIGVDVAKAELVIAVQDHPECSATISNHAAPITRWLRTLPTGSRIAVESTGEYHRELVSLAQQHGFSTYVLNARDVYFYAKALGQRGKTDRTDAQVISRYLREHHAHLYRFAPGGATEQEINRLLRRRVVVVAQRDSLELALQGLQCLDKPVRQLLAQFDAVLTAMDQEVQALIQGQAELAAASTQLQTVPGIGPQGAALLTCLFRRIGFSNADAVVAFSGLDPRPMDSGQKRGRRRLSKRGPALLRRQLYMMAFSASRTRAFKPVYQALRARGVSSTAAFVILGRKLLRIAFALWRTKTDFEMQRWEKNTCTQL

SEQ ID NO: 205365 - protein, 407 aa, unidentified
MDVLIERACGLDVHKKSITACVMTPEGKEIKTFRTHTVFLLDLIDWIKQHRCTHVDMESTGVYWKPIVNLLEAEEIQFLVVNAQHIKAVPGRKTDVKDAEWICNLLRHGLLKPSYIPDRNQRELRELVRYRRSLIQERSREHNRVQKVLEGANIKLAAVVSDIMGVSSRDMMGAMIEGEEDPEKLAAFARRTLKKKKEELELALRGNMSAHQRIMLKTMLTHVDFLNEQILELDTEVAKRLDPFQQDIERLDTIPGIGRRTAEQILAEVGTDVGSRFPSAPNLCSWAGLVPGQNESAGKRKSSKTRKGNKYLRAALIEVAHSVCRSDNYLGAQYRRIAARKGRHRAAVAVAHSIMTIVYYVLTRKEDYKDLGSHYFEQRQQEAIVRQAVRKLENLGFQVALFNSEAS

SEQ ID NO: 205366 - protein, 356 aa, unidentified
MAVYVGIDVHKKYCHAALMDESGRIQRELRFDNTLQGASGLVNLARSIDSQVKAVVEPSANYWIKIYDRLEDEGVQVKLSNPSRTKAIAEARVKMDKIDARTLAYLLRGDLVAESYVPTKKNRERRSLIRHRASLMRMRTEIKNRIHALLDKHDLSYEYTDLFGKEGLEWLRSLNLPSIDQQILQSNLQILETLNSEIRSADIQIAKDAVNEEQAKLLMTMPGVDYYAAMILLSEIGDVKRFASPEKLVSWVGLAPQVHQSGETHWTGHITRKGSKRARWILTQCAQSARQHDPKMREYYARIERKHGSSKAIIAVAHKMLSIMHVMLTRNEPYHGENRQLTEQKHKRLDRIANMA

SEQ ID NO: 205367 - protein, 407 aa, unidentified
MNAVGIDVSKGKSMVAALRPMGEVALLPKEYSHSDVGLEQMACAIIALGEDTRVVMEATGRYHEPVAAALHEYGIYVTVLNPLFIQRSGGGSIRKVKTDKADAMKIAKYGLDNWVDLREYTPMEAVRQQLKLCSRQYNLYMKTIVALQNNLISLTDKTFPGVNELFSSPERADGHQKWVDFVLSFWHCECVCQISEKAFTERYRKWCKRKNYNFSEEKSLDLYADSCGHITTLPKNDNTKLLITTAAQQLLAAKTTLVAMRAEMLRLAKLLPEYEAVLAMYGVGEITAAQLMAEIGDVRRYPRCSSLVAFAGVDPAVNQSGKHEAQSNPTTKRGSPHLRKTLYQIVCTHLKKSPADEPVYQFIDKKRSEGKPYFVYMTAGANKFLRIYYARVKECLAALDGVDTIKN

SEQ ID NO: 205368 - protein, 415 aa, unidentified
MSGKREIACGVDVHNKFIVATILSSDGLKFQNRFATTLDDLLKFKSWLKENCCHKVAVESTGNYWIPLFCVLEGSVNFILANAYQIHHIPGRKTDTLDSEWIAEICLKNLISPSRIFARDRRELRSLTRTRESLIKVRTKIKNRITHELEAACIKLSSVLSDIFGKSGRHIVDGLLNGIDIEEILESIPSRRVRAIKEEIRGIIQSNLSPTQIFLIRSHLDVIDDITKRIAEIDSKISDLITSRREDMRIALSMPGMGIISASTILAEVGDFRDFSSPDKLAAYCGLVPSVYQSAGKLINGHITKHGSPHIRGMIIEVAHAIIRTKRNSKLKKFFLRIKARRGTKIGLVALARKVLCILYHLIIRQETYQDESLGKPRSVKYSNVQSISMSLDDMIKTIIDAGYEVRKNEYLKSG

SEQ ID NO: 205369 - protein, 356 aa, unidentified
MDKNITERGSLTIGLDLGDKHTEACVLDADGEVVETFRVHTTPVALDRALSRFEVSRVVLEVGTHSPWVSRRVTAAGHEAIVANPRRVRLIAENDSKNDRFDAELLARLGRLDPSLLSPIVHRGEQAQRDLVLIRARDGLVRARSQLINQVRGFAKSLGSRCPASSTEAFAKRVRARLPDDLFPGLETMLGMIEQLTAEIRSMDRKVERLCEERYPETAVLRQIKGVGAITALCFVLTLEDPHRFAKSRSVGAYLGLRPRQRDSGDQRPQLRITKAGDALLRRLLVTAAHYVLGPFGPDTELRRFGLRLAERGGTSAKKRAVVAVARRLAVLLHRLWMTGEVYQPLGYDSNVAQAA

SEQ ID NO: 205370 - protein, 387 aa, unidentified
MPQPNDLSRSLVALDQNSTIIAVIEMSQSSWLVAGMVPGIERQPRKKLEPSPERLLGLLHRWRYEAIRAGRTITRIALAFEAGRDGFWLARWLAARGIEAHVIHASSVAVSREHRRAKTDRLDTELLKRGFLGWLRGERGHCSMARVPTIAEEDAKRPSRERDCLVGERTRIVNRIKSTLTRLGIRNFKPTLRKAAERLASVHTAEGMPLPPNTLAELQRDITRLGVVISQIRQIEDARQKRLEQQPETGSHAMVRQLARIVGVGVETADLLVHEVLSRPMRDRRAVARYAGLTGSPDESGAQRREQGLARAGNARVRRGMIQLAWRFLMFQKESALAHWYHARTADSRIGTRKTMIVALARKLVIALWRFVTTGEPLEGVVLRPAS

SEQ ID NO: 205371 - protein, 427 aa, unidentified
MSERKSLELRVSVDVGSRRHSVAIGLSDGQVLEEFEITHRPEGFQEFFSRIEKHQKAQGCGVAVAMEGYNGYARPLDSLVRQRGYRLYNINNLKLARFKEIFPGAAKKDRIDARKGLELFQLRDHLPLAKQVLQEVTGTLKENEILKRLTRRRRRLVNERVRVLNNLQADLQAVCPGLLEITTEASNQWFLNFLVSADTLPQLARLRKSTLLKIAGVGRKYASVIQEWQKRAHFSEEAQWVGEMIHEDAQRCVELEEKIKTLASKIEQVAKGSKIAKVLLSIPGFGPVCTSELAGEIGTVERFGKEGGLALYLGMSTLDNSSGNYHGTKQPKHVNTRAKAAMMTALDRHRKYVLESQTYYEKKRSEGKKHNQAIRSLGRHLCRIIYKMLKDQREYEIRLHQGNTKTKVGSRSCVKTKIRRPKIFPNS

SEQ ID NO: 205372 - protein, 349 aa, unidentified
MSILGGLDMHRAQITFDWVDRDSGEARRGRIAPATRAGVRAWLGELPSAEGGFAVEGCTGWRFVVEELQAAGFLAHLAEPAETSSLRGPKRRAKTDRSDARLLRELLEQDRLPSSWIPPAWILDLRTTVRLRKTLVDQRTAWQQRIHAALFHHGLPRPTQELLSRATRGWLERVTLPPASRQALAVALRQIDGLDAELAPIDQWLRTLARRQPGCQALMTRHYGIGAITAPTILAELGDARRFVGGDQVVRATGLDITVYASDGKRSPGHLSRQGPEVLRWALFEAAKAAARPSSPDYPYYQQVKARQGGNRATLAVARKLARRVRHTLVSLGDAALAPVQDLPVAEAA

SEQ ID NO: 205373 - protein, 360 aa, unidentified
MRYSTIVGIDTHSKKNAVCAIVPATGEMREAVLSEDPEQLLAWIVEQDFPKPVGCVYESGPTGFGLARSLVAGGVACTVAATSKLSYRVDRQKNDRVDAKWLARQMIAGGVREVRVPTPEEESLCHLSRLRGEVAADLRKAKQRVSSFLLLTGTEYTLTKKKWSKTFRKWAASCEFDQPADTFAFRCKMSAVLRLEERLAEVEAEILRIVASSPKLSERMSRLTCIHGVGKVSAFSLVCEVHDFDRFNNGASFASHLGLVPSENSSGKKVSRGAIAKQGNSHLRRILVEAASCYSKPFKAVRSEDAAVPEAVRAKAEKCAARLRKRRAALKKRGVSANKAKVAVARELAEWIYHIAVMPA

SEQ ID NO: 205374 - protein, 319 aa, unidentified
MEQNNYKIYIGIDVSKAKLDIQYDDSGSLLTIGNKPGDFKKLNSYLPKDKKSVLIILEATGGYETKVVKWLLSRNIPVVVVNAKRIRDYAKATGQFAKNDKLDAGIIREYGLMFGHKLHLQQKKDKLEEQIDDLTRRRKQMVSSRNKEKQHLATIQNMEGQRSIKRAIKFYNGEIEKIEEKLATTLKKDKQLQAKAELLQTIKGVGEVTMYTMIGELPELGHVNNKKISALAGVAPFCRDSGTMKGKRTIWGGRAQVRTALYMAALSASKYNPAIKLFYDRLITKGKCKKLALVACMRKLVIIMNTMVKNNEPWHAEIV

SEQ ID NO: 205375 - protein, 319 aa, unidentified
MGKSNVEFEQVIDRGCGLDVHRDTVVATVMGKGIKTETRTFGTTTSSLNELGVWLESLKITDGAMESTGIYWKPVLHVLRAYPLNLIVVNARHIKNVPGRKTDKADSQWICKLLISGLLKGSFIPPENIQELRDLHRYKKKLIGTVASEKNRIIRVLEDANIKLSSVVSDTSGVTASYLIKGLIEGRKDLEKLISECYHRKLQASPDQIKEAITGRLTAHHAFILKSMQKHIASVEEQIAEIDVEIEKYIKDFEKEIELLQTIPGVGKGGAIGIVAEIGVDMDVFPSEHHLASHSGMCPGNNESAGKKKVQEHDRGTNI

SEQ ID NO: 205376 - protein, 460 aa, unidentified
MNPKRSKSKDGRKMPIIHPNAAAIDVGATMHMAAVRADRAPEPVRSFGTFTADLHRLVDWFTECGVETVVMESTSVYWIPIFELLDARGFTVFLVNARDAKHVPGRKTDVSDAQWLQRLHSFGLLRASFRPKGQIAELRSYVRQRERLLEYAASHIQHMQKALTEMNLQLHHVVADITGATGLRIIRAILAGERDPNVLAGLRHYSCHASAETIAKALTGSYRAEHLFALEQALALYDAYHEKASACDARIEAVLKELSIHRGHDHGSAPRAARLRNRTDKANALAFDVREALFALLGKDITAIDGLGPYLSLKLIAECGDDLSPWPSAKHFTSWLGLAPSNKVSGGKMLSSRTRRSGGRAAALLRLAAGSVGRTDTALGAFYRRLSSRIGKAKAVTATARKIAVLFYNAVRYGMDYVDPGASSYETRYRMRVVNNLHRRAKAFGFVLQPLEPEVGAAVS

SEQ ID NO: 205377 - protein, 318 aa, unidentified
MAQKGTLVGIDVAKGKVDVAIRSAAAGASFTNSAEGRQQLLDWLTQHSVYKAVMEASGGYERSWAALLSDAGLEVVIVDPKRVRHFAKSAGRLAKNDPIDAQMIAWFGEVFGDTPGKPRDKARQELDQLVTARLGLVRLQTQVESWGEHDQPKVVQKIHQALLKAVAAQLSKLQAVITARLENTPQFTQRADIIQSVPGLGDAAVAGLIAFLPELGRVDRQAAAALLGAAPFDDDSGERRGQRHIKGGRRKLRNLLFMPILGAATQHNPVLKAHYQRLLARGKQPKVALMACLRKLIGILNTMLARSEKWDPTKHALA

SEQ ID NO: 205378 - protein, 363 aa, unidentified
MKIRVGIDLHGNNALCGLMDESGQRLLHKKLPCDLPAILQLLAPYQERIATLAVESTFNWYWLVDGLQDHGYHVVLANPAGMQPYSGKQHTDDVSDAYLLAELLRLNLLPNGHIHDRKTRPVRDLLRRRLLLVRQRTTLILSFKSLHERTLGQRVPLARVKAMKPAEAQARFTDPADQLLSAQQITLMGHLTDSITKLAQHILGVAGKWPAYQRVPALPGIGKIFGLTIALETGDAKRFADAGNFANYCRCVKSLRQSNGKKKGENNRKCGNKYLAWAFVEAAHFACRYEEQCRRFYDRKQQQTNPVIATKALACKLAKAAWHVMAQDVPYDAARVFGPAKKEASGETGREPAKGSGHPNQQN

SEQ ID NO: 205379 - protein, 337 aa, unidentified
MTNFVGLDIHKRFTFGVIKDQEGNVMNKARFENNQENFDLFLKDCKPEETKIVMESTGVWEFIYDMLESKNYGIKLANPIKTKAIACAKIKTDSVDAGTLADLLRANLIAESYIPDRETRKIRDVVRQRKSIVKGKTQIKNRIHAILTRHGIKLPYASLCNKAIIWMLEEGMNNLPSAKTILVSYVNILKKYDEELEAVDEKIREIAYSSSKTNLLMTIPGVAEIRAVEIMAEIADISRFESSEKLCSYAGLVPSIRQSGDSLRFGCLIREASRTLKHALIESSWALLRSKQENSLKIFYQNLLYKKSKQKAICALARKLCCVIHSMLRKNQEFHYS

SEQ ID NO: 205380 - protein, 437 aa, unidentified
MLTRTQDDEEIIERVAALDIGKAELAATIRVPAEKDPARRAAETRSFGTTRREVLALADWLRCWQVPAVVMEATGDYWKGPLYRLEAEGFECVLADAGQVRHLPGRPKRDPADSRWLAACFERGAVTPCFVATEEFRVIRLHTRYRRDLTEERTREKQRAEKLLESAAIKVSSVLTDLHGVTGRDIMNHLIAGDRDPNVLAQLARTAARRKISQLEEALEGAEFFTPSHAALLTVMLARIDRLNAGIDQLTEVIERLLAPHEEQLQQAESMPGWGRRAAQDSLAETGPDMTRFPTGAHLASWAGRTPLDHQSGKRQGRSKAKKGNRYLGAVTGETAVAAGRTQTREGARYRRLARRRGKPKAQVAVGNTQLKVYHKLLSNPGMRYADLGPDYYERQRGIRRQIACHVGKLGDLGFEVTLVRLPSPGPEPGGTHNPAA

SEQ ID NO: 205381 - protein, 412 aa, unidentified
MTAKDQFAAHVGLDWADKKHDVCVQFKNGDRIFHVIEHTPEALDSWLNELHQRAKGRIAIAVELKKGPVVYALQKYPFVTVFPVHALSLARYRQAFWPSGAKDDPQDAELALDLMLRYPHKIKAIEVDNPDIRLLQQLVEQRRLLVEDKRRFVNRLINTLKQYYPQPLEWFSHRDSSLFCELIIRWPSLQQLKRARSDTVRHFMNAKGGPAVAYTEQRVASIASAIPLTTDKTVIEANALMATALASQIKLTGDLIRTYDERIESLFDTLPDAELFKSLPGMGPCMGPRMLAALGDNRDRFNNAEEIQNYAGIAPVTERSGQKSWVHWRWQCAKFVRQTFVEWTAKTVNSSYWARLYYQSQREKGKSHQSAIRALAFKWIRIIYRCWKTRTRYDEAKYLLALEARKSPLLKP

SEQ ID NO: 205382 - protein, 456 aa, unidentified
MQPVQPQAPAAGSMTVVNPHAAGLDIGLEEIWVAVPPQSDPQPVRKFGTFTPDLQALANWLRACGVTTVAMESTGVRWIPIYELLQAQGFKPYLVNARHIKNVPGRKREVKDCQWSQRLPSYGLLSNAFRPEEERVILRAYLRQRADLIEHRAAHMQHMQKALQQMNLQLTQVLKDITGVTGMQIIRAILAGERNPVTLAQFRDNRCKHSSAEIAKALTGNYRAEHLFALKPALSLYDAYTAQIAECDVEIERQFSALKPPHDDELPPLDRSQKPDTPCKNGPSYDARELLYQKLGVDLVGLDGLQASSVETLISEVGTRMHAWPSVKHVCSWLHLAPPNAISGGKVLRSRVLKGGNRAAQVFRLAARSVGKTDTAFGAFYRRRRAKHGPQKAIVATAHQLARTFYCMLKNRQPYQRTSAEVYTAPEREREIARFTQKAHKLGFERVRPAPQPVAS

SEQ ID NO: 205383 - protein, 337 aa, unidentified
MMYCGIDLHSNNSVVAIIDDADRVVAQKRLPNDIAKIVGFLARWQGELVGVVVESTYNWYWLIDGLQDAGLRVHLANTVAIKQYDGLKHSGDETDARHLAHLLRLGILPTGTILPREHRAVRDLARKRMQLVHCCTAHVLAVENIMARQLGGRMSSNQIKRLTGDAIDEMALAADVSLAIKTNVAVIATLQAQIEILEKRLQQRVKPRAQYGFLTSVPGIGQALATVILLETGPIDRFADVGNFASYARCVDSVRTSNRKKKGEGNVKNGNKYLAWAFVEAANFARRFCPEAKRFHARKKAKTNNIVATKALAHKLARACYHILKEGKPFDVTRCFA

SEQ ID NO: 205384 - protein, 419 aa, unidentified
MERSRSKVCGIDVHKRFLVATILERNGQKKIGKFLNSLEQLLKLKEWIITEQCQVVAFESTGEYWTSLYEVLQGYVEIIVANSYHIKGIPGKKTDTIDSEWIAELALNDLISPSRIMTKEKRDTRALTRLREKLVNERTDHKNRAHKVLDSACIRLSAHFSDLFGKAGLKILKCFLSGLPPEEIVRKLPKRLRAQSDAILDAVRTQLSVQQLLQLQTSVTMIELLTGKIKELERTILNDLQKERRKLQILMSVPGIGVIGATTLLAEIGDVHDFSTPDKLAKWVGITPRVYQSANKLHTGSITKQGSKHIRWILVEIAHSCIRTKNTALRVFFDRIFNRSGYKKAIVALARKILKLVWHLLTNDELYQEKNTLFTKSAHIPLPQKNATFSVSAAIELLVKAGFQIIEGDDHADKRVVGT

SEQ ID NO: 205385 - protein, 301 aa, unidentified
MGPDGSGATFANTAEGIAELAAFCQQHGVELVAMEATGGYEKQVFALLWARGVPVALLNPRAVRRFAEGMGLLEKTDRIDAGVIAWFAAVKHVAPSPPASSEQARLQALVTRLRQLTELQAAQRNQRLLVTEAVVLAGFTEMLALVAAQIRALQAAIAELIAADPLWQKLDTTFRSIKGVADRTVARLMAELPEIGTVSNKAVSKLAGLAPLAQDSGQTQGKRSVRGGRGHVRAILFVVAGLVRRYEPDFAAFHKRLSAAGKPKKVIRVALAHKLLVRLNAKAREARRQFAAAELCAAAAG

SEQ ID NO: 205386 - protein, 336 aa, unidentified
MSSITVFVGLDYHKDSVSVCVVDAAGKQMANRKCPNDWRAIEQVVRRCGTPARVAVEACCGAAHLADELAAQAGWPMHLAHPGYVARLKQSPDKSDYSDARLLADLERVGYLPPVWLAPEPVRELRRLVRYRQQLVGERRNLKLRVAALLREQRVFIQGSAWTKAWRGRVATLDELSEQARWIIARQLARLEPLEAEIRLVEERLRSVTEHDPVVAKLLEQKGVGLITAVTLRAEIGRFDRFRNGKQLARFCGLTPRNASSGQRQADAGLIKAGNPQLRATLIEAAHRLLRFDERWSDLGEQLLARGKPKCVVIAALANRWLRGLHHQLASLSTAA

SEQ ID NO: 205387 - protein, 319 aa, unidentified
MNTITKTSIRNKQRNVGIDIGKDTLDIYIYECEKHWQTANTSEGVKTLIKQLNRYQLSRVLVEATGGYERRLVEACSEKGLPVIVVQPLQVRQFAKAQGVIAKTDKIDARLIAQFGVVMQPEPRPLPSKKVRLVRDLLARKRQLNETRTQELNRLHKAPKVLIPSHRRMIKLLDKDIVWVNESLSKEVTLIAEWQRVYELVSSVPGVGDGIAFTLLGELPELGKLTHRQIAALTGLAPFNRDSGYMKGRRRIKGGRAPIRTVLYMGMLSAIQHNPVMKQFYEKLVAQGKHKKVALTACMRKMITILNAMVRDDQEWKMT

SEQ ID NO: 205388 - protein, 355 aa, unidentified
MNYEKYIGLDVHQATISVAVMDSTGKLIMESILETKASTILEFLGGLRGTLSVTFEEGTWAAWLYDLLKPHVAHVLACNPRKNAALNQGNRNDKIDARELANRLRLNDLKSVYHGENGIRMLRELARSYLTIVKDLTRVMNRLKALYRSWAIPCAGRDVYYTRHRSQWLAKIREAGPRRRAEQLYQQLDMLQHLRQQARRELLSESRKHSIIAKLRQIPALGPIRCALAVALIQTPHRFRSKRQLWKYCGLALETRISGEYVYVQDERRRSKKQLSIRGLNKDHNHDLKGLFKGAATRASVMPGPFQEFYQRSLAKGIKPTMVRLTLARKIAAITLTLWKKGESFDVQKLKSQAA

SEQ ID NO: 205389 - protein, 323 aa, unidentified
MTVYLGIDIASKKFDVAELCDGNYRCKAFENTSAGFLALYKWLGQSTMPDIHACLEATGDYGTSLATFLYENKIKVSVVNPARIKGFGASELSRTKTDKADSKLIARFCKAAVPDGWKPTPAPLRKLQALVRRISALNGMLRMECNRRENADANIQASLDRIISLLKTEIEVVRQEIKDHVRSDDELKKQDALIQSIPGIGAVSSNLILSFMSGKGFRKAKEVTAYLGLNPRHHQSGSSVRGKTRMSKMGDARLRSALYMPALVALRYNPDIKAFGRRLLLAGKPRMLVVGAVMRKLIHIVFGVLKSGTAFSSRIAVHSVVTS

SEQ ID NO: 205390 - protein, 341 aa, unidentified
MQVTTIGLDIAKNVFQVHGVDDAGHAVLRRQLRRGAVLGFFAGLEPCLVGIEACCTAHHWARELAGLGHEVRLLPPSYVKAYVKRGKNDAVDAEAICEAVTRPSMRFVPVKSTARQAALVPHRVREVLIRQRTMLINVLRGQMAEFGLVAAKGRHKIANLVAVLRDPGETRIPALARTMLLELADTIAALEPRIARTQKVMAATVRQDPVARLLTTIPGVGPITASAMAAAVGDPGRFRNGRHFAAWLGLVAKQNSSGGKPRLGRISKMGDRYLRKLLVLGATSSLRRARSDQTPLAAWTRRLLERRPPRLVTVALANKTARIVWALMAHGEAYRPEAAAA

SEQ ID NO: 205391 - protein, 336 aa, unidentified
MIVGCDFHPSFQQVAVLDTESGELQAHKLMHATGEAEQFYRRLIAPSLIGMESVGNSQWFVQLIEQLGHEIWIGDAAQIRASYMRKQKTDKRDAAHILKLLVEGRFPRIWVPDAEMRDQRQLLIHRHKLVQIRTRVKNELQHLMMNRGVQKKYKLWSVRGRAELEQLPLQQWAGRRREDLLSLLKMLDQQIEHMDQAVAVAAQQNDRARLLMTQPGVGPVTALAFVLTIGDVKRFARSKQVASYLGLIPRESSSGGKQRMGAISKQGNRLLRVLLVEAANSAVRFDPEFRKEYAHRCHQKHRAVAKVAAARKLAVRLYWMLRTQMPYPKVATSRAA

SEQ ID NO: 205392 - protein, 385 aa, unidentified
MVYIGIDIAKFKHFASVVSSDGKVIVKPFPFENSRQGFMKLLEEIENFHDCLIGLESTGHYAENLIFFLYQHGYQIGVINPIQTDALRDSNIRKTKTDKIDTYLIVQCLMLNKYSLVTSLDINIIKLRRLSRFRLETIQQQTRIKTQLTCCLDIVFPELSSFFKGNLHLKVSYALLEKYSSAKAIAHCRIDGLTNLLYDNSRGHYNQDKALQLKELAKQSIGLDNPAIELQIQCLIKQLRLYQKQIKDIDLAIMTLMELLNSPILTIPGVGYTLGAMIISEIGDIKKFSNPSKLLAFAGLDPVVKQSGNFQAEHMKISKRGSTYLRYAIYRVAFLIIYNNETFHNYYLDKRSQGKNHRVALGHVCNKLVRIIFKILTDNTSFNLS

SEQ ID NO: 205393 - protein, 422 aa, unidentified
MQYAPTPSTPSSLPTEPPSGVTAGIDWASTDHVACVVDGRGQVTARFTVAHTTTGLTDLVRRLRQAGAGEVAIERSDGPLVEALLAADLPVVVISPNQIKNLRSRYGSAGNKDDRFDAYVLADTLRTDRHRLHPLTPDSPATQTLRATVRARRDLVAHRVALANQLRAHLQRVFPGAVGLFRDLDSPISLAFLARFGCQDRADWLSPRRLAAWLASVGYSGRKDPTVLLAHLRAAPRGATGEPGAAAAHTTRALLAVLASLVEQIRALSEQIAEQLALHTDAQIFTSLPRSGTVRAARLLAEIGDCRARFPDPEALICLAGVAPSTRQSGKHEVVTFRWAVNRQLRDAVCDFAADSRKTNPWAAHLYNQAIARGKDHPHATRILARAWLYVIWHCWQDHTAYDPARHGALQRLLNQDQTAAA

SEQ ID NO: 205394 - protein, 344 aa, unidentified
MQITTIGLDLAKNVFQVHGVDATGQVVVRRSLRRSQMLPFFAKLPSCLVGIEACGTSHHWARELIKLGHEVRLMPPAYVKPYVKRGKTDAADAEAVCEAVTRPTMRFVPVKSPEQQAALSIHRTRDLLVKQRTQTINMIRGLLAEFGVDIPKGLERALLMARQIVDGKSPDVPIEAAKIVGTLSQQALDTHVRLRQIDRDLVVWLRGNEVARRLMTIPGIGPVGATALAASVTDPHQFRSGRQFAAWLGLTPLQKSSGGKERLGRISKMGDKYLRKLLIVGMTSLVRRAKYNPERIDPRLADLLARKPTRVATVAMANKTARVIWAIMARGETYRAGHRPALAA

SEQ ID NO: 205395 - protein, 355 aa, unidentified
MYGLKHQKEKRSMDHFAGLDVSVKDTSVCIVDDTGRLVREVKVASEPEALLAVLANPAYHFKRIGLEAGPLSQWLFGALAEAGLPVICVETRHMRAVLQAQINKTDRNDARGIAQMMRAGLYRPVHVKTLRSQKLRMLLTHRKLLQGKAIAIDNDLRGTLRNFGLKVGVVRTVKFEVRIKELVENLPDLAVLVEPLLIVRRVLREQIAILHRRLLAIVRGDDVCRRLMTIPGVGPVVALTYRATVDVPARFRNSKAAGAVFGLTPSKHQSGEINRTGAISKCGDKMMRVMLYEAAQSMLTRTSKWSWLKAWAMKIARHRGMKKAIVALARRLAVIMHRIWVDGTEFQWARETAVA

SEQ ID NO: 205396 - protein, 360 aa, unidentified
MSAIAQISPRVIIGVDTHKDKHVAVGLDHLGRRLGELICPSTLAGYEALLEWAQNLGEIESFGIEGTGSYGAGLCRFLSRQGLAVIEVNRPDRASRRLQGKSDPVDAEAAARSIISGKATSVPKANDDQVEMVRLLTVARKSAIKARSQAIITLKSIVVSAPEMLREQLRDLSNVELIRMCSRLRPGDLVDPISAAKTALRSIACRYQSLDSEIKELSRQRDALVNAAAPSLIAINGVGPDSAAILLTAAGDNPERLASEAAFAALCGVSPVQASSGKTVRHRLNRGGNRQANSAIYIVVMSRLRWDARTKEYVDRRTAQGCSNREIMRCLKRYVAREIYRALIADGKHRTAQKSIEQAA

SEQ ID NO: 205397 - protein, 323 aa, unidentified
MIIIGVDFHPEFQQIALMDSDTGEFQERRLAHREEAERFYRELAAAGQKVRVGMEASGHARWFERVLAELQIELWIGDAAEIRTRRVRKQKTDRQDAQLILKLMLKDDFPKIWVPSWENRDLRQLLWHRHRMVQARTRIMNQLQAVALNEGLRCKKRLWRQHGREQLESFRVAPWASRRRRDLLELMDRLNPTIAELSQAIEQEAEKCPEARRLMTHPGVGALTALAFVLIIGQAERFDCGKQVASYLGLVPLEDSSGSRRRLGHITKQGSSMMRRGRKTAKVAMARKLAVRLYWMMRKGWDYEQWKKFGSHAGQPGHRDGVQ

SEQ ID NO: 205398 - protein, 372 aa, unidentified
MDERIKFFVGLDAHKDTTSVAACEASREPARFVGTIGPDVRVLLKLLAKAGDPAQVSVVYEAGPTGYGLYRELCRRGYQCEIVAPSLIPRRPGDRIKNDRRDCARLAELSRAGELKPIWVPDEAHEAMRNLWRAREDAVSMRLKARQQLKAFLLRQARRYPGKTSWTRAHERWIADQRFDHEGDRISLAEYQLAVQSAEQRVQRLTIALTEAVQGWRFEPVVAALRALRGIDTVSAIGLVTEIGDIGRFSSARQLMGYLGLVPSEHSSGNSIHRGSITKTGNAHARRLLTEAAWSYRFPARLSRQLRERSASLPDAVRSHAWKAQQRLCSRFARLSSRGVQVNKVCVAVARELAGFVWAIAHQTSPPAEALH

SEQ ID NO: 205399 - protein, 348 aa, unidentified
MRDLMAGIDLHSNNIMVGIVDQEGKRVAQQKLPCELKRIGEFLAPFKDRLQTLAVESTYNWYWLVDGLQAAGYPVVLANPARITQYSGIKHADDKNDAFFLAELLRLGILPTGYVYDAGRRPVRDLLRRRMSLVHQRTALMLSFKSLFTRTTGGQMSLSRLKAMEVAEAQELYAHPANQLIAGLQIQHIEQLDASIGRLEKAVLGVARELPCYPRLKTLPGVGIILGLTITMEIGDIKRFAGPGQFASYCRTVAAQCTSNGKQKGENNRKCGNKYLAWAFVEAANFAKRYDEPCRKWYERKAARTSNVIATKALACKLAKAAWYLAAEEADYEPGRVFPQHAGAAMKH

SEQ ID NO: 205400 - protein, 400 aa, unidentified
MLSIGIDVSKGKSTVCGMKPGGEIVYAPFEVQHTREGMSELVSLLHNSGEEVRAVLESTGSYHCPVVAALLENGIFVSVVNSLRMKRFCSQSIRKVKTDRIDAMQIALYGLAYWQELQPTRLPEDTYRELQLLARQYYQMTSLLIKAKVDFNAICDQVLPGMQELMNDHAGRHKLSDFVLRYRHTTHILEMGETRFRKDYCKWAEKKGYRNCERMAAHIFATAQNGIPVLPNAPSTQIVITEAIRVLHTVEASRDAILTQMQALAKTLPEYSLVREMPCIGDTLAPRLIAEIGDVRRFHSKRALIAYAGIDAPPYQSGKFCANNRHISKRGNRYLRKTGYEVMQSYVMHKPANDPIFTFIEKKRGEGKSGKLAMVAGLNKFLRVYYGKVTELYRSLSAIE

SEQ ID NO: 205401 - protein, 387 aa, unidentified
MEVLYQSCAGIDVHQANIVVCILHGPLTSTRPKREMATFDTTTKGLRACHDFLSQFHVEAVGMESTGVYWRPVWHALCDDFELILAQPAHMKAIPGQKTDKKDAHWIAKLTRIGLLPRSFVPDETIQELRELTRQRKHYVESRNRETNRIHKFLQSGGIKLTTYIEDIMGLSGRNLLQLLVDGTPITPRIVHQSVYTSLKKKVPQLLEALDGYFSDHHRFMLKQSLEIYDFYQKQIELLEERITVYLSQYENHVETLDSIPGIDVITASVIISEVGVDMSQFPTSGHLASWAGLCPGNNESAGKKRSTKIRHGNSYLKKCLCQAAFAVKRQKGSPLAERYYQIQSRRGSQKATIALAHQLLKIAYILLKEQMTYPEFLAQKRLLGTS

SEQ ID NO: 205402 - protein, 427 aa, unidentified
MSVTQNEKIRQVTDTTMVIGVDIASELHWARAFDWRGLELGKTVKFENSAEGFNFFLRWVSELTVEQKKDSVMVGLEPTGHYWFTLAAHLQGGDFKLVLVNPYHVKRSKELDDGHPSKSDKKDPKTIAKLVLEGRYVYPYIPQGLYAELRVAMNCRWRIRKELASIQNQIQRWLKIYFPEHSKVFGRFTGAGSMALLHSAPFPSDLISLGVEGISGIWKQMKLRGIGRKRAQRIYEAAQTSIGCTTGMEASRMELQILLEDYDAKLQQYERVMQVVENLCSQIPAVAELLKIQGLGLVTVAGLFAEIGDIRRFESPRQIQKLAGLAITENSSGKHKGPTEISRRGRSRLRAILFRAAIPLLAKNREFQLLHRYYTTRQNNPLQKIQSVIAICCKLLRVFYALATKDCAYSPEKVLADIQRNQPLKAA

SEQ ID NO: 205403 - protein, 412 aa, unidentified
MLFVGNDWAEDHHDVEIVDEQGRRLARRRLPEGLEGITRLHALIGEFAPPEWAELPAEQAASRVKVGIETERGQWVAALIAAGYEVFAINPLSVARYRERHRASGAKSDAGDAHVLAEIVRLDRAHHRPVAGDSDLGEAIKLVARSHQTLVWDRTRHVLRLRSVLREFFPAALEAFADLAAADTLELLALAPDPDRAARLPAARIRGALRRARRRNVEAKTTAIQAVLRAPGLRQPAQVQAAFASIVSGTVRLLVTLNAEIAELGKVVGEHFGRHPDAEIYASQPGLGVILAARVLAEFGDDPDRFADAKARKNYAGTSPITRASGTRKIVIARYARNQRLADAMQQWAFGALKGSPGARVYYDQLRARNIGHQAALRQLANRLVGILHGCLKTGTAYDEKTAWAHHHTAAA

SEQ ID NO: 205404 - protein, 338 aa, unidentified
MESYAGIDLHASNNYTAVIDDHDKRLYGKNQPNRLDVVLSALDPFKTELKGVVVESTFNWYWLVDGLMENGYKVHLANPSAIKQYEGLKHTDDKWDAFWLAHMLRLNILPEGYIYPKEERPVRDLLRRRLLFVKHRTSHILSLQSMITRNLGVRMACRGIKKLMEEDAESMFDSPYLVLAAKNNIATIQFLKKRIKVIEREIRPLIKIREEFKNLLTIPGIGDILGFTIMLEVGQLSRFPRVGDYSSYCRCVKSERLSNGKKKGKNNKKNGNKYLSWAYIEAANFIRMHCPKAESFYQRKMAKAGGIVATKALSNKVARASYYVMRDQVPFDEDKLFA

SEQ ID NO: 205405 - protein, 344 aa, unidentified
MEVAIGVDPAKGSLAVAAVDPLGRVLDAREFSNDPGGHRALLGWIRERGPNRVIGIECSLSYGASVSRHLLGAGEDVREVPTTLTARERRRRHAQGKSDLVDSVAIARIVASGEVLSSAHRVEALTDLRALVHYRDQLVRARTQVANRAHADLVNIRPGYEREVPNLRAKRHQAKARSRLRGDRSVRAELVRRRLGELSRLEGEIVAMDRRIEAMVRKVRTTLTEIPGVGSLIAAKILGEVGDPSRVRSKAAFAVLSGTAPLSASSGQTHRHRLNRGGNRQLNWALHYIALVQCRIFPEAQAYMARQRETGKTHKEAMRCLKRQLSNVVYRHLLADARGVELAA

SEQ ID NO: 205406 - protein, 354 aa, unidentified
MFVAGIDAHTRYVVIALVSKAGELIHRPMRIPMGNPERLLAALAPYRPLEAVVETSSSWPWLHDVLTAAGIAFVLAHARKLRAIAEANYKRDEIDAELLARMRLAGLIPSVYPTPPAQREWATLIRHRAELVGQRTRLCNRIHAQLHLVGLHLARGRLLTRSGQQWLRTVAWPMLSGEARRVVRTHFRLIAHLTRLRQALDRRIARTAPTLPAAQLLQTVPGIGPYRALLLCAECVPIHRFATPGHLVSYAGLAPRSSKSGQRPVRTGPIPAGANRWVRGTLVRAVVQHVRHAPESWLTHYYGQQKARLGWPVARIATARKLARALHAMLTTGTTWQREPGRGELHMTHAAPTA

SEQ ID NO: 205407 - protein, 388 aa, unidentified
MNVGADKSEPLTAIHTDLGAIFVSLELSRSSWLITSLSPGGGEKMSKHSVPGGDFAGLMERFAQLQEKARLRTGQSFRIIVVQEAGLDGFWIHRALQNEGIESHVVDAASIATSRRRRRAKTDKIDGETLVRALLAYKRGEPRVCAMVKAPTPGEEDRRHLCRERKALTAERVRHVNRIKGLLFSQGISGYQPLRRDRRQRLEELQTGDGRAFPQHLKALVNRELDRLELLLKQIKTVEAARDALLAVGQTAKPAPAAMLLEIRGIGPEFAAILWSEGLFRHFENRRQIAAYAGLAPTPWQSGAVDREQGVSKAGNPRLRTTLIQLAWLWLRNQPRSALSLWFHERVSRNGGRLRKTTIVALARKLLVALWKYVTAGVVIEGVTMKVA

SEQ ID NO: 205408 - protein, 438 aa, unidentified
MEILYACVAGIDVHKKQVTVTARTPDTRRAGRRAQVTRTFRTFYGDLLTMASWLVVECGVTHVAMESTGPYWWPVYSALREVGGPGLTIEVCNAAHVKAVPGRKTDVKDSQWLAQLMEVGLLRGSFLPPEQVRAMRDFTRYQTKLTEERSREKQRLLKMLEAAGIKLDNVASDTFGVSGRLMLSALINGERDPVVLAGLARGALRNKTDDLRLALAGRFTAHHGRLVALHLARIDHLDQMLTQVKDSIGRVGKDPTPGLVDPFTAQAQLLMTIPGVGERAATVVISEIGVDMARFPTAAHLAAWTGLAPGNNESAGKRRKGRHRKGNTHVQSILIEAALAAAKTRTRIGARYHRLHRRFGGKPNPAAAKKAAFAVAHTLIKVIWSVLATGTPYTDLGHDFYTRRVDPETQTRRLVAQLEALSGKRIVFVDEGGDPAAA

SEQ ID NO: 205409 - protein, 340 aa, unidentified
MHKSSAEAFLSCGIDVSAAQLVVALEGEGGSWRQRSFTNRAGGHQALIRWLQKSGERVRICLEATGRYSLDLALALHAASGIEVAVLNPKLVHAFAVTLCRSKTDPADAQVLAEYARRMAFQPWHPPRAAALELRAITRHIAALTQQHTQQSNRLHALSASSTGSGWVRQDLKRSLRDLERRMEKMRGAALALIAKDAELHPRWARLLSMPGIGEISALSLLGELALLAPGLSVRQWVAHSGLDPAHHDSGSSVHKRARISRAGNRYLRRALYMPALVAVRRDPHLRAFYQALLARHKAKLQALMAVARKMLHAIFGMFRGNADYDGSRLFPGLELAAAA

SEQ ID NO: 205410 - protein, 452 aa, unidentified
MKTAAAAAAPLGLMHPHAAGLDIGKYEIWVAVPPAPDRETVRVFGTFTPDLQALADWLAACGITTLALESTGVYWIPIFELLEARGLDVYLVNARHLQNVPGRKSDVQDCQWIQQLHSFGLLRASFRPEAEMVALRAYLRQRAMLIEHRAAHIQHMQKALLQMNLRLTQVLSDITGTTGLAIIRAIVGGERNPRKLAALRHGQCQRTEPEIAKALTGSYRPEHLFALGQALALYDAYTTQLADCDRQLEQQYATLKPRFDPDDPDAPLGPDAKTNTHSKNAPDFDVRRELFQLVGVDLTHVPGLHVSSVQVLLAEIGTDMSKFPTAKHFCSWLGLAPHNDITGGKVKRSRTLPTHNRAGQVLRIAAQSVGRGQSGLGAYYRTQKARLGAPSAITATAHKLARIVYHMLQDRQPYQPLTKEAFAQQRRDRELRELEKRAAHLGYRLQKEPAAV

SEQ ID NO: 205411 - protein, 413 aa, unidentified
MVLGIDVGSKTHYARAFDYRGIEYSKKPFKFSNTEVGFATFKEWILDLKERHEKDKVVPGMEPTGHYWFNLGKFLQDNEMKPMLVNPHHVKKSKELDDNNPTKNDRKDPKVIAGLVREGRYMIPYLPDGVYADLRTASNIRFQLQAELTRIQNRISRWFNIYFPEYKTVYGKPDAKSGMLILKAAPLPEDILTLGIDGVNQIWRDAKLRAVGKARAKTLIKAAEHSIGSKEGTMSARMEIRMLLEDYESQNMRLQEVMVLIEELVKEIPMAEKLLEIKGVGIRTVSGFLAEVGDISRFNNPKELQKLAGLALVENSSGKHKGKTTISRRGRKRLRYLLFEVAMSLVAKNPEFRELHNYYTTRRLNPLKKMQSLMAIAAKLIRVFYAMLTKGVDYDPKKMISDIKRPTVYLQAA

SEQ ID NO: 205412 - protein, 360 aa, unidentified
MLYLAIDQHRKQLTVNLRNEQGDVLVKRQVSTEWRRVRSFLEEVREMGVPEGGFIAILEICGFNDWLLKLLAEYGCRETILIQPEKRSRKKTDRRDAYALGELLWVNRQRLLAGKKVQGIRRIQLPGEREAEDRQLTVVRQRMGQQRTRTINRIKHLLRKHNLEQQQPAKGLDTKRTRKWLATLPLAAIDRLEMDLLLAQWKLWDDQLARLELEIAKRQAQSKTAAVLATIPGCAAYGSLALASRIGSIERFPRPASLANYWGLTPGCRNSGEATDRLGSITKQGSAMARFVLGHMVLHVLRRDARMKAWHARIKRRRGSKIARVAVMRRLATIVWHMVKHNEPYAVGGPPRRKLSAKAA

SEQ ID NO: 205413 - protein, 355 aa, unidentified
MLSTKYIGMDIHKETISIAVIGAGGKSVMECVIETKASTILQFIHGLRGDLHVTFEEGTWAAWLYDLLKPHVTEVLVCDPRKNALLKQGSKSDKIDARKLAELLRLNHLKPVYHGEHGVRTLKELARSYLTITQDLTRVRNRLKAVYRSWAIPCTGTKVYTPRHRSEWLGKFSEAGVRRRAEHYYQQLDALRPLRQEVRRDLLTESQKHKAWKLLRQIPGIGAIRAALLIALIQTPHRFRTKRQLWTYSGLGLETHDSAQYCVVEGQLQRVKRPAMLRGLNQNHNHDLKAIFKGAALEASSGAGPFHDFYEALLAKGRKPSMARLTLARKIAAIALIVWKKEVSFDAKHLKQQAA

SEQ ID NO: 205414 - protein, 356 aa, unidentified
MSCDIKYIGMDVHKEAVVIAVLNSSGKLVMESIVETKASSILQFIHGLRGELHVTWEEGTWAAWLYDLLQPQVAQVLVCDPRRNALLKEGSKSDKIDARKLADLLRTGMLRPVYHGEHGLRTLRELGRSYQTIGQDLNRVMNRVKALYRAWGIPCAGTQVYAARYREEWLNKIPHAGVRRRAELLYQQLDGLQALRRTLRPELLAESRKHKASKLLRQIPCIGPIRAARLLALMQTPHRFRSKRQLWTYSGLGIETRDSAQYRYLQGQLQRAKKPQQIRGLNQNHNHEMKEIFKGAATRASCGVGPLRDFYVALLAKGMKPEMARLTLARKIAAIALTLWKKEERFDAEQLKPQAA

SEQ ID NO: 205415 - protein, 364 aa, unidentified
MKRKVYVGMDVHKETIRIANLTSNTKEIVKEQQIKHNEVQIKKFVNKLKSEWNEIHSCYEAGVTGYPLYRYLKSLGVNCILVAPGKIPRQSSDKIKTDKRDAIKLAKLLRSGELESIHVPSEEDEAVRDYLRSRDSLRLDLGRNRQRLMKFLLRKGITYSKTKYWTVSHNKWLNNLQFNNEILQETFNDYYSRVRVQEENLKAMDKRIQEIAESEPYREKVGILRCFRGVDYLTAMFLLCEVCDFKRFKTAGSFMSFLGLVPGEYSSGSKRKQTGITKTGSPRLRRILTEAAWQHRFPGTGSKIVTARRSGQPALVVALAEKASLRLHKKFRNLQQRGKTPQVMITAVSRELSGFLWAAMNLVA

SEQ ID NO: 205416 - protein, 351 aa, unidentified
MSQKIDAVVASTIGIDTGKNTLHLIGLDDQGTIVLREKLGRSRIRTRLANVPACLIGIEAGMGTHYVARELLALGHDVRQVPPAYAKPFRQTHKNDFRDAYAIAEAVRRPSTRCVPVKTDDQLDLQALHRVRSRLVGQRTAVINQIRGFLLERGIAVRQGLRFLRQQLPDILAKRIDVLSPRMIRIIEDLSGDWRHLDERIEHVTKEIEVLAHGSQSCRQLMTVPGIGPLIASAMVAAVANGAAFTKGRDFAAWLGLVPKQMSTGDRTILGRISKRGNRYLRTLFMQGARVIMLRPANWPKHSFGPWLTAAAKRLHHNILATALANKLARIAWTVLAQRRNYETRVMVKVA

SEQ ID NO: 205417 - protein, 405 aa, unidentified
MPLFVGIDWASAEHAVCVIDAAGKVHGRFTVTHTAAGVEDLRRQLRRFASRADLLIAIERPSGLLIDTLVDDGFTIVPIHPNALKASRPRYSAAQGKSDPGDAFILADLLRTDGHRFRPFQPLSDHTRALRALVRSRDDLVQQRVALANQLRALLDSFWPGAAAIFADVDSPIALAFLDRYPTPQSADRLGEKRLAQFLAQHGYCGRRSPTLLLERLRAAPAGLCGEMESEAKGELVRALARVLDPLVAQLAKLSAAIEHAVTVHPDGPILISLPRAGRINAAQILAELGDDRLRFANDDQLAAEAGVAPVTHASGKHRAVSFRFACNKRFRQALTCFADNSRHGSPWAADVYRRARGRGCDHPHAIRILARAWIRILWHCWHSGTPYNPSAHGGAQRLASEAAA

SEQ ID NO: 205418 - protein, 486 aa, unidentified
MAGRKKSTFERLTRGRLNRKQRRELERRLTAEDPGLEIVHRNVAGVDVGNESHFVAVPPGRDPQPVQEYGSWTADLERMARWLKSCGIETVVMQSTGVYWVPLYDLLEARGFKICLANARHTKNLPGRKSDVQESQWLMKLHTYGLLRGSFHPPDEIRALRSLWRLRDRHVKEAARTVQHMQKALITMNVQLSNAISDITGVTGQAIVRAIVKGERDPWKLAKFRDWRVKASEEEIARSLEGNWRDDMLFELGQALDAYDFIQKQIAQCDQRLKTLLEALPVRSAPIGETEADTGAGGAGEVKPPKKPRQQKQRNTPAFDLQKELTRICGVDLTRIDGIDVMTVQTFVAEVGVDISRWPTENHFASWLTLTPNRDISGGKVVKQEPRKSKNRVAAMLRTAATSLLRSDSYLGAKYRSLRTRLGAPKAIKAMARHLACLIYRMLKYGQAYVDQGTQSFQQKRAHRELSSLQRKAAVLGYQLVQPASA

SEQ ID NO: 205419 - protein, 387 aa, unidentified
MRQPNDLSRSLVALDQDSTLIAVIEMGQASWLVAGIVPGFNRHPLKKIATDQEQLLQVLRRWAKEAETTGRMIKRIAVAYEAGRDGFWLARWLRARGVEAYVIHPSSVPVSREHRRAKTDRLDTELLKRAFLGWLRGEPDHCSMAAIPTLTEEDAKRPGRERESLVGERTRIINRIKGALARLGIREFKPMLRSAPQLLETLRTPEDAALPPNTLAELRRDMARLSFVKQQINEVERARLERLQQAPGERGNAMVRLLTRVVGVGVETADMLVQEIFSRNLRDRKAVARYAGLTGAPDESGKKRRERGLAKSGNARVRRGMLQLAWGFLVHQPDSVLAKWYRARTADARGVTRKTMIVALARKLLIALWRLATTGEVPEGLAIRAAA

SEQ ID NO: 205420 - protein, 417 aa, unidentified
MGSMKKCCCGVDVHKSFIIAVIAIFRNDEVVFSRHMRFSTFTNGLRDFKEWLRLNNCYEICMESTGKYYVPVYRIVSDEQFHVDVVHPKYVRAPRGKKNDKRDAKRIADMYMRDHIAEYSIIPPADILAVRDITRYRRKTVNTMTAEKNRMSNCLTVSCIKLDEVLSDVHGKTGKALIGQIIERGGCDFDPAPYIDKRVKAPLEAFQQALDGDVTPATLTKMKIIQKRLDSLESQKAELESTMESLSQDFSRQIELLVSVPGIDVISAITIISEIGVDMNVFGSVKKFLSWVGLVPQNDESAGKKKSTRIGKGNQWLKPVIVQCANAAKNDRNHPEIPDKYLALKKRRGYGKAIVAIAKRIMTAVYYMLLRDEMYNPQTCVDRAPARGKIQLQNLINYYCSRGYVVVTDDGEVLQTA

SEQ ID NO: 205421 - protein, 430 aa, unidentified
MKSNTQNAKIEAITEKTLVLGIDVGSEMHYARAFDYRGIEYSKKPFKFSNTEAGFVTFKEWILDLKERHEKDKVVPGMEPTGHYWFNLGKFLQDNEMKPVLVNPHHVKKSKELDDNNPTKNDRKDPKVIAGLVREGRYMIPYLPDGVYADLRTASNIRFQLQAELTRIQNRISRWFNIYFPEYKTVYGKPDAKSGMLILKAAPLPEDILTLGIDGVNQIWRDAKLRAVGKARAKTLIEAAEHSVGSKEGAVSARMEIRMLLEDYESRNTRLQEVMVLIEELVRKIPMAEKLLEIKGVGIRTVSGFLAEVGDISRFNNPKELQKLAGLALVENSSGKHKGETTISRRGRKRLRYLLFEVAMSLVAKNPEFRELHNYYTTRRLNPLKKMQSLMAIAAKLIRVFYAMLTKGVDYDPKKMVSDIKRPAVYLQAA

SEQ ID NO: 205422 - protein, 313 aa, unidentified
MTPPPFVGIDVSKDHLDLHARGAGAAGRYGNDPEGIAALVARVAALAPARVVLESTGGLEHPAAAALAAAGLPVAVVNPRQVRDFARAVGRLAKTDALDAEVLALFAERVQPPARPLADAQTRALQALVDRRRQLLGMRAAEAQRRAAAPAGAVRRSIDAVLRVLDRQLAGVDGELGAAVQASPVWRVNEELLRSIPGVGPVVSRTLLAELPELGALSRQQAAALAGVAPVNRDSGRRSGRRGIAGGRAGVRTALYQAALSARRYNPALRAFADRLAAGGKAPKVILVAVARKLLVVANAILRTQQPWAAQTT

SEQ ID NO: 205423 - protein, 344 aa, unidentified
MANLNQFCDFTKLIGIDIAKSVFQIYSCDTQTGEITNVQIKRDKVLESLANCGKCLIGMEACGSSQYWARKLQTLGHTVRLMDPKLVKPFVRHNKSDKADAEGVYHALVSGVRSVAVKTKTERDIQTLLTMRALLVKQRTARINHVRGLLAEYGHVMPKSVDQFDKKVDECINSLEGDAVQLVIDMLRDTIKSIRDEHDRIKTLQREISRLASQTKNAKHFLTVPGIGETIMAYMCVLLADPTQFSSGRQFAAYLGLVPMHTGSGGKTVTTKIPGRCDKALRAVLVQGAHAVARSKCRTDWVKNILAKKPKKVAMVAIANRMARQCWAVASKGQDWRRMPVTAA

SEQ ID NO: 205424 - protein, 343 aa, unidentified
MNKISIIAIDLAKNTFQLQGNDSFGTKLWGRSLNRSKLIRFLAKQPPCTVAMEACCGSHYWAKQILSLGHQVKVIAPQHVKPFVQVHKNDMRDACAIAEAAVRPAMPTVAIKTDTHLEIQMIHRVRERLVKERTAISNEIRGLLLERGIAVSRGNKVIREQLWLMIEDAENNLSIRCRNLLVDLKDQWSDRERRVEAYDQQLQQIVQEQPECRRLQEIDGVGPVNATLLFSYAGDIKNYPTGRHFSASIGLVPRQHSSGGKDRLMGISKQGNKMVRKQLVHGARAAYRRLIQEENHSRLGRWVKRLADSGKHPNTIIVALANKLARIAWAIMAKEPRYQANWA

SEQ ID NO: 205425 - protein, 408 aa, unidentified
MNPLYVGIDVSSKSNVAYLMKPDGSKHSNFSVPNTRDGSRQLVKRILSAITSESLTDVVIGLEATSVYGDNLVCFLREDGSLAPYNKKIHVLNPKQVNKFKLSYNDLPKNDYVDSFVIADCLRFGRINKEVYLDDYRYAALKNLTRARFFAVQNLTREKQRFMNHLFKKYSTMAQEKVFSDTFSTTALAVYESFESAETLANMDLHQLTEFIIEKGKKRFPDPDSVAKAIQKAARSSYRLPKTVNDSVNQVLSISISSMRAMESQIKAFDKAIAEQMALIPNTLTSVNGIGPVYSAGIIAEIGDINRFPTQASLAKYAGLVWSQHQSGDFEAQNTRMIQSGNRYLKYYLCEAALSLVRCDAEYRSFYHRKYHEVNKHQHKRALALTARKFVRLVFRLLKDNRLYYPAK

SEQ ID NO: 205426 - protein, 324 aa, unidentified
MESQEVKYVGVDCGKKSIEVVRINSENSLERRQFSTTESGINNLLQWLTLNDIVGLEAGSQSFRIAKSILNKGVQVIVLNPGNLATIYQSLKKTDKEDSLKIARLIQRHPIEELPTVPIPNDEEEDNRRLCSEHENWTKQLTQGKNRLHSLFTQAGLTQITKKHLRTKANREISVALLPSRYQKEAERILKVLDLVEQNLKLIEKEIQEALKKNKAYVQTIMSMPGIGMITSLAIMSYMGDCKRFSSAKQAAYYAGLVPRVDISGDTVRYGRIINRGCHSIRRVIVQAAWSLVRCQHGGKVKEFYQRLYLKKGAKNRSSLLHVK

SEQ ID NO: 205427 - protein, 331 aa, unidentified
MFPVGIDVSKNTLDLCMLYGGIKGRIKTRNIQNNRHSVENILRWLRLQHCSPEDVHVVMEATGVYHERLATELHDAGFRVSLANPHRSREFARGMGIMTKTDKVDAYMLACYAFLKKPHRWEPPAPEIRYLGALLRRRDVLLGDALREENRLEKYLSTDTPADIISSCRRMAQLLREEVSNIERQIKAHIKASPALRRDYTLLTSIKSVGPQLGMHMLVVLRSHNFVSAEQAAAFLGVVPIEKRSGTSVRRRPRMSKIGPPQLRAKLYMSALCGKIYNKRMRNIYDEMCLRGKPKMVAIGALMRKLVHWCYGVLKTGTFFNDEDLKPVLST

SEQ ID NO: 205428 - protein, 338 aa, unidentified
MTYYAGIDVSLESASICVIDAAGKIIREGKVASEPQALTDWLRATGLSLERVGLEAGPLSQWLYAGLRQAGIAAELLETRHVRRAFEIMPVKTDRKDAHGIADLMRLGWFRPVHCKSINAQETRAMLTARKLVQKQVMEVESSLRGILRGFGLKVGKTTPVKFEGRVKELVAGNPSLERITDALLATRAVLRREFNGFERQVRAMARNDTRARLLMSTPGVGTIVALTYAAAIDDPSRFKSSKMVGAHFGMTPKRYQSGEIDYTGRISKLGDASVRAALYEAAHVILTKPLKGCTALKSWAMRIARRAGMSKAKVALARKLAVIMHRMLANGTTFHAA

SEQ ID NO: 205429 - protein, 323 aa, unidentified
MQGKVSPERSAMTPVYVGIDVCKDRLDVYIHPVGLRLEFANSPEGIKRLKRSLKLHQVALVVMEATGKFHRAAHRSLHAAGFAVAIVNPLRSRLFAEAAGALAKTDRVDCRMLAILGESLEPDAVAPPSALMESLQDLVRCREAASDARTALLNQLGATTVRPAVAEINRQLRATETAIENLGAEIERQIAADPFLTRRMAILTSIPGVGIATAIALIVGLAEIGSLSAKEAAMLVGLAPIACDSGQSSGPRHIKGGRAHVRRALYMAALSAARFNPALRAFHDRLIKKGKLAKVALTAVMRKLLVLANTLVRENRKWEPLHA

SEQ ID NO: 205430 - protein, 309 aa, unidentified
MDVVVGVDVSKAQLDVHVLPSGEVFAVSNDADGLASLAERLAKLEPQVVALEATGGLETIAAGILAAAGLPVAVVNPAQVRAFAGALGQRAKTDPIDAWVIARFAQATCPRARPVPDEELRLLADLVGRRRQILQMLTAERQRLQRAREPRLKKSLGRLIRALQKELEQIEGDIDQAVRASPAWRRKEDLLQSVPGVGKVVSRTLLAEMPELGTLDRHQAAALAGLAPFTQRSGQWRGKSFIAGGRTTVRSALFLASLSAARHNPQLKAFHQRLIAAGKPKMVALIAVARKLVILLNAILRDQIPWQTA

SEQ ID NO: 205431 - protein, 316 aa, unidentified
MKQMNPCVGIDVAKAHLDVALSPTDPIFTVANTEAGLKPLVTQLQQLAPFRIVVEATGGYERLVVRVLVDAGLPIIVVNPRQVRAFAKATGQLAKTDAIDAQLLALFAARVQPALRAHPDQATVALAALLARRRQLVAMITDEKHRRHLATPPIRKSIQKHLLWLEHQLTTLDTEFTARIRQSPVWQAQEDLLQSVPGVGPVMSRTLLADLPELGTLSRRQIAALVGIAPFNQDSGTRRGRRTCWGGRAPVRTALYMATLVATKWNPVIAVFYHRLLIAGKRKKVALVACMRKLLTILNAMVQHKTKWQEIRSSTS

SEQ ID NO: 205432 - protein, 439 aa, unidentified
MTSMTTTVRVIGGVDTHGHSHHAAVIDGVGRQLDDREFPASPAGYGALLEWLRGYGELDRVGVEGTGTYGVGLTRHLREAGALVVEVDRPDRRARRAQGKSDPLDAYSAARAALSGAASVVPKLRDGPVEAIRALRVARSSAVKARSQATNQIKALIVTGPAQLREQLRHLPTGMIIAACARLRPGHNLGDAEQATKTALRRLARRHQQLAEEIAEADHELDQLVHQVAPALLALPGVGPEVADQVLTSAGDNPNRINSEAAFAHLCGAAPIPASSGRTRRHRPNRGGDRGANNALYVVVLGRLRYDSRTRAYVDRRTQEGLSKPEIIRCLKRYVARELNMPYRPQSPRTGPSNRLPNHRSIDPLAGCSREYLTGAAGQRHRTYRFLRRQSDPASWASTAELEGGPVVHHDLLLASPLRGEEVDQPCRAQQAGDCARRR

SEQ ID NO: 205433 - protein, 377 aa, unidentified
MSNVRFIGLDVHAETISVAVAEPKGEVRSLGTIPNRPESVARLVKKLGKPEQLRACYEAGPTGYVLYWQLSELGVKCEVVAPTLIPVKAGDRVKTDRRDAEKLARCYRGGDLTAVWVPDAAHEALRDLVRARLAAKRDQLRARNRLGKFLLRHGRRAPEGTKAWTAKHLLWVKTQRFEQAAQQMTLEDYRHEVEHAGERIARLEHSIDAAIETLPVKMRAVVAALQSLRGVAQVSAVSIVAELGEVSRFAGARQLMGYSGAVPWEDSSGQRVHRGSISKAGNAHLRRIVVEAAWSYRHRPAIGHSLKVRQRHCSARVCELAWKAQHRLHQRYARLTARGKSKQHAVTAVARELLGFIWAIGIEVERSQEVKPMRRAA

SEQ ID NO: 205434 - protein, 426 aa, unidentified
MKNRTNQRLEEITAGTLIVGVDVAKSVQWARFVDYRGAEVGKAVSFRNDRQGFEYIVTKIETLCKCKFEKVIIGMEPTGHYWKTLANYLMKAGYKVVGVNPYHTKKSKELDDNSPTKCDKKDAITIARLVKDGRYFDPYLPQDVYAELRVLSNTRVSILKRSSAVKNTITAVLDEYFPEIVKVFKYPLKGKASRQILKSCPFPTFILTLGADGVLAEIKKAVKKTVGMKKVEQLIETAKESIGVEYGLESAKLRMNCLISELEMIENNLVEIEISMEKMLVATGYAEKILSMKGIGIVTAASFIGEVGDPLRFDSDRQISKYAGYNLIEDSSGKNKSGTGISKRGRKQLRSVLYKMAFTMVGQNAEMKELYRYLLARQDNPLKKKQALVVISKKIITVIYSMLKKQETYKPELVLGTVRKEMLLAA

SEQ ID NO: 205435 - protein, 409 aa, unidentified
MDQIHDRVGGLDVHRDSVTACSRQVGPRGGVVHEKGRFGTTTAGLAELGHWLAERRVSLVAMEATGVYWKPVFYALEDCFELWLCNAHHVKNVPGRKTDMSDAEWLADVAAHGMVRPSFVPPPPIRALRELTRYRRTQVDARVAEIQRLEKVLQDAGVKLTSVASGVLSQSGRAMLEALIAGERDPGRLAEMAKGRMRPKIPALVEALAGHFSAHHAVAARRILDHVDFLDETIAALSAEVDHRTAAFALAYELLLPVPGIGKLTADVIVAETGADMSRFPSAADLASWVGVCPGNHESAGKRRRVATTPGNPWLRRALIEAARGAVHTKGSYFGAQYRQIARRRGPNKAAMAVAHSLVELIWHLLSTGQPFEDLGDDYFQRRQDTTRQARRLVAQLEQLGFNVTIAAA

SEQ ID NO: 205436 - protein, 349 aa, unidentified
MIVVGIDPHKQTHTAVAVDRSTGQVLGELTVKARTPGFERLVEWARELDAERTFAVEDGRHVSGHLERHLIVRGERSVRVPPRMMGESRRTDRVWGKSDPVDATAVARAALRHPDLPEATLAGPERDIGLLVAHREMLVNERTDRICKLRWLLHDIDPDLAPALRTLDRFKTLDRLLEELQALEPSVPTEICLELLARCREITVRASELERRIGMLVRAQAPALLQIPGCGALTAAKIVAEAAQVSRFPTEGHFARYAGTAPIPASSGARHRQRFNRRGNRQLNAAMHRIAVTQIRMHDPAKDYIAKKRAEGKTKTEAIRALKRHITRRVFKTLTTMDQPVDRLTAVAA

SEQ ID NO: 205437 - protein, 432 aa, unidentified
MSQFLNDFVVGIDVSSEFSIVAMLAPTGELIRKPFRIDHNPTGFHKLLDILKKEEERLKRKPIYFVESTGIFHLPLFFFLKSNDLRGFVLNPLCVHSTKNFDLRKVKNDNKDSEAIARLAKYQDVKVSMMPEPQILVLRMMTREYYAVSDMLTVMKNRLCTDLYLLFPGFLNVFSGPFGKTALAVLKNYPSPRAIRDADTDVLTLLISKASRKSSEWASNKVALLRDCAQLASSMPSEFSLLDTKIKFHIDGIEHMQASLNGIEAQVKTMIKSKEFPANAKRNIELLDEIPGVGFFTAATLIAEIGDFSLFNSPKALTAFFGLDPSVNQSGKFNGDRNKISKRGTRIGRRILFTVAMASIRRTRNGKEINPVLRDFYASKCVSKKKKVALVAVMHKLLHYIFAVLRDQKPFEFRKPEDHQSWRKAKLQPVAA

SEQ ID NO: 205438 - protein, 347 aa, unidentified
MVIVDSTRVVVGGVDTHLDEHVAAVVDSVGGVLGVARFAVTPSGYGRLVSWMRSHGLLERVGVEGTGSYGAGLSRHLLKSGLVVMEVTRPNRQERHLNGKDDDLDAIEAARAVIAGRALATAKTSTGNTEALRVLVGAQRSAKQARISAMVQLRHLMFTAPDDLRERYAKLSRKELTAQCARLRPRLDGDMVRYATKTSALTLARRAQALAAEIDELDALIAGLVKQTAPELLNVYGVGTDVAAAILVAVGDNPERIRTEAAFAKLCGVAPLPANSGKRTGRHRLNPGGNRHANSALWHIVLTRISQHEPRTAAYVERRREQGLSTREIFRCLKRYVAREIFTALPR

SEQ ID NO: 205439 - protein, 387 aa, unidentified
MAQQLDDLSRSLTPLEQDSTIIAVIEMSQASWLVAGIVPGIERHPLKKLEPSEVELVRLLMRWRAEATQKGRTITRIAVAFEAGRDGFWLARWLRARGIEAYVIHPASVAVSREHRRAKTDRLDTGLLKRVFLGWLRGEPDHCHMVAIPTLAEEDAKRPNREREGLVRERTRLVNRVKSCLVRFGVRTFKPTLRTAPDRLATLRTPEGVPLPPNTLLELRRDMARLRFVMDQIKDVEEARAQGLNQAPPDKTHVMVRLLARVIGIGLETADMLVQEVLARTWRDRRAVARYAGLTGSPDESGSRRREKGLAKAGNARVRRGMIQLAWRFLLFQKESALAQWYRARTADARGSTRKTLIVALARKLLIALWRMVTTGEVPAGVVLRAA

SEQ ID NO: 205440 - protein, 366 aa, unidentified
MASIADTPYTFIGLDVHKDSISAGILEPGVDDPTHDKIFHDEPSIRRLMGRHDPARLRVCYEAGPTGYGLARLLASMGIDCQVIAPSLIPTAPGDRVKTDRRDARRLARLHRAGELTPIRVPSMREEAVRDLCRIRVDAVQERRRARQRLGGFLLRHGRMFREAGNWTLKHTQWLNSLTFDEAAATATFGHYRAMLQMADTALQGIEEDLAAWTVTEPFAGPVARLAAYRGIQPLGGLVLTAEVCDFRRFATASSFMSWCGLVPSEYSSGGSTRRGHLTKAGSQMVRNQLIESAWAYQHRPAVGAGLRTRQQQVSSATIARSWAAQQRLCGKHRKLAARKDSKSVVNAAIARELAGFVWAEMITDD

SEQ ID NO: 205441 - protein, 443 aa, unidentified
MPKCVLERVCEFARTSDQYLPISGNGNMDTENEIVCGADIHRDFLVATIVSKNGLRLQERFDMNQDGLLAFKKWILDHKCKKVALESTGSYWYPIFYILEGHVEFLLVNAYQIRNIDGKKTDRLDSERIGIYCLNGLIKPSRIYPKDYRDLRNLTRSREALVNARSKIKNQIHQLLATCCIKLSSVISDLFGKSGRYIIERLLEGKTIDQILSGIPSKRVSKKADKLKEAIKNSIDPNIVFLIKANLEVIDAISEKIKLLDAEISAKVKIFKEDLKIVLSVPGTGLISAATIIAEMGDFRDFPSADKMAMYFGIVPSVYQSAGKLRTGKITKRGSKHMRRILVEVAKAISKTKKDSKLKRFFQRVMAKSGRNVAAVALARKILCILYHLLMKCEDYQEPEVKKAKPKMPSCISAASMMDIDEMIRIISKAGYLVERDLKDGCG

SEQ ID NO: 205442 - protein, 391 aa, unidentified
MEVRLVSTTSTVRDDALAACLIAIELSKASWVVGVQTPISNKPSQFRLAAGDWQGLLKLIEQTRRQVARELGLGIEIVETISCYEAGYDGFWLHRLLEAHGVRNFVLDPASLLVNRRARRAKTDRIDVVRMLRALTRYLRGEPDACSVVRVPDVAQEDARRLHRERDRLVRERVQHVNRIKGLCATQGIYDYEPLRSDRKVQLEGLRTGDGRSLPARLKAEIIRELQRLELVLKMIAEIEAERDAIVKEEASQHVNAGKIKALASFKSIGAEFATKLVGEVFYRSFDNRRQLGSYAGIAPSPYSSGSMERDQGISKAGNPQARSTAIELAWMWLRHQPDSALSIWFRERVGDSKGRVRRIAIVALARKLLVALWRYLETGLVPTGAVFKAP

SEQ ID NO: 205443 - protein, 323 aa, unidentified
MQGKVSPERSAATGVYVGIDVCKGWLDVYLHPIGQGLRVANDPTGLKRLKRELARHEVVLVAVEATGKFHRLVQRHLHAAGLAVAVTNPLRSRLFCEATGQLAKTDAIDARLLAIMAESLNPRATPPPPEIVEELQEIVRARAAAVEDRTALLNQKAAARVGLLKSELARRIAAIERCLVRLEKAIQAIIARDAMLARRFEILLSIPGIGPIAAIGMLAGLAEMGARSGKEIAMLSGLAPVACDSGETNGQRRIRGGRSHVRTAVYFAALSASRYNPDLARVYQRLIAAGKRPKVALVAIMRKLVVLANTLVRQDRLWQPNPA

SEQ ID NO: 205444 - protein, 379 aa, unidentified
MERIIYIGMDVHSTSYSLCALEPVFGQENKFFFETKVAAEPSNIIKYIDDIESCFANDECTFVTGYEAGCLGFSLYNYLKGRGIDCKILAPTKMSEEKGGKKVKTDKRDARTIAQNLAYGTYSAVFVPTEEDLAVRDYIRMRNDHKAAVKRIKQQINALCMRHGYIYQRTKWTAEHLKYIKGLTLSPLYREILQEYLATMEQLNNKIKAFDVRIEELSKTKRYKDNVGKLACFTGITRSRALAIIAEIGDFRRFLKPLNFAAYVGLVPGEKSSGKKQKRIAITKAGTGHIRKELIEAAQSICRGLPGYKSRALLARQQGNDTTVINYADKASARLRRRYYKLGRCGKKHNVAVTAVARELSCFICGMMNGLTEVQIKKA

SEQ ID NO: 205445 - protein, 348 aa, unidentified
MDHYAGIDVSLEYSSVCVVDASGKIVREGKVASEPEALVAWFASLGFELTRVGLEAGPLSQWLYAAMRQAGLAVELLETRHVHKALETMPVKTDRNDARGIAQLMRLGWFRPVHCKSLAAQETRAMLTARKLVQSKLHDIENGLRGILRGFGLKVGKTTERSFAGRIRALVAGHPNLEALAEALLSVHAVLLREFNAFEKRVRSLARSHAKTRLLMTTPAVGPIVALTYASAVDDPARFKSSKAAGAHFGLTPKKYQSGQTDVSGRISKIGDAAVREALYQAAHVMLTKPVKGCSELKSWAMRIARRAGMRKAKVALARKLAVILHRMLANHEPFNPTAGAKTVTAAA

SEQ ID NO: 205446 - protein, 381 aa, unidentified
MEASPNRSCLAEETYGGKKMSKTEEKRRLCVGVDLHKTQFTVSALTEDGEVILQDVYRTTPDGYSEFIEEMHRYEEEDGCSIELAVETTGNARFFKNQMEKEFFDVTVVNTNKFKVITYSTKKTDANDALTLAMYLQKEMLPEAHLCSQTSEEIRRMLKTRRILVQSSVKIKNQIHGMLIGYGIETNAAQFQSKRKRQELMNDLANHYYSDFTASSLEVMLNILDVLAEQIKDVEEQIEQMVEDNEDVELLKTIPGVGKIGAATIASYTEDLERFDGDFKRFAAYIGIVPSVHNSNETVHLGHITKHGPQELRTAFVQVALGMIRASKQTSNWRLIEDYRRKKTDKGSGRAIIAMTRKIARIVFVMLENREPFNPELMLSK

SEQ ID NO: 205447 - protein, 344 aa, unidentified
MNEVITIGVDLAKNIFQVHGVDAEGGVVVRRQLRRGQMLAFFKKLPACLVGMEACATAHHWARQLIGLGHEVRLMPPHYVKPYVKRSKNDATDAAAICEAVTRPTMRFVSVKSMDQQSVLMLHRTRELLVRQRTMLINALRAHMAEFGIVAPTGVPRIKELLTVIADEEDLRLPSLARTCLESLVRQYLSLNDEIIAAEQRITRWHRSNEVSQRLETIPGIGQIIASALAATVTDPEVFKSGRELAAWIGLVPRQNSTGGKQRLGKISKQGDQYLRWLLVAGAMSVVRHAKRRGRTDLPWLADIIDRKPTKVAAVALANKNARIVWALLRHGGTYKIPSSVSAE

SEQ ID NO: 205448 - protein, 463 aa, unidentified
MKHNRRHPRARVSASVLERINPNAAGIDCGSAEHFVAVPPDRDPMPIQSFSAFTNDLHRLAAWLTACRVTSVAMEATGVYWIPLYEILEARGFQVVLVNARHVKNVPGRKSDVSDCEWLQELHSVGLLRASFRPSAAIAVLRAYVRHRETLIDSAATHIQRMQKALVQMNLHLHLVISDITGVTGLRILRDIVAGHRDPQALAEHRDYRCAASKQQIIAALTGHYQPEQLFVLKQNLELFDTYQSQIAACDVEIEAHLQKLAAESTAPLTSMPPPRTGRKPRVNEPRFEIRSPLYRLTGVDLSRIDGLGPYSGLRLLSEIGADMSRWPTERHFTSWLTLAPKNKISGGRLLSSHTVPSANRAAAILRLAAMSLSRTQTALGAFYRRLAYRVGKPKANTATARKLAILVYRALKHELVYRDPGAAAYDAHHRTRVLRHLRERAANLGFALVNLQTGEVAEGAVS

SEQ ID NO: 205449 - protein, 371 aa, unidentified
MKSNSTTKFIGLDVHSKTISVAIADEGRKGEVRHYGTIDNTFEAIEKVIKSLASTGTELRFIYEAGPCGFALYRYLTGNGFKCIVTAPAMIPKRKSVRIKNDRRDALTLARLYRAGELTGIYVPEPEDEAIRDLGRARDDARMAERKAKQRLNSFLLRNNLIYPGKTKWNRTYFNWLGSVGMKYPAQKIALQEYIDAVHECTGRVKRLSEQIGLAVEDWRMAPMVKALQALRGVSLICATITVAELGDLSRFQNPKELMAYLGLVPSEHSSGETIRRGGITKTGNGHARRVLVEGAWTYKHHARVTLPLIKRQRELPKSICQISWKAQLRLCARYRKMVARKKPNNVVVIAIARELAAFMWAIAQEVRAAA

SEQ ID NO: 205450 - protein, 387 aa, unidentified
MEHVVIGMDPHKRSVTIEVMTGTEQVLAKQRFDTTSGGFKQLLTYTKQWPDRLWAVEGCNGIGRHVASRLVRAGEQVVDVPPKLSARLRMFDTRQGRKTDPDDAHAIAMVAVRMNGLRPVVNDEQHDLLRILADRRRALGEDHNRMISQVHQLLLELIPGGAKKDLSAAQARVLLAGVRPRDLVGKTRKRVALELVGDLEKVYQRSKALDKEIKQLIIETGSTLMDLHGIGPSSAARLLIEVGDINRFPDRNHFASWNGTAPLDASSGDQTRHRLSRAGNRQINRALHVMAIVQLRNPTEGRTYFDRRKAAGKTSMEAMRSLKRRLSDIVYRTMVTDALAVGAGPGGQRGNDSDSSATGLTPHTSTSEKPQPGPANPSLRPALPAAS

SEQ ID NO: 205451 - protein, 409 aa, unidentified
MRIIGLDIHRAFAEAVAWKNGKLRRLGRVDMRRDLLGAFAAKLLPDDVVVIEATGNASSAAAVVAPHVKKVVIANPKQVRIIAHAKIKTDTIDAGVLAQLYASGFLPEVWIPDEPTQALRRQVTRRNQIGRQRTRLKNVIQSILHSHLIPSCPHADLCGAKGRSWLNEQIVPEDERLAIDRHLREFDRLGEDLQVIERDLARSALDDEGVKRLMTIPGVDMTVALAMKAAIGDVSRFDAPRKLVSYLGLNPSVRQSGPGPAYHGRITKQGRGHARGMLVEAAWAAARAPGPLRAFFLRVRARRGQHVAAVATARKLSVVIWHLLTKGESYAWARPSLHAKKLRDVELKAGSKAVRGQKGAAHAYNIKSHREEERRWVEQAESAYTRFVAGWNSRGPKKARTDAANEMRR

SEQ ID NO: 205452 - protein, 340 aa, unidentified
MTIVMGLDQHRAQITTEWLDTATGEIGRARVAPAHRDGVRRFLARFAGQELEVALEATTGWRFVVEELRRVGAGVHLAEPAETSALRGKKKRPKSDRADARHLRELLMIGRLPESWIAPDHLLDLRSKVRLRHTLVDQRGEWQQRIRAVLYHHGLPQRAELHLLSGEGRGWLDEVDVPDAAREQIIVALAMSEALDAQIAPLDKQLRAYARRQLGCRALMRHYGIGELTSVAILAELGDCQRFSSSRQAVRYSGLDITVYQSDGHRSPGHLSRQGPPVLRWALYEAAQVARRQGSPDRGYYDQAAERLGSNRACLAIARKLLLRSYHTLRELGEEALQPA

SEQ ID NO: 205453 - protein, 346 aa, unidentified
MTTLERSRRVTGGVDTHLDVHVAAVLDDIGGLLGVEPFAASRAGYGQLLQWMNSFGIPARVGVEGTGAYGAGLARYLQAAGVEVIEVDRPNRQARRHHGKSDPADAVEAARAAHNGRVQAVAKSRNGKVEAIRTLVVAKRSARQARIKALNQIRHLSFTGPDELRARLAGLATARLAEQTAALRPRPGAEVVAYATRVALRTLGRRILALDEELAALNELLAELVAAAAPQLLAVHGVGVDTAAALLVAAGDNPERLRSEAAWAHLCGVAPLQASSGKVTRYRLDRGGDRQANQALWRIVMVRMSTDDRTRAYVERRTKEGRSKREIIRILKRYVAREVYRLLSRP

SEQ ID NO: 205454 - protein, 344 aa, unidentified
MTYYTGIDVSLRSVSICVVDDKGEVCLEAKVAAEINAIVHRLRRFSSDVKSVGFEAGTLTQYLTYGLQAAGFEVICLEARQVSVTLSAMRNKTDRNDARGLAQILRTGWYSRVHVKSLHSHQVRALLASRKAILKKCVDLENELRGLLKVFGIRLPSRVGHGSFDAELRETVSTDEMLACALVPLLDARTVLYKTYLKLDNAVKGLVRVDPICRRLMSIPGVGPVTALTFKAAVDDPNRFKSSRTVAAHFGLTPRRFQSGEVDNSGHISRAGDADVRSALYVAAHSLLTRNAQWSTLKAWGVRLAKTRGHRRAVIAVARKLAVVLHRMWIDGSEFRWGTVATPA

SEQ ID NO: 205455 - protein, 347 aa, unidentified
MTVYLGVDFHARKQTVSYLTTEDGEIEQVELEHEKDYVRTFYEQFRGQEVIVGFESSGYAAWFEEMLEELEYETWVGHAAAIRQFARRRQKNDRRDADLILELMVRGDFPRLHRYSRESRETLQQLRYRQRLVKMRTMVINSLRFMVASRGVTLRGTLQSRPGQARLQQVALPGPLGQQRDELLRLLLEIQQKVETVEEWLKQKAEADPRVQRLRTHPGIGLMTGLCLVATLESIERFANPRKVTAYAGFDPVEDSSGERKRMGSISKQGSRLLRLLLVEAGQVAARRDAELGQVYRRVTLRRGHATAKVAVGRRLLVRAFIMLRDEIDYAEFCRRGVAARSARGSA

SEQ ID NO: 205456 - protein, 393 aa, unidentified
MIYVGIDIAKNKHDCVILSDHATCLRPCFSLKNNSQGFALLINAIKEACGGDFNHGEVKAGLEATGHYAHNIVAFLNSNGIDTTIFNPFLVNQYRKSRSLRKTKTDKADAMLIAELLISTAANPATSSYHNQEMKTLCRYRFSLVKQRSKLKADMSRYVDLLFPELGSLGLNPTSSSVMAMLKELPGASYISICNISQLTDILSSSSRGRYGKETAEQVKAMAKESIATANKALSYIMSDTIEQICLLNKRIAKIDGELKNEVEKSGTKLTSIPGIGFCIASVILAEIGDINLFSSADKLQAFAGLDPSTFQSGNFTASHTHMVKRGSAYLRWAIMQGARLCSLNNLKYKQYLDKKIKEGKHYNSALGHLSKKLIRLIFHLLKENEEYDPKVA

SEQ ID NO: 205457 - protein, 388 aa, unidentified
MNVGADKSEPLTAIHTDLGAIFVSLELSRSSWLITSLSPGGGEKMSKHSVPGGDFAGLMERFAQLQEKARLRTGQSFRIIVVQEAGLDGFWIHRALQNEGIESHVVDAASIATSRRRRRVKTDKIDGETLVRALLAYKRGEPRVCAMVKAPTPDEEDRRHLCRERKALTAERVRHVNRIKGLLFSQGISGYQPLRRDRRQRLEELQTGDGRAFPQHLKALVNRELDRLELLLKQIKTVEAARDALLAVGQTAKPAPAAMLLDIRGIGPEFAAILWSEGLFRHFENRRQIAAYAGLAPTPWQSGAVDREQGVSKAGNPRLRTTLIQLAWLWLRNQPRSALSHWFHERVSRNGGRLRKTTIVALARKLLVALWKYVTAGVVIEGVTMKVA

SEQ ID NO: 205458 - protein, 341 aa, unidentified
MTAIGIDTHKATLAACAVDGLGAPLDERTFPNDPDGHRALAGWARRVAPGAIIGLEGSASYGAGAARFLIAEGEQVREVPPHLSRRERIRTRRAGKSDPGDALAIARVTAREVELPPVRVADRTREIGLLVEAREDAVAEATRVRNRVHADLVVLLPGYQSVAQNLVAACHRRAIARQLRRLDSVQAALALGRLARLRALDAETRELTARIAVLVGAHPLLALPGVGVLTAAKLIAETGDVGRFRSSDAFAALAGVAPIPASSGQTSRMRLNRGGNRQLNRALHTIATVQAVHYAPAREYLARKRTEQKTKREALRSLKRQLVRTVFRMLREGAPDLALAS

SEQ ID NO: 205459 - protein, 357 aa, unidentified
MLSSKVKYIGLDVHKEAIAIAVVNGAGKLVMESIVETKSSTVLDFLHGLRGELHVTLEEGTWAAWLYDVLKPHVREIVVCNPRRNALLKEGSKSDKIDARKLAELLRAGLLRAVYHGENGLQTLRELARCYLTISKDLKRVKNRLKALYHSWGICCAGKQVYAARHREQWLSKIAQVGVRRRAELFYQQLDGLLVLRNTVRGELLAESRKHQAVKILRQVPSIGPLRSALLLALMQTPHRFRSKRQLWTYSGLAVVTHDSAQHRYVDGQLQRSKKPQQIRGLNQNHNHAMKEIFKSAALNASRCAGPLQDFYARLLAKGMKPDMARLTLARKIAAITLALWKKGGSFDAEHLKSQAA

SEQ ID NO: 205460 - protein, 318 aa, unidentified
MKVGIDVSKLTFDVTWGNKESLQHRCFDYNEEGIKALLDLLPNDAHIVMEATGVYHSRLALWCYEADLKVSVVNPVAIKRFGQMLFKRAKSDKTDSALIHQFAESQNPDLWVPSSEAINELRQAIGWVDDLIRERTVANNREEAVRHNARPSQFVLGEIKDFRKYIKVRAKKCDQYLKAVVKKHFPELYNRLQTIPSVGEKTAIDMIVITEGFTKFTNDKALAAYVGVSPTTYSSGTSVHGRGGISRASKERSRQYLYLCSWTARRINPGCAALYQRMSEAGKPPKVISIALAHKLLRQIFAVGMGSHDYQAESTYLT

SEQ ID NO: 205461 - protein, 381 aa, unidentified
MTEMVIGLDPHKASNTIAVLDRDEMLELEQRFDNTARGMVAMLDAVAEFTDRVWAVEGANGVGRSIAQRLVAVGETVVDVPAKLATRVRIYSTGHGNKTDRADAVAIGRAALHSKHLRMVRPDDENVALKLLSDRRHELVASRTQSVCRLHRLIRELIPGGTPRALTAERAEALVNGLDVSDTAGLMRIELALDHIDDIKRFDRRLDQIMLKIHAAVKDSGTTLTRIYGVGILNAGLILGEVGDVSRFPTRNHFASYSGTAPIAVSSGDNNRHRLSRSGNRQLNHAIHIAAIAQIRYDTPGRAYYRRKLNENKTRREALRCLKRRISDAIYRQLQLDRETDQQQDQTWPRWPSARGDYSSYRSPNTLRRNGQPMKSRTAAV

SEQ ID NO: 205462 - protein, 327 aa, unidentified
MSTVVTIGLDLAKSVFQIHGVDDAGRAVLRRRLSRHELVSYFAKLPTCLVGMEACSAAHHWARELSRLGHGVRLIPPQYVKPYVKRNKTDAADAEAICEAVGRPNMRFVPIKTMDQQGVLSLHRVRSLFVRQRTAAINTVRGLLTEFGIVAGKGIRRVAELRQRMDKVGGDLLPAEARAAIAEAFDHVDELTERIGAIEDRIVAWHRNSEASQRLASAPGVGPITASAIIASVGGGRQFRSARHFAAWLGLTPRIHASGGREHIGKISKGGDRYLRALLIHGARAIVGTSFRKDVKPRPWLKQLLARRPVNVAAVAVAHKTARAFGR

SEQ ID NO: 205463 - protein, 433 aa, unidentified
MKVLYERVAGIDVHKDMIKVAIRSPGEKPWTRKTEILEFRTFYGVLQAMACELRRRGVTHVVMEASGVYTEPVYYALCEQDFTEVAVINPAHAKALKGHKTDARDCARLAELSGCGLLHGSYIPAPELKEVRDLTRYRMKTVQARTSEIQRLGKALESAGIKLGSVASSITGTSSTAMIEALIDGERRGGVLADLARGRMRDAGKLADLSMALSGRFTEHHALLCRLHQDRIAGFDAAVAGLDERIAGKAARWQREAGLLTSVPGFGDVVAQAWLGEIGPAPHRHFATCEKLACWVTLCPGNNISARKRKHGRTGDAGTYIKPMLVQAAWSAIRVRGRLQARYNRLVRRFGGDKNPAAKKKAITAIAHTLLKIAYQVLKSGTPYQDLGADFYTRRESPEHKQAWLERQLQKLHPGCTVTITISPPEAALAPGD

SEQ ID NO: 205464 - protein, 454 aa, unidentified
MMKGKKNRTNTHKKRLQQHLEHVNLYAAGIDIGSREHYVAVPPSLDEDSVKKFGCFTPDLEAMADWLVKIGITTVAMESTGVYWIPAFEILESRGLKVILVNARHVKNVTGRKTDVKDCQWLQQLHTYGLLHGAFRPEDDYVSLRAYMRQRETIVSHLASKIQHMQKALRLMNVLLDNVVSDITSQTGMAIIRDILSGIRDPKELAKNRDCHCKNSAEIIAKSLVGNYRDEHLFALKQSVELYDFYNAMLDECDQVICLYLSTLRTQADASERPAQKKRKKCNSNALRFDASINLYELCGVDLTAIDGMEEHGLLKIIAETGIDMSKWATENRFTSWLGLSPNNKISGGKVLSSSSIKTKNRAKQAFKMAAFSLSNSRSGLGAFYRRLRARIGAPKAISATARKLAVIFYKMLKNKTEYRKQSQEEYDELHKSRVLKQLKHKAKLFGMELIASE

SEQ ID NO: 205465 - protein, 375 aa, unidentified
MDTVRFVGLDVHAETLVVAVAETDGEVRSLGTMPNRPEAVRRLVRQLGPVDQLRICYEAGPTGYVLYWQLIGLGVHCDVVAPSLVPTKAGDRVKTDRRDAEKLARSYRAGDLTPVWVPDAEHEALRDLVRAREAAKKDQLRARHRLGKFLLRQGRRRPAHLKMAWTIGHLDWIRTVHFDSTAHQVVLADYLHEVDRVATRIAHLNQAILEAIRTAPPQMQAVIQALQALRGVAAVSAATIVAEVGQLSRFEKPRYLMGYSGLVPSEYTTGPRRRTGAITKTGNAHLRRVVIEAAWAYRFAPAVRAPLRARHAGLDPAITEIAWRAQKRLHDRYRTLAAKGKNHNQLITAVGRELLGFIWDIARTVERQVPVAATA

SEQ ID NO: 205466 - protein, 408 aa, unidentified
MRVIGLDVHRSMAVVAVLENRRLTSGGRIDLTRDAVIAFGRKLRPDDEVVIEATVNTAAIVHLLRPFVRRVVIANPLQVRAIAHAKIKTDKIDAAVLAKLHTSGFLPEVWMPDETTETLRRLVAHRAQVIQQMTRAKNRIHSILHANLIPPYQGELFSVAGRCWLKTQPLALDETLAIQRHLADLDCRASDLGVLDQALAQRALQDTRVERLMTISGIHVTVALGLLAAIGDVSRFASSEKLVSYLGLNPSVRQSGDGPAHHGHISKHGRAHARAMLVEAAWAAARAPGPLRAFFSRIQSRRGKPVAAVATARKIAVLAWHLLTKNENYAWARPALLENKLRKVELLAGQPAAKGRRPGRAHAYNLRAVRQRERAWVEQAEGAYTRFVANWQIKPGQRTGAANRKRPS

SEQ ID NO: 205467 - protein, 316 aa, unidentified
MNKTVVQNINVGVDTGKDFLDIHIRPLNEYFKVSNDKKGVAEATKRLRKLNIERVVIESTGRYESLFVNACAKADIPFSIVNPVHVKRFAGAIGRRAKTDKLDAALIAQFGEVIQPKLSRLKPENMQKMADIVRRRNQLIEMQTKEKNRLQIMSKTIQPNIKAMLVLLKKQIDKMNDELAKLIESCPDYRAKSELVQSMPGIGKISAAALISYLPELGLMNSKQVASLVGVAPMNKESGKYKGKQVTQGGRHQVRTVLFMAMMSAMQCNRKFKTFYERLVEAGKPKKVAIIACVRKMVIILNSMVRDGVMWEEKTV

SEQ ID NO: 205468 - protein, 314 aa, unidentified
METSAQPVFVGIDVSKNKLDVALWPSGEGFAVERNAKGLNSLCAKLAALNPVTIALEATGGFETVVAAALAAASLPVAVVNPAQVRAFAQALGKRAKTDSLDAAVIARFAEAAKPAIRPLADAETQLLADLIARRRQIVDMIVAEKQRLGRAPAKRLKKSIERLLKALEKELSNLNGDIDTAVRASSLWRANEELLTSVPGVGPTTARTLIAELPELGSLTRKEIAALAGLCPFTRQSGQWRGKSFIQGGRASVRAALFMAAMVAARFNPILKTFYARLTAAGKPKKAALIAVARKLLTILNAILRDQKPWQTA

SEQ ID NO: 205469 - protein, 370 aa, unidentified
MQFNAYSGLDVHKETIVIAIAEAGRKAEVHFHGEIANTPDAVARMLKKLGSRYGKLHFVYEAGPCGYGLYRQINAAGQVCEVVSPAHTPRRAGDRVKTDRRDAVTLARLSRAGELTSVWVPDEAHEAMRDLIRAREAATKDVRQARQRIQSFLLRHGRRYAGAVWKKKHRVWLANQSFTHPAQQIAFQTYLNAMDQALERKDLIEKQIEALVPEWSLGPVVEALQALRGVALTVAAGIVAEIGDMRRFDNPRQLMAFLGLVPGERSSGSKRKLTGITKAGSLVARRLIVEATWGLSHAAKMGQAMMLRQQSIATSIRDIAWMAQVRLCARYRRMFARGKKTPIVITAIARELVGSIWAIGQQVEPKAINA

SEQ ID NO: 205470 - protein, 338 aa, unidentified
MFYVGLDVHAKQITVCVLDADGRQHRTCQVRRLDELMRMLKSLPGPFRVCYEASTGYGGLFELLSPVADHVAVAHPGMLKVIFHSKQKNDRNDAAQLAKLLYLDAVPLVHVPPAKVRAWRELISFRHRLVEKRSRAKNGVRGLLRSLRIEVPSRPGLWTRKGLAWLQNLAFSQPLHAVKRDLLVEEIQSLSAQLRRVEKELARFAADHPEVERLRSIPGVGLRTAEALVAFLDDPRRFARSKQVGSYFGLTPSQDQSGGRNRLGHITRQGSATVRHLLTEAVWQAIRRSATVRAYFQRVQRDDPSRRKIAIVATAHYLARVAWSLMKKQTLWKESVTA

SEQ ID NO: 205471 - protein, 412 aa, unidentified
MEVVYECCCGLDVHAKRVVACLITRGRKEIRTFATMTDELLQLGDWLSSVGCTHVAIESTGVYWKPVFNILEGLLTVILVNARHIKAVPGRKTDVRDCEGLADLLRHGLLKASFIPPPEIRELRELVRYRHTVVTEHTAVANRITKLIESANIKLGQVASEVLGRSGQLMLRALAAGETNAETLAEFAQGKLKNKKAELRRALTGSLTPVQRWVLTELLTRVEELEAARGRVETRINEAVAMCTDSFVPEAVELLKSIPGIGQRTAQTIVAEIGVDMSRFPSAKHLASWAGVCPGNHESAGKRKSGQPTKGNKSVRTILTEAAWTATRAKETFLHAKYHRLAKRMSKQKALGAIVHRLLVICYHLLKRRVPYAELGTAPLDEQQVARQRRRLVEQLVGLGLKVTIEEGATVS

SEQ ID NO: 205472 - protein, 431 aa, unidentified
MKKGGEVLGIGIDWSEEFHLVALGRPGEGVIEVSRVEHHPKAVDALVAKIAGLEPDPGEVRVVIETRHGLLVERLVDAGYVVVPVNPDLVARRRGPAKKKDDAEDARIACLIALDRHERLRPLIPHGKIAGELRAIARDDERAARDERRLLNRLRQDLIATFPAAIAIGGEDLGAPTFLGLLERWPAANALAEASRRELVAFARSCRHGWPERFADRVEASLVAEYFRPKDYLVRAKADTIRLVATQLLAIGHQRRAWERRMGELLLGAPRHGRDHQPKGDGLGKGFPGGEIYLSFPGLGDRLAARIAGEIGDHPQQFDTPNSLQCYAGKAPVTRRSGKSELVVACRLAHNRYLGAAVQQWAFCSLRRSGWAREFYDAQRTRGKGHHAALRALGNRWLEILWHCVCKGVVYDEAVHVANRNRARGRTDVAA

SEQ ID NO: 205473 - protein, 412 aa, unidentified
MLHPKMRKLFIGVDIHKRTHVAVIINCFTEKLGELRFENNKKGFEKLIEFVKPHLKRGITPCFGLEDTSGNGRNFAIFLLNLGYTVKSVDASLTYTERRNQAIAHKTDGHDAFCVAKVLLNQLDTLPDASIHDDSWTLQLLVSRRNSIVKVRAASKNQVHSYISHHYPSYPKFFTVTYCKAGMEFFQNFPSPSKLKGITKEELAEFLSIHSSGFFGIEHAERILMLVAKDGDTSTEYQETRDFIVSHCIKEIKHCNEELEIIEAEIKKHMKQFPYRLETMPGINTITAAMLISEIGDIRRFSSADKMCRYSGISPVACSSGDKDKNFRNKQGNRRLYEIFRDIASRNICRGRDKKSPINETFLEYYNKKISQGKTKRQALIAVMRQIAKVIYSMMIHQREYIKPTVSKTENA

SEQ ID NO: 205474 - protein, 402 aa, unidentified
MQTRGLPELTPDTTYIHDNTKTMNSKSYYIGLDVHKNTTAIAYAQGGSREDAVYHGTCGGSLGAIERALAKLAKKLQVDRQELKVCYEAGPTGFVLVRRLRHLKLECVVMAPTKSTRKPGEKVKTDKRDAVKVAREFRNGDIVEVRVPPATDEAVRDVSRARTDASDDLRRSKQRLKSFLLRSGHHYEGRANWSGPHMNYLRSMSLADPAQAIVLEEYLAAIDGAHERVQRLTSKMKEILETWEWKPVVNAVMALRGFQEVAAMTFVGELGDLRRFRNPRQLMGFLGLVPSEDSSGGKRRQGAITKCGNNHARWMLTESAKQCRHKPKVGPALSRRQEGQSQEVKALSWRAQNRLNEKYRRLHARKLLANKVTVAIARELSGFLWELMNKCEVGVPERTVTD

SEQ ID NO: 205475 - protein, 536 aa, unidentified
MKNLLSINHVSYYSWQYRDVLFSSLGKKMHTALDCCENCKVSAQSDTLTRDYLRSSLSNEYISRLSDLITKNFCTEPFGRGIFISFSHAAGLDIAAASHWVCVGATPDGSDTVREFPAYTDGLQAIVAWLRDCGVPTVAMESTGIYWLPRYELLEAEGFEVLLVDPSDPKQVRGRPKTDRRACQWIQRLHAHGLLAAAFRPDELTCVLRSYLRLRANHVRYAGQHLQHMQKALEQMHLKLSEVVSDLTGVTGMSILQAMLRGERDPGRLATYRDRRCKASAETIARALNGSYRDEHLLARQQAVQCWECYQCKIAALDRVIAHHLQQLKKEPLLPPLPPKPRVRKRKPNEPRFDVRTALYYVTGADLTEIEGIDAWTALTVISEIGTDMTRWQTVKHFCSWLGLCPQHKSSGGKITSSRTRPGMNRAAAALCLGASSLHRSQSAMGAYFRRMKSRLGTPKAVTAHKLARILSHTLRYGHAYVKKTQEEYDILMRDRQIKTLKRRARMLGFEVVERVPPQPLHGAPADQESAPAPTA

SEQ ID NO: 205476 - protein, 358 aa, unidentified
MQTQVKTFDFAGQNIYAGIDVHKKNWRVSIYSEQLYHKSFHQPADPKALYHYLSKHFPNASFHSVYEAGYCGFWIHDELQDLGINNIVVNPADVPTTDKEKKQKADPVDSNKLARHLRNGDLEAIYVHNTGVLEDRSLIRMRSTLIKEITRYKNRIKAELSFFGINIPEQFQTTYGYWSNRFIQWLSELKLCRESGTASIGILIDHVSYLRQNLLQVNKKVRELSTQEPYREQVKWLISIHGIGLLTSMIILTEIYDIHRFSNQQKLCSYVGLTPSSHSSGDHQIHGEMVNRGNKYLKKAIVEAAWVAARRDPVLHQDFLSYCARMKKNKAIIRIAKKLLNRISFVLKNQVPYYDGLE

SEQ ID NO: 205477 - protein, 314 aa, unidentified
MAADCFIGIDVSKETLAVHTLPDGNDFQFVNDPDGIKAICRKFSKFRPKLIIIEATGGLQIPVATALSLKKFPVVVINPRQARDFARAKGRLAKTDKIDAEILALFGKQMEPEVRPLKDEQAQEMSSLMSRRNQLIRMLVMEKNRFTRAYGSVRADIEKNIDWLEERLSEIDTHLGTVVRASPIWRERDNLLRSVPGVGDVLSRSLLSNLPELGTLNRREIAALVGVAPLNCDSGKRRGKRRVWGGRSDVRSVLYMAVLSAKKYNPVIRDFYNRLKEAGKPHKVAAVASMRKLITILNAMVRSGQPWGQYAHAA

SEQ ID NO: 205478 - protein, 351 aa, unidentified
MIVLGADTHKRSHTIAGVGATTGELLGERTVQVGRAGFGALPAWARALGGERVWALEDCRHVSGSLERFLIERGERVLRIPTNLMAETRKSARQRGKSDAIDAVNVARAALREGLATFPAAHLDGPELDLRLLVDHRERLVIHRVELNNTLQWHLHDLWPELELPGGALFSKKWSTRIARRLSRAEQTMRVRIARDELRRLRELTETVKALAREITQLIEQIAPRLLAEPGFGPLIAAKLVGEIAGAQRFATDAKLARAAGAAPIPASSGNTRRQRLDRGGNRQINAALHRVIVTRARCHQPTRDYIERRRGEGKTTRDAIRCLKRYLARQVWNLLRASPPNMTLTTPSIS

SEQ ID NO: 205479 - protein, 337 aa, unidentified
MEQVIGIDLAKRVFQLHIASPLGKMMKNTVVSRDKLTAFLAQQPPSKIVMETCGSANYWSRQFKRFGHEVKQISPQYVAPFRMGSKNDKNDAAAIVEADSRPGMRYVPEKTQEQQDIQCLHRARQRLMKNRTALINQIRGLGLEYGIAIPESAHKVEQCLPDHLENAENDLTPLSRELFQELLLELKEQQQRLNVPDKRLDQLNAQQEDIRRLLTLPGIGPLGASALMIALGDSPDFKNGSHFASYLGRVPREHSSGGKVRLLGITKRGDGYLRGILIHGARSVAYRVQKLPDGRCNGLQRWLKGVITRSGLNKAAVALANKKCPNRVGTGQPTIEL

SEQ ID NO: 205480 - protein, 347 aa, unidentified
MTLIGCDFHPSWQQVCWVSTETGETEEHKLVHAPGEAEKFYRRFAAPARIGMEATGNCQWFVELLARLGHEVWIGDAAKIRASEVRQQKHDRRDAALLLRLLMENRFPRIWTPSSAEKDLRQLLIHRHKLVRLRAQTKNGLQHLAMNQGLQKKRRLWSKAGQEALRELALQPWASRRREDLFGVLAMLDGQIESLDVAVQQAAEENENARLLMTQPGVGPVTSLAFVLTMGDVSRFPRGKQVASYLGLIPREYSSGGHQRLGSISKQGNRFMRMLLVEAAPVAVRCDPQLRREYLQCCHQDKPKGVAKVAAARKLAVRLYWMLRTQQPYPEIVHVESSSRVPLVGAS

SEQ ID NO: 205481 - protein, 338 aa, unidentified
MFYVGLDIHVKHITVCVLDDCGKVYRRGQVKTIALMMDVLESLPGPFQVCYEASTGYGCYYEVLSKAANHVAVAHPGLLKCIFRSKQKNDRRDAEKLAKLLYVGEVPTVHVPTPQVRAWRELITFRRRLIEKRTRAKNGIRGLLRSLTIQAPRKPGLWTRVGMAWLKQFPFENFMHALKRNMLVEEITTLSEQIRRVEKELERYAANSPAVQLLRTIPGVGPRTAEAVAAFIDNPERFPHSKKIGAYFGLVPSQDQSGNTNHLGHITKEGSATVRQMVTEAVWQAVRRSPTVKAYLERVQRGEKERRKIAIVATAHYLVRVMWSMLKHGKPWQETVVA

SEQ ID NO: 205482 - protein, 336 aa, unidentified
MNNIRQSIGIDIAKNDFVASFAVLQKGQIIDFKSTKKFNNNLNGFKELITWVNSFKDNTIELNFTMEATGVYYENLAFFLFEMKQKIHVVLPNKVKKFGESLDVKSKTDKIDSKILAQMGVERKLRIWNLCSLRLRTIRTLTRERQQLIKERSIIKNQIHAEKHKAEPLESTLLRMATRLNFISSQVKCVENEIKEEVDQDDILKTKLEKIMTIPGLSFISIITVIAETKGFVDITSVKQLSSYAGYDVSIRESGKWKGRSRISKKGNSNIRSILYMPTICSIKYSSTNKNFYERITKNKVNGLIAITALQRKNLGLIYTLWKNNTEYIENYEALR

SEQ ID NO: 205483 - protein, 405 aa, unidentified
MYDELAEGNVPEIWAGVDIGKTHHHCVVINERGERLLSRRVQNDESELLTLIGDVLDVSQDALWAVDLNNGGAALLIGLLVSHDQPVAYLTGLAVHRASGTYRGEGKTDAKDAFVIADQARIRRDLGLLRPGDEIAVDLRTLTTRRLDLVFDRTRQINRLRAQLLEIFPALERALELTNQGPVLLLTGFQTPAAIRRAGAKRIETWLKNRKVRGAAALAKTTVEAAQAQHTALPGEKLAAAMVVRLAKGVMALDEEIAELDALIEARFREHPHAEVIRSLPGMGPKLGAEFLAATGGDMDAFGSADRLAGFAGLAPQPRDSGRVSGNLRRPRRYHRGLLRTMYLSAMVSLRCCPASKAYYDRKRREGKGHKQALLALARRRVNVLWAMIRDGECYHMSPPVTSAA

SEQ ID NO: 205484 - protein, 374 aa, unidentified
MKKSGVAFIGIDTAKLKNAVAVAEAGRDGEVRYLGGFENTPDAVAQLMRKLASRYERLHVCYEAGPTGYGLYRQIQALGHECIVVAPSLIPRRTGERVKTNRRDAQSLARLLRAGELTAVWVPDETHEAVRDLVRTRAMAVEDYRRKRQHVSAFLLRHGRRYDGKASWRGRHKRWLDGQTFAHPAQRLAYQEMLNAVQAAVERLDRLEAALIELVPDWTMAPVVAAFQAMRGVQFITAVVAEVGDLRRFEHPRQLMAFLGLVPSERSTGEIRRQGGITKTGNSRARKVIVEAAWTYRFSAGLGVDHQRRLQDLPASVRDIAWKAQTRLCARYRRMTAKGKRSTVVVVAIAREIAAFLWAIAQQVAPRPQPTVAA

SEQ ID NO: 205485 - protein, 320 aa, unidentified
MTILDSQVVIGVDVAKDEIVVYRSDQEKVQLVTNERSALQKWLKTLPAHSAIALEATNIYHLDTTELAHEMGHDVYVIDGSRLNKYRDGVGIRAKTDALDAVLLARYLSRESDRLRIWSPPPEAYTRLKSLLRRRAKLIQSRVALKQSWRNEPLLKEAFDLLVASMDQFEKAIQKTLKEIVNEAGMHDQVKRCQAVEGLGVLTATAAATAFIRGDFADSDEYVAFLGMDPRVRQSGQKDQRRRLSKRGDSEFRRLFHNSAMAASRSPTWRPFYQRYLARGLSGTQALVILARKLARVVFALMKNQSEYSPNSMFGGSPQT

SEQ ID NO: 205486 - protein, 354 aa, unidentified
MLIIGCDFHTRYQQIAMAREETAELLVERRLDHESGEADAFYRGLRSSQEPVRVGIEATGPIHWFERLLAELGHELWIGDSARIRASEVRKQKTDERDARLIVNLLLAKRFPQIWVPTPAERDLRQLLWHRHKLVSLRTMLGNQLHFLAMSQGLCGKKKLFTRKGRVEFTGLALGPWAGRRREELLQLLDQLESRIAELDHAVLEEAKRREDAVLLMTHPGIGPVSSLAFVLAIGPITRFHRSKKIASYLGLNPTEESSGGRRRLGAISKQGNTMVRWLLIEAVYPAVRKDPALRQDYQRLKFRRGHAVAKVAIARKLAVRMYWMLRSGAAYAQLVRRQGSPGGTLVNASSSLA

SEQ ID NO: 205487 - protein, 388 aa, unidentified
MPAAETPVAYLGIDVGKSSHSACALDAGGGVAFRAELANRPDDIDRLLERAGSGALVVVDQRRNIGALVLARAHAHGNPCAYLPGYAEKQARGMFPGIAKTDAIDAEVIARTALGVPRALRPAPEEPEGTASLRILSSQREFASSARTRAKNRLRATLLEADPALEGAVDPSSRWQVSMLAEFGGAAGCSAAGWRRFSSAARRAGAPAAGARRLWEALLASSRSGRRLPAGEDVAVRILAREIASLDADIEELDSLVADSLAGDEVYECLLTVPGIGPKTAAALVTSIDISAFRGHDELASYCGVAPSDRRSGSSIRSTSPQHGGNRQLKNLLIFSCNSLIGTDNRFGRYYGECRARGMRHSKALKAVARKRLKVIYAIMRDAVPYAA

SEQ ID NO: 205488 - protein, 400 aa, unidentified
MIHVGVDIGKSKHAAAAVNDAGACVMRPRFFTQDAGGFASLFGALEGQGGAASVVVGMEATGHYWKVLRHALVARQYRVDVINPLITSREASADVRGRKSDKLDALAIANVLRKGGYSPAPGELAATDTLKVLARHRKALVARGSDAKRRLISALDVAFPEAAKTLGDLFGAASLAVVRAFPSARLGAAADIRTLTSLFAKASGGQLGREAAEAYREAARHSLSLAMDTKGEEFVITQIVDEIRAAADQIDEVERRILAEPQPIIARLLGSIKGAGKIQPMAVAAELGDPSRFAGPDMAKKVLAYAGCDPRVRESGKWKGRAKMSKRGSPTLRNALYLLAGTIRLHTPFFNAVYKRQVAMGKHHNVALSHVVRKIVEVMCGMYKTNTPFMPQQPEVTPCS

SEQ ID NO: 205489 - protein, 366 aa, unidentified
MKKTSTVRVNGNMIFKGHKLTIGVDLGDHWSCYCVLDEAGKIILEQKVATTSEAMKQAFAKIPQSLIAMETGTHSPWVSRLLTELGHKVIVAHAQKVQLITKSNRKDDRHDARTLARLARIDAELLGPVRHRSAQAQIHLTVIRARAELVRARTALVNAARGLVKSYGQRLPKCGTRQVSRELGAGLHAELREVLEPLLKEIESLNERIQEYEVRVEKIAKESYPQVELLKQVKGVGTQIALTYVLTLDDPHRFPKSREVGGFLGLCPGRRDSGESQPQMRISKEGDRYLRTMLVQGAHYILGPFGADSDLRRCGLKLAARGGKNAKKRAVVAVARKLAVLLHRLWVSGEVYEPLRNSQKAMRVAA

SEQ ID NO: 205490 - protein, 340 aa, unidentified
MGEITTIGLDLAKHVFQVHGVDAEGAAVLRKQLRRGQVLAFFSKLPRCVVGMEACATAHYWGRELRALGHEVRLMPAQYVKAYVKRNKNDAADAEAVCEAVLRPTMRFVPVKTTDQQAAVLLHRGRERLVRERTALVNALRAHLAEFGIVAPQGLRNVGQLIAIVRDEGDARLPSLARQVLQVLAVQIEQIEAAVAALEKQLMAWHKTNPVSQRLATIPGIGPIIATAIAAMVAEPSGFRSGREFAAWLGLVPRQNSTGGKTRLGGISKRGNQYLRRLLINGASANLLRSKATNANPWVIGLRRRRPSMVVAVALANKTARIAWAVMHRQENYQRVATAA

SEQ ID NO: 205491 - protein, 419 aa, unidentified
MSFKILKNNCCGLDVHKTWIFACIGISDSHSRTEYKQARFSSFSKGLQEQFDWLAKYNCIDVCMESTGKYWIPVFNTLEKNNVWVTLSHPKYTKPQKGNKTDRKDAKWICDLYMCGMVKPSFIPPADIRELRDLVRYRYKLTCMITSEKNRAQNCLTVSNLKLDDVFSDVFDKSSRSITEQILQHPGENFDVTPFVDGRCKTPIQEIQAAVDGAISTEQAVKLRQCLNHIDELEMHKAEIEREIFRLSDNYEEALTLIRTVPGFDKNPMTAIQVLSEIGGDMSVFPTAKNFVSWAGCCPRNDQSNRKIKSTRISRAGSYFKPVLVQIANALIKSKKHPEFATRYRRIKARRGHKKAVIAICHMLLTAIWHILTDLKPYTPEGFLESRPVNKEKVLTTSQALNLLKQRGYTIKDDVVPVT

SEQ ID NO: 205492 - protein, 340 aa, unidentified
MGDITTIGLDLAKNVFQVHGVDEAGGVVVRKRLRRGQVLAFFAGIPPCLIGLEACATAHHWARELIALGHEARLMPPNYVKAYVKRNKHDVADAEAICEAVRRPSMRFVPLKTAEQQSALMMHRARDLLIRQRTMLVNALRGHLAEFGLIEAQGLHKVARLITIVVDEMDGRVPDIARQVLKVIVSQIEDIERGIAELETQVLAWHKNNPVSQRLATIPGIGPIIATAIAATVADPNTFRSGREFAAWLGLVPRQNSTGGKARLGGISKRGDSYLRRLLVNSAHTVLLCSKAAKTDPWLISLLRRKPRLVAAVALANKTARVAWVIMSKRETYRHVAAAA

SEQ ID NO: 205493 - protein, 314 aa, unidentified
MITYTSFIGIDIGKYSFVVALHGNKKVDEYENTPSGIEEFIQSYKKDLIKGLCILETTGGYEMGVLLTLCSQGFAVHRANTRKVKHFIKSYGNAAKTDKLDAKNLGLYGFERGKALELFTPQSKQSGELYEMIQRRTDLKQMLVAEKNRLKAPRAACVKESIQSLIEMLKVKLEAITEEINSLIAQDPVLSEKKKILKTIPGIGDIIANELLILLPELGQLSRREIASLVGVAPRCNDSGTLQGYRRTTHGRAGVKPLLFLAAMAARNSNSILKTFYEGLLARGKIKMVALVALMRKIIVIANARLKIVQPIAF

SEQ ID NO: 205494 - protein, 385 aa, unidentified
MKNTIVHHEGAASLEAAVKKVKLSGSIIKIGLDVHARLYVAVAQYDCLLPKPVRRLGPSEFVPWVKQLLRAGHTVHVVYEACGFGFGLYRELKAAGAHCYVIAPRKLDEQCTRVKTDPRDATTLCQRLSRYLDGNTPELAVIRVPTEGEEQARHVSRQREQLVCLRQKLEAQGRSLLVNHNLPSPAHWWKNQTWSRLLKLLPGWICLRLEVHRPVLLGLEQQIGVLSAQLEATAPADVPAGVGKLTTVIMTREICSWERFTNRRAISSYTGLCPGEHSSGSKRVPGSVTKRGNPRLRAALVECAWRMVRFQPNYPPVKKRLAILAKGAHATGAQRKKAIVAVARHLAVDLWRVHTGRCSAAQLGLKSAETLIVRGEQKAKLNALA

SEQ ID NO: 205495 - protein, 402 aa, unidentified
MKEFNSEAVRYETASALKTVMQAQAGHQYPAYIGLDVHKETIAVAVARAGREAPESRGEIANKPQTVAKLVDRLNREFTGEVLLFCYEAGPCGYGLYRQLLELGQDCQVVAPSLIPKKPGERIKTDRRDACKLAQALRSGDLTAVWVPDEEQEAMRDLTRARDDLKAQERKARQQLNAYVLRHGHAWPSNKARWTQTHYHWLESLRFAHDWQQVVLQEYIDAAKAGSNRVADITAQMERVLPQWSLAPVVDSLVALRGIDKLVAMVLLAELGDISRFDSPKQLMAYLGLVPSEHSSGGRRRLGAITKTGNSHARRMLVESAWSYRFPARQTAHLKRKAANASDEAKVIAWRAQKRLCGRYRTLLQAGKNTKQTTVAIARELTGFIWDIVCHEMPKVQPQVAQ

SEQ ID NO: 205496 - protein, 392 aa, unidentified
MIIVGIDIASQKHDYFMLQKETGVVFSSSSITIPNTLNGYKKLHKDIQSFCGATSDYTVRIGLESTGIYSTNITTFLVSEGYEVMMINPILTNMVRKASKVHCPKNDNLDSQTICKYLVDNMGSFSPYTSTLYHTLALKSLSRKRFYIVDELRKAKLNVYKLVHLMFPEFESFFSNIYVLSALSILKEYPSPQKLAKAHANKVSALIHGRCKCSALELIDAAKNTAGIKSDYDSFQLIDAIEELEHIQKRVEKYDVQIENYVKQHFPNLLTIPGVGYITAGLIAGEIGDINRFHSADFLVSFAGIDCTVYESGNYKAKHTIPSKKGSKYLRYALFQVARIAWQWDPVFKDYYLKKQSEGKHFYVILGHIQKKLLRVIYSLMKSGLNYKVISA

SEQ ID NO: 205497 - protein, 349 aa, unidentified
MTDHDNIVRVGVDLARSVVQVHAVDAAGNVVVARQLQRSALIPWCERLPEGCLVAFEACSAAHHLARQLGAVGLVPRLIAPCFVAPYRMTGATGKNDATDAEAICEAACRPRMRFVSVKTPEQQGWLAIHRLRDGYIKDRTAWMNRARGVLFEFGITLPLAGARFRDALQQAVSARDSGLPGNARPALRRCCVHLDQIQRQVAWCDEQIAKHARSDVNARLAMEVRGVGPLSASALAASLGDLTQFGNGRQFGAWLGLVPRQRSSGGKQRLGRITKRGDAYLRKLLVLGARSALTVAPRHDDADARWAVQVRERIGWPKACVALANRNARTLWRTLARRNPAGSERVDS

SEQ ID NO: 205498 - protein, 343 aa, unidentified
MGEVSTIGLDIAKSVFQIHGVDAGGAVVIRKRITRAKLLEFFAALPPCLVGIEACPTAHYWSRRLQALGHTVRLLPPSYVKAYLKRSKNDANDAAAICEAVTRPSMRFVATKSEQQQSGLMLHRSRQLLVCQRTMLSNAIRGHMAELGIIAAKGRNGTAELLKNIANEQDDRIPEAARFSLDVLARQYAAVRAEIVAIEKRIHAWHRSSEESRRLEEIPGVGPIVATALVAEVGDWKVFSSGRSLAAWIGLVPRQHSTGGKERLGRISKQGNRHLRWLLVAGAMAVIRYARQHGTKRPWLTRLMDRRPIKVAAVALANKIARMAWAMMVRGERFKEPKLLPAA

SEQ ID NO: 205499 - protein, 386 aa, unidentified
MMIIGVDPHKSTHTATAVDPQTNRTVASVRIDASLAEYRWLLRWARQFDSRRWAVENAEGLGRHLSWWLLARGEEVVDVSSAATAWVRQLSRGGGRKNDQIDAAAAACAAALQGDGRPLQPEDITDALALLDESRMNLAQSRVRLVNQLHALLRDLLAGGAPTDLTATTAAALLRQVRPAGDAERVGKQIAIGLVSQIRSVDSLLKANAKQISELIATSGSTLTSTVGIGAITAGRLIGRTGRAGRFPTAAAFANYAGAAPVEVASADKARHRLSRSGDRQLNAALHTVAITQIRTPGSRGHTYYTAKLAEGKTPREARRCLKRRLANHIWRTMITDEQRQAANPGGHLGTTLKSSAAGSTPTTSSSDKSLPGLANHDSTTAQPAA

SEQ ID NO: 205500 - protein, 383 aa, unidentified
MSEHSVAYVALDTSKLHNAVAIAECGRDGEVRYLGEIDNTAEATARLVRKLSAKHAHLTFCYEAGPTGYGLYRQVTGLGHDCIVAAPSLIAQKPGDRVKTNRRDALSLAKQLRAGDLTAVWVPDARHEAMRDPRVKRPRTSLTRARGAAKRDQQAKGQQVSSLLLRLGRPYPGRKTWGKTHMSWLAGQKLEHLEQRLALEEMLLAVRQAADRVQRLEQAIRAAVPDWSLAPLVTALMALRGVDFIAATALLAEIGDLSRFRSPRELMAWLGLVPSEHSTGERVRRGPITKTGNRRARRMLIQCAWSYRHPPRVGSDKLAKVAAAPEAVREIAWKAQTRLTARYRALCRAGKLDVVAITAVARELAAFIWAIARAVAPGVVTIG

SEQ ID NO: 205501 - protein, 392 aa, unidentified
MLLDHVFNEPTAIRTQLGAIFVSLELSRSTWLITSLSPGKGEKMSRHSVPAGDIGALLARFAELKRKAAIRTGQDYPIITIQEAGLDGFWIHRVLQGEGIESHVVDAASIAAPRRQRRAKTDKIDGEALLRVLLAYKRGEPRVCAMVIAPSPEEEDRRRISRERQTLIAERIKHVNRIKGLLFSQGILDYAPLRRDRRARLAAMRTGDGRDLPGHMKAQISRELDRLELLLDQIKAVEAARDALLAKADKSEREASGEPHAVSMLLALKGIGEEFAAVLWLEAFCRTFSNRRQVAAYAGLAATPWRSGSIVHEQGVSKAGNPRLRRTMVQLAWLWLRHQPQSALARWFEERTRGGVGRKTAIVALARKLLVALWKYVSAGVIIEGAVMKDAA

SEQ ID NO: 205502 - protein, 426 aa, unidentified
MKNNRNERINQVHENTLVIGIDIAKEKHYACAVDSRGRELAKVWNFTQSREGFLYLNHTIQNLMEQHDKTEVLIGFEATGHYWMNLAFYLKISDLPFVLVNPLHVKQSKEMDDNIQTKNDTKDARVIAKLLPNGYFSVPRDMTTVDHNLRQGSSIRERIRKDIGAVKNRIQRWIDLYFPEFRQVFKHYGQQELAVLKLTPLPEDIKNASVEDLVRRQKEAGAKYAGRPKMIKLIELAQHSIGIKDGVYIAKIEIRALVQQLELLQFQLEEITAEMVQQAKNLPEFEYLVSIKGISENTVSELLAETGSLQNYNHPRQIIKLAGLTLRENSSGKHQGTKKISKRGRRGLRRLLYKATLPLIRNNHAFHKVYTYYHSREDNPLKKKEAMVVVCRKLIQVLHGLSVHQTVFNPERMLGDLSYITASNAA

SEQ ID NO: 205503 - protein, 367 aa, unidentified
MSSIAHRGFVHLGMDVSKDAIAVAVLSPDRDTAEVDKIFHDTDSVRRLVKRLGKPKEIWACYEAGPTGYDLHRLLTSMGVRCDVVAPSLIPKGSGDRVKTDRRDARRLAGLHRAGELTAVAVPTPAQEGVRDLCRTRGDMVQDLTRARNRLSGFLLRHSVVWRGGSPWTERHRRWLATLTFEDPAIATTYAHYLATVKLRDTALESVEADLVPWCTQDPFGEQVPRLAAYRGVTRVGALCLAAEVFDWRRFPRARPFMSFTGLVPGENSTGLTQRRGSITRAGNAHLRGQLCEAAWAYQHSPNVGAGIRERQQGAPPETVARSWAAQIRLSRRFRQLAAHKNVRSVVAAAIARELAGFLWAEMVAEV

SEQ ID NO: 205504 - protein, 406 aa, unidentified
MMWFVGIDWADDHHDAVVIDDAGMRVAAMRVPHSSNGITALIAFLRGIGDVDTHPEHLACVVETNRGLLIAALLDAGVPVYPVNPTTVDRQRKPSGAKTDAIDAYLLARTGRSDLADLRRLTPDSPLVAELKLLTRDQDSLIQGQTRLVNQLTACLKAYYPVALELFGKLHQGATLAFLRTFPTPDEARAATVERIAAILTTVRYATAEAKAHEIWQRVQQPQLTADPIVTRAKARLVLTLTAQLQVLVTDIAAYDREISRVFAQHADSAAFASLPRAGKRLAPRLLAEWGDDRGRYADAASVQALAGTSPVVVQSGNYASVHKRYACSKPLRNALHQFAWQSTLQEGWANAYYRRKRREGKSHTKAVRALANQWVRIIHALWCKREIYDSAVFVAAQQAHARRAA

SEQ ID NO: 205505 - protein, 347 aa, unidentified
MRYVGIDIGKWKCNAAVMDPEGVIVEEFAFANDHAGLEELASRLTPEDRVVMESTGSVWSNLYNLLDERHVPVVLANPLKTRAIASARIKTDKVDARILTHLLRSNLVAECYVPPRSFRELRALVRHRASLVRVRTTVKNRVHALLDGRGIRCEYSDLFGKRGSEWLRKLDIGPLDGLMLSNHLEHLESLNRQVDETDEMIRGRASVDEDVRLLLSLTGVDVYTALLIRSEIGGIDRFPDYKRLVSWAGLAPSLHQSGSVEYSGRITKQGSKMLRWAMVESARVAVRHDERMRVFYERVKRRRGDGKAVVAVACKMLKVIWFMLTRREAYQSRNEGRYGVKLKSLRT

SEQ ID NO: 205506 - protein, 424 aa, unidentified
MKSASNTPSSERPLALPEVAINDVTAGIDWARDDHAACIVDGRGHKIATTTIEHTIAGLRDLVGFLGRHGVGEVAIERPDGPVVDTLLAADLVVVVISPNQVKNLRGRYGSAGNKDDRFDAYVLADTLRTDRARLRPLVPDTEATIALRRACRARKDLVKHRVAAANQLRAHLRNVLPGAIGLFKDIDSEISLAFLARFDTQDRADWLTPKRLGDWLAKHGYPGRTSPELLHQRLLDAPRGATGDHATTQAHITASYVALLKTLVEQIKALSTQIDRQLDAHPDAHIFTSLPRSGRVRAARLLAEIGDCRARFPTPESLTCLAGAAPSTRQSGKLRTVGFRWSCDKQLRDAVTDFANGSRDANPWAADLYDRARARGHDHSHAVRILARAWLHVIWHCWQDRAAYNPETHRALQRVLATQPEAA

SEQ ID NO: 205507 - protein, 377 aa, unidentified
MKNVRFIGLDVHAETIAVAVAEPGGEVRSLGSIPNRAESVRRLVGKLGKPEQLRVCYEAGPTGYVLYWQLSELGVHCDVVAPTLVPVKAGDRVKTDRRDAEKLARCYRAGDLTAVWVPDAAHEALRDLVRARLAGKRDQLRARHRLGKFLLRQGRRAPEGMRAWTGKYLAWVKQQRFEQPAQEATLLDYLHEVEHVAERIVRLERAIDAAMESMPESLQAVIAGLQCLRGVAKVSAVTVVSELGQLSRFEHARQLMGYAGIVSREHSSGERISRGSISKAGNAHLRRIVTEAAWSYRHRPALGNALKARQAGCSEAVKAIAWRAQHRLHERYRALTGRGKNKQKVITAVARELLGFIWAIGCEIERQQERAPLRRAA

SEQ ID NO: 205508 - protein, 355 aa, unidentified
MSQTLNTSIAVVGIDIGKNSFHLVGQDQRGSIVLRQKWSRVQVEARLANLPPCLIGMEACVGAHHLSRKLQMLGHDARLMPAKYVRPYSKGQKNDFRDAEAIAEAVQRPTMKFVATKTADQLDLQALHRVRERLVGQRTGIINQIRAFLLERGIAVRQGLRFLRAELPGILATRSDVLSPRMLHLVEDLAADWRRLDARIEGLSGEIERLARQDKDCERLMTVPGIGPIISSAMVAAIGTGDAFSKGRDFGAWLGLVPKQISTGDRTILGSISKRGNRYLRALFVQAAWVVLVKLGKKWERYGLKSWIEAARKRLHHNVLAIALANKLARIAWAVLNKGRAFECVKVNEMTSQPV

SEQ ID NO: 205509 - protein, 342 aa, unidentified
MNLPIRIGMDTSKSVFQLHGVDENEVVVVRRQFRRAEMIRYFERLPPVLVAIESCGSSHHWARLLQSFGHEVKLIPPQYVKAYVKRGKNDAADAEALCEAVTRPSMRFVPVKSKERQAACMLMTVRERLVSVKSQLSNAFRSYAAEFGIVGPAGRQNVTALIKRVLEDDSLPEMARDLFRLQAEEYAAVQARLAKIEAKLMKWHREDDVSRRIATIPGVGPIGSSMLSMKAPPPETFRSGRDFAAWLGLTPKDHSTGGRQRHGGITKAGDSVLRSTLIVGATALLRHIRKGRHKPTLWLASLLERKPPKLVAVALANKFARIAWRLMISGGVYNRPVAAMPI

SEQ ID NO: 205510 - protein, 369 aa, unidentified
MTDLTLFVGLDLHKKTISVALVEGAAGAAVRFYGTIANTPETVRTLCRKLSKDGQQLHFCYEAGPCGYGVHRHLTRLGHRCDVVAPALIPRKVGDRVKTDRRDAMMLAQTLRAGQLTAVWVPDEAHEAMRDLVRLRSQAMRDLRKARQQLLSFLLRHGRNSPYGHWTKMHRRWLGELVFAHPAQHLALEEMLQRIERAEALCERLKEAILELVPQWSLAPVVQAIQALRGVSLIVAAAIVAEVGCFSRFESPRALMAYLGLNPSEHSSGATIRRGAITKTGNTLARTCLVEAAWTYRFPPRVSQIIRDRLKELPEPIRAVAWKAQVRLSARYRKLTAAGKPGPKVVVAIARELVGFIWAIARMVEPKFA

SEQ ID NO: 205511 - protein, 357 aa, unidentified
MIAMKYYTSTTQFNCGIDLHARQMYVCVMDRDGKKLVHTNIKNNDFAYFLKLVAPYRHDLTVCAECMFGWYWLADACADAGIHFVLAHALYLKAIHGGKNKNDRIDSEKLAHLLRTNFIPPGHVYPAEKRPLRALLRQRLLYVWNRSELLARIQSHQLAHNRPTCRQHVYNREPWAEQLLRAEPDPVRQFALQNDLALIGHYDTQLATLEKELLKLTKQTASRDFTLLQTAPGIGDYLGLTILHEIGDIARFPTVKDFLSYCRLVKGTVASAGKIKGLRGAKLGNPYLRWAFGEAAVVAKRDPLVIGPLAQRLEARLNNKFKANTVLAIKLARAVYFMLKQKTVFDPDRLVAALSRN

SEQ ID NO: 205512 - protein, 423 aa, unidentified
MLEQAQVEQEIIQRVAALDIGKATLTCCVRVPGAGAGSRRVQEVTDYATMTRSLQLMADRLMELGVTRVVMEATSDYWKPPFYLLEAHGFEVWLVNAKDVKHLPGRPKTDRFDAVWLCKIAERQMIRPSFVPPAPIRRLRDLTRYRVALIGDRTGEKNRVEKLLEDAQIKLSVVASDIFGVSGRAMMDALLAGERDPLALAQLARASMRNKISALEQAFVGSFTDHHAFLLRRMLTRIDALSTDIAELDRRIEEQIAPFADAVTRLDEIPGVGVTAAQVIIAEIGLDMSRFPTPAHLASWARFAPGVKESAGRSKGNGSTGHGDPYLARVLGEAAVAASRTNTFLGERYRRIARRRGKKKAIVAVGRSILVIVWHLLSDDQAHFHDLGPDYFDKRRGPERLKHSHVRQLEALGYKVTLEPAVA

SEQ ID NO: 205513 - protein, 382 aa, unidentified
MKKDTSKTKKENGYVRAAKQRSGEEKFAFYVGIDLGDKTSEVCVLGPDGGFRESFRLAMKATAFQDRLSKLGRSRVAIEAGGQSRWVAEIIERCGHQVFVANTRKVAYISESDDKNDPGDAYKLAELVYFKPRLLHPIQHRSAEAQADLSWIRAREVLVESRTQVVNAVRGISKAFGERLAKCSTEAFTARLAEQVPEAIRGAVAPLLETIDHLNEQIRYYDQMEAHIARQRYEKYKLLEQVDGVGVHTALSFMLTIGDAARFEKSRTVGCYLGMRPRQRDSGDSKPQLGITKSGDEYLRKTLVNCAHYILGPHGSDSDLRRFGQRICERGGKNAKKRAVIAVARKLAVLLHRLWVSGEVYEPLRNSGRAPKVHAEGVVAVA

SEQ ID NO: 205514 - protein, 420 aa, unidentified
MPDARCRLDQDDVVIGLDLASAEHQAVVLSADGRRLTRFKVPHSQAGLEELLRRTAPAALGRGEGRRVFAFEATGHVWEALAYVLRARGQQYVVVNPFTTFRVREARQLSREKTDRTDAEQIAELCRTGMVTQTQLEARPYLALRRAWGEYRRLRDERARLKVLIAHQLYGLFPEFLRVWADLLQPGALAVLRTGLTPLKIAALSLTDFVARVREHQAGRRVWRFKLAQVHRYAQQTVACPDGLETLAREVQRAVARIDTLTGQMTAVAAEIDVLLTELHEAPYLRTIPGLGWASVAGLLAHVGAIGKYRHGRQLIKLAGTNPSRRDSGQTVGRGQAMSRRGRAGLREVVYLATISCLQHNRRIRAHYDRLIQRADRPLTKMQALGACMNKLLLYAFAVMSRQQAFQIDHDWQRTVERVV

SEQ ID NO: 205515 - protein, 428 aa, unidentified
MNEIDNIRLEEFRQLKKEIRGSKEYLIVGIDVAKDKHNAFFSTAMGKAILKRLVFENNIAGFEKLLTQVEALKVYHNFKKIVFGMEPTANYHKPLGEHLIKCGHNVVLVSGLAVNKNREMLDGRWDKNDIKDPGNIADLISQSKCLYYDYPSMQLRDLRNLVSLKRRLKKQEHGVKVRIRNHLLAQYFPELDRYFGGAGSEGLAIVKWCLDPSVIAGLEYDEFVHLVAPRIRSMGQQKRLKAIWEMAADSIGCEVGQALDFEAKLMVEYLQQVRESISAIDDRIEEICLGFPEYRYLLSIPGFGPDVSSKVLGAIGNPFRFNNGKQVLKLTGYDLSASRSGKTSDTAVPVISKRGKAYLRYALYQAAFIASTRNRHFIIYYTNKLRGREREKGIKTKMRVKLAAKMLIIAWTLMKKKELFDPEYLNID

SEQ ID NO: 205516 - protein, 355 aa, unidentified
MNVNVNHYIGFDVHKKSISYCVKLADGRIVEEGKLAARRVTLCQWASKRAEPWHGAMEATLFSGWIYDTLKPFAAKLEMGHPGRMKAIGASKKKNDKLDARTICDLIRANLLPACWVAPSERRELRRILRYRNLVLEQAVRMKNKISGLLMESGVEYNKKRLHGEKYFHELLENLAAEVPESVKDLLKLSRGWLESFQATQQQLLVKLQKHPILMERLKRLKSIRSVGEVTALTWALEIGDPHRFSSIGDAVSYCGLTSALVESADKQKRGPISKQRNAHLQTVLIEAAKVAPRWNPQFSELHQAEIDSGNHRNRATLEVARKLVAYLLAVDKSGKDFAVRTPSAKPEGEVKPAA

SEQ ID NO: 205517 - protein, 321 aa, unidentified
MDFVLGVDIAKRKFDVALIVNDKLKHKVFTNDKEGFSELTIWLKKYGVDHARVCMEASGNYGEELAIFLHEAGHTVSIVNPARIKGFARSELLRIKNDKVDAGVIARFCDKMRPGPWTPLPPEIRKLQAFARRVDALMSMRTQELNRVESTDESVFYSIKEHISFLDEEIAALKKEIADIIKKNPDLKTKSDLLRSIPGVGEATTAAILSELSLFQRCDNVRKVVAFIGLAPREFTSGSSVKGKPRICKTGQARMRKALYMPSLVSMQYNPIIIDFCRRLTNKAKNGKVIVCAAMRKLVHIIFGVLKSGRPFDPNYGLETA

SEQ ID NO: 205518 - protein, 315 aa, unidentified
MNDSVAIAGIDVSKDKLDVHLLPSNLAFTVSRDRRGLTTLAGRLRKAGVGRIALEASGDYERMVMEALEAEGFVVQLLNPTRVRRFAEACGMLAKTDPIDARLIALYAQHFPDKGLSRRPEQARKLGEFLSVRTMLMGIVGEARNRLEHLREPTLRSLAECFLADATARLKQLEAAIAKVIAEDHAMARKAKLIRSFVGAGPVLTSNLLARVPELGYVGRRQAARLCAVAPSDRKSGKSKRRSKVEGGRNHLRPILHMVAVSAIRSNPVFAAFAKRLIAAGKSKRLVIAACTRKVIVVLNAMLRDQTPWRHANAA

SEQ ID NO: 205519 - protein, 367 aa, unidentified
MAVVWFFIHPYMEDIIMVQLHTSVNDQLCVGIDLHRDTMTVACLDPRTGEVTFRKLACKCRTQITEYFSTLPRPHSVAIEAVGFYRWLWDLLEPIVDELHLADATRCRALAATRPKTDRQDALNVADLMAAGRLPIAYAPPMHVRELRDWTRHRNGLARSHARVLTRVQSIMNANNRPGPKRAKADALIRYVKAHGTLLPQRHVRMLWLAVDQLTVIERQIDDAERTITGLLADEKFVTVDTLLRSIPGVGPVTSATAIAELGDLTRFTDRKQITRYAGLNPRTFDSADKQRTGRISKAGPRQLRWVLQQAAWCARRDHPIFRKRFGQLSKRVGKAKAGVAIARKLLLCMWAVVRDGKPYRPVGDAG

SEQ ID NO: 205520 - protein, 419 aa, unidentified
MEVMIERCAGLDVHQATVVACVRIRDGGKRARREVRTFGTMTHELEELRDWLSEHGVTHVGMESTSVYWRPVYAVLEGHTALIVGNARHIRNVPGRKTDVKDAEWIADLVAHGLVRSSYVPPRPLRELRELTRYRRKLTELQAAERNRLQMQLESANIKLASVATDVLGVSGRAMLRALIKGEEGPDAMAELARGRLRTKRAELAQALRGRMDETQRILLGMQLRRVEQTEQQIEELDRCIDERLKPYRAEMALLMQIPGVQRVNAAVVIAEIGIDMAVFLSVHHLAAWAGVCPASHESAGKRRNIGVRHGNKHLRTALFEAAMAGSRTKGSYFRDKYYRLKARRGAKRAGLAIAHKILIAVWHMLTRRVDYHDLGEAWLDQLDQQRTARNLRRRLEHLGYEVTMVPRQPTSGVAEEVG

SEQ ID NO: 205521 - protein, 421 aa, unidentified
MQVLYQRCAGIDVHKDQVTVAVRLPGQGPGGRETRVRKFGAFYGVLREMARWLAAQGVTHVAMEATGVYTMPVYHALLEPGCFEQVLVCNAAHVKNVPGRKTDAVDASWLAELLECGLLKGSFIPPAEIKAVRDVIRYRRKLVQERAAETQRLGGVLQDAGIKLDSVASSIDTVSGLAMIRALIDGERRGVVLADLARGVMRAKIADLSRALEGRFDDHHALMCQLHLDHIAHLNDMIAKLDAQVEAMIAPFRRQRDLLATIPGIGPAAAAAIISEIGTSPAEFFATGAHLASWAGLCPGNHESAGKRKHGKPRKGSQHLQPLLVECAWAAVRTNGRLKARYHRLVRRFGGYRNPAAKKRAIVAIAHTLAVVIWHMMATGTPYADLGPDFYITRTDPGKETQRLIAKLEALGHTVTLAPAA

SEQ ID NO: 205522 - protein, 389 aa, unidentified
MLCIGIDVAKRKHDCCIIDSDALKTVESFTFPNSREGFDMLLSKISELGIPKDKIRVGLEATGHYSSNLAHFISEHDLPLLTFNPLLTNRYKQGFSLRKTKTDKVDACAIAQMIVSGKGSQTYSSSLYHNEEMKSLSRYRSQTMQKCSKLKISVSRLVTILFPELEGLTSSIHLASIYALLKAYPGHEQIAHCSMKRLTHLLSDASQGRFDKSKALEIHQAACRSIGKVSLSASMELVHTITDIEVLKQHIAEIDEKLKEMVDQEESSIIDIPGIGYTLCASILGEVGDFKRFPDVDKLLAYAGMSPSKHDSGNYHSKHNKMEKRGSPYLRKTLYLAARLVAQNVPKFKEYLEKKLSEHKPYKVALSHVAKKLIRLIYRLGISGCPYLA

SEQ ID NO: 205523 - protein, 410 aa, unidentified
MDVSCGIDWAEDHHDIALVDRGGGLLARLRISDDAAGLTALLELLAGHGDSAEDPIPVAIETPRGLLVACLRATGRPVYPVNPMAAARYRDRHSPSGRKSDHGDAVVLANILRTDRHAHRPLPADSELAQSIAVLARAQQDAAWDRATAGNRLRSHLREYFPGFLAAFADVKGGITRPEARAILAAAPTPADAARLTLAQLRALLRRAGRQRGTDAEAQRLRGALRLEQMRQLPLVEQAMGRQALALLRQLEAACQSADDLQAAAEESFNQHPDAGIITSFPGTGALAGARVLAEIGDDRSRFKDARGLKAFAGSAPVTKASGKSRAVIHRRIKNNRLAAAGYLWAFSAITASPGARAHHDRRKGTGDRHAAAQRNLFNRLLGCLWYCLQTSQHYDEATAFPARTVPAAA

SEQ ID NO: 205524 - protein, 468 aa, unidentified
MSKLSKRDSQFRSVMEVRPFEGISQIQVDVAGADIGAHEIVVCVAGAEDTQIIRTFGNYTIDLQSMAKWLQEQGVHSVAMESTGVYWIPLFETLEDFGLQCCLISATAIKRFPGRKSDVLDCQWIQTLHSYGLLADSFRPEADLIALRTLLRHRAQLIEHRSPHILHMQKALLHMNVQLSQVLSDIMGETGQQIMRAIVEGERDPHKLAAFRNYHCKKDEGEIAKALTGTWRSEHLFVLKQSLAFYDFYTQQIENCDVEIERTYAAIRPRWDEPNNPDTLPAQKPNSFSKNSPKTVQVRKHLHRIAGVDLVAIDGISLSLAQTIISEIGTDMSKFPEEANFCSWLGLAPHNDISGGKVLHSYTLQTNNRAGQAFRQAAATIVRANCAFGAFYRRLKSRLGPAQANVATAHKMARVVYHMLKFQIEYQTMTAGEYDRRFREREIQYLERKATRLGFAISPITASVSAVS

SEQ ID NO: 205525 - protein, 324 aa, unidentified
MMTPALGIDVSKDRLDVEIAACGNPRSKYFANSPDGWRYLIAWLKELKIKRVHACLEATGRYSLGIALALWEAGHIVSIVNPAQIRDLARTKLGRNKTDAVDAGHIREYAEIFKPQPWTPPSPAMQRLGELQTIRAGIVSSLTEWKNRCGSGLADDTALALVKATITHFAAQLAEVDKAIAGTIDNDPDLSAKRDLLLSISGVGEVLAGLVLSELPGTDVLRSSAQAVAYVGLNPRSHRSGSSIDRPTRISKIGNATLRSALYMPALSAMQHNPVVAALAKRLKAQGRLKGKQIAVAAMRKLLVLCFGVLKSGKPFDPALAMPN

SEQ ID NO: 205526 - protein, 470 aa, unidentified
MAAVMIGVDPHKASHTAVAISAAEEPLGELRVRACVAQAERLLAWAAAWPQRTWAVEGAGGTGHLLAQQLVSAGERVLDVQPKLGARVRLLAAGDVNKNDPNDARSVAVAAMRSAGVQEVRADDHAAVLKIWSKRYRDLGRSRTQVVCRLHAVLGELIPGGVPKAITAARAARVLKAIRAEGAVQAARWELAAAFLEDLRGIDAGIRETRKKLAAAVAAAGTSLTGLFGVGPVIAAAVIGDVRDVSRFPGRDHFAAYNGTAPIEVSSGQRKVYRLSRRGNRRLNHAIHMAAITQIRNRHSQGRVYYDKKLTEGKTPKEALRALKRQVSNAIFACLQADARRAAARAKGPGGQQGNDSVASAAGSHPRHRLFGQATPGPGHHTTTVTGGPPPGPARGRDRAGHSSIAATLPPATPQVQVERPQRSEDERPGGAARRRPHSAARKATGQTAQVKKQRPKGTSQAAERTDGTP

SEQ ID NO: 205527 - protein, 324 aa, unidentified
MEKLYAGLDIHKEKFVGCIMDKDGNITREHTFPSSQKAVERFLYGIPSSDITIAIEACGLWRGAHRILTNMGYSVKLANPKKTHDIACQKKTDKVDARILADLLRTHYLPEVWIPDEQTLQFRDLTRHKATLTRLKTQVQGKIRGYLLRKGVKYGKLSKEDTLATLTDDPDINNLIQVYHSVKQEEKEVMRRIKKIAQNMKQTTMLMSMPGIAEFSSLMILAEIGDIRRFSSPKELVSYSGLCRGIYQTGSTERSVPNTAVNKWLKWIIYECSGRASMLDTRFQNYYYKIKEKKGFKTARRATARKMLTIIWYMLTNEEPYHAA

SEQ ID NO: 205528 - protein, 430 aa, unidentified
MKSNTQNAKIEAITEKTLVLGIDVGSEMHYARAFDYRVIEYSKKPFKFSNTEAGFATFKEWVLDLKERHEKDKVVPGMEPTGYYWFNLGKFLQDNEMKPVLVNPHHVKKSKELDDNNPTKNDRKDPKVIAGLVREGRYMIPYLPEGVYADLRTASNIRFQLQAELTRIQNRISRWFNIYFPEYKTVYGKPDAKSGMLILKAAPLPEDILTLGIDGVNQIWRDAKLRAVGKARAKTLIEAAEHSVGSKEGAVSARMEIRMLLEDYESRNTRLQEVMVLIEELVRKIPMAEKLLEIKGVGIRTVSGFLAEVGDISRFNNPKELQKLAGLALVENSSGKHKGETTISRRGRKRLRYLLFEVAMSLVSKNQEFRELHNYYTTRRLNPLKKMQSLMAIAAKLIRVFYAMLTKGVDYDPKKMVSDIKRPAVYLQAA

SEQ ID NO: 205529 - protein, 412 aa, unidentified
MQAIIERCCGLDVHQETVVACLLIGAPGAQPKKEVRTLRTVTRDLEALRDWLQEAGVTHVGMESTGVYWRPVYAVLEGYFELIVGNARHIRNVPGRKTDVKDSEWIADLVRHGLIAKSFVPPKPLRELRELLRYRRKLVESQAAERNRLLKLLETANIKLASVASDVFGVSGRAMLRALIAGEASPQAMADLARGRLRGKRADLILALDGRPEEHHRFLLAMQLRRLEAIEADIAALDLRIGERLEPYSAPHALLMQIPGVDWVVAAVIIAEIGVDMSVFVSAYHLSAWAGVCPGNHESAGRQKSGRARKGNIHLRTILVSAAISASRTKGSYLKDKFHRLKARRGGLRAALAIAHKILVSAYHMLAKTLPYRDLGEAYLDQIGQTRTVANLKRRLERLGYRVILEPNAQPA

SEQ ID NO: 205530 - protein, 307 aa, unidentified
MFVGIDVAKDRLDVHVRPAGEAFTVARDGEGIEELAKRLSAVAPTLVVLEATGGFETIVAAGLAAAGLPLAVVNPRQIRDFARATARLAKTDTLDAAVIAHFAEAVNPPPRPLADAQSRLLGELMARRRQLIEMIGAESNRRRMLTVRRTLKSVDRVLATLKVQLEQIDDDIDIAVRGTPAWREAEDLLISVPGIGPRIARTLIAELPELGRLDRREIASLTGVAPFNRDSGTLRGRRTIAGGRPVVRAALYMSVLVSIRRKLPLAETYHRLRASGKPAKVAIVACMRKLVTILNAILRDKKPWATA

SEQ ID NO: 205531 - protein, 420 aa, unidentified
MSFKIFRFNCCGLDVHKTWIYACIGITDSNGRTDYKQARFSSFSKGLKELCDWLAKYNCSEVCMESTGKYWIPVFNVLEKANNSVILAHPKYTKPQKGNKTDRKDAKWICDLFMCEMIKPSFIPPADIRHLRDLVRYRFKLTCMITGEKNRVQNCLTVSNLKLDDVFSDVFGKSSRFITEYMLAHPGEIFDVAPFVDSRCKTPMEEIQAAVDGAISPEQAIKLRQCLNHIDELEKHLEEIEREILRLSDKYQAALDLIRTVPGFDKNPMTAIQILSEIGGDMSVFPSAKHLVSWAGCCPRNDQSNKRIKSTRISRAGNYIKPILVQVANGLLRSKKHPEITGRYKRIKSHRGHKKAIIAICRMLLTAIWHILSDLKPYTAEGFLESRPVNKAKVLTTSQALNLLKQRGYTIKDDIVPAMN

SEQ ID NO: 205532 - protein, 357 aa, unidentified
MCQRVIVKDESHEGAVHMQISTIGIDIAKNVFQVHGVDAQGKVVVARQLRRGQVIDFFGKLPPCLIGMEACATAHHWARELTELGHTVRLMPASYVKAYVKRSKNDAADAAAVCEAVTRPSMRFVPVKTIEQQAALMLHRSRDLLIRQRTQLINALRAHLAELGMVAARGKEGVKDLVAIVVKATVLPEPMRQALQALVSQLAELQQPIGQLERSIHAQHNASDRSRRLETIPGIGVLGATAIAATIADPFVFKSGRACAAWIGLVPRQNSTGGKERLGGISKQGDRYLRRLLVIGAMAVIRQARTHPGKYPWVMKLLAKKPAKVVAIALANKMARIAWAILAKGEIYRAPTLAAAS

SEQ ID NO: 205533 - protein, 327 aa, unidentified
MQALRTHVAGVDVHKAILAITILTGDADQEPKIEQFTCDTFSEDLMAMGVIIKERGVTEVAMESTGVFWKPVYNVWSKMGIRCTVGNARTMRNVPGRKTDMNDSHWIAQLHRFGLIKASFIPEDKFQQLRLLSRHRTNLTDDLARVKNRVQRILEDGNIKYGSVVSDVFGVAGLKVLRLLADGVTRPDTLAAVVTTNIQRKGEVKKSLSNCFSSHHCFLIKELMQQYDDLKTRILEIDRRLATEVTPYADLIDELKKIPGIDMTLAVGIVAEATNDVSNFADERKFAAWAGVAAGNNESAGKKKDQNVERARRTFESCLSRLLTAPN

SEQ ID NO: 205534 - protein, 363 aa, unidentified
MDKYIGFDIDSKKTVACVVQKGQKDQFATLKTDIEQMKKFLQSQRKMGERLHLTFEISGEAGYRHDRLADLVDTITVSNPTKMTWVYKTAKKTDRIDARKQAVLLSIGEVPRVHIPNKEIRQWRVTIQHRRKIVNRITAVKNRIRAFLKANGFVQPAERGSWWKLSNRAWMRGLAEEGEVASEQLWRMSLADMLDELELLEVQLARVTRYLDSYLKSKPGGRLLMSIPGVGPRTTEAVLAYTDEVRRFSRNKQYSAYFGLTPRLDESGSTRRLGHISKQGPSVVRWLIVESAWRAIKKSPVLKAFYERVRAGQKARKKIAIVAVARKMLSIMRAMLLTGELFNEQLVCNECWLGGTVEVKRSA

SEQ ID NO: 205535 - protein, 365 aa, unidentified
MNLNTATKAGQIIGTMNGLQVIGLDIAKHVFQLHSVDMSTGEIINIQIKRAKVLEYFVNKPPCLIAIEACGGAHHWAREFTAVGHSVRLLHAKIVRPFVGGNKTDATDARAIWQVVQQPEVKFVGIKSTEQQATLTLHRQREMMMKMCNMQTNAVRGLLYEFGATFAQGRQALFKDVEKALEALADQLPQMVRDSLREQVARIKATSEDMKAIEKRLTLQLRQDRQMQRIFQIPGVGLLTATAAIATMGEASAFKSGREFCAWLGLVPSQTGTGGKVRLGNISKRGDTYLRTLIIHGARSVLAHTKEPGPWLDALKGRRPASVVIVAQAAKMARTIWAVTAKEQDYKRDFQSIRPATAAKAPVLA

SEQ ID NO: 205536 - protein, 402 aa, unidentified
MAGSDSTRTLEASAFRPEEGRLTWSPESRRSWSPLRVMGWTPPDGIVCQSEGVEQHSEEASMGQVSTVGLDLAKNIFQAHGADVSGEVVFRKKLGRGRLLAFFAGLPACVVAMEACAGAHHWGRELARLGHTIRLIPPIYVKPFVKRQKNDMADAEAICEAAQRPSMRFVPLKQEEQQASSVVFRARDLLVRQRTQTINALRGHLAEYGWIVPKGVPHVERLIARVEDPAEALPPAARTILLVLVSTLRTLDEQIAVLDAEIASRARHDPVARRLMTIPGIGPITATALIALAPPHEAFKSGRHFAAWLGLTPRQRSTGGQQKLGAITKMGERTLRRLLTIGASAVIKQAAIRGAPAGSWLDQMLARKPKMLVIVALANKNARIVWALLAKGDVYRAPGVPA

SEQ ID NO: 205537 - protein, 355 aa, unidentified
MNSRKYIGMDVHQESISIAVRDANGKLVMESVIETKAATILECIRGIRGNLWVAFEEGTSAAWLYDLLKPHVAQVIVCDPRKNALLKTGNKNDRVDARKLSDLLRAGLLTPVYHGESGVRTLRELSRSYLTVTKDLTRVMNRLKALYRSWAIPCAGEKVYSPRHRSAWLEKLSEVGVRRRAEQLYQQLDMLLQIRRDARRELLRESRKHPAQELLRQIPRLGPIRVALVIALVQTPHRFRTKRQLWAYCGLALQTRSSGEYRFTGGQRQHSKKLPALRGLNDNHNHDLKNLFKSAATHASASTGPLGDFYQNLLAKGMKPPMARLTLARKMAAIVLKIWKKGERFDPGQLKQQAA

SEQ ID NO: 205538 - protein, 340 aa, unidentified
MDQISRIGMDTSKHVFQLHGVNAAEVPVLRKKLRRKEMLAFFKKLAPTVIAIEACGASHHLARLLQSFGHTVKLIAPQLVKPYVKRGKNDAADAEALCEAMSRPTMRFVPVKTAEQQAALMLVGVRDRLIRNRTQLANTIRGYAAEFGLTAAKGMAHLVPLLERIQADETLPALARELFASQAGEYAQLQAQIGEVEAKLTAWHRADECSRRLAKIPGIGPIGAVLLRMKAPDPAQFQSGRQFAAWIGLTPKDHSTAGKVRLGVITRAGDEALRSVLVVGATAVIQQALRSGKALPWLAGLLKRKPAKLAAVALANKTARIAWKVMLTGDAYRATSAAAA

SEQ ID NO: 205539 - protein, 385 aa, unidentified
MTQPAHDTTFIPRDYDIFGGLDVDKKSMAVTFRDHGTMRKSLKLPYSGRQLLNYTRKHFPGQRVAFVYEAGPTGFGLHDELTAAHHPCLVVSPAMVPTAARPRVKTNRLDSNKLAEGLRGGQLRSIHVPATSYRELRHLVQLRDTQVAQLRASKCRIKSLLLYEGIPFPAANGQWSGQVLRQLEALPCSRAVRFKLDQLIEALQFHFQSAARIQKEIRHYCQNDAELRQSISFLTSLPGVGTITATHALARLGDWRQISNVRQIAGFLGLVSSEHSTGDKENRGEITRIGDSRLRNKLIQCAWTAIRKDPELRAFYRRIYERQPKKVAARKAIVAVARKLTTRMYAVLKEQRPFVIRPDSAITPLTAEETVGPRERLDTAQNEQP

SEQ ID NO: 205540 - protein, 344 aa, unidentified
MDHFGGLDVSVKETSICIVDDTGRIVKEVKVASEPAALLKVLGNPTYRFKRIGLEAGPLSQWLFSALAEAELPVICVETRHMQAVLKAQINKTDRNDARGIAQMIRVGLYRPVHVKTLRSQKLRMLLTHRKLLQSKAIAIENDLRGTLRNFGLKVGMVGKVRFEARIQELVENIPDLAVLVEPLLIVRRVLREQIVILHRRLLAIVREDEVCRRLMTTPGVGPVVALTYRATVDVPARFRKSKSVGAVFGLTCSRYQSGEIDWSGKISRCGDEMMRTMLYEAAQSMMHSKKWSWLKAWAMQIARRRGMKKAIVALARRLAVIMHRIWVDGTEFRWTREQVAAAA

SEQ ID NO: 205541 - protein, 394 aa, unidentified
MKLVGIDVGKNSHHFCVMDKETGEFNVTPTSFSNNKEGFDFLINSLKPYSKKSILIGMEDTGHYHVALLKFLLSNGYTVALSNPKTTDLTRKMEGGITKNDKLDTITICDVLDTPERKKQYRITKVDRFDLYEQRQLTRHHHNLKEELNVYCNRLQKSIDLVFPEFNTLFSSKYSIVYMNLLKTFGSAEAIASTDIRTIRKCFEIKGRGNRISLTPEKLKECAKNSIGISSEVETIQIKHLVSQITLIKEQIAEIDKKIEEFSITNNSPILSIPGISHFSGTSILAELGDIGNYSKPSQIIKFAGVAPYHYESSQYNAQHTGITKKGSKYLRKTLYQIILTVINNNPVFKKYYLLKISQGKGHRCAQGHCIRKLLRIIYHLLETGQSFDPALLR

SEQ ID NO: 205542 - protein, 385 aa, unidentified
MRDKTFVPREYDVFAGLDVDKKSIAATFSSHQGFIRSLSMPYKVEDLLNHVRNHFADQKVAFAYEAGPTGYGLYDGLAAQGYRCLIAAPSMIPRAPGQRVKTNRLDSKALSESLRGGQLKSIHVPSPLYRQLRHLTQLRDTMMSEAVGMKQRIKSLLLFEGITFPPAPAGSQWSFIVKAKLRKLPCSNTVRFKLDQLLDSLEFAEKQVFKSTKEIRRFCQTDPELSQCIKYMMTVSGIGWIVASQLLARIGDWRELENIRQLGGFLGLVPMEHSTGDKTDRGPITHTGDGRLRSKLIQAAWSAIRKDGELREFFRSVCQRHPRKVASRVAIVAVARKLSVRISVVLMQQRPYEVREKVHSAPLTQEETSPQGTTRRQAEPGVETP

SEQ ID NO: 205543 - protein, 318 aa, unidentified
MRNAAGLDISKDTIDVAVIIGDSVQTKKYRNDETGIKQLQSWLQTFEDLTVCMEATGNYYEAAADYLAESFIVHVVNPLKISKYAESRFARTKTDKQDAKLIAEYCQTAKEKDLIHRPKPTEAQYKLARLTAAYAQISQECTAMKNRCEAAKDSEVREVFKNIIRHLQTQLKNLKAQIRKQTQTPQYQPQIKRLETIPAIGRLTAAVLLQYLTTVDFQTPNKFAAFAGLSPQQKQSGTSVRGKEKITRYGNRKLRTALFMPAMVAYRMKAFPAFIARLEAKNKPKKVIIAALMRKLAVIAYHVHKKGEDYDPTRYAGA

SEQ ID NO: 205544 - protein, 417 aa, unidentified
MEVLVTRCAGLDVHKKSVMAAVRAPGPDGKRLQVVRESPTFTRNLVQLRNWLVSQGVTEVAMEATGVYWQPVWHVLEDMPGVELKLVNAEHVKNVPGRKTDVSDAAWLAQLLECGLLRGSFIPEPAMARLRDLTRYRKKLVEERAREVQRIQKLLETAGIKLDSVATDIVGKSSRRMLEALIAGERDPDALAELALTRMRAKLPALRLALEGRFSEHHALMARLYLDHIDHLSEAIDRLDAQVVSETAPFAQQIDRLCTIPGMGRRVAEVVIAEIGVDMSRFPTAGHLASWAGMCPGNHESAGKRRSGRARRGNDDLRTALCEAAWAASHTKDTYLSAQYRRFVARFGKSNGGETKAIFAVGHTMLVIIWHVLAHSGNYEELGFDYFEKRNETEAYKRRLVHQLEKLGLKVTVEPAA

SEQ ID NO: 205545 - protein, 419 aa, unidentified
MFCNRPNLKCRSLDSEFRFRSMSCMLQSKQKLVSKKTKKKPLKAAAQQPSKSPVRDRICLGAFNTVSEQDPRRSLESNPNSRQSRPQGKTSQPSSHLQDRVTSMDSLITSFVGMDISKHTWDVHLSPDNRSFTVPATATGLSELLSQLPAVGTCLIVMEATGGYERDLAAGLFDAGHLVSIANPRQCRDFAKAFGQLAKTDRVDARMLALFAEKVRPRLSEKPSEKQAELDELVTRRRQLVAFQSAELVRQEQARSKQAIRSLKKHLELLKKQIKELNAAIAKLIQSDEDWRRRAEIVASTPGIGEATAATLIAELPELGKINRNEIASLVGVAPFNHDSGKFKGQRRIKGGRKSVRTALYMATFSAMRANPLIQVFDERLKTKGKPFKVRVIACMRKLLTILNIMVREQTLWMPKIVN

SEQ ID NO: 205546 - protein, 489 aa, unidentified
MSRRKSGRKNQTSTNKASLRSRASKSSQPQARQASRRGGLPVNNAPQPIDGFSLVNANAAGIDIGASVHFVAVPEGRDPTTNVRSFGCFTADLEGIVDWLTECKITTVAMESTGVYWIPLYELLESRGFEVLLAEPRQIKKFRRKTDVLDSQWIQTLHSFGLLSGSFRPEDKIVVLRSYVRQRGMLVKQAAGHIQHMQKALEQMNIKLTEVLSDIVGVSGLAIIDAILRGERNPQELAKLRHESCLNDEATIALALQGNWRDEHLFALKQAVDLYRFLLLRITEVDCQIESYMLTFDEQAPSNDLTKPKHRKTKRQHDMKFEVRKFLHRMCGHDLTTIDGIGEQAALQIISEIGTDMSRWPTEKHFVSWLCLCPELHKSGGKKQKKRRSKTQSSTNRVATVLRVGAQSLFNSKCSLGAFGRRIRSRDGAPVAVTAMARKLAIIVYKMLREGQPYVDRGAEHYDARYRERVIKNLQRKVASMGYEMTPAA

SEQ ID NO: 205547 - protein, 344 aa, unidentified
MSITIGIDPHKASHTAVAVDDFETVVDEICIRSCPTQAVLLRDWADGFRDDRVWAVESAQGLGYLLAQQLIAAGETVVDVPAVRASRVRTLSTGRSQKNDPNDARSVAIAALRADDLARVLPDDHTRILRLLGKRQRDLGRQKNLECNRLHALLCEMFPGGADFRFDSMTRVNTLIDRFVVTDSMSRQRLDLAHDLVDSINELTAKMKVSKRRITAAVKASGTSLTDIVGLGPITAALIIGHTGNIDRFASRHHYASYNGTAPIEASSGDRVRHRLNPRGNRQLNWAIQVIAISQLRHDTIGRRYYDRKIEEGKTSKEALRALKRRISDTVYRHLVNDARQLRG

SEQ ID NO: 205548 - protein, 365 aa, unidentified
MKKSSKKQQGSPVVENKPEKVVGLDLGDRHSHYCILTSSGEVMEEGRIQTTAASLEKHFGSEARMRIALEAGTHSPWVSRLLKRFGHQVIVANPRKIPTLTKSESKNDRNDARQLARMAAFDPELLHPIEHRSTERQQDLNLIHTRSVLVRARTMLINSMRGLVKSAGGRLPSCSSEAFPEKVPAAVPPALKSACAPVVKQIAQMNQTIAAMDKQIDGLEKKYPEIALLRTAPGVGPMVAACYVLTLGKPETMETNRQAGAYLGLRPRQQQSGDSNPQCGITKTGNTYLRSLLVQSAQYILGRFGPDSELRCWGLKLAASGGKRGKKRALVAVARKLAVILLSMWRNRKKFEPFLQSATQLARAV

SEQ ID NO: 205549 - protein, 401 aa, unidentified
MVSDFMKVRYNLMKIFVGIDIAKLNHFAAAISSDGEILIEPFKFTNDADGFQLLVSKLESFDKNSIIIGLESTAHYGDNLVRYLVAEFYQVCVLNPIKTCQMRKNNVRKTKTDKVDTFVIAKTLMMQDDLRFITFFDLDMMDLKALGRFRQKTIKQRTRLKIQLTTYVDQVFPEIQYFFKSGLHQHAVYALLKEAPSPKEVASMHMTHLANLLKVNSHGHFTKELAKELRVLAQKSVGANDSAISIQITQTIQQIELLDSQLEKIEAEMTDIMKFNDSVIMTIPGIGYINGGMILGEIGDIHRFSNPNKLLAFAGLDPSVYQSGNFQAKTTRMSKRGSRVLRYALVNAAWNVVRNNATFKAYYDAKRAEGRSHYNALGHCAGKLVRVIWKMLTDEVEFNLE

SEQ ID NO: 205550 - protein, 337 aa, unidentified
MNYKHFIGIDVSKSWLDFTVMEKNQILLYKRIENNVKSIKAFFKGLKVFEGYQLCDTLVCMEHTGIYNNHLLNHLNELKANVCLESGLQIKQSSGLKRGKNDKIDSERIALYAYKNCEEIKLWQPKRNLLIRLHHLTALRNRLLNVLKQLQTPLKESAGFVNKKDLGQTKSFCKSSIAAATKDLKKLNDQIKSLIKADPELNRLFNLITSVTGVGTVTATEMIITTNEFKSITCHKKYACYSGVAPFEHRSGSSIRGKTRVSSMGNKNVKKLLHLAALSASICKGDMKNYFDRKVAEGKNKMLILNAIRNKIIARVFACVKQNRLYEKNYQNDLFYP

SEQ ID NO: 205551 - protein, 354 aa, unidentified
MRTTEQAVRKVISAKDVYVGIDVHKESWHVTIRSDGEERFNGRIPGQYQSLKSVLQRYRDFRIKVAYEAGPFGFWLLDRLVQDGIEAIVVPPSLIPIESGNKVKTDKRDSRKLATLLESNMLKRVYVLTPEEREHRDLLRTRRQIVEHRNDVARQIKSKLMFYGIRSPFTSTARWSLQYVAWLKTITFETSYLKEAFELLIQTYEYLTRQIARINRTVVLLCRDKRYRGRIKLLCTAPGIGRLTAIELLVELQDMTRFKSAEELASYIGLTPSEYSTGERTRQGRITRCGNKRVRTYLVESTWVLITKDAQLRAKYLRLKNRRGGKRAVIAIARTFLIRLRRMLLDNVPYRMAA

SEQ ID NO: 205552 - protein, 367 aa, unidentified
MHAQGREPMNSLLYFNLFRQTHMAAFKMNKNDHKSKLSLQAGIDVGSEELILVVRKNSKPFDPQKFTNTPSDRARLVKKLVKLPGIIVCMEATGIYHFDLAIALHDAGVSLMVVNPKASHNFAKVLMKNSKTDAVDANTLAEYAERMDFVAWTRPSNEKIALRCFSRRINSLTNQRAAAKNHLHALTASQETPKAVLNDAKLAITQLQKRIDRLAAEALVLIGKYPELTRMLQLLISIKGIAETSAIALMGELLLLPPDLTHREWVKFAGLDPKAFDSGKSVHKKTRMSKAGNRHIRSALYMPALSAKQHDPYVKAYFQHLVLDNGKKKLQALCAVMRKLLHAIHGMLKHNVPFDNTRFYTIPASAG

SEQ ID NO: 205553 - protein, 337 aa, unidentified
MLFCGIDLHSNNSVVVISDENDKVLYSKRHPNNLDEICTALSPYRSELFGVVVESTFNWYWLVDGLQDAGYCVHLANTTAIKQYDGLKHRGDESDARHLAHILRLGLLPEGHIMPKATRGVRDLARKRMQLVQQRTTQILSIETGFDQRTGAHISSNSIKKLATSDIDNLGLGHMEALCIKANVAVMHAVQTEVEVIEKELAKYCRGNPAFSLLKSVAGIGDVLATVILLETGSIERFADVGNYASYCRCVGSAHMSNGKKKGEGNTKNGNRYLAWAYVEAANYAIRYCEAAKKFYQRKKAKRNGIVAIKAVAHKLARACFHMLKTGELFAVERCFT

SEQ ID NO: 205554 - protein, 458 aa, unidentified
MNKFYLGCDVSKGYADFIIINEEKQIELDSFQLDDTTLGHQQLCNILDRFSFDHSVPIIYSAVESTGGYENNWFNTLSNLQDKINIYVARVNPLGTNHNSRASMSRIITDKNAAKNIAEYLINHKKKIIFNKDDKFSSLRKQWTFVRMLTKQRTQLYNQLESILYIANPEMLIYSKHGYPSWLLTVILNYPTAKRLSKARVTSLSSIPYLNEQKAVSLINKARASVAASDDDVTANLVTSLVKQIIGLSKTIDKQSKFIADNCKLPEIEILKSFPGIGNYSAIGLLLNICSTEYYQSTKNLASYFGIHPIWKQSGDGIWGMHMSKQGKKEVRNILYMVAKTAIVHNELIREIYARHLKKGMNKTAAIGVCMHKILRIIFGMLKHNEKFNPEKDRANSQKMLKDNKQVKAVTNKLRRYQKLDLAAPISNRQTKKRKEQEKSQNGITSLSTGSIPHSFSD

SEQ ID NO: 205555 - protein, 313 aa, unidentified
MEARTMSLPPAASHDDAVRCLLAIELSKKSWIVAVNTPLSDKISRYTLKPCDWKELLKLSERIRTRVAGELKKRVDVVSCYEAGYDGFWLHRLLEAQGIRNYVIDPASVQVDRRARRAKTDRVDVERLLRSLMAYLRGEPKVWSVVRVPSVAEEDDRRLHRERGRLIRERIQHVNRIKGLLAIHGIYDYQPLHRDRMQRLKGLHTADGRQLSPRLKAEIVRELQRLELVLGMIETIEAERDAIASAKTKAKTKVEHSNAKKIQDLVKVKSIGPEFATALVSEVFYRSFDNRKQLAGYVGLTPSHFQSGPMCRD

SEQ ID NO: 205556 - protein, 433 aa, unidentified
MNTSHPYDLVIGLDRSDKKADLRLIDTITGQRRSQTIDTAPEALWEWLLQLRQDYPQARVALCLEQPAVHLIAFLEAYDWITLYPINPITLQKYREAFVTSRAKDDAKDADYMADLLLSHHAKLKPWAPEDSQTRALQQLVVHRRAVVDERTGLTNRLIALLKQYFPQALVLCGEDLWRPLATRFLLKWPSLEAVQKAKPASFTQFYHLNGSRSPKLLQQRLALIDKAVPVTDQTALIQSFVLRVQLIARQLQLVQQAVQHYDSQIAQAYAAHPDQFIFASLPGSGPVLGPRLLASLGSQRERYPANTNLQCYTGVAPVTKRSGGSCYIHRRYLCPKFNRQSFHEYAKESVLWCRWAAAYYLQQRSKGCSHHTSVRALAFKWQRVIWKCWQDRTPYRDELYEAALRRSGSPVTNLFDRVQLGKSPVKNPAKIS

SEQ ID NO: 205557 - protein, 408 aa, unidentified
MKTLHQRCAGLDVHKQDVVACLRLATKGRVHREVRRFPTTTRGLLELAAWLEAARCTIVAMEATGVYWKPVWHLLDGRFELVLANAAHIKGVPGRKSDVNDATWIADLLAHGLIRASFVPPQPIQDLRDLTRTRKQLSREIVRHTQRLQAVLEEANVKLASVITDILGASGRRILKAMITGETDPSHLAELGSRRLGCSRDTLVEALDGRVRDHHRFLLDQHLKTIEQLEETMAAFDARIEAALAPFRDTVERLTQVPGLSTRAAEVVIAEIGLDMSRFPTAEHLLSWAGLVPALDESAGKRRSTRVTKGAPWLKPVLVQCAWAAANKKNSYFEAQFLRLKGRRGPKKAAIAVAASILTTVYHMLRDGTCYQDLGPNYFARRNPARTARKLADRIRSLGYIVEIRSAA

SEQ ID NO: 205558 - protein, 312 aa, unidentified
MAMLSFCGIDVSKDRLDVVVLPEGWFLSVSNDTAGWAELVVRLRPLTVSAIGLEPSGGYERGIIRALLAAGLSVRRINPNKLRQFARARGVLAKNDRLDARLIAEYVAIMPTRVVQRDAAVERLAEIVTMRRQLCDEHVAAENQAAHLEDAMLRRLSKRRQMRLEADIRLLDKRLAEMVAANVALAQRYELLTSMPGVGPVLAFTLIALLPELGKMSRKQIAALVGLAPYDFDSGKLKGHRSIYGGRMPVRNVLYMAALSASRYSPALKAFHRRLAAADKKSKVIIVAVMRKMITTLNAMLRDNAAWQPRSA

SEQ ID NO: 205559 - protein, 440 aa, unidentified
MQQEECSRLEEFRQFRREVRGSREYLLVGIDVAKEKHYAFFGTATGKTLLRRLVFENNLEGFRKLLVQAEALKVQEGLSKVVFGMEPTGNYHKPLGEHLMGCGRQVVLISGVAAHENRKTLDGRWDTNDTRDAANVADLMSQGKCLFYEFPVGALLDLRNLLSLKRRLKRLEHGQRVRIRNHLVAKYFPELDRYYEQSDSTALAIVRWCLAPAEIAGLEYPRFVQRVGSSRRRSSQEKRLRTIWELAVGSVGCEAGPVVEFEAQVMVEGLKRIRGDIERIEEKIQEICSQIPEYGFLLSIPGFGPDVSAKVLGAVGDPFRFQNGSQVLKMAGLDLNAERSGKNSESAVPVISKKGKADLRYALYQAAFIASIRNQDFIVYYTNKLRGREREPGIKTKMRVKLAAKLLIIAWTLMKKKEPFHLGHLRVEGQSLYGAAGRES

SEQ ID NO: 205560 - protein, 283 aa, unidentified
MQETITYVGIDAHKKALAIAMFVGNDDTATTWTVANEPRAVERLRRKLVRVAPGPIECCYEAGPCVYALHRQLHRDRLRCQVIAPSLIPRKPGERIKTDRRDARKLAELHRAGLLTEVRPPTRAEEAVRDLARARDDARDDLQRGRQRLGKLLLRRGLHYPGKNWTRSHRAWIASLSWEHDAERHVVDDYQLAIDHLDARLGELDARLAELAETEPYRAAVGALCCFHGIGTLTAMLILAELHDLRRFPSPRALMAYLGLVPGEASSGERHRRGRLLGLWPTG

SEQ ID NO: 205561 - protein, 412 aa, unidentified
MQDILTCAMGLDIHRDVIVACLAKGELGTDPEIEIRSFSTLIPEMRKLRDWVLEAECHHVAMESTGIYWQPIYEMLEPCFDGQISILVVNARHMKNVPGRKTDMRDAQWIATLLRAGLLKGSFIPDKTFRELRHLTRYRKSIVRDITAQKNRIDKFLQSSGFRFTAFLSDAFGASGRNIIRHLMEYGNISREALDRCLKTQTRKRIDEILIALNGSLSEHQRNFLRMIFGHLEALEQHRHTVEDAITKEITKHEEALRLLCSIPGIDVTAAAAIIAEIGTDMSAFPDSQHICSWAGLSPGNNESAGKRKSAHINKGNPYLKSMLCEVGWVISGKRTLHLSGWYWKIKQRKGAKRATIALARKLLALIYTMLKTGSPYNEDCFEIRRKQSERKRAYRMVNELQKLGYFVVAPG

SEQ ID NO: 205562 - protein, 377 aa, unidentified
MKKKILYVGLDVHKNTIDVAVASGRSNGTVRSHGKIDSTLDALNKFIKRIQDKGVELRFVYEAGPCGYQIYRYLRSKNINCSVVAPSMIPKRSGDRIKTDRRDAINLVRLFRAGELTSIYVPTEEDEAIRDLVRCRDDMRRLERKARQRLLAFLLRHGHRYSGKRHWTKGFYKWLATIKFSEPAQQITLQEYIDTVNDYSERVKRLTQHIQTHVEQWSRGPFVKAYQALRGVSLIVAATVVAEIGDMNRFENPKQLMAYLGLIPSEHSSGSMVRRGSITKTGNSHVRRVLVEAGWSYRMPARKTIILLKRQQGLPKNVCDISWKAQTRLCARYRRLIARGKSRQNAVTAVARELGAFMWAIDKQMQLAVAKNKFSTL

SEQ ID NO: 205563 - protein, 387 aa, unidentified
MQSVTSATAVATTARANDITLFASLELSKSKWVVTINSPGSEKFSRHGVEGGDGAGLLDLLSRSRAKAEQRYGVQIKTIVIQEAGLDGFWIHRLLLAEGIESHVVDAASIAVNRRHRRAKTDSIDGETLLRTLMAWARGERRVCSMVRAPSPEEEDRRRLTRERGTLLKERIQHTNRVKGLLSGQGVRDYNPLRRDRVERLEALRTGDGRELPPLLKAEIRRELDRIAVVTTQLAVVERARDALVRTEAGEPNNPAALLLKLKGLGPEFASLLWLESLFRSFGNRRQVAAYGGLAPSPWQSGGVERDQGISKSGNRRLRKTMIELAWFWLRHQPDSALSRWFRARVGAGKGRIRRIAIVALARKLLVALWRYVTQGVVPEGAVLKAA

SEQ ID NO: 205564 - protein, 352 aa, unidentified
MIIGCDFHPSFQQIAYVDQETGEYGERRLNHREEAVRFYGSLAGSKVVVGLEATGNDRWFRKLVLQSGHELRVGDASAIHAAAPREQRTDKRDARHILRLLEENRFPAVWQPSVANEEQRQLLLHRCRLVRMRTRIKNQLDSIAKSEGLTGSRSWSGRRRGQIEGLPLTGWYGQRRADLLQLLDGLELRIKPLDRAVEAAASQDAEARLLMTHPGVGPVVSLAYVLVVGDWRRFPRGKHVGSYLGLIPSEASSGKRQQQMGHITKQGNTLLRWLLVEAATTAQRYDPGWHRQYVRLSMSKHHGVAKVAIAHKLAVRLYWMLRSGQEYGQIKERGSHARQSECPVGRSTRPIE

SEQ ID NO: 205565 - protein, 461 aa, unidentified
MTKKKSTGPQQGSARKKVDWKALDIVHPEAAGIDVGGSEHWVAVSPDRDSEPVRRFGCFTADLREMARWLIEKGVHSVAMQSTGVYWMPVFEMLEQNGLEVYLVNARDTKNLPGRKSDVQECQWLLKLHTFGLLGNSFQPPNEIRIARSYWRQRGNLVAQAGSAVQRIQKALTEMNIQLGNVLSDLSGVSGMKIIGTILEGERDPWKLAALARPEIKATPEDLAKSLEGNWREELLFVLKQEVDLYRFYQEQIIDCDLQLRKHLESFGSSVDIRAQPLGPKPKGKKGSRNAPHFDLRSELYRITGIDWAQINGIDVLTAQTVIAEAGADLSAFPSEKQFTSWLGLCPTNEQSGGKILNRRTRKVVNRATVAFRNAAMTLLRSQSYLGAQYRRLRTRLGAPKAITAMARKLACLFYRLIKHGQQYVDKGTEYYEARYREQQIRSLAKRAQKLGLQLVIPKIA

SEQ ID NO: 205566 - protein, 341 aa, unidentified
MQITTIGLDIAKNVFQVHGIDGDEKVVVRKQLRRNQVLRFFDELPPCLVGLEACATSHYWARELAKLGHEVRLMPAKDVKAYIKRNKNDAADAEAICEAVRRPTMRFVQVKSADQQAQLMQHRARDLLMQQRTQLINAMRSHLAELGIIAPQGREGVKELLAIIAHDDNRHLPVDARASLVVLAAQLQALQTMIGAIEKRIVKQHRASKESKRIQTVPGIGEIGASAIAATVTNPRIFRSGRDFAAWIGLVPRQMSTGGKPKLGPISKQGDRYLRRLLVVGAISVLRRAKLHPGKFPWVTQMLARRPFKVVAVALANKMARTAWALMMSGKTCRAARYAAA

SEQ ID NO: 205567 - protein, 350 aa, unidentified
MRFYTGQHRFYCGIDLHARTMYVCILDATGEIVLERNLATAPEAFLETIAPYREGLVVACECLFTWYWLADLCAKQGIRFVLGHALFMKAIHGGKAKNDRIDAHKIAVLLRGGMLPQAYVYPPGMRETRDLLRRRLHLVRKRGQLLAHLQNLRHAYNRGAFEKRIAYPSHRDGVVAHFAGEPMVQANAALDLSLLDHYDKLLVDLELRLVKQAKKEAPRGFHLLCSIPGIGKVLAMTIVYELHDVHRFERVQQFASYARLVKCAKESAGKRKGTSGAKMGNVHLKWAFSEAAVLFVRHSAEAKALLARLTQRHGKGKALSILAHKIGRAAYYVLVREKPFDAAKFFAHAR

SEQ ID NO: 205568 - protein, 374 aa, unidentified
MSKHSEAFVALDTSKLRNAVAIADGGRAGEVRLGEIENSTAATAKLIRKLEAKYERITFCYEAGPTGYELHRQIKALGHECVVVAPSLIPKKRGDRVKTNRRDAVNLAKLLRAGELTAVWVPDRRHEAMRDLTRARETAVIDLRSKRQQVSAFLLRQGRWYPAGKKTWTNAHMNWLASQKFEQPERRIVFEEMMFAIRQAQERVERLEPAIRAAVPDWSLAKVVTALMALRGIDLISATGLLAELGDLSRFQTAPELMGYLGMGSSESSTGDTIKRGPITKSGNRRARRTLVECAWSYQHPPRVGIAKQQKVAAAPPKVREIAWKAQCRLNRRYRALIRRGKLKTVAITAVARELAGFVWAIAREAGSAEPAAK

SEQ ID NO: 205569 - protein, 320 aa, unidentified
MMAQDDMVVVGIDVAKDKVDACIRRCGLRQTCPSTAQGQRKLITWLRKSQVGKAVMEASGGYERQWRKVLHAAGIEVRIVDPKRVRSFALSAGRLAKNDAIDAEMIAWFAETFSEAPSQMHDAAHEELVALVKSRISLIEIRTRLQGQSEHAAPGPVQKARSRILKGLAAEIEKLEAVISAKVKATPDFAARAEIIESVPGFAETTAANLVAGMPELGQVSNEIAAALIGLAPYDDDSGQRRGERHIKGGRRWVRNAIYMPCLGAATLNNPVIKAFYDRLIARGKEPKVALVACMRKLIVILNVLIARQQKWDPSRYALS

SEQ ID NO: 205570 - protein, 431 aa, unidentified
MDVIHSRVAGIDVHKKVVWVAVRLPGERPGERTVTVKRFKTFWRPLRQMAAWLAELGVSDAAMESAGVYWWPVYHALTGAGIQVCVCNAAHMRNVPGRKTDLADCQWIAELHEHGLLRPSFIPDAQVAALRQRTRYRKKLIEQRTSEGQRLAKVLEDAGIKIDSVASKLLSQSGRAMIEALIAGERDPGRLASLAKGVLRRKTDELQMACDGRFTAGHAQMCRLHLDAYDHLTGQIAELDALVAEAAAPFAALIARLVTIPGVGQRTAEVIIAETGGDMTRFATAARLAAWAGLAPGDNESAGKRKKAPARKGDRHLRTAMVEAAWATRRTATRPGARFRRLARKFGKGNEKKAAVAVAHTLMCIAWAVMRYDAGYTDAGADYYERRDQRNREHLVRYHQNALARLGLQVIVTQPGDGTPPPPDNPGQAAA

SEQ ID NO: 205571 - protein, 350 aa, unidentified
MPMVADVVDAVIGGDTHKDTHTLEMATPSGVPMASIVVGNDAAGGAAALAWITDHALGPRIVVGLEGTRSYGIGLARALRAAGLTVVEVERPKRETRRGRGKSDPIDAHLAVLAVLRMHTDRLPTPRADGDREALRILLTARAELTDTYTRQINQLRALLLTGDDTDRAISRGRVTHDWLDRLIRRRGPGTETREQATRRAETRRLAQAIRDAHRDLTHNRDQLAAIIPDLAPGLLDRPGVGPVSAAQTIVSWSHPGRCRSEAAFAALAGVNPIPASSGKTIRHRLNRGGDRHLNHALHTIALTRMRSCPRTHAYLTRRRAEGKTDRDIRRILKRYIARELYRTLNTNAA

SEQ ID NO: 205572 - protein, 431 aa, unidentified
MNTQQFEVIRPKCAGLDVHKKSVVAAVCTSDPVTLTASYKTKVFNTTNSDIAALRDWLLAQDCRDVCMESTGKYWIPIFNILEPHMHVILTHPKYVKAIKGKKTDKRDAKWIANLFRFDIVKASFIPPADIRALRELSRYRLKLSYMRTAEKNRYQNSMTISRIRIDCVLTDPFGLSATRIMDYLLSDEPFDEEKCRSLIDWRVKASKDDVLDSIRGYNIPEEQKFKMTHAKAHMDFINKSIDEIEAELFLRSRQYDTQVKRIATVTGITGLSALFILSEIGADMSVFESDRHLCSWAGLTPANNESANKKKSARCSRAGQYLKPLLIQCALAAVKSKKEPYFAIKYQRIAKRRGKKKAIIAIARMMLTSIYHMLSEDKDFRPDDYEATVNPPKQKPTVLTIENTLQFLREQGADPETLTLIQQQCAAQAG

SEQ ID NO: 205573 - protein, 405 aa, unidentified
MSKDLRRGTISVSLKFKAMTTPLKYSVGFDCSKDDFSACISLIDFSQEVTIKSTRKFKNTTRGFDDCQYWITQHCKAPVPIAVVMEATGNYYENLAFYFFKKDYAVSVILPNKAKKYMESRGIKTKNDPVDAKGLSQMGAEQRLNKWEPFSDQIYQLRSLTRHCEHLSQERTRLINQLHSLEFGMFKNDLVKQQLQNMLELLENQIKQAKLTIETIVQADRNIKERLDKIVTIKGIGLFTLATIIAETNGFKLFENQRQLTSYAGYDVIENQSGKRVGRTKISKKGNSHIRKAMHMPSLNVVRYENPTFVSLYERIMKRTNIKMKAYVAIQRKLLCLIYTLWTKNESFNPQILITSGNDEPKPLFPLGFEKAEKKVVPTNNVRTTQDELPCNELPEALFPLLQIY

SEQ ID NO: 205574 - protein, 458 aa, unidentified
MLEGDAVKKAQRIAKLPVINPNAAGIDIGATQIFVAVPPDRDAESVRCFGTFTTDLEKLADWLVACKIQTAAMESTGVYWIPLFQILEKRKIEPVLVNAQHLKNVPGRKKTDVEDCQWIQHLHAVGLLRGSFRPADEICTIRSLWRHRENLIQLASIHVQHMQKALDQMNIQLHHVISDVTGTTGLAIVDAILLGERDPAKLAKLRDPHIRASEQTVMESLVGDYRQEHLFVLRQSLESYRHFQRLIQEVDLEVKQMVKELPSQVDVQERPLPKATNPRKTPWRNEPPQLREDLYRAFGVDLTQVPGLNTLTTQIVLTEIGPDFSRFPTSGDFCSWLRICPNPKITGGKIISSKTRPSKNRAALALRMAALGLHRSQSFLGNYFRRMKARLGTPKAITAAAHKLARIVYHMVTTRQEFDATIFEALERRSRDHKHLRLRAQARELGFDLVKINAEAVS

SEQ ID NO: 205575 - protein, 345 aa, unidentified
MLYTGVDYHRSFSYLTTMNEKGEILTQKKVPSNGEIIDFLKEFGEEMEVAMEASPSWYWLYDHLEEEGFDVKLSHPLKTKAIASAKVKTDKVDSGTLAHLLRSNLLPLSYVPGKAVRLNRELLRYRASLVKIQTSVKNKIHTVLAKNNINHSYTDLFGKQGMAFLHSLSLDENYKIALEGYLTVLDTVRQEIRKASKKVKQMAEEDADTLLLMTIPGMGYYSALLTKSEIGDVRRFRSAKQLCSYAGLVPSTYASGNTCFHGHITKQGSRWLRWILVEAAIHAVKRPGVLRRFYFKIERKKGGQIAKVAAARKLLEWIYHILRDGRTYPEMEKIADLLGRGELGN

SEQ ID NO: 205576 - protein, 320 aa, unidentified
MAQHTKPVAGIDTGKLHLDLALHTQPDVQRVTNDPDGWPALIAHLKAHGVEHVGIEASGGYERGVVAALRAAGFRVSLHQPRQIKAFAKARLQRAKNDRLDARLIAAFTALITEHQPERSAPDPRLQPLADHLVFIEQAMDDATRARLRLEHQHDPRLRRQLEADIRRADARVERELGLLLAKVRAEPDLAERLDLLCSIQGLGEKTAVRLVVLMPELGSLSREQAASLAGLAPYDHDSGEHKGERHIAGGRARVRTALYTAALPASHRWNPALIALRTRLIDRGKTHKKALVACARKLLTYANAVLARGTPWVPEGRPG

SEQ ID NO: 205577 - protein, 348 aa, unidentified
MLHVGLDLSRRRLDYCLLDEGGVIVERGAVAPDADALAGLVRLVELRHGRQPVRAVIESMNGARFVHDTLERCGWEVLIADAQRVKGLAPLACKTDRIDAWVLAELSRRDLVPAIWLASFGQRQERERARWRLYLVKHRSSLKQRVHSELMAFGHACPVTDLFGVRGRELLERLALPDPWHANVLACVALIDDLDRRIDQLERELKALGADHRYVPLLVTVPGISWVLAYTIAAEIGDITRFASPKKLCGYSGLCPRVYQSGDSDRRGPLTKNGPRYLRWALIVAATNASRHPLYHDRYQQTKRRLGKQRGAKVAQVQLARTLTEAIWQMLTRNQSFAPAGAAFPLAA

SEQ ID NO: 205578 - protein, 364 aa, unidentified
MGEYNTWVGIDDSADQLDVAVLYGNEVLPRHEFQVVNDAQGCGKLIKRLKSMPGEVRCVYEAGVNGYHLYRLFQKYGIACDVVAPALTPRKPGERVKTNKRDARKLASLYRSAELTSIMVPKEEQEALRDLMRAREDALEDLQRMRHRLGGFLLRRGLRYRAGKAWTKGHLKWLKGLSLEHAHFQEVLNEYRLALDDAAERLKRFEARVEEIAKQGPCKKLVGFLMALRGVKVVTAMTIIAESVDLKRYLNAPGYMDAIGVVPSEYSTGDKRRQGSITKTGNAHLRRVLVESAWHYRWAPGLSKTLKKRRTGLPPEILAVVRKADQRLHTKYTRLVNKGKLSKIAAVAVARELAGFIWAIGQAA

SEQ ID NO: 205579 - protein, 466 aa, unidentified
MTRGDRRRNARREQLRGMLPRDGAVIGIDLAEDKQAIAVVDHDLRLLGRKTVRVKAFRLDEGLDWAVGRARSKGFAAVTVACEPTGPRWLQVQRLCAERGLPLVCIQPLMTHIAREQQDFTTHKTDEADCVLIARLAVELHCYIPEELDETWAHLRHLGRRRQQLITAATASAQRIRDFLSVAWPVVTGTCAEPFNSKTWLAALQVVTSRCGADPGKLAVMGEEAFTALVRGAVPGWGGQKGWGPIRGRIFAALTSTEGVVVASRRGLLRRVADELGDLQRTRAQLRAVEADMAAVLDELGLSRLADIPALSAVGAAAILAETGDPRRYDSSSSLARHSGVSPSDNASGAFYGQAHISRRGRPGLRLAVWRAVWPMLMANPVMAAKYAAMTKAADDAARAAGVHADTLAGSRPASAAAAAARARRAKARVACAASLLRWIYSMVVHGTSWDPAVASGAPICQAEAA

SEQ ID NO: 205580 - protein, 343 aa, unidentified
MKITTIGLDLAKSVFQVHGVDATGQVVVRKSLRRSQMLPFFAKLPRCLVGIEACGTSHHWARELIKLGHEVRLMPPAYVKPYVKRGKTDAADAEAVCEAVTRPTMRFVPVKSPEQQAALSMHRTRDLLVKQRTQLINMIRGLLAEFGVDIPKGLERALLMARQIVDGKAPEMPFEAAKVVGTLSQQALDTHVRLREIDRDLAVWLRSDDVARRLMTIPGIGLVGATALAASVTDPHQFRSGRQFAAWLGLTPLQKSSGGKERLGRITKMGDKYLRKLLIVGMTSRVRRAKQSPAVDPHLADLLARKPTRVATVAMANKTARVIWAIMARGETYLAGHRPALAA

SEQ ID NO: 205581 - protein, 354 aa, unidentified
MSRKTNMLDFEGQVFNIGIDTHKSNWKVTVRQNSMELKKFSMNPEPLELLSYMSKHYPGGRYRSVYEAGFSGYWIHRSLSELGIDNIIINPSDVPTTHKEKDRKSDGVDSAKLSRELENGSLTGIYIPTMEQESIRALARLARQYSKRSTQVKTRITSFLDVNGVRLAEGLQYSYWSKNHIKWISELEFKLPVNRYILDKHLQELQHIRGMRLELLRKVRECSRNILTVRLLRSIPGIGLTVAFILYTELMDIRRFESEDPLASYIGLVPSTASTNDKEHNKGMTQRHSRYLRYILIEAAWIAVRRDPAMTLAFSKLTKRMSKTRAIIRIAKKLLKRIRWVWLHQKEYVTAIVE

SEQ ID NO: 205582 - protein, 497 aa, unidentified
MKNKVSIYGNCNPQLAKIFETAGHPAKVMCVALDYAKEKHTALMCEGRGQVLQKSFPVENSAEGARTLLDLVGQCAKRHHIEPEHVFFGGEDCPSYAENFVRRLRQHKYLVVGVNAWEAKQQRSNFAASNDSLDLLGVAKCCLNQRGQTVEDWPEEYANLRIATRNRHRLVCQRTAISNGIHVYVDRLVPGFLDSTKSGISPFCQASLDLMAERFTPGQLRRRSGKTLAQWLRQRGLEQPQEAAAQLKALAKEALEPAPEQAALLQQSLAQLVQLHRGLTTSIGLMDKEVAFWLARTPGAVLTSIDGIGVTLAGLWTAELGPVSQWRPVRCLCSYTGVVPRSKQTGGPDREPVVGSTHRRCNTRLKNAVLQAVQKVRQYGPADLVQSAQRLEEQGSHVEFAMAKRLLRLGKWLALNQTVYRPKALLDPDTPKATLASHYQDMWTKLVAKWKDKADLRDVFAPSHPLGKWRKMAQELYALELRLPQVRTAQKSGASTP

SEQ ID NO: 205583 - protein, 402 aa, unidentified
MTITPTTELDAVFGGVDSHADTIHVAVITDRGGHVADAEFPTTAAGYAAAIAFLNAHGTVTAVGVEGTSSYGLGFTRAARRAGLTVVEVNRPDKAERRRIGKSDPIDAYAAARAALSGRASVIPKDDTVSGIRALHNAARSAVKARTATLNQIAHILITAPDDIRVKYTALRGKTQVDALSRLRPTGDGPRVALLTALKTPARRVQALTAEHDTLTAALDAAATENNPGLRAAFGVGPDTAAQLLVTAGGNPDRLRTEASFAALCGVAPVPASSGRTNRHRLSRGGDRRANAALYRVALVRMSSDARTRDYVARQTAAGRTKKEIIRLLKRAIAREIFRYLTTPVSVPDVSDLRPARQAKNITLTTVAEHFGVWPAVISCIERGTRRDDDLADAYRDWLTAA

SEQ ID NO: 205584 - protein, 316 aa, unidentified
MNKKNHTEVNIGIDTSQTQLDIYVRPCGDYFSVENTPKGAREAACRLRSYRPTRVLIEATGRLEMLFVCAAHKARLPVVVCNAGQVRQFAKATGRLAKTDKLDAQDIAHFGEALQPALTELKPEKLRQVSDLIAVRSQCLDMSTMQKHRLHRMPKSVHKPIQRILKAIQTEVERIDKRLDKLVEAIPQWRDQRDLLMSAKGVGKVVAYTLMSELPELGKLNRKEIAALAGVAPINRDSGSYRGKRRIYGGRKKVRTVMYVSMLSAIQYDPKIKSMYERLVAAGKPKKVAIVACMRKQLTILNTMMKNGTHWDEKLA

SEQ ID NO: 205585 - protein, 342 aa, unidentified
MSAITIIGVDLAKRVFQLHGAKADGSVAFRKKLSRGRFLSFLAEQPPCVVGMEACATAHSWGREIEKLGHTVRLIPPIYVKPFVKRQKNDAADAEAIAEAASRPTMRFVAVKTEEQQARAMLFRTRDLLVRQRTQLINAVRGHLAEHGVVAAQGPAHLKRLADAIGDEASLLPVMVQELGKLFLQQIDALGTKIGELDKKLRAVAGQAETTRRLQTMPGVGPITAVAVETFAPAMETFHRGRDFAAWLGLVPRQHSTGGKQRLGKVSKMGQRDIRRLLIVGAMAVVQAALRTGAPEDSWLGRMLAKKPRMLVAIALANKMARGVWAMMTKQENYRDPTAAKA

SEQ ID NO: 205586 - protein, 345 aa, unidentified
MTIVESRVITGGVDTRADTHVAAALDSIGGLLGVEEFPVTPAGYVRLLGWLGGFGTVGLVGIEGTGSYGAGLARHITAAGVRVAGVDRSDRQDRRRQGKSGPLDAVSAARAAQSGRARGAPKGRDGAVEAIRALMVAKRSARSERTQTINQARSLIVTGPDDLRARFAGHTAAALVSELASLRPRPGDAVGYATRIALRELGRRAEFPGSQLDRLDELIVPLVTARAPGLLARHGAGPDTAALLLVAAGDHPGRLRSEAAWAHLCAVAPIPASSGKVTRHRLNPGGDRQASHALWRIVITRMSSHAPTRAYVERRTKEGLSKTEIIRCLKRYVAREIYRQLRAAG

SEQ ID NO: 205587 - protein, 429 aa, unidentified
MQESTSPAPAEGVAAYIGIDWADQKHDVVLRSASEPAKVEHSRIVHEPDALMEWLGELQQRFAGKGKVLVALEQSRGALIYHLMGYEFVELYPINPAQLASYRETFSPSGAKDDRPDAELICELLYYHGDRLKAWKPDDELTRKLAFFNEGRRKAVDQRTQLANEIKSQLKVYFPLALQVLDNNSSTALAADLLLQWPALDSLQKQSAHKLRKFFYGHNCRNEQKLLERLELIKTAKPLTRDPAVIEPAALRVQLLAHQLKSLLPYIARYEKQIAELFDAHPDSFLFRDLPGAGTALGPRLLTAFGTNRERFDYPIELSSLIGIAPVRRASGKKTGKKASVHFRHACPKFLRQSFHEFAECSIRYCSWAQGCYQAQRERGKGHHAAVRAVAFKWIRILFACWKQRLPYDPQRYLQTLQTRGSEYAKIAP

SEQ ID NO: 205588 - protein, 419 aa, unidentified
MGTEAVCGLDVHRSLVVACLRKGGRQLETESFQTNLRELERLEAWLEARECQVVGMEATGVYWKPIYHALEEKRRVVVANPQHIKAMKGRKTDRADAAWIARKLEDEDGIRPSFVPCKEVRETRELVYFRENLVKARTQIRNEVQKLLAGAGVPLKEAVSDLFGVSGQAILVRMAAGQTAWDQLEDLVKGKLKQKVERMRLALEMPLTEAQRWELEAQLKRHLQAEQDIRKVNEELAKRLGKWEAVKLRLMTIPGIADEGANLLLGFFGSDLSPFPTDGHFSAWIGLSPGDNESGGKKRYAGRKNGNRFLQGKFTQFAWAAARTRGCWLQHKYRSLSGRMPKQKAIIAIAHKLAVIVYHVIKDETDYRDHGEDYTPGVGKAKALRRAIKLIESQGGKVQLPTSEQLQTESDPAHRGFTG

SEQ ID NO: 205589 - protein, 411 aa, unidentified
MENVFPCCAGLDIHKKSVEACVRRLEPTGQMHHQTRHWGTMTRDLLAMADWMAAQGVTHVAMESTGVYWKPIYNILESRFTVLLVNARHLKQVPGHKSDVRDCQWIAQLLQHGLLKGSFIPPRAQRELRDLTRHRTQLVEEKTRTVNRLHKVLEDANIKLASVATDILGVSGRAMLEALMEGQEDPVQLADLAQRQLRGKIPELEKALEGHLTEHHRFLLRLLWKELAQQEELIAELDRKIEEHTRPFANEIERLDAVPGVDRRVAEVVLAEVGSDVKPFPTHFHVASWAGMSPGNEESAGKRRRGRITPGNRWLKRTLVQAAWAASHTKNTYLASQYRRLAGRRGKKRALVAVGHSMLVIFYHMLKERTTYKNLGGDFFDRLEPERLTRYYVKRLKDLGHKVTLEPGVAA

SEQ ID NO: 205590 - protein, 365 aa, unidentified
MQESTHIGLDVHKETIAVAVLRPGTGECEERVIANTPEALRRLLARFPERAALRACYEAGPTGYDTWRLLDSLGVPCEVVAPSLIPRRSGAHVKTDRTDARNLARLHRAGELTAVRVPTPAEEALRDLVRAREDLKSDRRVAQQRVRSFLLRYGRRYPVPRGRWGVRYELWLQTLSFEEPAAQAAFDHLLGAASVRGAQLAAIDRQIEEAALRGPLAGPVARLRAFRGIDTLTALTIASETCDFARFPTAAGYMAFTGLVPREHSSGASRRQGSITKAGNAHLRRVLVEAAWAYRHRPAVRGKLAARQEGLPPELLAYSWKAQMRLHATYRKLAARRGANKAAVAVARELSGFVWGAMTGRTGAR

SEQ ID NO: 205591 - protein, 413 aa, unidentified
MSILDVALDPATVVVAVDPGKVMNRVWVSNGLGLLEDPVSLPVARAGIEQLDALLAAHPSSAQVIAIEATGSLHRAWAAELERRHPGALRLFAPSETRAARTQLGSGRFKTDDRDCAALTYLARQGAGRPHAEEVTVDCLRAAVRHRRGLVTDRKVAQQRLHDQLNVLCPGLSAPGGHGELGRSLPIESPTGQAVLACAVAFVGRTPTVRSLVARAPGKLTRATAEYWVTRWRGCLPPPADAEQRAARLGRDLARYQNLLVDIAAQDHEIKQLLAGTEGQVLTSLPGVAAIRAAAFAVHSLPIGRFPDAEHLYSATGLAPAMYKSATLRKRGRISRQGLAEHRDALMGIAWGLSTYSPSFAQRDAEYRARGMAPIQARVAIARHACRLTFRLLKTQQPFDEERYRRGRLNPGR

SEQ ID NO: 205592 - protein, 437 aa, unidentified
MRVVHEHVAGIDVHKDMIKVAIRSPGEKPWTRKTEILEFRTFYGVLQEMARLLRRRGVTHVVMEASGVYTEPVYYALAEQDFDEVAVVNPAHVKALKGHKTDAADCRRLAELFECGLLRGSYIPPADLKEVRDLTRYRMKTVQARTSEIQRLGKALESAGIKLGSVASEITGASATAMIEALIDGERRGQVLADLAIGRMRTAGKLADLSMALTGRFTEHHALMCRLHRDRIAGFDAAVADLDGRIAGRAGRWQRELDLLRTVPGFGDVIAQAWLGEIGPVPHRHFAGHDKLACWVTLCPGNNISARKRKHGRTGDAGTYIKPMLIQAAWNAIRTRGRLQARYSRLVRRFGGEKNPAAKKKAITAIAHTLLKIAYQVLKSGTPYQELGADFYTRRESPGQQRAYLERRLQKLYPGCAITITISPPEAALAPIADHAP

SEQ ID NO: 205593 - protein, 321 aa, unidentified
MTTTEVTYVGIDVSKTRLDIAIHPSGEAWTVAYEEAAVAELLTQLQRLAPQVVVLEASGGYESAVASALAAASLPVAVVNPRQVRDFAKAMGRLAKTDRVDAHVLALFGERIQPQVRPLTSEAVQQLSALVTRRRQLLEMLSAERHRLVFANGLVRRGIRQHIRWLERRVEEANADLRRLLQDSPVWRVQDDLLRSVPGIGPTCAVTMLACVPELGHLSRREIAALVGVAPFNDDSGTHHGRRHIAGGRAPARAALYMATLVATRHNPVIRAYYQHLLAAGKLKKVALVACMRKLLTIVNAMIKHQQPWRAAAAAAAPLDV

SEQ ID NO: 205594 - protein, 414 aa, unidentified
MLKIVYRICCGMDVHKSFVVACIASTNDQGVTTYKSKRFSTFTGDLRRCAAWLSENNCKDVCMESTGKYWIPIYNILEPTCNIVLAHPKYVKAIRGKKTDKRDAKWIADIFKHDLVAGSFIPPADIRQLRDLFRYRWKLTSFTTGEKNRAQNCLTVSNFKLDDVFSDVFGKAASAITSRILENPTEKITDISGFRTKGMKATNEQVLAAVDGEMCKEQAEKLRIIRSHMDSLELCKLNLESLILATAEKYLPQLNLVVTAPGIQSFAAIGIISEIGVDMSVFPTSKHLCSWAGLTPQNNESAGKKKTTRISRAGAYIKPLLVQCALNAIRAKKFPEVRNRYLALKKRRGHKKAIIAIARMLLTAIYNMLKKNEPYNPELYRKGDRPPAHREVSVEEAIFILQRQGYLVTAPPPT

SEQ ID NO: 205595 - protein, 411 aa, unidentified
MEAAVITAVGIDVSKSKSTVAVRRPGGEIALRPFEVHHTNSDLKKLASTLKKLGGDIRIVMEHTSTYWRPIAPTLKEAGFFVSIVNAMLIHDFSDNTIRKLKTDRADALKIANYALTFWDTLPPFNNEEETRLLLKMQSRANERITATATALRNGLIALADQTFPGVNIAFDPNTKNANGHEKWVDFFLRYWHKDCVCQYSMEAFTESYRGWCKRKNYKFRTDTAHQIYLLAQEGVATLPKCESTKMLITQACKSLNAVCEAKQSTQLEMQRLAAMLPEYEVVMQMEGAGPITGPALMVEIGDVRRFKNKKALVAFAGIDAPPFQSGAFESKSRHVSKRGSPHLRRTIFIVSNIILTRSNQENAVYCFMDKKRSEGKHYYVYTVAGSAKFLRVYYARVTEFLRSQPSPGAC

SEQ ID NO: 205596 - protein, 346 aa, unidentified
MMIIGCDFHPSWQQVSWLDTETGETGEKKLVTAAGDAERFYRQVPAPALIGMEATGNCHWLVDLLAELGHELWVGDAAQIRASYVRQQKTDRRDAEHILKLLVEGRFPRIWMPSAEVRDLRQLLLHRYKLVIIRARVKNELQHLCLNKGVQRQHKLWSKAGQQMLHELPLKPWAGRRRDDLLSLLAMLDQQIAPLDQAVKAEAQRDKMALLLETQPGVGAITALAYVLTMGDVSRFPRGKQVASYLGLIPREHSSGGRQKLGAITKQGNRMLRMLLVEAAQSAVRLDPRFRKEYLHRCHQKPKAVAKVAAARKLAVRLYWMLRTQTAYPEVVRIESSPRVPLVGAS

SEQ ID NO: 205597 - protein, 454 aa, unidentified
MRKEVQKARSVPCLENVETNAAGIDVGARKVYVAIPAERDPEPVRSYETFTEELQRMADWLVACGITTVAMESTGVYWIPVFDILESRGLQVCLVNARHVKHVPGRKSDVQDCQWLQYLHSVGLLQGSFHPEEKIRALRALQRHRAALVEMAAAHVQHMQKALTQMNLQIHHVLSDLTGVSGLAILDAIVGGERDPGKLAALRDGRVQASEETIRKALVGNWRREHLFTLEQSLQAFRQYQSLIAACDRETAGYLKNLQGKDDGSLPPLPPERHKHKPRKNEIRFDLRSELYRLFGVDLTAVPGISSLTAYAVLTEIGTNVSQFPNAPAFSSWLGLCPNPRKSGDRILSSKTRRTKNRINQALRLAAHTLHGSLSYLGSFYRRLRSRLGAPKAVTAAAHKLARILFHLITTKQPYDESIFALAEQNEQRRREQRLQKQAHSMGYRLVPQEACSA

SEQ ID NO: 205598 - protein, 345 aa, unidentified
MQLMYYIGLDVHKRIISFCVKEGSGKLHSEGKIPATRFDLNRWMKTLPQPWSAAMEATMFSGWIYDHLKPHAAALKVAHPLMLRAIAAAKKKNDRIDANKICDCLRCDFLPECYMAPTAIRERRRTLRYRNLLVRQMVQMKIKIGTLLMEAGVSYNKQKLHKAGYFRELLTSNPDINEGLRPLLRLCRETVVRLSKLESALVRSLERDQFLVERVERLMSIPAIGPITALTWALEIGEVQRFSSIKKAISYCGLCGAEKSSGNTVQRTPLSKQRNKHLQTTLIEAAKMAPRNSSQLAMLYDKERQKGNANRATLAVARKLVAYLMAVDRGQRNFQVVETSNCIAA

SEQ ID NO: 205599 - protein, 402 aa, unidentified
MNAVGIDVSKGKSMVAIMRPFGEIVSAPFEIKHTAGDIHSLVELINSVEGESRIVMEHTGRYYEVLAHQLSKANLFVSAINPKLIKDFDNDSLRKVKSDKADAVKIARYALDKWQNLKQYNVMDELRNQLKTMNRQFGFYMKHKTAMKNNLIGILNQTYPGVNTYFDSPARSDGSQKWVDFASTYWHVDCVRKMSLNAFIDHYQNWCKRKKYNFSQSKAEEIYGKAKELVPVLPKDAITKLIIKQAVYQLNSASTTVESLRTLMNETASKLPEYPVVMAMKGVGTSLGSQLMAEIGDVSRFTHKSAITAFAGVDPGVNESGSYEQKSVPTSKRGSSDLRKTLFQVMDVLIKTHPQDDPVYQFLDKKRAQGKPYYVYMTAGANKFLRIYYGRVKEYLSSLPES

SEQ ID NO: 205600 - protein, 387 aa, unidentified
MPKHNDLSRCLVTLEQASTLIAVVEMGQSSWLVAGIAPGLDRYPLKKLGPDRDALLQLLHRWRNEAAKVGHAINWIAVAYEAGRDGFWLARWLRSQSIEAYVIHPSSVPVSREHRRAKTDRLDTELLKRAFLGWLRGEPKHCSMAAIPTLEDEDARRPGRERQILVGERTRILNRLKANLARLGVHGFRPNLARAPSQLGALRTPEGVAIPTNTLAEMRRDLDRLRFVKQQIKEIEKTRAERLAKAPDERRHAAARLLTRVVGVGIETADMLVQEVFSREIRDRRALARYAGLTGAPDESGQRRRERGLAKAGNARVRRGMIELAWGHLVHQKGSSLTTWYRRRTVDARGGARKTMIVALARKLLIVLWRFATTGEMPAGLLLRPAT

SEQ ID NO: 205601 - protein, 421 aa, unidentified
MVQQKISKKLAQVKKGTLHVGVDLGSENNVAVVINEYAERLDRFRFPNDRDGYEYFQRRIEEQQQQNNAPEVLVAMEPTNYLWMLLATVLEQKGIAYRLVNAYTVKKHREGDQLDRSKDDPRDAFTIADLSRTGKCTETQLQHGAYAELRQSVSLYYRLKRQIRREKQHIWHAAGQLFPELPRIFKNITGETAKAMLITQAAAVEIRKISEEEFITKVHIGFDGNRLYISRLRAAHRLAMGSVGVKYGVQALQLALKIHVESLNHLQNQEKQILSALEVCFLSLPEANALLSVNGIGILTGATILAEIGDPKRFRHAGQLVKLAGIQPTPNRSGRKQWSATPMSHQGRPRLRSALYLTCLRLIRVDRRFSILYQRLQDREKNPLTKMQALGVLMNKLLHILWALMKQKTQYKPLDAGLTET

SEQ ID NO: 205602 - protein, 315 aa, unidentified
MQTPLDIGADVSKDYVMVACAKQSLPMCKLANKRAALWAWLKSLPAASRIGMEATGTYHELLAILALRLGLVVYVLNAKDVHHYAKGTGQRAKTDRVDTALIARYVAKEHSHLHPWHPASPAQRQLQRLVRRRAKLTSARATLRSSLQTLPSLRSDLRALLNDFDVLLAKLDAQARKLIEEAQERAQHFRRLNSIPAVGNTVGIGLLAALERWSLPRADAFVAFIGLDPRPDDSGKKTGRRRLSKRGDPELRRLLYVAAMSASRTRAWKPLYQRALARGLSRIEALVILARHIARTAWSIYTHKTNFDPVRLHSH

SEQ ID NO: 205603 - protein, 423 aa, unidentified
MKPGNAEFTAFVGLDWADAKHDICVQAPGCEAREFDRFAHHPEGIEAWARAMQQRFGGRIAVALELSKGPIVYALQKYDCFVLFPINPSMLARYRQAFKPSRAKDDPTDAELALDLLLRHRERLQPLTPQSVPMRKLCLLVEQRRRLVGDKTRCVNRLCYTLKQYYPQALAWFAQRDTVLFCDFIARWPTLKQVKRARQATLRAFFKAHNVRFERVIEARLRAIKAATALTRDRAVIEAHQLQAEVLVEQLRITLQAIARFDEEIAVTAARLPDYALLFEPLPGAGPALAPRLLAGFGEDRQRYAGADQLQMYSGVAPVTERSGNKTWVHWRWQCPTFLRQTLVEWAGQTVNKSFWAGAYYRQQMAKGASHQAAVRALAFKWVRILYRCWQTRTPYDESKYLEALRRRGSPLLKQLGETMEIT

SEQ ID NO: 205604 - protein, 320 aa, unidentified
MTNLNVFSGFDVSKDYFDFFTIDDQGKSIGQRVVYTREGLKSLARLIPAQSHCVMEATGPYYLKLATWLYQNGYAVSVVNPLVIRRFCQMKLVRAKTDKADARMIALYAKSEKPALWQPPAPYIVKLQQLDALVELFTKNRTALINQLHAFEVTGIADPFTCSLLKKTIADVTKKMEKIEVEITAVIGAHYKEMLENLKSIPGIGKRSAVALIVASDGFKRFDNYKKFSSYLGICPRIYESGSSVRGRSRICKLGMSRIRAILYVCAWSAKKGNLACKQLYDRLVEKGKSKRLALIAVANKLVKQAFAIAKSGIKYQPVG

SEQ ID NO: 205605 - protein, 348 aa, unidentified
MAMTIVEAGRTVIGGVDTHLDVHVAAALDPIGGVLGVESFDATPRGYQALLEWMGAFGTVTQVGVEGTGAYGAGLGRFLAKAGVEVIEVDRPNRQARRTKGKSDVADAVEAARAVLSGRAAGTPKSRDGAVEAIRALLVAKRSARTARSRALAQMRQLSYTGPDQLRSRFKGLSIADLVDQAAALRPRASGDPVLYDTKVSLAALGRRVLALDDEMVGLDELLTDLVTTCAPQLLGLYGVGVDTAATLLVAAGDNPERLRSEAAWAHLCGVAPIEASSGKVTRHRLNRGGDRYANQALWRIVMTRLAGDPRTRAYLERRTKEGRSKREVIRVLKRYVAREIFKYLPRG

SEQ ID NO: 205606 - protein, 312 aa, unidentified
MSSDALYMGIDVSKATLDVAFGSDGELVQVSNDEAGVARLVDRLAAATPALVVMEATGGYERLVAAALATRGVAAAVVNPRQVRDFAKATGALAKTDQIDARVLARFAEAIRPKPRALPTPETRELEELLSRRRQIIDMLTMEKNRLGIAASEQMRRSIKKHIAWLEDALRHADKDLDKGVRASPVWREQEDLLRTVPGIGPVSARTLVVHLPELGTLNRKEIAALVGVAPLNHDSGKHKGSRSCWGGRAVVRDVLYMAALTAVRHNPVIRRTFTGLRARGKERKVALVACMHKLLTILTAMVRDRRAWSPS

SEQ ID NO: 205607 - protein, 455 aa, unidentified
MQTFYLGIDASKGYADFIILNRYKKVVVESFQLDDTFDGHCLLYELLMNFSTDHPDSIICAALESTGGYENNWHNVLLEFQGTLNLQTARLNPLGVHHNSKADLKRNVTDKISARNVAEYMIAHPEKVSYQSQDHLASLRKQWGFVKMLTKQCTQLLNQLESLLYSANPEILTYCKDGVPAWVLKLLVKYPTAANLARAKMGSVSRIPFVSTAKAEALVLNAKKSVASAVDEVTQQLVAATVKQILHLKETIKIQSAIMARACAVPEVELLKTFIGISDASAIGLMLNIQSVKRFKTVKKLAAFFGLHPKLKISGDGVSYVRMSKQGRAEPRQILYMVAMAAITRNPLIREIYQERVGQGMEKMAAIGLCMHKILRIVYGMLKNNRPFDPEIDRRNRQKPIRQRKQKQNKIRRYQDYDFKAPISRRQKAKRMEQRQSQSDNGAECGILAPVPFPT

SEQ ID NO: 205608 - protein, 351 aa, unidentified
MNEVIRVGVDLAKNVMQIHGVDRFEKVAVRKALQRAKFLEWFANRPPCIVAMESCSTAHFWARKLRAMGHDVRLIAPQFAAPYRKGGTATKNDAQDAEAICEAASRPNMRYVGIKTTEQQSTLVMHRMRSGYVEERTALVNRLRGLLVEFGVFLPQGITKFRGRFVESLEDATNDLTGPARIVLMRAAAQLRALDDEIDWLDRCIVEHAKADPRAKRVMEMFGVGPLTASAATATVADARQFRNGRQFAAWLGLVPKQNSSGGKERLGRITKQGNVYLRTLLYQCARVTVTASSNRHDRLSRWIVQLRARVGISKALVAVANKHARVLWAVMAREEGFDPDFESKVKRVVV

SEQ ID NO: 205609 - protein, 427 aa, unidentified
MAAGGMTSRNAYLLHRIKEDSLIRYHVGIDVGKNKHHACVYDIVEDRYTKVFPFTVDRPDFERFLLFLQRQGPIEEVMVGVEASGPYALTIGHFLLEHSYTVVELNPFQASQFRKAQGKKAKTDRVDARSLAAFLAVGSYKPLTLGDPLYENLRELTRFRVDLVKDRTCQVNRLKETLAIAFPELGAYMASLESPTVLTLLTNYPGPQALAEAGAQAVSACIIEASHGRLGSAQAQAIVSAAGTTIGLLQRQQALAIKLEVLASGIISVNMQLQRVEAAIEDLFRHLRYNKSDFPVGGIQSLACILAEIEDVNRFPTLKQFLSHFGWCPQTFQTGGFRQEHPRMSHAGNRYVRRVLWMLAIMAVNTVPAYHDYLQRRTAAGKKKMHTIVAVGRKILSVIYAVLKTGRPYTSEGGASHADPCPVLTSL

SEQ ID NO: 205610 - protein, 407 aa, unidentified
MTNQDTNLIERVIGLDAHPDTFTAALLRGQTPAQALTEKVFNRVPMSQLQSWARKHTQSQDLLVLEASGNSFQVVRSLAALGRKALVLESCQMGKLKEAHANNDRISAVRIGKAYLAGTAKIVWVPDLKTQERRDWFHAHQKAVQRTTQVRNRLRSYLSDAGVRLKQGTRLTQPSAVEEPLRKAKAWTPRQWQVIAGMLLELRHAEEQRQHWRSLIAQEVASDPELLSLVRLCGVREMVAFALGALIGDIKRFARPASLVKYVGLNPAFDDSGQEQWHGGIGGHGRRDLRSLLIEAGQAILRSRDPLAAWGKKLLARKGSVNLAVAAIARKLAVAVWYLLMGQWTPLEEIDERVALKVRKIISQLGPKALKQLGQTRKELQLQVHQSLKKGRVYQLNPNKTLIPLPA

SEQ ID NO: 205611 - protein, 359 aa, unidentified
MTIVAHLYRFIVGVDTHARNHVLSILESATGAEIVCQTFANTSQGHVRAQAWITKHTRADLREVLVSMEGTASYGTRFRVALEQAGYRVVEAPRLLVRGRKKLAKNDVIDAFQIAARTLGKDETELTIPKQGDYREALRILVAARKQLTRATTVNINSLTALTRCTDLGIDARRALSVKQVHQIAALEEQPGDAIDVLVAKQEAKRLAKTIIDARTQLAENQNQLAMIVQLVTPALLEMPGVGPVTAAQMIISYSHVGRIKSEAAFAALAGTSPIPASSGNKVRYRLNRGGDRALNNALHTVALVRLRNDDQTRAYMKKRLAEGKTKRETIRLIKRYLARKIYRLLTKELTRTQVTLAA

SEQ ID NO: 205612 - protein, 346 aa, unidentified
MLHAGLDLSRKRIDVCLLSDYGELIEELACPPDQDGLRGLARRAGVHGEPVVGVIESMTGARFVHDTLESLGWAVEIADAAKVKGLAPLAAKTDRIDARVLALLSQRDLVPAIWLPDPRVREERELARFRLHLVKHRSQLKHRIHSTLMSFGRPCPVSDLFGVRGRELLAGLEVPEPWLGNVLASLQLIDALEEQISEINGRLQRGGAEHPYVPRLLTVPGIGPVLAFTIAAEIGEITRFASPTKLTGYTGLCPRVVQSGESDRRGPLTKQGPRYLRWALLEATMHALRHPAYAERYQRNKHRLGRQRGAKVAQVDIARKLTVAIWHMLTRNESFAPKGAAFRLAA

SEQ ID NO: 205613 - protein, 359 aa, unidentified
MDATESSVCRVIGGVDTHKDLHVAAVVDKGDRVLGSRCFATTRQGYRQMLAWMRSFGELQRIGIESTGSYGAGLLRFMQAAGVEVLEVTAPDRHDRRRRGKNDDLDAQNAAHAAFAGRRTVTPRSRDGMVESLRVLKACRKTAVAARRVALQMIQNTIVCAPDSLRDLLRTMTRMQLVRTLAAWRPDLTAYRDVEAAYRIGLRSLARRYLELHDEIADLDAMIGAIVDELAPDLVARNSIGHTCAAQLLLTAGDNPERLRSEASFAALCGVSPVPASSGKTIRHRLNRGGDRAANSALHIIAIGRLRTDPKTKAYVARRIAEGHSKLDAIRALKRYIAREVFSLIIRRQKEINQTRIAA

SEQ ID NO: 205614 - protein, 355 aa, unidentified
MERYIGMDVHAASCTLAVISEKGRKLKDFPVETNGQALVEAIRMIPGHKHLVFEEGLQSAWLYETLNPHVDDIVVAGITTSRGQKSDKGDAYGLAEKRRAGNLDKHVFKAPRQFTRLRELSRIHMTLVSDTVRVQSRIKSLYRSRGILVAGMNVYAARHRKEWQKQLPSSNQTRATRLYDHLDFMLEQKKQAEADLLREAKKHPIVGTLETAPGFGPIRAARLVPIVVTPHRFRTKRQFWSYCGLAIVTRSSSDWIQTADGQWIKARVPQTRGLSRQHNHFLKDIFKGAATTVITQRNKDPIYGRYGRLLDGGTKPTLAKLSLARMIAATVLRMWKDEEEYDPGRACPPAKTRES

SEQ ID NO: 205615 - protein, 323 aa, unidentified
MSKIIGIDISKQTFDVSYLEKGKWIHKIFKNQNIGFEQFNKFIGISDWIVMEASGPYYVQLATFLHLSSFNVCVLNPLIIRRYSQTRLYRAKTDKKDAKTIAEYGAQYELKRWYPDSKHSIEIRQLYTAVELLKKQKHQTKRQLESFEVTGLLSSSLRKELKQVLILLIRRIDKFEEKIEQIGKLAYKDTVERIKTIPGVGLKTAIMMSVITDNFTKFENHKQLTAFVGFSPRLYQSGTSVKGKGHICKMGKPQIRKLLYLCSWSAKRVNKNCVEMYERLKEKGKPERVIKIAIANKLIKQIFAIAKNKQYYNENHQSLYCIN

SEQ ID NO: 205616 - protein, 382 aa, unidentified
MAGTEPHAWGTGLMDDITYVGLDVHKATVCVAVAESGRGGEIRQVGVFENRPEILCKMAARLGKGGRRLSFCYEAGPCGYGLHRLLTGCGHSCIVVAPSLIPIKSGDRVKTDRRDAMMLAKLHRAGELTAIWIPDAAHQAIRDLVRARATAGQVLSKARQHLQGFLLRHDRIYRGVRAWTLAYRRWLTTVRFEHPAQQIVLQDYIHAVEDAEARRDRLTRQIEEMLPSWSMAPVVTALQAMRGVALVVAVTVVAGVGDFRRFANARQLMAYLGLVPSEHSSGSTIRRGGITKAGNALARRVLIEGAWTYRMTARVSRKLHDRLEPLSAAIRDIAWKAQVRLCARYRRLAAAGKPKVVVTTAIAREMVGFIWAIARIAQPALA

SEQ ID NO: 205617 - protein, 361 aa, unidentified
MSLTSWLVAGIVPGVERQPLKKLGVDERALLKLLHRWREEAEKAGHRIKRIAVAFEAGRDGFWLARWLRAYGIEARVIHASSVAVSREHRRAKTDRLDTELLKRAFLGWLRGERDHCRMVAIPTIEEEDAKRPNRERESLVGEQSRIVNRMKAALIRLGIRGFNPKLKKAAERLDGLRTPEGDPIPPNTLAELRRDMVRRRLVSDQIRQIENARLERLEHASGDGPHAMVRLLARVIGVGTETADMLVQEVLSRNMRDRRAVARYAGLTGSPDESGKKRHEKGLARSGNARVRRGMIQLAWRFLMFQKDSALAQWFRARTENARGTRKTMIVALARKLLIALWWLVREGVVPDGVVLRPAQ

SEQ ID NO: 205618 - protein, 346 aa, unidentified
MDQIIRIGMDTSKHFFQLHGVDAAERPVLRRKLRRNEVLAFFAKLPPTVIGMEACGAGHYWARELRKLGHEVKLMAPQHVKAYIKRNKNDGRDAEGLCEAMSRPTMQFVSVKTEEQQAALMLIGVRQQLIARRTQLGNAIRGYATEFGLITAKGLDKLEPLLARIAQEEGLPELAREMFAAHGREYARLQAELKAIEARLMAWHRTNTDSRRLAKIPGIGPIGATALVMKAPDPRLFPSGRHFAAWIGLTPKDHSTAGKTRIGKITRAGDEMLRSVLVAGATAVIQQARNGRGRPLPWLLALLARKSPKLAAVALANKIARIAWKLLTTGESYDGARMPGASALAA

SEQ ID NO: 205619 - protein, 343 aa, unidentified
MSVIIGVDPHKATHTAVAVDGDETEIARAKVRATRNQVPQLLSWAEPLGERTWAIESASGLGYLLSQQLVAAGETVLDVPATLAARIRVLSSRRSDKNDPNDALSVAVAALRTPELRAVVTADHAEVLRLLAKRNIDIGRERTRVVCRLHNLIAELVPGGIRKELYASQATRLLDQFAPSTPAEHARLAIARELLADVEVLDAQLKASHRRIRTAVSASNTSVTDIYGIGPVLACYLIGYTGDIARFANRDCFAAYNGTAPVERSSGGRVVHRVSQRGNRKLNHALHLAAICQIRNPGTEGRIYFERKIAEGKTKKDAIRSLKRHVSNAVYRKLVDDQRSRMM

SEQ ID NO: 205620 - protein, 400 aa, unidentified
MRAVFGIDVSKASSEVAILVNGEKVHGYTISNDALGFARLLGDLKTVHKPEIIFEATGVYSRRLQAFLEDNGYAYTRLNPLEAKKQLDSLRVRKTDQIDAEKLAQSQFVLNRKPTYVQEEVYQELRDLSRFYQNLTEDIVRAKNRLHKALQVTFPELETILSTPTGEQYGNLVVAFPCKDFVLDLSKDELSESIRQSTSKRISDKRVAYLAEKLIALANQSYCAVKKTSPMLEEVRYYAKELLRLSEQRQTVLDQMVELAQPLPEYDILLSIPGIAETTATSIIGELGDIRRFQSANQINAFIGIDLRHYESGNFLAKEHITKRGNPYARKILFKCIHNIASASHTNPCHIADFYEKRKRQSQTTSTKPHTIASIHRLIRTMYYLITHNKLYDYRSTRNQ

SEQ ID NO: 205621 - protein, 454 aa, unidentified
MIAAVVERCAGIDVGKKFLKVCVMVGPLSEEPRCEIRRVDCTQGQFEDLLKWLKSEAVTHVVMESTGPYWVPVFNVLEAECQVVLANPEEVKNRKGHKTDAQDSWWLAHLLRHGMIRPSFIPEKATRDLREVTRRRKKLVQQIAQERNRVQKQLEYGNVKLGNELSDVFGLSGQLMLKALVDEERTPAEIAEMAQGSLKKKKEAIAESVRGARLSETQKEMIRSSMRHMAFLEMEIRQLDEMVTGLVRESGQQEAYLLLQTIPGVKAEAAGNLLAEIGSDMQQFPDAGHLSSWGGVCPGNNESAGKHKSRHTTHGNPWFRITVTECAWSASRTKDSAFQAKYAGLEPKIGHKRALMAVAHLLVYAIYYVLSRKQEYRTAPQAAMNEIQRQRVIRHHTRRLRRLGVWLPTERLTPLKEWYVTHCIPEMDAPPKRRGRRKKAQVTDNKNEALDVND

SEQ ID NO: 205622 - protein, 312 aa, unidentified
MSQNNPLTIYAGLDIAKATLALYLAGQNYNFNNDKQGLAQMLKLLRAQQVHVICEATGGYERSAVRALHAAGIPVSLLEAGRVRHFACAKGRRAKTDPIDARVLAEYGVAFQPAPTPAPSAQQETLRQLTIRRRQLVETVVAETNRSAHYFESLCQKQSRALLKVLQKQIDQCEKAIIQLIAQDAELKAKAERLDAIPGVGPATAAIVLAEMPELGTLSKESAAALAGVAPYNQDSGGQRGQRHISGGRSAVRTALYMAVLSAVRHDPILKAFYLRLRAAGKKPKVALVACMRKLIVLMNHLIKNPNFALAH

SEQ ID NO: 205623 - protein, 339 aa, unidentified
MAVYAGIDLHSTNNYLGIINEKDERLFKKRLPNDMGTILSALHPFREQLSGIVIESTYNWYWLVDGLQDHGYTVHLANPAAIKQYEGLKHTDDRWDSFWLAHLFRLNILPEGYIYPKEARPIRDLLRRRTMLVRQRVAHILSVQSMMTRNLGINMSGNAIKKLYEDDSERLFDHPHLKLAARNSLSIMKFLTEKIRLIEREVLSHLRIRKEFEPLLTIPGIGTILGLTIMLEVGDINRFPKAGNYASYCRCVKSERLSDGKKKGTGNRKNGNKYLSWAYVEAVHHAIRSYPYAKSFYQRKKAKTNGIVAVKALSNKLCRASYYVMRDRVPFDQEKLFRS

SEQ ID NO: 205624 - protein, 376 aa, unidentified
MRWIGCDVHKEYLFCVHLDAEGNVLAEETVTAEYSAVKTWVETLDPGSTTIALESCYAWEYVHDLAAARGIRVLVADPALLQPAVKQRANKNDRDDAKNLAKLARLDLLPLVHPVDRRYRELRALTRHRIFLTQTRTSIKNHVHFLLDRAGVKLGVTDIFGKKGRRGIAGVVLPFESQLALSSSLKQLDALDVEIDALDRELARRVPDFPKVKLLMTIPAVGYWMGLVIAAETAGMSRFPSAKKYQAYTGLVPSRHQSGKTDVSGSITRRGSSELRWALVVVAQNLKAQPGPIRDFFQRLEPKKGANRAKVACASKLAEFIWCMLTRGEPYRARQPVKEIAKVDRRQRRARPYDVEAERMERWFVKYVGTEGASGV

SEQ ID NO: 205625 - protein, 335 aa, unidentified
MQVFGIDLSKEKFDVNFIDAKGNEKKQEVKNTVASISRFLSSVSGDVILCAEHTGAYGDLLVYLCNQMNIPIALVPGYVIKHSLGMVKGKSDPLDSKRIREYGERFTDKLEYVKYTEENITELKQLYTLRHQLVKQRKSLRTIDKGRGHLPMQSISVHNHINTVLDGLDKEIAAIEEEIEMLIRRDQEMNENYELVTGIVGVGPVIATELIIKTGNFRIIDTYRKAASYAGVCPFPNTSGKMVGKSKTSPFADKKLKTLLYMGAKAAVKHNKEYALYYQKKELEGKPYFLIMNNVSNKLLRTVYSVVRNKTPYVQNHVCLDPREKSINSSAKKVA

SEQ ID NO: 205626 - protein, 333 aa, unidentified
MQNFYFIGIDVSKKKLDICVMSNSKVLKEEQVSNHPQAIATVIAGIKEELSMSNDNLIICAEHTGQYTYPLICACKSAGSKLWLENASQIKYCSGVTRGKNDKVDARRIAEYAMRFFDKAKPYQRPTEELMRLKQLEAERSLYLTDMAKYKAQLSDQEGFMEDKIFKRKAKRLKEMIKSLEKTLKEIAQEMADVIDSSEGLSRQMRLLKSVEGVGPVVAMNMIIATEAFTRFDNPRQFNCYVGVAPFAYTSGSSQHSRNRVSQRAVKYIKCLLHMAAVAIVHKKTGDLKTYFERKVAEGKNKMTVLNAVRAKLVARMFAVIRNNRVYQPILSV

SEQ ID NO: 205627 - protein, 426 aa, unidentified
MSPDEKYAYARQFPVHVGVDTSKTFHVLVARGPDGRRTKPFRADVSRAGFDRADLHLTTLFPEVARERMLVGLEFAGHHGFTFAHDLARRGYPVVNVLPAVTKRTKEIEDNSPLKTDAKDAALIAKLTGDGAFVRFPFLDEQYVALRLLATERHRLSCEAVRFRNRLQGMLDLAWPEYLRHFADLTHPTPRALLERWPLPEDLRAASPRTVRLLAKRVSLNHYGPEKVAGLLESARETVALTQAAGARRMEILALLARWALVRAQIADVEEALAASVDSCAPARALMTLPEVNAVCAATIVAELGTPEDYESPRQVLKLAGMNLVEKSSGLYRGRTRQSKRGRPELRRQLFLLAGRWVRKDRGLYRGYYEALLARNGGLKTKAVCAVARKVVPLVLAVAQSGEPFDRGRWLRSRHQRGLEAGDLTT

SEQ ID NO: 205628 - protein, 329 aa, unidentified
MVTAPLLPVVGLDVSKATLAVCYQVNELVKHLEVSNNKAGFQQLVKACGAHCRFVMEATGTYNLALAYYLHEQGGEVAVLNPLVIKRFIQMHLSKGKSDRKDAQWLLRYGQQQPVKVWQPDETVLVECRQLEQVNEQLLKQKTMVSNSLEALQRQPVISKQALKRLQQMLKTLTRQVALVEAELLTLLEQRFAAQMALLCSIPGIGRKTAGMLLLFAGGFTGLDNYRQLIALAGLSPREHTSGTSIRGKVRITKMGGGLIRGKLFMCSFSAKKTNVACAALFDRLVAKGKNKKLALIAVCNKLLKQAFAIVKSGVPYQADFSSKLAPIS

SEQ ID NO: 205629 - protein, 397 aa, unidentified
MYIVGIDIAKRKHEAAVIDGEGTVIIKPFSFTNNCSGYNRLLAMLTKAKLPLDEVSFAMEATGHYWLALFTRLQKEGFRVQVINPVQTNSIRNFYIRQAKTDPRDALLIAEVIRFGHFSESTLHPENIYELRELCRGRHAIVSMQADVKRKVVALLDQVFPEYETAFTNMFGDTSMAILQTCPTPKELSEMCLEELCHLIEVSSHKRFRMAKAQELQELARNSFGFAMAGDVFSTMIRLYAKHLVFLKQQVQEMDRKIAEIMDTLDTPITTITGIGPTLGAYILSEIGDISRFSSAAKLAAYAGIDPTMRQSGEYNGVRNRMSKRGSPYLRHAIWLAASSAVLHDPALKLYFQKKRDEGKPYMASVGHACRKMVSIIYAVMRDNKAYTPYIPNEISA

SEQ ID NO: 205630 - protein, 413 aa, unidentified
MKANPPELALGIDWAKDKHDWNLRDASGQILAKGKLENSPATITALIAELLEKHGSGKRLHVGMESKDIPLARLLQAHDQVDFVHIAPGPFAHYRASRRSSKAKDDSSDAALLSDWMIRNHDEIKIEPKQPAPEILLLCRQRLHLVEDRVRLANRLRAALCEGFPGLDELIDKPYANWVIKLLTLTCILQDFQKKRFSPLIDKIGRIGAGTAEKLETLHKSGKPFVADDGILNALRIKIKGLCRQIELQNELIDAIEGRIAELEAASELTPLIDSLPGAGDALRPRLTAALQTLTKDQTAEDFAVSQGIAPVTISSGKSHVVKHRVSGIGFDSQTFFDFSLHSMKKSSWAFDFYAAARLRGKKHGAAVRALAIKWIRIIVALVRSGETYCEQRYLAAKAKRQKAVDKPVSSQA

SEQ ID NO: 205631 - protein, 342 aa, unidentified
MNISTVGIDLAKNVFQIHGANERGKKLWNKQLQRKQVLKFFTRLPPCLIGMEACGSAHFWARKLEELGHTVKLMAPQFVKPYVKTNKNDAADAEAICEAVTRPSMRFVPIKNGEQQAILSIHRARQGFVKARTAQANQIRGLLMEYGIIIPQGIVNINKNTPEILEGAENELPGIFRQLLLRLTSHLKELDLQVIALDSQIQAYHKANEASKKLAEIPGIGPITASALTASIGDAKCFKNGRQLAAWLGLVPRQHSSGGKPSLGGINKRGDSYLRTLLIHGARSVVRVATSQKTATHCWAINLVERRNKNVAAVALANKNARIVWALLAQNREYQQDFNSVT

SEQ ID NO: 205632 - protein, 335 aa, unidentified
MYYVGLDVHYRTSTYCILNAHGREVKCETIRGHWAKLLDRLSIIKGKWTVCFEATCGYGYLYRELSRMASRVMVAHPGQLRLIFRAKRKNDRVDSRKLAKLLYLDEVPQVYVPGEDVQSWRELIEHRRRVVDRQTACKNAIRSLLRGHGLIAPKGLWTKKGLAWLRQSQMPTSASGLKRDLLLEELDAAKRGVRTVTKALDKIGRRHPGVTVLRTIPGVGMRTAETMAAYIDDPKRFGRSSQVAAYFGLIPCQDASAGVNRLGHITKQGPGTARKYLVEAAWQGVYRSAKIRAYFERILRGKKERRKIALVATAHYLLRCMHAMLIRCEPWRDVA

SEQ ID NO: 205633 - protein, 482 aa, unidentified
MKKRNIYQNQSQELLSLFGSAGSSAKVMCVPMDYAKRDHLVMFCNGHGDILRKPFSVKNSPEGIEYLIDQVTRSCRRCGIKKEHVFLGGEDANSFAENFINTLRVKGWLVAGVNAHDAKKQRMNLQASTDRIDLMGIATMLLNCRANCCPAASGIYRNLRSLVRHRRKLVVMLTEVKNRAHGIVDRLFPGFLDENKSGIVAFTQSSLFLMENRFSPKQIRRRRRQKLIEILKRFGTSKAEEAACKLQQYAATVLHTPDEYIDTLQISLAQHVKHIRCLKESIVVLEKEIAVNLAQTQGAFLTSVRGIGIVLAAGVTAEIGDPNEQKPLNNLVSYSGIIPRVKQTGGLEGKTYTGSVAKRCNRILKDYVVKSGFHLGLHGPEELKIDYKRRDASGQHADFGIGRRYLRMAMSLMRTSQVYLPPRLRKADSTLEERAGYYLMIWPYLREKWKKYGVLEAAFTKDRPLGMWRQIVQELYDIKLKL

SEQ ID NO: 205634 - protein, 349 aa, unidentified
MALTIVEEARSVTGGVDTHAGTHVAAALDPVGGLLGVREFPATAAGYSRLLGWLGGFGTVCLVGIEGTGSYGAGLARHITAAGIRVVEVDRADRQDRRRQGKSDPLDAVSAARAAQSGRARGAPKGRDGAVEAIRTLMVARRSAAGERTRTINQARALVLTGPDDLRTRFARHTPAALITGLASLRPRTGDVAGHATRIALRELGRRARFLDGQLQRLDELIVPLVTAHAPGLLALYGVGPHTAALLLITAGDHPGRLRSEAAWAHLCAAAPIPASSGKVTRHRLNPGGDRQANHALWRIVFTRLGSDPRTRAYAERRTAEGKSKAEIIRCLKRYVAREVYPHLRPAGG

SEQ ID NO: 205635 - protein, 425 aa, unidentified
MRITQTAEKINLQKVMDVSVDVHKDILNFFFETAGKEYTDECSNRTTTLIKRLESYHEIAQEHGMKNLRIICEPTGQYHNKLFRTARSKGFFTCFVNAESVAKFRVIETNDTGKTDTKDPKVIRTLGKLDKVIKHRMLPEEYLVLRKLNKLYDEVEVAITSLRCRIDGLLVELFCDYSFKKDFLYSTSGLALVEHYGVNPYRIIKTGSEGFCASMRKAAPRIQRNTLQRLWKDAQSSALNEQPKEYIETLELHLQQLVEDWTRQIERKTDIVERMVSLLGRLREEDPHIPPPTAGVISEKNIARLLGETGPFGDFDNWRMLMRYGGLNIRMRQSGKYQGQNKITKRGRPLMRKILQNIALPLVRQHCLYGQYYHSKKEIQKMPGNKAMTCVARHFLKKFYGWYKSAQVFDRQRFFACETQYKKAA

SEQ ID NO: 205636 - protein, 308 aa, unidentified
MTTIYTGLDIAKLNLQLHLAGRLHDLPNTPAGHRRLLKLLTSQPGVHVICEATGGYERDLVAALHQAGVPVSVLNPARVRHFARAAGQRAKTDPIDAAVLSAYGQALEPKPTPPRTEQEEQLTELIRRRVQVLEILVAQRQQAERLTLPALRRQAQSLVRRLERDLEHIQAQLRELRTQVALLDQRVQKLEAITGVGSITALAVLAELPELGTLNRRQAAALAGLAPHPRESGQWHGRRSIGGGRAPVRRALYMAALVAARSNQTLKAFYQRLRTAGKPAKVALTAVMRKLIVLMNHTLKHPNLVLQN

SEQ ID NO: 205637 - protein, 345 aa, unidentified
MENMYYIGLNVHKKTISYCVKDGSGRIYAEAEIPATRLDLDMWMKTLPQPWTVAMEATIFTAWIYDHLKPHAAAVKVAHPLMLRAIAAAKKKNDRIDAHKIADCLRCDFLPECYMASAEIRERRRTLRYRNLLVRQAVQMKNKIAVLLMEAGVSYNKQKLHKVGYFRELLATNQDIDEGLKPLLRLCRETVVRLGKIESALVRSLQRDSLLMERVERLMTIPAVGPITALTWALEVGDVQRFSSIKKAISYCGLCGAENSSANIIKRTPLSKQRNKHLQTMLIEVAKMAPRNSPDLAMLYDREKQKGNANRATLAVARKLVAYLVAVDRRQKDFLVVASENRTAA

SEQ ID NO: 205638 - protein, 383 aa, unidentified
MTIQIQAPRFIPRDYDVFGGLDVDKKSMSVVFTDHAGSQRALRMAHQVTPLLNYVRKHFAGQRVAFAYEAGPTGFGLHDELVRRAYTCVVVAPSKVPRAPGERVKTNRLDSRKLAESLRGGQLHSIHVPSAVYRNLRHLVQMRDTHVRQLTSSKLRIKSLLLFEGIAFPDPHEKWTARAMRELQTLPCSEPVRFKLDDLLDTLHFHFQAAARATKQIRQYCLQEPELQQSIEVLLSLPGIGWIVASHLVARLGNHREIKNGRQIAGFLGIVSSEHSTGDKENRGEITRSGDSRLRNKLIQSAWTAIKRDPELRAFYRRIYQRHPKKVAARKAIVAVARKLTNRIYVVLKEQRPYLIRPDSSIAPLTAEETVGPRERLDTAQND

SEQ ID NO: 205639 - protein, 368 aa, unidentified
MATIGIDIGGRSHALARCRDGQARADREILRVSQSRAGFTALDVWLERQTEPVTLVTMESSGHYWMSLASHLRRRDVQVAVVNPVAAKYSAKSRLARAKSDPADARSLAELGMRDTPAARDPLLGAELRQAARFAMTLVTEQAKVCQRLIRLVELGFPELGELFHDPTCRTAREILRIVPTARAATRRRTSTLANANAGPGRRRLGMAKAERLQAAAESLAVPELDAEVAFEVGLLLDQYDLLERQIEPADRRVAALLDGETARRLQTIPGVGPSIAATLMAEIGDLLRFTDFDQLLAFAGVHPAERSSGRKGANPETAWHMSMAATATSGRPRIGWPSWASSTIRSSLPITPGNGPPARPRLDRNGI

SEQ ID NO: 205640 - protein, 386 aa, unidentified
MQKAITYVGLDVHKDSIVVSLAEAGLRGRLREVREYGKVLNTPAALKAMATKLAAGGNELRFCYEAGPCGYGVQRQLSAMGHHCAVVAPSLVPRKPGERIKTDRRDAAKLAKLHRASELTPVWVPDPAHEAMRDLVRARLAAVRNIREARQQLSGFLLRNGYHYHRHPWTLMHRRWMADLKFDQPLHYIVLQDCIAAVEASEQRRDRLEAGIIAALPEWSLAPLVEPLQALRGIALVSATTLVAELGDIARFSNPRQLMAYLGLVPSEHSSGRSRRQGGITKAGNAAARRMLIEAAWSYRFPARISRYQLSQQKRLPKLIRDIAWKAQERLCRRHRKLMRAGKPKTVVCAAIARELTGFVWAIATETSPANGKKGTGKPATMGAVS

SEQ ID NO: 205641 - protein, 347 aa, unidentified
MKDTTISVDVAKSVFEIAVSLHPGKVSETHRLPRPRFAQFFAARTPTTVVMEACGMAHHWGRELQNQGHRVVLLPPHAVRPYVPRNKTDRTDAKGILEAFRNQAIHPVPVKSVSQQALAALHRMRSRWMATRTSRINTVRGVLREFGLPIPVGSRQVVPAVRVALGDADSGLPDAIRSTLDMACEEIHDLEARIAAVERQIEAVARETPVVSMLRSVPGIGLLTATALAAVVGDASRFPSGRHLASFVGLTPRESSTGLRRRLGSISKRGDSYLRMLLIHGARSVICHARKAKSHDRLRAWALRLVSRTKYNKAATALANKLGRIVFGVWRHERTYESLALLPERAA

SEQ ID NO: 205642 - protein, 367 aa, unidentified
MKKISTVAARQSRNISLQKLTIGLDLGDRSSWYCGLDEGGRVLLEQKVSTTPKAMQEVFGGMPRSRIALETGMHSPWVSRLLSGLGHEVIVAHARNVRLIGESRKKDDRLDAQTLARLARIDPQLLSPVKHRSAQAQADLTVVRARAGLVRARTALVNTARGLAKSYGERLRGCNVRNMNPEKAEGLSPELQKALGPLPAASAALSEQIAEYNERIEKLAQESYPQTALLKQVKGVGTLIALTFLLTLEDAHRFQKSRDVGCYLGLQPGRRNSGQSEPQMHISKEGDPYLRTLLVQGAQHILGPFGIDCDLRRWGLKLAERGGRSGKKRAIIAVARKLAVLLHHLWVSGEVYEPLHNSNQRAMPAAA

SEQ ID NO: 205643 - protein, 426 aa, unidentified
MAAGGVTSRNVYVTAPEEDKLIRYHVGIDVGKHKHYACVCDLVEDRYMKVFPFTVDRQDFERFLLFLQQQAPVEQILVGVEASGPYALTIGNFLLEHGYTVVEINPFQANQFRKAQGKKAKTDRVDARSLAAFLSVGSHKPLVLGEPHLENLRELTRFRVDLVNDHTSLVNRLKETIAIAFPELGAHLASLDSPAALTLLATYPGPQALAEAGIPAVSSCLIEASHRRLGSAQAQAIVSAAGSTIGLLRRQPALALKLEVLAQGILSVNMQLQRVEAAIEELFSHLPYDKSDFPVGSIQALASVLAEIDDVNRFPTLKQFLSHFGWCPQTFQTGGFSQEHPRMSHAGNRYMRRMIWLLAIMAVKTVPAYRDYMQWRTAAGKKKMHTIVAVARKLLSFIYALLKTGIPYSPEGDVESNRPCSALTSL

SEQ ID NO: 205644 - protein, 316 aa, unidentified
MNTSTLQNVNIGVDTGKSQLDIYVRPLGIFFSVSNDEKGIKQAIKAIQQHSPQRIVVEATGRLEMPFILACAEAGLPYVIANPIHVKRFAGAIGQRAKTDKLDAKLIAHYAEAIKPTLTQLKPESMRLMADLVIRRNQLLSMQTMEKNRHQIMPKHLTMTIKPILTAFKNQIEKIEKKLIQLIESCPEYQAKNNILQSMPGIGKIAAASIISNLPELGYITNKQAAALVGVAPMNRESGRYKGLRKIQGGRAQVRTVLYMAMMSAMQCNPVFKRTYQRLLAEGKPKKVAIIACVRKMVIILNSMLRDGVLWNEKSA

SEQ ID NO: 205645 - protein, 355 aa, unidentified
MNIEKYIGLDVHQATIVVAVTDSTGKLIMESILETEAATILQFFAGLRGTLAVTFEEGTWSAWLYDLLNPRVEKLVVCNPRKNALLKDGNKSDRIDARKLAELLRGNQLKSVYHGESGVRMLRELSRSYLTIVKDMSRVMNRLKAVYRSWAIPCAGRDVYYRRHRAQWLDKIREAGVRRRAERLYEQLDMLQYLRQQARRELLAESRKHAITARLRQIPYLGPIRSALAVALMQTPHRFRTKRQLWAYSGLALETRISAEYRMVEGQVRRSKKLLSIRGLNKDHNHDLKGLFKGAATMASVRPGPFQDFYQASLAKGIKPTMARLTLARKIAAITLTLWKKGESFDAEKLKSQAA

SEQ ID NO: 205646 - protein, 339 aa, unidentified
MQQIAVVDTDTGECEEKRLEHRQAAEDFYRKLRERGVAVRIGMEASGHSRWFERLTSELGFELCIAHPAEVRARCVRKQKTDRQDAQLLLQLMMEGRLPQIWIPDWGNRDLRQLLWHRHRLVQMRTRVVNQLHAVALNEGLRRKKALWRSGARGELEALVLAPWSSRRRKDLLALLDQLQPAIASLTAAVEQEAQKRPEVVRLMAHPGVGAITALAFVLVIGDPTRFQNGKKLSSYLGLVPSEESSGQRRRLGHISKQGNTLLRFLLVEAAQATVRADAEWRRQYLHLAMRRQRQIAKVAMARKLAVRLLWMWRNALSEAPIEGFGAHAGQPGTGVDAQ

SEQ ID NO: 205647 - protein, 406 aa, unidentified
MISVGIDVSKGKSTICAIKPYGEVLMTPRDFKHTRDGLDSLIKQLSRFKEEIHIIMEATGNYHLPIYQYLKSKGYQIAVINPLEMKRYRCQGIRNPKTDKIDSMIIAQYGIDYWYRFKPNDDTEEKRQELRLLGIQYTQFMKTRVIRCQALCEILNRTMPGVYGFLDDFNRNNGQDKLCDFAEKYWHSDNITKYSEKAFIERYNSWLKKKGYRPNEKEARQLYSIAKNAIPTLDSKLPSTKLLVQEAVNVLREVDSSLYDILNQLKSLSKEMPEYETVLHMKGIGETLAPRFIAEIGDPRRFHSAKALIAYAGIDAPPYQSGQFIGTKRHISKRGSSNLRKLGYELMDSVNKHKSSYIGDPICEYFMKKRNEGKPYRVAMVAAFNKFLRIYHSRVCEVLNEYDKTK

SEQ ID NO: 205648 - protein, 371 aa, unidentified
MEHTRFVGLDIHKERISIAVAESGRSGAVEYLGEISNDPVAIGKLCDRLERRGNALAFCYEAGPCGYGVHRQLTSLGHRCDVVAPSLIPHKSGDRVKTNRRDATMLARLHRAGELTPVWVPDADHEAMRDLIRLRSVVRQIVTRTRQHLQGFLLRHGRKHGRGTAWRMAYRRWLSTLAFGHPAQQIAFQDYTDAVMDAERRLKRVEEQISGLLPEWNLRPVVDALQAMRGIALINAVVLVAEVGDFTRFSNPRQLMAYFGLVPGERSSGETIRRGGITKTGNTHARRALVEGAWAYRMKARIGRHKVDRIEALPKIIRDIGWKAQVRLCTRYRRLRARGKTANVVNVAIAREMVGFIWSIACTVQSTPKTA

SEQ ID NO: 205649 - protein, 403 aa, unidentified
MFYVGIDVAKEKHYVCILNDARELACKPFWIHTDIVGLNKLVKTLTNLSLSNNEFIIGVESTGALSENLYEFITDSDYKVVLLNSYQTAKYRDFSTIKKIKNDTIDAYVIAELLSTGKYKESYISNDDYQSLKVLGRLNRSLSDKIKSIKREISTVMAIVNPEITRVFPNIFSKSALEIIKAYPTAVDISKATPKKLTKLFRHIKGNNFNENKARFLIDLAGNSVYAGRAHEARALMILTNIRILELLCQEKSEIELQIELLIYGKIDAVDSCIDNLKSIPGVADKTISAILGECGDIRRFNSAKAFIGYLGLYPTQYQSGNHTSIGKLAKRGVPIAKHALYMAAVSSVMHNDQLRKLFRDKVSAGKSKKEALIIVSKKIATIIYSIFKYNKPYEPNRVFLPR

SEQ ID NO: 205650 - protein, 315 aa, unidentified
MTKQLLPVNAGVDVSKDNLDLYLLERDLALSVPNDEQSIASLLKRLARYRLERIVVEATGRLEHAFVSAAIAKGLPVVVVPPLKVRRFAEAAGQLAKTDAIDARLIARFAAALKPTTRLVTDANSKLIKDLVVRRRQLTSLRTTEKNRRGVMPEVLKPSIDRIIASLDREISSLEQLIQDAVEQHAAWRHKRDLLTSMPGIGPSVASTLIGDLPELGSLSRRQIAALTGVAPFNRDSGTFRGKRRIRGGRAHSRTALFLSAMVAIRYNPDIKRFYERLLQTGKHKKVALTACIRKIVTALNAMLRDDKPWHSSFA

SEQ ID NO: 205651 - protein, 341 aa, unidentified
MSDYSYFGGIDLAKNHFSIHVLDSQGKVTLHKSVTRSKLLTTIANMPPMRIGLEACGGAHYWARTLNKLGHDARIMAVKYVVPHRTKGKNDLNDAVAICQAVHHPSTRFVPVKSPEQQAILSVHRMREHWVRERTALMNRIRALLSEFGLIIPVGRSSLMKQVPLMLEDAENELPQLARTVIADAYYHLEQLNQRIADTEQVFEAFSKVSENVQRIMKVRGIGPQTATAILASIGNGSQFDKSRDFSAWLGLVPKQYSTGGKPRLGRITKHGDKYLRTLLVHGARTVIANLGDKQDRLSQWCRGVLERRGMNRAIVALAAKNARIIWSLLHNQTEYENYAA

SEQ ID NO: 205652 - protein, 427 aa, unidentified
MNTDEATRYADFCQFKTEIRLSKDYLIVGIDVAKDKHHAFFGTATGRTLLRRLIFDNNRNGFEQLITRASQLGLEHGLSRIVYGLEPTGNYHKPLAGWLIGNEQMLVLVSNKAIADNRQTMDGRWDKNDTKDSANVADLMGQGKCQFFEIPDLALVQVRNLLSLRRRLKRDEHALRMKIRNGLVTKYFPELDRHWGSSLTENLAIVRWCLDPRKISSMGFEDFVRQVTRTDRGLRQLKRLKRIYEAAGLSIGCPVDEGAKFEARLLVDRLEVIREQMDSTETEIKQICLGFASYRRLLTIPGFGPYVASIVLARIGDPHRFKGRKQVIRLAGYDLNAKRSGKGSKDAVPVISKRGNSELRYALYQAALIATYHNDRFRALFTRYLKGREKERGIKTKMRVKLAVKMLVIAWTMMKTDSEFNPSLIEV

SEQ ID NO: 205653 - protein, 411 aa, unidentified
METIIRRCAGLDVHKASVVACVRIIDENGEIQSATQTFGTTTDALIDLLDWLSSFAVTVVGMESTGVYWKPVYTILESEFECWLLNAQHLRNVPGRKTDVADAAWIAQLVAHGLVRPSFVPPKQIRELRELTRYRKSLIQERSREAQRLHKVLEGSGIKIANVASNILGKSGRAMLEALVAGTHDSNVLAELARGQLRKKIPDLRKALVGWFSPTHRILVSELLAHLEFIDESIERLSEEIATMMLPFSTAAEHLDTIPGVNRRSAEVFLAEIGTDMSCFPSAAHLASWAGMCPGNNESAGKHFSGKTRKGSKWLRTALVESAQAAARTKGTYFAAQYARIKGRHGHNKAIVAVAHSILLVVYHLLEREQPYADLGGDYFAERQRKDAYQRRLVHQLERMGYEVALTEKAA

SEQ ID NO: 205654 - protein, 377 aa, unidentified
MKKPIRFVGLDVHAETIAVAVAEPSGEVRSLGTIRNRPEAVRRMVRKLGPAAQLRICYEAGPCGYVLYWQLTELGAVCEVVAPTLVPVRAGDRVKTDRRDAEKLARSYRSGDLTAVWVPDAAHEALRDLVRAREAAKKDQLRARHRLQKFLLRRGLRPPEKIKAWTAQHLVWAKTLRLEQPALSATLLDYITEVEHARERIERLERAIDQAIEAAPAAIRAVIEGLQALRGVARISAATIVAELGQLSRFHRPKQLMGYTGAVPSEHSSGERVRRGTITKTGNAHLRRILVEAAWSYRHRPNVGSELRRRQANASEEVKEIAWKAQHRLHYRYVRLMARGKIKQQVVTAVARELAGFVWAIGVEIEKQPVSRPARAA

SEQ ID NO: 205655 - protein, 310 aa, unidentified
MRIICGVDVSKAWLDVFVAPDHCQRFANSPDGVTDLAGFCREHDVELVVLEASGGFEQSAFLALWQQGQPCAIANPAAVRHFAKAMGYLEKTDQIDTRVIVGYAEAKRLKPTPPPSCDQQKLTALAARLRQVTADLSVQKQRRHSTRDEQAMASLCEAIAFFNRQAKILAAEIAALVEKDPLWVTLDRTFRSVKCVADRTVAVLLADLPEIGTVSNKAIAKLVGLAPIANDSGKRAGKRPIRGGRDTVRSILFLVADLARRYDPSLADFRQRLLDQGKPKMVIRIALARKLLVRLNAKARDARAQMPNAL

SEQ ID NO: 205656 - protein, 345 aa, unidentified
MKQITTIGLDLAKQIFQIHGADAEGNVIINRKLRRAEVLRFFEKTPPCLVGIEACGSAHYWAREIAALGHDVRMMPPAYVKPFVKRGKTDAADAEAISEAVTRKSMRFVPIKSAEQQAASMVLKTRALLVSQKTQAINALRAHLSELGIIAAVGAGKVATLIEIVRDEADGRLPRAARLALMEIADQIETLTRQIEKLEREVVAEARRDADMRRLATIPGVGAITAAATKAFVPDPAAFRSGRDFAAWLGLTPKPHSSGGKERLGRISKMGNPMLRSLLVVGATSVLRHARGKANAPRWLIGLLARRPFKVAAVALANKMARIIWALLVKGGIYRKVEAMSPASA

SEQ ID NO: 205657 - protein, 313 aa, unidentified
MNQDSAFVGIDVSKSTLDSFVSTTGQVEQFLNTHDDIQRLTKYLKAQTPALVVLEATGGFERLAAAELSASGLPVVIVNPRQVRDFAKATGQLAKTDALDARIIAEFAQAVKPAIRELADEHARELADLLVRRRQIIDMLVAEQSRLKQAVFKALQQDIKAHVVWLQKRLKNTDDDLHDAIKASPIWKANYDLLREVKGVGDVLALSLLAMLPELGKVNRKQVAALVGVAPYNCDSGIFKGRRRIWGGRAELRSVLYMATLSSKLHNPVIEQFYNHLLAAGKSKKVALVACMRKLLTILNAMIRDQKHFAEMA

SEQ ID NO: 205658 - protein, 330 aa, unidentified
MTFFLGCDVSKNKVDVALVDASGIEQWVDQVPNTTLDLATCVAAVAGNYPDDELCCVVESTGCYHHPFTEAAAVLGIPCRILNPIVTKQQIKATIRGKKTDRTDAVMIARLGLRGEGRLASPEPYLSTKYYARSCQKFSNLAGSLKKHSRHITELLDDDLSAATATAFLDVQGALEQAKRQLYRDLAASARGEVFTLLQTIPGVGPYVSASLIGEIQDMKRFGTAKALTAYAGLDPKIRQSGHTLNNTGKLTKRGSSYLRRSLFIAASISRQYDPKMKAFYDKKRGEGKSYKVATCAVARKLLTLVRAMWLSGNKYDPTLKIRTPEVKGT

SEQ ID NO: 205659 - protein, 402 aa, unidentified
MAVSKKFTRFCGIDIAKAKHVACVIDRDGASCIRASSFANTAEGYQRLLDRLKDTARASSILIGMEATGHYWYGLHDFLTRCGYAVAVLNPIQTARQISQAIRKCKTDKYDAAHIAQLIRSGNYRPATIPSEKAMTCRQLTRLRYSMLQQQTRIKQLLWSRLHPVWPEYEPLFANPFCKTARAVLRLAAAPQDILQIDQDDFAEMIRSTSHGKLGQLKAQEIRDAAHNSVGMHRGRDGISIGINCLLDQMEALEPVRKKLESQVIHMAETLPQYLFTLPGASPLNIVSLYGEVDPIATFGRPSQLVAFAGLDGAVFQTGQYDAPQRHISKRGSPFLRKTLWQMAYRALQHEGDLRDFWLKKKRENKHQFVAVTAVARKLCHVVWRIMTDQRDYIPEGYNPKS

SEQ ID NO: 205660 - protein, 351 aa, unidentified
MEHTTIAVDLAKSVFQVAVSHRAGRVDAERRLSRDRFLAYLAQQPPATVLLEACGSSHHWARQLEQFGHVVRLLPAHDVHRYVRRNKTDRTDAKALLEAARNEEIHPVPVKTVEHQAITSLHRLRSTWVATRTARLNTLRGLLREFGIFIPVGAQHVVPRVRELLGDPTGALPVAVRSTLANACAEIDVLETNRRDVERQLAAIARQLPDVALLQTVPGVGLMTATALIAFVGDIGRFGSGRHFASFLGLTPKEDSSASRRRLGAISKQGDVYLRMLLIHGARSVLWHAKSCAHPSGFQTWARCIEQRRGHNVAAVAVANKLARIVWAVWTQQRPFAANHRHAETTSVSSN

SEQ ID NO: 205661 - protein, 340 aa, unidentified
MEDVAVVGVDLAKSVFQLHGIDARGEVVLRRRVSRSKLRSFFENLPSCLVGMETCASANYWARELIPLGHKVRLMPPQYVKPHVKRSKNDASDAEAICEAVTRPTMRFVGVKSSEQQSVLVLHRTRLVLNRQRTQIGNAIRAHLAEFGIVAPVGRIGLDRLFVIIADESDQRVPAAARACLAMLVEQHRLVLAHLLETDRAIRTHSRASEIGRRLQEIPGVGLLVASALIATVPDPHVFKNGRSLSAWLGLVPRQNSSGGKERLGGITKAGDTYLRKMLFVGAMAVIRYAERHGTRRPWLAKLLTRRHPRIAAIALANKIGRIAWAMMTSGEHYREPVVA

SEQ ID NO: 205662 - protein, 457 aa, unidentified
MARKSAQKKEGSSRMLPVLHPDAAGVDIGAEEIFVAVPADRAADAVRSFGTFTRDLHKLADGLQECGVRTVAMESTGVFWIPLYQILETRGFQVFLVNAEHVKNVPGRKNDVSDCQWIQYLHSLGLLQASFQPPDEICVIRSLWRHRKSLVQMAAEHIMHMHQALSKMNLQLHHVLSQITGLSGQKILDAVLAGERDPMKLASLCDGCVKSSRETVAKSLEGDYREEHLFALRQALVGYRFYQRLIAEVDRELELKMRKLPRASRGPEQMPPRTKARFYQRADNEPAFDLKGILFRIAGVDLTDVPGISAITAHTILMELGPDVSRFRNASAFASWLGLCPEKQVSGGKVLYTRSRKVKNRAAIALRLGAHCLYRAKNYLEEFYRRMRWRLGAPAAVTATAHKLARIVDHLLSTKQPYSEDLLVKCDRLANKRAEIRLRKQAANLGYQLTPIPQSNS

SEQ ID NO: 205663 - protein, 356 aa, unidentified
MDNYTIGCDAHKHYSVFAVLDREGVLKSQKRVEHKTGEIQRYLEKYPMGTRVALESVGNWYWIADEIEAAGCIPLLTHAAKAKVMMGNINKTDKLDAKGLATLLRLNSLPYVWLPPGKTRDGRELPRTRMALTKIRTALKNRIHATLAKYNKKLEGASDIFISKWREELLSTIDQLPTETRKCMRSELELLDHLSSQIQSLEVRIQDLVEDSDQIQLLKTLPGIGNILGIVIRQEIGTIERFPSAEQFASYCGVVPTVKSSGGKSRYGRMRKQSNQYLKWAFIEAANVVGLRHTSSNWKDRHVVRLYRRIRQRKGHRIAIGAVARHLAEATYWILRKQEPYREPAARSRKVTLQSG

SEQ ID NO: 205664 - protein, 406 aa, unidentified
MKQFNPNQPIAMCGSTALLNQSSIAPLHYELYIGLDVHKDTIAVSIAHRDGSKPRYYGEIANTPNAVKKLINKLSPTGEVISVCYEAGPCGYGLYRQIIALDHQCIVIAPSLIPSKPGDRVKTDRRDSESLARLHRANELTPVWVPGAEQEAIRDLTRAREDMKHLARQSRQRLSMFLLRHGQNYDSGTSKWTQAYFRWLERIKFTQPVQQIVFQEYIDCVKQQHARVKSLEQEMESALHGWALAPVVEALMALRGCKLNTAMTIMAELGDITRFDSARQLMAYLGLVPSEHSSGKSTRRGGITKTGNGHVRRVLTESAWCYRFPARKTAHLQRRAERTSESVQAIAWKAQKRLCGRYQHLLNRGLLKVKVCTAIARELAGFIWAIACDVMPKPSALMGQQAFITE

SEQ ID NO: 205665 - protein, 391 aa, unidentified
MIYVGIDVAKDKHDCFITNSDGEVLFKAFTITNNLDGFNDLYQKIETVMKDITKVKVGLEATEHYSYNLLGYLIDKGLPTYVINPLHTNLYRKSLSLRQTKTDKVDARTIASMLMSDVNLKSYSDTSYHNEELKSLTRYRFDKVKQRAKLKSSVSRLVCILFPELEKLVPTLHMASVYAMLSEFPGAKQVANAHLTRFTNLLSKVSKGRYGKETAIAFRNAARTSIGSNMPAKSLELKHTIKLIQELTSEIDEIENEIKLIMDEINSPILSIPGINYRMGAMIIAEIGDFNRFDSPDKILAYAGFSPSTYQSGQLDGAYSHMEKRGSRYLRYALYNAAKYVCNWDPTFAEYLAKKRAEGKHYNVAISHAVKKLIRVIYHLEKTNQQYIKAV

SEQ ID NO: 205666 - protein, 313 aa, unidentified
MAAIERFIGIDVSKETLDVHTLPDGNAFVFTNDPDGIKAICKKFSKIRPELIVLEATGGLQIPVATALSLKKFPVAVVNPRQVRDFAKATGRLAKTDKIDAEMLALFGKQLRPEVRPLKDEQAQELSAFMSRRNQLLRMLVMEKNRLSRSYGSVRNDIEKNIDWLEERLSEINTHLGALVRASPFWREQDNLLRSVPGVGEVLSTAILSNLPELGKLNRRAISALVGVAPMNCDSGKFRGKRRVFGGRSNLRSILYMAIMTAIRFNPVIRDFYKRLTEAGKPHKVAAVASMRKLVTILNAMVRSGQPWAHCES

SEQ ID NO: 205667 - protein, 519 aa, unidentified
MEVIHPRCAGIDISKKDAKVCVRIQGRGSGATSATVTTWGAMTGQILALKEHLLAEKVTIVVMEATGDYWRPFYYVLEEELNVILVNAHEARNVPGRKTDVSDAAWLADLGAHGLVRASFVPPAPIRELRDLTRARTIITRERTRDIQRLEKLLEDACIKLSSVASEITGVSGRAMLEALIAGEDDPAVLADLAKRRMRSKIPELTEALTGRFREHHRFMTRLFLDRIDAHTGDIERLDQRIEEVIEPFLPARELLMGIPGFSRIIADIFIAETGADMSVFPTPRQLASWAGTSPGSNESAGRIKSAKTRPGNRYLKGALGIAALSIARTNNTYFSAKYRRIAARRGPMRALVAVNTPCSPQSGTSSPPVSSTGIQDRTTSPSTPQPRPRPARSANSNPSATRSVSSHWQKQVRTPAQPSTPAVVIKFSCQEARMANARPKNDGTLIVDVHELQLPQAALDRIAASVQKAVMLELATVDEAPDFQVQMSRPDGKFIDILKDIGRTRGLILQKIARGDGR

SEQ ID NO: 205668 - protein, 341 aa, unidentified
MTIGIDLGDVWSHYCTLNEDGEVVGRGRFRTSPSGVEKWFTDLPRVRIAMEAGTHSIWISEQLQELGHEVIVANVRELRAISHSDRKSDPVDAEKLARYARLDPKILRPIAHRTVAQQEALTLIRARNLIVRLRTAAVNAVRGLAKPCGYRLPASSTLCFAKRCVAVLPPGLAQALGPVLEQIAEMTKKIKHYDRLIKRLTETEYPETQALIQVYGVGQLTALTYVLTLGNKERFQRSRDVGCYLGLRPKRSQSGDRDPQLGITKAGNIYLRTLLVECANHVLGPHGRDSTLRQWGLHLASRGGKQSRNRAIVAVARKLAVLLHRIWITQEPYIPFYGVAA

SEQ ID NO: 205669 - protein, 361 aa, unidentified
MTDSDAIWAGVDLGEEAARVCVIDNAGSILLEADCSPEANEITGVLSALPKAPFIGLEAGLGTRLTRQLRASGLTVATFEVRTVRRFLSVFHNKTDASDARGLAEIARLGRSVVSQVHVKSKECQVTRSLLAIRHKVTQQRVATQSIIRSLFRVHAERTVRFTARLKVRALVEEELQRLASEGIDLRAEVLPLLSVWESLLQFGAAIDKRVAKMAKEIPTCRRLQTIPGVGPLLALSFYSAIEDPHRFAVTSRVGAYLGLAPRLFKSGTVSRREGISKRGSKLTRTHLVIGAQVILRKDAQDSALKQWGTALASRIGYRRATIAVARKLAVLMLTIWKTEVEYTAFPKGSGGLVPRQGRGA

SEQ ID NO: 205670 - protein, 347 aa, unidentified
MAHVGVDLHSNSFTSCRLDLDGTETLATYQLCATDLSSFRKTLLADDEIAVEATGNSAWFREQVIDSVQRVVVVNAKQFQVIRKSVKKTDKNDARALAFFLSKDMLPETRVKTVATSELASLTQTRDLLVKQRTRLLNKIHAQFTRHGIKIKKESLGSKRALEKLEIMRFSRLEQFELTILRDQAQSLTEALAKMDREIESAAAKLEGYEGLSSIKGVGARSAAVLLTSIGNVNDFDNADKLAAYLGIVPRVSQSNDTDNRGRITKRGDRLARTTLVQCTLTAIRYSGYLNSYYRRIKDRRGSGKAIIATARKFLTIIFDTLKNGWVFEDFPNFKIAGKSIVSGQSS

SEQ ID NO: 205671 - protein, 375 aa, unidentified
MNQFIKYVGLDTHKDTIAVAIADIAGGKPRFYGEIANTPTALSKLMKDVSPNGEVVSYCYEAGPCGYGIYRQISDSGHDCSVVAPSLIPTKPGDRVKTDRRDCENLARLHRVGELTPVWVPDQEQEAIRDLTRAREDMKHLERQARQRLCAFLLRHGQRYDSGKSKWTQAYWRWLERIKFSHRVQQTVFQEYIDSVKQQQQRVAELEQTMQEALADWALAPVVEGLMALRGCRLITAMTIVAELGDITRFDSPRQLMKYLGLVPSESSSGPKTRRGGITKTGNGHVRRVLVEAAWCYRFPARKTAPLQRRAEQTSDEVQAIAWKAQKRLCGRYQALNRRGLLPQKTCTAIARELTGFIWAIACEVMPKNATEANA

SEQ ID NO: 205672 - protein, 377 aa, unidentified
MPSSIFPHPCKLESAASGKMPGAVAVGRPTYSGARKPVAQHGSPTADPLNPDSRVGRSASPIKQGRALMDAIYVGIDVSKDRLDVHVRPTGEAFAVARDGEGLAVLVARLLPLAPHLVAVEATGGFEITVAAAIGGAGLPLVVVNPAQVRHYAQALGRRAKTDAVDAEVIARFAEATRPEPRPLPDEATQALADLVTRRRQIIVMMVAERQRAGRLPKRLKRSCERVVRVLEKELTALDQDIDDTVRGSPAWREKEDLLASTPSVGDITARTLIAELPELGTLDRRKISSLVGVAPFTRQSGRWHGKSFIAGGRSNVRAALFVATMSAVQHNPTIRAFRERLLAKGKPKMVVMVACMRKLLTILNAILRDRKPWQPA

SEQ ID NO: 205673 - protein, 398 aa, unidentified
MLSIGIDVSKGKSTVCGMKPGGEIVYTPFEVQHTREGMSELVSLLRGSGEEVRVVLESTGSYHCPVVAALLENGIFVSVVNSLRMKRFCSQSIRRVKTDQIDAMQIALYGLAYWQELQPTRLPENTYRELQLLARQYYQMTSLLIKAKVDFNALCDQVLPGMQELMSDHAGRHKLSDFVLRYHHTAHILKMGETRFRKDYCKWAEKKGYRNHERMAALIFATAQNGIPVLPDAPSTQIVITEAIRVLHTVEASRDAILTQMQALAKTLPEYSLVREMPCIGDTLAPRLIAESGDVRRFHSKRALIAYAGIDAPPYQSGKFSANNRHISKRGNRYLRKTGYEVMQSYVMHKPANDPIFTFIEKKRSEGKSGKLAMVAGLNKFLRVYYGKVTELYRSLPQ

SEQ ID NO: 205674 - protein, 390 aa, unidentified
MSQPFDASRSLTAFEQDSTLVAVIEMSQSNWLVAAVVPGVERQPLKKLDAEADALLKLLQRWRDEARKAGRVVRRIVCAYEAGRDGFWLARWLQAHAIEAYVIHAASIAVSREHRRAKSDRIDTELLMRSFLGWLRGEKRHCSMVAIPTMAQEDARRPSRERESLVGEQTRIGNRVKAVLALFGIGGFNPKLRKAAEKLETLGTVEGTSIPENTRAELRRDLERLRLVRDQIRAIEGERLRRLAAAPRTATGPHAMVRLLARVFGIGIETADMLVNEALSRNLRDRRAVSRYAGLTGAPDESGKRRREKGLARAGNGRVRRGMIQLAWRFLTWQKHSRLAHWFRERTADGRSTTRKTMIVALARKLLIALWRLVTTGELTEGIKLRPAGA

SEQ ID NO: 205675 - protein, 420 aa, unidentified
MNQTQIYFAGVDWASEKHDVWLTDAGGKRLGMRTFAHSGEGLAQLCAWLTATSGAEPGQIHVAIEVPHGPVVETLLERGFNVYAINPKQLDRFRDRFTLAGAKDDSRDAETLASSLRTDGRAFRKLAFDEPALVELREYSRLTDDLTREKNRLANRIRQQLWRYYPQIAKLDADLSEWVLDVWEAAPDPAKAARLTKRTVSSILKKRRIRRIGTDEVLSILRTQPLSVAPGVTDAAKAHIRLLAEQLRLVNKQIKEAHRQLDRLCTLLAGPAQAGEGEAEPGQPQEQRDAAILDSLPGIGRINLATLLAEASVALRQRDYHALRILCGQAPVTRRSGKSRIVVRRYACHPRLANALYHWARVASQIDEKCMAKYAALRKRGHSHARALRSIGDRLLAVACAMLQKRTLFDPAFGSTNSPC

SEQ ID NO: 205676 - protein, 327 aa, unidentified
MTAYIGIDVSKQKLDVAWLRDPDTLKVKTKVFPNTPEGLSALTAWLVSTTGAPATEISVLMEATGVYHEALAYALHEAGMTVVVANPRHAHQFRESLGKRSKTDKKDSIALARFLCSRPHERWQPEPAEVRALKALLGRLQALDTDLQREQNRLEKAGIQRAAAVEDSIRKMLEALEAERTRLRRQIDDHFDNHPGLKSDKQLLESIPGIGSVLATELTAMLRSRSFRSASQAAAYLGLVPVMHESGTSVNHRPALSKAGPSRLRAKLYMGAVVATRYNPLIRQQYERLVERGKAKMSALGAAMKKLVQIAYGVLKHQRSYDPQWAS

SEQ ID NO: 205677 - protein, 342 aa, unidentified
MQITSIGIDLGKTTFHLVTLGEQSKVLARKKFSRKQLLAYTANLPASLIGMEACSGAHFIAAAIRGQGHDVRLIPAQFVKPYLKSNKNDFLDAEAIAEAVARQNMRFVPIKTDEQLDLQALHRVRDRLVQRRTAVINQIRGFLLERGITFPKRPANLRNNMVALLEDAKANLSPGMRRLLEGVWQEWKQLEADIDGANAEIERIASTDTNCQRLRKIPGVGPLASTAMVAAIGNGAAFRKGRDFAAWLGLVPKQRSTGGKARLYGISKRGNEYLRRLFIHGARAVLYRVKYDTGGLGRWAHQLEARAPRNKVIVAIANKLARIAWAVLSSGEVYQHQPVGTA

SEQ ID NO: 205678 - protein, 345 aa, unidentified
MQIKSIGIDLGKTTFHLVALGAHSQVVIRKKFSRQQLLNYTANLPSCLMGMEAGVGSHFLGRAFREQGHEVRLIPAQFVRPFVKSNKNDYCDAEAIAEAVERENMRFVPIKTEDQLDLQALHRVRERLVSRRTSVINQIRAFLLERGISFRKGPASLRRQMPEILENADERLTARMRRLLDFLWQEWKHLQLQIESLSEDLEKIANSDAACVRLQQIPGVGPLVATAVVSAIGNGSAFHKGRQFAAWLGLVPRPWSTGGKPKLLGISKRGNPYLRKMFIHGARAAVLRVKREGSCLGQWMSGLETRAARNVVIVATANKLARISWAVLSSGNDYRAMHRPLRCSS

SEQ ID NO: 205679 - protein, 455 aa, unidentified
MARAKQSSKQHDLSPVHPHAAAIDIGATLHVAAVGPERDPEPVRSFGTFTGDLHRMAEWFAQCGVKTVAMESTGVYWIPAYEVLEQHGFEVILVNARDARHVPGRKTDVSDAQWLQRLHAYGLLRGSFRPKGEIATLRAYLRQRERLLDYAASHIQHMQKALTQMNLQLHHVVSDVTGVTGMKIIRALVAGERDPEVLAAHRDTRCRASTETIRQALVGTDREEHVFALTQALELYDVYQEKVAACDARIEAVLKRLQAMAAKPAGKLPPPRHTTRQPNAPAFDARAALHTILGIDLTQIHGLGPSLALKLVGECGTDLSAWPSAKHFTSWLCLAPSNKISGGKVLSTRTRRSGSRAAALLRLAATTVGRTQTALGAFYRRLAARVGKAKAVTATARKIAVLFYNALRHGMNYADPGAAYYEERYRRRVLTNLQRRAKSLGYVLQEASPEPAGVS

SEQ ID NO: 205680 - protein, 346 aa, unidentified
MSHKTATTVAHTIGIDTGKNTLHLIGLDDQGAIVLREKIARGRIAARLANVPRCLIGIEAGMATHYVARELSALGHDVKQVPPAYSKPFRQGHKNDFRDAHAIAEAVQRPSTRCVPVKTDDQLDLQALHRVRSRLVGQRTAVINQIRGFLLEHGIAVRQGLRFLRQQLPDILAKRSDVLSPRMIRIMEDLSGDWRRLDERIEHVTKEIEVLAHGSDSCRQLMTVPGIGPLIASAMVAAIGNGAAFAKGRDFAAWLGLVPKQMSTGDRTILGRISKRGNRYLRTLFMQGARVILLRPANWAKHSFGPWLTAAANRLHHNVLATALANKLARIAWTVLMQARSYEARV

SEQ ID NO: 205681 - protein, 353 aa, unidentified
MEITTIGIDLAKNVFAVSGAERRGRVVVRKQLRRAQLMGFLRTLRPCVVGMEACGGAHHWARALTQLGHQVRLMSPALVAPYRKGNKHDRNDADAVLEAVSRPSMRFVAVKTIAQQDVLALHRVRARLLKQRIALSNQIRALLHERGVAARLGAAGLRAAVAAALAADHNELSAELRQVIAELLDELRQLELRIKAFDQRLARAAQGDERCLRLREVPGVGPQIATALVATVGDAREFKSGRELSAYLGLTPRQHSSGGKTVMLGISKRGDRYLRTLLIHGARSLLYRNRRLAHPRARWAARLSAARGPNVAAVALANHNARVLWALLSRGDRYRPDFQPRGFPSRPSAGAVN

SEQ ID NO: 205682 - protein, 349 aa, unidentified
MSKRKGSKIASLPLVEPNAAGADIGATQIFVAVPPDRDAEPVRCFDTFTADLERLADWLEQCKIRTLAMESTGVYWIPLFQILEQRKIEACLVNAQHLKNVPGRKTDVEDCQWIQHLHSVGLLRGSFRPDQEICAIRSLWRHRDNLIQLATVHLQHMQKALDQMNLQIHHVISDLAGTTGLAIVDAIVAGERDLAKLAKLRDWRIRASEETIMKSLVGDYREEHLFALRQSLMSYRHYQKLIQDVDAQVKQMMHRLPAKIDIGERPLPKEKNPRKTPWRNEPPQLREDLYRTFGVDLTQIPGINTLTAQMLMLLTEVGPDLSRFPTVAAFCSWLRLCPEPKISGHTGTA

SEQ ID NO: 205683 - protein, 456 aa, unidentified
MKNKPSPDRARQRLTKHLEQINLYAAGIDIGSESHYVAVPEGLDDEPVRCFSCNTGDLEKLADWLVQIGIQSVAMESTGIYWIPLFEILEERGLEVLLVNARHVKNVSGRKSDVLDCQWLQQLHTYGLLAGAFRPPEQVTALRAYMRQRGTLVRYAGSHIQHMQKALRQMNLLLDNVVTDITGKTGMTIIRTILKGERDPNKLAAYRDRRCKKSEQAIAQSLHGHYREEHLFALRQSVELYDTYHAKILACDEAIEQQLKRFDAQGDPQQLPAGKKKAANAPAFDVRGELYRMSGVDLTAIDGINDITALKVLAETGTDMSRWKSEKHFSSWLGLSPGNKISGGKILSSKTKPTTNRAAAALRMAAFTLSNSKSALGAYYRRMRSRQGAPKAITATAHKLARLIYSMLKHGTEYVDQGQDYYEQQYQDRVMKNLRHRAAQMGFALVPSSGDNGSLV

SEQ ID NO: 205684 - protein, 411 aa, unidentified
MQVIYQRCCGLDVHKRIIIACVLEWVGSGWEKEIRQFGTMTSDLLALSDWLVHEGCTHVAMESTGVYWKPVYNILEGQFELLVVNAQHLKAVPGRKTDVRDAEWIAELLAHGLLRGGFVPPASVRELRELTRYRTSLVRDRARTINRLQKVLEAGNIKLANVVSDIDGVSARLMLEALVAGERDAQQLAGLAKGRLKDKRAQLVEALSGRLQPHQSFLIAEELAQIDYLDGAIERLNHQVEERLRPFEQEIGWLDTIPGVNRRTAEVLWAETGGDMSRFPSARHLASWAGMCPGNNESAGKRRSGRTRKGSPWLRHCLVEAAHGAAHTKNKYLSSQYHRIGAQRGRKKAQVAVGHSILVIAYHLLTRKQPYSDLGANYFDERDRQAVTKRCVNRLQKLGFKVNLEKLPAAA

SEQ ID NO: 205685 - protein, 379 aa, unidentified
MDLQGTATPAGGILYGALELSKNSWLLAIQFPDRAQPSLYPIPGGDTQALLAKLMAARNRWAKLKGKAPSIALCYEAGYDAFWLARLLKAHGIECLVIDAASLQVNRRGRRAKTDRIDVAMLLRALIAWWRGERHVFSAVRIPSVEEEDLRRSHRERSRLVHERTAHINRIKGLLFGQGIRGVKVLSRREPLKIDKLLTGEGRPLPPRLANEIARELERLTLVQKQLVDIERELDQAPTPCQATEKKRRQLMLLKGIGPTFSAVMAREVYYRQFDNRRQVAGFLGLATSAFDSGELTRSQGISRAGSGLVRSAMIQASWLWLRHQPKSALALWFEQRTQGQSGRIRRIMIVAVARKLAIALWRYLEQGLVPQGAILAGR

SEQ ID NO: 205686 - protein, 373 aa, unidentified
MGEDRTVCVGLDTHKAKIAVAVAEPGRTGEVRFQGEIANQADAVRRLIERLADKYGRLRVCYEAGLCGYGLQRQITALGHDCMVVAPSLVPRKPGDRVKTNRRDAVTLARLHRAGELTAVWIPDPVHEAMRDLVRARTAAMEAVRRARQQLQGFLLRHGRVFTGRKTWSPAHRRWLAGLRFAHPAQQIVLQEQIDAIAEAERRRDRLEQQIRELVPDWSLAPVVAALQAMRGIAFLSAVVLAAEIGDFRRFTNPRQLMAWLGLVPSEHSSGSKVERGGITKAGNGRARRVLIEGAWSYRFPARVTSPIQVRLDGVSDAVRAIAWKAQVRLCARFRRLVAAGKNVNVVTTAVAREMAAFAWAIACQVQPREAAA

SEQ ID NO: 205687 - protein, 376 aa, unidentified
MNEFSSMYVGLDVHKETIAVGVARSGRCAPEYFGEIKNSVAAVRKLLRRLSPNGEVLQICYEAGPCGYGLYRQIKSLGHDCEVVAPSLIPRKAGERMKTDRRDGLKLAHEHRAGGLTAVWVPGEEQEAVRDLTRAREDMKAIETKARQRLGAFLLRHGRVFEGKSRWTQAHFRWLETVKFDQPLQQLVLQEYIDAVTDARRRVEALELQMRQALPGWSLGVVAEALMALRGLSLIAAMTTLAELGDITRFDSPRELMGYLGLVPSEHSSGGSRRQGGITRTGNGHVRRVLVEAAWNYRFPARKTRDIQKRAEKTSAAVQAIAWQAQKRLCGRYQTLMRAGKEKNQVTTAVARELAGFIWAIAREVMGKPHASKALA

SEQ ID NO: 205688 - protein, 341 aa, unidentified
MNTMTEAVLGIDIAKNKFDVVLLIGGRRRRKTFANSRSGHAHLLQWLRDKGVTFSHACMEATGRYWEALAMQLHDGGHLVSVVNPSQVKNFARSKLTRNKTDSVDADLVAEFCLLLKPLRWSPPSPAKRRLRDLVRLREPLLASLIEYRNRLGEGTLFSPASDALGRIIDALEDELASIERAIREQIAACPMLATEITLLTSIPGIGVMTAAGILVELPDISLFRAAKQVAAYAGLSPRNRQSGSSILGPGRLARTGNANLRSLLYLPALAALRFNPVIKAFADNLRSKARLAPKQIVAAAMRKLLHLCFGVLKNAQPFNPNQPAGRQQRAILSPDACATA

SEQ ID NO: 205689 - protein, 362 aa, unidentified
MNKSSTSRLESFIRGFEFKPFSVGIDVHKNSYHIALPREDGQFHVWVAPSNPLALAIRLKELSLSIRCIAYEAGPTGYTLARVLLAANLPAIVIAPNKIPRPISASAKTDSLDCRRLADYAAKDMLTPIALPTEEEEALRTLVRRRKTLTAQRRQVRQRIKSLLLYHGILEPRGLENWSKKALAGLDALPLRPAIASALGSLLREHTFVQQEVNLVDDAIGKSSRDELPQGDQASAAEYLQTVPGVGPVVAATFVTEVFRPQRFQRGEEVASYLGLAPTVRQSGERSGQARLAPGGKKYLKSILVEAAWTVKRYCPWAANLYGRIVSRTNVPQKAIVAVARKLAIILWRLSLEKRAYEPAMA

SEQ ID NO: 205690 - protein, 372 aa, unidentified
MTSMPEPTPIDRAHDEREEVVLGVDTHKDLHVAAVLSGLGALLATRAFPTTAAGYRGLVAWARSFGALRRAGVECTGSYGAALTRHLQAEAIEVVEVNQPDKATRRKRGKTDAIDAEAAARAVLSGRATATAKTSNGPVEAMRVLRMARNSAVNASTKAINQLKAVLVGADPALRDSLAGLGPASLVRRCAELPDPTPGSGLSEVDRAVVFTLRTLAARIMALKAEAYQLHKQLRALIAAHVPELLERRGIGPDSAAALLIAAGDNPERLCSEGSYAALCGASPVEASSGKTQRLRLNRGGDRQANAALYRITLSRLRWDSRTQNYLQRRLAEGKTRREAIRCLKRYIAREIFTLITPKAATAPANQSANAA

SEQ ID NO: 205691 - protein, 355 aa, unidentified
MRFVGVDLHKQTITLVVVDAARKLLFRKRFSNLMSEQIVVFLKTLGEFQLTVEATASYEWFVQLVEPLAMRIVLAHPGKLRVIAESTRKSDKLDAKVLAEMLALDQIPASYRPTPRQRDHRQLVRQRQFWQRKITGVRNKMRRILSNDNLDRRDLFTVAGQEWLKTAAVSSVDRFCLDQLVGEWSDLVKRRMAVEQQLREFAQEGSDQERLDRGILKTVPGVGEVTSEVILAELADPRRFSSLKKVVAYAGLAPGQRESAGKRQNLHIEKTGSPLLRWVLVQAAWQLAKRSPKWQTIYENLQRRIGSKKAIIAVSRRLLTICVTLLKQQDVYREIIPRPATAREPASAICAGTRT

SEQ ID NO: 205692 - protein, 322 aa, unidentified
MIFIGIDISKLTFDAAYFINKRYVHKQFSNNPKGFTDFELWMNKSDAEVFSCLEATGIYSFDLAQYLSQQKRNVLVVNPIITHAFFKMELNRNKTDKADAKLIARYCKHAVLSGDFKRNYYQPKGADYETIQRLVTRCDQLEKSKTQENNRLEASTNKHTTRSIKRLQKSIANEIIWIKKTIAGIVKNNENLSQQVELITSIKGMGERTAWSVIAYIGDFNFFANAKQVASYAGLTPKIMQSGTSINKSSLSKLGHKRLRKSLYMPALVAIRHNPSLKAVYERLVHNGKPKKVAIVAVMRKLLILSYGVLKSEKAFDVNYQP

SEQ ID NO: 205693 - protein, 337 aa, unidentified
MKYCGIDLHSNNCVVIVSDEHDRVVYQNRLPNDLRQIAAALEPYRPELTGVVIESTYNWYWLVDGLMDAGYTVHLAHPAAIRKYEGIKHSGDFADAAYLAQLLRLGLLAEGYIYPREERGARDLARKRMQLVRYRTAQILSIEGTVMRQTGHTLKGEAVKRLSGSQVDEFGFAPDVAMAIEANRAVCQVLGQQIETLEKRLLECVSLRADYCLLKTVPGIGQTLATTIMLETGSITRFRRVGNFSSYCRCVDSLRESNGKKKGEGNTKNGNKYLAWAFIEAANFAVRCCPQAKSFYERKKSRTNRILATKALAHKLARACYHILHDQKPFDVHLCFG

SEQ ID NO: 205694 - protein, 385 aa, unidentified
MRSVGLDLGARHIAWCEVVDGVVTRRGSVGRLSELEAILGPDTAPAQVAFEASREGWHVHDVLLGWGKKPWMLDTTRIRRIGVGHHGRKNDAIDAEAIAMALDAGRFPVAHVLSPERRALRAKLSVRSERVDTRARQVTVLRGLARAAGVLIGTSSTDGFVQKLADTPLDDATRALMAPLVATLTVVQEQLAAMDVEIGQIAKTDDIIKLLATAPGVALIVAATFVSVIDEAKRFRNAHAVSAYLGLVPGETTTGGKQRLGSITKHGNTHARKMLVQSAWQILRAGKPEDPLHRWASDLVKTRGKKIAAVALARKLAGVLWAMWRDGTFYDPGSHAQESTRGLRASAQSQALRAEAMKRVAKKIKRRESTPSRATRAKTSRALPV

SEQ ID NO: 205695 - protein, 351 aa, unidentified
MYYIGVDYHKKYSYVVVKDEQGRREQKGMVNNTKEELQEFLKPYQPGRAVLEATRNWGLIYDWLEEILDDVALAHPLKVRAIAEARIKTDKISADILCDLLRSNLLPEAYVPSKETREAKSTLRQRMFFVRVQTMVKNRIYDILDRHPEIACQAPDVSDLFGASGMAWLRQTVLPGQDNRLLASELELLEVLKRKISESNGMVKELARGDKRIKLLRSVPGLGPFFSVLVAKEIDDISRFRDEKKLCAYAGLVPSTYASGGKVFHGRITRTGNKWLRWAFIEAVQPAISCDADLFAYYQRLKMKKGANAAKVATARRLLIIVYRVLRQERLYERRNRRAIRRLAPAALITS

SEQ ID NO: 205696 - protein, 382 aa, unidentified
MSSHNHCVVLDAEGKRLLSRRVLNDEPELLALLADVLAIDEDAVWAVDVADGMATLLISVLLNHGQQLLYIPGLAVNRASAGYRGTGKTDAKDATVIADQARMRRDLAVLRPDDEHAIELRVLTNRRADLNADRTRRINRLRGQLTSIFPALERSLDLGNVGPLIPLTGYQTPAALRRTGRKRLETWLRNRHVRSPEALATDALEAAERQHTAVPGQKITAEVIHTLAKEVMGLNEQITEIDKLIAARFRDHELAEAISSVPGIGPLLGAEFLAATAGDMSRYGTADRLASLAGVAPVPRDSGNLHRPRRYHRGLQRVFYTSALISIRNCDASRRFYERKRAEGKRHTQAVLALARRRVNVLWALIRDGRCYQRELPVTAAA

SEQ ID NO: 205697 - protein, 334 aa, unidentified
MIHVGVDLHQRFCYMTALDSRGKQLNAQAVPNEKAALRAYFRQFRKPVRAAVESCGFWPAFRAAVGDEVEVKLVHAQRVKAIAAAKLKNDRIDSATLAHLLRCDLLPEAWMADESTRELRQQVRLRATLVRQRTRLKNQVHAILHQHGLKQEASDLFGKAGREWLKQVVVGEKARDAMGTYLHLIDEFTGHVKQQDQQVKQFVTQDQRAQWLMTIPGIGQYSAMLLLAEIGDIQRFADKHALTNYAGLVPWVRESAEKRRSGGITRVGSPWLRWIMVEAAQVAVRTSPAVRCYFERLRRRKHRNVAVVAVARKLLVAVWALLQHGECFDEAKFD

SEQ ID NO: 205698 - protein, 349 aa, unidentified
MQRYIGLDAHASSCTLVVLTAAGKKVKELVVETHGEALVEAIRLVPGRRHLVLEEGTHSAWLHEILERHVQELVVVPVRRSKGQKSDSIDAQRLAEALRTGAIEQPVFKAPRKFALLRDLARGHRMLVRDVVRVQTRVKSVFRSRGVSCPGKTVYGRKQRDAWLAELPPSSQVLVSMLLAQYDALVEIRNQAERELLAECKQHAISKVLRTVPGLGPIRVARLLPVVVTPHRFRSKRQFWSYCGFGVVMRSSADWEQQPGGGWERTGRPRSCGLNHRFNHGLKDVFKGAAQTVLTKHTDEALCAHYARLCAAGTKPNLAKLTIARKIAAITLAVWKNKEAYDSARLQAA

SEQ ID NO: 205699 - protein, 331 aa, unidentified
MHDHDPARRNPTPDPVPCFVGIDVAKATLDCYIDPTGRRLRLANDEQGIAQLLSHLLPLDVRLVVIEATGRLHRRAAAELVQAGIPVALVNPERARAYARSVGKLEKTDRVDAAVLAAFGRAARHQTLEKPSEKQVELDDLISRRRALVQMRVAEKSRLAEDHQPELAKAQAKKLLRLIEQQVEDIDRAVAEMVDDDDRWKRLLEIITSVPGVSTGTANQILADLPELGKLNRQKIAKLAGVAPLANDSGPRRGQRSIKGGRGPVRNALYMAAFNAIKYCERFKRFAKTLTDSGKPFKLVVTATMRKLLVTLNQMVKTDSLYTPQLVASSH

SEQ ID NO: 205700 - protein, 421 aa, unidentified
MRKADTGKVKVVRDDALIVAVDIGMEMNRGYCTTPDGRSTKTFKFENTREGLDTLWGMIMASKNRFKCNEVIVGYESTGPYAEPMVHYLMKKPVRVVQVNPMHTKRIKEINDNSPLKTDEKDPRVIADIIRWGHALSIVIPEGDAAYLRRLNNSRERHVRERTALVNQLQQLVFLLFPEFMTVIKDIKCKTPLYLLKRYPTPEAISVLDKQLLGEEMRKRSMGKFREHHADMLINLAKHTVGIREGVSGLSMDIRHILIQLEMLKNLIAEIEGEMEIALGRMPYSSKLLSIKGLGVVSVAGIIGEIGDFKKFKTRSEIMKLAGLDLFEISSGKRKGQRRISKRGRSLLRKILYYAAIQTIRKNGILHDYYTRLTDRGMKRMMALVAVSRKLLGILYAIVRDDSEYSVNFESMKRQVIKKAA

SEQ ID NO: 205701 - protein, 378 aa, unidentified
MRQPVAPRVLEDRALAWAPHLICGREISNSCQGAGARIVQDREQATAPLVREVIVNEEGEVFVGIDVSKDHLDVALYGSPEVRRVANTDGAIETLVSDLQAQSPRLVVLEATGGFEMPVAIALASAGIPVVIANPRQTRDFARSTGQLAKTDAIDARGLALFAARVRPAVRPLPSEESRALDALVARRRQIIGMLTQEKNRLGFALKPVQKGIKKHIAWLERQLADVDGELDDRIRKSPIWAARSDLLRSVPGVGPNLSRTLIAELPELGSLSHKQIAALVGVAPRARDSGKFRGKRMVWGGRASVRSALFMSVLSGTRWNPVLRTFYQRLRSQGKPARVAQTACMRKLLIMLNAMVRDGQSWNPSIPLEQLRLQHSC

SEQ ID NO: 205702 - protein, 385 aa, unidentified
MSDHSEAFVAFDTSKLRNAVAIADGGRGDEPRFLGEIDNTPAATAKLVRKLAGKYERLTFCYEAGPTGYELQRQVKSLGHECIVAAPSLIPKKAGDRVKTNRRDAVGLAKLLRSGDLTAVWVPDRQHEAMRDLTRARETAMLDLRAKRQQISAFLLRQGLHYPEDKRTWSKSHLNWLASQKFDIAEHRIVFEELMEAMRQAQGRLDRLEAAIRAAVPDWSLGKLVIALMAMRGLDMISASTIVAEVGDLSRFRTPRELMAYVGIVPSENSTGDKVKRGPITKTGNRRVRRMLVECAWSYQFPPRLSKDKQVKVDAVPQAVREIAWKAQSRLNQRYRALLRRGKLKNVAITAVAREFVGFIWAVAQAVGAAPAANNRTAPAPAAAR

SEQ ID NO: 205703 - protein, 345 aa, unidentified
MKKVIAGMDLHSNNVVIGVMDMDGHRLASRKLPCELKEVVKFLTPFKRRLERVAVESTYNWYWLVDGLQALKYPVVLANPAGMAQYSGIKHADDTNDAFFIAELLRLAILPTGHIYDVELRPVRDLLRRRLMLVHQRTALMLSFKSLYTRTTGQELTLSKLKGMEIKAAQELYEHPANQLIAGMQIKHIEQLTESVEKIEKAVLGSARELPYYKKLATLPGVGRILGMTVTMEVGDIKRFAAPGHFASYCRTVEAKRMSNNKKKGENNSKCGNKYLAWAFVEAANFARRYDEQCRKWFDRKVARTSNIIATKALACKLAKAAWYLMAEGTDYDPKRMFGQPAKTQ

SEQ ID NO: 205704 - protein, 338 aa, unidentified
MPLYGGIDLHANNSVVVLLNEQDQVIYQHRFANHLPEILEGFALHQADIQGIVVESTYNWYWLVDGLMEAGYRVHLANPTAIQQYSGLKYTDDHSDARWLAHLLRLGVLPEGYIYPKAERAVRDVLRKRAHLVRQQTAHVLSLQNIIVRNTGVRLSAKRIHALTLEEIERLLPVPEHVLAVTSSVVVVHCLAQQIKTLEKMVQQRLKHTSAYAQLQTVDGIGPILAQTIVLETGDMRRFPTVGNYASYCRCVGSTKISNGKRKGQGNIKNGNPYLEWAYMEAAQFAIRFSPTVQRFYQRKQAKSHLMIARKAVAHKLARACYYIMRDLVPFDVHKAFG

SEQ ID NO: 205705 - protein, 412 aa, unidentified
MEGETVIAGVDTHKDVHVLCLLDGLGRKIWSGSFGADPEGYDRLAEAIGDPGSCMVVGVEGTASYGAGLTRRLVELGYNVVEVLRPKRDKVRPGEGKSDPLDAERAARKAASGRGCSVPKSQDGWVEAVRQLYVARRLAVATSTSCVACAKSMLTTAPSALRERFRGRERPKDLMPLLARGRKAGDALEESVLASLRSVAAVWKEARSQVESLDERIRALLEANAPALLGVEGCGTTTAAALVVAAGDNPGRLKGEAAFSMMCGASPIPASSGKTDRHRLNRGGNRQANWALYEIAIKRMAYDERTRRYVARRTSEGKSRREAVRCLKRYIAREVYRVLMDPNPDGAAPEGPELAKMRKAMRVTQKKAAAGLGMSAASLGHLEHGRRRSTKLERRYYELLCELKGALPQTAS

SEQ ID NO: 205706 - protein, 348 aa, unidentified
MQIATIGLDIAKNVFQVHGVDASERVVVRKQLRRGQVLGFFKALPPCLVGMEACATAHYWARELTELGHQVRLMPAKDVKAYVKRNKNDAADAEAICEAVRRPTMRFVSVKTAEQQSRLMLHRARDLLMRQRTQLINALRAHMAELGIVAAQGREGVRELLRIIASERDARLPIDAHASLVVLAAGVQAVQTMIGSIEKRIVAQHRSDEASKRLRSVPGIGIVGATAIAATIPDPKIFRSGRDFAAWIGLVPRQDSTGGKQKLGPISKQGDQYLRRILVVGAHAMLKRARHQPEKYPWITRLLGRKPFGVVAVALANKMARVAWALLARGGTYRAPALAVAAQGSSQN

SEQ ID NO: 205707 - protein, 305 aa, unidentified
MQTVRSFVGMDVHKETISISVAEDGRNGPVRFIGVIPNQPDDIAKMAKRLAKHGELDFCYEAGGCGYNIYRQLVALGHSCTVAATSMIPRKPGERIKTDRRDSQKLAILHRSGDLTQVWVPDATHEALRDLVRARVDASMHLMRCRQQLLAFLLRHGRSYPTGKHWTQRHRSWLAGQTFQLEVHRIVFHDYVEAVWTAQERRDALIERIGAMTASWSLGPLVEALRGLRGIDLLSSATFLATTGDLSRFESPRMLMGYLGLVPRSVRTLQRRQHPSRRHHEDRQPRSTQDADRSRMELSLSGPRR

SEQ ID NO: 205708 - protein, 332 aa, unidentified
MNMHLQGGVAKGDRRPNAGVDVSKHHLDVCFNGQTHRVANDAQGWDELTARLRREQVDLIVLEATGGYERGLLCALQSAQLCVARVNPRQARDFAKSMGVLAKTDRIDARVLCDFADVLARHAGRERYVAPMLEQARQTLAELMTRRRQLVDMRVAEHNRLEHAGPKAQRSIRSVIKLLDRQLESIDRQIDDHMDEHFKQQRQLLDSVKGVGPVTILTLTAMLPELGQLGRRQIAKLVGVAPLADDSGTRQGKRMTWGGRAEVRSVVYMAAIVAMRHNPVIRVFYERLVAAGKPKKVAIVACMRKLLTILNAMLRDQATWNAARHLSLTIGA

SEQ ID NO: 205709 - protein, 391 aa, unidentified
MIYVGIDVSKDKHDCYIVNSDGVVLADVFSVENNLDGFDLLLQRLKSVAPDLLNVKVGLEATGHYSYNILGFLLDKGLATFVLNPLHTNLFRKSTSLRRTKTDRVDARTIAAMMSSGIVLKSYTAISYHNEELKSLSRYRFDKVRQRAKLKQAISRLVTILFPELEKLVPSLHIASVYALLAELPGAKQVASCQLTHLTNLLSAASKGHYGRSKAVVLRNAARRSIGSTMPAKSLELQHTIRLIRELDAEINEIEAAIKQFMDQIASPILTIPGISYRMGAMILAEIGDFSRFDSPDKILAYAGLSPSTYQSGKLDNAYAHMEKRGSRYLRYALYNAAKYVCHWDASFCAYLAKKRAEGKHYNVALSHAAKKLVRLIFALQRSGQPYCPTA

SEQ ID NO: 205710 - protein, 419 aa, unidentified
MSEPGSMPVMYRQCAGMDVHKDSVYVCARLVSGEGTMREEFETFGTTTRELLRLRGWLEERRIVQVTMEATGVYWKPVWNLLEDAFDLWLVNARHVKQVPGRKTDMLDCQWLAQLLSCGLLKKSFVPPVEQRDLRDLTRGRTTLIQDRARVANRIQKVLEDANIKLGSVASDVLGASGRDMLAALVSGETDAAAMAQLARRRMRAKLPALTEALQGQVRDHHRFLLKSLLQQIDALEALIEAHSLRIHEVMDPFFKEAVARLDTMPGVDKVAAQCIVAEIGIDMSRFPTAGHLCSWAGLCPGNRRSAGKRQSGRMNRANVWLKAILCQTGWGASHTKDTYLSTQYHRLARRRGKKRALMAVGHSQLQSAYYMLRDRVAYAELGVNWLELRHGEQQAKHLVQRLEKLGYQVDIQKASAAA

SEQ ID NO: 205711 - protein, 472 aa, unidentified
MKSKSSRKRNPVDPVAEEIPDAEHELVIERVAAIDVAKASGKVCVRLPGKTGRRFSRVWDVPARTGAVSELAEQLIESGVEKVTVESTSDYWRIWYYLLEAAGLDVQLVNARDVKNVPGRPKTDKLDAVWLAKLTEKGLLRPSFVPPAEIRQLRDYTRLRVDLTRERTRYWQRLEKLLEDALIKISAVASTLDTLSTRDMIEALIAGERDPGRLADLARGKMKAKRSELIAALDGRFDDHHGELARMLLDQIDTLTAQIATLTSRIEQLLAAMPDTRSRGDGGTGGDPDRPSTGHGVEPETAARFTDATLLTPVERLDEITGIGELNAQVVLAEVGLDMTRFPTPAHLVSWAKLCPRTIQSGPVTRGGKTGRGNPYLKGALGEAAAAAARTDTFLGERYRRIVKRRGKLKALVAVARAILVVIWHLLANPEARFRDLGPNYHTQRIHTERKLRNHIAQLTAMGYRVTLEPAA

SEQ ID NO: 205712 - protein, 347 aa, unidentified
MPEMEVDTFAGIDVSARELSVALRPGKGEDKPAMAKFSNHPSGHKALIAHLLRGGRRVRVCLEASGNYSLDLALTLQAHRQVEISVINPRRARRFAESLGQRSKTDPVDARVLCEYVARMPWVAWQPPSSVALHLRAVARAIADLGVIHTQQNNRAHASAASQALPVLVVKEMQRHQKYLEQRMTRLRREALRLIAGDSELDRRFRLMLTTTGIAECSALQILGELAVLPDMLDARQWVAFSGLDPRLFKSGKSVEKRPRISRGGSRHLRRALYMPALVALRRDPYLRRFYQNLLARGKARLQAVVAVMRKLLHALFAMFRSNQPYDGSKLCCASVDMAGNGIAACA

SEQ ID NO: 205713 - protein, 405 aa, unidentified
MKQPAMLHYAGVDWATRTHAVCVVDPNGAIRARFEVPNTSKSYARPCKRLIKLGVAGVAIERPDGPLVEAMLEAGLRVVVVTPRQVKALRSRYGASGAKSDPADAEVLADVLRTDGHRLAPLTQDSDPTKVLRALTRTRKDLQEARVALVNQLTSQLERCFPGAIGLFAELRTPVAVAFLRRYPTSHAAAGLTQAKLAAFLRRLHYPGRTPVHVLFSRIQTAPVAGISPVEAAGRAVCVLALLEAIQACARQERELEAEIIERLELHADQHIFTSLPRAGHGVRAAALLAELGDVRARFPDNDCLAALGGAAPVTITSGKRRVVKFRWACDKKLRNALIDFADDSRHASPWAAHVYAQALARTGRHPHAVRILARAWIRVIWRIWQDGVAYDPTKHRGAVMLQAA

SEQ ID NO: 205714 - protein, 427 aa, unidentified
MSEQIPLEIRVSVDVGCHSHNVAIGLSSGEVLEEFQIPHRPEGFQHFFSRIEKHQKKRGYPVAVAMEGYNGYARPLDGLVRARGYRLYNINNLKLARFKEIFPGAAKSDPIDARKGLELFQLRDHLPLAKEVLQEVGAVPAENEVLKRLTRRRRRLVNERVRVVNNLQADLQAVCPGLLEITQEAGNQWFLGFLVSADTLCQLARLRRSILLKIPAVGVKYAGLIQSWQKRAHFSEDVEWVGEMIQEDAHRVLELDHKIKALEAKIAEVAKGSKIAKVLLSIPGFGPTCTSELAGEIGTVERFSKEGSLALYLGMATLDNSSGKHKGSKSPKQVNTRAKAAMMTAIDRHRKYVPESQRYYEKKRLQGKAHNQAIRALGRHLCRIIYKMLKEEREYEIRSTEGDSRGRVASRASLIGQMRRSKIKAKS

SEQ ID NO: 205715 - protein, 416 aa, unidentified
MEILYAVCCGLDVHAKTVVACLIVSGKKTTRTFSTMTEDLLRLADWLMEAGCTHVAMESTGVYWKPVHTILEGVCEVLLVNAQHVKQVPGRKTDVKDCEWLADLLRHGLVKASFIPPAPIRDLRELTRYRSTLVRDRVQLANRVQKRAESGNIKLSQVVSNALGVSGRRMLRALAQGEQDLDKIVALADEKLYAKHSELRRAVDGRLTQAQRFVLADLLDRYDEVERAIARVSERVAEEVGSQQQDPFVEEAIAKLDEMTGIGQRIAEVIIAETGIDMGRFPSEKHLSKWAGLAPGNNASGGRRRSGRTTKGNQALRTALVQAAWVAVRKKESYFGVLYQRWKGRLGNKRAIIAVAHRMLDIIYHMLSRREGYHEVDLKAIGARSVEYERERLVRKLKALGVNVTIEERADIPDAA

SEQ ID NO: 205716 - protein, 390 aa, unidentified
MDVLYQSCAGIDVHQANIVVCILHGPLTSTRPKREMATFDTTTKGLRACHDFLSQFHVEAVGMESTGVYWRPVWHALCDDFKLILAQPAHMKAIPGQKTDKKDAHWIAKLTRIGLLPRSFVPDETIQELRELTRQRKHYVESRNRETNRIHKILQSGGIKLTTYIEDIMGLSGRNLLQLLVDGTPITPRIVHQSVYTSLKKKVPQLMEALDGYFSDHHRFMLKQSLEIYDFYQKQIELLEARINVYLSQYEKHVEILDSIPGIDVITASVIISEVGVDMSQFPTAGHLASWTGLCPGNNESAGKKRSTKIRHGNSYLKKCLCQAAFAVKKQKGSPLADRFYQIQSRRGSQKATIALAHQLLKIAYILLKEQITYPEFLAQKKTTRDELVA

SEQ ID NO: 205717 - protein, 347 aa, unidentified
MKKLFIGIDFAKEKFDAAIIEACGLKEFGNREYGTFTNDKKGYRQFFKWVKTNADKSVENEWLFCGEDTGSCSLGLSKWLYGKGLDIWIENAYSIKHSSGIQRDSSMIAEYAWRHQDKAVLFEPLSESLSQLREVFLYRHKLVQQHIAMDVRKQDKEAAEPSKAISFIKRKSKHLMSEIDNAIKECDLMIDRIIESDAELKENYAIITSIKGVARQNGACLLIFTNNFRRFDLDARKIACYYGVAPFGKDSGTSIHSPAKTSHFANKLIKSLLGQAAHCAKKFNPEIREYYNRLIGRGKKPQVALNNVKNKLIRIIVALVRKKVYYDPKTYMFYNAKFTDVKKMLNS

SEQ ID NO: 205718 - protein, 498 aa, unidentified
MGLRPTKCHENGVESRLHPIKWTSVVEVDGAVDELRPPSCLIRSVRLNEQVRVADSILRGRRQREMVLKIFPGTLSALVRREGTMESSYKVAGIDVHKKMLAVVITDAVEVGEFRFERRKFGTGDAELRVLAGWLAEVGVKEAVMESTAQYWKPVWQALEGQLKLHLAQAHSNRAPKGRKRDFADAERLVRRHIAGELILSFVPDEQQRLWRTMTRTKQQLTRDRVRLQNQLEGFLEETRIKLSSHLSDLLGLSGRRMLQALAEGETDPARIAALATQGVRATQQELRDALRAAATLGQPHRRILKLFLERLTLLESQMTMLERSVGQALREYEDSVHRLAEVPGLGADSAQQIIAEVGPHAATFPSPGQMASWVGCCPGREESAEVSKNDRSPKGNRHMRRILNQAANAAIHTKGSSYERLYRRLAGRIGHFKAVWAVAHRLCRIAWKILHQGVRYEERGQRPDPHAVRQRTNRLIRALRNLGYQVQLTPAAPGAVL

SEQ ID NO: 205719 - protein, 370 aa, unidentified
MSKSVLYVGLDVHKMSMDIAIAEPGAAGEIRYYGRIGGDLDSLDKVIRKLDSKGAKLRFAYEAGPCGYQVYRHLTAQGRPCLVAAPALIPRRPGDRLKNDRRDALTLARLFRAGELTPVRVPDADDEALRDLTRAREDAVSVERRAKQRTAALLLRHGRRYPGKTAWGRGYWRWLRQQVMDQPAQQIVLQEYLDAVREASARVQRLTGQLRELIPQWRRAPWVAAYQALRGVSLIVAATVVAEVGDLNRFQNPKELMAYLGLVPSEHSSGASVRRGPITKTGNRHARRVLVEAAWAYRLRARVTRTLLKRQEGLPESIRQLAWKAQLRLCARYRRLLVRGKAKQTIVTAIARELAAFLWAIGQAVAPAKV

SEQ ID NO: 205720 - protein, 333 aa, unidentified
MLYSGIDLHKDNCVISTVNQNGEMINQSKLPNHNSSIIHYFSSMGKPHKAVVESTANWYWLSDLLRENGIEILLAHAKYLKAISYAKVKTDKVDSQTLADLMRARLRLVSKRTSCFNSIHRLLGKYNIAIPDNRNLHDLSTLDLLVNLPLDQDALFQLELLKQQIRLLHKQINTLEKSLHPRLIPNEDIQRLLWIPGIGKVLAFSIYLEVDGVDRFIDVNKFYSYCRLVPGANNSNRKQRHKSANKDGNRYLKIAFMEASIKARQYYKEIRQYYQFKASKKHKNIARNLVSLELARITYYVLKNKTDFNNRFNGRILSRQKIMQWPRLTSPGV

SEQ ID NO: 205721 - protein, 347 aa, unidentified
MYKANRRDGLCERSLTMFPVGIDVSKNTLDLCMLYDGIKGRIKTRNIQNNRHSVENILRWLRLQHCSPEDVHVVMEATGVYHERLATELHDAGFQVSLANPHRSREFARGMGIMTKTDKVDAYMLACYAFLKKPHRWEPPAPEIRYLGALLRRRDVLLGDALREENRLEKYLSTDTPADIISSCRRMAQLLREEVSNIERQIKAHIKASPALRRDYTLLTSIKSVGPQLGMHMLVVLRSHNFVSAEQAAAFLGVVPIEKRSGTSVRRRPRMSKIGPPQLRAKLYMSALCGKIYNKRMRNIYDEMCLRGKPKMVAIGALMRKLVHWCYGVLKTGTVFNDEDLKPVLST

SEQ ID NO: 205722 - protein, 353 aa, unidentified
MVYSPNEYDIFIGIDVDQKSFSFTVKNHDTMSNSYKIPANPENLYQHIRNRYNNQRVICAYEVGVTGYHLHDYLTSQNIRCLMVPPQSVPKASNDRTKNNRLDSDRISQHLKNGDMEPIRIPDYDYRELRQLLRSREEYVDLRKVSKQRIKSLLLFAHLHKLLKDTTQYWSYAHIKRIKELPCSPATRKRLDLLLNDLDYSRNQTVIIIKELKSFSDQNASLKRNIHYLRSIPGIGFITAITILASIGDPQRLRNPRELSAFVGLVPSEYSTGERITRGRITHLGSSVLRSLLIEAAWANITKDARLRQFYDRIRSKHHPQVGARKAIVAVARKLTLIIYRVLKEQREYIANI

SEQ ID NO: 205723 - protein, 372 aa, unidentified
MSHMSGLNTNTTVVGVDVHKYSHTAVAIDCFGQKREEHEFSNDYLAEFVVWLDSLGPRENLLVALEDVNGYGVHLVKRLANENILMRYVPGILTERRRKQSIHREKSDPADAMRVAKVILTNYEETLPAKESIADPGERGAAANLDFFLAERRGLVADQTILKNQLHALLHQYLGDHYADNFTKAFNPKSMAYYQKSLKPKNMVDPEQPALAMSIKRRLERLKLLVCQIKEIDAAMQTAAKVCQPVQALRYSLKGCGQITACTLLAEVTTVKRFRTKAQFARYAGIAPIQKSSGSHRRLYTSPYGNRKVNRALHTIALYQISRTSGLGRLYYEKKLAEGKTKLWALRCLKRQLANRVFQTLKYEYESRIKPA

SEQ ID NO: 205724 - protein, 404 aa, unidentified
MPYRIAGIDVHKKKLAVVMADVEVEDEFQFERRWFGSNPEQLRQLAEWLAGQQVEEAVMESTAQYWKPVWGALERYWKPACQSREGAGPKSGILHLAQALSNRGRRGRKNDFRDAERLVKRLLSQELILSFVPDAEQRLWRTLTRTRYQRTRDRVRLQNQLESLLEEAHIKLSSLVSDMLGVSARRMLQAPADGETDPAALAALAHQRLRATPEQLQDALGACTELNPVYCRLMKMALADLKFIEEQISQLDREIAALLGEYQDAVRRLAEIPGLGVESAQQIMAEVGAKAATFAAAKNLVSWVGACPGEEESAGVNRSKRSPKGNRHMRRILNQCANAAIRHKGSIFEILYRRLVPRLGHNKTIGAIVHRLCNLIWLILHRGLRYESTARQYPSSQGERAHSE

SEQ ID NO: 205725 - protein, 383 aa, unidentified
MGKVVIGVDPHKRINAVCVVDAKGRVVAREQFDNTAGGFRQLKAFWRQWRPRTWAIEGCNGVGKYLAQRLVAEGETVYDVSTRRAALVRVYAGGNGRKSDDTDAESIAMVGLRSTDLVSVRRDDLTERLRLLSNRRAELVAQRTQAVCRIHRDLVGLLAGGSSKRLTATQAKAILARIRPRDDVGKLRRALLADQIADLVAADRKIAAINVEIKQAVAGAPTRLTRLFGLGPVSTARILGDVGDVARFRSRHHFASYNGTAPTLSGSGGPPTPRVNTKGNRKLNHAIHIAAVTQVRSTTSTGHAYYRRKIAEHKTEKEAMRALKRRISDAIYRQLVADAAELRGPGGQMGTTPRTSVTGSTPTAGSSARPQPGPRRKATPPAA

SEQ ID NO: 205726 - protein, 392 aa, unidentified
MHSIGTSGLPAADHENVRVLAAIELSLKRWRVASVSPGVEKISRVDITGGDAVGLSQRLERWRDECARRLGRAVGITVCYEAGRDGFWLARFLEARGITVLVIDPASLQVNRRARRAKTDRLDVEGMLRALRRHHWGEPKVFSVVRAPSPAEEDSRGLSREREALVKERTRQINAVKALLTAQGVAGLGACRRGWLDRLAAARTGDGRALGEHLRHRLARLARLGRRLDEVNRQIAEVEAELADLDHRRAVDLPAGATTVAARLRRLVGIGPVSAMVLEEEAFHRSFANRRHVAAYVGLTPTPFQSGESNREQGIAKAGNPRLRRVMIEVAWMWLRHQPDSPLTKWFQARVGDARGRVRRVALVAVARKLLIMLWRYATTGLVPDGSRLSPT

SEQ ID NO: 205727 - protein, 400 aa, unidentified
MISVGVDVSKNKSTICILKPYGEIVSSPFEIQHTEKDLTEVSNMLLRLDEEVRVVMESTGNYHYPILTFFLKKGLFVSVINSLAMHKYATCSLRAAKTDKIDSIKIANYGIDNWYHLKKYELQENEYRQLQILGRQYAHYIEMRVKEYLYFYSILDQTLPGIKKIIKSQNNDNFERDKLVDFAENYIHFDNISKMSESVFIEDYLNWNTKNGYQPSTTKALEIYNYAKNSIPTLDSQNPITSIMVLESVRVIKKINKTLNVILAQMNKYAKSTAEYSIVRSMGGVGNKLAVRLIAEVGDIRRFHSSKALIAYAGIDSPPYQSGQYLGLNRRISKRGSSLLRNVGYEVMQSLKTHKPSGDAVYLYILKKEQEGKPKKVAKIAGLNKFLRIYYAKVMEVYNS

SEQ ID NO: 205728 - protein, 370 aa, unidentified
MVEMHGVAGIDPHKNTATVAVIDGCGGRRGSQSFTIDEAGIGELLSFLVDSELIIDRVGIEGSAFLGRPLVLALGAAGYDTREVQANRTAERRSRRRRAKTDNEDAEAIARETLAHADLPPAGKRSTPDEDWEALGAVRNWRESLVLQRVRLLTEAEAVLVALPVAVRATLPLTSRVLPQLKALADGSVDLDGLGLADQIKVDRLVASLTDITTLTTRINELDRKIPALLERLGCTLTSIHGIGVVTAMDLLVEVGDPCRFTSEAQFARWCGAAPVALSSGEGDGPPRRHRLDLGGNRAVNSILHGVHVTQVRCHPPAKAYMARQTEQHKPKRSARRSHKRHLANVIIRHMWKDASRLSAVTDQALLTAA

SEQ ID NO: 205729 - protein, 551 aa, unidentified
MGGPWRERLWRQKPMPLDRFARIELDSTAKADYTLVSIPGHERGSGFHPIPGIGSAIRYRFGNGFDPVGKFSLYESEPGRIHKSSESGEVMMKKRAASKRKESVQKNVDWKALEIVHPDAAGIDVGGSEHWVAISPDRDPEPVRRFGCFTADLREMAVWLVEKGVRSVAMQSTGVYWMPVLEVLEQHGLEVYLVNARHTKNVPGRKSDVQECQWLLKLHAFGLLNNSFQPTDEIRVARTLWRQRGNLVADASSTIQRMQKVLIEMNVQLSNVLSDISGVSGMCMIGAILEGERDPEVLMALVQPGVKATPQDILKSLEGNWRKELLFVLRQQVELYRMYQEKIQDCDQQLREHLESFGSVVDLQARPIGPKPKGKKGSKNAPQFDLRTELYRITGIDWAQVNGIDVLTAQTVIAECGADLSAFPSEKRYTSWLGLVPTNEQSGGKILRRRTRKVVNRAAAAFRNAATTLLRSESYLGAQYRRLRTRLGAPKAITAMARKLACLFYRLIKHGQQYVDKGNEYYETKYREQQIRALAKRAQKLGLELVIPKTA

SEQ ID NO: 205730 - protein, 309 aa, unidentified
MTPKNYIAIDISKDTLEVLDQQSKKSCTFRYRPDALQELLQWIQGHKTPLVVCEATGGYERELLAMLREHGVPAALVNPSRVRAFAKSEGLRAKSDPLDAALLLRFAQSKALEATPPLSPLQLTLQALLDRRSQLSEDLAREKNRLEKCPQCIRRSIQKMIRNLEKEIDRTDQQIEDLIAGDQTMSEQNQKMQSVVGVGKVTAWSILAYLREITTLSRNKLVALAGIAPFVKESGKYKGKRKIDGGRAKVRRCLYMAAQSAAVHNPHIKAYVERLRARGKPYKCAIVAAMRKLLLHLQSILQIPEKCLA

SEQ ID NO: 205731 - protein, 369 aa, unidentified
MGAALHGLRWPPDPVRGARRPFPLRQQPLVSLGTACCSVTHDRTVARLSIAWTRQVTVTDLICGVDVCSAALDVRLGRDGAMRRFTNDGAGITELIAFCKEHQVGLVALEATGGYERLAFAMLWSAGLATAIVNPRAVRRFAEAMGFLEKTDRIDSGIIAWFAEVKRIAPRQPDGAAQRQLAALVTRLRQLTELRTAQDNQRRLVTEPAALASFAELLSLIARQIKAIGEQIGKLIATDPLWHKLDLAWREIKGVADRTVARLMAELPEIGTLSSKAVSKLAGLAPIARDSGKLSGNRPVRGGRSGIRSILFVVAELVRRHNPDFAAFHRRLTLAGKPKKVIRIALAHKLLVRLNAKARDVRAQLPYSA

SEQ ID NO: 205732 - protein, 348 aa, unidentified
MNILAMDLGKNNTVICLYDAQSGKHSFDKIKTSPQTIHDTLAEHKADRVVFEICSSAGWIYDICCSLKLDVQVANPNTQAWRWKNIKNKNDRNDALKLAQLSVMNQLPTVHMPKPAVRQKRSLIQYRQTLVARVVEIKNNIRSIFDKQGLSMSAGKSGWTQKAVELLNKEALSFEKCDSFNLWRGQLYVELQVLQFAQKALKEVTAELDRSGEQDSQVKLLQSAVGIGPRLAEAVVAFLDEPGRFATGKQVGSYVGLTPRQYQSGSMDRQGKISGQGNKLLRSLLVEVSWLGLRYNDWMRQTYERLLRGSESRKKVAITAVARKLLVRCWAMLRDGREWEDVVKKQAA

SEQ ID NO: 205733 - protein, 340 aa, unidentified
MHKSSAEGFLGCGIDVSAAQLVVALEGEGGSWRQRSFANRASGHQALILWLQKSGGRVRICLEATGRYSLDLALALHAASGIEVAVLNPKVVHAFAATLCRSKTDPADAQVLAEYARRMPFQPWHPPSAVALELRTLTRHIAALTQQHTQQSNRLHALSASSVGSRWVQQDLKRSLRDLQRRKEKMRRAALALIAQDAELRPRFARLLSMPGIAEISALSLLGELALLAPGLSVRQWVAHSGLDPAHHDSGSSVHKRARISRAGNRYLRRALYMPALVAVRRDPHLRAFYQALRARHKAKLQALMAVARKMLHAIFGMFRGHADYDGSRLFPALELATAA

SEQ ID NO: 205734 - protein, 350 aa, unidentified
MKILALDMGKDKTVGCDFESVTGEHRFAGIATSPGEIIRLLEEIAPHRVVIEIGPQAGWVADLVRGMEIELQVANPNHDAWRWRQIKAKTDRLDALKLARLSAMNQLPMVHVPELGDRQWRALIVHRQTLVARRTAIKNRIRSVLEVQGLRVIKDGKSAWTQSGLGRLRELSRPLDQVEMKDVWRGTLWIELEEFDQVQDHIGRVERKLDSIGQPDERVRRLQEIPGVGHRLAEAVVAFLGDPHRFKSGKQVGCYVGLTPRLYQSGKMDRAGAISGEGNRHLRSMLIEVSWLGLRWNPWMREVYERVCRGSKARKKIAIVAVARRLLVRCWAMLRDGTRWRPPEIGAQAA

SEQ ID NO: 205735 - protein, 340 aa, unidentified
METARHIGIDLHRNQFTCCMRLENGRNYLTDWKLEDLPRFVKKLRPGDEVAVEVTGNTRLFHDAVAPYVKRVVAVDPNQFKVISHSVKKTDPNDARNLALYLEKDLLPEVRMKDKTQAQLASLTQTRDTLVKLRTALKNKVNNILSAHGINLEKEALSSEKKLNEILAMRFDAMVKVELEVIIEEIRSLNQRIAKLEKTIAEEGSKLEGHKNLTSIKGIGPLTGSILLSVIGDINDFADEGKLAAYFGIVPRVSNSNETERSGRITKRGSKLGRTALVQCALIAQRFSPYLKRYYEQVKARRGTGKAIIALARKLLGIIYRTLKNKWVFEDFPNFVLAEV

SEQ ID NO: 205736 - protein, 313 aa, unidentified
MAQMIKTAGIDVSKPWLDVAIWPTREEIRVSRDGAGLAQLIAWLGEHEVLRIGLEASGGYERAVIDALQAAGFEVALLNALRVRCFAKAKGRLAKNDRVDARSVAQFTAVMLEEVVPAQRRRDLDELVELLTYRRQVKGWSTDCTNQLEHLRDSALRKTVAQRRVSFERDLAKVDAKLATLIGERDNWNALARQLRTVPGVGPVVSASLIALLPELGSLSRRAVASLVGLAPFDDDSGNRQGERHIKGGRKAVRDALYMAALSARQHNPIVAAFAKRLDGKKPKVIITACMRKLLVMLNAMVRDGTDWRAQAA

SEQ ID NO: 205737 - protein, 354 aa, unidentified
MFEPAKTAVAVIGIDIGKNSFHVVGLDQRGTIVLRQKWSRGQVESRFANMPPCLIGMEACVGAHHLSRKLKALGHDARLMPAKYVRPYSKGQKNDFRDAEAIAEAVQRPTMKFVATKTVEQLDLQALHRVRERLVGQRTGIVNQIRAFLLERGIAVRQGPRFLRTELPRILAMPSDVVSPRMVHIIEELAGDWRRLDERIEGLSIEIETIAHQDVGCERLMSVPGIGPITSSAMVAAIGAGDTFSKGRDFAAWLGLVPKQISTGDRTILGKISKRGNRYLRVLFVQAAWVVLIKPKSWERHGLKPWIESARKRLHHNVLAIALANKLARIAWAVLARGRNFEARKIGETAAQPA

SEQ ID NO: 205738 - protein, 390 aa, unidentified
MEHPMQKLNDLSRSLTALEPDGTLIAVIEMSLSSWLVAGIVPGVERQPLKKLAVDESTLLKLLYRWREEAEKAGRRIERIAVAFEAGRDGFWLARWLKACGIEAYVIHASSIAVSREHRRAKTDRLDTELLKRSFLGWLRGERDHCKMVAIPTIKDEDAKRPNRERDSLIRERSRIVNRMKAAFVRLGIRGFNPKLKRAAGRLDGLRTPEGEPIPPNTSAELRRDMERRRLVSDQIRQIEEARLERIEQAPSDGPHAMVRLLARVIGVGIETADMLVHEVLSRNMRDRRAVARYAGLTGSPDESGRKRREKGLARSGNARVRRGMIQLAWRFLLHQKDSALTRWFRARTENARGIRKPMIVALARKLLIALWRLVREGVVPDGVVLRPAQ

SEQ ID NO: 205739 - protein, 348 aa, unidentified
MSISLIGMDTAKSVFHLHGVDAQGKVLLKRKLKRDELIGFFEQQPRCTVVMEACGAAHHWARVLRGLGHEVKLIASDAVKPFVKRGKKNDPADAAAICVAASRPEAKFVMAKSSEQQGVLALHSVRSLLVKQETMLANAMRGLATEFGLVVPKGMGKLEELVALVEEDQSFPEQASRAFAELREHCRGTTERIAALEKQIVAHARQHDVARRLATIPGVGPITASLITATVGDGIGNFRSARHFAAWLGLVPRQHSSGGKTRLGKITKAGNGQIRTLLVLGATSMVYRAAHWDSAAGKWVRGLLERHPVRHVTVALANKNARIAWALMTRNEVYRAEGGAAPVATATA

SEQ ID NO: 205740 - protein, 337 aa, unidentified
MKLYCGIDLHANNSVVAVLDEGDSAVYEKRLPNDLSTIIDVLRPYQADLTGCVVESTYNWYWLVDGLMEAGFPVHLAHTGAMPQYAGLKYTNDFSDARHLAHLLRLGILPTGYIYPKEERALRDLLRRRLLLVRQKTLHHMSLQSMIARHSGQRLCANEIKALETKQLADFLPPPILLGGQITHQARCWMDAAIKRIERELQKRVQPRMDYQLLQSIPGVGPALGTTIALETGTIQRFSGPGNYASYARCVRSEKISNGKYKGQGNKKNGNKYLAWAFMEAAHYGAIWNPQIKRYYQRKQAKAHILVAKKAVANKLARACYHMLKRGEMFDVTRAFG

SEQ ID NO: 205741 - protein, 319 aa, unidentified
MIEAFLGIDISKKTFDVALLVQDKISSHKFNNNIQGFQSLLAWLKKKEILLLQACMEATGIYGQALAEFLFAQKISVSIVNPARIKGFSQSELARSKNDILDAKLIARFCKLIRPKLWQPIPQSIKVLQQWVRRLDDLIKMLRQEENRLDVAEDCLKKHLQKNIKHLENSIKEVRQIIKTHIHQHPELKKKSELLESIPGIGEATIAQILAFIGDVSKFNNAKEVAAFIGLNPKQCQSGTSVNKRARISKTGDAGLRKAFYMPAVVAMRYNPIIKEFSMRLEQSGKHKMLIVGAVMRKLVHIIYGVLKTETMFKHHALK

SEQ ID NO: 205742 - protein, 371 aa, unidentified
MKKDSTTKFIGLDVHSKTISVAIADEGREGEVRHYGTIENTFEAIDKVIKKLTATGVELKFIYEAGPCGFALYRYLTGNGFTCIVISPAMIPRRKNVRIKNDRRDAMTLARLYRAGELTGIYVPEPEDEAIRDLARTRDDARVAERKAKQRLNSFLLRHNLIYPGKTKWNRTYFNWLGSVGMKYPAQKIALQEYIETVNECTGRVARLSEQIGLAVEEWRMAPMVKALQALRGVSLICATVTVAELGDLSRFQNPKELMAYLGLVPSEHSSGETIRRGGITKTGNGHARRVLVEGAWTYKHHARITSPLIKRQRDLPKSICQISWKAQLRLCARYRKMVARKKPNNVVVIAIARELAAFMWAIAQEVRAAT

SEQ ID NO: 205743 - protein, 327 aa, unidentified
MAKSTEKFTAVTRVGLDLAKSVFQVHAVDDRGDAVVARKIRRGAALEFFGRLNPCVVAMEACASAHHWGRLLIEQGHEVRLIPPAHVKPYVRRGKNDAADAAAICEAAMRPGQRFVPVRSIDDQAELMRHRVRELLSGQRTALLNALRGHLSEIRVIAAQGVQNAYKLKRLVQEGADDYGEVLVPDNVRAVVKPLAMQIQALDAQIAEIDTEIGAAVKRDEKARRLMTIPGIGPVTASAVISTVPDFSAFSSGREFAAFLGLTPRQHSSGGKERLGQITKMGDRYPSASSSSLARLLRSITREATKTPYVAGQARCWSAKRSNTGSS

SEQ ID NO: 205744 - protein, 488 aa, unidentified
MAALSAPLRPQLLGQSLVDKTRKRDPIISYSQKPSQRPTQNNVSNLPQHLQHININAAGIDVGSDRHLVAVPEGRDTVSVREFATFTADLQALADWLEQCGVTTVAMESTGVYWIPLYEILEQRGFEVYLVDARRVKNVSGRKSDVLDCQWVQELHTYGLLAKAFRPAEEVCVLRGYMRQKEMLVQTAAMHIQHMQKALQQMNLLLHNVVSDITGATGMKILKAIIAGERNPQVLAKERDPRCRNSTETIAKSLVGNYRPEHLFALRQAVELYEIYQTKIADCEAAIVAYLEQQDHRTEDEPPSPPKPISARDRMRGGTDVRTQLYKMTAVDLFAIPGLAADTLLTLASEVGLDISPWQSEKHFTSWLALCPGTRKSGRRVLSNKTRPSANRAAQAFRMAAATQARAKTALGAFYRRIRARSGGREAITATAHKIARIFYSMLKNQTEYIEIGQAAYEQKFKERRLRSLKQQATALGYQLTPIAARSF

SEQ ID NO: 205745 - protein, 342 aa, unidentified
MDYFAGLDVSLEEVSICVVEGAGSVVREARVSSEPEAVARWFAAVGLPMARVGLEAGPLSPWLHSELVRRGLPAVCIETRRMRSATALMAVKTERIDARAIAHAMRVGWYTPVHVKSAASQELRLLLRNRKTVQEQRVALDNEIRGSLKAFGIKLGRVSEARFSEAVARAIGAVRPELLKMVEPLLKLRLELRRAYAVLHRQMLSAARQSPICRHLMTAPGVAGVVSLTYMTGVDDPVRFRRSSDVAPHFGLTPRKYASGTIDRNGPISKAGDEMVRQALYQAAHTLLTRVQRWSALKAWGMQVAKRRGLRRATVAVARKLAIILHRMWTRGETFRWAAKEA

SEQ ID NO: 205746 - protein, 364 aa, unidentified
MTRYIFAGIDLGDKNSVARIAIDRNSSQRFGFVNTRSGRERLFREVKRRSQEAGGAKIVMAYEASSCGFVLRDHAQANQIDCHVLAPTKMEKSVEQRKQKNDDRDAEDVLERLRGHFLAGNRLPTVWVPEITVRDDRELVRTRLAAADKQTQIKAQIQMLLKRYGLEKPSDIGSSRTVQYRKWLQALSESTGLGSGTRQSLASLLRQLTALEAELQHLDKLLAELAKQDRHQPIIKALTKEKGVGLLTALVYRTEIGHAGRFRRGRHVGKFVGLTPTSHESGQQSDRKGHISRQGPPRLRRVLCQASWVHLRHDAHSRQFFDRLVSRNPKKKKIAVVAVMRRLAVRLWHRMREAELNLAEYGSR

SEQ ID NO: 205747 - protein, 358 aa, unidentified
MITQANGKVDKSIRTFATTTAALLALADWLASLQVSYVAMESTGVLWRPIYNVLEDQFELILANAHEIKALPGRKTDVRDCEWIADLLRHGLIRPSFIPAKPVRVLRDLMRYRKSLVYQHTQQINRLHKVLETANLKLTSVVSDVWGKSGQSMIKAIIQGESDAQALTELARGTLRGKLPQLQEALEGRIQPHHRVLLQQIFAHLQFLESSMQQVLKEIEAQMDPYQEVVELLMTHPGVQAVAAMGVVWEVGIDLSRFPSAKHFASWIGVCPGNHGSRRQTQTWENHQGQCVSARVIGRNRLGDKSYQRQLLIGEVTSVSSSHWQNQSDRGGLSHRCRELLSYDHQASSVSGAGSELF

SEQ ID NO: 205748 - protein, 402 aa, unidentified
MNCVGIDVSKGKSMIAVMRPFGEVVVSPFEVLHTDSELSELARLLKSLDGETRVVMESTGNYHAPVAWLLHDAGLYVSVVNAMLVHDYGNNSLRRAKTDKKDAVKLANYGLDHWLTLPRYVPDEDTRLMLKTCYRQYQQYSKVQTMLKNNLISLLDTTFPDANRLFASPPRADGSEKWVDFVDAFWHCECVCGLSEKTFITRYQKWCRKHGYNFNENKALDIYASACGHFGVMPKTDTTKLLVEQAISQLRATSAALAALKQEMQSLAASLPEYPVVMGMFGVGPSLGPQLMAEIGDVRRFHSKKALVAFAGIDAPPYQSGQMDVRSRSISKRGSASLRRTLFLVMSVILQRAPMDEPVYQFMSKKHSEGKPYRVYMMASANKFLRIYYASVKAYLDSMEYD

SEQ ID NO: 205749 - protein, 384 aa, unidentified
MSDVVIGVDPAKRSHAIEVIDDRERALAAGVFDNNNDGYRQMREVARRFPKRVWAVEGASGVGRQLAQRLVADGERVVDVPAKLSARVRSLSTGHGRKSDPADAHAVAVVGLRKSGLTEVVVDDETVAFRLLSERRRDLVRSRTETVNRLHQVLMELIPAGAPQKLTATKARALLATVRPRDVAGKARRQLAADFIDDVTALDRKLKTIEKRIAEAVEATGTTLTDIVGVGPITAALILGEVGNVARFPSKHHFATYTGTAPLDASSGDVVRHRLSRAGNRQLNHALHIIAMVHKRYDARGADYYARKLAAGKGTKGALRCLKRRLSDVVFRALVDDQTRKVREGHLGATLTSSAADLIPMASTSDKPLPGLTTDLTPVATAMS

SEQ ID NO: 205750 - protein, 424 aa, unidentified
MNFKMQNKQNQLIERITDQHLVVGVDIAQHVHVARAVNFRGIVVGKPLSFENNEEGFTRLLNWIQELKQMKNLDTTIVGMEPTGHYWINLSKWLVKQNMDVVTVNPHHVKRNKENRDNTQSKSDKKDALVIADMVKNGYYAFVRSTSESFEKLRVLMANRDVIVKRLVSSINQINRWVDVVFPELRQVFKDVSCKGAIATLRLFPTPAELCSLQPQDIVTGWKSCMKRHSGHKKARSLLVLAKRSIGTKQALDAYKLHLEQLLEEYDLASSQLGRVTQEVTNVLEQIPFVKQILAIKGISEISLAGILGEAGDLSGFAHGNALLRHAGLHLAEASSGKWKGQIVLSKRGRSRLRRYLFLTTMSLVMNNPEFKALHSNNVKVKKIKKMKSIMKLCGKLARVLVGIARNGSTYKPEMIFPLEQLAA

SEQ ID NO: 205751 - protein, 343 aa, unidentified
MQSISTIGLDIAKSVFQVHGVDAAGQVIIRRQLKRRFVLSFFEKLPPCLVGIEACASSHYWSRELQALGHTVRLMPPAYVKPYVKRQKNDSTDAEAICEAVTRPNMRFVPTKTIEQQSCLMLHRVRHLFIRQQTAVINSIRAYLAEFGIVAPVGRRGVEQLLEVVADPADRRVPEVARACLAALGGQLRALKAQILEFDRRIIAWHRSNATSKRLDAIPGVGPALATALVASVADAKTFRSGRDFSAWVGLVPKQNSSGGKDKLGRISKQGDRYLRSLFTAGALAVIRYAKIHGTSHRPWLTALLARRPTKVAAIALANKLARMAWAMMARNEPYKEPAALTA

SEQ ID NO: 205752 - protein, 412 aa, unidentified
MEVIYARCCGLDIHKQTVVACVIVPGPERQPRKEIRTFGTMTADLLALSDWLAAQGVTHVALESTGVYWKPVWNLLEGSFELLLANARHIKAVPGRKTDVRDCEWIADLLRHGLLKASFVPDRGARELRELTRYRTSLVRERTAEANRLQKTLEGANIKLAAVATDILGKSGREILAALVAGSTDAAALAQLAKGRLREKLPALERALVGRFGAHQRFLVAQQLAHLDFLDAAMAEVSAEVAERLRPFEDALTRLDTIPGIGRYVAETLVAEIGTDMSRFPTAAHLASWAGMCPGNNESGGKRRRGKTRKGSPWLRALLVQAAHAAARKKDTYLAAQYRRLAARRGASKAAIALGHTILVIAYYLLRRGTEYQELGPRYFDEHDRQAVERRLVRRLEALGNKVTLEPAHPAA

SEQ ID NO: 205753 - protein, 380 aa, unidentified
MRRVSGLDVHKDSVFLCIVDDDGVVFQSKYGVLTTELEQMAGVMMEYGVEEAAMESTSIYWMPVWRILEPYVALRLVNPFFIKQLPGKKSDVKDAEWIATCLQKELIKGSYVPDELIQQLRQYDRRIFDLSKDIVYKLTKLDAALQRCNIRISNYVSTTKGKAYQEIVRLISEGKTDSEELVKHIHGRTVNRIGKDVLVSALSGVISAADIDTIRQLREEVELAQRHKDECQAKMDAICEQYFPKQYANLQTIPGVQARSATAIIAEVGANMDAFQTAAHLVSWAGLKPRNEESAGKIKSRRVTHGNKYLRKTLIECSWSASKTHGCYYNRFSYIQCNVRHKNKMKVQVAIARKMLTAVWYILHDNVPYRDCMPDIVPAE

SEQ ID NO: 205754 - protein, 343 aa, unidentified
MNVDVLGIDLGKNSCSVVGLDPTGRVVLRRRMRRESIVALAAKLSGCVVAMEACCGAHHLGRLLAAQGHEVRLMSPEYVRPYVKAQKNDDRDAEAIAEAATRPTMRFVALKTEAQLDVQVLHRVRDRLVSQRTALTNQMRSILLERGIAVPQGRRRLLDALQALSDQPDGSGVGPRVRLLLGDMLDQWRGLDRRIAALDDEFAAMARNDPAARRLATIPGVGVLNATALVAAIGDGRTFSRGRDLSAWLGLVPRQASTGGRPKLLGITKRGSKYLRKLIIQGARAALPSLSRTATPLGSWLRGLLSRAHGNTVVVALASKLVRIAWALLRKETVFAAGRLAAA

SEQ ID NO: 205755 - protein, 415 aa, unidentified
MLNALLPICCGLDVHKRSITACLLKTSASGEPTQAMRTFGTFTPELRALAQWLQAEGCRHVAMESTGVYWKPVYNVLEPICEQLLLVNAQHIKNVPGRKTDMKDAEWIATVLQHGLVRGSFIPPQEIRELRELTRYRSTLVRERAAECNRIQKLLEHMNIKLASVATDVLGKSGQAMLKAICRGEEDTAELANLAKGRLRAKIPQLMDALQGYLTETTRWLLRQQLHRVAELDAAIAELDAKIEEVGRPFAEVLTLLDEIPGVNRRVAQILISEIGIDMSRFPTSHKLAAWAGMSPGNNESAGKKKSGKTRKGCSWLRAALVEAGWAAGKMKKGYLQAQYHRLGRRRGKKRACVAVGHSILVIAYTLIRDRKHYTDLGDDFFERHSGERLKTQLVRRLERLGYKVTVEPALTPAA

SEQ ID NO: 205756 - protein, 339 aa, unidentified
MRAKCNDDLSTVNFSTIGLDVHKNRLVACAVHVQHDAKGREVHEKEYFESTGTYSGRQRLTEWCSSQNADLILMESTGIFWKAPFRDLEKADLHPVLINPRIFNRGSDKRKTDKSDATWLANLARLGLYRASFIPAEPYRSLRLVQSQIKSLVAERQRLKNRLVKVLDDSGFRFTVAFADIGGASSQSLIAGILEDAPREELALMIDPLCKKSIEEILDAVSGELSQINKDIVQSILRLIETHTKEIETLEQTVIRELKKCEKVKQNIRLMTTIPGVSEKSAQLLMSMIGPDFVENFSSPHAFARWLGVCPGNNESAGQIKSGRTPHGQRLIKKVLRNS

SEQ ID NO: 205757 - protein, 389 aa, unidentified
MPSVSERPEAPTAIQTHLAASFVSLELSRSIWLITSLSPGSGEKMSKHSVRAGDVAALLARFSELKRKASERTGKSFPIVVIQEAGLDGFWLHRVLQSEGVESHVVDPSSIATSRRRRRAKTDRIDGEALLRALLAYKRGEPRVCAMVKAPTPEEEDRRRLCRERKVLIAERVKHVNRVKGLLFSQGISGYEPLRRDRRQRLDELTTGDGRPLPVHLKTQIRRELDRLELLLDQIKEAEAERDALLAAPQPAAPAPAGRMLLEFKGIGAELAAVLWLEALFRHFDNRRQLASYAGLAPTPWQSGSVDHEQGVSKAGNPRLRTSLVQLAWLWLRHQPQSALTLWFKERVSGNGGHFKKSTIVALARKLLVALWKYVTAGVVIDGAVMKDA

SEQ ID NO: 205758 - protein, 363 aa, unidentified
MQNSITWVGMDVHAENIVLAAVRGSSDAVLFRAEFLNTPKGRERLAGRLTENAPVRCVYEAGPCGYDLRRFLEDRGIECDVAAPALIPRKPGDRVKTDRKDAEKLARLHRLGELATVFVPTPAQEALRDLLRTREDAREDLLRRRHRLSKFLLRQGRRYTGGQRWTTRHWDWIRAQPFTDRNAETVFREYIVAIEQEVERIRRIEQQIVEESKSPEVGRAIARLRALRGVDTITAMTIITEVIDLNRFRSPRELMAFIGVVPRERSSGGRERRGSITKTGNAHIRRVLIESAWHYQRLPAGTPKTILVRREGQPPEVIETARKAELRLHRKFMKLLGRGKPKGIAAVAVARELAGFIWALGRG

SEQ ID NO: 205759 - protein, 457 aa, unidentified
MVEKLQAQAIDWDSLPPLNVNAAGLDIGAAEIYACVPVGRDPQSVRRFDTFTVDLQSLAAWLAACHIDTVAMEATGVYWIPVYEILEAAGFEVYLVNARHIKNVAARKSDVSDCQWIQRLHTYGLLRASFRPPEEIAALRALVRHRDTLIQYRAAHIQHMQKALQLMNVKLTHVISDITGLTGMTIIRAIVAGERNPKVLAQYRDPGCKKSQAEIAKALEGHYKAEHVFVLRQALELYDFYDQQIQACDREIESCYQSSEPRDLDGQPPTTAPKPTQRKPRKGQAHFDLASSLYRMVGVDLTRIDGIDALTAQTMISEIGLDMSKWPTVKHFTSWLGLAPNPKTSGGKVLTNHARRPQNRAAQALRIAAQTLARSQSALGGFYRRIRAKHGAAPAVVATAHKLARIVYHMLKYRQDYQDLGADYYEQQYRDRVVRTLSRRAADLGFRLEPVPVPQVS

SEQ ID NO: 205760 - protein, 329 aa, unidentified
MFYLGIDVAKAKIDCCLILENSESKKKTKTFSNMPKGFEQLQTWLNHHAANSTQTIILMEATSIYHERLVKYLFNAGYQVCVTNPARARYFAQSMSKLNKTDKADSEVLARFAMTADLHFWQPLPEHIQLLNALLDRRAVLCEDLQREKNRLEKAESTFTIEPVLQSIHKSIKQLNKHIQDIDQQIDDHIDQNPDLKNDKELLSSIPAIADRTSLLMLSFLRSHNFERASQAAAFVGLVPIQRQSGSSIHGRSRLSKAGSSKIRAGLYMAAIVATRHNPHIKEMNERLLANGKTKMMAIGAAMRKLVHLCYGVLKHQQPYQENYCINSQ

SEQ ID NO: 205761 - protein, 355 aa, unidentified
MKYYTSTTEYNCGIDLHARQMYVCLMDRQGKKLVHTNVKDNDFAYFLKLIEPYKHSLTVCCECMFGWYWLADACQAAGLTFVLAHALYVRAIHGGKNKNDRIDSEKLAHLLRSNLIPPAYVYPSQQRPLRALLRQRLFYVWRRSELLARIHCHQLAHNRVPAKQSRWTRDDWEERLLKAEIHPLRQLALSNDLAMIRHFDHQIYEVEKELQWQTKQVAAREYALLQTVPGIGENLGLTILYEIGEISRFPTVKDFLSYCRLVKGTVASAGKIKGLRGAKLGNPYLRWAFGEAAVLAKRDHFRIRPLAQALEARMNGNKFKANTVLAIKLARCVYFMLKNKTVFDPDRLVAALARN

SEQ ID NO: 205762 - protein, 352 aa, unidentified
MKHYIGNDAHKKYSIFVTVNENGKTCSPERVPHDKELYRKYLTTLPAGSPIAIESVGNWYWMIEAMEQAGHKPILVHPRKAKLLMGLINKTDKLDSRGLAMLNLNGSLPSVWIPPAELRDQRELSRMRMSMVGVRTQFKNRIQATLAKYAIVIDEVSDIFGKTGRILLSEAIKELPPETQNSVEEQLVLLDQVSGQIEKIEKHIREVVREKPMMQLIKSLPGVGDILAIVIALEIGDVERFGSAEHLASYAGTVPRVSSSGGKTHYGRVRQDVNHYLKWAYIEAASCVALQQQRNTGRHVVELLQRIQKQKGYPKAAVAVGRHLAEATYCMLKRNEPYHEPNLRKTVLSSQG

SEQ ID NO: 205763 - protein, 358 aa, unidentified
MKIYRVQDFVVKGKEVFLGLEDSKSTWKIAVRCERMLIHEVSMEARYPALIGYLRNKFPECAIHLMYEAGFKGFNLYDRLTEDGIDCVVIPPHMVTEPKVNKVKTDKRDAKRLAYILENHDYKDSCYVPDKERREDRQVSRTLMAVQKDIICNRNRVRKLLDFHGIEVPYADKNEWGRKEFCALRELPLSEPVRVGLNALLTILEQLWDQQSILRDYLRGLCKKKRYIKAFEIAKSLPGIGWFTAIRLILELGEDLSHFTNGKKIAGFVGLTSSEYSTGDTERKGRITGMGSGFIRYCLIENSWVAIRKDQALLSKFSRVWRSSGSKKKAIVAVARVLIVRLRACIIAGTPYRIGIVQ

SEQ ID NO: 205764 - protein, 363 aa, unidentified
MLASSWLSRLRTDPVLVFLTPERLVERRFACSHAQARDMKTMSGSSVMVGIDVASAHVDVACLGAVLPSELAHVSNDAEGHSALADALVKLQPGLVLMEATGGYEAALACALQAAGLRVAVINPRMARDFARAMQRLAKTDRIDAATLAEFAAVLAQRPDCERFVRPLSEPEQQDLAALVTRRRQLVAMQLSERQRLRLARPVTRPSIDALLEAIARQLDDVDAEMVRHVEQHHAVMAKLLQSVAGIGRIAAATLIAELPELGRLNRRQICALVGVAPYAKDSGSSRGRRRITGGRFEVRRALYMATLTATRFNPAIRAFYKRLVAAGKLKKVALIACMRKLITHLNAITRDHLNAQNQPFTA

SEQ ID NO: 205765 - protein, 428 aa, unidentified
MNYNQNERLNQLNENILIIGIDVAKKFHVARAQDFRGIEFKKGIKFDNSRQGFAEFEDWKNTLQAEYNKSNVIIGMEPTGPYWLPLARWLQSEGYWTVTVNPAHVKKSKELDDNNQAKTDYRDARVIAQLVKDARFSEPNLLVGIYEELRNAKNIRKMIKHDLKRIKNQMINWLDRYFPEYQEVYVNWEAKSFLYILEKYKLPSEISKLDAEKVYSDVREKYPRGIGQKKIESLIKISRESIGITEGTRMAEKELDYLLRRYNELNLDIEDIANTIENLCEKLPEVEKITQIKGIGITTASGIVAELGDIKSYKNSKQMIKMAGLSLTENSSGTKKGKTSISKRGRKDLRTILYRAVVGMIRTNEAFNKLYIYYRERAKNQLEGKQAIIVLARKLLRIIHTIVIKDIDYDEEKMLGAIRHPEEFLVAA

SEQ ID NO: 205766 - protein, 336 aa, unidentified
MRAIGIDLHKTMFVGCILDGDKKEFHQYKMKEIEKFADSLKPEDILAVESTGNSHYFTEKVKSKVSKIVVVNPAQFKVISRSVKKTDKQDAELLAFYLQKEMLPEVRMTDDYSSQLKSLTSTRDKFVKARSVLKNKIHNILNYQGIISKKEDFSSIKGLNRVLELKLGEGTKFELEIIVDEIKHLNENIARLEEKINSMGSKMKGFENITSIKGIGAKSGTILLSIIGNINDFADEKKLAAYFGLVPKVSQSNESIHQGRITKHGSKLGRTTLVQCSLIAKKYSPYLKNFYERIQKKRGSGKAIIATARKLLSIIFNTLKNNWVFLDFPNFVLRQV

SEQ ID NO: 205767 - protein, 335 aa, unidentified
MELTNQSVGIDVSKDSLEVKFKEKSTKGIKIKGSSKFDNTSNGFISLLEWCNKREKAENVVYVLEATGVYHEEVLYFLFGQGKKVSVELPQRIKYFAKSKGVKTKNDLIDSGVIADYGLERELKVWQPPGKEFKTLRDLSREHNTLTNSKSEAKNRLHAAKHSHDKNARVIERLQSTIKFYTNQLAEIEKDIKTTVNADKELSGKIKKVATIKGVGLMTVVKIIAETGGFYLFQNINQLISYAGLDIVENQSGNHNGKTWISKKGNADLRTALYMPALSAIRFNEKMKSFNERIMETHSYKKQGIVAVMRKLLILIYTLWKKNEEFSLNYKWGQA

SEQ ID NO: 205768 - protein, 316 aa, unidentified
MAMHVEPSLIGVDVSKAELVIRQSWSSNLVKLGNERKAIDSYLKALTGPVCLAVEATNIFHVLLIERAHALGHAVYVIDGLRLKRYRESMGGRAKTDASDAALLLRYLTHEKSDLRPWTPPPAGYATVQRLLRRRSVLVQAQTTLRQSLQCLPELKASVRAMLARMKHMQHLIDQRLAQTLKRQGWKGDVRRCQGIEGIDPITAAALTLIFHRGAFKSADAYIAFIGMDVRVRESGTFSGRRKLTKKGDPELRRLLYMAAMTACRSSTWKPFYERALARGLSCIQALVALGRKLARIAFALLKTQSDYVPKVVQVA

SEQ ID NO: 205769 - protein, 367 aa, unidentified
MKKVSTAAGKATKNFSQPKLTIGLDLGDRSSWYCLLDEVGEVLQEQRLGTTPKAMREVFGKMPRCRIALETGMHSPWVSRVLSELGHEVIVAHARNVRLIGESRKKDDRLDARTLGRLARIDPQLLCPVKHRSAKAQADLTVIRARAGLVRARTALVNTARGLAKSYGERLRGCNVRNMNPEKAEGLSPELQTALQPLLAGIESLSERIRECNDRIEKLAQESYPQVALLKQVKGVGTLIALTFLLTLEDAQRFRKSRDVGCYLGLQPGRRNSGQSEPQMHISKEGDPYLRTLLVQGAQHILGPFGADSDLRRWGLKLAERGGRNGKKRAIIATARKLAVLLHRLWVSGEVYEPLRNSNQRAMLAAA

SEQ ID NO: 205770 - protein, 382 aa, unidentified
MSGKKQNSKAVSTPTQLYLSFELGEQDWTLGFTVGLGQEPRKRKIMARDLKALEQEIARAKQRFGLPEAAPVVSCYEAGRDGFWLHRYLVAHDIQNRVVDSSSIEVNRRAKHAKTDRIDAGKLVMMLVRYALGEHKLWSVVHVPSVEAEDARHLHRELLALKRDHTRHVNRIKGLLSGQGVSLTVGTNFLHALDTVRLWDGAPLPAGVRARLEREYTCGQAIHQHILQLEGERAELLRTSKDASVEKVRRLLRLCGIGDNSAWLYVMEFFGWREFHNRREVGGLAGLAATPFDSGDQSRDQGISKAGNSPVRAMAIEIAWCWLRYQPDSDLSRWFNERFGKGGKRLRKIGIVALARKLLIALWRYLENGVIPAGAQLKPSTA

SEQ ID NO: 205771 - protein, 376 aa, unidentified
MQAAQVKAYEVNTSLYMAMELSNSKWKLGFGNGTKIRRKSIDARDRQRCLEEVALAKVKLKLPADAPVVCCFEAGRDGHWIYRWLESEGFEVMEIDSSSIETARGRKHVKTDRIDVEKLLDLLIRFHCFGLRQAFRVVRVPSVSAEAGQRLHREDEYLIRQRTRISNRIKGLLIAQGVDEVSLKGDFASYLDRVRLWDGEGLSVELKMELQHMHAQLTLFDGQLKEMVSAYAEELAADTPLAEKRRRLQSLKSLGPKTSRILAAEVFGWRSFANTKQVGAFAGLTPTPSQSGDSDTEQGISKAGNRRVRRVMIELAWLWLRWQPDSALSQWFNRRFAHGGKRQRRIGIVALARKLLIALWRYVEHGVIPEGALLKG

SEQ ID NO: 205772 - protein, 346 aa, unidentified
MKIVGCDFHPSFQQVAILDISTGEVEELKLMHATGEAERFYRELASPVLVGMESMGNSLWFERLMERLGHELWIGDAAQIRASYVRRQKTDKRDAAHLLQLLIEKRFPRIWVPSHLERDQRQLLLHRHRLVQMRTRVKTELQHLALNQGLQQKRSLWSVRGRADLEKLPLEGWTRRRRLDLLKVLDMLETQVGELDEAAGKVASANAGARLPMTQPGVGPITALAFVVTIGDVARFKRGKQVASYLGLIPSERSSGQKRRLGAISKQGNVFLRTMLVEAAQSAVRHDEQFKKEYAHRCHSKPKGVAKVAAARKLAVRLYWMLRNQTPYTHAVHNEGSPSHPVVGAS

SEQ ID NO: 205773 - protein, 338 aa, unidentified
MRYVGLDVHWRQSTICVLDGRGQKLSTQTIRGGWSKVLEELGKIKKPFAICFEASSGYGYLFEQLSTIARRVVVAHPGQLRLIFRSKRKNDRVDAEKLAKLLFLDEVPPVHVPSVEVRSWRSMIEHRRKLVAEQTRTKNGIRSLLRSQGIEAPRGLWTRRGLTWLAAVKLATDLDTLQRDIMRERLESIANMIRRVERVLNRKGTAHPGVQLLRTIPGVGPRTGEAVVAYIDKPGRFHSNKAIGCYFGLIPKQDASGRSNRLGHITREGPSVVRSLLVEAAWQGIRRCPQIREVYERIMRDDKQRKKIALVATAHYLIRAMLAMLQTGEVWRYSAEAA

SEQ ID NO: 205774 - protein, 422 aa, unidentified
MKQVLTEERFAAFIGIDWADAKHDLCLQADGCETRESSILENTPEAIAAWASALHRRFAGKPIAICLELNKGPLVYALAEHDFVVLFPVNPLTVARFREAFATSRAKDDPSDAQLQLELLLKHRDRLKPLKPSSPAIRALQQLVEHRRRLVGEKVRLTSRLGSVLKNYFPQLLQCFNDIDTTLFCDFLTQWPNLKVVQRARRSTLERFFHARHVRSAALIERRIRTIKTATALTTDEAVIAPNELRALASVAQLRVVLSAIEQFDEQIAQRAQSHPDFALFDTLPGAGPALAPRLLVAFGDQRERYACAADLQKYAGVAPVTERSGQHCSVHWRWRCPKFPRQTFVEWSAKSIHHSFWAQAYYQQKRAQGQSHQAAVRALAFKWIRILFRCWQDRRPYDESVYLRALQERGSPLLKDLVAPT

SEQ ID NO: 205775 - protein, 329 aa, unidentified
MTKNSIVCAGIDTGKHKLDVAIRGVKGQLFELLVENTADGHKVLSAWLREHKVKRVGIEASGGYEQAVVLYLRKKKFVVVVFQPKQVRAYATFNLQIAKNDKLDAALIADCTAAIKEINAPPDERMTAFAKRMTFIDQITEDVARIKTRCESCRDKQILHYWREEIARLERRKKAELKALAAAIREHDDLSKRLDLIESVDGVGLVTAVAILVRMPEIGTVTREEVAALAGLAPYDHESGNHVGERHIKGGRGRLRKSLYCAALPASMRWNHQLVSMYRRLIAAGKLHKVALVACARKLLIFVNTVVERGSPWEKSRAPGKFELGLRAA

SEQ ID NO: 205776 - protein, 449 aa, unidentified
MSKVSPPINGLPVIHERAAGIDIGSRFHVVAVPSTLSDEPVQTFQAFTADIQRMADWLKSIGVETVVMESTGVYWVPVFEVLESAGINVMVANARETRSVPGRKSDINDAQWLQRLHACGLLRASFRPGRDIAALRAYLRHRERLLDYAAAHIQHMQKALTFMNLQLHHVVQDITGVTGMKIIRAIVAGERNPQALAEFRDVRCKSSIETIQAALVGNYQPEHVFALTQSLALYDFYQTRIDDCDVQIEQALAVLKADKPEPEQPISKARHRTKQPNAVNFDVRTTLYQLIGVDLTQIHGIGPFLALRLIAECGTDLSKWPTAKHFTSWLTLSPGCKISGGKVLSAHSRKSNNRLTAHLRLAAVTVGKTNTALGAFYRRLAARIGKAKAVTATARKIAVLFYNAMRFGMHYSDPGADQYEQRYRERVIKQLHRRAAEFGFVLQEVECVS

SEQ ID NO: 205777 - protein, 450 aa, unidentified
MNSSPQTVLPVASGLDVHKSFVVAVIKSTSNQGTVNTVKKRFSTFRADLEDLRDWLLQNDCHHVCMESTGKYWIPVYNVLESAMNEVRVCNPKWLSLVKGEKDDNKDAARICDLYRNGMTKSSYIPNKQIRTLRELTRLRQKYVQQRTSDHNRLINCLTVSNYKLDMVFSNVRGRSAFLIINLILSGEPYTDEDILKCVSSRCKAPREDILRACHGFELDKLQREKLRIIQDHIDGLTKEIEKLDQLIAEACEDHKDYIRLLMTMPGVSEISARKIIAELGTEMDQFVKGSRVAKWAGLAPGSDESAGKIHSRHITKGGKYLKPVLIEAAWAAVRSKNPYYRCKFEILSLRLGKKRAIVAIARKMIISIFHMFSDMKEWRPKDCDDCFVPRSLSVQKESRKLNKTVNTLKAMGLTEHQILKTIAAGLDDPEISDDEGNRYDLIIGEYRTA

SEQ ID NO: 205778 - protein, 339 aa, unidentified
MAIVGGLDLHRKQITFDVLDTDTGEVRRGRISPAERQLFRDWLAGFGDVQVELAVEGCTGWRFVVEECQAAGAVAHLAEPADVAGLKGRRQHAKTDRLDARHLRDLLCDGRLPECWIPPQLVLETRAKVRLYKDLADQRTGWQQRMHATLYHLGAPAQRDLLARDPARLPRIEGLSPAARQSITVALRMIDALDVELDRLRGELVGFARRQPGCRALQAEYGIGPLTAVVIWCEMGDARRFARSRDAVRHAGLDVTVYSSDNKRSPGRLSKQGSPLLRWALYEAGRYGARANSPDHDYYTVVAARLGGQRAALSVARKMARRCHHRLRALGEEALAPAA

SEQ ID NO: 205779 - protein, 352 aa, unidentified
MISSQITAIPKLFIGMDVHKKSWTSHFKTDLFDYKTVTMPADPFVLHDYVDKHFPDHEVTCCYEAGCCGYWIARTLQQFNWNVLVVNPADVPRTNKQDWQKTDKIDCRNLCEQLQKSNVHSIHIPDEEQEQLRSLFRRRSHLVRQVRTIKNHIKSQLLYYGIKLPEQFDNPNWSHEMKTWISNISWKFSCAAATMQSRLKQLDFLWYEELHISNELRAYCRKHYRKDYYLLKSVPGIGGIIAAGILAELGNIRRFSCIDQLASIVGFIPGIYKSSDNEICLGLSKRSNRYLRSLLVEATWTAVRTDMALQAYYRKHAHKEPNKAIIKVAHKLLNRIRTVIITGIPYQTGIIK

SEQ ID NO: 205780 - protein, 454 aa, unidentified
MGHGINLLFQASQIQIGKQRDIMLKINYMSTLFVGIDVSSKSNVVYAMDFDENKYISSSFSNNQPGADALAEMLSECMNKHSDLNTIIIALESTSVYSIHIANFLSTCELLMPYKPYVYCVNPKATANYRKSYVSMDKTDPMDAFLIADFARVGRTKKCEPWRGGQYLALKRLTRHRLHLAECITRKKTYMVSNLYLKFSELQLLEGDEQPFSNTYGVTASAVLTEFMSPQEIMDSSEEELLEFLAEKSRNRISDISKTSDLLKKAARDSYRLDKCMYEPLNISLASSFNCIQTYQKEIKLIDQAIEKCINGMNPNAFTILKSIPGIGPVWAAGILSEIGDITAFHSSDALAKYAGLTWLKNDSGDFVSEDNRISKAGNTYLRYYLGEAVNSVRRHVPEYAEFYSRKYAEVTKHQHKRALALTSRKFVRLVFGLLVKNQLYTGEKLDAELNTES

SEQ ID NO: 205781 - protein, 452 aa, unidentified
MSRKKKMEMEIINQNAAGIDIGSRSHFVAVGQALEDVKEFGVYAEDLTAICVHLKQYGITSVAMESTGDYWQNLFTELIKHNFDVILCNGKFTKHAKGKKTDVKDSRWIQKLHSLGLLTSSFLPDETTGTLRTYCRQRINLIHQASTASRKMQKYLKFLNFRLDVVVKDVCGLTGLKIIEDICKGNLDPDLLAEHRHYNCKKSKEEIAKALHGNNREDFLFGLKQEFESYEFFQKQIKACDRKIQKFVNNVLKKTPNQLKLKTSDKPYKRFNKNTVNIKNFNQVAYQYFNGVDLLAIEGVSYATILSIMSEIGPEGFRKFKTSKEFVSWLRLAPNNKISGGKVLSSRVPKGSNRLKIALRQAANAIGNLKDTDLSDFFRRIAYRKGRQAAVSATARKLGVIIWTMITKKVPYKPSKEYLFLDQKRKLGIVKRIQKQITKFELSKNNFEFVTD

SEQ ID NO: 205782 - protein, 427 aa, unidentified
MYRIAGIDVHKKKLAVVVTDVEVHGEYQFERCWFAANPEQLRLLSQWLAEHQVEEVVMESTALYWKPVWGALERYWQPICQKREGAGPTSGILHLAQAQSNRGPRGRKKDFRDAERLVKRLVADELKLSFVPDTEQRLWRTLTRRRYQLTRARVQLQNQLEALLEEAHLKLSSIVSDLLGVSARRMLQAIAHGETNPEALAGLGDRRLRANPAQLCDALGACTELHPVYRRLIKMMLEELKVIEEHTAELNQELATLLRPHQDAVERLAEVPGLGVDSAQQILAEVGAKAATFASDKNLCSWVGVCPGDEESAGESSSHRSPQGNRQMRRLLNQAANAAVKSKGSIFEIAYRRLVPRLGHNQTIGAVAHRLCRLIWLILHKGVRYEERGPAVSQRSRQNRTGKMIRELRMLGYRVEFLNAVPSVPIP

SEQ ID NO: 205783 - protein, 454 aa, unidentified
MQKQDSYDYYVGIDCAQNKHDFAMKNNQDKFLIKKGHFSNTLQGYEKFLNTVLSKCLDKDKILFGMEVTGIYGTNLYERLKSDGYHVVMIFPDSVKNYRDYKRLNKTDKIDSACIAELLLNGDAQIVHAEKNGYTDLKAYIRRRNALKVTCTQETNRFLAKVCLYFPDLLKVFPSGRATLKAIFSIYPTPYSIIEADFNELVSVLQKASKNKFGVDKANELIHAARNSIVVRKSTSDGELYNIHSLIDSIDSLESEIRNLEKIIDSKAEEFPAYHVLLTLTGCGKITAATIVAEIGDISRFHKASQIVSLAGLYGDNSKSGSSVNKRGKISKKGSRYLRHAIYMVAEFARRNNPIFKAYFTKKKNGDRTKHILAVNAVANKLCKVIYSLMKNQSTYIIQYRDLAKLSESTQNEFFQNAETDFSAKTRRKKYLYEDEYGELHEFVFKSIKTALIE

SEQ ID NO: 205784 - protein, 427 aa, unidentified
MPRSCTLLDSFGMGGDLLSKLFVGIDVDLRKNTVHYMSANGDTLKKFKVPNNIDGALALVDNIVELSTRHSLQEVVLGLESTSNYGYHLAALVKNSEKLAPLSPKVHVLNAKVVHNFKKSYSDLPKNDGVDAWVIADKLRFGRLPQEVFMDERFLALQRLTRTRYHLVNTIKREKTYFLNNLFLKFSSLRQEKIFSNNFGVTAMAVVEEFLSPDEIAGMPLEELVSFLEQKSKNRLADAEGVAKALQRAARSSYRLSKSMADPVNACLASSISVIKALQSEVKKLDRLIEEHMKAIPQTLTSIKGIGPVYSAGILAEIGEVRRFKDHKALAKFAGLVWNEHQSGEWKAEDIKRIRSGNKYLRYYLVEAANLVRVHDREYAEFYRAKYDGAHTHKHKRALVLTARKLVRLVYALLRTNQLYTPRKRGG

SEQ ID NO: 205785 - protein, 448 aa, unidentified
MIKKELRSYTWRDLETNGKFAKNDKLSFITDDMLIAGCDIGSETHYIRAIDVRGRELSRGAFEFSNTSEGFANAKEWGLALAAKNDKKQIVLGLEPTGHYWFALAAWMISNGISVVQVNPYAVKQSKEIEDNSQRKDDRKDPKLIANLVKDGNYGMPYLPEKVYADMRRLSMFRDQLTEDRIRNINRLHRELKIYFPEYMDAFGKIDGAFTLEVLKVSAIPSDITALGAEGIRNIWHNAKLRGRGYNRANEIVSYAEKSVGLTDGTDAGREAVKWYAEQILKLDEQLAEIESALHEKCREIPYAENILAINGVGENILAGTLAEMGDISRFDDVKEIQKLSGMGLVACSSGKHKGQTKISHRGRKRLRYWLFQAAKSAVSHADEFKQLHEYYTTRSNNPLKKMQSLVVIACKILRVIYTILKTGTTYDPQKLLKDIKHPAASQAPMAA

SEQ ID NO: 205786 - protein, 360 aa, unidentified
MDKIHDTSLSFKDQDFFIGIDVHKRQWTLSIVSMNMLLKKYLSIDPSPSVLLKYMQKHYPDGNYYAAYESGFSGFWAVRELNNSGIKCMVVHPSDIPSSQKERLNKNDRVDSRKLSRSLSNGDLIPIYIPEKLAEEYRYLNRHRFKTIKDQTRLKNRIKSALHLFGVTIPLQYQERRWSGVFIDWLLTIKFDTEYAQFAYDDLVDQFIQIRTRITQQLRKMRVMAKEQEPFNIIIPLLLSVPGIGFITAMTLVTEIIDMNRFKTLEKLASYVGLVPSMQSSDETEINYGISPRRNKYLRTLLIEAAWKAVKKDPALTMKFNQLSRRMNRNKAIVRIAKILLNRIRYVWKNQKPYVLSVVS

SEQ ID NO: 205787 - protein, 346 aa, unidentified
MGGSPNSYVVSKTGSASTGTPKLYYSSEVEMAEITIQINVGIDVSKDWLDVVVIPSGETWRTENRDEAIRELIKKLEQLQPERIVVEATGGYEQMLTAQLYRAGLPLCRVNPKRTRYFARSMGLLAKTDTLDGKVLALFGERVKPPLTRLPSEKEQVLSALITRREQISNFLVAERNRLDTAPKKLHTSLNEHITWLKKELKQLEGEIDDFVNDDPDFKEKSDLLVEVQGVGKKTAAKLIADVPELGACDRKQIAALVGVAPYNRDSGRQSGQRFISGGRPDVRSILYMATLTATRRNPVIRVMYQRLLKAGKKKKVAIVACMRKLLTILNAILRDRSHWKIAFSA

SEQ ID NO: 205788 - protein, 337 aa, unidentified
MKYCGIDLHSNNSVVIVSDEEDRIVFSKRLPNDLGQIRAALEPHREDLAGVVIESTYNWYWLVDGLMDTGYQVHLAHPSAIKKYEGLKHSGDFADATYLAHLLRLGLLAEGYVYPREERGARDLARKRLQLVRYRTAQILAIEGILMRQTGARLKGEAVKRLTAEQVDAFAFAPDVSLAVEANRAVSQTLSQQIEALEKRLQQRVILRPEYRLLKTVPGIGEVLATTIMLETGTISRFTRVGNFSSYCRCVESLKESNGKRKGEGNTRNGNKYLAWAFVEAANFALRCCPQARSFYDRKKSRSNRILALKALAHKLARACYHMLQDHKPFDVHLCFG

SEQ ID NO: 205789 - protein, 449 aa, unidentified
MGNGSGVSRGDRNRNARLERLRALVPVSNAIAGIDLAGKKQMVVVTDHDSKVIARRVFRCRAWDLGSALDWAAGRAAASGWAGVTVSCEPTGHRWRVLGQLAADRSMPFVCVQPMVTSWSRRTEDLTCDKTDEKDAVLIARLTAQLRCYVPEPVDETWGRLRHLGVRREQLITEAGSQIQQMRDLLECAWPAALDTARQPFRSRTWMAAMSVIAGRDGGDFSRTRRLGAARFEQAVRREITRRGGRKPSLRILRALFTALSDPAGVIAHRPGALERVQLLMEDWQLTKTRLNDTEQRMTAVLDELGLTALATSITGLSPVGAAAILAETGDPRRFATARALVKHAGLAPREKLSGAFTGRTRLTGQGRPGLRLAAWRAVWGAQCANPVYRARYQHLTSREQNKLRPTQAQTIIAAAILRHLHAVITTGQAWDPVIATHGTRRNPGTLAA

SEQ ID NO: 205790 - protein, 388 aa, unidentified
MTKVDDLSRSLAALDQDSTLIAVIELSLKSWLVAGLVPGVERRPLKKLAAEPEAVRHLLERWRGEALKAGRRSKRVAVAIEAGRDGFWLARWLREREIEAHVIHPASVAVSREHRRAKTDRLDTELLMRAFLGWLRGERKHCQMCLVPSLADEDGRRPGREHEALTRERTRLVNRIKATMGWLGIAGFNAKLRRAAERLAELRTPDGLGIPPNTQAELRRAIERLRLIRQQIKEIETERLERLERTPAAKPQAAMLLLQRIVGLGLETADTLTNEVLLRPLRDRRAVGRYGGITGAPDESGAKRREKGLARAGNARVRQTMIQLAWRWLMFQKDSALARWYRERTENASKLVRKKMIVALARKLLIALWRYVTDGVVPEGAVLRPAAA

SEQ ID NO: 205791 - protein, 366 aa, unidentified
MGGSHGSRQLCLSVPRPTPSVSQDESDLRFRHPAIIPNWVYSQRGYQLEIETDPRGYAGLLAWAQEFGPVVTFGIEGTSSYGAGLTRFLRAQGQAVIEVLRPVRRDRRFGGKSDPIDAYAAAGAVLSGRATAVPKAGDAGVEMVRALKIAKQTAIKARTQAVNAVKGLVVMAPDPIREQLRNLKTPALVRTCSAYRVDRASDPTSAIKLSLRSMCRRYVALDQEVRAVEKELDALTVRLVPQLRQLFGVGQDVAATLVLAAGDSGDRLRSEASFSMLCGASPIPASSGMVQRHRLNRGGDRQANAALHHIVIVRRRHDEATKAYFAKRKAEGKSKKEIFRCLKRYVAREVYRTLVGPREEVIRSAA

SEQ ID NO: 205792 - protein, 320 aa, unidentified
MVNHPAYVGIDVAKATLDVAVSPTAERWTLAYTEREVAGLVRRLTGLHPALVVLEATGGLEGPLVGALATAGLPVVVVNPRQIRDFAKATGTLAKTDALDAAVLAHFAAAVRPTPRPLPDAATQTLAALVTRRRQLVEMLTAERNRLGSAPRVLRAEIQAHLTWLQRRLARLDTDLGQAIRTSPVWRVQDDLLRSVPGVGPVLSATLLASLPELGTLNRKAIAALVGVAPLNRDSGTLRGRRRVWGGRAAVRAVLYMGTLVAVRHNPVLRAFYQRLRAVGKLPKVALTACMRKLLTILNAMLKHQTPWSPAYAHPACESS

SEQ ID NO: 205793 - protein, 418 aa, unidentified
MKQIDEERIAVWVGLDWADEEHVYALRMAGSERIETGSVKQKPEDLREWINSLRDRSGGGWVAVAVEQSRGALLYALMDYEFLFIYPVNPKSLAKYRQAFYPGGGKDDPRDADLILDYLLKHRDRMRLWQPESPEVRCLRMLSEERRKLVDLRTELTNQLTANLKNYFPQALQWVSPLKETTACEFLERWPSLQELQKPKPSVIRRFFRSHGARGLERLEARILEMRQAQALTRDWAILTAGGMLTQSLARQIGQLNESVALFDRKIEELFKNHGDHVIFSSLPGSGPALGPRLLALFGDDRERFDSSEQVQAMSGVAPLMSQSGKTRIVHYRHACPKFMRQSIHEFAAHSRKWCPWAEAFYQTQVSKGKKHNMAVRSLAFKWLRIIFRCWKDGTPYDDALYMASLKANNAPLLAYLR

SEQ ID NO: 205794 - protein, 316 aa, unidentified
MQSILDLGADVDSRYVMVACAAGSFKPHRIANERKALGAWLRTVPRGSRLAMESTGSYHELLADLAHQAGLQVFIVNARDLRRYGQGIGRRGKTDRIDAEVIARYIAREHQELHAYVPPTDAQRLLARLIGRRAKLVRAKDSIRQSLGGLPALQSEARRLIGHIDRVIARLDLLMQRTVQQTPAVREAAGHIVTIPGIGVLTSTCLGHRFTRLPYTTSDAVVAATGLDPRPEDSGQKEGRRRLSKRGPAEERRLLFNCARSAAQRKPWRSYYDAQLAKGLSKTAATVVLARKMLRVAFAVYQHRQPFNPLLVGGGT

SEQ ID NO: 205795 - protein, 366 aa, unidentified
MRKPSTTALRRGGKLQGEQLTIGLDLGDRSSFYCVLNGPGEVVLEAKVATNPEAMKKTFEKMPATRIALETGTHSPWVSRLLTELGHEAIVAHSRNVRLIGESRRKDDRLDAQALARLARIDPQLLSPIQHRSAQAQADLSVIRARYALVRTRTALICAARGLTKSFGERIRSRYIRGFKPAMGDTLSPQLRVALAPLLSALETITARIREYDAQIEKLAEESYPDVALLKQVKGVGTLIALTYILTLEDPRRFRKSRDAGCYVGLQPGRRNSGQSEPQLHITREGDSYLRMVLVQGAQHILGPFGEDSDLRRWGLKLAERGGKSGKKRAIIAVARKLAVLLHHLWISCEAYEPLHNTRKRRLAAA

SEQ ID NO: 205796 - protein, 496 aa, unidentified
MKKAHAKKEAAGSAKSVAKKARPVKKVKVPKVAAAALEGLEPVHAHAAGIDVGGHENFVAVPAHVIKPGESTVRSFGVFTADQDALVEWLQACQITTVAMEATGIYWMALYDKLEAKGLEVVLVEPRSVKQVPGRKSDVLDCQWLQKLHTYGLLSGSFRPEESIRRLRTLTRHRLELVQDGATCLQHIEKALVQMNLQLHLVVSDIQGDTGMRILEAILAGQHDPKELVKLRDPRCKKSTLAEMEAGLKGHYLEELLFIVGQALENWKHYQKQVAACDQQIEVALAAVPTAKAATLPVPPKPVPPAPATKQEKKLAPQRGNAVNLDPGKLKAQLQRVCGVDLMNICGLGLTSVLMLIAEIGLDMSRWRNAKAFCSWLGLCPGAKISGGKVLSRRTRKVVNRASVILRVAALAAGRTDTWLGRFYRRKKAHLGAPKAVTATARKMACVVYHMLKYQEDFVPLDIAVYELKAAEARQRRLRREAQEAGFELVAIKQLA

SEQ ID NO: 205797 - protein, 348 aa, unidentified
MLAESVDVVIGVDTHRDAHALAVVEARTGAVLAQFAVSADRRGYRQALAQADELGHARRAWALEGSGSYGAGLRRALLARGERVIEIDRPERKGQRSAAKSDALDAVRAARTALARQRLARPRADGRREALRVLMVARSSAVKTRTNAVRQIKALVVSAPDDLRERLRELRGLALVRRCASLRPGSCAEPAQAATMAALRALARRALAALAETREHERALLAHVRALAPELLAEQGVGPITASQLIISWSHPGRLHGEAAFARLAAAAPIPASSGQVIRHRLDRGGDRQLNRALHTIVLVRRQRDGATKRYIERRMTEGKTAREAVRCLKRYLARHLFRLLEATAVAA

SEQ ID NO: 205798 - protein, 357 aa, unidentified
MNAQTAVGWDIHRKFSQLSVVQRDEQGEIRVVKRWRLEHDDRPALRARLAELPPGTPVAMEGAFGWPWIADLLHELKLDPHLGHPPAIRVLAKNEAKADRVDADRLGCFWLRGIFPESYLSTPEVRQLRERLRYRMALVRLRSGMKNRVQAILHRQGVLHTFSDLFGKSGRSFLQTLSLPLASRQALEGWLAQIDLVTEHTAQVEAWMQEHLEADAIVRLLKTIPGIGLILAHVIRAEIGQLSERFPSAKHLTSYAGLAPLANDSADRHGRRHIAAACNHTLRWALVEAAGVALRSKNCPSKLRRLHQRLTCGGRANKSQAKVAVARELGQLVYVIWKKGEPYREPTPPVRPLRSER

SEQ ID NO: 205799 - protein, 406 aa, unidentified
MTEFGKRYIGLDVHKHYLIALGVDDDLNVVIPARRVELTQLESWMKKTLRKQDAVVLEMTTNTWQVYDELVEHAGSVTVVHPPHVALITRSQVMNDKIAASILARLLAKGLLVSIWVPPQEIRELRGLVAQRQKMTRLATQAKNRLHAVIQRHHLLPPAGNPFGESQRAWWQSLELGPLEKLNLQSDLETLEFAEKQQARQTEIMTGLVAEQEPLGRLLQLAGFGVVTAVTVWAAIGDIARFEDAQHLVGYAGLGARVHDSGLTTRTGRITKAGRRDLRVALVEAAHVAANNHPHWKAELARLEPRLGRNKAIVAIARKLLIAVWHVLQGKTDKYAEPEAVAQKLLRFAYEVGKEQRAGQTAAQFARVRLDALGLGSELNSIPWGSKKPIPLPPSKLKKESAVPNK

SEQ ID NO: 205800 - protein, 371 aa, unidentified
MRKDTIVRKSAKTAITRDALDTPAAPKRTIGVDLGDQESHYCILDRHGDVLSEGTVRTTEGGLTRQFKKLVRARIVIETGTHSPWVSRLLERFGHEVVIANARQVRSIYESDRKTDKVDARVLARLGRIDKELLHPIRHRSAQAQADLAWLRARDALVRIRTKLINCVRGMVKSVGGRLPSASGAYFHKKVREYLPDSIRDALSPLLLQIEQLTAQINDYDKQIESMAEKKYPHTALMRQVPGVGVLTSVAFALTIEDPNRFSKSRDIASYLGLRPRLNESGQSSPQLSITKAGDHMLRRLLVGCAQYVLGHWGPDTDLRRWGLGLMARGGKNAKKRAIVAVARKLAVLIHALWVSGEVYDPLRQANQAAA

SEQ ID NO: 205801 - protein, 424 aa, unidentified
MNLTQNDRLNQVTADTLVVGVDIGSQDHFARAFDWRGFEFSKRAFRFSNTSVGFLSFIRWLYELQSKTDTKKVIVGCEPTGCYWLTFQKFLKDHGVLLVTVNPYSVKKCKELDDNSPEKSDLKDPKTIAGLVKDGRFSTSYLPSGVYAEIREASVCQDMIMKQHVRLANQIQGWLQKYFPEYFECYKDWNSASGLMVLKNAPLPQDIIKLGAGGINQIWREAKVRAAGIKRATTLVEAAQNSVGLEGGEAARLEIWILVNDYISKAEQLDRLDAYLNEKIMEVPNVEKLLAIKGVGLSTVIGFIAEVGDIGRFTDPRQVQKLAGLEITKISSGKRKGQPGISKRGRRKLRRTMYESARSLINWNPAFLDVFLYYRNREHRPLGSMQAKIAVACKAIRVFFVIMQTGCDFDEERFRKDILRPEAA

SEQ ID NO: 205802 - protein, 392 aa, unidentified
MIYVGIDVAKDKHDCFITNSDGEVLFKPFTISNNRNGFETLFQRIQSVSDDSNKIKVGLEATGHYSYNLLGFLLDKGLTTFVINPLHTNLYRKSLSLRKTKTDKVDSRTIATMMMSDMNLKSYSDTSYHNEELKSLTRYRFDKVKERAKLKSSVSRLVCILFPELEKLVPTLHMASIYALLSEFPSAETVANAHLTRLSNLLSESSKGRYGKDTAVMFRDAARSSIGSHMPAKSLELKHTIKLIQELTAEIDEIEAAIKRIMDEEIQSPILTIPGISYRMGAMILAEIGDFSRFDSADKILAYAGMSPSTYQSGQLDNCYSHMEKRGSRYLRYALYNATKYVCHWDKSFGAYLEKKRSEGKHYNVALSHATKKLVRLIFAMEKSGKAYLPTT

SEQ ID NO: 205803 - protein, 360 aa, unidentified
MRIVGCDLHARQQTLAMLDTVTGEVVNRTLMHEGNQVREFYAELPRPVLVGIEAIGPMQWFLNLLEELGIACQVGDAAKIRAAEPRKQKHDRRDAELILKLLVEKRFPTIWMPSKELLDLRALLLHRHHWVRLRTQIQNALQAIALANGLRRGPGLWSYDGQAKIAFLPLPPHASYRRSALQATYRKMQEEIENLTEQVAEQAGYRSGARLLMTHPGVGPVTALATEVFLGDPRRFGDGKAVASYVGLIPREYSSGGRQRLGGLTKQGSPLLRFLWGEAGAHAARRDPELQRFYHRKLVQKGLGKARVAVARKLGIRLWIMLRDQIDYDEFCRRGQKQSGDACAGMPETRFGAHRHRPVD

SEQ ID NO: 205804 - protein, 345 aa, unidentified
MQITTIGVDLAKSVFQVHGVDAAGEVVVRRRLRRAQVLPFFAGLGRRCLVGMEACASAHHWARELMALGHAVRLMPPAYVKPYVRRQKNDAADAAAICEAVSRPSMRFVPVKTTEAQAMLSLHRTRALLVKNRTMLVNALRAHLSEFGHVAAQGQGGLAALVALVEKRFAETGIPAMAAPALISLARQIRLLSGEIGALERGIRAAHAKDEASRRLASIPSIGPLAASAIAASVPDAGQFRSGREFAAWLGLTPRQSSSGGKERLGAISKKGNCYLRSLLVVGATSILRRRGALSEEHRAWLERLLAKKPARLASVALANKVARIAWAVLARGGVYRNEAAQAAA

SEQ ID NO: 205805 - protein, 420 aa, unidentified
MKVVYQTCCAIDVHKSFLVATIIKTTSGVEPSYHKKRFSTFNNSILQFKEWLIANKCRDVCMESTGKYWVPVFNLLENDINVTIANPKWVKAVKGNKDDAKDSKWIGELFRLGLVPGSYIPCKPIRILREFTRYRYKLTSCRSSEKNRYQNALTVCNVALDSVVSDIFGKSATSVIDYLIEQSDNSINHEEIASRLLRSLKKKSDSVIESIEGYQMTDSQKYRMRLIRAHMDYITSIINDIDTMLDSLITPYENAVMLLCTIPGVDRNSAITIISEIGTDMTQFSDSKRLCCWAGLTPGNNESAGKKKSVRITRAGVYLKPALVQVAHAAVKSDKSPYYKQKYERIRKRRGKKRAIIAIARMILTAIYQMLSAGEVWNPTDLYKIDMPEPLKEKQKEKAIKQAKKLLICEGIISESQLVS

SEQ ID NO: 205806 - protein, 344 aa, unidentified
MDYYVGLDVSLRSVAVCVIDADGGTVFERSVAREIEDIAQCLAGFEASGLRIGFEAGAMSQLLFFGLKSAGFDVVCMEARQVNAALSAMRNKTDKTDARGIAQVLRSGWFNPVHMKSREAHAVRALLSSRKAVQRKCIDLANEIRGLFRIFGHRLPSRIDQASFDEQVRPIIEADPDLSHALLPLLDARAVLFSTYKELDRRVKRAASHDETCLRFMAIPGVGPIAALTFKAAVDDPNRFTSSRTVAAHFGLTPRRYQSGEMDNPGRISKAGDADVRSALYAAANAMMMRSVASSEIKSWGLRLMRRKGRRRAVVAVARKLAVIMHRMWADNTEFRQRPLEGAA

SEQ ID NO: 205807 - protein, 404 aa, unidentified
MQERTAGLDLASEQHRLVVVDSDGRRLEEQRIVHNEDGIEALARRLGDLGVARVAIEQPNGLVVDRLLDAGITVVAVHPNQLAASRDRYRTGGGKSDGFDAYVLAELARTDMHRFRLLEADSDETKALRALTRTREDLVEQKVALANQLRAQLDAFWPGGKRIFADIDSPIGLAFLERYPSPTDARTLNAKRLAGFLARNSYSGRRSPDELLERLRTAPAGRTGDAELEARRTLVLALVATLKPLVEQIRLLTSQIAGAVRTHDDGEVFLSLFRHPNSVITAAELLAEIGDNRDRHPSSSSLEAIAGQSPVAVQSGKKKVACFRWACNKNLRAAVSVLADTSRHHNPWAADIYQRARARGHDHPHAIRILGRAWLRIIWRLWQDRTPYDPTRHGNLNRLHTAGG

SEQ ID NO: 205808 - protein, 354 aa, unidentified
MHGLKHQMEKRSMDHFAGLDVSVKETSVCIVDETGRIVREVKVASEPEALLAVLKNPAYRFKRIGLEAGPLSQWLYSALAEADLPVICVETRHMRAVLKAQINKTDRNDARGIAQMMRVGLYRQVHVKTLRSQKLRMLLTHRKLLQSKAIAIDNDLRGTLRNFGLKVGVVGKVKFEARIRELVENVPDLAELVEPLLVVRRALREQFVILHRRLLAIVRDDEVCRRLITTPGVGPVVALTYRATVDVPARFRKSKAVGAVFGLTCAKYQSGEIDRSGRISRCGDEMMRVMLYEAAQSMMHSKKWSWLKAWAMQIARRRGMKKAIVALARRLAVIMHRIWVDGTEFRWTREAAVA

SEQ ID NO: 205809 - protein, 400 aa, unidentified
MIDTGDIDVYLGLGVGKGEHHATALTPAGKKTFDRRLPNSEPKLREVFAKLQAKHGTVLVIVDQVASIGALPLTVARELGCHVAYLPGLTMRRIADLYPGEAKTDAKDAFIIADAARAMPHTLRSVDLDDETIAELQMIVGFDDDLAAEATRLSNRLRGLFTQIHPHLERVLGPRMQHPAVLRLLDQFGSPAQIRKAGRRRLVTLIRPKAPRMAERLIDDVFTALDEQTVVVPGTDAAALIVPSLASSLQAVLDQRKLLAHRIEELLESHPLSKVLMSMPGIGIRTGARILIDVGDGTAFPSAAHLDAYAGLAPATRTSGSSIRGEQPSRRGNKQLKRAFFLSAFAALADPASRTYYDKKIAQGKHHTQAILCLARRRADVLFAMLRDGTFYQPPTPITP

SEQ ID NO: 205810 - protein, 350 aa, unidentified
MLTLHPPRGVIIGVDTHKDTHTAAAVGATGNVLEHLTVSADPAGYRRLVAFGRRHEARLWAIEGTGSFGAGLTTELLARGERIVEVDRPQRPARRGGVKSDDIDAVRAARQALAGVGLSEPRSRGEREAIRVLLATRGQAVECRTRAISALHALVISAPDRIRQRLRALPLGQLLRTCAGLRGSVRHSVEESATVLAIRSTARRAIACEEEAAELEAQLATLVRQIAPHLLDQLGIGPVVAGQIIASWSHQGRVRSEAAFAKLGGVAPIEASSGTVVRHRLNRSGDRQLNRALHTIVLVRMRQDPATKAYLQRRLAEGRTVRDIKRCLKRYIARQLFRQLEALPPTLDST

SEQ ID NO: 205811 - protein, 316 aa, unidentified
MESPQNFVGIDVSAKRLDVAVLPAGTHFQVAHTDEGIASLVRRLRELRPHIVVLEATGGYEIAVAYAMSEASLPVVIMNPKVLRHFAKSTGKLAKTDKLDAQVLAHYAQAIQPPVRPLKDSEQMELATLMSRRRQLRDMIVMEGNRRRTSTPKVRGNIDQHLLYLRQLLTDLDREIHDSIRRTPLWHENSDILQSFNGVGPKVSASLIADLPELGTAPRTQISALAGLAPMNRDSGQWRGKRTIQGGRPAVRQALYMAALVASRRNPVIREFYQRLRQAGKPAKVALTACMRKILVILNAMLKNRTYWNPQLPLAA

SEQ ID NO: 205812 - protein, 426 aa, unidentified
MSYRIAGIDVHKKMLAVVVSDVEIESEYQFERRMFSSNPEQLRSLAAWLVEQKAEEIVMESTAQYWKPVWETLERYWKPLCEKREGARRRSGTLHLAQALSNRGRRGRKRDFVDAERLVKRLVARELTLSFVPDAEQRLWRTVTRKKYQLRRDLVRLNNQLESLLEEAHIKLSSLVSDLLGVSARRMLKALADGETNPAALAALAHERLRATPEQLCDALGACTELKPVYRRLLKMTLEHLQILEQQSGQLDQELATLLHPHQDVVERLAEVPGFAVDSAQQIIAEVGPAAATFPSEKCLSSWVGACPGEEESAGVNYSHRSPKGNRHMRRLLNQTANAAVKAKGSIFEIIYRRCVPRLGHNQAIGVIAHRQCRLIWLILHQGTRYEERGPAVTKRSRYQRTWRMIRQLRNLGYRIDDPSYRGGVP

SEQ ID NO: 205813 - protein, 358 aa, unidentified
MLYLGLDVHSKWTTINGFDSVSGQTVFWERINNDRDSFEAVLGSLEGPLCGAMETGTSCWSIYRMLAPFFEKLLVVDPVEVWGRKVRRGAKTDARDAMTLAVKLSRGELCGLYVPDEQTQDLRSLGRAKIQATQLVTKLNNEIWSLLKSWGFGIERSLLSKQGDKILAEAASRLPEHTARVLEMWTRMLHEAQAVVAELQERIEEAASNDEVCQKLMTIPCVGEFTALVMRAEIGDIRRFASARHLVSYCGLCPTLSMSAGKGKSGRLSKACNHALRYVFALRGKCGSRLGRDNPLSQTYWRTAIRHSPNDGGIAVARQLVRVVYAMMKNGTDWNPEHLHRQRQAAEPPPAAAAAGTA

SEQ ID NO: 205814 - protein, 340 aa, unidentified
MDITTLGIDLAKSVFQLHGIDTNGVVVLQKKLRRGAVLNFLSKLEPCLIGMEACATSHYWAREIAALGHDVRMFPPAYVKPYVKRQKNDAADAEAICEAVTRPNMRFVPVKTEEQQGVLVLHRSRDLLMRQRTMILNAIRAHFAEFGAVAAQGARKVAELVSLLREDDNPRLPETARSALVALAVQLDSLEQEVRKIERELLEWHRQNAASQRLMTIPGVGLITATALAASVPDPAVFKSGRQFAAYLGLVPRQNSSGGKDRLGHISKMGNGYLRRLLVVGATSVTRRAPTTDTRTGAWVRSLLERKPTRLVTVAIANKTARTAWALLAKRESYRAAPAI

SEQ ID NO: 205815 - protein, 425 aa, unidentified
MKNKILNTLFVGIDVSSKDNVLCALDFSGNKLLTIKALNNQPGAESILDHILSCLDSNILKYVVIALESTSIYSTHIANFLASNELLLAYEPLVYCLNPKTVANYRKSFVDMDKTDPLDAYIIADFARCGRITSQPWRGAQFLALQRLTRHRLHLIECVTREKTYMVSNIYLKFSELAVGDKQERPFSNTYGATSAAVLTDFLSLDDITYSPIEELVAFVSEKGKNRFSDPLKTATLLQKAARDSYRLDKVLYEPLNVSIASSFNVIKALENEVKVIDKAIEKTIKGLNTTEFQSLTSIPGIGPVLASGILSEIGTITSFNSHDALAKYAGLTWRVKQSGNFNSEETRMTKTGNKYLRYYLIEATNSVKNHVPEYKEYYYKKFGEVTKHSHKRSLALTSRKLVRLIFGLLTKNQIYSNDKVGENQ

SEQ ID NO: 205816 - protein, 429 aa, unidentified
MNVLPVAGIDVGKEFSEMAILSPTNKVCARMKIFHDSFKKVDKAIELLKKAEKDFANRPIVVMESTGHYHKILFHAFAEAGFEVVITNPLQTDSIKNLGIRKVKSDKVDARKVALLYRFQELKTTSIPNDTINCLKSLCRQYYKMTDQLTAYKNKLIGIVDQVMLNLTDVFKDVTSKTALALLERYPTPSHMLKGNREEIISLISETSRKGIKRATSKYELLIQKAKDFEPLSISSPANISLIQVNINMVRTLEKSISDIEDAILKLIKDDKEQDMPVLTLTLELLCSIPGIGLMTAATILAEVGDFSAFQKSNKLVAYFGIDPSVKQSGKFKGTQNKMSKRGSRFLRKVIYTSALACIRKKRNGELNNPVLYEYYQKKCISKPKKVALGAVMHKLVSIIFAVLRDKKPFELKTPEQHARSLVAKNKAA

SEQ ID NO: 205817 - protein, 385 aa, unidentified
MTSPPPIPTAAVDFDTTLVLALETSARNWVIAAQVPGLGQVKAKQVIGPDADQLAAAIEGYRRRAAKVGKAVERVVLIYEAGYGGFWLARWLTAKGIEVHVIQPSSVPVERKKRRAKSDRIDADLLLRTLLAWLRGEPRVCTMVPIPDEAVEDARRQVRERAELITERVALTNRIGAILATVGVGGYNPLRRDRRARLQALRTPLGQPLPDHAKAKIARALERLELVLAQIATLEEQRDAVLEEKAPDAAERMIQALVLLRGIGAQFATVLVWEAFVRHFPTAKALGSYAGLVGTPFSSGGTEREQGISKAGNRRLRATAVELAWMWRRHQPDSELTKWFEQRLAGAKGRMKKVLIIALARKLLLVLWRYSSSGIIPAGAELKAA

SEQ ID NO: 205818 - protein, 417 aa, unidentified
METIRDRVAGLDVHRDRVVACCRLSGGRRVEVIKRSFSTMSAGIGELADWLAEHRVTTAVMESTGVYWKPVYYGLEGLVDELWLVNATHVKRVPGRKTEWLADVAAHGMVRSSFVPPPPIREMRELTRYRKTQVEARTREIQRLEKLLQDAGIKLTSVASSVWSKSAKAMIEALIAGERDPERLAEMSLSVMRAKKDRLVGAFAGTNFSAHHGVVARQIMDHIEFLDASIARLSAEIVERCRPFEPMIDLLCQIPGWGRSTAEVFIAETGGDMAVFPTPGQLAAWSGMAPGTHESAGKRRRAASLVGNRWLGKALIEAARSAARKDNTYLGVQYRRIASRRGPNALGVAHLTPRHRPLFLPRIRGLTLIYETRRGGSIGGSRIWQFASDQLDEVSNWRDWAERPKSVTNVAEPLCPS

SEQ ID NO: 205819 - protein, 370 aa, unidentified
MKKNSTRLQSPKRAAARSKGPITIGMDLGDKTSRYCVVGDHGELVSEGSVATTRKAMGQKFAGMRRCRIALEVGTHSPWLSRMLTGLGFEVIVANARQVQLISASSRKNDRMDAHMLARLARVDPQLLRPIRHRSEQAQADLMTIRIRAALVEARTGLVNAARGFTKAMGERLPACDTDSMGVGKLEALPAALQPRLQPLLEQIEALTAQIKKLEGKLQQIARIEYPETQLLTQVSGVGTLIALTFVLTVEDRERFQKSRDVGCYVGLRPKQSESGQSQPQLRITKEGDRYLRTLLVQGAHLILNRRGPDTDLKRWGLKLASRGGKNAKKRAIVAVARKLAVLLHRLWVGGEVYEPLRNSRPVPASKQAA

SEQ ID NO: 205820 - protein, 397 aa, unidentified
MYIVGIDIAKRKHEAAVIDGEGAVIIKPFSFTNNCSGYNRLLAMLAKAKLPLDEVSFAMEATGHYWLALFTRLQKEGFRVQVINPVQTNSIRNFYIRQAKTDPRDALLIAEVIRFGHFSESTLHPENIYELRELCRGRHAIVSMQADVKRKVVALLDQVFPEYETAFTNMFGDTSMAILQTCPTPKELSEMPLEELCHLIEVSSRKRFRMAKAQELQELARNSFGFAMAGDVFSTMIRLYAKHLDFLKQQVREMDRKIAEIMETLDTPITTITGIGPTLGAYILSEIGDISRFSSAAKLAAYAGIDPTMRQSGEYNGVRNRMSKRGSPYLRHAIWLAASSAVLHDPALKLYFQKKRDEGKPYMASVGHACRKMVSIIYAVMRDNKAYTPCIPNEISA

SEQ ID NO: 205821 - protein, 332 aa, unidentified
MSVYVGIDVHRKRSQVAVIDQDGQVLANRNVHNGVTPILSVIGGLPEGTKAAFEAAYGWGWLVELLEDYGFEPHLVHPLQCKAIASARLKNDKVDAAILAQLLRADLLPEAWIAPLEVRQLRALLRHRIQLVRLRTLLRNRIHAVLADHGHGRPEGCWSGPGRAWIASLDLPAVSREVVEDALALIDALESVTGRLDAEIRGHARSDPRVNVLTQLPGVGPFTALVLLAEIGDITRFASARKLASWAGLTPTVRGSDRTVRHGHISKQGSVWVRWILCEAAQKAKRHPDFAASYQAIAGRRGTKIATTAIARKLLTRACHLLTDAASAGAPS

SEQ ID NO: 205822 - protein, 339 aa, unidentified
MQVTTVGLDLAKNIFHVHGVTETGEVAFNRPLRRAQVLAFFERLSPCLIGIEACASSHHWGRELTKLGHTVRLMPPIYVKPYVKRGKSDAVDAEAICEAVTRPTMRFVEIKSEDQQALLSLHRARDFVVRQRTQLINMIRSLAAEFGITIARGVARAIDFAKGIIEGKQSGVPELAQDVLRVLSRQLVELHNRLRWYEITMRIQARLSRQAQLLQTIPGIGPVTASAVAATIGSGHQFKSGREFAAWLGLTPRNHSSGGKERLGRITKMGDRYLRQLIVVGMTSRVRQVTNHPERADPWLTQLLQRKPARLATVAMANKTARIMWAVLTRNEPYRPHTA

SEQ ID NO: 205823 - protein, 503 aa, unidentified
MGPLAYVRGVEASVSLRSELRGRLWSNHFGWQSLFDVGHAPVGEHWTKSRPADQSLTGHPMSFDRLKRTQRRKRLPGHKLKPSRATLFVQNSKPHLSMKPTYFLGIDAAKHKMRATLSNRSEHVLFEKDLSVEATGLRQLLAAIKRQVNDPEQLLVLIEATGLLHLNWSAALTKAGYAVAVINPLIARRLYTLQNSIRDNKSDPIDARGLCTIGLLHGEKLLVHYRFSLRPEQFTLQRAQSVRKALRSALTNLKKTYQSLMDLSFPELGGLLQLDGVGIRQLLIQAPTPAAIAGKRLSTLENNWMVRPKAAALKALAADSMADPDLAAASGPALVALLQSVAAMEGRLHALDQQIAKLACTSVDPQTKALIETIPGFGPVNAAKTLAWLPTEILHSGSNRKVAARLQAFMGNDPRLRQSGQWKGHTKMSKRGVEMLRTAFFQSAFSAAHNDPELRAYYQCKRAQGKTHQVALSHLMRILTRRLVAVLRSGKPYQSHYNLKNAA

SEQ ID NO: 205824 - protein, 340 aa, unidentified
MEHCGIDLHSKSSEVAVLDERGECGERARIPTTESSLRRWFGGRAPMVICLEAGGQSAWAARILTSFGHDVVVANPARVRLIAEATLKNDHVDAETLARLVRADRRLLCPIIHRSADTQRQRGVLRARRTLVNARVACLNTSRGILRSFGFRTPSRKAERLAERLADSQIPEALVAVVAPLVQLALELDEKIAALDAEVEAMGQAYPEVALLRTIPGVGPQVGLAFVLCIEDPSRFRRSRDLGGYLGLRPKMRESGSTSRSGGITHQGDTEMRTLLVQAAHGLLRSRADSDLTQWTQGLVARIGKTKAVVALARKLAVVHTMWVRGEAFRPFREVLDVAA

SEQ ID NO: 205825 - protein, 410 aa, unidentified
MRRCIGLDVHRDFAEVAIWQEGVVRSAGRIETTPEELRLFADSLSEHDEVALEATCNTHAIARLLERHVGRVVVSNPMKTRAIAEAKVKTDKVDAQVLAQLLAAGFLPSVWLADEETQALRRQVARRAHIVRQRTRLKNRVQAILHRNLVPRCPAADLFGQKGRRWLAEQELGADERHAVEALLRQLDFHADELRLIDAALAQVALAREEVKRLMTIPGVDATVALSIVAAVGDFDRFRSPDKLVSYLGLNPRVRQSGSHPAVHGRITKQGRAHARGMLVEAAFAAARVPGPLRAFYERVRARRGMQIAIVATARKLAVLCWHLISKGEDYAYQRPSLTAKKLRALELRAGARSHRGRKGTAGAYSLREVRARENALAEQGELVYRHLVADWQAKRPAKAGAGAATGERL

SEQ ID NO: 205826 - protein, 340 aa, unidentified
MTIKFLGIDLAKNVFQLCGLNQAGKPVYSKRVSRKILLQTVANIPACLIGVEASTGAFYWQREFEKFGHNVKVISPQFVKPFVRGQKNDGNDAQAIGIALMQPTMRFVPPKSPEQQDIQALHRARQRIVNHRTATVCQIRGLLLDRGFTIGAAISRVKRAVPLIIEDAENGLSTRMRKTVAELFDLFIDLGRRITFFDKEIEAIFRQSEPCQRIAKIKGIGPKTATAVVAAIGKGSEFKNGRHFAAWLGLVPRQYSSGDRQVLMNMTKKGDKHLRTLFIHGARAVVRVAENNNDSSMNQWVNQLKERRGVNKTTVAVANKNARIVWSMLKNNTEYQSVVI

SEQ ID NO: 205827 - protein, 402 aa, unidentified
MNCVGIDVSKGKSMIAVMRPFGEVVVSPFEVRHTANELSELAGLLKSLDGETRVVMESTGNYHAPVAWLLHDAGLYVSVVNAMLVHDYGNNSLRRAKTDKKDAVKLANYGLDHWLTLPRYIPEEDTRLMLKICYRQYQQYSKVQTMLKNNLISLLDTTFPDANRLFTSPPRADGSEKWVDFVATFWHCECVCGRSEKAFTTQYQKWCRKHGYNFSEDKALDIYASACRHFGVIPKTDTAKLLVEQAISQLQTTSSALAALKQEMQSLAASLPEYPVVMGMFGVGPTLGPQLLAEIGDVRRFHSKKALVAFASIDAPPYQSGQIDVRSRSISKRGSASLRRTLFLVMSVILQCAPIDEPVYQFMDKKRSEGKPYRVYMMASANKFLRIYYASVKAYLESLEHD

SEQ ID NO: 205828 - protein, 355 aa, unidentified
MNDAKYIGLDVHQATISVAVLDFAGKLVMEAILETKAETILQFLRGLRGSLHVTFEEGTWAAWLHDLLKPHVAQLLVCDPRKNTLGKVANKNDRNDARELAELLWRAKLTPVYHGEHGVRTLKELSRSYLTITRDLTRVMSRLKAIYRSWAIPCAGQQVYALRHRTEWLAKISEPGVRRRAEFYYQQFDALAALRQEARRELLQESRKHCAVQLLRQIPSIGPIRAALLVALIQTPHRFRTKRQFWSYIGLALKTYGSGEYRFVGSQLQRSKKFLAIRGLNLNHNHDLKNIFKGAATWAAANNGPFQNFYQTCLARGMKPSMARLTLARKIATITLLVWKKGVRFDAEHLKQQAA

SEQ ID NO: 205829 - protein, 346 aa, unidentified
MEHYVGLDVSLKLTAICIVDRSGKIEREGVVTSDPETIAAFVKSHAPHVARIGLEAGATSTWLWTELNKMGLPVICIDARHAKAALKMQINKSDRNDAVGIARIMQCGWYKEVRVKDLDSHAIKALLVSRALLVKIKRDIENQIRGLLKNLGLVIGRAKMNVFAVRAAELADARPAVAAAVEPLLKARDAVGRQIADLDRKVLRLARNNAQVRRFITVPGVGPITALCFLATIDDPTRFKRSRSVGAYAGLTTRRYASGEIDWTGRISKCGDKMLRTYLYEAANVLLTRIEKWSALKAWGIRLAKRSGLRKAKVAVARKLAVILHRMWIERTEFKWSSKEAANQPA

SEQ ID NO: 205830 - protein, 287 aa, unidentified
MGLHCAVDLHGNNGYYGIVDETGKRVFKQRIPNSLPIVLEALEPYRQQLESGIVVESTYNWYWLVDGLQANGYKARLANPAAMQQYNGLKNTDDETDAFFIAELSRLDILPEGYIYPKEDRPVRDLLRRRLLLVRHRTAHILSFQNLIARERGEQISSNNIQKLWPKEVEQFFDDNRLILMGQTNIETIRFLTKQIRKIEKVVLNAVKLKPQYEKLLTVNGIGKILGLTIMLETGDINRFKKVGNYSSFCRCVKSVRTSNDKKKGENNRKNGNGCNFFSLKRKSLFS

SEQ ID NO: 205831 - protein, 398 aa, unidentified
MHKHYLIALGVDDDLNVVLPARRVELPHLESWMKKTLTKQDQVVLEMTTNTWQLYDELCAHAGSVLVVHPPHVALITRSQVMNDKIAASILARLLAKGLLVGIWVPPQEIRELRGLVAQRKKMTGLATQAKNRLHAVLQRHHWMPPEGNPFHALQKNWWLALPLGTLEKVNVLSDLETLRFAQAQQEHLTFIMEEIASQQEQVTRLLQISGFGVVTAVTVWAAIGEIQRFADPQHLVGYAGFGTRVHNSGMSTRTGRITKAGRRDLCVVLIEAAQVAANSHPHWKAELARLQPRLGRNKAIVAIARKLLVAVWYILAQHKTDRFAEPEAVAQKFLKFAYQLGKEHRPVGQSAAQFVRQRLDALQLGSELTSIAWGSKKPIPLPPSSPKTERSDVPNGA

SEQ ID NO: 205832 - protein, 413 aa, unidentified
MTEMNNCSTRCVLIAIDIAKQSHDALIESPSGKIKAVKIRNSLEGYQQLLALVKTEGVAIQAAFEPTADYHRNIAYWLQAQGVHCYLVSSLACARAREMLFKTWDKHDRKDARVILYLMQRGMMQPFYDPLVAGTMDIQELSKTYHQISLARTRCQHSVLNHYLTLYFPEMERYFHTSRAEWFCRVLLKYPTPRSITRYKQATFVKRAWEIVGRKVAKERFLEELYETAVSSIGLPIDLNSVAVSTFKLQLQRYLVLNQQRRELEETADQFLSEREDYQHLRTLPGVGPINALMIIAESGDLKRFRHYRQYLNFCGFNLSAIQSGRHQGSYQLSKRGNARLRYAYWLAAVNAIRQRENSFRYKYERYIHKDPDNADLKRKARVAVATKMARVAHALVKQNTDYRGYYELSHGT

SEQ ID NO: 205833 - protein, 370 aa, unidentified
MPKHSTAFGMDVHLRSTTVCALDADTGEAVTRRFPGNPWGEIAGWMDGFPGPSLAAYESGYLGFAPQRELAGLGVECVVAAVSKIPRSAADSASKNDRNDAARMAKAILAHDISPVWVPSPEVEGIRDLAGAYDGATARLATAKQRLLAFLARRGFVYGGTTPAGNPRKYWTYDFLRWLDKVRPEDDGGVRALAALRNEVEAAAEARADLLSEYGAAVDASPIAAEVAALQSIKGCAFALAAAFSAEVGDFTRFRSGRQVTAYFGLAPSQRSSGDSVRLGGISGAGNALVRKLAVEGSWCYAAARHQPKLMPRDTGVPLEIRMHGRKGSERLLRRREEMLARGVPAAKATAAELVRWLWALGMMCREGAE

SEQ ID NO: 205834 - protein, 304 aa, unidentified
MNGIGIDVSKRQLDIGTTDGETLQVSNNRSGFSELDVWLKKRPTRQIVLEATGGYEQPVLDFLHKAGHPVARANALRARKLAQGLGQIAKTDRLDAYALAQMAALVKLPPYQPLQSWQQKMREFVRARRQAMDALTIARQQQEMVLDRELRRLLQGNITRLQTLVERLGKQIVEQVGQQPQLKMLKSMKGVGPVLQAVLASYLPELGRITGKRIASLVGVAPMSHDSGTMRGKRSIHGGRAEIRQVLYMAAMSAMRHEPRLRDFYQSLRARGKEGKVAIVAVMRKMLVILNARVRDAESGLVPA

SEQ ID NO: 205835 - protein, 462 aa, unidentified
MPGRDEIASSGKSRGQLAGLPIIRSNVAGIDLGSERHWVCAPTRDRSGREVASFGATTAELLRMGEWLKARQVESVAMESTGVYWIAPHEVLEAQGLQLLLVDTRQLAQVPGRDKKSDPTDCEWIQRLHSCGLLRGSFRPEEGVCMLRTLVRDKANLVAESGDWLRRMQKSLDQMNVRVHRAVSDLDGATGMAILRAIAGGERDSQKLAKLRDRRCSKTEQEIAEQLSGHWREDHLFSLQQALKMYDAVQERIAAYEQEILRKLGEMEREEPHEPTAPPLQNANKARTIKNRGQEAKRQALYRMSGVDMTQIDAIGVETVEVVVSEYGSDLSRFPTEKQFVSHATLAPRVPKSGGKPVKKKKRNSASTRVAAALRMAALSLRHSQTALGAYYRRIAQRRGGDIAVFATARKLATLVYRLLRWGQPYADEGAAAYENRYRQHRIGRLAATAKELGYQLTPVSA

SEQ ID NO: 205836 - protein, 367 aa, unidentified
MKKVSTRAGAQSTNISQPKLTIGLDLGDRNSWYCVLDESGQIQLEQRVRTNAKALRAVFGEMPHSRIALEIGTHSPWISRLLSELGHEVIVANARKVRLIGESRKKDDRLDAQTLARLARIDPELLSPVKHRSAQAQADLMMIRARAGLVRARTGLVNTARGLAKSYGERLRGCNVRNMNPEKAEGLSPELQRALEPLLAGIESVSERIAEYNERIEKLAQQSYPQVALLKQIKGVGTLIALTYMLTLEDPHRFRKSRDVGCYLGLQPGRRNSGQSEPQLHISKEGDPYLRTLLVQGAQHILGPFGVDCDLRRWGLKLAERGGRNGKKRAIVATARKLAVLLHRLWVSGEVYEPLHNGSRTTVRAAA

SEQ ID NO: 205837 - protein, 422 aa, unidentified
MKLKYSICCGLDVHKNVIVATIVTTNKDGISEYLQKSFSTINSDIQRFHNWLIENNCYHVCMESTGKYWIPIFNYLENDIDVCLTHPKYVKAIKGKKTDKKDSKWIADLYKFDLVRCSFIPPKDFRQLRELSRYRFKLVCMKSSEKNRIQNCMTISNVGIASVLSDPSGKTATEIISYLLEHTADSMDEKAVRKLIKKGAKSKSDEIIEAIKGYTIETDQAKKLELARGHLEYLDDMITQTEVELYVRIKPYYEFVEFVSTMPGMTELSSTIVLAETGVDMDIFDDAKHLCSWCGLSPANNESAGKKKSVRIAKAGDYLKPMMVQCALAAIKSKKQPYFAIKYGRIKKRRGHKKAIIAIARMMMVCIYHMVSEKKPFTPTDYEELMDPQNHVESVVLNENNVFAYLESLGYDSSKLVKRNDN

SEQ ID NO: 205838 - protein, 351 aa, unidentified
MIIIGVDYHPSFQQISFMDQKTGEYGERRLNHSDGEAERFYRELKEREVSVRVGMEATGYSRWFERLLAELGFELWIGDAAEIKTKRVRKKKTDREDARLLLKLLLENRFPRIWVPSPENRDLRQLLWHRHRLVQMRTRIMNQLQAVAMNEGYRWKKKLFSEKGRSQLEKLSLAPWASRRRKELMELLDQLDPKIEELTAAVEQEAKKRPEVLLLMTHPGVGPITGLVYVLVLGTPDRFPCGKQISSYTGLIPSEDSSAGRQRLGHISKQGNTLLRFLLVEASQAAARYNPDWRRRYLHLMMRREKRIAKVAMARKLAVRLYWMWRNGWDYSQLVEFGSHAGKLVIGHGVN

SEQ ID NO: 205839 - protein, 349 aa, unidentified
MQDITTVGVDLAKEVFAVCVLDQTGAVVHSKVLKRDAFISWAEQLSPCAVAMEACGSAHHWGRWFAARGHTARLIAAEFVQPFRKSVAAKNDRNDAEAIAIASRQPTMRYVAIKSVEQQSILAWHRMREGWKEERTALLNRLRGLLGEFGIWPDRSSDKLIRALPGLSEDERLPLGVRAMVIETREHLTALHTRLAQCDHEIARHAHTHPGAKRMKEIVGIGTLTASAAAATVVDAKSFRCGRQFAAWLGLVPRQMSSGGKTRLGRISRRGDAYLRSLLVQGAKSALQAALRQPPEKANRLQRWIVDVYGRVGYHKTLVAIANKHARMIWAMLAKDEGYDPTAWQRLSM

SEQ ID NO: 205840 - protein, 351 aa, unidentified
MPHKLNSGIAVIGIDIGKNSFHVVGHDKRGAILLRQKWSRGQVEARLANLPPCLIGMEACVGAHHLSRKLQMLGHDARLMSAKYVRPYSKGQKNDFRDAEAITEAVQRPTMKFVATKTTEQLDLQALHRVRERLVSQRTGIINQIRAFLLERGVAVRQGLRFLRAELPRILAAPCDALSPRILRVIEDLAGDWRRLDERIEGLSNEIEALARQDKGCERLMTVPGIGPIISSAMVAAIGTGDAFSKGRDFGAWLGLVPKQISTGDRTILGSISKRGNRYLRALFVQAAWVVLVKVGPKHWARYGLKSWIEAAMKRLHHNVLAVALANKLARIAWSVLAHGRTFETSKIQAA

SEQ ID NO: 205841 - protein, 353 aa, unidentified
MAGTTAPRITVGVDTHLDVHVAHANDQLGCRVDTLSIPTTPTGYQDLLAWARGLGEPIAWGVEGTGSYGAALARFLAAHGQVVLEVNRPDRQARRGHGKSDPLDAEAAARAVQAGQATVTPKTGAGQVEMIRWLRVARQTAIRARTQATNAIKALLVTAPVELREQLRGLPATMLVPAAAALEPGAVTSPIAATMLALRTVAQRYQTLDEEITILTAELDRLVAAAAPKLVALFGAGQDSAGALLVAAGDNPDRLHSEAAFSMLCGSSPIQASSGKTVRHRLNRGGNRQANAALYRVVLVRLRYHQPTKDYVVRRLAEGKSKQEIIRCLKRYVAREVFAVLQEMRQTNSTNAT

SEQ ID NO: 205842 - protein, 440 aa, unidentified
MNEYKFPVVYPNSAGIDLGSTSHWVAAFPGSCEKPIRSFGSFTCDLTAMALWLKGLGVTHTVMEATGPYWFQVYESLQAHGIHADLVDPRSVSRLPGRKKTDRIDSSGLQRMYACGMLSPCFVPSAEILALRTYHRRRQSLVESCSQQILMFQQSLTLMNVQIHHVLSDVTGVSGMRMLRAIVSGERDGKVLAAMRDKRVKASEEDIVKSLEGNWAPEHLYCLKQSLAIYDMLCEQLADTDRQIALELARLSQSQNKPAKTLTPHKKQPRFELRTYLEELTGCDLTQVEGFEVLTALSLVSELGTDLSRFPTAKHFTSYLGLCPNNRITGGKVRSRRSAHVSSAAAKSFRLAAHSLHRSRSYLGAFLRPVAARRGMPKAITATARKLAERYYMLMAKGGQYMMQANNTLKRSTSNVGSRDSRRLPQTSDSHSPNSRRTRN

SEQ ID NO: 205843 - protein, 326 aa, unidentified
MNLMPLGIDIAKQKFNVCLRFAHDKLKHKVFTNNQAGFTQLHRWLQQHAGDRVHACLEATGAYGEALAFYLHEQGHLVSIVNPAAVKAFAASCLSRTKTDRVDAELIARFCLAQQPPAWEPARPEVRELQALVRRLASLIEMRVAEENRLAAGPTVPEVHRSLEESLAHLQAQIKRTEKLIRTHLDQHTGLRQQRDLLTSIPGIAATTAALLLAELPHLKQYRSARQVAAVAGLVPRERQSGSSVKGRVRLSKIGNARLRKALYFPAITALRCSPFMQQWAQGLRERGKSKLSVVGAVMRKLLHLAYGVLKTNQPFDPEWTTRAAG

SEQ ID NO: 205844 - protein, 320 aa, unidentified
MNQEKVYAGIDVAKASLDVAVFSSEKKWQFTNDEAGLSRVAEFLGELSPALVVMEATGGIEAPLAHALKVARIPVAVINPREVRDFARATGKLAKTDSLDAQVLAHFAAAIKPEPQPLSDEQVEELKAILARRRQVSEMITAEKNRLHSARSSVRKDIKAHIAWLEKEMAKIETNLRGKIEESPVERQKDSLLQSVPGVGPTLSVTLLAELPELGTMTGKQVAALVGVAPLNRDSGTRRGKRTIWGGRATVRAPLYMATLVATRCNPVIRAFYQRLCAAGKTKKTALTACMRKLITILNAMLKHNAPWSYVAPQLLGPCH

SEQ ID NO: 205845 - protein, 344 aa, unidentified
MGEISMIGLDLAKNVFQVHGVDASGSVVLRRQLRRGAVEKFFAQLPPCTVGIEACGSAHHWARVIGRYGHQVRLMPPSYVKPYVKRNKNDGRDAEAIYEAVGRPTMRFVPVKSVEQQATLAVHTTRALLVRQRTMIANSLRAALSEIGIVAAQGIEGLRELMAKLEAPNEEVPEIMRGALLLLAKHWQALDADERTLERQIAKAARADREARRLMEVPCVGPIIASTVLAKVPDATVFHSGRDFAAWIGLTGRDHGTGGKHRPGRISKQGDRMLRALLISGASAYLRHQRTRGVSDPWLRDLLARRPYKVVMVALAAKTARILWAMLVKGEPYREPANAPAAAC

SEQ ID NO: 205846 - protein, 425 aa, unidentified
MNLLILKGVPMSLKIVYKICCGIDVHKTFVVACIASTNDKGITSYESHRFSTYTSGLKTLLQWLLNRNCKDVCMESTGKYWIPVYNILENDCSIVLAHPKYVKAIRGKKTDKKDAKWIADLFKHDLVAGSFMPPADIRQLRDLMRYRFKLTCFQSSEKNRLQNCLTVSNIQLGNVVSDTFGKSAQAILDKLLENPADTSFDLEPLVYKSLKKKLPELRDAIDGYITPEQAGKLKVIKAHYESLESRKAELEELILALAAPYQQELAILQTAPGIRSDFTAIGIISEIGTNMEAFPSAKHLCSWAGLTPTNNESAGKKKSVRVSKAGCYIKPLLVQCANAVVTSKKHPEIRNRYLRLKKRRGHKKAIIAIARMLLTALYHMLKNGETYNAELYRKSDLPPVDREITVEQAIIIARNQGYKIKSATA

SEQ ID NO: 205847 - protein, 344 aa, unidentified
MTHYVALDVSLRSVAICIIDAEGTIKRETSVVSDVEDIVHVLGTFDGEIASVGLEAGVLTQPLTSGLQAAGYDVVCMETRQVHAALSAMRNKTDKNDARGIAQILRSGWYSRVHVKSLESHYVRALLSSRRAVLQKCVDLENEVRGLLKIFGFKLPPRVGHAQFDGVIRERIVQEAELQHALIPLLDARGVLYTTYLELDRRVKRRALDDEVCQLLMTVPGVGPITALTYKAAVDDPRRFKRSRTVAAHFGLTPRRFQSGEMDNLGHISKAGDAEVRSALYIAANVLMTRSVGFSSLKAWGIGLMKTKGRRVAVIAVARKLAVILHRMWIDGEQFHWGTEGANT

SEQ ID NO: 205848 - protein, 414 aa, unidentified
MESSYKVAGIDVHKKMLAVVITDAAEVGEFRFERRKFGTGDAELHALAGWLAEVGVKEAVMESTAQYWKPVWQALEGQVKLHLAQAHSNRAPKGRKRDFADAERLVRRHIAGELILSFVPDPQQRLWRTMTRTKQQLTRDRVRLQNQLEGFLEETRIKLSSHLSDLLGLSGRRMLQALAEGETDPARIAVLAAPGLRATQQELCDALSAAATMSEMHRQILKLFLERLTLLESQMDTLEKSVGQALREYEDSVHRLAEVPGLGADSAQQIIAEVGPHAATFPSPGQMASWVGCCPGREESAEVSRSDRSPKGNRHMLRILNQAANAAIHTKGSSYERLYRRLAGRIGHFKAVWAVAHRLCRIAWKILHQGVRYEVRGQRPDPQAVRQRTSKLIRALRNLGYQVQLTPATSGGVV

SEQ ID NO: 205849 - protein, 361 aa, unidentified
MGKKSWLVAGIIPGVERQPLKKLAPDEDGLLKLFERWRAEAEKAGHKITRIAVAFETGRDGFWLARWLRAHGIEAHVIHAASVAVSREHRRAKTDRLDTEQLKRAFLGWLRGERDHCKMAAIPTFAEEDAKRPHRERETLVGEHTTIINRIKGTLARLGIRNLNPKLKKAPERLEHVRTSEGEPIPPNTLAELQRDLARKQLVAEQIHQIEKARLEQLKQAPKAGPNLMVLLLMRVIGIGIETADMLVKEILSRNMRDRRAVGRYGGLTGSPDESGTKRREKGLARAGNARVRKGMIQLAWRFLGFQKESALAKWFEARTKNNRGLRKKMIVALARKLLIALWHFVRDGVVPEGVVLRPAH

SEQ ID NO: 205850 - protein, 372 aa, unidentified
MKKIRFIGLDVHAETIAIAVAEPEGEVRSLGIIPNREESVRKLVKKLGPAEQLQACYEAGPTGYVLYWQLTALGVKCEVVAPSLVPVKAGDRVKTDRRDATKLARSYRAGDLTAVWVPNEEHEALRDLVRARETAKQDQLRARHRLSKFLLRHGRRAPAGIKVWTQKHQQWIKEQVHFEQPAQEYTLLDYLHEVEHMADRIRRREQAIEEAVKLAPPRMQEVIQALQALRGVAQISAVTIVAELGEISRFDGARQLMGYSGAVPSEHSSGKRIQRGPITKTGNTHLRRIAIEAAWAYRHRPAIGPRLRKRQEGLSEEVKEIAWKAQHRLHKRYRTLSAAGKEKQKVITAVGRELLGFIWAIGVQVERNSRVA

SEQ ID NO: 205851 - protein, 403 aa, unidentified
MYNAVGIDVSKGKSTVAVLQPGGTIVKKTFDVEHSISGLKELRDYILSLDGDTKAVLECTGRYHEPILHSLSDAGIFVSAVNPHLIKNFGNNSIRKVKSDPADAKKIARYTLDNWAELQEYSSMDTTRTQLKTLNAQLDFFTKQKASAKTNLISLLDMTYPGVNELFSSPARSDGSEKWVDYAASFWHVDCVRKIGLKSFAERYKAFCKREGYNYSEARAKELFEGSKELVAVFPKERSYKDLIEMSIKQLRTITESTVCIKNEMNELAATLPEYSTVMAMCGVGKTLGPQLIAEIGDVSRFSHREAITAYAGVDPGVDASGKRVNRSNRASKCGSSRLRKTLFLVMSVLLKTKPDDAVYRFLAKKRSEGKPYNVYMTAGANKFLRIYYGKVKVALAAQAKSE

SEQ ID NO: 205852 - protein, 344 aa, unidentified
MKITTIGIDLAKNVFQAHGVNEHGKTEKKKQLKRGQVAEFFANLPPCLIGMEACGSAHYWARKLEGFGHTVKLMAPQFVKPYVKTNKNDAADAEAICEAVARPNMRFVPIKNVEQQAVLSLHRVRQGFVKARTAQANQIRGLLGEFGIIIPQGITNIAKRVPELIEDASNDLPGSFRLLVQRLMDHLNELDKQVDELEVQIKAWHRESAASCKLEKIPGIGPITASALVASIGNAKNFDDGRQLAAWLGLVPKQHSTGGKSKLLGISKRGDSYLRTLLIHGARSVILSASKKVDKSSWLRKLMERRNPNVAAVALANKNARIVWALLANEREFRSDYTPARAAA

SEQ ID NO: 205853 - protein, 344 aa, unidentified
MERKFKLIFGIDISKLTLDVTYSLEGSFRYFQITNDARGISQLVKTIKELGIEEQQVLVCCENTGSYMDKLALVMKGLDATFWVVHPIIMKGYRLDLQRTKNDKVDSMKIAEFALAHQHKATSFHHPNQKTKELKELYLLRKQLVGIRQQTLNFIASEQDKAIPGILNTVIHDQLKYFITDLIKDVEKSIQLLIKSDKTVSGYYNTLLSIPGVGPVIAQHILAATDGFKKITDYKSFACYVGIAPFARSSGISVRYRPRTSKKANQELKAEMHQGALSVIKQGQIFHNYYKTMIDKGKHHLWIMNAIMNMIAKCIFNLAAKMTPFNKEIFANNKKSWQNNLVMS

SEQ ID NO: 205854 - protein, 458 aa, unidentified
MTPRQDHFPHPAPRRRRRTLQVTHPDAAGIDVGADAHWVAVPAEHDPEPVRRFGTCTADLEALADWLAACGVTTVAMESTGVYWIPLYELLETRGFQVLLVDARQVARAPGRPKTDAKDCQWIQRLHSYGLLSAAFRPAEQVVVLRAYLRQRDMLVTYAGQHIQHMQKALEQLNVKLTEVVSDITGVTGMAIIKAILRGEREPQPLAKLRDPRCKESEATIARALQGTWRAEHLFALRQAVALYEYYHQRMSECDQAIEAHLRTFADQSGGQPLPYRPRRRKRETNEPRFDARARLYGVCGVDLTAIEGIDETTALVLLSEIGTDLNRWPSLKHFASWLGLCPQHKISGGKILSRRVRRGASRAKRALRLAARSLHQSKSALGAFFRRIKARHGTPMAITAAAHKLARLVYSLLKHGTAYVAQEMAAYEAKYRERKLQGITRQAQALGFVLVPVAAGG

SEQ ID NO: 205855 - protein, 490 aa, unidentified
MSKKNVKRETGNSSGKMRVESEMTKLNHDVAGMDLGSEEHWVCVPADRVEENERCFGVYTCDFCELADFLRACGVKSVAMESTGVYWIPLYEFLDKKGFEVVLVNARHLKSVAGRPKTDIYDCQWIQRLHSYGLLQGSFRPSDDICELRGLVRHRAGLVEEATMHIHHMQKALQQMNLRLDKAVSDISGKTGTLIIERIIAGERNPKVLAELRDPRVVANKKEIAAALDGNYRNEHLFALKQSYEALCFVHRQMEECDAEIKRVLDGLDRKVDANLAQLSPSPKGSKRSNKNQSLFDLRPALYEIYGVDLTQVNGFQSGTILNILAELGPELHKFPSEKNFTSYLGLCPNREISGGRLLKNSTKKVQSRAAKAFRLAAQTLKNSECYLGKFYRRIKARAGAPKAITATARKLAVIFYKMVKDKVEYKPLDPSSFERKHRERALKSLKNRAKACPVLQYPSDPAYLLFSKSMSSTIPEMNPRILKISLTIR

SEQ ID NO: 205856 - protein, 312 aa, unidentified
MELRYIGIDVSKDRLDVHVLPEGTAFAVARDGKGLAELVERLSALQPERIAVEATGGFETVVAAALAGAWLPLVVVNPAQVRHFAQAVGRRAKTDPIDAQMIARFVAATKPDLRPLADEATQLLADLVARRRQIIEMIVAERNRERRVEVKRIKKSIARLIAALEKELAEIDTDIDASVRGSPAWREKEDLIASVPGVGPITARTLIAELPELGALDGKQIASLAGLAPFTRQSGQWKGKAMISGGRKAVRSALFLAALAACRHNPTLKAFRQRLLDAGKPKMLVAIAAARKLLTILNAILRDKQPWRNQTA

SEQ ID NO: 205857 - protein, 343 aa, unidentified
MVGPMRSLSLFSFYTTGLPMSSSSCFAGIDVSKDSLHVALAHSLHHHDGPFRSFPGDSDGLAHLIAWLRQHHVQLVVCEASGGYERPLLDVLLEHDIPCARLQATDARDFARGLGVLAKTDKLDAHMLARMASVRRPHLEVKRSTTQRELVKLVDYRLQLMEDRTRLKTQLGKQEQGWILARQEARLTQLNEELIALDQHIETMLKSDESLQLKLEKMSQIKGVSRVTSWHLLAYLPELGELNKREIASLVGLAPMARESGTYKGRRSCGRGRLKVKAALWMASLSVIQHEEPFGEFYKRLKEKGKEPSVARVAVCRKLLTNLNAMIRDGKDYDVEKVRAKRG

SEQ ID NO: 205858 - protein, 373 aa, unidentified
MNDSIFVGLDVHKTTISVAVAEAMRGGEVRNLGIIPNRADQITRLAEKLGKGDRKVSFCYEAGPCGYGLHRQLTGLGHNCIVVAPSLIPMKAGDRVKTDRRDAAMLAKLHRSGELTAVWVPDAAHEAMRDLVRARATAMRVLGKARQHLQGYLLRHGRIYAGKKGWTLAYRRWLTTVRFDHPASQIVLQDYIHAVTDAEVRVDCLTKRIEELAPQWSMTPFVEAVQAVQAVRGVAFIVAVTVVAEVGDFSRFDNPRQLMAFLGLVPSEHSSGATIRRGGITKAGNAVARRALIEGAWTYRMQARVSRKLHDRNERLPQAIRDIAWKAQVRLCARYRRLSAAGKPKVIVTTAIAREMVGFLWAITRQVQLVPAA

SEQ ID NO: 205859 - protein, 346 aa, unidentified
MLYAGLDLSRKRLDFCLLDGAGFVVGEGVAPPDRDGLRAFAARVGRQRQPVFAAVESMNGARFVHDELERHGWRVEVADAARVRGLAPLACQTDRIDARVLAELCRLELVPAIWLPDQAARGARERARFRLHLVKHRSSLKNRIHQTLLSFGQPCPPSDLFGVRGRRPLERLELPQPWAGTLEASLRLIDELDAEIATLERQLQQLGADHPYVRLLVTVPGIAWVLGYTIAAEIGDINRFRHPAKLSGYTGLCPRVYQSGEHDRRGALTKHGPRYLRWALLEASTHACRHPLYAERYQRTKQRLGRQRGPRVAQVDLARRLAEAIWHMLTRNQPFAPKGAAQVLAA

SEQ ID NO: 205860 - protein, 370 aa, unidentified
MLGSPALMEHVNNTELSSHEGTRCQFNGSSGVIKLGIDVHQQFYTVVMQEGGSNPKPPQRFSKQGLVHWAARIKNQEGEMHAVYEACGFGCGLQRALSGLGIKCYVVCPQKLDEHNRRVKTDSLDAKALCLKLDRFVQGNRDALALVRVPSEKEEQLRAIHRQREQLVKARKQLEAQGRSLMVNHGVEPVKSWWKSRTFAALQVASWLKELLRNSQPILVALQEKIRALTVELQNAADPDQARGLGAMSSVIIDREIGNWHRFNNRRQVGSYTGLCPGEYSSGNTRLQSCVTKHGNPRLRAALVELAWRLVRFQPNYKPVLKWRETLRQGALSTGAARKKAIVAVARQLAVDLWRIRTGRVSAESLGLSN

SEQ ID NO: 205861 - protein, 442 aa, unidentified
MRIVYQRVGGLDVHKKSVVATRMQITEDNRLEWETETFGTTTPDLLLLHDWLQEWRCTHIVMESTGDYWKPVFNLLESDFEVLLVNAWHVKHVPGRKTDVTDSEWLAELLLHGLLKPSFIPPRPQRALRDLTRYRTKLVQERVRIVNRVQKLLEGANIKLASVVTNIMGVSARDMLAALGDGETDPVLMAELARGRLRNKIPELEKALTGVVEPHHRFMLGKQLLHIDFLDEQISDISIEIAQRLEAMSLPPRSPDLRGDPTTEPAGADAEALPLTWSEAVALLDTIPGVNQKVAEVMLAEMGLDMSQFPTAKHLAAWAGLAPGNHQSGGKRYSGRTRKGNRPLSAIMVQAAWSAVCTKDKFLKARYQRLAARRGKKRAIVAVAHSMLVSAWHMLTYRQSYQELGGDYFDQRKKQSKISYLIRRLERLTGGSVSVKVQPATA

SEQ ID NO: 205862 - protein, 353 aa, unidentified
MRKIQEYIAKGKQIFVGLEDSKRTWKLCVRSDRMIVHETGMPAEYENLRSYLFRRYPVCDIQVIYEAGFSGFWLHDKLQADGIECIVTPPNRVTMEKVTAVKTDKRDARRLAKNLENNDFTRCHVPDRERREDRQLSRTLEQVQRDITCTKNRIRKFLDYHGLNAGFPPGRWNDSYYSRLAELELSGALRISLDVYLRVLHGLTELKKELIKELKALSEKARYAQSVQIKKSCPGIGILTAIRLTLEWGDMSRFPSGKHIASYTGLTSREYSTGETVRRGRITAQGRNTIRSWLIQCSWIALRKDPVLMQKFQHVWRNSGSKKKAIVAVARKIVVRLRAVELCEYNYSPGVVE

SEQ ID NO: 205863 - protein, 415 aa, unidentified
MKHYSELTHFAGLDWAKDHHDANLMDRQGQVVARFRFAHTGPGWQQWREKIQRYPALGVAIETSHGAAVEQLLASGVTVYPVPPKAAKAYRQRQAPSGTKDDELDAWSLGDALRVDGAHWRALNPQDALVEELRLLCRDEAELIGQRTALVNQLQAALHEYYPAALEAFEDWTAPSAWAFVEAFPTPQQLVQATPHRRRVFLHTHKLWRPGTAERRLEIFARADQFCGGVAVTRAKSRLAVALCRSLAALQLQLEGYRAAIEKLFAEHPDHDVFGSLPGVGVTLGPRLLSGVGADREQYPDAQGLQCVAGTAPVSYNSGQIKRAKIRWHCDRFLRHTVHLWAGCSLKSCAWAAAYYAAKRKDGMSHACALRCLAQRWLKILWKMWQTHTPYNPEYHARNQQRHGSWVLQLNPKTT

SEQ ID NO: 205864 - protein, 354 aa, unidentified
MKKFFIGVDVSKDTVDVSFFDDDRMKSPEYLAQYSNSPKGFREMVKDLRMCCHGVSSGQWLFCCETTGRYDHPLCHWLVDHGMVVWRESALQIKWSSGIQRGKNDRVDSLRIAEYAWRHQDKMQKFVKPSESLSNLKAAFTHRRRLVEKRTATRCQLKSMSSEKGLSASVARMIIRDLSREIERLSASIATMDESIQEIIRSDSELDRNYRHIISVKGVGPITAVALIVCSGNFKAITSAKKMACYCGVASFRSQSGTSINRKASVSNLSNRQIKSLLSMAARSASRSNPVFAEYFNRTLSRGKPVALVYNNLRNKIITVIYKLIERDCDFDVDYMRMHSTGQRANESAIREAV

SEQ ID NO: 205865 - protein, 430 aa, unidentified
MHNKNYISVGIDVGSAFSFMTILAPDETVILKPFKITHNNKDSLERAVSEIKKAEELYSLESRTFLESTGIYHFPLFCYLVDCGFNASIINPIITHSTKNGNIRKVKNDKIDSKGIAKLGLSKDIPVSQFPAKLVLELRSLTRKYYDLTDERSAHINKLKGDLHTVFPQYLDVFCDVTGKTSTMILRQYGTPDKILRGHKKTMIEKISKASRKGLAKASERYEKLCAAANAAKTFGCQIDSIYFNIFLTLDLVEKLDSALDSILNRIRQLITFNKNEKFIQQIKLLNTIPGVGFLTAVTIMCEIGDFSAFRNPKQLFAYFGLDPEVNESGKFVGTQLHMSKRGSRIARRAIFAVALASIRTKRNGEGINPYLRKYYELKSVQKPKMVAIGAVMHKVCNVVFAVLRDEKAFELRSPEEHCKQYQRPALAAA

SEQ ID NO: 205866 - protein, 264 aa, unidentified
MELYAGIDLHSNNSVVTVLDEADRTVYAKRLPNDLDTIMAALRACEGTLCGVAVESTYNWYWLVDGLQDAGFTVHLVNTTAVKQYDGLKHSGDFSDARHLAHLLRLGILPVGHIYPRAQRAVRDLLRKRSQLVRYRSAQILSVQNLLARNLGTRARSGEVKRWQAKSIDAMELLEEQKQALKATLAVMRCIDAQIRVVERSVLAKVKARADYKALKTVSGIGEVLALTIALETGDIGRFAGPGNFASYARTVKSTRESNGKKKG

SEQ ID NO: 205867 - protein, 340 aa, unidentified
MTIKTIGLDLAKSVFQAHGVDADGATMLVKKLHRKQMLPFFSKLSPCLIGVEACGTAHHWARTLSAMGHEVRLIPPSYVKAFIKRGKSDAIDAEAICEAVQRRTMQFVPVKTVDQQGILMTHRARSLLVRQRTQAANALRSHLAELGLVANPGVANLARLAEQALAGQNVLPSFARAALEIMLRQIVALGQEIAELDRQIAAWHAESEASRRLAAIPGLGVITATAVAATVTDPDQFRSGRQFAAWLGLTPQQKSTGGKTRLGGISKQGDRYLRRLLVVGATAVIRHTKDKPTPMAAWIRKLLEKKPFRLVSIALANKLARIAWVLLTRKETYRPHQLGA

SEQ ID NO: 205868 - protein, 338 aa, unidentified
MKAYAGIDLHSSNNYIGIINEQDQRLYGKRIPNELDRVLLALEPFKKELSGVVVESTYNWYWLVDGLQEHGYKVHLANPSAIKQYEGLKHTDDKWDAFWLAHMQRLNILPEGYIYPKEDRAIRDLLRRRLLFVRHRTSHILSLQSMITRNLGIKVSGNKIKKLTGEDVDGMFNSPNLIFMAKNNIAVIQFLKKIIKDIEKNVKSQVKLRKEFAMLLTIPGIGDILGLTIMLEVDDINRFPKVGDYSSYSRCVKSERFSNGKKKDENNRKNGNKYLSWAYVEAANFMIRYSDRAHRFYQKKKAERNGIVAIKALSNKICRASYYIMRDHVPFDEDMLFR

SEQ ID NO: 205869 - protein, 387 aa, unidentified
MQSVTSATAVATTARANNITLFASLELSKSKWVVTINSPGSEKFSKHVIEGGDGACLLDLLSRSRAKAEQRYGVGVKATVIQEAGLDGFWIHRLLLADGIESHVVDPASIAVARRHRRAKTDAIDGETLLRTLMAWARGERRVCSMVLAPSPEEEDRRRLTRERGTLLKERIQHTNRIRGLLSGQGVRDYNPLRRNRFERLEALRTGDGRELPAMLKAEIRRELDRIALATTQLAAVERARDALIRTDAEEPNNPAALLLKLKGLGPEFASLLWLESLFRSFGNRRQVAAYAGLAPSPWQSGGVERDQGISKSGNRRLRKTMIELAWFWLRHQPDSALSHWFQARVGAAKGRIRRIAIVALARKLLVALWRYTTQGVVPEGAVFKAA

SEQ ID NO: 205870 - protein, 359 aa, unidentified
MRCERTFVGLDVHAWSVTGHGFDAVTGEVWQRKLTPNPADIESWLRTLPQPVAVTYEAGPTGFGLARHLRGAGFRCPVAAPSKLQRPWGDRVKTDARDAELLARLLKLDEIVEVVVPTVAQEAARDLVRAREDVRGDLMRARHRLSKLLLRQGIVYTGRPWTGIHDTWLRGQRFDQSARQLAFDAAYETMLLTVQRRDRLNAAITAMAENSEYTDLVHRLGCLRGISTLTGFGLAVEIGDWTRFTGNTIGAFLGLVPTEHSSGQSRLQGSITKTGNGHARRLLVEAAWHHRKTYHHPGLTMRTRWEQAPPAARARGHQGNRRLHQRWQTFTARRKKPVIANVAIARELAGWAWSLAVLE

SEQ ID NO: 205871 - protein, 447 aa, unidentified
MQKKNVKMEVINPNAAGIDIGSRSHFVAVGQGSDDVREFGVYNEDLKAIADWLKENEIETIAMESTGTYWQSLFAVLQAEGLQVILCNGKFTKNIKGKKSDVQDCQWIQKLHTMGLLSGSFLPDEATEQLRTYSRHRDNLIDQAADTARKMQKYLRLLNLRLDVVVNDICGLTGLKIIEAICKGEINPEKLASFRNGNCKKSEDEIAKALQTNGRNDYLFTLNHEYQMYLNLQSKITECDKEIEKMLNQQINNDDNKKQHHIDKKTHKRINKNTPKNIDINLLSYQYFEGVDLLAIEGVSYSTVLTLMSEVGHGIHKFETAKQFASWLRLSPNNKISGGKVLSNKIPKGSNRLKIALRNAANAIGNLKDTALSNFFARISHRKGRVSAISATARKLAVIIWNMVVKRQAYIPLTEYQFVDQKRKKIAAMKRLISKFEITNEDLNLQM

SEQ ID NO: 205872 - protein, 313 aa, unidentified
MITQKVHVVGADISKATIELGCLSLTTPSSIPNTPAGFKALLKIITKTTNPIHIVCEATGAYHKAFVSTLHQAQIKVSVVNPRFIRDFARAWGKLAKTDAIDALLLADFGRTMQPDPTVPPEEHMRLLDELVTRRTQLVEDRARERNRLSQTSRPEVAASLRLHLRHLDKQIKDLLSCIAEVVDKNHALKAKVFLLAQVHGIASLTASALLATLPELGSLSKNEVSALAGLAPFNRDSGAFRGKRSISGGRIGVRRALYMSALCASRGNPILKAFYQRLRAAGKPHKVALVAVMRKLLIYLNSLLKQQTLSPA

SEQ ID NO: 205873 - protein, 402 aa, unidentified
MIFVGIDWADEEHEITVTDDNANELTRFRVPHNHEGLETLKNRLLRLSDDPEQVLCFLETNQGLLVHFLLEVGFPVYPVNPKVVDNRRKPSGAKSDAIDSRLLANIGRADFKTLKRLNPDSKHIQELKTLCRDQDTLIEDSTRLKNRLIACLKEYYPVALTLFSDISFPISLSFLKTYPTLEDARSASVPELAAFLKAHRHPQANLTARSIYEKLHLPQLKANSAITRAKSRLLLATIAQLEPILAQIKAYDKEITRLFESHPDRLIFAGLPGDGPRLSPRLLAGWGEDRGRYENAAVIQALAGTSPVLYQTGKIRFVRYRRACLKFLRRALQLYAFQTIRLVPWARDYYKRKRDSGKKHHEALRALANVWVKIIFAMWLNHQPYDETIFLVARAKHSPSVA

SEQ ID NO: 205874 - protein, 403 aa, unidentified
MATKTKTTARSTATQYIGIDVHCQFCEGGVIDSLGRESGPFNVATSIPTLLEVIEKVRRPRTVVIEEGPLADWLYRHLAPHVDEMIVCDPYRNALIAKEGDKSDPIDWRKLAHLCRGGYVKAVHQRQSLARSVLKQHVQVYHDRVRHRVSEANKILWRVRRLGVFVTEADLKDDARRQAMLEQLPGGGQANQRQQDGKDNSNGNSKGTTDGKGKDNSKGNSNDKDAASDSGSVIRQDVQLLLKGYDLAAEQVTELRRRLVTLGKQEPIIRAFCELPGVSWVRAASFFVMVDTPFRFASKQKLWKYAGIGLERHQSGNGPVRLRVPRRCNRVLKNVLLGAAKSAAASKDNVFADQYQRWLDAKCSPRIARRNLARSLATTMWGMWKSGSVFDPKMIGCMPAVIA

SEQ ID NO: 205875 - protein, 347 aa, unidentified
MLIIGCDFHPSFQMVSIFDKKTGEVRQMRLGHREEAERFYRSLPAPVRVGMEACGQWIWFERLLAELGHELWLGDAGQIRAMVVRQQKTDRRDADHILTLLLQERFPRIWVPSLEERDVRQLLVHRHKQVQARTRVKNQLQALALGQGVQRKRKLWTEKGRAELEQLPLLPYAAQRRQLLLESLDRLEQEIQQLNGRVEQEVGRRPAALKLRTHPGVGPVTALATVLTLGPVERFGSARQVASYLGLIPREHSSGGRQQFGRISKQGNPFLRFLLVEAGQSAVRGDAELRRFYQRLAARKHRALAKVAVARRLAQRLYWMLRQDQTYAQLLQGRHAGEPESFCGRRN

SEQ ID NO: 205876 - protein, 321 aa, unidentified
MSKNVEFEPFAERCCGLDVHKKEIVATVEGEGIARETKTFESTTRSLTELKEWLLDLGVTHVAMESTGVYWKPVMNVLEPVGFSIMVVNARHIKYVPGHKTDKKDSAWICKLLRAGLLKGSFVPSREQRDLRDLTRYRRKLVQQQAAEHNRMIRIFEDANLKLSSVFSNIRGKTCTAVIDAVIAGETDPQKLSEMCTHWRLKSTQEEIALAVEGNFTEHHMFMIRMIRSSIADIEKHIADLDAEIDRRMTPINGIIERLCGIPSMDRTSVKELIAEIGVDMEVFPTADHLASWAGMSPGNNESAGKKKARTRTTGTRRRKR

SEQ ID NO: 205877 - protein, 396 aa, unidentified
MVTVGIDIGGRSHVVARCRDGQARADREILRVSQSRAGFTALGAWLDRQDEPVTLVTMESSGHYWMPLASHLRRREVPVAVVNPLAAKYFAKSRLGRTKSDPADARSLAEMGMRDEPVTRDPLEGAELRQAARFAMTLVTEQAKVCQRLLRLVELGFPELGELFDDPTCRTAREVLRIAPTARAATRRRTSTLADANAGSGHRRLGHAKAERLQAAAADSIAVPELDAEVAFEIGLLLDQYDLLERQIDAADSHVAALLDGELARRLQTIPGVGPSTAAILIAEIGDIGRFTDFDQLLAFAGVHPAERSSGRKGSNPETAWHMSKAGNSHLRAAAYRMAVVGTQHNPVIRAHYERKRAAGKSKMNALGHCMRKALSIVWGVWRNGQDFDPNWGAQD

SEQ ID NO: 205878 - protein, 322 aa, unidentified
MSIPKRRIRGVMVGIDIGKFRFECHIEGQSGTSSHANAATYFETFEQSLPDAVAWIVLEATGGYEKRLRRYLQGCGYRVHVAHPVRVRAFATAHGMLAKTDPIDAQVLSDYARAMAPFALQVETAERQQIQLLIRRRTQLVEQRKAETNRLDKTTEPSAIASLHRHMAWLDEELKLLEAELEAMLQTHPRLMAQVALYESVCGIGRQSSLTLLADLPELGQANEKALTALVGLAPYARDSSTLKKRRRIRGGRPTVRRVLYMAAISAIRYNPDLRPFYQRLRKRGKPGKVAVIAVMRKLLLVLNAVARRQTPWEPNRSAAMT

SEQ ID NO: 205879 - protein, 482 aa, unidentified
MKKRNIYQNQSQELLSLFEQAANNAKVMCVPIDYAKKDHVVMFCNGYGDILRKPFSVKNSPAGVDFLTDQVMRSCRQRAISEKHVFFGGEDVGSFADNFVSTLRCQGWLVAGVNAHEAKTQRENLQASTDRLDLMGIAKSLLNRRANCSPAQSGIYLNMRTVVRHRRKLVDIKTEVRNRIHTVVDRLFPGFLDESKSGITPFSKSSLWLMKERFSAGQIRRRRRSTFIEALRRLGTKKPECTADQLQQYATQVLKPPQDYVHMLQLSLAQHVKHFCCLQESIGQLEKEIALNLAQTQGAFLTSVRGIGIVLAAGVSAEIGNPYEQKPLNNLVSYCGIIPRVKQTGGPQGETKTGKVAKRCNRILKDYVVQSASHLGLHGPADLMSDYKRRDAAGQHADFGMARRYLRMAMCLMRTSQIYLPNGLRKAQAQMDERADYYLMNWPYLRDKWQKLGALETAFKADHPLGQWRKIVQQFYRIKLTL

SEQ ID NO: 205880 - protein, 378 aa, unidentified
MPSENTVHIAIELSFSSWLVAARLTGAKKSRLHRIEGGDTGALLALIAELRSRALTQLGGAAEVACCFEAGRDGFWLHRLLTAHGILVYVLEPTSILVNRRSRRAKTDRLDAEGMLRVLAAWLGGDRQVCSMVRVPTPEEEDGKRPHREREGLVQEKLRIENRIEALLFTQGIRARPSLRSWERELTELRTGDGRTLPPLLRAELDRLRRRLVLILELIRELEAERAAALAAAPDEAMAQKITSLQRVRGIGANFSAVLVREVLYRSFANRRQLASYVGVAPMPYQSGGMDRDRSISRAGNPRARTTLIQLAWLWLRYQPGSALATWFRERVGTLQGRTRRIAIVALARKLLIALWRYVEAGVLPAGVEIRTGTVPAA

SEQ ID NO: 205881 - protein, 313 aa, unidentified
MSELYVGVDVSKEYLDVASSDGTSWRVGNDEAGHQELVTRFGAAPPALVLMEATGGLERALAVQLSAAGVALRIVNARHVRHFAKATGLLAKTDRLDAQALVHFAQTLKPEPRAIQPEQTLALQALIVRRRQLVEMLTMERNRLRTAHRGVRKDLQTSIRWLEKRLAGVDDDIDGALRECGVWREKVQLLESVPGIARVTSVSLLASLPELGELNLHQISALAGVAPFNRDSGRWQGRRSIYGGRPLVRSALYMAALVGARHNPVLRTFYQRLRAAGKPAKVALTACMRKLLVILNTMLKNGQRWGTHLQLQA

SEQ ID NO: 205882 - protein, 339 aa, unidentified
MQATTIGLDLAKNVFQVHGIDDHGEVVFNRALRRGQVLAFFERIEPCLIGIEACGTSHHWARELIKLGHIVKLIPPAYVKPYVKRGKSDAVDAAAICEAVTRPTMRFVEVKTPEQQAILAVHRTRDLIVRQRTQTINMLRAQLAEFGIILPQGVYHALQFAKDCVNEGPSNLPNDAEEVIIDLCDQLLFLHSKILRLSRHMTQIAKREKRVALLRTIPGVGPITASAIVATVGSGKQFNNGREFAAWLGLTPLNKSSGGKERLGHISKMGDQYIRRLLVLGMTSRIRSIRSKPEKFDPWFADILSRKPNRVAAVAMANKTARMIWAVLTRNEPYTVRTV

SEQ ID NO: 205883 - protein, 404 aa, unidentified
MVKYHIGIDVSKRKHKACIHNLAQDSYSGIFSIEVNHQGFEKLINTLEKLSTNKEDFLIGIEATGSYGDTLSYYLLSRSYKVVEINPYRANQFRKAQGKKAKTDSIDARSLAAQLALGNHKVLAIPDPVLDNLKELTRFRADMVKDRSALVNQLHETLSKIFPEFATVFSQLDSPSSIALLIAYPGPGYISRAGEAKITEILFKVSRGMMGKAIAESLIAASQTSIGVLQRQPALTTKVSILGERITSLTAAIKRVEKEVADLFHKLPYKPEDFPVGDISSLATLISEIEDINRFHTLKQFLSHYGWCPQSYQTGSYNREHPRMSHAGNSYVRRVIWMLSIVAIRNVPRYRDYFQRRVNEGKAKMHVIVAVARKLLSVLYAILKKGIPYDPDWEVNRHLAMARP

SEQ ID NO: 205884 - protein, 408 aa, unidentified
MLKIVYPNCCGIDVHKTFVLAVIAITDEHGVTQYFRHRFSTFTKGLGELKQWLEYYSCTDVCMESTGKYWIPVYNVLEDSCSICLAHPKYVKAIRGKKTDKKDAKWIADLFKHDLVAGSFIPPLPIRELRDLVRYHFKLTNFCSSEANRLQNSLTVSNITLSSVLSDVLGVSGSRIIDAILEKPTDEIDLSALIHGRLKSKLSDLELAIDGKITDEQAIKIRIIKSHYDALTLCKSDLEKAIIEVAEEFRAQQELIQTVPGCANQFTTIKIISEIGVDMGQFPTAGHLCSWAGLTPTNDESANKKKSVRISKAGHYLKPLLVQIANGIVKSEKYPEHRNKYLQLKKRRGHKKAIIAIARRILTAIYHVLLKREPYDSSYYSIEIVHPNRVMTINEAISFAKSHGFVVS

SEQ ID NO: 205885 - protein, 287 aa, unidentified
MKIIGCDFHPSFQQIAMCDSETGEFQERKLSHADGQAERFYLELGGPALIGIEATGNSQWFLDLVGRLGYEIRVGDAAKIRASYVRKQSTDKRDARHLLTLLLEKRFPQLWTPSAAMRDQRQLLRHRDKLVEIRTKVKNSLQHLAMNRGMQKKSRLWTRLGMEQFQQLAMPGWAGVRREDLSHLLKQLNCQIETLDRAVEQAACQHPQAQLLMSQPGVGPVTALAFVLTIGEVTRFAGSKQLSSYLGLVPSEHGSGSKRRLGAITKQGNRFSAQAAGGSSADRSAQG

SEQ ID NO: 205886 - protein, 389 aa, unidentified
MFYLGIDIGKNTHVASLIDDKKKVVFKAFSFSNSVKGAESLISKLSNFKNELEVGMEATGHYWLSIYSYLVKNNFTVRVINPIQTDGWRQGIEIRKRKTDIIDSLLIADLLRYGDFVESSLLSEDFMSLRNLSRFRSYLISSIGDLKRKTIALLDQVFPEYASSFSDIFGKTSKQILETFSSPSDFENISSDDLSAFLESVSRKNYASRKIDELSRKASTSFGINFSLDSFSLQIKMLIQQISFIQNQVSDIDKEIEELLKKINSPITTIPGIGPVNGATILGEIGDISRFSNPSKLVAYSGIDASVSQSGDYESIHNHMSKRGSPYLRRALFQAALIAEFNDSVFSAYYQKKISEGKHHLVATNAVARKLCHTIFAVLTKNEPYQIQS

SEQ ID NO: 205887 - protein, 330 aa, unidentified
MCIFIGIDISAKTFDVVTRNQGKPNKPSSFEQSFEGHEKCIQQLKKLKPKLIVMEATGIYHLDLAIAIYDAGLPVSVINPASFKQFAALMLTQSKTDGIDAGLLAEFAERMKPRLWIAPTKNCIYLKDLGRQIQRLTRDSAKAKNRLHAFKSKRTTTPLLIEDIEDSIAHYTLRIGKLTNAALDLIQDDPNLNTHFSNMQKAKGIGQASAISILAEFVVLSNDMKAKQVSRHAGLDVKLHQSGSSVNGASRISKAGNAYLRSALFMPAMSAVRHDENVKAFKEALVRRGKKKIQENFAVMRKYLTGLWAVYQTGIAFDSTKLFSDVHKKA

SEQ ID NO: 205888 - protein, 347 aa, unidentified
MRFYTKVHKHYCGIDLHALTMYVCVLNQEGDVLLHRNIECDPELFLTTIGPFRDDLVVGVECIFTWYWLSNLCAREGIAFVLGHALYMRAIHGAKAKNDRIDSRKTAGLLRGGLMPQAYAYPMKMRATRDLMRRRLHFVRQRGQLLAHIQMTYHQYNRDSPGKRIAYASNREGLGEGFEDVSVQESIAADLELIKHYEMIIGELELSVVRRARCHDPNSFQLLRSIPGVGKILALTILYEIHDIERFARVQQFASYSRLVKCQQTSAGKVVGSGGKKIGNAYLKWAFSEAAVLFLAKCPEGKPLLARLEKKHGKAKALSILAHRIGRAVYFMLARKRAFDLERFLRS

SEQ ID NO: 205889 - protein, 408 aa, unidentified
MDSAFRFFAGIDWGSEKHRVCLTGRDGQIMAERWIEHSGDSLAELAVWLRQHTSDSPSLLAAAIEIPRGAIVETLLEHGFTVFSINPKQLDRFRDRYSPAGAKDDRRDAFVLADALRTDMHCFRAVKLDEPAMIRLRELSRLDDELAQEQNRAVNRLREQFHRFFPQLLRLCESADESWLWDLFELAPLPARAAKLSEAKITRLLQQHRIRRITAAEVRAALKTKPLTLAPGAAEAAAEHALLLLPRLRLLHQQRVDLGRRISALLDELATPAEDKHEHRDAAILLSLPGLGRKIAATMLSEASQAIADRDYHALRCYSGAAPVTRQSGKKKIVLMRRGINQRLRNALYHWARVSVVFDPQSKKRYAAMRACGHSHGRALRGMADRWLKTLTSMLTTRTLYDAQRRAA

SEQ ID NO: 205890 - protein, 351 aa, unidentified
MEHTTIAVDLAKSVFQVAVSHTAGRVEAERRLSRDRFLAYFAQQPPATVLLEACGSAHHWGRQLQQFGHVVRLLPAHDVHRYVRRNKTDRTDAKALLEAARNEEIHPVPVKTVEHQAITSLHRLRSTWLATRTARLNTLRGLLREFGIFIPVGAHHVVPRVRELLGEPTAAVPAAMRSTLANACAEIEVLERNMRDVERQLAAIARQLPDVVLLQTVPGVGLITATALIALVGDIRRFGSGRHFASFLGLTPKEDTSASRRRLGAISKQGDVYLRMLLIHGARSVLWHAKPCAHPTSFQAWARRAEQRRGHNVAAVAVANKLARIVWAVWSQQRPFAANHRPAESTSVANI

SEQ ID NO: 205891 - protein, 354 aa, unidentified
MNDIKYIGIDVHQSTSVFAVRDRQGEIIGESILKTNPSAIVDFLKGQRGTVRVAFEEGTYSNWLYDVIKPHVSRVIVCDPRKNKIDGNKTDKIDARKLAELLRLNALSAVYHGEQSHQTIKEYARSYLNLQQDSVRAMNRVKAIYRGRGIGCRGRTIYGPKNRKEWLDKLEDRGARCRAERLLKQLEFFGKLRIEAQKDLVRESRKQKDYKILKGIPGLGSIRKALILAFVITPHRFRNKRQFWTYTGFSVVRRGSSEYEILEGELQRKKRKPLPRGLNHNYHRVLKDVFKGAALTAAYRGPFKPLFDQRVANGMAENLALLTLARKIAAITLAVWKKGERFDIERHQLSEQKT

SEQ ID NO: 205892 - protein, 312 aa, unidentified
MDECIFVGIDVAKDQIDVCLQPADIYRTFPNEKKGFDELQKLLAHQRITLAVMESTGGLEIPVAVSLGCAGIPIAIVNPRQVRDFAKASGRLAKTDRLDASTLAQFGAAIRPAAQPLRGDEHRALAAIMTRRVQIIDMIVSEKTRLSSVPNSEMAKDIKSHIGWLEKRLRKIDQDLGNRVKRTPLWRERDALFQSVPGVGSVVSHTILAHLPELGTLDRRKIAALVGVAPLNWDSGRMRGRRVIWGGRAAVRKALYMAAVASMKWNPIIAAFYKRLRVAGKKPKVAIVACMRKLLTILNSIARSGEAWRSCA

SEQ ID NO: 205893 - protein, 475 aa, unidentified
MNIKGTKKKNQVVTANIFEQQELLKKAEVIKENLTASTWRELETNGKFDKNKKLSFISDDMLILGCDVGSETHYVRAIDTRGRELSKSAYSFNNDYEGFQSAKEWAVKIAAEHDKSQIVLGLEPTGHYWFCLATWMIANGISVVQVNPYAVKQTKEVEDNSQLKDDRKDPKLIANLVKDGNFGMPYLPEKIYAELRRLSMFRDQLNEDRIRTINRMHREMKIYFPEYKEALGKVDGAFSLELLKEAPFPDELTALGEEGIRQIWHAAKLRGRGYSRAREILQYAKASVGIKDGSIASKVAVKWFVQKIMELDVELAVIENQINQKCQEIPHTGNVLEISGIGENTLSGILAEMGDISRFDDVKEIQKLSGLGLVACSSGKHKGETKISHRGRKRLRYWLFQAAKSAVAHAEEFKELHMYYTTRADNPLKKMQSLIVIACKLLRIIYTILNTGTKYAPKKMLMDIRRPENKESTAA

SEQ ID NO: 205894 - protein, 344 aa, unidentified
MQMYYIGLDVHKKTISYCIKDAGGQIYGEGKIGATRRELDTWMKTLPCPWTVAMEATIFTGWIYDHLLPHAEQVKVAHPLMLRAIASAKKKNDRIDAGKIADCLRCDFLPECHMAETGIRDRRRTLRYRHLLVRQMVQMKNRISGLLLETGVTHNKQKLHKVGYFRELLSSNDEVSESIRPLLKLSRETIVRLQKTEYTLISSLQRDPLLAERVKNLRTVPGVGPITALTWALEMGDVSRFQSVKQAISYCGLCGAEKSSADKVMRTPLSKQRNKHIQHTLVEAAKLGPRLSHELAEVYEKKKLKGNANRATLAVARKTVAYLLAVDRGKRAFVPQEEQGTAVA

SEQ ID NO: 205895 - protein, 347 aa, unidentified
MVTLGGDCHKRTHTLVAVDENGRELGTKTVAAVEAGHLEALRWASQWAQRRWALENCRHLSRRFEADLLLAGETVVQVSPKLMAGARRSAREWGKSDPIDALAVARAALRESDLPVARLEGKSREVKLLLDHRDDLVGERTRVQNRLRWHLHELEPSFDVPARGLDRKVVLSQVAKVLARHHGVAAEIAVELLERVRELSLRINELERQIRTLVTRLAPNLLQLEGCAALGAAKLIGETASVSRFKTSAQFAMHNGSAPIPVWSGSQARHRLNRGGNRQLNAALYRIAITQIRFGGRGHAYVERRRASGDTKREALRALRRRISDEVFRRMWQDHLAGETAVREAAA

SEQ ID NO: 205896 - protein, 349 aa, unidentified
MHINGQAVLGIDTHKHTHVAVVMDGLGRHLGTLQFPASDDGAAQLLAWSRTHGAPTAAGVEGTGSYGYQLTRSLQAAGISVAEVNRPDRANRRRKGKSDPVDAEAAGRAVLAGQATAVPKNREGAVEALRALTIARNSAVQGTTTASNQIKALLVGAGQDLRDAMHVKSLLQLATRCSQLPAMSGLHAALASLGQRWLQLHDEVLQLDRLIRDLIRRTAPKLIQRPGIGIHSAAQLLITAGGNPERLHSDAAFAALCGASPVQASSGQRQRHRLSRGGDRSANCALWTIANNRSIHDPRTRDFAKKRSQQGDSRNDTLRVLKTLHRPRNFRPDPRCSPQRAANHRGRLT

SEQ ID NO: 205897 - protein, 439 aa, unidentified
MTDKNETIEFAAYIGIDWADQKHAWALQSSSESGMEQGDLLHKPEAVEAWAAELARRFDGRPIAVALEQSRGSLLFMLLKYEHFVLFPVHPSTLVNYRKGFRPSGAKSDPSDAILLLDLLVRHREKLRRLHPDSEQTRTLQFLVEGRRKFVHEKVRYCNRMTAYLKMYFPQILDWFSAVGSPIVGDFLLRWPTLEKLQKARPATLREFFRQHNSYKSDSIERRIQEIRNAVPATHDEAVIRSCSRAVLGLVRILREVRAALRAYDEELETLTRQHPDFALIDSFPGVGPVLAPRLIAALGTQRDRYQNASELQRYSGIAPVLASSGNQSWVHWRWACPKFLRQTFQEWAVHSLASSAWAKAYYQQQRAKGKAGNTVVRALAFKWIRILFRCWKDRTPYSESAYQQVLEHRQQLAHKRSAVKVQWKTSAGFSKIAAATVD

SEQ ID NO: 205898 - protein, 414 aa, unidentified
MGSGCKICIGGMHVNCVGIDVSKGKSMIAVMRPFGELVIPPFEVGHTDAELCEVSRLLGKLDGETRVVMEATGNYHLPVACFLYDSGFYVSVVNAMLVHGYGNNSLRRAKTDKKDAIKLANYGLDHWMTLPKYIPEDEVRLLLKTTYRQYQQCTKVQTMLKNNLISLLDTAFPDVNRLFTSPARADGSEKWVDFVAAFPHCECVCGLSEKAFAAKYQKWCKKHGYNFSQDKARDIYVSACGHFSVLPKTDTAKLLVEQAVSQLRAASAALAALRNEMQSLAASLPEYPVVMGMFGVGPALGPQLMAEIGDVRRFHSKKALVAFAGIDAPPYQSGQTEVRSRSISKRGSSALRRTLFLVMSVILQRSPTDEPVYQFMDRKRTEGKPYRVYMMASANKFLRIYYATVKQYLESLEA

SEQ ID NO: 205899 - protein, 357 aa, unidentified
MQGLERVKRFRYFMGIDQHKRYSHITVIDEVGDIVEERKLYHHDKEGMLNYFKSFNPEETKAVLEATGNWYWLADLLESANLTHILAHPYKTRIIAESKIKTDSISSFTLAQLLRAGLIPQSYLATRNTRSLRELLRYRISLVKVRSSLKCRIHSILDREGIDTPKLSDLFGRKGLIWLKNLTLAYPLSQTLEGYLNLIERLNSLIDETEKSIKLTIKENPLAQLLLTIPGIGFFTAYLILCEVVDINRFLTPKKLSSYIGIVPSIHQSGNLSHTGKITKQGNKYLRWALIEASQKAIIKDPYLKAIYDKITYKKGKQKAKVAVANKLAHIIWGVLKYRQPYRPKKRLIYSCPGQAR

SEQ ID NO: 205900 - protein, 413 aa, unidentified
MADGTVSWFVGVDWGSEKHQVCLLDAAGQVVGERAFRHGGAGLAALCDWLVSVAGDPGLVAVAIEVPHGPVVDALLDRGFAVHAINPKQLERLRDRISLAGAKDDRRDARVAAGGLRTDPHLFRPVEAGDPAVIALREWSRLAEELQQERTRLSNRIRQQLWRYYPQLLEVSDDVTAEWVLDLWTLAPTPAKAARLREATLARLLQEHRIRRVDAERVHGLLRQSAIKVAEGVTEAAVLHLRSLVARLRLANREFHQAEGKLDELCTSLSERTSAPKSSTPPDAAILHSLPGVGTVTLATLLTEAAGPISRRDYAALRTLSGVAPVTKRSGKSCIVTMRYAAQVRLRNAVFHWARVAVLNDPKCRSRYAALRARGHSYGRALRGVADRLLGVACVLLQRQVLFDPDHGTRAAP

SEQ ID NO: 205901 - protein, 347 aa, unidentified
MVTFGGDSHKRTHTLVAVDENGRQVGECKVGATPAGHMEALVWARQWPHRRWALENVRHLSRVLERDLLNAGEGVVQVSPKLMGSARRSGRELGKSDPIDALAVARAALREPHLPVAQLEGKEREVKLLVDHREDLVGERTRIQNRLLWHLHELEPGYQVAASGLLRGVVLAEVSGRLVSHTGVVAEIARELVDRLAELTQAVKRLQRRIEGLMRELSPALLSLPGCAGLSAAKLVAETADVSRFRSSAAFAMHNGTAPIPVWSGNHERHRLNRGGNRQLNVALHRIAITQIRLGGPAAAYIARRLSMGNTKTEAIRALRRQISDEVYRRLRQDSSERSTALAAVAA

SEQ ID NO: 205902 - protein, 354 aa, unidentified
MRIAGKKEGVSVVGKRVYVGIDVHKESWQVTVRTEGEEIFNGRIPGQYQSLKRLLERYQGSWMKVAYEAGPFGFWLSDKLVEDNIEVMVVPPSLIPVESGNRVKTDKRDSRKLARLLESNMLKQVYVLTPEEREHRDLLRTRRQIVDHRKDVARQIKSKLLFYGIASPFSATPYWSLKYIEWLKALSFATDYLMESFQLLIDLYEYLTRQIARINRKVVLLCREAKYLDRIKLLCTAPGIGKLTAIEILVELQDISRFENGEELASYIGLTPSEYSTGEKTRQGRITRCGNTRVRTYLVESTWTLIKKDPVLRAKYLKLKNARGGKRATIALARKFILIIRRMLLDNTPYRMAA

SEQ ID NO: 205903 - protein, 360 aa, unidentified
MTGTVTWAGLDVHARSIHAAVVDARSGELVRRRFGGETEAVVAWLAQLPGPLRACYEAGPTGYGLARACAAAGLCCEVIAPSKTPRASGDRIKSDRKDAELLVRLLMAGSLTPVRVPAPELEAVRDLVRVRAGLRDDLSRERQRTSKMLLRYGRVYPGKSCWTRAHRLWLAEQRWPYPAQELAWCDHLAAVDGLATRRAAIDEQLSLLMHADFLWPTVARLRCFRGVDSLTALALHVEVGDWARFARPAQLSAWLGLVPTLSQSGESLRRGGITKTGSRHARRLLVESAWHYARPPRLGVTLDRRQAGQPAHILQIAWRAQCRLHRLSMRLRGAGKPANVVTVAVARELACFLWAAAVAA

SEQ ID NO: 205904 - protein, 400 aa, unidentified
MRTVFGIDVSKASSEVAILVNGERVHGYTMPNDIIGFSRLLEDLKTVSNPEIIFEATGVYSRRLQAFLEENSYDYTRLNPLEAKKQLDGLRVRKTDKIDAEKLASSQFVLNRKPTYVQEEVYQNLHDLSRFYQNLTEDIVRTKNRLHKVLQVAFPEIENLLSTPTGEQYWNLVSIFPTKHWVLELSEVELKEAIRNSTSKRISENRVSNLTEKLVGLAKQSYAGISKTSPMVEEVKYDAQELIRLTNRREQVLQQLIALAEPLPEYKILLSIPGIAETTATSIIGELGDIRRFKSANQINAFIGIDLKHYESGDFLGQEHITKRGNPYARKILYKCIHNIASASHTNPCHIADFYEKRKRQSQITSTKPHTIASIHRLIRTMYYLIMHNKLYDYTLAQSH

SEQ ID NO: 205905 - protein, 338 aa, unidentified
MKGGLVSHFYCGVDIAKDTAVFCLVGNDGEPLNKPETFANTSKGFREALKWLKKLAKPYKPFDIHIAMEASNVYFLAMAKFFHSQKGFIVSVVNPAQVKAYGQARLVRTKTDGVDALLIARFAQAMNPRPWSPPAPHEEEMLGIVRHLEVLKEMCQAERGRLHSLQTIGASTAEIQKAVKKHIKFLEDQINDLNNRLKKLAKEHPDIEENIKLLCSIPGIGETTAYALIAEIGDIGRFENVKQLVAYAGLAPAERQSGTSVRGKVMINKHGSKRLRKSLYMPAVVAARYNPAVSDLYQRLTASGKKPICAVVACMRKLVHIAYGVLKSRKCFELQGCF

SEQ ID NO: 205906 - protein, 369 aa, unidentified
MAKSISRKRTQRSETLGTWWDRVSTIGIDLSDRSSQCCAIDDEAAIVAEFRLGTDAASFEKTFGGVGRKTIAIETGAHSPWVSRLLESLGHEVIVANSRKLRFIYENRRKDDRVDARSLARVARMDRQLLEEIRHRSEHSQVDLELLRARDVLVTTRTRLANHIRGVVKSFGKRLPTCGPAALPRKATAAMPTMLEAALRPLLDVIESLSRQIGEYDRAIEHLATVEHPDVATLRQVSGVGALTGLAFMLTVDDPHRFRHSRSIGAWLGLVPAKDDSGERRPQMPISKEGDHYCRRLLVGSAQYILGPFGPDCDLRRHGLAIAARGGKNSKKRAVVAVARKLAVLLHRLWVTRGMYEPLYNTLRRQIAA

SEQ ID NO: 205907 - protein, 338 aa, unidentified
MRVYIGIDLHANNLYVSVIDIKGKVHLDCKLPTDLGTVLGTLSRYKKGAAGVVVESTYNWYWLVDGLMDAGYPVHLANPAGNHQYSGKKHSDDRSDARWLAELLRLGILVEGTILPKEDRAVRDLLRKRGQMVRQRTANILSVQNLYARNIAVRPNSGKVKGLSRQNAREAMGDPLLAQAVESTLAVMAAQSAEIKRIEGMVLAAVSPRPEYELLKGAPGIGVILALTILLEAGDIGRFPGPGHFASYCRCVGSEKLSNGKKKGEGNGKCGNRYLAWAFAEAAHHAIRSYKAVHAFYERKRAKRNGIVGLQAVAHKLARASYHMLHDKVAFDMKRAFT

SEQ ID NO: 205908 - protein, 341 aa, unidentified
MQITTIGLDIAKDVFQVHGIDANEKVVVRKQLRRSQVIAFFKALPPCLVGMEACASAHYWARELRKFGHEVRLMPAKDVKAYVKRNKNDAVDAEASCEAVRRPTMRFVGVKSAEQQGQLMQHRTRDLLMRQRTQVINALRAHLAELGIVAAQGREGLKELLAIIADESDARLPIDARASLIVLAAQLQAVQTLIGSIEKRITAQHRANEASKRLQSIPGIGVIGASAIVSTVTDPKAFRSGRDLAAWIGLVPRQDSTGGKQKLGPISKQGDRYLRRILVVGAHAVLRRAKHNPEKYPWLTQLLARRPFKVVAIALANKMARVAWALLASGGRYRAPRLTAA

SEQ ID NO: 205909 - protein, 343 aa, unidentified
MQVVTTVGLDIAKSVFQVHGIDAAGQVVIRRQLKRRYVLAFFEKLPPCLVGIEACASSHHWSRELKALGHTVRLMPPAYVKPYVKRQKNDAADAEAICEAVTRANMRFVATKTPEQQSGLTLHRTRHLFIRQQTAVINVIRAHLAEFGIVAPVGRKGVEELLNVVTDASDKRVPAAARMCLAALGAQLRRLKEQILEFDRMIMAWHRSHEASRRLDVIPGVGPILATALVASVTDPKAFRSGRNFSAWIGLVPKQYSTGGKDKLGSISKQGDRYLRSLFMAGALAVIRGAKIHGAKHRPWLTALLARRPIKIAAIALANKIARTVWAMMARGEHYKEPVMLAA

SEQ ID NO: 205910 - protein, 343 aa, unidentified
MPHYVGLDVSQKTTAICVVDEQGLRLWRGECPTDPGAISARVLKHAGVDAKVGIETGSMTPWLVHALRGADLDVRCLDARQVKVALQMRLNKTDENDAEGLAQIMRTGWYRAVHVKSLDAHRARALLGARVQLVGMTTRLSNMIRGVLKTFGLLPGAGRGARFDRKVEALLEGAPDIALIVRPLLASWRQLREQIAVFDKAVRQRVKTDPICRLLMTVPGIGALSSLMYVSTVEDPSRFTRSRAVGAHLGLTPRRYQSGETDRSGHISRCGDGLARTLMYEAAVVILHRVKRSLPLKDWAEAIERRAGSGKARVALARKLSVILHSVWRSGEPFRWAPQPEAA

SEQ ID NO: 205911 - protein, 388 aa, unidentified
MPAAETPVAYLGIDVGKSSHSACALDAGGGVAFRAELANRPDDIDRLLERAGSGALVVVDQRRNIGALVLARAHAHGNPCAYLPGYAEKQARGMFPGIAKTDAIDAEVIARTALGVPRALRPAPEEPEGTASLRILSSQREFASSARTRAKNRLRATLLEADPALEGAVDPSSRWQVSMLAEFGGAAGCSAAGWRRFSNAARRAGAPAAGARRLWEALLASSRSGRRLPAGEDVAVRILAREIASLDADIEELDSLVADSLAGDEVYECLLTVPGIGPKTAAALVTSIDISAFRGHDELASYCGVAPSDRRSGSSIRSTSPQRGGNRQLKNLLIFSCNSLIGTDNRFGRYYGECRARGMRHGKALKAVARKRLKVIYAIMRDAVPYAA

SEQ ID NO: 205912 - protein, 341 aa, unidentified
MEIDVLGIDLAKQIFQLHGADRRGHVVHRAKVSRSSFFESVRALNPKVVVMEACGTAHHWARRFQSLGIEVRLISPQYVAPFVKTNKNDRNDAEAIVEAASRPTMRFVTIKSVEQQDIQAAHRMRAVMLRHRTALINQMRGLLGERGLAISRSPEAFKRAMPEILHTSADELTSFCQTLLTELLQHLSAIEERVRLIEASIQSFMKKSTLCKKIAEIPGIGPITATAVVAAVGDARQFRNGRHLSAWLGLVPRQYSSGGKPRLHGISRRGDTYLRTLLIHGARAVLRYAPTKTDPQSVWLQHLMTRRGHNCAAVALANKNARIIQALLSSDATYITRTATA

SEQ ID NO: 205913 - protein, 373 aa, unidentified
MNYNTVYVGMDVHKETFSLCCYTNEKELAEYSQKVDAHYSKVLNYLEAMRFHYGDDVMFICGYEAGCLGFTLYHQLTSHNVKCIILAPTTMSKPTGRKKVKTDKRDAALIARCLAHHDYSPVHIPTEQDEQVKEYIRMRQDHKLALKKIKQQILAFCLRHNYRYDTTKSHWTQAHLTWLRSLEPEGLYQEILTEYLATYDQLTDKLERLDQRIEELASKEDYQENVSHLSCLLGVKTQTALSTLVEVGDFKRFASAQQFASYLGLTPGEDSSGEDQNRLGITKAGNSHIRTLLVEAAQSYTRGKPGYKSKALKARQKGNPADIIAYADKANERLRRRYYQLVLGQNKKANVAKTAVARELACFIWGMMTDNIH

SEQ ID NO: 205914 - protein, 334 aa, unidentified
MKIRFYVGIDISDETLDVCVLDRTEVVLECQIKNKKKALAGLFKRLQGLEVTKSNTWFCAEHTGLYGLTLRQAIETYGFIYSMVPAIEIIRSSGLTRGKSDKVDAQRIAVYARRFKDKLRPSKLPLKYLGDLKELYTYRKQLVKKNSASKNFIKRLKKVWDSASNRFIIKAVKKELRDREKVIVALERQMTELIESVPKAAINYGLAKSVLGIGSITACYLLICTENFTLFNDVRKFASYSGLAPFEHSSGKSIKGKTRTSKYRNKDIKTLLHNGLNSVISRENEFNRYYKRKLEEGKHKNSVKNAVAFKMVARVFASVKRKTPYVSTYATNFN

SEQ ID NO: 205915 - protein, 370 aa, unidentified
MGVRRGPWCMTPFGSLDPIPFLVLGRTVARDGGRSREPASKEDYTMNEATPYIGVDVSKDKLDYSVSGEKAAGTCPNTAKGIRKIIVAARKLNARVCCEATGGYERGLLEACWAGGVEVVLTDPWRVRHFAKGKGVLEKTDAIDARIIARFACENDLRPFARPSEARRRLCDLTRAGETLDKQIQMARGQLEHCCDKAMEKLWLKNIRMLGGMREKVDRERIAVVNGDERMRHLFERYQLVKGVGPETALSMIAEMPELGTVSDKVAGKLLGAAPIPDDSGKKTGRRLIRRGRFAARRALYMAAVSSIRFNPILRAFYLRLAKSNGKPPKVALVAVMRKLICLLNRIAGDEAFKPSASGSKPAPRASGRG

SEQ ID NO: 205916 - protein, 418 aa, unidentified
MKSMEITAVGIDVSKSKSTVAIRRPGGVIVARPFDISHSNHDLEKLVSILKTTGGDIRVVMEHTSNYWKPIALTLKEAGFYVSVVNAMLIHDFSDNSIRKLKTDRADSLKIANYALTFWNELPPFNDEDETRLVLREQSRMYERLSSTATALRNGLIALADQTFPAIDQAFGHAIKNADGHEKWVDFFSIYWHRDCVLRLSIEKFTESYRKWCLRRNYKFRTNTAHKLYALAQDAVPTLPKNNGTKALVLQACKSLNAVCEAKQATQEEMNRLASLLPEYEVVMQMEGTGPITGPALMAEIGDVRRFKNKKALVAFAGIDAPPFQSGNFESKSRHVSKRGSPHLRRTVFLVANIILTLSHKDNSVFCFMDKKRAEGKHYYVYTLAGSAKFLRIYYARVTEYLRAQEPTATAICLDCKD

SEQ ID NO: 205917 - protein, 379 aa, unidentified
MERQQEDPPSIRHRCARVEMFGNHSQDRGSDMQVTTYGVDLAKRVFQVHWVEPDTGEVKRKMLTRGEFAAFFARRAAGLVAMEACGSAHHWGRTLRGLGHQVRLIPTQFVRPFVKSNTTDAADAQAIWEAVQRPEMRFVALKSELQQAVLGLHRVRAQLVKMRTMQANQVRGLLYEFGVVVPRSWRALLLQAGPILADSSRREVPELLRGELPQQLQGLRELTRRLEQLEHSIGTYRQQDEQCRRIEAIPGVGPLSSTAVLASIGDARTLRSGRQFAAFLGLVPRQSGTGGRVKLLGISKRGDPYLRTLLIHGARAVLNHSSRPGKTPSQWLAGLLSRRPKNVATVALANKIARTIWALLAHGRVFDPRWRRALPVSVA

SEQ ID NO: 205918 - protein, 597 aa, unidentified
MDVVVARCAGLDIGKTEVVACVRTPGEGGRRRQQTRTFLTFTSRLEALADWLAGEQVSQVVMEATGQYWKPVWYVLAERGFELLLVNAAHVKIVPGRKSDVADAQWLAELLEHGLLRGSFVPPREIGQLRDLTRYRKRTVQAHTAEAQRIAKVLEDAGIKLDSVASDLLGVSGRAMLHALVDGERDPARLAELAKGRLRAKLPALAEALRGRFAEHHALLIRLSLGHLQHLEATIAALDARVDELMSPFAAARDHLDTITGIGKRAAEIIIAEIGVDMSVFPTAAHLASWARVCPGNNVTGGKRKSGFTGGGSPWLRDILVEIWRKYRQDNVSILVSSLAYYTFFSFFPMLLLVASVMGFLFGMGEEYARVPRDLAARLPFSSEYLATALERVMKARRSLGVFGSVLLIWSATAAFDVLQQILNRIHQAPTMRPLWRRRLLGILLGLIVLFFVPLSIGLAGLRPLLLGALVHHTPLPATWERAILILCTGGLAVLFNFALLLVLYLFGPSVRRGVRQIWVGALAGAVLWEISKVAFGIYIRSLSSYKMLYGSVGSIIAILLWLYVSGTIFVLGAEVNFVLAARGERGDHRPQRRRRR

SEQ ID NO: 205919 - protein, 430 aa, unidentified
MNESDGIRLHEFCQFKKEIRGSTDYLIVGIDVAKERHNAFFGTASGKTLHKGMFFENTYEGFQKLLIRTEALKVQYGLRKVVFGLEPTANYHKPLGEYLIKGGNLVVLVSAAATAKNRELLDGRWDKHDTKDSANVADLISLGKCLYYDCPREELRSLRGLLSLKKRLKKEEHGIRVRIRNQLLAQYFPEMDQHFGSVASLNVVQRCLDPTDISLMQYDDFCRMVSPGKVNVAQQRRLTQIWRAAKQSIGCDAGEAVSVEAQIMVAALQRVRETIKTLEDTIENICLKFPEYTFLLTIPGFGPDVSSKVLAAIGDPERFTNGKQILKMAGFDLCASRSGKTSNSVTPVISKHGKTDLRYALYQAALISSLNCKEFIVYHTNKIKGREREKGIGTKMRVKLAAKLLIIAWTLMKKKEAFDPDRLNTLEKAA

SEQ ID NO: 205920 - protein, 359 aa, unidentified
MERKRFIGIDLGKRTYEIKIIESDGKVSGTNGLTNPAGRKTLYKKLRCTDRVAIEVCSLAMVMAKEIQSEVGCEVVLLNPSQIALIYRSVKKNDKEDALKLARLVQKFTNEELPKIELPTEHEENLRQILTELRQLKHDRTKEINRIHAVFLECGITEIKRKDLATAEKRTESIKILKGLALMQAERNLEKLKLIEKQIQEVENLLDEEIDGDKNIEKLEEIPGVGKQLASAFVAFIGDGSRYPNVSTIGAATGLVPRLDMSSTSLRLGHITKCGNTNLRSLLILAAWSHVKAKGSGALKDRYLYMTQVQSKGKKIAIVAVARKLAELMYTLLKNGTSYEKRTSPTISQLVGDALAVAS

SEQ ID NO: 205921 - protein, 376 aa, unidentified
MKKIRFVGLDVHAETIAVAVAEPNGEVRSLGTIANREESIRKLVNKLGPPDQLRACYEAGPTGYVLYWLLTSLGVKCDVVAPTLVPVKAGDRVKTDRRDALKLARNHRNGDLTAVWVPDEAHEALRDMVRAREAAKRDQLRARHRLSKFLLRHGKRFPEGGKAWTLKYMAWVKQVRFAQPAQEYTMLDYLHEVEHMNERVLRLEQAIEEAVKLAPGWMQEVIQALQALRGVAKISAATLVSELGEISRFETARQLMGYSGAVPGEDSSGERVRRGAITKTGNAHLRRVVIEAAWSYRLRPRIGPTLLQRQKGISEEIKEIAWKAQLRLHKKYQRLMAAGKDQRKIVTAVGRELLGFIWAIGTRTEGLSGQRRAMTA

SEQ ID NO: 205922 - protein, 347 aa, unidentified
MLHAGLDLSRKKLDVCLLSHRGEHIDQLAVPPDVDSLKTLARRIDEVHREPVGAVVESMTGARLVHDTLEAEGWDVEIADAQKVKGLAPLACKTDKIDSLVLAVLSHRDLVPAIWLPDPRVREERELARFRMHLVKHKSALKCRIHSTLINFGRPCPVTDLFGVEGRRLLARLDVPEPWRGNVTASIELIDDLERQIDQINRRLREGQADHPYVPLLLTVPGIGRVLAFTIAAEIGEIERFPSPQKFAGYTGLCPRVNQSGDKDRRGPLTKHGPTYLRWALLEATMHALRHPAYRERYQRTKKRLGKQRGAKVAQVDVARRLCHAIWHMLTRNQEFAPRGAAFRLAA

SEQ ID NO: 205923 - protein, 339 aa, unidentified
MGLYVGMDLHARNTYVAILDENYKRVFKKRVTNDLPLIVHTLHPFKDELKGIVVESTYNWYWLVDGLMDAGYRDIHLANPSAIKQYEGLKYTDDQHDAFWLAQLLVLGILPEGYIYPKETRPIRDLLRRRSFLVKQRTSHIHSLQSMIERYTSVHVSGNDLKKLALEELHEIFQQEHLLLSAEASLDNIHFLTQHITRIQKAVKEKVRIQTPFNLLMTVPGIGEVLALTIMLEIGDITRFPHVGNFASYCRCTPTDRRSAGKSKGKGNRKNGNRYLSWAFIEASHYARGFNERFRRYYQRKEVRTNKIVATKALSSKLARICYYIMRDQMPFREEALFC

SEQ ID NO: 205924 - protein, 350 aa, unidentified
MSKTLNSAIAVIGIDIGKNSFHVVGHDGHGTIVLRQKWSRGQVEARFANLPPCLVGMEACVGAHHLSRKLKGFGHDARLMPAKYVRPYSKGQKNDFRDAEAITEAVQRPTMKFVATKTAEQLDLQALHRVRERLVSQRTGIINQIRAFLLERGVAVRQGLRFLRAELPRILATPPDVLSPRMVRIVEGLVDDWRRLDERIETLSDEIEAIAHQDAGCERLMSVPGIGPIISSAMVAAIGAGDVFTKGRDFAAWLGLVPKQISTGDRTILGKISRRGNRYLRVLFVQAAWVALVKVKPTRWGHGLKRWIEAAKKRLHHNVLAIALANKLARIAWSVLARGRAFEVSEPQAA

SEQ ID NO: 205925 - protein, 320 aa, unidentified
MPMLLPVYGVDVSKAELVIARPTHKKVEAVANTPAAIRRWLGKLSGRCLIGVESTGTLQLALAEAAWAAGHAVYVIDPRCLKAYRRAIKLRAKTDRCDAQLIAQYLASEHERLHCWKPPDAVLGSLQRLLRRRARIVQCRVKLLATLKECPELRTASRPAIQGLRTLVRAIDKQCEDLLAQQPRRQLQHQRLSTIPGIGPLSATGLLVQLERTAYHSSDAVVAGLGLDPRPDDSGQRHGERHLSKRGPSELRRLLYTAALAARRWDPHFAALYAGYLARGLSSITALVMIARKLVRIAYALYRLGKEFDPGHTRIPCRGT

SEQ ID NO: 205926 - protein, 410 aa, unidentified
MNTLYVGIDVSSNNNVIYLMKPDGSKHSNFKVANSLNGSKELVKRIISALNSLELTSLSIGLEATSVYGDNLVYFLREDGSIATYDKQIHVLNPKQVKKFKDSYNDLPKNDYIDSFVIADCLRFGRINKEAYLDDYRYKALQNLTRARYFAVQNLTKEKQRFLNYLFMKYSSMTQEKVFSCKYGTTAFAVYEEFDSAEQLAEMDLHDLTEFIKAKGKNRFPDPDAVAKAIQKAARGSYRLPKTINDSVNQVLSISISSMRALESQIKEFDKAIEEQVKLIPNTLQSIPGIGPVYSAGIIAEVGDINRFKNQASMAKYAGLAWSQYQTRDFEAEQTHIIQSGNRFLKYYLCEGAWSHVCCDTEYKRFYDIKYKEVNRNQHKRALALTARKFARLVYSMLKTNQLYKAPVSK

SEQ ID NO: 205927 - protein, 417 aa, unidentified
MKAWTELTHFAALDWADDHHDLVVVDAQGQVALELTFTHNAEGWQQAQQALAAWPGLPVAIETSAGPAVDQLLQRGFVVYPIMPKAAARYRERKRPTGSKDDRHDAWSLADALRTDGHGWSALSPLDPLTGELRALCRDEITLIEQRTALVNQLQAALNEYYPAAVEAFEDWTAPCSWAFVLAFPTPKALAAAGKRKWEKFLHTHKLWRPQTSSQRMEIFARATAFSGGEAITAAKSLLAQSLARLLQTLEQQLANYRARIQALFDQHPDHDLFGSLPGAGAKLAPRLLAELAGADWSQLSQVQARAGTAPVTYESGKIKRVKIRRACTHPLRATLHLWADLSRHYSAWAAAFYRAHRDKGQSHACALRCLAHRWLEIIGAMSRTHSTYNPEHHLRQIQKHGSYVLKLISSPDPKPL

SEQ ID NO: 205928 - protein, 367 aa, unidentified
MKKISTVAEKQSKNISGKKLTIGLDLGDRSSWYCVLDEAGEVLLEQKLGTTPKAMQEVFGAMPRCRIALETGMHSPWVSRLLSELGHEVIVAHARNVRLIGESRKKDDRLDARTLARLARIDPQLLSPVKHRSAKAQADLTVIRARAGLVRSRTALINTARGLTKSYGERLRGCNPRNMNAEKAQQLSPELQSALEPLLAAIESLSERIYEYNQQIEKIARESYPQVARLEQVKGVGTLIALTYLLTLEDPHRFRKSRDVGCYVGLQPGRRNSGKSEPQLHISKEGDPYLRTLLVQGAHHILGPFGADSDLRRWGLKLAERGGKNGKKRAVIATARKLAVLLHRLWVSGEAYEPLRNSHQSALPAAA

SEQ ID NO: 205929 - protein, 388 aa, unidentified
MEWSGGTARAMHHPTTCMITNSIDGVRESEKSTGPAKAATVLSEIFLGIDTSAAKHVVTRLIPGEGPKPAEAMSTEPLVAKVAKWVNAGVAVHCVYEAGPTGFALYRRLVKTGATCLVVRPKRLEQHQRRRKNDPQDSRLLAEQLAAHHFGYSRLLVPVRVPTEQEELNRLAVRERETIHRARHQILNSAKGRALALGYPLPKQWWRPRVWPKIKDAFPPELARLLERTAQTAAAMKLQLTAAEAELKATAPAAPVGVGQVTAAVLEREVCSWDRFPSERKLSSFFGLCPCEDSSAERHHLGAIDKHGSPRLRFWCQEAAWRLFKHQPDYHVIIWARRKMAGANSHRLKQIAVAVARRFLVDWWKVRTGQTTFAALGLRCAESTATTR

SEQ ID NO: 205930 - protein, 353 aa, unidentified
MHTHQKSSDAVAVIGVDIGKNTFHLVGLDKRGAIVLRIKLSRSQLERRLANVPCCLVGMEAGCGSHHIARQIRALGHDVRLIPAQYVKPFLKGHKNDYRDAEAIAEAVQRPTMNFVAIKTPEQSDLLSLHRVRSRLVGQRTAVINQIRGFLIERGITVRQGPAPLRKALSEILSSPTEVLSARLVRLIADLAEDWRRLDERIAAVSVEIETLAENDGGCQRLMTVPGVGPIISSAVVAAIGNGGGFRQGRDFGAWLGLVPKQESTGDRTKLGKISKRGNKYLRTLFVQAAHVVLQRRPAAAIRGLWPWIERAAKRLAHRNLLAIALANKLARIAWAVLARGRDYEPRITINAA

SEQ ID NO: 205931 - protein, 336 aa, unidentified
MTQLRHRQPLGDLCLNSNPASFRRKLKRRYVVPFFQKLPPCLVGIEACASSHHGSRALQTLGHTVRLMPPAYVKPYVKRHKNDAADAEAICEAVTRANMRFVAIKTPEQQSCLMLHRTRHLFIRQQTAVINAIRAHLAEFGIVAPVGRNGVEALLNIVADTSDNRIPEIARACLVALGTQLRTLKDQILEFDRLIMAWHRSSEASKRLDEIPGVGPALATALVASVGDPRAFRSGRDFSAWIGLVPKQNSSGGKEKLGSISKRGDRYLRSLFTTGALAVIRYAKLHGTKHRRWLTALLARRPTKVAAIALANKIARMAWAMMARGERYREPVALAM

SEQ ID NO: 205932 - protein, 351 aa, unidentified
MLIIGCDYHPGVQQIAFMDTETGEFGERRLEHGEGEAEKFYRDLQQAGISVRVGMEATGHARWFERLLEELHFELWIGDPLEIRATRVRKQKTDRHDAQLLLKLLLEDRFPRIWVASWENRDLRQLLWHRHRLVQMRTRIMNQLQAVALNEGVRQKKRLWGQAGRAQLESFVLAPWARRRRQELLELLDRLNPSIRELNAAVEQEATRRPEVRRLMTHPGVGSLTALTFVLIVGTPQRFACGKQIASYVGLVPTEESSGGRRRLGHISKQGNSLLRFLLVEAAQATVRSDPDWRRKFLHLAMRRERGIAKVAMARRLAVRLYWMWRKEWDYEQVKKFGSHAGQPGNPLGVQ

SEQ ID NO: 205933 - protein, 454 aa, unidentified
MGKPRVVPDEDHEVMYQRVAAVDVAKASGVVCLRAPDPARPGRFTSRIWDDVPATRARIAELGAELLVSGVQMVTLESTSDYWRIWYYVLEGAGLAVQLVSASQAKNLKGRPKTDKLDAMWLARLTQAGMLRPSFVPPAEIRRVRDFTRARTDLVAERTRCLQRLEKLLEDAMIKVTAVAADGLKAKSVVAMVQALIAGERDPRTLADLAKGRLRARKDALAAALDGMFDSHHGVIAGMLLDQVAFLDQRITVMEDQAIAALAQVEESWGTDATGETGPAAGTAPGSPVLAAAHRLAEIPGISVWLAIVIIAEIGLTMAVFPTPAHLVSWLGLCRSAAQSGTRRGKGKPKKGNSYARAAAGQAAIGAARTATFLGERHARIARRRGKAIAQVAVARSIMIIVWHLLNDPAARYRDLGPDFHATRTNRDKKIRTYLRGLKALGLTVAITGDEHAA

SEQ ID NO: 205934 - protein, 310 aa, unidentified
MAVICGIDISSSTLEARVGASGAVGSFANTKAGVELLAVFCRAHGVTLAVMEATGGYERMPYRMLWMEGVGSAVVHPHAVRCFAQAMGMLEKTDRLDAGLIAAFAAARGVVAVRPPSAEQQRLRALVTRLRQLTELRTSQQNQKRLVTETAVLDGFDQMLGLFKQQIRELEQAIADLLAADPLWSELDRSFRQIKGVAGRTVARLMAELPEIGTLSHKAVAKLVGLAPMAADSGKHRGPRRVRGGRSTIRSILFVITIGVKKYQPQYAEFADRLALKGKPPKVIRVALAHKLLTQLNAKARDTRAQMAPA

SEQ ID NO: 205935 - protein, 358 aa, unidentified
MANLITAEGRVTVGLDVSDRHSHVCVLDSEGEVLEESKIRTTPEGVANRFKTMSPARVALEVGTHSAWVHRLLEDLGHEVIVANARKLRMIFQSDTKNDKADALMLAKVARMDPDLLSPIQHRSAQAQQDLAILRARDALVRSRSKLINHVRGAVKSMGGRIAAMSADSFGTKAEEQLPGCLRPALQPVLEVIRKLTEQIRQEDRAAEEAAELRYPQTRTLQQISGVGPVTSLAFVLTLGEAGRFESSRQVGAYLGLRPRQSQSGEHDPELRITKAGDGLLRRLLVSSAHYILGAFGPDTDLRRWGLKLASGGKTAKKRAIVAVARKLSVLLHRLWVTSGTYEPLRNAKETRTMTSGK

SEQ ID NO: 205936 - protein, 483 aa, unidentified
MVLRVPIGSWMPYKRINIPKTNRHEAIFQTLKLKTMSKSKTKKEKVKRISQLAVINPTAAGIDVSDTEMMVAYPINSEQLEIRVFGCFTRDLHSIANCLKENGTTTVAMESTGVYWIPLFLLLQEYGFKVYLVNARHVKNVTGRKDDESDAEWIQKLHSCGLLSASFQPDNMERTLRSMVRHRKNLVRTSATYLNRMQKALELMNIKLHTIISDIDGKTGLLIIEAILAGERDPEVLTDLRDKRIKASREDIIKSLEGHWTTEHLFELRQCYQLYCQHRQMIDECDKEIEKQLIVKIASKNEGIIPDIPKVKRKTSSKHKVPFNLTAYLREILEVDVTEVFGISELSGLTILSEVGSDMTKWKTEHHFTSWLGLAPNTKISGGKVISSRIKKKKHHAGQSFRIAASSLYNNKSPLGDYYRRIQAKSGVPKAVVATARKLAIIYYKMVANKEAFNPKALDDYRKKYNEKKINQLKKKIALLEAA

SEQ ID NO: 205937 - protein, 404 aa, unidentified
MDIVYARCAGLDVHKKTVVACVLTPEGRELRSFSTLTADLLKLADWLQGHGVMDVAMESTGVYWQPVHNVLEDRGLRPIVVNAQHIKAVPGRKTDVKDAEWIAECMQVGLLRGSFIPERPQRELRELTRHRRNLIQERSQVVNRMEKLLEGANIKLSSVISDLSGATGRTILEALATGTTDPEVLAQLRRGNLRASTSELASSLQGVMREHQRFLLQSLLRQLSFLEEEIAALDAEVARRTAPFEELFQRLDAIPGIGRRGAEDILAEIGFRLGHFPTARHLASWARLCPGSHESAGKRKQVGTGHANRWLRAALTQAAQAAARKKASYFQILYHRLAARRGKKRAIIAVAHSILVVIFQMVTTGRTYEDLGPYHFDLRDHQRLKNRLVHRLQGLGYTVSLEAA

SEQ ID NO: 205938 - protein, 320 aa, unidentified
MLYVGIDVAKNKHDVTVIDNTGKMVLKPITITNRKQGFELLHNTLKQLNQNCLTAMENTGHYALNLLTFLHQNNYQIYTYSPLLIKEFTKSLSLRKTKTDKKDAHTIALKLLSDSNRALFMHDNRQEELEIMTRHMNRLKKHQSDWKVQYTECLDIIFPELHHVVTKHSDYVYELLKRFPSPEKMVTAGFDKLIEIKRLTAKHALDILELAPNSIGTTSLAREFELIEIIENIQHYEKLIKQTEKKINELMAELNSVIATVPGISNRLASVILAEIRNINTFNHSAQLQTFAGLEPSIYQSGQLDTWLLTSTLGAHTSCY

SEQ ID NO: 205939 - protein, 383 aa, unidentified
MQPIDTVNPTILLAIELSASTWLVAARVPGAEKPHLHRIDGGDTAALLALISSLRARVARRLDAPQIGVVCCFEAGRDGFWLYRLLTAHGVASHILEPTSILVNRRARRAKTDRLDAEGMLRVLAAYLRGDHQACSMVRVPTLDEEDAKRTHRERENLVHERLRIENRIEALLFTQGIRKRPSLRSWERDLDVLRTGDGREIPHHLRAELNRLRRRLVTTLELIREVEAERDQAAEAKPQDQACRKIAALCRIRGIGANFAAVLTREVFYRSFDNRRQIASYVGITPMPYQSGGMDRDRRISRAGNPRARTTMIQLAWLWLRYQPGSELAEWFRERVGTLAGRTRRIAIVAMARKLLIALWRYAETGVIPAGAEIRAETTVAA

SEQ ID NO: 205940 - protein, 325 aa, unidentified
MTALKTFSMNPSPLELIAYLNKYYPGGIYHLVYEAGFCGFWALRVFQQHHVDCIIVNPADVPTTNKEKVNKSDPIDSRKLARELEKMSLHGIYIPSVEQEELRMLMRLRYRIIQSQTRTKNRIKSLLHSQGIAIPMQFSGSARWSHHFICWLESLPMNTTAGRFTLLNLIAQLREIRQHNKNVLKQLRAETRKETIAPIMNVLMSVSGVAFITAMTLYSEIIDMKRFADEDHLASFIGLVPSVQSSDENIYSNNITVRKHSFLRVIMIEAAWTAVREDPAMTLKFNELTKRMKGQDAIVRIARKLIRRIRHLWLHQQEYQYARVA

SEQ ID NO: 205941 - protein, 414 aa, unidentified
MTGDIKVSVGLDLHKKFILATVLWQTGQMIQERFDRTKEGLFSLKAWATGHHADVVACESTSDYWVQIYDLLNGIIPVIVGNAHDIKVLSHKKTDKIDSLMIARLALHGMIQPSRVFAQKHREFRKLVRLRHGLVQKRTDIKNQIHHILDSELLQLSSVMSDIFGATGMHLLQGLVDGTPLDVLLQKLPPRIRKREEEIRSVLSDTLSPDALFRLDCCLRLIRCLDEQIEVITESATAYAYENHTRQVEILLSVPGIGKIGAVTLLAEIGDVSDFSSAEKLASWVGVVPKVAQSADTLHTGSITKRGSVHVRWILTEIAHATARSRMNGLKTFFERKKKALGTGKAIIALARKIISLVWHLLSNDELYSDPQFPPKQNTDFVSVKVPKSLTLDELLQILVEANVYLKKKDPEML

SEQ ID NO: 205942 - protein, 349 aa, unidentified
MKQFIRIGVDLGKRYFQVHALLNEDGRAVTRKLRRDGFLAFFAEAAPCLIGMEACGSAHYWGRELRAMGHEVRLIPPIYVKPYVKRGKNDAVDAAAVCEAVSRPDMRFVPIKSAENQASLMLHKTRELLVKQRTMCVNALRGHLAEFGVVGAKGVGHAGELLEKAKNDATLPEIAKAAVKIFVQQLEAISAAIVALDKEIANVHAQSEISKCKLLAGVPGVGKIVATAIVASVPDPSVFKSARDFAAWLGLTPRQNSSGGKEKLGAITKQGNRYLRKLLTLGATSLLRVAGKRNGVLRDWFVALLARKPARLATVALANKLARIIWAMMTTGEAFRTQIMARATEPSMA

SEQ ID NO: 205943 - protein, 315 aa, unidentified
MTNLKKRKTRINVGVDVGKAFLDIHIHEREIHWQEENTEAGIKRILKRLAHYDIERLVMEATGRYEFNLAEAAYTKHIPVCIVKPLLVRRFAGALNQLAKTDKIDARIIALFGFMTKPQITPRKSKNLIAIKGLIARRRQLMGLRTQELNRIKTIGKALELSCKRILKYLDAEIERMENRLSKHVKDQADWTEKQMILKSVPGVGDTLVYTLLADLPELGDLNKNQVAALVGVAPINRDSGKLRGKRRVQGGRANVRTVLYMATLSATQCNPVIKSFYKRLVAQGKHKKVAITACMRKFITILNAMVRDQVEWGL

SEQ ID NO: 205944 - protein, 369 aa, unidentified
MNKITYVGLDVHKDTIAVAVAEDGRGGEIRFFGTIAHTADSVLRLTKQLAAAGSTPSFCYEAGPCGYGLHRHLTKLGFECAVVAPAMIPRKAGDRVKTDRRDAEMLARLWRAGELTAIWTPDEEQEAMRDLIRTRKQAMDAVKVAKQQLLSFLLRHGLRYENGSYWTKRHRRWLAELRRFRFSHQQLAFEELKRAVDQAETRVATLDQAIDEAVQTWRFAPVVDGLRALRGVNTIIAATVVAEIGDITRFENPRQLMAWLGLVPSEHSSGNTTRRGRLTKTGNALARTMLVEAGWSYRHPPKEGQPFLKRSAHLPQEIKDIGWKAQTRLCKRFRHLSNTGKPQPRVLAAIARELAGFIWDIARKTPLPA

SEQ ID NO: 205945 - protein, 353 aa, unidentified
MDLNLGWEIDMTISMLGIDIAKNTFQLHGADDSGKAVHKKRLARRELAAHVANLPACTIVMEACGGANYWARVFQSSGHTVKLISPQFVKPFVKTNKNDANDAMAIVEAASRPSMNFVPIKQVEQQDIQSIHRIRTRIVKNRTALINEIRGLCLEYGVVLIPGAARVKSSLCAAIADGDSELTVSSRESLQGLYEELVGIEARVKNLNTRIRQLCRQNENCQRILKIPGVGELTATAIVAAVPDPGEFRNGRHMSAWLGLVPRQSSSGDKQTLLGISKRGDRYLRTLLIHGARAVLSHYKDLDNDYAKWVGRKKATLSHNKAAVALANKNARIIWSILNTGEEFNIGAQATAV

SEQ ID NO: 205946 - protein, 310 aa, unidentified
MDIITVGIDVSKDRLDVAVRPSGEVFAVERNGEGLEQLTARLRGLSPHLVALEATGGFETVAAAALAAAALPVVVVNPAQIRAFAKAVGQRAKTDPIDAAVIAHFAEATKPEPRALPDAATRLLADLVARRRQIVAMIGAERQRERRLTTPHLRKSIARLVKALEKELVSVDSEIDDSVRGSPVWRAKEDLLASVPGVGPTIARTLIAELPELGQLGRKQIAALAGLAPFTRQSGQWRGRSFIGGGRTAVRTVLFMGAMVAKQHNPVLQAFFDRLVAAGKPKMVALVAVARKLLTILNAILRDNRPWQIA

SEQ ID NO: 205947 - protein, 372 aa, unidentified
MGHHSEAFIGIDTSKSRNAVAIAEGGRGGEVRYFGEFPTTEAATRKLVGKLAAKYGRLTFCYEAGPTGYGLYRLITSLGHECEVTAPSLTPKKPGDHVKTNRRDAVSLARLSRAGELTAVWVPDERHEAMRDLSRARQAVKKDLQGKRQQISSLMLRLGRYYPGKKTWGPAHMKWLRSQKLEHREQRIALEELLEGVRQESERVERLEQAIREAVPEWSLAELVTAMQAMRGFDLIAAVTIAAEIGDLSRFQNPRELMGYLGLVPSESSTGDKVKRGGITKAGNGRARRILVEAAWSYRYPPRVGRDKQPKVAAAPRRVREIAWNAQTRLCARFRSLVRKGKRPTIAATAIARELSAFIWAINREIMGNRQV

SEQ ID NO: 205948 - protein, 450 aa, unidentified
MARRQKSTQNLPVIEPNAAGADVGATQIFVAVPADRDPKPVRCFDTFTTDLEALADWLEACGIRTVVMESTGVYWIPLFQILEKRGIEARLVNARHVKNVPGRKSDVADCQWLQYLHAVGLLRGSFRPNQEICALRSLWRHRDSLIQMASVHLQHMQKALDQMNLQIHHVISDIAGITGLAIIDAILAGERDPKRLADLRDWRIRATEETIMKSLVGDYRDEHLFTLRQSLVAYRHYQQLIGEVDEKVKQLLSELPAQVDPAEDPIPKARNPRKTPWRNEPIGLREDLYRAFGVDLTQVPGIDSLTAQRLLTEIGPDLSAFPNVAAFASWLRLCPDKRVSGGKVLSSRTGPTKNRAALALRMAAQSLNRSETFLGEYFRRMRARLGAPKAITAAAHKLARIIYHLLTSRQPYDESIFIVQEIRFRKRKEARLRAQAHELGFQLVPVQAVP

SEQ ID NO: 205949 - protein, 338 aa, unidentified
MTILTVGIDLAKNVFAVHGVNEAGKAELVRPAVPRDKLHELIAGLPPCIIGMEACSGAHHWARLFQASGHTLRLIAPKFVTPYRMTGKRGKNDAADAAAICEAIQRPHMRFVPLKTLDQQSRLMVHRARQGFVEQRTATLNRIRGLLSEFGIVLPLKAATVRRRACECLEDLPGYANTVIGDLLSEVSRLDERIAQYDAYIQAMAKDDERARRLMQLGGVGPTTATCLLAMIGNGHDFDCGRQFAAWLGLVPGQYSSGGKTRLGRITKAGDAYLRNLLVLGAKALLAAAKNKTDSISRWAVALAERRGYWKAVVAIAAKNARMAWAALRRGEAFALPA

SEQ ID NO: 205950 - protein, 341 aa, unidentified
MYPTTIGLDLAKHVFQVHGVDAAGKVIIRKKLRRSELVEFFKKLPACLVGMEACGTAHYWGRELASLGHDVRLMPPAYVKPYVKRGKNDEVDAEAICEAVTRPTMRFVPIKSAEQQSILMLHRTRDLFVRQRTMLVNSLRGQLAEFGLIAPQGIWRIPELHALAQDTDSSVLPDPARACAELIMMQIEDLQAKIKAIERTLMARHRANEMSLRLATIPGIGVITATAMVATVVDASAFKSGRHFAAWIGLVPQQNGTGGKVHLGRISKKGEPYLRRLLVLGATAVVRYARNKPDFAGWVNALLARRPARVVTVAVANKLARIVWAIMQRGGSFRERSFGIA

SEQ ID NO: 205951 - protein, 336 aa, unidentified
MNHHLPQLGIDVSKHKLDVLLLLPSGQHAQTFANTAKGFLALARWLAALKATPRVCLEATGSYSLPAARFLHQRGLTVSLVNPLAVHYFARTRMSRNKTDAHDARLIAQYGQQHQPRAWQPPAPAKEQLQQWVRIREQILEARVIALQHLESAPAATAGLFRAQLRLLDRQIAAVETQLRGAVQADAVLQKAVALLTSIPGVGLITAVTVLSIMPEIGQLESARQLAAFAGVTPSQNQSGTFTGRSRLSKMGHARLRKALYFPALTALRHNPRIQSLAIRLAQKGKSKMVIIGAAMRLLTHLIYGVLKHQKPFDPQHQNKTSPRAAASLQLAPGGG

SEQ ID NO: 205952 - protein, 401 aa, unidentified
MRESDDGFFEIIITKTLDMVLKYSVGLDVSGKKIDACISTIDQIQKVVIKSTKGISNNLTGFKLLTQWIEKHWNDKTVPLVISMEATGVYHEQCALYLYEKQYNVSIILPNKSNKYMQSIGLKSKNDSIDAKGLSQMGAEQNLKLWQPMGKYFYELRALTRQHQNIQESKTAIKNQIHALEHSMYPSKEVLKQLHSTIKLFDKQLIAIEKLIEKLVSDNTAVSEKVKKICKIKGLSILSVATVLAETNGFELFENYKQVVSYAGYDVIENQSGNKKGKTKISKKGNSRIRRILFMPAFSAVTHKQKPLIDLYNRTFEKHGIKMKSYVAVQKKLLVIIYTLWKSEKEFNHLRQTNSPAISRATQDSHYRNDFSFDVQIYKYLSNDETKKNPEKVYSYCETLE

SEQ ID NO: 205953 - protein, 440 aa, unidentified
MGSYAGVDWASEKHDVRVADAAGEKLLAVTFAHDEQGLRSLCRQLVRLEVELVAIERPEGLLVERLLDAGLRVLALHPNQVAAARDRFRVSGGKSDGFDAFVLCELARTDNHRFRVLEPDSDETKALRALTRGREDLVGMRTALTNQLRAELERFWPGPLGLFTDLHGRISLAFLERYPSPADARGLGEARLAGFLARERYSGRQKPAELLAKLRRAAAARVGELELSTRRQLVLGLVAMIKSLNAQIKELERQLARTLGEHPDGEIFRSLFRDPRSVICAAELLAEIGDCRGRYPSRDSLAADAGQAAVAIESGKRKAACFRWGCNKRLRAAFATLADSTRHWHPWAQDVYAAALARGHDHPRALRTLGRAWCRVVWQCWQKRTPYDPARHRALQQHITVTIPTASGPVVDQLATESMAAGLFATNAPHPRQQQVTAAQ

SEQ ID NO: 205954 - protein, 431 aa, unidentified
MINRNNDRLDEITTTTLIVGIDIAKSVHWVRFVDYRGKEIGKALSFGNDRQGFESILTRIQEIIKTRVLPTPFESVIIGMEPTGHYWKTLASYLMNYEYRVVCVNPYHTKKAKELDDNSPTKNDKKDALTIAKLVSNGRFFDPYLPDGIYSELRVLTNTRFSVMKHFTATKNKITAILDEYFPEISTVFREPLEGKAARQILRSCPFPSLILEMGEAGVLSEIKKAVKKSVGIRKVRQLINAAESSVGVKYGLESAKLRLGQLLDDLALAERHISEIEAAMEQAIIKTGYAEQILSIKGIGIVSAAMFLGEVGDPLRFQNAKQINNYAGLSLMEDSSGKSKSGTCISKRGRSQLRALLYQMAFTMVGCNKEMRILYKYLTTRKNNPLKKKQALVVISKKITTIIYSLLKKKTVYIPELVLGAVRLEMIAAA

SEQ ID NO: 205955 - protein, 426 aa, unidentified
MAEKQMDPQPEFAAFVGIDWADRKHVWCLQAAESRKREAGELEHKVEAVEAWVAELCRRFGHRPIAVAVEQVKGALVFLLNKYECLHIFPVPSTMTAKMREALYPSGAKDDPRDADLLLDILGQHRDKLHRLSPDDEATRRVQNLVEERRKLTAERTAQSNRLTSYLKIYFPQMVEWFEKLDMPLVCDLLERWPTLEELQKVSPEELRKFLCQHHCHRGLRERRILAIGGAIPAGGDRAVIEAKRVAVKVIVQLIRSLLEGIAELDRKIEEAAAEHPDFFIFDSLPGAGAVMAPRLLAAFGSQRDRYSSAAELQTYSGIAPVTERSGKRKWVHFRWACPKFLRQSFHEWAGHSIAQSMWARAYYQQQRDRGSDHHAAVRALAFKWIRILFRCWKDRVAYDESKYLVALAKRGSPLGKLLVVGMASL

SEQ ID NO: 205956 - protein, 408 aa, unidentified
MNRYYGGVDWADEFHQVWVSDAEGKKVAEMKVEQSPKGLSEFGRWLHERQGEQIELWAAIEKPQGRIVDFLLDHGVVVYPVNPKALDRARDRFRMSQSKSDSFDAYVLAEFLRTDHVHLRALEPDSEQAQELKMLTRDHHRLGRHKTRLLNQIEVTLKEYYPRPLEVFSDLESKLALDFLEHYPTPRALSELSRRQWNRFAKREHHLGEERCKELWEKLSQPQLKIPEHVVRAKTQLLLVLVIQLKSLAEAVKNYSEEVERFFASMPAAELVKTLPGGKSGTTVPMLWAELGDAKSRWQSFRHLQAEAGGVPVTKASGKSRVVQFRFACNKLLRYASYWFSFNSLNRCEWANKYYRDQRGKGHGHPQALRALGAKWLKIIFVMWRDHKPYDENYHLSNIARQQMRQAA

SEQ ID NO: 205957 - protein, 391 aa, unidentified
MSMYFIGIDISKYKHDCCIISAANQKVVSKVIIKNNKAGFNELLTIIHSLANPADIRIGFESTAHYALNLELFLENSLLTFMEVNPVLISEYKKSKTLRRTKTDSVDCESIARWLMTVEYKPHSKGFYHAYSLKSLTRLRDKLIRQRSFYLVKITNVLDHTFPEFKPFFNERLSKTALYLLENYGSAEKMARMNSASYEKLRSVSRGKFSPQQFLRLKELAANTVGVNNSIFDVELNSLLSLYKSLVKEIDTIEKEINKLIEEVHPHYMSVPGIGPLSAAVIYSEYGDISNFTNPGQMLAFAGIEPGINESGTESHGGKMVKRGSSQLRYTLINCCLPLIRFDMTFATYYAKKRGEGKPHRVAITHVAKKLIRVIYALESQDIDFNAQKLR

SEQ ID NO: 205958 - protein, 449 aa, unidentified
MSKQRNKVVSLPVIEPNAAGIDIGATEIFVAVPADRDPEPIRCFPTFTVDLERLADWLQQCRIGTVAMESTGVYWIPLFQILEKRKIGVRLVNAQHVKNVPGRKTDVSDCQWIQHLHSVGLLRGSFRPDDEICALRSLWRHRDNLIQLATLHLQHMQKALDQMNLQLHHVISDLAGTTGLAIMDAILAGERNPQKLAQLRNRHIQASEETIMKSLAGDYREEHLFTLRQSLKSYRHYQELIQEIDQQVKQMLQRLPSNTAAGDEAPKGDKIRRTPWRNEPPQLRNDLYRAFGVDLTEVPGINSLTAQMLLTEIGPNLSRFPTAAAFCSWLRLCPNPKISGGQVLSSRTQPTKNRAALALRMATQGLHRSDSFLGDYFRRMKARMGTPKAMTATAHKLARIVYHMVTTQQQYDATVFQQQEQRRQLQKSARLHAQARELGFNLVPINAVP

SEQ ID NO: 205959 - protein, 312 aa, unidentified
MPCFVGIDVAKAQVDIAVRPAGERWAVPNDVSGVTMLVDRLQALHPAVSVLEATGGLERLVPSALAPAGLPVVVVNPRQARDFARATGPLATTEAWEARARAHVADVIRPTPRPLPDAQTQELRGLRGRRQQLIVMRTAEQNRLAGTSGRLQTDIAAPITWRTERLAMLDDALETVRRGSPLWRDNDDLWQSAPGSGPVCARTWLWERPELGTLTRPQIAALVGVAPRNGDRGTLRGRRIMWGGRAHVRTVLYLGTLVATRDNPRIKAFYQRLRAAGKVKKVALTACMHKVLTILNAMLKHRTPWHAQEVQG

SEQ ID NO: 205960 - protein, 429 aa, unidentified
MPYRIAGIDVHKKMLAVVVSDVEVDSEFQFERRWFGSNPEQLRSLAAWLLEQEAEEVVMESTAQYWKPVWGALERYWKPICEKRKSARRKSGTLHLAQALSNRGRRGRKRDFRDAERLMKRLVAQELTLSFVPDTEQRLWRTVTRKKYQLRCDRVRLQNQVESLLEEAHIKLSSFVTDLLGVSARRMLKALADGETNPAALAALADERLRATPEQLCDALGACTELNAVYRRLLKMTLEELRLIDEQIGQLDQEMASLLSKHQDAVERLAEVPGLGVDSAQQIIAEVGPTAATFPSEKCLASWVGACPGDEESARVNKSHRSPKGNRHLRRLLNQAANAAVKAKGSIFEIVYRRSVPRLGHNQAIGAIAHRQCRLIWLILHQGVRYEERGPAVTKQSRQKRMARMLRQLRSLGYRIETPNLQPSQVQAA

SEQ ID NO: 205961 - protein, 408 aa, unidentified
MQVTFGIDVSKSTSTVCELIGESKNELTITNNRPGFIQLLHELTAFSKHPQIIFEATGVYSRRLQAFLEDYGYEYVVLNPLKAKKEMNMGLRYNKTDKTDAYHLALIQRLYRHPINQLQSQTYKQLNSLSRFYDQLTADLVMAKNRLHQALQSTFPEIENLFSSAKGKNYWQIVVRYPHCDLVRREDKKQLINWLMSLKGIAFKHALRTADKLIELAHLAYPVVSCSDIEVQQAQYYARRLLNLSNQRQRIITKMVKLAKTLPNHDLENLESIPGFAQTTAVRVLAELGDLRRFSNPNKINAFIGIDPGRYQSGEMDSNLSITKHGNAVARKLLYRAIGQIDNAAKTNPCHIADYYESKKLSSQTKGFKKIAIASIHKLIRTIYALIINDQPYDYNVATHNQKDFSRN

SEQ ID NO: 205962 - protein, 403 aa, unidentified
MEGPLISLDVSKGKSNYRFFENGTDRKGKKGVIRHDIQGFDSIRDEAEKMEERLRIKPSVIFESTGVYSDVVEKYFTDKGFDVYVISPLLSASMRKEGVRPAKNDSLDTLSIAKVFYSRDDLRKCSENDKNAERLREMSYELDMMNRRIRPMKCQFLRLLDKVWPCLDEVSDYSSRFMLDFIIAFGHPENIKTVKGVLSVIRKSEMGTAGRKDKIAQDLFDYCHTHLSAVSKDSSYVELLKRMAIELKAMAKKKSELIDRMAEEARSKDEFVRLLTIPAVAKTTALKIMARVGDISRFRNAEALVAYCGLDPRVYQSGKMTGEHRTITKKGDCILRSTLFLAVKLMVMLYPDTKVARFVAAKAKNGLSYKQAVVAGSAKLARIIYSMLTHHENYVEFNADIVA

SEQ ID NO: 205963 - protein, 402 aa, unidentified
MAATRKQHSTKQIRPVAPLKAPGGLYLAFELGWNEWKLAFATGPAENARLRTIGGRNTQALLQEIAKAKKRFGLPDDAPVYSCYEAGRDGFWLHRFLQSQGVNNVVVDSASIEVKRRRRRRKTDRLDAAKLLSMLIRWQQGERQVWSVVQVPSVADEDRRQLHRDLLELKAERTQHSNRIKGLLAGCGLALPVIDAEFPERLTKLRTWDKQPVPLELQQRLVREHQRWQLVDRQIKDLTNERARRIRTVKDKGVDKVRQLLRLRGIGPNSAWLYVMEFFGWRRIRNRKQLAALAGLTPTPHQSGDSDHEQGISKAGNRRLRTMAVEIAWCWLHYQPGSALSQWYQKRFAKGSSRQRRIGIVALARKLLVGLWRFLETGEVPAGAETVPWKTGLQPLAEPTAA

SEQ ID NO: 205964 - protein, 389 aa, unidentified
MSTGHPFVNPNEGMVEMIVIGADTHKASHTVGAVDAATGRVIADLTVRAKRRSFDDVLLWARGLDEGERVWAIEDCRHVSGALERFLLARGERVVRVPPKLMAGARNSARERGKSDVIDAVAIARAAIREGVDTLPVAQLAGPELDVRLLVDHRERLVGQRTRLINDLRWQLHDMWPEFEIPARALITARWQERVGGRLARAAQSTQVQIARDEVRRIRELTRSIDALERQIAGLVAELAPRLLAERGCGVLTAAKLVGEIAGIQRFASDAKLARLAGAAPIPASSGRTDRHRLDNGGNRQLNCALHRLAVAKGRFDPESADYLARKQAEGKSRREALRCLKRHLARRVWRLLQPVTGPSVAIGERPPVIAGAGVTLNCSAPFNAYSLT

SEQ ID NO: 205965 - protein, 421 aa, unidentified
MRWSRGALGRVPRFAQRRVILFFWPIRASSANQISIVSMPTAFSRAIASRRAGKLMEWPAPPPGEIVLPETQTEERMMKIAVLGIDLGKNVCSVVGLDPSGAVVLRRRVRRDTLIDLVAKLPSCIVGMEACCGAHIILVLFAAQGHDVRLMSPEYVRPYVKAQKNDDRDAEGIAEAATRPTMRFVEMKTEDQLDMQTLHRSRERLVGERTALINQLRAILLDRGIVVPQGKRKLEQYLVILMNEHNGEGLSARMRMLVADIRAQWQELDRRIGEFDAEFVRWAKENEDARRLVTIPGVGVTTSTALIAAVGKAETFEHGRDLAAWLGLVPRQSTTGGKPRLMGISKRGNKYLRKLLIHGARAALPYVAEKDTALGRWAKSLLSRVHQNVAVVAFANKLARICWAVLRSGQRFAAQEAPLVV

SEQ ID NO: 205966 - protein, 405 aa, unidentified
MTSVMIGVDPHKGSHTAVAIGMAEEPLGTLRVRASAVQAEKLLAWAAEWPERTWAVEGAGGLGRLLAQQLLAHGEQVLNVQPKLASRVRLLQAGGTNKNDPNDARSVAVAALRSPVRRLVTADDHAAVLKVWSKRHRDLARSRNQVACRLHAVLCDLIPGGTGKEITAAQAEKILQSITISGAVAMARAELAAEFLQDLRRLDAQLRQTKKKLAAAVRASGTSLTEVFGVGPVIAGTIIGDITDVSRFPGRDNFAACNGTAPIEVSSGNRKTHRLSLRGNRRINHAIHMAAISQIRHRHSDGRAYYERKEAEGKTHKEALRALKRRISDAIYARLQADAQKASARPAEGPGGQPGNDSNSSAAGSHPARQLFGQATPGPCPRYDATPAGTRSLSNQTPRNTRTTP

SEQ ID NO: 205967 - protein, 272 aa, unidentified
MHSMKQQEALVGGGADAHADTHHAAALGERGALLATKSFPTTTPGYRELLGWLSGFGEVDVVAVESTGSYAAALVRYLREHDIQVVEVNQPHAHTRRRVGKSDAIDAEMAARLFLAGKAKAVPKQTNGIAALDRQLERLVRAAAPRTTQLLGISTGHAGQLLVTAGQNIDRLRGEAAFAALCGASPIPASSGKTTRHRLNYGGDRQANRTLHLIAVCRLRYCPRTRAYLRRRTAEGKTKAETMRCLKRYIARETYNALRADLGPAQAQPPLP

SEQ ID NO: 205968 - protein, 353 aa, unidentified
MDNRKYIGMDVHQASISIAVSDAAGKVLMECIIETKAATVLEFFQGLRGSLWVTFEEGTSAAWLYDLLKPHVTKVVVCDPRKNALLKAGNKNDRVDARKLSDLLRAGLLTPVYHGESGVRTLRELSRGYLAVSKDLTRVMNRLKAIYRSWAIPCAGQQVYSPRHRAAWLEKLREAGVRRRAEQTYQQLDFLMEIRKETRKELLAESRKHPARKLLEQIPRLGPIRVALLIALIQTPHRFRTKRQLWNYCGLGLRTRSSGEYRYTGGQLQHARKPPALRGLNVNHNHDLKHLFKSAATQAGNDPLGAFYQNLLAGGMEPPMARLTLARKIAAIALKIWKRGERFDPAKLKQQAA

SEQ ID NO: 205969 - protein, 289 aa, unidentified
MGKARAFPNQEAGWRALVAWAVELEAFVAFEATASYDRGLSLLLQEAKVAFHRANPRKAREFARSAGFLAKTDQVDARMLALYGAALPLAPARPTTPERLELQDLVARRDELVEMRKAERTRLKADPAAWLKDSLQGLIRVLGEQIADIEARIQALIDGVDDMTRDYRILRSCAGVGEVAASVLLALMPELGQVNRRTIAALAGLAPIACDSGALRGKRRIFGGRKRVRDALYMAALAASRTSAFRSDYERLKAAGKPKKLALIAIARKLLVALNAAVRDQTPFHTIHT

SEQ ID NO: 205970 - protein, 417 aa, unidentified
MALKIVYPVCCGIDVHKSFVVACIVATDGKGVTTYKQRRFSTFTGDLRLLAQWLVDNQCRDVCMESTGKYWIPVYNMLESTCKVVLAHPKYVKAIRGKKTDSRDAKWIADIFKHDLISGSFIPPFAIRQLRDLMRYRVKLTSFAVGEKNRAQNCLTVSNIKLDDVFTDVFGKSASAITDQILLHPDGNFDVMPFVDRRCKASTEKIQAAVDGLLCSEQAEKLKIIRSHMDSLELCRTNLESVILSLAEQFRLQMELVMTVPGVQLFSAISIIAEIGVDMSVFPTAKHLCSWAGLVPQNDESAGKKKSTRIARAGAYIKPLLVQCALTVCNSDKHPEIKNRYLALKKRRGHKKAIIAICRMLLTAVYAILKKSEAYNPDLYRKVVSLPANRAFTVEQAVAFVQRHGFIVVDSDGVIAS

SEQ ID NO: 205971 - protein, 379 aa, unidentified
MATTKQALLNDTSVKLMLYMALELSASKWKVALADGQRAASQHTLVGGDVDGLLRLIDRAQKRCGLQGKVRVMSCYEAGRDGFWLHRWLLEQGIDNVVVDSSSIEVNRRARRAKSDTLDAAKLYEMLVRYVAGEKRVWRVVRVPSVQQEDERRLHRELERLKKERNAHVNRIRALAVLHNVRLQRVGGRGWSERLEELKGQLPAGMVAEIERQSARAKLVGEQIAALEKSRQEQLRAMIEQQQDGPLLALLKLRAIGVQTAWVLVRELFSWRRFSNRRELAGCVGLNPSPYDSGASQREQGISKAGNRRVRALLVEIAWYWLRYQPHSALSAWFNRRFGGAGKRMRRVGIVALARRLLIALWRYVEQGVIPEGAQLKKP

SEQ ID NO: 205972 - protein, 392 aa, unidentified
MDEVAPRVVIGMDPHKRSVTIEIMTSDESILGKGRFGTDRDGHEAMRRHVKAWPNRVWAIEGCQGIGRHVANRLLAEGESVVDVPPKLSARTRVFATGQGRKTDATDAHSVALVGTRMSGLRPVINDEQLAVLRILVDRRRSLGDEHTRKMSQVHHLLLELIPGGAKKDLSAAQAKALLATVRPRDIAGKTRRRVASELIIDLERIYQRKKAANKELTALVAATGTGLMDLKGIGPSGAARLLVEVGDITRFPDNNHFGSWTGTAPIDASSGDNVRHRLSRGGNRQINRVLHIMAVVQLRNPTEGRAYFDRTKARGKTSNESMRLLKRRLSDIVYRTMVNDAARHIATGPGGQRGNDSDSSAAGSQPHTNSSDKPLPGPARHKPTIPLPAAS

SEQ ID NO: 205973 - protein, 350 aa, unidentified
METRKIDAEFYCGVDLHARTSYLCVLDRSGGIQLRRNIPNDFQIFKEFMRPFVGGLVVGCESTYNYYWLLDGCREAGIPFYLGHALYMKAISGHKKKNDPLDAETIANLMRSNYFPEAYPYPREMRATRDLLRRRHRLARIRAGAYAHIQLVFQQYGIRDVGPTHVKNKSTRRGLMERFSEPNIRFSIKTDLDVIDALTPLISELEKVIEGQSIHHRGREYRLLLTVPGVGSMITLVILYETHDIGRFRSVQDYSSYSRVVKCARQSAGKFKGYGNPKIGNPYLKWAFSQIIISAQQSSEGIRKYYQRLEGKYGRARARAQMAHKFCVAIYYMLKRGEAFDEARFLGKNK

SEQ ID NO: 205974 - protein, 363 aa, unidentified
MTRKRLSGKHLLDFIGVDEKTPVWIGLDVHKKSYHVALRRADGVCQSWVSPADPIVLARQLCAISQRISLIVYEAGPTGYCLERVLKANGYKVAVVAPSRIPRPVTNVAKTDKLDCLKLAEYAAKGMIEAITTPSEQEGAERSVLRRRNQLVDSTRKTKQRIKSFLLFHGIEEEYGLRYWNQSARSKLSKLPLQSDLKFVLKSLLRQLSYEEEELAKITNRLARIAKRRQHWEVVKNLKTVPGVGDIVACAFRTELFRPERFKRAEEVCSFLGLAPAIRQSGEKRQGGWLMRSGQTRLKSLLIEAAWMWRAKDPWARKKYQIHLSRCGIAQKAITALARRLAVILWRLSVENRAYVMLQVDSV

SEQ ID NO: 205975 - protein, 363 aa, unidentified
MLQHTASTHVGLDVSKASISVALLRPDGHLDEDRIASNPEAVRSLVRRWAEPSKVRACYEAGPTGYDLYRQLTSLGIETTVIAPSLTPRRPGDRIKTDRRDARKLAGLFRAGELTAVRVPTPAEEAVRDLLRARQDEREDILRARHRLSKFLLRHGRVFGDGKAWTLRHDAWLRSQRFDEAAAQRTLGHYRAELDMRLAALKLLDDEIHAIAHHQPFAATVARLSALRGIAELSALTIAVEVGDFARFESAPAFMAFVGLVPSERSSGERRSQGSITKAGNAHLRRVLVEAAWHARRRPNIGPALAKRLAGQPPEVLAVATRAQGRLHKRYWRLVGRHKPSNVAVVAVARELAGFCWALGRVA

SEQ ID NO: 205976 - protein, 391 aa, unidentified
MMKQNIIFGIDVSSKSSTVCVVIDRIKQGETFKITNDSFGYQDLLDRLNQYLITPLVVFEATGVYSLSLQAFLEDYHIKYLKLNPLKAKKLMDNNLRHNKTDKVDAYRLALIQFNAPQKLRAPQPKEYHELQNASRYYEELTQALIINKNQLHRNLQSTFPQIESILSTSSGRVYWTIVSLFPHAQYVLNHNENQVFQSLLAISGIGRQRAHYLTTRLYALARQAYPYDNESSITIRAIQRNIANLLSLSAERDNVINYMEKLAMQANARSLNIYESIPGIAKTTAVRLVAELGDLSRFDTSAQIDAFVGIDPGRYQSGEKDSHLGITKHGNHLARKILYRTIIQMETVKATQPCHITDYYDKKKRSSNSRGYKKIRDCKIVCVRMNDSLN

SEQ ID NO: 205977 - protein, 344 aa, unidentified
MKCKTIGIDLAKNVFQVCGVNEYMKPQFNKKLKRKDFIDFMAQQPPTELVMEACYSSHYWGRKLTELGHTVKLIPAQHVTPFVRGNKNDRNDALAIVEASQRPYIRFVPVKTEHQQEISSLHTIRERLIKNKTATSNQARGLLSEFGIIFNTGKKAFLEGVTAFIKDDYQSLRLRSLMSEMLYEYQYLIKRITKIENELIKFVKESPSGKILMSIPGIGVINASAFLASIDKGQAFNTPREFAVWLGLTPQQYASGNNSRMGGITKRGDRYLRKQLIHGARTVVSNAKNKTDQLSVWATNLLERKSFNKTAVAMAHRLARLIWILLQRQELYSAQLATDHTVVK

SEQ ID NO: 205978 - protein, 342 aa, unidentified
MNEVSIIGLDLAKNVFQAHGAGADGSVIFRRKLSRMQLLKFLTQQPSCVVAMEACASAHHWGRVIGDLGHEVRLIPPAYVKPFVKRQKNDMADAEAIAEAASRPTMRFVAVKSEEQQGAAMVYRTRDLLVRQRTQTINALRAHLAEQGIVAPTGPAHVGRLAAVIDGDDGALPAAVRDLARLLLDQIAGLGEKVADLDAELRRRASVDDTARRLATIPGVGPITAAAITTFAPPMETFSKGRDFAAWVGLTPRQHSSGGKERLGRTSKMGQRDIRRLLIIGAVAVVRWAARKGAAEGSWLARMLERKPKMLVAVALANRMARTVWALMRKGEDYRDPAMATA

SEQ ID NO: 205979 - protein, 343 aa, unidentified
MKLMRVGVDLAKSIFQVHGVDRHEQVVWRRKLTRANWLRVFIETVEPGCEVGMEACGGAHHWARVLQAHGYSVKLIAPQFVKPYVKSNKNDANDAEAICEAMSRPNMRFVAVKTVAQQDVQAVHRVRAEVSKQRKAKGNQIRGLVSEYGLVAPKELVHLRAAIPAWLEDGENGLTGRFRRLLNALWHDLRALDQRMLELDREIAQIAAADPVAKRLQRLRGVGPVIATALVATVGDVRQFANGRQLAAALGLTPRQNSSGGKERLLGISKRGDAYLRTLLVHGARSALRTARNKEDRLSRWISRIAETRHHNVAAVALANKTARIAWAMMKNGTDYEPDRAAA

SEQ ID NO: 205980 - protein, 356 aa, unidentified
MNNQKYIGMDIHQASISIAVSDAAGKVLMECIIETKAATVLEFIHGLRGSLWVTFEEGTSAAWLYDLLKPHVAKVVVCDPRKNALLKAGNKNDRVDARKLSDLFRAGLVSPVYHGESGVRTLRELSRSYLTVSKDLTRVMNRLKGLYRSWAIPCGGQQVYSSRQRATWLEKLREAGVRRRAERLYQQLDFLMGIRKETRKELLAEGRKHPASPLLQQIPRLGPIRVALLIALLQTPHRFRTKRQLWGYCGLALQTRTSGEYQYTGGKLQHAKKPPVLRGLNENHNHDLKNIFKSAATQAGACKDDPLGEFYQNLLARGMEPPMARLTLARKIAAIALKIWKEGERFDPTKLKQQAA

SEQ ID NO: 205981 - protein, 409 aa, unidentified
MSTDACSNVFAGLDWAVHTHAVCIIDIAGGVLDRFEIAHDRDGLAELMRRLARFGERVRIAIERPSGLIVDALVEAGHHVFPIHPNAVKASRPRYRSHGAKSDASDAYLLADLLRTDGHRWRELSPQSDSIRALRALVRCRDDLVSTRVALGNQLHSTLEAYWPGAACIFADITSPIGLAFLKRYPSPTSAARLSQAALGRFCRSQHYSGRRTPAELLERLHSAAVGLAGPLTNEAAGQLVRAMVAVLQPLVTQISDLTRRIERFVESLPDGQIIMSFPRAGRVCAAQILAELGDVRERFPNLDQLAAEAGAVPVTYQSGKTRSVAFRWACNHRLRQAVTCLADNSRHANAWARGIYVAARARGCDHPHAIRILARAWLRVIWRAWTDRKPYDPELHLGALKLASAQGG

SEQ ID NO: 205982 - protein, 397 aa, unidentified
MSKCYVGIDVSKDASTAQGIDEKGKKLFYFEFTMDAEGFSKLLGVIRSHCKDFSMLKAAMESTGCYHTNLLCFLATEGIPCFVINPLLIANFAKLSLRKTKTDKKDAMVIAQFLLIHKDVLVKVEPSQGLQDLKDLARERESLTVLMSGLKNDIKRMLQITFPELESLCNVFSESMRDIIKQFPSARLVRIANFVVVKKALTPSDARRTSPFYPEDFIKAAQDSVATDSIAKELILPEKYATLEHLMKQRERITEALVEACQAMMIKDIEIITSIGGISDTTASAFLAEVGDYKAFSSYKHLIAFAGLDPSIHQSGKFEGRSKISKRGNRHLRHLSYLMTTCVVRLDNIFREYYLRRRAEGLPYKKAILATAHKLLRVIFTILTNRTTFQVKEVISK

SEQ ID NO: 205983 - protein, 346 aa, unidentified
MNITTVGVDLAKLVFQIHGIDARGKLALRKQLKRSQLIAFFAQLPPCLIGMEACGGAHYWARKLTELGHTVKLIAPQFVKPYVKTNKNDVADAEAICEAVGRPNMRFVPIKNAEQQALLGLHRARQGFVTERTAQANQIRGLLSEFGLVMPVGIRCIGSKLPEILEDAENGLSGASRALFARLFEHFRTLHRQVEELEREINAWHRENLASQRLQRIPGIGPLTASALVASVGDARVFHNGRQFAAWLGLVPRQNSSGGKTNLLGISKRGDVYLRTLLIHGARSVLLSLKRHPDRPEGWLARIVARRNPNIAAVALANKNARIVWALLANGRDYLAGYRSLNTVTA

SEQ ID NO: 205984 - protein, 462 aa, unidentified
MGTIIRKRDRPRAGGKGFLTLRPNVAGIDIGSRQMHVCGPADEQGQAQLAVFDTTTVDIQACGKWLRELGVGSVAMESTGVYWIPVLELLESGGFEVLLVDTRPLSRVPGRKTDVTDCEWIQTLHSCGLLQSCYRPSDAISELRSIVRMKATLVSNQSDWQRRMQKCLDQMNVRVHHAVSDVSGTTGLAIIRAIVAGERDPRKLAELRDPRCRNSQEQIAEYLTGHWRQAHLFNLANCLKMYEFLSAEIESYESEIKQRLKELTPPGSQDKKAPPLPNKERMKGIKKRGQEEKRQELFRMVGADLTSIDGVGVETAEAVVSEYGIDLSKFAHETQFIAHLQLAPRQAISGGKPIKKGKRKTTGTRTGRALRMAATGLRNSATALGAYYRRISRSKGANVAVFATARKIGTLIYRLLRWGQAYVDEGQQAYEARFQAARLRSFLATADQLGMQVVPNPEAVSG

SEQ ID NO: 205985 - protein, 408 aa, unidentified
MNTLYVGIDVSSKSNVIYLMLPNGDKHSNFSVANSHEGSTQLVKRILSALTSHSLDTVLIGLEATSVYGDNLVYFLREDATLAPFNRKIHVLNPKQVKKFHDAYNDLPKNDYVDSFVIADCLRFGRINKEVYMGDYRYKALQNLTRARFFAVQNLVKEKQRFMNVLFKKYSTMTQEKVFSDTFSTTALAVYDEFESAEALANMDLHELTDFIIEKGKNRFPDPDAVAKAIQKAARSSYRLPKTVNDSVNQVLSISITSMKALEPQIKEFDKAIKAQMELLPNVLISIPGIGPVYSAGIMAEIGDINRFNSQAALAKYAGLAWKQHQSGGFESEVTRLIPSGNRFLKYYLCEAAFSLVRCDKEYSDFYRLKYKEVNRCQHKRALALTARKFVRLVFRLLKDNRLYCPAK

SEQ ID NO: 205986 - protein, 344 aa, unidentified
MEKDTVVAVDIAKSVFDAAVSHEPGRVAARRRLSRKVFLLFFAQMPAATVVMEACGSAHFWARKLQELGHRVVLLPPHQVRPYVVRNKTDRTDAKGILEAYRNADIRPVPVKSVPQQVLVSLHRFRSGWLAARTAHINTLRGLLRELGLVIPLGAEKVLPEVMALIGDADSGIPDALRPVLAAACEEIQALSERIKMTERQIEAIAEQTPVVERLWSIPGIGLLIATALVAFVGDIQRFPSGRHFASYLGLTPREYSSGLRRRLGRISKRGDAYLRMLLIHGARSVLCHAKKAKEHDRLRTWALDLERRVGHNKAAVALANKLARIAWAVWKNDRAFESLPKAA

SEQ ID NO: 205987 - protein, 356 aa, unidentified
MGKGITTVRGLTIGLDLGDKHTVGCVLSDSGEVVETFRVATTISALSRTMAGFEACRVVLEVGTHSPWVSRLVEQAGHEVIIANPRRVRLIAENDSKADEVDAELLARLGRVDPGLLKPIVHRGEKAQHDRILLLARDGLVRSRTQLVNQVRGFAKSLGQRMPSSSTEAFPRRVREQFSQDLFPGQSVMLEMIDRLTQEIRRMNQEAEKLCKEHYPETGVLRQVKGVGALTALGFVLTLEDPSRFAKSRTVGAYLGLRPRLRQSGEQQPQLRITKAGDELLRRYLVGASQYILGPFGPDTELRRFGLKLAERGGKAAKKRAVIAVARKLSVLLHRLWVTGEEYQEIGYGQSAQEAA

SEQ ID NO: 205988 - protein, 338 aa, unidentified
MFYIGIDIAKHNHEVSIIDDNGKALGKSFSISNSQKGVDKFNTYLDSFNITSENCVIGMESTGHYWINLFSFLVNLKFNVFVINPIQSDAFRKMYIRKTKNDSKDSYIIAQIMRFGEYSSSNISDENIFALRQLSRYRTSLVDECSSWKRKIISILDQVFPEYSNLFSDTFGVTSKELLSKYPLPENMLELSTEELTNLLNKASKGRLGNEKAQEIKESAKNSFGVSFAKQTFSFQIKQIINQISFIESQLKELDNEISNMLKELNSEITTITGIGDVLGACILSEIGDISRFEKASQLVAFAGLDVAVKQSGEFTGTEMKKKLNYLILMSYAHRFIV

SEQ ID NO: 205989 - protein, 339 aa, unidentified
MDHVAIDLGSRKSQICVRSADGQIIEEKRWDTAELKGYLAKRPKSRVIVETCAEAFGVADAARELGHETRVVPATMVKTLGVGARRTKTDQRDASVLSEVSCRIDLPTVHVPKAESRERKTMCGMRDALVGARTKVINTVRGWLRGQGKRLAKGSRATFTERVRAVCDSQAPSYVERQLQVIEALTIQIVEADEEVECWAEADETCTRLTTVPGVGPLTALRFVAALDDVKRFENAHQVESYLGLVPGESSSSDRQQRLSITKAGPSALRWVLVQAAWALRTRCRKAEAIPLQLWAERIEQRRGKRTATIALARKLAGLLYAIWRDGTVYDGSRGAKMI

SEQ ID NO: 205990 - protein, 370 aa, unidentified
MKKKVLYVGLDVHKKTTDVAIAPGRSNGKVRSYGKIDSTLDALNKLINKLEDGDKQLRFVYEAGPCGYQIYRHLDAKGIDCSVVAPSLIPRRSGDRIKTDRRDALNLARLFRAGELTSIYVPTVEDEAIRDLIRCRDDMKRFERKARQRLLSFLLRHGHQYSGKRNWTKGFYNWLATVKFSHSAQQVTLHEYIETTNECSERIKRITEQIQVHVEEWSRARFVKAYQALRGVSLIVSTTVASEIGDMRRFPNPKQLMAYLGLIPSEHSSGKTVRRGPITKTGNSHVRRALIEAAWTYKMQARISTVLLKRQQGLPKSVCDISWKAQTRLCARYRRLMARGKTKQTVVTAIARELSAFIWAIDKEMQVAYE

SEQ ID NO: 205991 - protein, 372 aa, unidentified
MEEYSGYVGLDVHKETISPALANPGRSKPESLGVIANTKKSIQNLVHRLSREGEVLGFCYEAGPCGYEVYRWIKETGHDCVVVAPSLIPKKPGERVKTDRRDGLKLASLFRSGELTPVWVPDEEQEAIRDLTRARGEMKRVELQLKQRVSAFLLRYSKRYTAGKSKWTQGYYRWLAEVKMKFPVQQIVLEEYVGAVKQTEERVRGLDKEMETALANWSLKPVVESLMALRGVQLLTAMSLVTELGDISRFDSPRELMAYVGLVPSEHSSGGKQKRGGITKTGNGRVRRLLVEAAWSYRFPARQSYHMQKKAEKATKPAQAIAWKAQKRLCNRYRVLQRNGKEPGKVATAIARELSGFVWAIACAVIAEQKTK

SEQ ID NO: 205992 - protein, 427 aa, unidentified
MEFSTNPNKNESMTANKKEIKFDQIIERGCGIDVHKSVIVATIKGTGIQEETNIYDAFTESIEKMRDWLLQNKITHIAMESTGVYWKPIYNILEGYFEILLVNARHIKNVPGRKTDKKDSKWIAKLLLSGLLQGSFIPPKDIRELRDLTRYKRKIIQQIASEKNRIQKILEDANIKLSSVVSDMSGATAVKIIDAMIEGEENIDNLVNMRHGKMLVSEKDLAAALKGKLTEHHKFMLQTIKSSIKEKEELIQKLDNRIEMHLKENELELDAELLTTIPGVGKDGAAYILAEIGANMEQFPSEQHLASWAGMSPGNNESAGKKKSSRITHGDKNLKPVLVQCAWAAARTKRTYLRSKYDSLIVRRGKKRALIAVGHKILIAAYFILKNKTAYKELGAEFLQNKQKDKQINRYIKKLKEFGIEVKINVA

SEQ ID NO: 205993 - protein, 428 aa, unidentified
MTIRDYTSAKDFLQFKKEIRGSKTHLIVGIDIAKDDHRAFFGTAYGKTLLRRFKFKNDIEGFRKLLEHVKLVKQKHGLSEVVLGMEPTANYHKPLGDYLIRCGYRVVLVSGVAVKRNRELLDGRWDKNDTKDSANVADLISQGKCLFYDYTPALIRDLRNLLSLKRRLKKEEHGLRTRIRNGLLAQYFPELDRYYSKWEPDILSVVRWCLDPSMVAGLEYDQFADLVYPGNKTLRRQGRLEWIWKKAVDSIGCTAGEAAEFEAQVLVEELRHIREVIKETDAKIKDVCKRCPEYDYLLTIPGFGPDVSSKVLAAIGDPFRFNSVSQVLKMAGMDLNAERSGKSSDTAVPIISKKGSGHLRYALYQAAFIASCRHKQFKKYYVNTLTGREKEKGIKTKMRVKLAAKLLVVAWTLMKKREPFDPEYLQIG

SEQ ID NO: 205994 - protein, 392 aa, unidentified
MHKPKQQKPLNDLSRSLTPFDPNHTLIAVVELSQKNWLVAGVIPGVERQPLKKLNADADELVKVLERWRTEAEKAGHKIDRIAVAFETGRDGFWLARWLKKRGIRAHVIHAASVAVSREHRRAKTDRLDTEQLKRAFLGWLRGEREHCKMAVVPTLAEEDAKRPHRERETLVGEQTTIINRIKAALTRLGIRNFNPKLKKAPERLEHLCTPEGEPIPPNTLAELRRDMERRQLVAEQIRQIEKTRLERLKQAPTTGPNLMVSLLARVIGIGIETADMLVQEILSRNLRDRRAVARYGGLTGSPDESGKKRREKGLARSGNARVRRGMIQLAWRFLEFQKDSALAKWFRARTENARGSRKKMIVALARKLLIALWRFVHDGVVPQGVVVRPAQ

SEQ ID NO: 205995 - protein, 320 aa, unidentified
MMTQGNLVVVGIDVAKDKVDACIRSLSRRQMFPSSAEGRRALIGWLRKHKVGKAAMEASGGYERDWAKALREADIEVRIVDPKRVRSFARSAGRLAKNDAIDAEMIGWFAETFGEVPGQAYDAAREKLSQIVNARQGLLDLQTKLQNRGEHAGPEPVQKMQARLLKKIAVEVAKLEAVIAAMIKTTPHFAELAAIIESVPGLAGTTSAGLIARMPELGQVSNKIAPALLGEAPYDDDSGRRRGERHIRGGRRKVRNLFYMACLGAATRHNPVLKAFYRRLIAKGKEPKVALVACMRKLIVILNTMIARRQKWDPGRYALS

SEQ ID NO: 205996 - protein, 425 aa, unidentified
MNYKQNEKINQVKESTLVVGIDIGSTTQYARAFDWRGIELGKVFPFSNSREGFESFKAWMQHLQDKYKKLDAIVGIEPTGHYWFDLGAYLEDEGILLVMVNPYAVKQTKELDDNSQSKNDRKDPKVIAKLVTEGRYSAPYTPDGVYADLRIMVTNRKRLIREMTQIKNRFARWFAIYFPEYTDVFGDYEAQSSMLLLKKVCTPEAIVELGAEKINQIWRDAKLRAVGMKRATTLCETAKRSIGLKKGSSAARYEMKLLLEDYEYKKAQLDAVMEEIEKLCRKIPESEQMLAIKGIGVITVAGFLAEVGDVRRFESPRQIQKLAGLSLRENSSGKHKGQTSISKRGRSKLRAVLFNAAIPLIAKNPEFKSLHEYYTTRANNPLKKKQSVIAISCKLIRVFYAILANGVTYDAQKMLSDIHRQPQAA

SEQ ID NO: 205997 - protein, 344 aa, unidentified
MKITTVGIDLAKNVFQVHGVDEHGKAVLKKQLRRDQVAAFFVNLPPCLIGMEACGSAHHWARKLEGMGHTVRLIAPQFVKPYVKTNKNDAADAEAICEAVGRPNMRFVPVKNVEQQAVLALHRVRQAFVRARTAQANQIRGLLGEFGIVIPQGIGYIANRVPELIEDGANDLPGAFRLLVQRLLDHLKDLDRQVEELEAKIQAWHRGSDLSRKLAEVPGIGPITASALVASIGDAKNFDSGRQVAAWLGLVPKQHSSGGKAGLLGMSKRGDTYLRTLLIHGARSVIYRVGQKAEACGWIAGVVNRRNKNIAAVALANKNARIVWALLAHGRNFDAGYVRQATTV

SEQ ID NO: 205998 - protein, 289 aa, unidentified
MNKGIKYFGLDISHLVFDVTDSDGDYHQFKNNGSGFKKFAKLLNFDSHCVMEATGYYHYQLAYYLLENGIKVSVENPLSVKRFIQMKLSKIKTDKSDSKLICEYAQQVELKLWKGNSKDELECLQITRALSVYTKQSTMLKNKLHGESVLGEPSKAVVRSLKRSLKQLEKEMKNLEDKLLVLVKQSHQDLLTRLETIPGIGRKTAIMLVVLTGGFDRFSSASELCSYAGLTPVIRQSGSSVKSRPRISKIGNQKLRNLLFMCSFNACKYNKACQDLYERIVAKGKSKKH

SEQ ID NO: 205999 - protein, 417 aa, unidentified
MINAVLERCAGIDIGKRFLMACVMVGPADGEPRTEIRKFGTTVSELERLKAWLQSAGCTHAVMESTGAYWKPVFNVLEGTVIVILANAQEVKARKGHKTDPSDSAWLAHLLRHAMIRPSFIPPREIRELRELTRRRKQLLNAGTAERNRLQKVLEEANVKIGSVLSDVFGVTGQAILEALLEGKASAEEMAHLARGLAKRKIPQLIEALRGHRLSDAHRFLIEHCLQHMGFLEQAIEQLEARIFQQINRANLTRPFELLQTIPAIKQAAAAAIVAEIGSSVDPFPSPKKLASWAGLCPGNNKSANKTLGTNCTKGNQWLRTTLAECAWAASMQKESSFQVRFKRLSPRIGRRAAIVAVAHAMLIAIYDVLHTGQPYSKDAARANPNQKHRLVRHHFRCLQKLGVKVTIESTMSEAPG

SEQ ID NO: 206000 - protein, 429 aa, unidentified
MAVPSVPSRLPSKSHYDLEGPHIMKTPAGERNVTGGVDTHLDFHVAAVLDSTSARLLDTGSFPATSDGYVELHAWMTSFGELDDVGIESTGSYGAGLCRHLAAESVSVIEVNRPDRSERRFNGKDDTIDAEAAARAVLSGKATTTPKSGDGIVAAIRSLEVVYHSAVKDRTRAINQFKALLVTAPTGLRERLERETLRRQLDLARRFNNAHPDPVERQIRFAFKTLARRIGFLDEQTKELEERINTLTAEANPTLVGISGVGPHVAAQLLSTAGDNPDRIRSEAAFAKLCGACPVPASSGKTSRHRLNRGGDRRANRALFTIVLVRMRHDPRTKAYVSRRTSEGKTRKEIMRCLKRFVAREIYHALTKPDPDLITGPQIRGLRTAAGITLTELATGLGRPPIQISRIERGLDHNTTLANQANTWLQTTA

SEQ ID NO: 206001 - protein, 342 aa, unidentified
MKVHTIGIDLGKTKFHIVGLNERGEVIIRKQFSRAQLLHFTANRKVYLIGMEACGGAHFLGRALQQQGHEVRLIPAQYVKPYVKTNKNDYIDAEAIAEAVSRPTMRFVPIKSDDQLDLQSLHRVRERWVSRRTAVINQIRSLLLERGITVRKGRRYIEAALPGILEDADAKLSGALRLLLAQLKLELDQMAKRLEEADALIEQTALENEACRRLVKIPGLGPVTATAVIAAIGNGAAFRKGREFAAWMGVVPREHSTGGKQKLLGISKRGNRYLRKLFVQCARSVLQQKTKQTPGLRAWLEKLTARSHYHVAGVALANKLARMAWAVLATGEAYRAPLPAAA

SEQ ID NO: 206002 - protein, 325 aa, unidentified
MKFILGMDIAKDKFDCCLLSEGRKFHQEFLNAPRGFKQLLGWLRKADASPAALWACMEATGIYGEALLRFLFEKGLRVSKVNPAQIKHYARSLLSRNKTDRQDAWIIAEFARERSASGQLRVWQPPSPAIARLRQLTRLLAARKGQRAREKRRARMVDRELRAHTRAMLRAFEKQIDAIEAEIDALIASSAELKRRHDLLRSIPCVGPVTAQTVLAELPEQIANARAAAAYAGVTPRREDSGQKKGRARLSKTGNAHLRQALYMPASSGRKTNPRLRACAQRLAQKGKTRKLAIGACMHLLLRLCVGVMASGKPFDPHWPKQPMR

SEQ ID NO: 206003 - protein, 397 aa, unidentified
MERTYSVCCGVDVGKSSHHFAAIIPATGELVFDGKVEQSESGIRDALLSVSLFGSPVVVVDQPGNMAALLFAVCDDMGIAKGFITPRAMSKAIEMYGGDIKTDAHDALVIAEVSSSLPKLVKPVGEKSALYLRLSALMSYDRELTLESTRATNRLHDLLLSVSPALEAHLEGKRVQSNFSLMVLSRYGGPAGLKKAGRGNVRRWLRSRKGKAALRRLDDLFEAIGRQSVTIAGSEYVEELIKQEASFLLTVLASRKKVAESRDELLSQMPEARLLMSLPGLGAVTCATFLAEVGDISRFPNASKLASYAGLAPKVRQSGKTIHSVTKPRGGNRRLKRVLVLSAGKSVQFCEESRAYYERKRSEGHSYGSCMMALARRRLNVMYAMLRDGTAYEKQNG

SEQ ID NO: 206004 - protein, 351 aa, unidentified
MNNPIVVFNPCGIEVSQLTLVVAWRAHDHAEPLREFPNTREGHQVVLRFLERGARPVRVAMESTGLYGLDLALTLHQAGVAVMVANPRAVRHFAQALLQRSKNDQRDAEVLREFAARMPFQAWRPPSAAALKLVAVARRLEALTDMMAAEKNRGHAASLSEALPALIRRDIQRSIQTQQHAIDRLTRAAQEFILADPELARRYELLLSIPGFGATSALHILAELTLLPAGMDVRQWVAYAGLDPREYTSGTSVHKKVRISKAGNKHLRRALYMPALVAVQHQPQVRAYYEHLLARGKTKMQALVATMRKLLHAIYGMFKHDQLFDGQKVYTSRAAVLAPALANSEVVCSQT

SEQ ID NO: 206005 - protein, 323 aa, unidentified
MIKIAYPFTQVVGVDVAKGKLDFLLADEKQPLAIKNTQDQIVSKLIARIKHPQSTIVVMEATGGYEGLLVTLLHRHKIALAVVNPRRVRDFAKGVGIDAKTDRIDAGVLAFYGQVVRPEAQVAKSDEEKKLKNLVERRRQLLDLIGQENNRLQQVADQEIRGYIQESLETLKKQVKTIDQRLAKCVKENTVNARKVEILDSVKGLGPVCISTLLAELPELGKLNRGQIAKLVGVAPMNCDSGQVSGKRRTFGGRSYVRRVLYMATLTATRFNPRIKAFYQRLVAQGKPKKVALIAAMRKLLTILNTLVKNDVVWSEEPNKAGV

SEQ ID NO: 206006 - protein, 448 aa, unidentified
MSTVKDVITTAQPFAAMIGLDWADQKHVWSMRTADGHRQRGELDNSPEAVEVWAAELARRFAGQPVAIGIEQSRGAVISMLTKHAHFVLFPVLSTAVSNYRRSFAPSGAKSDAKDSDLILDLLIKHPEQLQPLRPDTVETRSLQFLTEERRKLVNLHTSQVQSLTNWLKQIFPQVLRWFDNVSTPLVYDLLLRWPTLPDLQKVPSKKLLHFFHQHNCRSAERNQQRLAEIRQAVPATHDPALLKAGVLCIQNTVRLLAQMRTGINALENQIAEIFHSHPDRAIVESFPGAGAALEPRLIAAVGTQRDRFSSAQSLAAFAGIAPVTEASGNSRWIHWRWACPKFIRQTFHEWANCSIKSCDWAREFYDQLRARGKTHHAAVRALAFKWIRIYFRCWRDRVPYDEQRYLRSRQAREAETAAPVPPAHRKAKPKFLFKTCGDFQKIVQIPY

SEQ ID NO: 206007 - protein, 360 aa, unidentified
MLKATTSNHKVEPVTRPDLARLKMTPVEFRPATKLGIDISKLYFDVALIKLPVKGHEPTSEHAQFDNTPDGFKQLTAWLKARRVKQVHAGMEATGRYGDALALWLHTHGHVVSVINPAYIHDYAGSRGRRNKTDALDADLIARYCVKESPAVWSPPTPDLQDLQALLKCLADLKAMRQQESNRLKSIIPCAQAVAVVQRHMDFLDQQIKSLEADTKAFTKSVPTFWSQFKLLITIPGIGPLTAMRLVAFELLRFDDADAAVAMAGLNPSESRSGSSCQRKTRLSKHGHAHIRMALFMPALTALTHNPCVRDLAARLEARSKHPMVILCAAMRKLLRLAFGVLKSNRPFDPAYSSRSPKIA

SEQ ID NO: 206008 - protein, 364 aa, unidentified
MPMLAECIDAVIGVDTHRDTHHAEIAHPSGAVIAACSIPSTSTGYAQLLAWASEHAPGPRLVISIEGTRSYGAGLARAAAAAGLMVTECEQPTRKTRRGKGKSDPIDAHLAVLAALQLDTAKLAIPRADGDREALRILLCARAELTTTATGQANRLRALLRDGDDHDRNLARGRLTSTTLAALARRRLPGDASRAQAVRHREIRRLVQALQDATRALKDNNAELDAIVSDLAPGLTSRPGLGPVTAAQAIVSFSHPGRCRHDAAFARLAGTSPIEASSGQTTRHRLNRGGDRALNKAIHIIATTRMRSDPATRAYTTRRRAQGKSDREIRRCLKRYIARQLYRALTTAMTPDLHPTATTRRSTT

SEQ ID NO: 206009 - protein, 385 aa, unidentified
MQERKVITMITHYIGIDAHTTNYTLSTASDFEEKPYNTSKYAAKLHYILKYANTLCKKDKIQKENILLGYEAGCLGFKLQRDLNKEGFNCIVIAPSSIPGTEINRKRNKKTDFRDAEAIAKALRNNDYSAVATPDEQDEAIRDYIHEREAQKKTLKAIKQRIGALCNRQGFHYEAGGYWTKKHLDWLKSLTFPNEFFGEVLDSLLLEYEHVTEKIETMDKRIEVFAEMDKYRESVHKLVCFKGIKTLTALAVIVEVGDFARFMKAKNFVAFLGLSVGEQSSSTDHNQGGITKQGNCFIRRLLTEAAQCFSRVTSSKSKALKERQEGNSEEVIAYADKGNERLRKRYYHLIIHNMKNPNKAKTAVARELACFIWGMMTDNIHTVLS

SEQ ID NO: 206010 - protein, 348 aa, unidentified
MTMVGGFDVHRKQITFDYVDDDGLVRWGQIRPATRKTLRAWLGEHCPDGDAEFALEGCTGWRYVTEEVASAGVGVHLGDPAEIAVARGPKKRAKTDRADARLLRTLLLEGRFPESWIPPVHVLEIRTLGRLYCTLMDERRAWQQRIHAQLFHQGCPPIRALLSAAGRDALARVDLSAAGRQYVDTALRRIDELSTEIGPLRTQLVNFARRQVGCQALQAHYGIGWLCAAIIWAEIGDARRFTSSDQLVRFAGLDVTVYSSDGKRSPGHLSRQGSPELRWAAFEAAKCAARRGSPDYAYYHQLAAKRDGHNGKNPTLAVERKILRRCYHTLRELGDAALALPIPEEVAA

SEQ ID NO: 206011 - protein, 408 aa, unidentified
MKRYYLGVDWGDRVHQVYVSDEEAAKVREMKVQETPDGLAEMGCWLDARRIEGVELWAAIEKPAGRVVDFLLDHGVTVYPVNPKAVDRVRDRFRMSQSKSDGFDAYVLAEFVRTDHAHLRPLRPNSAQGEELKLLTRDQQRLVHQNTRLLHQLKVTLKEYYPRPLEVFSDLDTQIALDFLKAYPTPAALSELKRKQWNRFAKQKHHLSKPRYEELWEKLKQPQLVVPEHVVRVKAQLIAVLIDQLEVSLKAVKSYSERVKSFFASMPAAKLVKTLPGAKTGTIIATLWAELGDAQSRWESFRHLQAEAGVVPATKSSGKSRVVQFRFACNKILRHAAYWLAFGSLNRSEWANHYYRDQRAKGHSHHQALRALGAKWLKIIFVMWRDHKPYDENYHLANIARQKMRQAA

SEQ ID NO: 206012 - protein, 359 aa, unidentified
MRTQSNKVNFNGENIYVGIDVHLKSWAVTIYTEHLHHKTFSQPPVPILLWKYLDENFPGGNYYSAYEAGFCGFHIHFELEKLNIKNIVVNPADIPTSQKEHVHKNDSCDSKKIARSLRAKELTGIHIPLIETLENRSLLRSREMLVKDLVRFKLRIKSFLYFYGIAYPPEFEKSSCHWSKRFLKWLKEISLNTQNGNEALSLLITEVEQQRLLLLEVNKKIHSLAISDKYIKEMELIRSVPGIGLITGLTFLLEIENIERFSNTDKLACFVGIIPTCHSSGETSNNGEMTFRGQIHLKKGLIESAWVASRIDPALTHSFIKLCKRMEPNKAIIRIARKLLNRIYYTLKKEHKYEYGMVK

SEQ ID NO: 206013 - protein, 380 aa, unidentified
MASMHDSVRFKTTVYAAIELSKKSWVVAIARPDRDRPSIHRIAGGNLADLIGRLRKAAGEKQRIVVCYEAGYDGFWLARSLAKIGIDCRVLDPASIQVNRRARRVKTDRIDSLALLRALIAIDRGERHVCAVVRVPTVEEEDARRSHRERQRLVRERTGHINRIKGLLFAQGIRGIEPKRRRTRIDFGKLTTAEGRPLAERLRRELEREYQRLELVQSQLRIVEKERDTADAQDSAVERKRELLCALQGVGGASAAILAREVFARPFASRRQLGSYLGLTPSAYDSGSTTRCQGISKAGNSWARRVLIEVAWLWRKYQPGSPLSHWYARKTADQSPRIRRIMLIALARKLAISLWRYVETGLVPDGAVMAKTTPHMAAAT

SEQ ID NO: 206014 - protein, 362 aa, unidentified
MAKSTTIIAFDQHAATTVAAVLLPGQRTPALHQLTSEAPTILRFVERLRRTGPVQCCYEAGPCGFELQRALTMRDIPCDVIAPSLIPRRAGDRIKTDRRDAGQLAVLYRAGALTAIHIPTEQEEAARDLLRCREDIRADLLRARHRLSHFLLRHGRRFTLTKKAWTKRHAAWLQAQRWPLPALGQTHRAYVRAVDEAIARLHAVDTELRDLLTLEPLRARVERLRCFRGIDDLTALTIAAELGDARRFPTAPSLMAFTGVIPSEHSSGAKQARGPITKTGNAHLRRVLVEAAWQYRHHAFLGPALQRRQRGAPAAAIDIAWHAQRRLHRRYRVLAARGKPKQLIVTAVARELIGFLWSALTR

SEQ ID NO: 206015 - protein, 355 aa, unidentified
MIVAVESHQGALHMQISTIGLDIAKNVFQVHGIDAAEKVVIRKRLRRRQVLEFFKALPPCLIGMEACATAHYWARELTKLGHRVRLMPAKDVKAYVKRNKNDAADAEAICEAVRRPTMRFVRIKSAEQQGQLMQHRTRDVLIRQRTQIINALRAHLAELGLVAAQGNAGVNELRAIVTDEQDTRLPIDARACVIVLAAQLEALESVIGAIEKRIKLQHRSSEASQRVEAIPGIGVIGATAIVATVTDPTIFRSGRDFAAWIGLVPRQDSTGGKQKLGPISKQGDRYLRRILVVGAIAVLRRAQENPGKYPWLTQLLARRPFKVVAVALANKMARMAWALLAHGGTYRAPRLAEIA

SEQ ID NO: 206016 - protein, 348 aa, unidentified
MQEISRIGLDIAKRWFQVHAVTGDGKTAFCRKLCRDDVLNYFAGITPCNVAMEASGSAHYWAREIGKFGHRVCLIPPAYVKPYVKRGKNDAHDAQAICEAASRPDMRFVPVKTEDQQAALMLHTTRQLMVERRTALINSLRGQLAEFGMIAAKGLSHARQLINIVTSGTDDQVCKLPPTVLHVLTLITDQVQETEKAIAALDQKIKDWHAQSSCAQVLTSVPGIGCLIAAAIAATTPDPSVFKSGRDFAAWIGLVPRQRSSGGKERLGHISKQGNPYLRKLLVLAATSHLRWLPKRNGPLADWLRALLRRRPARLVTIALANKLARICWALMRTGELYRIGIMPLQEA

SEQ ID NO: 206017 - protein, 365 aa, unidentified
MSTITIGVDLAKSVFSVCEVDGSGHVLRRRDLKRDAFAVWLAQVPAGTVVAMEACSGAHHWGRRCLEYGLQPRLMAAQFVTPFRKNRTAKNDRNDAEAIATAARQGNMRFVPVKTVDQQARLSCHRVREGYKVEGLSISNRLRGLLAEFGIVVAKSDLALRRALADLDRQTALPPEMRELLRDLSAHWAQVRTAVDACGARIDAHARVDERCIRLRAIIGVGTITADAAIATLGDAKEFRNGRQVSAWLGLVPTQHSSGGHARLGTISCRGDGYLRTLLIQGARSSLQRAKAVSVEKSTPEQIWIRQLASRMPFGKVLVAIANKHARQLWAMLAHDETYDADAWLKHPMVQRPAGKHAITMRTTA

SEQ ID NO: 206018 - protein, 344 aa, unidentified
MIISPHCVGIDVSKRMLDIFDDAVGRPERIANTLQAITERVAGWRCGNVFVVFEATGVYDRELAEALRQADIRFARINPARARDFARADGRLAKTDAIDARMLAIFARKMMPAVEPAPEPARSALASLAKRRDQLVQIRAQEKNRRSEATDRTTIEGIQRHLDFLNGEIKAIEASIKTLIKAEPDISEQARLMRSAPGIGPVACMQLLAKMPELGCLGSKQVAALAGLAPFNVDSGSYRGKRAIGGGRKRVRDALYMAALNAVRRDLTMKAFYQKLRTVGKPAKLALIAVARKLLTTLNAIAARPQSLRPAPTHITVAGCAEQRTGRCCASPGEHCPRPVILGD

SEQ ID NO: 206019 - protein, 393 aa, unidentified
MIYVGIDAAKNKNDCYIVDSEGELLCDNLTFSNSLEGYDTFLNLVKNYCNGDLSKVKVGIESTGHYSTNLITFLNQTKLYVVVFNPMIINRKHKADSLRKTKTDKSDAKFIAESLFFNKSDSYHLESYHIQELKSLTRARQDLAHEKQPLQNKYRKCIQLVFPEITTLFSSCYCPSIFAVLKELPSAQDIASCNILKLTKILKDNSHGKLGREFADQLKDLASHSIAAYYPGESFNLNLIISRLEFIDSQLEILETRIKELLDLLDSPITTIPGIGTVLGASILAEIGDISKFETSSQLQAFAGCDPSTYQSGEYIGTHEHMVKHGSKYLRTALYQAVVASNIKGNNVFSNVLHKKVSEGKHYYVAVTHAMKKLIRVLFTMLTTNQPFKTEFI

SEQ ID NO: 206020 - protein, 422 aa, unidentified
MLGVGIDWAEEFHMVALGRPGEGVFDVARVEHDPRSLDTLIARIAQLEPDPAEVRVVLETSYGMLVERLLDAGYAVVPVNPDLVARRRGPAKKKDDAEDARIACLIALDRFERLRPLVPHGEAAAELRAIGRDDERASRDERRLLNRLRADLIATFPAALIIAGDDIGAPTFLRMLERWPTANALAEASPGELIAFARAGRHGWPDRFADRIHAALAADNFVARDWLVRAKTDTIRLLASQLLALGTQRRAWERRMGELILGAPRTGRAKRPKDGDRGPVVPGGEIYLSFPGLGDRLAARVAGEIGDIANFDTPNGLQCYAGKAPVTRRSGKSELVVANRLACNGHLRDACQQWAFCSLRGSGWARQFYDTHRTSGKGHQAALRALANRWLEVLWHCLTRRVAYSEAVHVANRTHARTRTAA

SEQ ID NO: 206021 - protein, 423 aa, unidentified
MSQNQPEIQYGAFLAIDWADQKHVWSLQDANSSTCERGEVDHMPEAVEAWAAQMSQRFAGRPIAVAVEQSRGALVFLLSKYAQLHIFPVPPAMTANLRKAFYSSGAKSDPTDADLLLDLVQRHREKLRRLSPDTEATRLIQNLVEERRKLVDEKTAQSNRLEAHLKIYFPQIPRWFGDVDSPMVCALLERWPTLEALQKARPDTLRSFFRKHHSCKEELIESRIKAIGEAMPALKDRAVVEAKVAVVKVLVQLIQDLHEGIEGLNRQIQEAAEAHPDFFIFDSLPGAGAVMAPRLLAAFGSQRERYQNAAEVQTFSGIAPVTESSGKRSWVHFRFACSKFLRQSFHEWAALSIPQSKWARAYYELQCRRGKKHHAAVRALAFKWIRIIYRCWKERVAYDENVYLAALAKHNSPLVAATRAEAL

SEQ ID NO: 206022 - protein, 356 aa, unidentified
MSRDTKYIGMDVHKEAIVIAVLNDSGKLVMESIVETQASSILQFIYGLRGELHVTWEEGTWAAWLYDLLEPYVHEVLVCNPRRNALLKEGSKSDKVDARKLADLLRTGMLRPVYHGENGLRTLRELARSYQTISKDLNRVMNRLKALYRGWGIACSGTQVYAARYREEWLHKIPHAGVHRRAEVLYQQLDGLQALRRTLRPELLAESRKHKAAKLLRQIPCIGPIRAARLLALMQTPHRFRSKRQLWTYSGLGIETHESAQYRYVRGQLQRSKKPQQICGLNQNHNHEMKEIFKGAATRASCGVGPLRDFYVALLDKGMRPEMARLTLARKIAAIALTLWKKEERFDAEQLKPQAA

SEQ ID NO: 206023 - protein, 352 aa, unidentified
MSETAHSAIAVVGIDIGKNSFHVVGLDQRGAIVLRQKWSRGQVYARFANMPPCLVGMEACVGAHHLSRRLRLLGHDARLMPAKYVRPYSKGQKNDFRDAEAIAEAVQRPTMKFVATKTADQLDLQALHRVRERLVSQRTGIINQIRAFLLERGIAVRQSPRYLRSALPSILATPTDDLSPRMVRIVEDLAGDWRRLDDRIEGLSAEIEELARKDCGCERLMSVPGIGPIISSAMVAAIGAGDVFSKGRDFAAWLGLVPRQISTGDRTILGKISKRGNRYLRVLFVQAAWVVLIRPKSWERYGLKPWIEAARKRLHRNVLAIALANKLARIAWSVLARGRSFEVRSTVPAPSV

SEQ ID NO: 206024 - protein, 404 aa, unidentified
MPTYFVGIDVSKFKHTCCIISEHGEIIKKSFDFSNSKEGFDSLIEIFKSIDQSESLFQIVMEATGHYHECLFRYLVANNYLVQIKNPVVIVRFKQSEYLDKAKTDNLDALLIAQYASKHPFSPSMLKSYNIERIRRISRAKYFLYQDKERTINHLHRYLDESFPELIPFLRNRGDIKRYQGRNFFDSKTTLWFVENFPSAKKFSNARSETAEKLRRMSKGAFSLIKFNELRNIAKNSVGVSFQETEEIIIQLAQELRNIQERNDKLDELLTPLIDETSPNLLTVPGIGYRLAGLLISEIGDASQFPSADKIIKFAGLDVRVYQSGTIEKHGAIRKRGSPLLRYALFQAAEKARIHCPEIAEFYSKKKGEGKHPICALTHTARKILRIVWALLKTGQNYSQTISD

SEQ ID NO: 206025 - protein, 401 aa, unidentified
MAAGQVWAGVDVGKEHHWVCVVDDSGKVVLSRRLVNDEQPIRELVAEIDELAERVLWAVDLTTVYAALLLTVLADAGKTVRYLAGRAVWQASATYRGGEAKTDAKDARVIADQSRMRGQDLPVLHPNDDLISELRMLTGHRADLVADRTRTINRLRQQLVAVCPALERAAQLSQDRGWVVLLARYQRPKAIRQSGVSRLTKVLTDAGVRNAASIAGAAVAAVKTQTVRLPGEEVAAGLVADLAREVIALDDRIKTTDADIEGRFRRHPLAEVITSMPGMGFRLGAELLAAVGDPALIGSADQLAAWAGLAPVSRDSGKRTGRLHTPKRYSRRLRRVMYMSALTAIRCDPDSKAYYQRKRDEGKRPIPATICLARRRTNVLYALIRDNRTWQPESPPNIAAA

SEQ ID NO: 206026 - protein, 347 aa, unidentified
MEHIAIDLGSRESQICVRSADGQILEERRVGTLSLGKYLAKRPKSRVVVEACAEAFVVADAAMTVGHEAVVVPSSLAPSLGVGDRGIKNDTRDARNLSEASCRMSKLPSVHVPVKKSRDRKSMCGMREGLVEARTKLINTVRGWARPQGLGVIRSGKPSTFPLRVKEHVTERGGTLPEYVDLVLKAIHELSVQINKADKQLEETAAADPTCKLLMTAPGVGPTISIRFAAAIDSVGRFPNAHKVEAYLGLTPGENSSGHRKRRTGITKAGPSKLRWVLVQAAWIARRHCKDHPIVLWSLDVEKRRGRQVAVMALARRLAGVLYAMWRDGKPYDKNHRQHPHAPSAAA

SEQ ID NO: 206027 - protein, 387 aa, unidentified
MFYVGIDIAKNTHWASIMSSDGEIVKEPFSFSNDNSGFQKFISNLESLDKTKILIGLESTAHYGENIISYLFNLNYKIGLINPIQTANLRKSNIRKTKNDKVDTYIIIKALTFGNYSLITSRDINNLKLKGLCRSRRNLVTMRSKSKIQLVSYLDQIFPELAQFFKGNIHLNVSYQLLKEYSSPKQLSSLHLTKLSNILHDNSHGRYGKQDAIRLRELAKSSVGIDNPSLSLQIKHAILQIELYNEQITEIESLYKSILDEMDSPILTIPGMSYNQAAVIVGFIGDFNRFEHSCQLLAYAGLDPSVVQSGNFQAKSTRMSKRGSGMLRYSLVYAAHNVVLNNKTFKEYYELKRSQGKSHYCALGHVAHKLVRVIFKMLKDNVAFNLD

SEQ ID NO: 206028 - protein, 367 aa, unidentified
MKKISTVAGKRSRNFSEQKLTIGFDLGDRSSWYCVLDEAGSVLLEQRVSTTPKAMKEVFGGMPRSRIALETGMHSPWVSRLLSELGHEVIVAHARNVRLIGESRKKDDRLDAQTLARLARIDPQLLSPVRHRSARAQADLTVIRARAGLVRARTALVNTARGLAKSYGERLRGCNVRNMNPEKAEGLSPELQSALEPLLAGIESLSERIREYNERIEKLAQESYPQVALLKQVKGVGTLIGLTFLLTLEDGACFGKSREVGCYLGLQPGRRNSGQSEPQMHISKEGDPYLRTLLVQGAHHILGPFGADSDLRRWGLKLAERGGRNGKKRAIIATARKLAVLLHRLWVSGEVYEPLRNSHRTAMPAAA

SEQ ID NO: 206029 - protein, 422 aa, unidentified
MTAHTSQTFHQQFHLFLGFDWAHDDHDVVAVDSTGRTVLDRAVPDTAEGWADLRQKLQDLAGPDLWHVAVVVETCNGPAVERLLDMGTAVYPISAKAAKAFRQCKNSSGSKSDRLDAWSFADALRTNGQQWKALVPDDPLTQELRLLCRDEVKLIEQRTALVLQLQEALHEYYPAALEAFDKWVCPSAWAFVAAFPTPRHLVAAGRRKWEKFLHSHRLYREATYDRRLEIFARADRFCGPPAVTNAKSRLALALVKQLQVLEAQLREYRTAIETLFDQHPDRDIFGSLPGGGDKVAPRLLSEIGTVRERFKDAQSLQTYAGSAPVTWESGKSRIVQFRRACNKHLRAATNFLADLSRDRCVWAQTYYQQKREQGKSHATALRCLAQRWLKILWKMWQTRTPYDEAFHLQNQTRHGSWVLVMK

SEQ ID NO: 206030 - protein, 428 aa, unidentified
MTTDRVPCRKFILGGAIMDKIYDNCCGIDVHKKLIVACLRKGNRQEVREFGATTRELLELADWLKTSDCKMVAMESTASYWKPLYNILESSDLNAMVVNARHMKAVPGRKTDVKDAEWIADLLQHGLLQPSYIPDKDQRELRELVRYRKSLVGERTRELNRLQKMLEGANIKLSGTVSDINGKSARSILEYLLTGECIDGAKYDEMYEQKIIAHNLKATKEQIIDDLNGVMTPLQRRMMKELLSHLDELNTHIKNLDDEIDNFMKPEEKQASQAIQDVTGIGNTSAQAIISVIGTDMERFSTDRHISSWAGLCPGDNESAKKRKSGKTRKGNSLLRTTLITCAHAAVKNKKSYFYAQFMRISAHRGKKRAYVAVAHSMLIAIYHILKDGVIFKDLGADYYNQFNKERKINAYLKKLKALGWEAPVVAA

SEQ ID NO: 206031 - protein, 343 aa, unidentified
MQIRSVGIDLGKTTFHLVALGDNGKVLLKKKFTQKQLIAFTANMQTCLIGMEACSGSHFLGRALREQGHDVKLIPAQFVKPFVKSNKNDFIDAEAIAEAVERENMRFVPIKTDDQLDLQALHRVRDRLMARRTALINQIRAFLLERGIVFAKSPIRLREALPEVLENVNENLTPRMRNLVAMLWSEWKDLELQIVQMNDEVERIASSDAACRRLRQIPGIGPLVATAIVASIGNGAAFRKGREFAAWLGLLPNQHSTGGKARLYGISKRGNSYLRKILIHGARAVVLRSKRDRIAMGSWMSSLETRAPRNVLIVATAHKLARIAWAVLSTGQDYRAVPEALTV

SEQ ID NO: 206032 - protein, 404 aa, unidentified
MNNVAGVDVSKGKSVVSVLRPFGEVVAKPFSVGHTGSELKELADYLKSLDGETRVVMEHTGRYYEPVARFLHEEGIFVSAVNPKLIKDYGNNTLRKVKTDKADARKIARYGLDNWVELRQHTPMDTIRMQLKTLNRQQGLYSKTKTMMKNNLIALLDQTYPGINALFDSPVREDGSQKWVDFATTFWHVDCVRAMSLTAFTERYRKWCKRHGYNFSQSRAIEIHMEAQDLIAMLPKDVLTKTMIRQAIDALNAVSKSLEQLKAEMRTLAAKLPEYPVVMAMRGVGDSLGPQLMAEIGDVTRFTHRGAITAFAGVDPGADQSGAHEAKSNHTSKSGPPELRRALFLVMDCLLKTQPEDDPVYRFMDKKRSEGKPYLVYMTAGANKFLRIYYGRVKEYLASLKNAD

SEQ ID NO: 206033 - protein, 421 aa, unidentified
MTPTSHTTFAAFVGIDWADAKHDGCLQAAGSAKRECFQLEHTPEAIDAWVTTLRTRFHGHPVALCLELTKGPLVSALRKYDFLVLFPINPLTLARYREAFTPSRAKDDPTDAELQLELLLTHRDKLQPLQPQSPTMRALAQLVEHRRRVVGDKVRITNRLTSALKNYFPQVLQWFQDKDTRIFCDFLSRWPTLKAAQLARRSTLETFFRDHHVHTADVLATRLHAIKTATPLTTDEGIIAPNVLLVQTLVSQLRVTLDAIEAFDQAIAQRALHHPDFPLFQVLPGAGPVFASRLLVAFGEQRERYASAAARQKYAGIAPVTERSGKKAWVHWRLQCPKFLRQTFVEWTAESIRHSFWAQVYYQQQRDKGNTHQAAVRALAFKWIRILYRCWQERTPYDESTYLQALMRRNSSLIPNRVKAS

SEQ ID NO: 206034 - protein, 465 aa, unidentified
MSKLRKRNRARSSQGETRPFEGMRQVHPHAAGVDIGAHEIVACVPDGDDQQIVRTFGTDTVDLQTLADWFVDRGIQTVAMASTGVSWIPLGEEREARGLPCCLISAQSIKRVPGRKSDVLDCQWIQTLHSYGLRAASCRPAADLVALRTLLRHRAQLLEHRAPHVLHMQQALLQMHSPLSHALRDITGATGQRLIRAMVAGARAPQHWAALRNDRCKKDAHEIAMALTGTWREEHLFVLTQALALFDFYTTQLSACDAQVEHAFAVITPHFESTAAASVPARAAVPPRRKPHSPSKNAPEGNTRAHILRITGVDLVAVHGMSDSLAPTIVAEIGTDMSQWPDDTHFCSWLGLAPNNDISGGKVLKSRTMKHRNRAAQAFRMAAQSVIRSHCAFGAFYRRLTGRLGPAQALVATAHKIARTVYHMLKHRVPYYDIGAAEYNKRFREREMHSLQKQAAKLGYKLSPG

SEQ ID NO: 206035 - protein, 354 aa, unidentified
MGMDISVLGVDLGKNVCSVVGLDASGAVVLRRRAKRETLIALAAKLPPCVVAMEACCGAHHLGRVFAGHGHDVRLMSPEYVRPYVKAQKNDDRDTEGIAEAATRPTMRFVGLKSQEQLDMQTLHRSRDRLVGERTALINQLRAILLERGIVAPQGKRKLEQFLTVLMDEQRGAGLSPRMITLVADARAQWGELDQRIAAFDTEFIRWTKENEDARRLASIPGVGPTIATALIAAIGKGETFGHGRDLAAWLGLVPRQFTTGGRPNLLGISKRGNRYLRKLLIHGARAALPHVAERDTPLGRWAKALLERAHPNVAIVAFANKLARIAWAVLRRGEGFVVRGLCPWRRSRWLGQS

SEQ ID NO: 206036 - protein, 343 aa, unidentified
MEQISTIGLDIAKNVFQVHGIDDAGEVVVVRQVKRQRVLPFFAKLPRCLVGLEACATSHHWAREIAKLGHDVRMMPPRYVKPYVKRNKNDAADAEAICEAVQRPTMRFVPIKTPEQQSVLMLHRTRQLFVRQRTTLINAIRAHLAEFGIVAGVGRNGVEKLLELIAKGEDDRIPPAARECLMALAAQLHLVKRQILGADRRVLAWHRRSKTSKRLEAIPGVGPLIATALVASIPDPAIFRSGRDMSAWIGLVPKQNSTGGKEKLGSISKAGNRYLRKLLVIGALSVIKRAKILGYTKHPWLVRLMERRSTMIAAIALANKIARMAWAMMVRGEKYRTPLPQAV

SEQ ID NO: 206037 - protein, 398 aa, unidentified
MSRIWAGTDCGKTHHHCLVLDAEGDTLLSRRVANDEPELLELIGDVLDIADGGRVTWAMDMTGGEPALLIELLIAHGQELVYIPGVVVNRATDSYRGEGKTDARDAKVIADQARMRRDLLPIRPGDEAAIELRLLTEHRSDLVGDRTRTLNRLKSLLNRMFPALERALDMGTVGALVLLTGYQSPAAIRRTGKRRLTTWLRNRKVYRAEALAAKAVEAAERQHTAVAGERAIAKMVHTLAREVMALNEKITETDKLIEGRFREHELANVITSMPGIGTTLGAELLAATGGSMDAFPTPDRLAAFAGVAPAPRDSGQVSGNLHRPKRYHRRLQRVFYTSALVSIRCDPNSRRFYDRKRAEGKRHVQAVLALARRRVNVLWALMRDRRCYTVTPPVTHAA

SEQ ID NO: 206038 - protein, 398 aa, unidentified
MKQFNEKVVEVETVSTLNTAQQSIYAYAAYIGLDTHKDSIAVSVAKAGRAAPELRGEIANRPKAVAKLVAQLSQEFGGEVLLFCYEAGPCGYGVYRQILSLGQDCQVVAPSLVPRKPGDRIKTDRRDARKLARALRSGDLTAVWVPDDEQEAMRDLTRARNDFKVLERKARQQLNAFVLRHGHAWPSNRTRWTKTHYHWLESLGFTHDWQQVVLQEYIEAASAASERVADMTAQMERVLPQWSLAPVVDALIALRGIDKLAAMVLLAELGDISRFDSPKQLMAFLGLVPSEHTSGSRRRQGAITKTGNSHARRMLVECAWSYRFPARQTMHLKRKAKDAPVEAKAIAWKAQKRLCGRYRSLLLAGKNTKQTTVAIARELVGFIWDIACHEMPKRRPVA

SEQ ID NO: 206039 - protein, 385 aa, unidentified
MIIIDEKEQILYQRKLPHHLGEIKETMKQLKSLQKKENAQLSFALEGKNGYNNPLDRLLLAEGFTLYNVDNYKLKRFRETFTGEWRDDNRDALMLSKMVNLKEHINTKEEKVFIEITKPSIIPESLKLLSRHQQLLIDEKVRLTNRLGKKLLEVCPELLSLGKLKYQKIIAILAKYPDFSRYSKITLKSLLRIPGIGKKQAPHLLAGLHELAYMPDLTDIYKTIISSESKRISQLQKEIKEIDAKMDQIGQQDDSIKHLKSIPGVATKLASRFLGEIGDISRFPSEKNLAIYCGIACVNNSSGKINKTKVVYKANKIAKQTLIAMAGCSIRVNPQCRDYYLKKRKEGKAHNHALRCLARQMIKVIYRMLTEDRDYQIKREALKVA

SEQ ID NO: 206040 - protein, 416 aa, unidentified
MNAAGIDVSSRKSTVAVLRPFGEVVRAPFEVSHSAEGLASLVRQLKAIDGETRVVMEHTGRYYEAVANALHEAGLFVSAVNPLLIKEYGGNSLRRVKTDKADAVKIARYALDNWAELLDYTPMDRIRYDLKTLNRQFHLASKQKTATSNNLIALLEQSFPGVRKCFDSPVRRDGTQKWVDFAHDFWHADCVRKHSLVSFTERYHKWCKRHGYNFKQSTAQQVYDLAKSVVVLVPKSNLTKVLVQEAANQLTIISKSVETYRTEMDRLASQLPEYPVVMGMYGVGDSLGPQLMAEIGDVRRFERKQSLVAFAGVDPMPNQSGDKNVRSNKSSKRGSPYLRKALFNVMTCYLQKAPTDEPVFQFLDRKRAEGKPYYVYMTAGANKFLRRYYGKVTEYLSTLEDLPPVDMDSTGLPKRQ

SEQ ID NO: 206041 - protein, 479 aa, unidentified
MRHGHASSDTGRDGPQPPLYDLQPVATNQRKRKTSMIANVTPEPAPAAPSLALPLGEFACCIGLDWGDEKHATALQQRGSHAIECAELSSKPEAVHQWLESLQSRFGRLPVAIALEASKGAIVDILLQYPWLTIYPVHPATSRRFSKAFAPSGAANDEPDAKNLLEILRCHRHKLRALAPADEQTKRLAAQVQIRRKIVDQLTDLSNQLTSLLKSYFPQALELTGEDRLSGLSLAFLQRWPDLISAKKAKPETLRSFYYKHQVRRPELVEERLELLRQARPLSQDPLLIEISLLSLPRLLAQIQVLQKHLAILEEKIRESFAAHADAFIFKSLPGAGPAMAPRLCALFGSDRERWLDAAEMQKYYGIAPVIEASGKQRWVHWRWNAPTFQRQTLVEWAGLTVRYSPWAKTYYDQQSQRGKARAAILRALAFKWLRILFKCWKSRTPYDDATYMEALQKKGSPLHRGQAIQFPKKDPKNS

SEQ ID NO: 206042 - protein, 373 aa, unidentified
MKCFVGLDVSSTKLDVCIMLSDTITPVTASRPNDLVGASEIKKQILELNDSYSFERIVIGMEATSLYSFHPAMFFHEDSDLKALKVEVMVEQPNKIKKYREAFEESKNDTIDAFYIADYFRIERFSPAFLKEEKYMALQHLTRTRLQLIEQLTKTKQHFIENIYYKCNTLSTEIKNENLTTSLWSSTIISLMTEDYSLDELATIALEDLAEFLQKLGRGRFKVPEKLAKAIQAAIRGSYRLPKLQQDSVNVILGLLAREIRNLEQMIKDIDKAIEDMVEVIPEYQCLTSVPGVGKVYAAGIIAEIGQIERFKDHPQVAKYAGLNWKQYQSGNINYQNTELVKRGNRYLCYYLVEAANSVRRQDSEYQTFYMKK

SEQ ID NO: 206043 - protein, 343 aa, unidentified
MAQHMIIGIDLAKHVFQVCMVTPQGTIKTNTTVARGKLLALIARPPPALICMEACGGAHDWARRFGALGHEVRLLAPQYVTPFRRGQKNDPNDALALTEAGQRPNIPTVPIKTIEQQDLQALHRVRERLVKHRTAVVNQVRGLLLEYGIIVPQGIARLRKRLPRVLEEADNGLSFLMRDLLQRLQSELSALDTRITEITGQLTRLSHELEACQRLQEMEGIGPLSATALVAALGHGHNFHDGRQVAAWLGLVPRQHSSGGTTRLGGITKGGNSYVRRLLIHGARSVISHVRDKPDAKSAWIRQLVTRIGVNKACVAVANKMARVAWALLHTGEQYRKPVALSI

SEQ ID NO: 206044 - protein, 438 aa, unidentified
MSNNVIFNFDELFISVGIDVGADFSWMSIVLPNQQFVGKPYKILHNSMDSLASAVSKIKEAEEMYSLESRIFLESTGIYHYPLFCYLRDKGFNCSVINPIITKNSTNINIRKVHNDRFDSKKAALVGLKPDLKVSLMPSDLALNCRNLCREYYDLMDSRNAYVNKLIDEQRMVFPQYLGIFSKVTIDTSLILLETYTSPSAFINADKQEIIDLIRSTARFGLTYACNKYNAIIQAANDADEFGYILDSNIKRIRLYIGFIRKYDEEINSILESMHELAAANEDTDFVKQIRLIETFKGAGFLSAMSLMGEIGDFSAFSKPKQLFAYFGLDPAVKQSGKFEGTKIQMSKRGSAIARRVIHTLTLQSISASRTGESKNPVLLDYYLKKCESKPKLVAMGAVSHKVCNMIFAILRDSKPFEIITPQEHIKKYNAAKCDVAA

SEQ ID NO: 206045 - protein, 414 aa, unidentified
MLKIVYPICCGMDVHKSFVVACIATTNERGVTTYKSKRFSTFTGDLRRCAAWLAENNCKDVCMESTGKYWIPLYNILERTCNIVLAHPKYVKAIRGKKTDKRDAKWIADIFKHDLVTGSFIPLADIRQLRDLVRYRWKLTSFTTGEKNRAQNCLTVSNFKLDDVFSDVFGKAAFAITTRILNNPAEKITDVSNFRTKGMKATDEQVLAAVDGAMCEEQAEKLRIIRSHMDSLHLCKLNLESLILATAEKYLPQLNLVMTAPGIQSFTAIGIISEIGVDMSVFPTSKHLCSWAGLTPQNNESAGKKKTTRISRAGAYIKPLLVQCALCAIRAKQFPEVRNRYLALKKRRGHKKAIIAIARILLTAIYNMLKKNEPYNPELYRKGDRPPTHREVSVGEAIFILQRQGYLVTAPPTP

SEQ ID NO: 206046 - protein, 406 aa, unidentified
MTAVMIGVDPHKGSRTAVAIDTAEEPLGKLRVQASASQAGRLVKWAAKWPERTWAVEGAGGLGHLLAQQLVAAGELVLDVQPKLAPRVRLLEAGDSNKNDPNDALSVAVAALRSRARRQVRADDHAAVLRVWSRRHRDLGRAKNQAACRLHAAGCEVVPGGVPEEITAAQATRILGSAKPSGAAGQARGELAAELLADMRRLDEQMRESKKKLAAAVRASGTSLTELFGVGPFAAATVIGDVTDVSRFASRDHFAAYNGTAPAGVSSGNRKTCRLSLRGNRRVNHAIHMAAITQIRHSHSDGRAYYDKKTAEGKTHKEALRSLKRRISDAIYARLRADARQAASSANQGPGGQPGSDSDSSAAGSHPEHRLFGQATPGPDTSLRPATPARPAMPPEPDSREIRRSP

SEQ ID NO: 206047 - protein, 344 aa, unidentified
MAIVLIHVGLDYHDDTVRVCVLAEDGAVLFNRDLDNDVAAVVRAVARFGVPRGVAIEACCGAANFAAEMIRLTGWKVRLGHPGYVKRLKQGPDKTDHDDAWLLADLDRVNYLPEVWLADETTLQLRRLVTYREGLKKERKNVKLRIRALLREERIPLPVEKAWTKPWKEWVRKVSLPEQSRWVMDQLLEQLTRLEADLRAVENRMEQATADDPLTQRLLAEPGIGPITAVALRAEIGRFDRFRTAKQLSKYCGVTPCNASSGKRQADAGLIKAGSRELRALLIQTAKRLPRQDPHFQEMKNRLGRTKKANVVTCAIANRWLRRLYHRMLAPQCSPGNETVPTAA

SEQ ID NO: 206048 - protein, 431 aa, unidentified
MNYNQNKKLAQITSQTLIIGVDIAKFKHVARAQDFRGMEFGSPCYFENTKEGFSHFLKWISELKREQAMDKVIVGMEPTGHYWFNLAHILKENEIKFVAVNPLHVKKSKELDDNSPTKNDVKDARVIAQLVKDGRYAEPTIPQGVYAELRVAKKIRDLLTDDLQTVQGQVHNWIDRYFPEFLTVFKKWEGKAALQFLRLNALPHEMIKFSDQELLIHLRKAVTRSVGLSKIKELKQAASKSIGLRQGSDMAKLELKTLLDKYELIQLKFEELDAKIDILLEEIPGVPQMLAIKGVGRDTVAGFFAEVGDLSDYNHPRQIIKLAGLSLKENTSGKHKGKTTITKRGRKKLRALLFRVCMILVAQNSAFKALHAYYTQRPDNPLKKMQSLIALCNKLIRIFFSIGKKQFDFSEEKMLKDIPHLSASRKVEMAA

SEQ ID NO: 206049 - protein, 394 aa, unidentified
MNRIVYIGMDVHTSNYTLCSLDPGYGVEKDNYFAEVQFTNDFIKNVVNYVTNLKKKLKDCEFVCGYEAGCLGYSTYKELTKVGIKCVLMAPSTMAVQKGGKKVKNDRRDARVIAQCLAYQTYKEVYVLSEHDEAVRGYLRMRDSHNKALKRIKQQIIAFCTGHGLFSPTKSNWTVAHLKWLKDLKFNDPVEQEILNEYLSSLTFLSDKIKAMDVRIEELASEKQYCENVKKLRCIKGIETNVALTLLAEIGDFNRFSKPTDFASYLGLIPGEQSSGDKVRGTGITKAGNSTLRRKLTESAKGYWRGRIGIKSATFKKLEKELPKEVTEYALKANTRLQRKFFNMTHVKGKNMNVAASACAREMACFVWGLITNHYEKAPAVPKTDEELLDLNIG

SEQ ID NO: 206050 - protein, 347 aa, unidentified
MRFYTEQHAHYCGIDLHARTMYMCILNQAGAIVVHRNMKTDPDAFLKAIAPYRRDIVVAVECMFTWYWLADLCAQEEIGFVLGHALYMKAIHGGKAKNDKIDAHKIAALLRGGMMPQAYVYPAEMRSTRDLLRRRMHLMRQRAELLGHIQLTNQQYNLPDIGKKIAYRSNREGVAERFADPSAASNVRFDLKRIGFYDGLLNEIELEILRHAKQHDANTLHLLDTIPGVGKILGLVLLYEIHDISRFPTVQDFASYCRLVKSKKESAGKVYGTSGDKIGNAHLKWAFSEAAVGFLRNNPQGQAYLARLEKKHGKAKALTALAHKLARAAYHMLRRKEAFDIKRFVNR

SEQ ID NO: 206051 - protein, 414 aa, unidentified
MDVVYERCAGIDISKTDVKVCIRTPGPGRRRRQVRTFTTMTNDLLAMRDWLLAERVTVVGMEATGAYWKPVYYLLEHDLDCWLLNARHMKAVPGRKTDVKDCEWIAQLVEHGLVRAGFVPPEPIRQLRDLTRYRTEIIRERTREIQRLEKLLEDAGVKLSAVVSDLTGKSARAMLEALIGGERDPQTLADLALAGMRGKRALLAQALTGRFGEHHAFLARAMLDRIDACTAMEQRLSDQIDRQVQPFRRQLDLIQTVPAVGRRAAEVILAEIGADPTRFRTAADLASWAGMCPGNHQSGTRSVPAPTRHGDPWLKAVLGQVAVNAARSKGTYLAARYRRIVARRGKKRALVAVGHSVLIAVWTMLARDQPYQDLGTDYFTDRLDPQHKARQARRLLDQLHQLGYTADLQRIATG

SEQ ID NO: 206052 - protein, 369 aa, unidentified
MPVVRGERAARFTFGTPSPRGSIWRAFATVLWKPEQLIDFNSHLQGWETENMPELIHVGIDVSKDALEVACGPESPTQCFTNDDAGHEALVNVLHVHRVDLIVVEATGGYEAPCACALQAAGLAVAVVNARQARDFAKAMGYLAKTDRIDAQVLAALAAVLANRADRQKLIKALPSDEQQRLHALVLRRRQLVQMLVAERNRLPMSHQAARVSIEALIKAIRKQIVDIEADLSSPIAHHHADLAGLLRSAQGIGPHTSMALIADLPELGKLSNREISALVGLAPFNRDSGKMRGKRMIFGGRTQVRCALYMATIVAMRHNRVIQRFYQRLLAAGKPKKVAIVACMRKLLTILNAMVRTGKQWDETFHFA

SEQ ID NO: 206053 - protein, 339 aa, unidentified
MTECHYLAIDLAKNVFQLHGAAADGSVVFRRRLTREQLSAFVVQLPPCEIAMEACASAHHWARQFTAMGHRVRLISPQFVKPFVKGNKNDGNDAEAICEAMQRPNMRFVPIKTVEQQDVQSLHRIRARLVNERTGLVCQIRGILAERGIVFAKSITRARREFPVIVQDLNNPLTPTLRMMMGELIEELRALDARIRTMDQHIDAVFRANEACQRIACIEGVGPKTATAFVAAVGDPTEFKNGRHFAAWLGLVPRQHSSGDRLQLMGISKRGDKYLRTLLVHGARAVLRTAPKKNDHKHQWALQLAARRGAAKAIVAIANKMARVIWVLLAKKQDYCPAN

SEQ ID NO: 206054 - protein, 346 aa, unidentified
MTTVDVTRLVTGGVDHPPRRERCGGTRSARRAVRSSRVPDDACGPPFPREFLASFGTLTRVGVEGTGSYGAGLSRYLRGSGVEVVEVDRPNRQSRRRTGKSDPVDAIEAARAALSGRAQGAGKSRDGNVEAIRALVVAKRSGGSTKIQTLNQIRHLGFTAPEELRARLKGISRQHLGAEAAALRPRAGGDPVVFATKTALSLLGHRVLVLDAERERLNLLLGELVEKTAPQLLEIHGVGVDTAATLLVTAGDNPERIRSEAVWAHLCGVAPIPASSGKVSRVRLDRGGDRQANSALWRVVITRLRSDPRTQAYMERRLKEGRSKPEVIRALKRYVAREVYQRLPRA

SEQ ID NO: 206055 - protein, 399 aa, unidentified
MLAVGIDISKSKSVAAILNQDGSMHTGPFEFHHTQPELDAFIKYILNSNQSATILMENTGHYHYPVLKAFQEAGLPVCMVNAYQIKKFGDMDLRKAKTDKKDAVRIARYALEKSYSLIPYTSMEQKYEDLRFLARQYNQRILTLKTNKVFLLNLLDETMPGITNILPLTTRTPETSLSVLFINRFKSYDRIKKMGKSRFLDAFEKIARKSRNRQTKTYGLAIYETALLNITTRGENEYTLGAQDQCLELVCESQKAADSIILKMQALAETLPEYAVLRSMAGVGDRLGPLILAEIGDIRRFHSGKALNAYAGNDAPPYQSGTFESHNRHISKRGNAALRKYCFEVMQTLKLTRPQDDPVYLFLLKKEQEGKPYNVAKMAGVNKFLRIYYARAMETLKQQ

SEQ ID NO: 206056 - protein, 344 aa, unidentified
MATYYIGADVHTNNTELAVEQRGRIVARYSVPTSIPTIGAVLNSIQGKKILAMEEGPMAGWLYRNLNEKVDEFIVSEPRRNKLISSEGDRDDKIDSGKLAVLLRGNFLKAVHHTGDDHRAYLKHWINLYHDRVRDAVRDINKIRACCRMHGVRIPRKVVRNPVRRHQWLSGLDNPVLKAQLHMLWIGYDATKEQLEIAKKQFSSYARPYPIIKSWCDLPGVGMIRATTIFAYLDTPWRFKNRAKLHRYCGIGLVRMTSGTDKKGRPKPARLKLPWAVNRRIKNAVMGAAVSAIERGGNAFKDYYERMLSHGITPVNARHSVARKLVSTMSAMWKTGRPYDQTLV

SEQ ID NO: 206057 - protein, 347 aa, unidentified
MHYVNNTELSSLEGTRRQFKGGRCAIKLGVDVHQDFCVVVLQEDGASPKPPQRFQKEAFLHWAARLKRKSGAEVHAVYEACGFGFALQRQLSALSIQCYVVCPQKLDEHNRRVKTDGLDAKALCLKLDRFVQGNRAALARVRVPSEAEEQLRAIHRQREQLVKARKRLEAQGRSLMVNHGLEPVKNWWKPRTFAALQVSDWMKQLLQNSQPILIGLQEKIAALTGQLQRAASPDQLRGLGKMTSVIIDREIGDWHRFRNRRQIASYTGLCPGEYSSGNTRLQSCVTKHGNPRLRAALVELAWRLVRFQPNYKPVVKWRQILAKGALATGAARKKAIVAVARQLAVDL

SEQ ID NO: 206058 - protein, 311 aa, unidentified
MTEHTIGVDISKSHLDVFDAERGEAKRFENSASGFRAFDKWCSKFEIVRVVYEPTGPYHRNFEERFCDKLPLVKVNPLQARRFAEACGTRAKTDALDARGLARMGVALELEPDIPVAKTTRILKDLQVARASLIKERTRLNNRAHVQTNTVLKRQTKARLALVEKQLCELDREIDTLIKADKTSARRREIVQSIPGLGSVASAAILTYLPEIGTLDRRQVGSLAGVVPYNRDSGQWKGKSFISGGRKPLRDALYMPALVAMRHNPDLKAKYEALRAAGKPAKVAIVAIMRKLIETANALVKADRVWVAKTT

SEQ ID NO: 206059 - protein, 456 aa, unidentified
METKRRREQRSMLPVHPDAAAIDIGATVHVAAVGPARDPEPVRSFGTFTGDLHRLADWFAQCGIKTVVMESTGVYWIPIYEILEQRGFEVRVVNARDAKHVPGRKTDVSDAAWLQRLHEFGLLRGSFRPQGAIAALRAYLRQRERLLDYAAAHIQHMQKALTQMNLQIHHVISDITGATGMRIIRAIVAGERDPDTLASYRDIRCHSSAETVRQALIGNYREEHLFALAQAVELYEVYQAKVATCDEKIEGVLERLKQPGRAPAKPLRAARHKTRQPNAPAFDARGALYAVLGVDLTQIHGLGPYLALKLISECGTDLSAWPSAKHFTSWLSLAPGNKISGGKILSSRTRPSGNRAAALLRLAATTVGRTETALGAFYRRLSARIGKAKAVTATARKIAVLFYNAVRHGMDYADPGASYYEERYRRRVLTNLQRRAKAFGYVLQPTEIKVVPMAVS

SEQ ID NO: 206060 - protein, 412 aa, unidentified
MQAIIERCCGLDVHQETVVACLLVGAPGAQPTKEVRTFRTVTRDLEALRDWLRAAGVTHVGMESTGVYWRPVYTVLEGHFELIVGNARHIRNVPGRKTDVKDSEWIADLVRHGLIAKSFVPPRPLRELRELLRYRRKLVESQAAERNRLLKLLETANIKLASVASDVFGVSGRAMLRALIEGEASAEAMADLAKGQLRRKRADLILALDGRIDEHHRFLLAMQLRRLEAIEADIAALDLRIGERLEPYCTQHALLMQIPGVDWLVAAVLIAEIGVDMSVFLSVYHLAAWAGVCPGNHESAGRQKSGRARKGNIHLRTILVGAAISAARTKGSYLKDKFHRLKARRGALRAALAIAHKILVSAYHMLAKSLPYRELGEAYLDQIGQTRTVANLKRRLERLGYRVTLEPTVQAT

SEQ ID NO: 206061 - protein, 338 aa, unidentified
MTDIKVLGIDLGKANFHVIGHNDQGRTIFKKVFTKTALLSYLHKIPTSIVAMESCPGSQWLGRRVQSYGHDTRLLPPQYVKAYVKTNKNDFIDADAIAEAAIRPNMRFVPIKSVEQQSALVTHKLRDGFIKQRTACMTQIHAFLLEFGINHGKGHPAIRRVPSLLEDAALDLPVELRKSIDHLYQHYQYLNEQIKLLEKRIESYINQNESSQKLLTIPGIGMHTASRLVAEVGNANRFKTGREMAAWLGLTPRQHSTGGKQKLLGISKRGNKQLRCLLVHCARSILRFKHKYSDTAFGDWITLMQENKTFNVATVALANKLARIAWAILYKNEEFKLA

SEQ ID NO: 206062 - protein, 337 aa, unidentified
MIVVGVDVHKHSLTAVAVDEAGRALAERTVAAAPELLAWSASLGPERLWALEDCRQLTRTLERALLAADERLVRVPPKLMAPQRRAGRMRGKSDPIDALAVARAALREPRLDHPRPGEQRLRELKLLVDHRDDLIDERRRVQQRLRWHLHDLDPELAVPLGALDRGVWLDRLGRRLARLEQTAQIRIARELVSRCRGLTRTILELDRELEQRAAATAPRLLELPGCGAISASKLLGEIGPITRFETDAQLARHAGVAPLEASSGKHRRHRLDRGGNRQLNCALHPIAVTQARIHPPARAYLERKQAEGKSRREALRCLKRQLARVVFNTLKANPALT

SEQ ID NO: 206063 - protein, 453 aa, unidentified
MSRNKTKLQSVNEPPKIRTDAAGIDISPEVIYVAVDPRRDPQPIRHYGTVTAELYRIANWLKACGVRTVAMESTGVYWIPLYQVLDERGFEVYLVNARHYKNVPGRKTDVCDSAWLQYLHAVGLLQGSFRPTDEICAFRTVMRHRGSLVEAASKHVQHMQKALDQMNVQIHRVLSDLTGVSGLAMLDAILKGERDAGRLAELRDGRVQASEESIIAALEGNYRIEHLFTLKQSLESYRHYQKLMAECDRQIREQLEALEGRSGGNEPPDARKNMRRRSDEELRKEFFRIVGVDLTAIPAINVGTVQVLLAEVGPDLSRFRSAGAFSNWLGLCPNNAITGAKIKSSKTKNTENRLAAALRMAAESLCRDKSYLGQFYRRMKMHLSGGAEAVTAAAHKLARIIFAMVTRRLEYDETRFAEIEQRNTQRARLRFIKQAEKFGFRLTPVQPAAEFVS

SEQ ID NO: 206064 - protein, 427 aa, unidentified
MNEIESNSIDRFRQFKKEIRGSKEHLIVGLDIAKRKHHGFFGDANGRTLLKGLIVENSAGGFRHLLTQVRFYMDREGLSRVVFGLEPTSVYHKPLAEHLIEQGHLVVYATNEAIKKNRSLIDGRWDKNDTKDSANVADLVAQGKCHYYDLPELRLRDLRSLLLFRKRLKKQLHSCRVRIRNNLVAQYFPELDWFWNNAAAENLAIVRWFLDPGSIRQLSCEQFIVKVTTHNGGLRQQRRLQHIWEAAGQSIGCRPGLAMALEAELVVEMLQSVQAQLSRVERDIQKIAEGFEEYDYLKSIPGFGPYVSAVALAAIGNPHRFENRAQLIRLAGFDLSANRSGEKSKAAVPVISKKGKADLRYALYQAALVASSLTSHFRAYYSRLLDGRQREKGIRTKMLVKIAAKMLVIAWTLMKRKESFNPAHIQA

SEQ ID NO: 206065 - protein, 357 aa, unidentified
MQTQVTKRLDFYDKKIFVGLDVHKKSWSVTIIVGGIEHKTFNQPPDSQVLSDYLHRMFPNGEYHSAYEAGFCGYGIHRSLNELGINNQVINASDIPTTQKDTLGKTDRVDSRKIARALEREMVRGIYVFERDQEELRSLNRTRMNLMKDFRRSKNRIKSFLYYFGIVLPVKYDNNHWSRDFEVWVEQVDMDTNGGKDALNQLLATYRYFRQQMLDISCHLRKCIRERDRELYDLLQTIPGVGPLTAITLITELGDIKRFRHINHLASFVGLVPRIKQSGDIERTGDLTFRCNHYLRTMIVEASWTAIRMDPVLMQYYQEKRVNSIGQKAIIKVARKLLNRIRYVMKHRKPYVMGVIE

SEQ ID NO: 206066 - protein, 362 aa, unidentified
MGAVARTQLRETPVKQNRTCVGLDVHARSVWACTVDDDSGEMRTARISPKTAEIVKWEKALPGVVEVAYEAGPTGFGLARALIAAGVTCHVLAPSKMERPSGDRVKTDKRDSEWIARLVRLGELPVVVIPSEGQEAARDLVRAREDVRGDLMRARHRLSKLLLRQGFVFDGTAWTAAHDAWLRSQSFDKPGVRFAFDEAYDTVLTTLARRDRLDKAITVMAAEPAWQPVVARLGCLRGVGTLTGFGLAVEIGDWHRFTGNSIGAFVGLTPSEHSSGGSRSVGSITKAGNGHARRLLVESSWHHRKPYRLSAEMIRRRDGQSPAVRARADQANRRLNQRWRTFDARKKRSTTAAVGVARELAG

SEQ ID NO: 206067 - protein, 349 aa, unidentified
MLADELDYVLGVDTHRDEHVMAVVTAPAGVVVAGRSAAANARGYRELLRVAGRHAPGRRAWAIEGTGSYGAGLARFLAGRGELVLELSRTPRAERRLRGKDDTLDAVRTARAALASETLALPRTGQQREALRLLSVARRSAVDVRREALTQLRAVIVTAPDPLRSELRRLPLGQLLERCSRLRRSATATPDQLATRLVLRSLARRIQAATLEADQLEQEILARVLALAPALLEEPGVGPIVAAQLIVAWSHRGRLRSEACFARLAGVAPVPASSGQTTRQRLSRGGDRQLNRALHTIVLHRRQHDPATRDYIAKKIAEGKSRRDATRLLKRYLARHLYRLLENQDPLMA

SEQ ID NO: 206068 - protein, 317 aa, unidentified
MTKTSMKVAGIDTAKDKLDIAVHGQALRWQVENLLQGWKRLGSELAKAGITRVGIEATGGYERGVVRYLRAAGLTVLVLQPIQVRAFARFHLRRAKNDALDAVLIAACAAAMEEPRIGPDQRLIELADLLTFVEQTEEDLARLKTRLEHLNEPRLRRIVFTDIARLKARRLAQLRLIARQLRDHPDLAARLDLVLSVPGIGERTALALIIRMPELGRISREEAAALAGLAPFDDDSGKHKGQRHIAGGRGRLRRSLYAAALPAAFRWNKALISLYGRLVARGRPHKAALTACARKLLVYTNTVVARGTPWTDSPSPA

SEQ ID NO: 206069 - protein, 607 aa, unidentified
MSTIASLDRIGVGIDTARYGHRVSFLRPDRKPAAKPLTVMENRAGYQALQDRLNQLHEQHPTAYFHVRIDAAGQYAVNLELFLRGLKLPMTISVGEPKRNKDYQKAHFPKRTTDDTESQAMARFAVIELPNATPAPSTPMILLREVAGRLQSKVKQTTQAINRLHNLLARVFPELATLTEDISVGWVLKLLDKYPTAERIAQAQIASLEKIPYLSVEQAHAVHQAAKQSVASLRGELAEALVRDLVNQLRLCQKAEQHLHQLLLEAFADLPASPHVQVLTITGIGEATAAALVAKIVDINRFATPNHLVSYFGVFPEESSSGVDKHGKPLPPGTLIMSPKGNDLVRFYLWNAARTAIQHNPAIRALYRRLRAKGKRGDVAFGHCMRKLLHLVYAVWKTDRPFDKEHFPWEGSSDTQPSATTPPSADAGTTPSANEEAVGHKRDLPAEEVVTTADSTLEPASPAVKPASQSAAPRPKVDFACVREHVTMEQVLQHLGYFASLRGRGRQRRGPCPVHSQPTAPERTFSVHLGKNAFQCFHAECAVKGNVLDLWAAIHRLPLYEAALDLAETFQVPRNREEEPVKGTSSPRTATAKTSAPAAATATDGAK

SEQ ID NO: 206070 - protein, 484 aa, unidentified
MIGSFACEPVRSDAPCSTRAQERSPAGSEASVQKSERTTSREDPVSGRLRTEAKADATRNSSRTFKLNSRMHLESLFANFGAIDWAKYNHHAVIVDRTGQIVAEFSFPHTLKGWQQWRQQAARYVPLAVAIETSQGTVIDQLLQTPDCTVYPLNPKAARAYRNRKAPSGAKSDHLDAWSFADALRLDGSAWRPLSKQDPLLEQLHLLCRDELALIEERTALVNQLIAALHEYYPTALAAFEDWTLPAAWAFVEAFATPQLLASSGKRRWEKFLHTHKLARPETYEKRLELFAKATEFHASDALTQAKSRLAVTRTKQLRVLQTQLEDYRRQIENLFGQHPDHDLFGSLPGAGPKIASRLLAELGDNRQRFESSQALQCYGGTAPVSYQSGPVHKVRVRTQCNKVLRHTVYLWADLRRRTCPWANIYYQSLRKRGQSHACALRCLGQRWLKILWKMWQTRTRYDASLHQQNQIQHGSWVLKLTNP

SEQ ID NO: 206071 - protein, 358 aa, unidentified
MIGMKYYISTTKFNCGIDLHARQMYVCLMDPQGNKLVHTNIRNNDFNYFLKLIAPYRHDLTVCCECMFGWYWLADACQAAGLTFVLAHALYLKAIHGGKNKNDRIDSEKIAHLLRTNFIPPAYVYPAAMRPLRALWRQRICYVWRRAELLARIGSHQLAHNRTPIKQTRRVRDPWAKELLAQEPDPVRALALQNDLAMINHYDQQIYALEEQLQKFTKANSWREYALLQSAPGIGQNLGHTILYEIGDIERFPSVKDFLSYCRLVKGSVASAGKIKGLRGAKLGNPYLRWAFGEAAVIAKRDHATIGPLAARLEAKMNGNKFKANTVLAIKLARAVYFMLKNKTVFDPQRLVAALSRN

SEQ ID NO: 206072 - protein, 346 aa, unidentified
MTILEDTRVITGGVDTHADMHVAAALDPLGGLLGVREFPATAAGYADLLGWLSGFGDLALVGVEGTGSYGAGLARYLAAARVRVVEVDRADRQDRHRQGKSDPLDAVSAARAAQSGRAAGAPKGRDGAVEAIRALMVAKRSARNERTQAINQARSLIVTGPDDLRARFAGLTAAALAEGIAALRPRPGDAAQYAVRIALRELGRRVEFLDGQLERLDDLIVPLVTARAPGLLSLYGVGPDTAALLLVAAGDHPERLRSEAAWAHLCGVAPIPASSGKVRRHRLNRGGNREANRALWRIVITRMSAHPATRAYIERRTKEGLSKKEIIRCLKRYVAREVYHHLRAGG

SEQ ID NO: 206073 - protein, 521 aa, unidentified
MQLIIFGANFYEGSLTPEDENVRQLWTGAIIEALGKVETVIGGQSRILNWPCRRDGTPDWCGASRPWSKIVEHEPVGEPRPKEVCMIPAVLTHCAGIDIGKRGLAVCLMVGAAEAEPKVEVREFSTFTADIEAMKAWLVQAGCTHVVMESTGSYWKPVFNILEGSLVVCLANSEDVKGRKGHKTDRKDAKWLAHLLRHDMIRASFIPPRAIRELRDLTRRRKQLLGDATSERNRVQKTLEDANVKLGSVLSDVFGVSGQRMLEALLEGRGSAQEIADMARHKARQKIPQIIESLAGHRFSEHHRLMIRMSLEHLRMLEGQIIALDEEVVQRVQSLGLERMLNLLAAIPGLGHDSAATILAEVGPDMKQFPTAKQLSSWAGVCPGNKKSAGKNFSGHTTRGNRWLRSTLTECAWAVSRSKKSALRDKFWRWAAGGKKKAVVAVAHGLLLQVYQVLQTQQPLAQAPSPPMDEQRRKRIVRHHLRCLGRLGVSTGPKRISADGVAAKPGRPPSKVKTNKPEACS

SEQ ID NO: 206074 - protein, 341 aa, unidentified
MDITIVGLDLAKNIFQVHGINSAGDVIVRRRLRRTQVPTFFAGLKPCLIGMEACGTAHFWARELVALGHEVKIIPPSYVKAYVRRGKNDAADAAAICEAVTRPNMRFVPIKSEDQQAALMLHKARELLVRQQTMLVNALRAHMAELGMIAPLGRSKVEDIITVIEDGEDASIPALAKAALKPLVSQLRANEEATATLDGEIKAWHKDNAASQRLATIPGIGFLTASAIAATVPDPSFFRSGREFSAWLGLVPRQNSTGGKDRLGRISKQGNPYIRRLLVIGATSMLRYARARTAPGADWVNSLLERRPARLVTVAMANKTARIAWALLSKGETYRAPAATA

SEQ ID NO: 206075 - protein, 366 aa, unidentified
MKKTSTVRVKGNMIFKGQKLTIGVDLGDRWSCYCVLDEAGEILLEQKVATTAEAMKQIFEKIPRGLMALETGTHSPWVSRLLRELGHQVLVAQAQKVQLITKSSGKDDRHDARTLARLARIDPELLGPVRHRSAKAQIHLTVIRARAELVRARTALVNAARGLVKSYGQRLPKCGTQQVNRELAAGLKAELQDVLEPLLKEVESLNERIQEYEVRMEKIAKESYPHVELLKQVKGVGTQIALTYVLTLEDPHRFPKSREVGCFLGLRPGRRNSGESQPQMHISKEGDRYLRTLLVQGAHYILGPFGADSDLRRWGLKLAARGGKNAKKRAVVAVARKLAVLLHRLWVTGEVYEPLHNSHQEMRAVA

SEQ ID NO: 206076 - protein, 337 aa, unidentified
MYYIGLDIHKKTISYCVKDAAGCVHREGKIGSSRRELDAWIRTLPQPRMMAMEATIFTGWIYDYLLPHAEKLKVAHPLMLRAIAAAKKKNDKIDAAKIADCLRCDFLPECHIAPTEIRDRRRVLRYRNLVVKQMTQMKNRVSGLLMETGVSYNKQRLHKVGYFGEMMSTNADINDAVRPLLNLSRGMIRRSSKLEYDLVSSLERDPLLKERLRRLRTVPGVGSITALTWALEIGDYTRFRSNRQAISYCGLCADEKSSADKVMRMPLSKQRNKHIQRVLVEAAKLAPRLSPELAMIRARELERGNPNRATLAVARKMVCYMLAVERRQQDFVQTAAA

SEQ ID NO: 206077 - protein, 417 aa, unidentified
MDVVYRRCCGIDVHKETVAACVLRWEEGGQVRKEKKVFGTMTRSLHELAAWLSQHEVTHVAMEATGVYWEPVWNVLEGQFQLLLINPEHYKGLRGKKTDLKDGERIGELLQHGLLSGSFVPPCEIRALRGLTRHRASLAQERVRVFSRIQKLLEDANIKLASVASDVLGLSGAAMLDAIAAGQDDPKKLAEMARGKLRAKLPALRLALEGRVQAHHRFLLRELLDHELHLQFQLGKIDEEIARRAVPYEETVARWKTIPGVDQITAWSLLAEIGTNMDQFPSPQQLASWAGVCPGNNESAGKRKSGKTRKGSPWLRRVLCQAAWAASHTKGTYLAAQFRRFAAKRGKKRAIIAVAHSILVIAYHMLKNTCDYQELGGDYFDRINSEGLKRYLVKRLEHLGYKVQLDAQPQPGSTACT

SEQ ID NO: 206078 - protein, 401 aa, unidentified
MKEFNAEAVRIETASALETVRAAQADRQYPAYIGLDVHKQTIVVAVARAGRDAPESREEIANKPKTVAKLVERLNREFGGEVLLFCYEAGPCGYGLYRQLLALGQDCQVVAPSLIPKKPGERIKTDRRDARKLAQALRSGDLTAVWVPDEEQEAMRDLTRARDDLKAQERKARQQLNAYVLRHGHAWPSNKTRWTQTHYNWLESLKFAHDWQQVVLQEYIDAAKAGSQRVADITAQMERVLPQWSLSPVVDSLVALRGIDKLAAMVLLAELGDISRFDSPRQLMAFLGLVPSEHTSGGRRRQGAITKTGNGHARRMLVESAWSYRFPARQTAHLKRKAASASDEAKVIAWRAQKRLCGRYRTLLQAGKNTKQTTVAIARELAGFIWDIACHEMPKVQRAVR

SEQ ID NO: 206079 - protein, 338 aa, unidentified
MKLYGGIDLHSNNSVFSIKDETGDVMARRKLPNDIKQIFLFLAPFKQQLTGLVVESTFNWYWLVDALNEADFQVHLANTTAIQQYSGLKYGDDKTDADWLAEMLRLGVLPEGYIYPKEQRTVRDLMRKRMQLVQQSTLNLLSIQGLYMRHLSYKMSNNKIKQLTPEAIMTHFSSANTAQATICNLAVMKCLKEQIKLLEKIVLTQVQLKPDFQELTTIDGIGNILALTIMLETGDIKRFNKVGNYASYCRCVSGARYSNGKKKGKTNSKNGNKYLAWAFVEAANFAIRYNKTVKSYYQRKSAKTNQTIAIKTVAHKLARACFYVLRDKVPFDVEKAFC

SEQ ID NO: 206080 - protein, 397 aa, unidentified
MSMFFVGIDVSKDYSSAQGLDREGKKVFYLEFAMNGEGFSQFLKVLKTHCEDLSGVTVGMESTGCYHINLFAFLCSWGIICVVINPLLISNFARLSLRKTKTDKKDALTIAQFLLAHRGEFSRVSYSQSSQDLKDLARERESLAVMIAGLKNDVRRLLQMTFPELEHRCKLFTETMMRFLIKFPSARIIRTAKPKEISKALIHAEGKRKRVFLSAEEIIKLAKASVASESVAKELILSEKIETLLYLEEKKARMTEALVEACRSTRVDELDIITSVDGISAITGSTFLAELGDIETFRSYKHVIAFAGLDPSIHQSGQYEGISRLSKRGNRHLRRVIFLMTLCAVRSQNIFREYFLKRKGEGLPAKKAILATAHKLLRVLFAMLTSKSYFRKEVVEV

SEQ ID NO: 206081 - protein, 412 aa, unidentified
MRRVIGVDIHRTFGEVVIWEDGKLRSFGRVDMTRTALEGLGGKLQPTDEVVIEATGNAMAVSRVLSPFVRRVVIANPLQVKAIAYAHVKTDKVDAGTLANLFAAGFLPEIWTPDAETERKRRLTARRYQVVRHRTRIKNEVHSILHAHLVPKCPHSDLFNRPGRAWLERQPLPDDEREAIARHLRELDRLAEDLAVLDREIAEGALDDGAVKRLLTITGVNLTVATGILAAIGDISRFKSPGKLVSYFGLNPRVRQSGLGVAHHGRISKVGRSHARAMLVEAAWAVAKAPGPLHAFFVRIRARRGHQVAAVAVARKLAVLCWHVLTKDQDYLWARPALVANKTRAMELQAGKPQAKGNRRGPAYAYNVKALRDQEQQLAEQAERNYARFVDRWRTRPPKAGARERLNPARSE

SEQ ID NO: 206082 - protein, 430 aa, unidentified
MKKRRAYRARSVKEVKWEVASQGRDGQGVHVGFDVGKEEVLTVVRWGEDQFERPWLVKNPGEIRELVDLLVRVHQERRLTLAMEPTGTYGDGLRQALADRGLTLRRVSTKAAHDYAEIFDGVPSQHDGKDAAVVAELAAQGKSKEWPWTVPSVVEQEMAYWVDWMDAQQRQSAMWLGRLEALLARHWPEATQWLKVSSGTLLRAMERYGGPAGLAGDAEGASQLTRWGGPYLKRETIAGLIRSARQSMGVRQGEVDVQRMRQYAQQALAARGEIARSKRCLAKLAQGHAVIQAMAEAVGIATACVLWVYLGDPRMYHCGEAYRKGMGLNLAERSSGKYQGKLKISKRGFPQVRRWLYFAALRWIRRGPIARWYQRKKAKDADRAKRAVVAVMRKLALALYQVGACGEKFQERRLFPGRQVVRSRPGCLVH

SEQ ID NO: 206083 - protein, 338 aa, unidentified
MIVIGVDVHKHSLTAVAVDEAGRMHEEKTVAAGDGELLAWASMLSDQRLWALEDCRQLTRWLERHLVEAGEELVRVPPKLMAPQRRAGRARGKSDPIDALAVARAALREPGLSQPRPDEQPFRELKLLVDHRDDLVDERRRAQQRLRWHLHQLDPSFAVPARRLDRLAQLDRVGRWLARREQDVQVRIARDLISWCRSLTRAIMELDRELEQRTEQLAPALLELPGCGALTAAKLLGEVGPIDRFRSDAQLARHSGVAPLEASSGRVQRHRLDRGGNRQLNAAFYRMAITQARYYPAARAYLERKQAEGKSRREAIRCLKRQLARVVFNTLKASPALT

SEQ ID NO: 206084 - protein, 343 aa, unidentified
MKLTRVGVDLAKNIFQLHGVDRAERAVWCKRLKRNRWIKEIEQNVEPGVEIGMEACGGAHHWARLLQSKGYRVRLIAPQFVKPYVKSNKTDANDAQAVCEAMSRPSMRYVAVKTIEQQDIQAVHRVRASLISERGAKANQLRGLAYEYGLVAPREIAALRVAVPAWLEDASNGLTVRLRALLCGLYADLRALDERVRELDKEIRAIGRENEAVGRVQQLRGIGPLIASALVATIGDARQFKNGRHVAVALGLTPRQHSSGSKERVLGISKRGDSYVRTLLIHGARSALRTAPGKNDRMSRWALALAKRSHANVAVTALANKMARVAWAMLRHGTTYEPNGLAA

SEQ ID NO: 206085 - protein, 379 aa, unidentified
MGDCSEVFVGIDTSKLRNALAIADGGRDGEVRFLGEIENSEAATAKLVRKLASQYQRLTFCYEAGPTGYGLYRQITELGHECIVAAPSLIPKRPGDRVKTNRRDAVGLAKLLRAGELTAVWVPDRHHEAMRDLTRARETAMLDLRRKRQQITGLLLRQGRHYQEGNQERRKPWTKIHKAWLMRQKFEHPERRLVFEEMMLAMREAEERLARLEQAIRVAVADWSLAEVCTGLMAMRGIDLVSSAGFLAEMGDLNRFPTPSELMANLGMVPSEKSTGETIKRGPITKAGNRRARRLLVECAWAYRHPPRVGVTKQAKVAAAPRAVREIAWKAQHRLYGRYRTLIRRGKLKNVAIAAVARELAGFIWAVNREITVAGAATR

SEQ ID NO: 206086 - protein, 312 aa, unidentified
MTEITIGVDVSKDTLDVHLHPDGTHRQFINDAAGFRLILDWIGSRPVARLVFEASGAYHRAFERAMGEAGIALCKVNPARARRFAEATGQSAKTDRIDAAMLARMGAVLEPDTRAAPSKTACDLKELHMMRVALVKDRTAAKNRAATLTLPLLKRQLRQRLAAIDRQIRQIEQAMHARIEADPELARKRDILISIPGIAERSAFALLTGMPELGDLNSQAAGALSGTAPRTRQSGKWTGRAFVQGGRAHVRRALYMPALAAARFNPDLNQTYKSLTARGKPPKLALTAVMRKLIVLANALIRDNRKWTPKPN

SEQ ID NO: 206087 - protein, 324 aa, unidentified
MQNQTIVGIDVSNATLDICVSNHEQRSFVINNEVKAICQFFKAYKEKLIIGMENTGRYNWALYEALKETNHRIFVISPLHLKRSMGLVRGKNDKIDAVRIAAFIAKNHNELPQWKPSSQAVQKLKILLTERSCRVKAKRQLLKQQYDYAKMKHLGMDKYLMGLNKQELALINKQIAMIETEIEALIKTDEQMHNQAKLIRSVPGAGKVLCWMMLAKTAGFTTITEPRKMACYSGVVPFSNQSGTSIRGKNRISPYADKAIKAVLHLAAMSAIRLKNDLREYYLRKIAEGKNKMSALNAVRNKIVHRIFAVIKNQTHYQNHLLLS

SEQ ID NO: 206088 - protein, 309 aa, unidentified
MTIHQTVLGCDISKSFLDVFDPRSRRCERIANDKHAIEAFAASLAGTDCLVVFEATGVHDRLLRHALGEHGIAARRLNPVQARRFAEMRGRLAKTDRIDATSLSDFGKMVQPNPDPAPSRDRERLAALARRRDQLVELRALEKRHRADAFDASIIADIDVVIESLGNRIAAIETEIDRHTRRDVELTAELKRLTSAPGVGKITALTLVAHLPELGSLTPKKIGALAGLAPFNNDSGHRRGRKHIKGGRRRVRNALYMAALGAIRANTRFKSFFNAVTDRSGSKKVAIIAVARKLLTVLNAMQRDKKAFA

SEQ ID NO: 206089 - protein, 357 aa, unidentified
MGKSIIDTSGVTRVGLDLAKRVFRIHAVDATGSVVIARSVNRRTLLKFFDALPRCVVAMEACSSAHHWGRQLQALGFAVRLIPPAHVKPYVRRNKNDAADAAAICEAAGRPAQRFVSVRSVENQAELMRHRARELMVGQRTAALNALRGHLSEIGVVAAQGVPNAYALKELVDGGFDENGEIVVPDCVRLALAPLVRQIDALDEAIEAIDRTLEASARTDATARRLMTIPGIGPVTAMALLATIQDFAAFSSGREFAAFLGLTPREHSSGGKPRLGRITKMGDRYLRKLLVVGACSALAARKGHNDALRRWASGMLERKTVKYKFKLTAVALANKLARIVYALATKGGHYDDRPVAA

SEQ ID NO: 206090 - protein, 340 aa, unidentified
MKKVAILGIDLAKNVFQLHGVDSEGQAVMKRRVRRERLLKVVAEIEPCLIAVEACTGAFYWARAFQQCGHTVRVISPQYVKPFVKGNKNDGNDAEALCEAVQRPNMRFVPLRTVEQQDVQALHRARQRLVNHRTALITQMRGLLLDRGVAFGKSASRARRIIPEILEDADNGLTSLFRQTLADLYDFWREIDLRIAQFDQRIAQVFQQSEACQRIAQVEGVGPKTATALVAAVGNAREFKNGRHLAAWLGLVPRHCASGDRRHLFGISKHGDQHLRTLLIHGARAVVRTAASKSGPRYAWVQALQKRRGTNRTILAVANKNARILWALLAKGEAYRKSVE

SEQ ID NO: 206091 - protein, 355 aa, unidentified
MNSLKYIGLDVHLATISIAVLNAAGKLIMEVTIETQAAALLDFIRGLRGTLQVALEEGTCAEWLYALLAPQVAKVVVCDPRQNPRRLGEKKSDRLDARKLAEWLRLGTLKAVYHGNPQGPALRESARSYCTLVSDTVRVMNRLKALYRGRGIRCAGTRVYSPRGRGEWLAQLLEPGVRRRAERLYQQFDWLLPLRQEARAAMLAESRQHAAQKILRSIPALGPVRVALLIALLQTPHRFRGKRQLWAYAGLALVTRSSADYRVVAGQLARSRQPALILGLNANHNHALKALFKDAAASALAHPGPLKDFYTTRVAQGMKPELARLTLARKIAAITLTLWKKGERFNVQHLKPQAA

SEQ ID NO: 206092 - protein, 347 aa, unidentified
MVIIGVDAHKATHCLVAVDDVGRKLSEKTIPATTDGARDGLLWARRYFGVDLLWAVEDCRQVSARLERDLIAAGQRIVRVPVKLMSRARRQARTRGKSDPIDALAAARAALREPNLPIACHDAVSRELKLLVDRRDDLILQRTATVNRLLWRVHELDPTRKKPISLNHATHRTALREWLAPQPGLVAELARDELDDITGFTEAINELTKRIAKRVRVVAPSLLALPGCGEITAATIVGETALVQRFSSEAAYARHIGVAPVPHSSGDKSVYFRSTRSGNRQLNKAIHRIAVTQLRLHGLGRAYYDKRVAENDSRAHALRCLKRRLSRVVFNRLRDDEKNRSALPQAA

SEQ ID NO: 206093 - protein, 344 aa, unidentified
MQKSNVIGIDLAKNVIQVCLISKDGELISNKAMSPQRLKELLAKTKTAIVAMEGCSACHYWGRFAKQFSHDVRIISPRKVKAFLQGQKTDANDALAIAVAATQTGMVFSQLKSEAQQTLQSIESSRRLIDRQRVALENSIRAYVYEYGLTSAKGKKGFRELVLSILDNQIDGLPECLKPTLQLLYQQYCQTLECAASIEKQRNCLVAQSEPCKRLKALEGVGDVCATLLYINLGNGSEFKNGRQASAYVGVTPKQYSSGGKVSIKGIDKAGGNKELRAALYQGALAVVSALPDKPKTTKQLWLFELVQRAGVKRACIALANKTVRTAWALMNTGETYKPKALAC

SEQ ID NO: 206094 - protein, 347 aa, unidentified
MKFYIKQHQHYCGIDLHAKTMYICILDSKGRVKFHKNLKTSPDALMEAIKPYLDNLVVAVECMFAWYWVADFCEDNNIEFILGHALYMKAIHGGKAKNDKVDSHKIASLARGGTFPMAFVYPRDMRSTRDLLRRRMHLMRKRSELLGHIHNTNTQYNYDPIGKNLRYKSNRKLVDERFNDPSVQKNVDLDMQLINFYDEQLTGVEYYIKKHAKINDYQSHMLLNSVPGIGKIISLVILYEIYDIKRFPSVQDFASYARLVKCKAESAGKSYGTSGAKIGNAHLKWAFSEAAVIFLRGNPKAKAYVNKMTKKHNKGKALSILAHKLGRAVYFMLKRKQPFNMNKFLPV

SEQ ID NO: 206095 - protein, 349 aa, unidentified
MDHIGIDVHKRESQIYILAEGGEVIERRIRTEPERFAAVLGPRPRARMLIEASTDSEWVARCLEALGHEVIVVDPNFAPMYATRTRKVKTDRRDARALAEACLLGAYRPAHRLSDPQRHVRGRLVVRDALVRTRTRYISVIRALLRQHGYRVPSGSAESFVRRVQGLPLPGRLLSVVAPLLALMRPLNRQLTYSDATIEHLAVQDPRVPRLRSVPSVGPVTAAAFIAAIDDAHRFRHAHQLEAYLGLVPREYSSGETQHRGAITKAGHSRTRWLLIQAAVSILRRRPPQAEELRTWALRIAARRGKQVAVVALARRLAGILYALLRDGSVFELQRVRPPRPTVAALVAM

SEQ ID NO: 206096 - protein, 351 aa, unidentified
MRISQKITGIVTTIGIDIGKNTFHLVGFDQRGAIILQQKVSRSQLERRVANIPRCLIGMEACSGSHHIGRQLAEIGHDVRLIPAQYVKPFLKGHKNDYRDAEAIAEAVQRPTMHFVTIKTPEQMDLLALHRVRSRLVGRRTGVINQIRGFLIERGITVRQGPMPLRKALSEILSSDTGALSPRMVGLIADLAQDWRRLDERIAAVSAEIEALAEQDDSCQRLMTVPGVGPIISSAVVAAIGNGTGFKQGRDFGAWLGLVPKQESTGDRTILGKISKRGNKYLRTLFVQAAHVVLERRPSAAMRGLWPWVEQASKRLHRNMLAIALANKLARIAWAVLARGGTYQPRITHAA

SEQ ID NO: 206097 - protein, 365 aa, unidentified
MASVTSAAGPIHLGMDTSKNTIVVAVLMPGEEIPVLDRIWNEEDSVRHLVGRLGEAGALRACYEAGPCGFELHRVLSSMGVACDVVAPSLIPRRAGDRVKTDRRDASRLARLHRAGELTAIRVPAEAEEAVRDLARARAALMADRRRAQQRITAMLLRHGRAWRGTSWTEAHERWITGQRFGEPALASALAHYRAALDTRRAELAAVEAELAAWAGKPPLGEAVARLGCYRGIAELNGLTLAAEVVDWRRFPSARAFMCFTGLVPAEYSSGERTRRGSITKAGSAPVRTALIEAAWSYRFRPAIGVTLRRRQHGAAPGTLARSWQAQRRLHARYKTMTARGKPAGVAVTAMARELAGFVWAEMTS

SEQ ID NO: 206098 - protein, 344 aa, unidentified
MKLFIGLDVSLAKTAVCVVNEHGKIIKETEIASEPETLSLFAGTLPGMIAIIGLEAGPLSQWLHRGMTEAGLDVVLMETRQVKGALKAMPIKTDRRDAEGIARLLHIGWFRPVHCKSVSAQEVRALLGARKAIQQGMITLEMSLRGLLRNFGLKVGAISRGRYDVRVRELVAGNAMLEVATTPMLKSRAALRQELANLEREVRGLAKDDPVCRVLMTMPGIGAVVALTFKSAVDDPSRFKSSKRVEPWVGLTPSRHQSGERDVIGGITKAGDVNLRRALCQAATVMLHRGRPSWLRTWAARVAKRRGNKRAMVALVRRIGVVLHRMWRDGTEFNHAAPPTVGGV

SEQ ID NO: 206099 - protein, 501 aa, unidentified
MASEGKVVSSLAEAITFRPEGEYKMELVEFKVDVDWRTHPFFCGLDVHKHELAVTICTAEYRDAKVVSRSIFSVNSEGLEQFWNYVKKYQPAGFAMEATGIFHHWIHKFLMQKLTTVDWHAEMIITNPSDAHSLPGRPKDDKIDSESLAKYLAKGMLRCGKPIIEVQEDLKAIFRMILRIEKDRTALKNRIIKTLDRAGIRPKRMSLNMNWVCRFLYYFTHFQGTLGAFLDEIFTDGHPLEPQHTVIKKNIGRFQPFSPIALTHIQRTLIRQDLIELDFKTGRKDTLTIEIGHIIEQYPHLRHHASNLASIPGLSKVKAVWILAEIGSLKQYPTSRKFAAYCGCCPRIVSSAGKVYSAHTMRHSNKYLRTIFYNAAIVICNLLKQDSELKRYATRTIQRKGRTAFKLAVCTVATKLTKITYAILRDGKPFDPEHSQKLLHPLKKDNEQVFTLVEKKIIRHARNVLKRVSQMENTQDLGILGEDLSIVAEHLDSLLEGKKII

SEQ ID NO: 206100 - protein, 346 aa, unidentified
MQFYTRQHKFYCGIDLHARKMYVCILDAEGNIRVHQNIKTDPEAFLRIITAFREDIVVTVECIFTWYWLADLCHKEGIPFVLGHALYMKAIHGGKTKNDKIDSHKIAVLLRGGMIPMAYVYPEKMRATRDLLRRRNHLMRKRAELFAHIQNTNTQYNLSESFGCIAKPQNRNGIVEQFEHPAVQKSMAVDLEVVRTYDTILTDLERTIIKLANHHDPVSYALVQSIHGVGRILGLVMLYEIEDIGRFPRVQDFASYSRLVKCSHESNGKKYGTNGNKIGNAHLKWAFSEAAILFLKGNDPAKRYFDRLIHKHGKAKALSILAHKLGRAVYFMLKNKEAFDQEKFLR

SEQ ID NO: 206101 - protein, 316 aa, unidentified
MFIGIDVAKAELVVAVRPTGAVWAVPNTGAGHRALVAQLTPPALPAAAQLVVLEATGGYEAAVVAALSEAGLPVVVANPRQVRDFARATGQRAKTDALDAALLALFAERVQPAVRPVSAAAAQDLHAVLLRRRQLGDMLVAEQNRLALARPAVHASLVAHIAYLRDERTRADAELLTRVQQAPDWQARDALQQSVPGIGPVVSFTLLAELPELGTCSAKQVAALVGVAPLARDSGAQRGTRAIAGGRAHVRTALYMGTLVATRHNPVIKAFYTRLVAAGKPKKVALVACMRKLLTLLTAILRSNTPWCPRLALSPL

SEQ ID NO: 206102 - protein, 423 aa, unidentified
MMHKERRWFVGIDWGSQEHVVSLCDDVGKRIGQRKFAHGGTGLTDMIAWLLKESGGKPGEIHVAIETPHGPIVEVLLERSCNVYSINPKQLDRFRDRFTVAGAKDDSRDADVLADSLRTDMRAFRKLSSVDPTIVELREWSRIDEELKAEHVRLTNRLKHQLWRYYPQIYELANDVGAGWFLDLLEALPTPEKAAKTREKTVARILKQYRIRRFDAAHVLSELRKPALTVAPGTIEAATAGICILIARLRLINSQLVDAEQQLDRLCKKIVGPVAGEEEENTPGQKNELRDAAILDSTPGIGRTVLASLLTEASDALQRRDYHALRALCGTAPVTKRSGKSCLVSRRRACNRRLRNAVHYWAHNAVQHDATSRAKYEALRAKGHGHARALRSVADRLLNVVCAMLRSGTSFDSSLASKKQAGA

SEQ ID NO: 206103 - protein, 321 aa, unidentified
MAMLSFCGIDVSKDRLDVMVLPGRQSFAVRNDAAGWAELIARLRGLTIAAIGLEASGGYERGAIRTLLAAGLPACQVNPFKLRQFARASGVLAKNDPLDTRMIASFVAIMPTRPAQPRPPAIERLIEMLAVRRQLNAEKVAAENASRLLEYAMLQRLSRRRIARLAADIDRLDRRLVEITASDAALAHRYRLLASMPGVGLVLACTLIALLPELGTMSRKQVAALVGVAPYAFESGKFKGRRCIWGGRAPVREVLYMAAMSASNWNPVFKAFHKRLKAAGKLPKVAIVAVMRKIITTLNAMVRDDVVCADHLHGRHIVPTA

SEQ ID NO: 206104 - protein, 372 aa, unidentified
MNYNTVYVGMDVHKESFTLCAYTIDAEKGSHFQRTEADYKNVLKYLEFLRTVYGNDANFICGYEAGCLGYTLYHQLTEHDVNCVILAPTTMLEQRSKRRIKTDRRDAEIIGKCLAQHNYSPVHIPTATDEETKEFLRMRDDHKLALKKVKQQILAFCLRHNYRYDGNSHWTAAHIKWLKSLNPEALYKEILDEYLLTYTTLSDKVERLDKRIEELASKDEYRESVKKLCCFIGIKTHTALSVLVEVGDFQRFASAQNFASYLGLVPGEDSSGDGQTRLGITKAGNRHVRMLLTEASQCYARGQIGFKSKELKSRQAGISPQVIAYADKANERLRRRYYKMVLGKSKKHNVAKTAIARELACFMWGMMTEHIA

SEQ ID NO: 206105 - protein, 345 aa, unidentified
MELHTIGIDLGKTVFHLVGLNRRGEVVVRKKFSRKQLLHFTANLQVELIGMEACGGAHFLGRALQEQGHSVRLMPAQYVKPYVKTNKSDYIDAEAIAEAVTRPRMRFVPIKSDDQLDLQSLHRVRERWVMRRTAVVNQIRGLLLERGITIRKGRCHVDAALPGILEDASAKLSGALRVLLAQLRLELDHLQTRIDEADAVIQQTAGENEACRRLVAIPGVGPVTATAIIAAIGNGAAFRKGREFSAWLGMVPGEYTTGGKQKLLGISKRGNTYLRRLFVQGARAVLQQSAKQSSGLSAWLTQLTARTHPNVAAVALANKLARMAWAVLAKNEPYRPPVLAEAATD

SEQ ID NO: 206106 - protein, 266 aa, unidentified
MTESRYAGMDVAKDRVEVAISKDTSVKSFTNDGPGHEELAKLLLANEIALIVMEATGGYEFDLACALQAAGLAVAVINPRQARDFAKAMGYLAKTDRIDACVLSELARTIAAHPHADRFVKPLADAEQQTLKALVTRRTQLMGRLNAERQRLAISHPASRASIEKLVKTIREQLKGIEAQLAKHIAQNHADLSGLLKSVSGVGPALSAILIAELPELGRLRNRQIAALVGVAPFNRDSGAMRGKRSIYGGRAHVRRTLYMGALVAL

SEQ ID NO: 206107 - protein, 364 aa, unidentified
MASVQFVGLDVHKDTVDATVMSGKSGTPDFEKRYTNSPKVVQRLFKSLQQRGPVAAAYEAGCMGFELQRMLKGMGVECLVIAPGKMPRFTSDRIKTDRRDARTIAKLLKNGEVTPINVPTPEDEATRDFLRAREDLKQDSGRAKQRLMKFLLRHGYTYRGGSYWTMKFARWLSELQFALPLLKETFDSYRQKVQELKDQMRVLDERVVAIAVQKQYAQRVARLRCFRGIDHLIALALVVEVGDFRRFATAASFMAYLGLVPREMSSGGSRRQGGITKSGNGHLRKLLIEASWHYRRKPSVSKRLRERREGQPVELIGYADRAMNRLHQKYIKIVVRGKTKQTAVTAVARELAGFVWGTMTGKIS

SEQ ID NO: 206108 - protein, 406 aa, unidentified
MSRPQVIDDEQHERVRERVAAVDVAKDSGMVCTRTRHPSRPGARRSTVWTVKARMGAVRALGRQLHKDGIEIVTPESTSDYWRIWFFILEACGLAVQLVNAAQAKNLPGRPKTDKLDAQWLARLTEMGLLRASFVPPKAIRDLRDYTRARTRLIRERTRCWQRLEKLLEGALVKVSSVASKLTTVSAQDMIKAMIAGERDPEVLAGLARTRMRAKRDDLVQALDGMFDDHHGELAGMLLDQIAFLDGRIAQLSARAAELTAAMPEAWGINADGTTGPDAGAAPGAPVLPAVARLAEIPGISDDLARAIIAETGLDMSRFPTAAHLVSRAGLCPSARQSGPRIRAGKKGQGNGYLRGSLGQAATGAARTATFLGERYHRIARRRGKAKAQVAVARSILVIISLAPAQ

SEQ ID NO: 206109 - protein, 298 aa, unidentified
MQIKHFIGIDVSKDTLDLSVVVDGKSLQYFCIKNRTVEIKSTINKIMKGLGATVDDTIFCMEHTGMYNLPLVKWLQSHQGKMWLESGVHIRKTLGVVRGKNDKVDSSRIAMYAYTNRHQIKFWNPPRKLIERIAALLSQRARMNKAKKQLNTANKEQKRFLDKDIMRTLNKYTQKTILVINKQIEALEKEILGLINDDEKLSRIYKIITSVHGIGFVTASYILVTTNEFININNPKKYACYSGVVPFEYSSGSSVRGKNRVSHMANKNMKSLLHLSALSAIQMQGDLQEYYKRKVSEG

SEQ ID NO: 206110 - protein, 341 aa, unidentified
MPIVTIGIDLAKNVFAVHGVDETGKAILIKPRVPRDQLATLIAQLPACLIGMEACSGAHHWARMFQEHGHTVKLMAPSLVAPYRMSGKRGKNDAADAAAICEAVTRPNMRFVPLKDEHQQATLCLHRTRQGFVEERTATYNRLRGLLSEFGVVLPQSPEKLRRYITEHLDTLPGWAKRSISDLLEHAGHIEDRLLEYDRAIAEIARADARSKRLMQLLGIGPTTASALLASIGAGHDFKNGRQVAAWIGLTPGQYSSGGKARLGSITKAGDAYLRGLLVNGARAVIASLGEKQDRFSRWVRTLVERRGYWRAAIAIAAKNARLAWASLKYGEDFKLEPVAD

SEQ ID NO: 206111 - protein, 416 aa, unidentified
MNSPAKSTSQRFLALDLHKHYLVVGGVNFRQQVVLNPRRISLEKWPAWAKANLLPCDAVVLEATTNAWDIYDQIVSLVARVVVAHPPKVKWIAEARVKTDRLDVLRLAHLLAADLIPEVWVPPVEVRELRALMAHRQRLVQMGTRARNRLHSLLHRHNLKPPAGKIFAQKHREWWQKLDLSPTQLMRIRHDLATLDHVQGQLAEIEQELSRLSTAEPWADQVPFLLQLPGFGLIVSLTVLAAIGDISRFSHPKKLVGYAGLGASIHDSGEKHRTGRITKRGRKELRWVLVEAAWRAADTHPYWKAQYERLERRIGSTKAAVALARKLLVAVWYVLTQRTSDRHADPDKVAFKYIMWSWKLDDVKRNGLNTRQRTRYHLMRLQLGEDLTHILRGGHRYPIAPGEELRALLPELQAAD

SEQ ID NO: 206112 - protein, 316 aa, unidentified
MNHSQDNEVNVGIDTGKTQLDIYIRPLGEYFAVSNDAKGVREAIKRIKAHQPTRIVIEATGRLEHTFVFAAAKHNLPVVVANPLHVRRFAGAIGQLAKTDKIDAQLIAHFGESIKPTQTAVAPENDRKISDLLVRRRQLMEMQTMEKNRLSIMPKELRTSINTMLKTIKAQIDKIDAALDGMIAQADDWKEKNEILQSVPGVGKVMAYTLLSDLPELGTLNNKEIAALVGVAPINRESGRYQGLRRIRGGRHQIRTVMFMAMMSTIQCNKKFKDHYERLRAAGKRPKVALVACMRKMIVILNSMVRNGTAWEGNMA

SEQ ID NO: 206113 - protein, 377 aa, unidentified
MERLKFVGLDVHAETIAVAVAEEGGEVRALGIIPNREESIRKLVRKLGPVEQLRFCYEAGPTGYALYWQLTRMGAKCEVVAPTLVPVKAGDRVKTDRRDALKLARNYRAGELTPVWVPDAAHEASRDLVRAREAAKKDELRARHRLNKFLLRHGRRPPMGVKAWTMKYLEWIKREVHFEQLAQEATLLDYLHEVEHADARIMRLDGAIEEAVKCVPPKMRAVIEALQALRGIARVASVTIVAELGELSRFARAKQLMGYGGIVTSEHSSGECTRRGGITKTGNAHLRRVVVEAAWTYRHRPAMGTSLRKRQEKVSEEVKEIAWKAQQRLHQRYRKLLAKGKNKGIVVTAVGRELLGFIWAIGIKVEAAQKESLQQAA

SEQ ID NO: 206114 - protein, 423 aa, unidentified
MKVVYPICCGVDVHKTFFVATIITSEGFTPHYQKKRFSTFNNSILEFKRWLLDNNCLDVCMESTGKYWVPVFNLLEDSINVTIANPKWVRAIKGNKDDTKDSKWIGDLFRLGLVPGSFIPDKPIRILREYTRYRFKLVSCKSSEKNRFQNAFTVCNVALDAVVSDMFGASASSITGYLVDSDSFDPQHCVSLLQKSLKKKAAAVVASIEGYQMMPEQKHRVRMIRNHLEFIDKSINKLDDMLNVLASPYESAIHLLGTIPGVDRTSAITVISEIGTDMSRFSSSKRLCCWAGLTPGNNESAGKKKSVRITRAGVYLKPALVQAAHAAVNSKDNSYYRIKYERIAKRRGKKRAIIAIARMILTAAYHMFSTGEVFNPCDLYKVDIPPELRDKQKEKALKKAAKLLIAQGLIQETDVPSLFLKPA

SEQ ID NO: 206115 - protein, 418 aa, unidentified
MLVAGIDVGAEVHHVAVVDESEAVVTQPTAFAENALGYDKLFALLGRAGARGGADLPLATASAAPPSTLVVMEATGHYWQNLLAALTAKGFAVALVNPLRTHRFAGEELARTKTDRLDCWQIARFGAQKRPAPSYLPEAAVEELRELMRLRERLVEELVARLNQLHRLVDLGFPEFTRYLKDLNTELATALLHQYPTAQAFRGISRKRLARLSYDGRHQVGTELAQQLIAAAAVSVGSQHSSSHQLGVRYACEDLETLRKRLKRLDGAVAGTLQQHQVGQLLTTIGGIGDTTAAMIIAELGDPARFQSAGALAAYVGVCPAHKHSGKHQPKRSSLTPIGNRRLRHALWMPTLSAATHSNPWLMLFYRRLIERGKPHKVALCAAMRKLLAAIYSVAKHRRPFTMDLNLQSRLRVSYENA

SEQ ID NO: 206116 - protein, 394 aa, unidentified
MRFVGIDVAAETHLVAVVGESADVVIKPTPFTEDAEGYQKLFTLLGDAADTLVAMEATGHYWKNLFAVLASRGFMIALLNPLRTSRFAGEDLERTKTDSIDALAIARFAAQKRPVPTRLPESATEELRELVRHRDRLVQDFGDRIRQLHRLIDLGFPEFTRIVKSLDSELATSILHDYPTARSFQGVSLRRLAQLRYDGRHKVGEEIAAALIEAARVSVGQHHGEAYRIQVRHACEDLAVLRRRLRQLEGDIERKLGEHEVGTLLTSIDGIGPQTAARLIAELGDPAQFRDAAALASYVGVVPALRQSGKCRSTRAGLTSIGNARLRAALWMPTLTAVRKNPWLRAYYRRLVARGKARKLALVAAMRKLLVAVYSVAKNRRAFIPHLAPAEASP

SEQ ID NO: 206117 - protein, 360 aa, unidentified
MYSIKIICKDMKKICIGIDVSKETLDVTVIHIESYELVEKLGYSKFDNRPSGFRSMTAWVRKVIKSRGQMDEALFCMETTGSYDLPLCHWLHKNGLNVWRESALQIHCSKGFQRGKSDKEDSEVIAQYAARHQSRYTAFVPDAEAIADLKELICYRDSLVERRKECKVRLANKKETLVNRNSKAWKCIERLSKAEIKRLDKVIGECDEEIRNLMKEDEEMEKNYQHLTSIVGIGLINGAALIAYTGNFKKITTPNKMSCYCGCFTFYEDSGTSVHRKSPYRNACCKMLKGYLRMAAKSAMLANTELRKYSERLREKGKPYAVILNNVANKLLHIMFSLVKHDYDYEYNHEMVRRMEREIA

SEQ ID NO: 206118 - protein, 343 aa, unidentified
MDSPYHFIGLDIHKRAVAFCEKRADGKTVASGSFSTSRQGIGAWVAQRAHAWIGGMEATLFSGYLYDMLAPHAVEIQVGHPLRIKAITSGKHKSDSLDAEVLANLLRADLFPQCHMASPLVRELRRVLRHRTFLVRQAVCMKNKTTGILMETGVQYDARRIHRESYFSELLGSLEGVPNSVRELLRTTRAGLEMFQSAQKQLLNALIKHPELSGRCERLMSIKGVGQITALTWALEIDNPARFANLKQVQSYCGLCSGRNESAGRSKTGPLSKQRNPHLQTVLIEAAKLAPRWNPQLKRVHAASLEKNPNRNRATCSVARKLAAYLMAVDKSGKPFEEPVPKG

SEQ ID NO: 206119 - protein, 346 aa, unidentified
MKLMAGMDLHSNNVMVGIVDMEGKRIVHQKLECDLSKVAQFLKPYKKRLEKVAVESTYNWYWLVDGLSEQGYPMVLANPAKIEQYGGLKHGDDKSDAYHLADLLRLGILPEAYIYDKDLRPVRDLLRRRMGLVQQRTSMMLSFKSLYTRTTGRGMTLSELKGMEVKKAQELYDHPANQLIAQVQKQHIDQLTESIKKLEKAILLSAKELPYYEKLKTLPGVGIILGQTITLEVGDINRFAQAGHFASYCRTVDARHMSNGKKKAENNQKCGNKYLAWAFVEAANFARRTDEKCRRWFDRKAAKTSNVIAVKALACKLAKAAWHVMAKEVNYDEARVFPELAVKKTS

SEQ ID NO: 206120 - protein, 422 aa, unidentified
MLARAQDDEEIIERAAALDIGKAELACCVRIPDEDRRGKRLQEVATCSTMTRFVPAMADHLACLGVTRVVMEATSDYGKPVLYLLEAAGFETWLVNAEDVKHLPGRPKTGKLDAVWWCKVAERQMLRPSVVPPPPIRRLRDLTRYRADLVAARTAEKQRAKKLPEDACIKPSAVVTGIFGLSGRDMLAALVAGERNPTVLAQLARRRRRKKITVLEEALTGHFTDHHAFLPGTMLARVDAITAAIAALDVQIAAHAAPPAHLVARLDEIPRISLASAQVILAEIGTDMARFPTAGHLTTWARLAPGIKESAGKKKGNGPTGHRNAHLAAVLGNAAAAAAKTGTFPGERYRRIARRRGSKRAIAATGRAILVIVWHPLPDPDARFHHLGPGYYDARTGPERRKHNHIRHLEAPGYKVTLDPAA

SEQ ID NO: 206121 - protein, 354 aa, unidentified
MQQSRTLYVGLDVHKESIAVAYIAQEYHAEVVSLGTIGTRQCDIDQLIRQLQSKTSHLVFVYEAGPCGYGLYRYLTTKGHRCWVVAPSFIPKKAGDRVKTDRRDAMQLARLMRSGDLTPVYVPAVDDEAIRDLSRAREDTLRDLKAAKLRLKAFLLRHDIRSTGRANWSPAHLRWLSEVVCPTPAQQIVCQEYVQTVTEQTERLGRLELELHEQVKTWRFAPVVEALQALRGVQCTVAVTTVAELGDLTRFENPRQLMNYRGLTPSEYSSGARRQQGSITKTGNTHARRALVEGAWAYRYPAKVSRHLQLRLEKLPAAIQAISWKAQVRLCTRYRQLMAKGKNANQVVVAIARE

SEQ ID NO: 206122 - protein, 343 aa, unidentified
MNAVATIGLDIAKQVFQVHGADAQGATLFNRKLRRSEVRPFFEKLPPCVVAMEACGSAYHWGREISALGHEVQILPAQYVKPFVTRGKTDAGDAIAISQAMRRPDIRSVRLKTATEQAAAMVLRTRVLFVRQRANAMNALRGHMTELGLIADRGIPNIGKLAAALPEEGDARVPPSARTVLEEILAEIEALTSRIERIDRQVASVAKEDEDIRRLTAIPGVGPVTASTIKAYVPDAAYFKTARHFSSWLGLTPKLNASGERLRSGRISKMGNVELRSLLYMGAMSVLIAARRRGTPSPWLRRLLDGRPLKVVAVALANKTARVIWALLTKGGSYEAPSERAGA

SEQ ID NO: 206123 - protein, 423 aa, unidentified
MVLVGHLFTNPIFQRSLMNAVGIDVSKGKSTVAILRPGGEVVASPFEVSHNPRKLNELVSLIKSLNGDSKILMEYTGNYYLPVALFLQKSGLFVSVVNPILVKDYNNKSLSVRKGKTDKKDSLKLAAFALDRWHDLLLFSPQSDSRTLLKAFNRQYNQYNKLKVMLKNNLISVLDQTFPGANTLFSTPARKADGHEKWIDFVLKFPHYECVSKKSFSAFSKSYLSWCRKFGYLFSEAKAKEIYAFACNCTPSLADSEATHTLVSAAILQLNTLNETLASLQKEMDLLACSLPEYDTVLSLYGVGSVLGAQLIAEIGDVSRFSNKKALVGFAGIDAPPFQSGNFNPQSRNISKRGSAALRKTLFQVMAVILQNAHANEPVFLFMDKKRSEGKPFYVYMMAGANKFLRIYYARVMVRLNSLRETT

SEQ ID NO: 206124 - protein, 345 aa, unidentified
MMVIGIDAHKRTHTAVIVDENGRQLCAKTVGTTTQDHLRLVKWASGVGVKRQWAIEDCRHMTRRLERDLIAAGESVVRVPPKLMAHTRDSARTYGKSDPIDALAVARAALREPDLPVARLDGIERELRLLVDHREELVDERTSIISRLRWHLHELDPGWTAPAKMERTRAFDAVATHLQDCGDQTVVRRLALRLIEHLRMLTTEIDELETEISERVSTVAPSLLAIVGCGALTAAKIVGETAQVHRFRSKDAFARLNGTAPLPVWSSNKHRHRLSRSGNRQLNAALHRIAMTQARMHPPARELLARRKLKGDGGMEALRVLKRRLSDVVYRAMLNDQSQPALTAA

SEQ ID NO: 206125 - protein, 342 aa, unidentified
MSAYVGLDVSLKETAVSVRRGGKRIWRGKCASDPKVLADLIRARAPDAERVVFETGQLSTWFYHALKADGVPAICIDARHAKAALDMAANKTDANDADGLAHIAEVGFYREVRVKGFESMLMRTLVAARDQILKVIVQMSNQIRGLMKTFGLVVAKSAGGAFEGHVRRLLADNTQLERIVLPMLDAWRGLRMQAAKLDGQLRAASRLDQRCALLMSIPGIGPVTASSFVAAVEEPGNFKSSRAVGAWLGLTTRRYQSGEVDYGGHISRRGDPRLRGLLYEAAVVILTRSTGESTLKQWGVGLRERLGFKRAAVAVACKLAVIMHRMLHTGELFDRTAGAAVS

SEQ ID NO: 206126 - protein, 364 aa, unidentified
MTKIGIDLGKKASDVCVMGSATEVSERFRVATTREALTTAFANRPAAQIAVEACRGALWVREVLMGLGHEVVLVDTSRARAIGIGQGKRKNDRRDAEALARALWAGVVPRAHVLSHEAQRLRDVLHARHQLVGMRTELVTQLRGQMQARGVLVPGCRAEEFARRLRESGGELVGAVQVQSALRVIEALTSELTVLTAELQALAARHEPFERLCTVPGVKLIVALSFMAALDRAARFRTAHQVEAYLGLVPSERSTGGQQRLGRITKAGDSLTRSMLVQASHTLLRVRGHDTDPLVVWGRQLAARRGKRVAVTAVARRLAGVLWAMWMDGTDYDPKGLARASAGGLSRRARETQREAATMQQIAA

SEQ ID NO: 206127 - protein, 331 aa, unidentified
MEIKETIGIDVSKASLDAHIHSTGDKGKFDNNQKGFRSLTQWVFLKSLFPQEQTLFVFEHTGLYSHNLSTYLAAQNLSCRMVSGLEMKRSLGIARGKNDQVDAKRIAIYAYRLREEIRPSNVSDLKIRQLRALFSLRAKLARQRAGYRTTLKEQKSVLGSKDYKVLFEVQRSMVDTLSGKIAKLEEKMMEVVKNDRELEELFRLVTSVKGVGPITALLVIAHTNRFTKFRTWRNFASYCGVAPFPYQSGSSIRGRSKVSHFANKELKGILNMCAIAAIQYNPEMKRYYERRTEEGKNKMSTLNIIRNKLISRMFAAVNRGTPYVNVYAHAS

SEQ ID NO: 206128 - protein, 347 aa, unidentified
MRGAIHMQITTIGLDIAKNVFQVHGIGAAQKVIVRKQLRRGQVMAFFEALAPCLIGMEACATSHHWARELTKLGHMVRLMPAKDVRAYVKRNKNDAADAEAICEAVRRPNMRFVRIKSAEQQGQLMLHRARDLLMRQRTQVINALRAHLAEFGITAAQGREGIKELLAVVVQDEGSRLPVDAHASLTVLAAQLQAVQTMIGSIEKRIVAQHRSNEASKRLETIPGIGVVGATTITAIVTDPKAFRSGRDFAAWIGIVPRQDSTGGKQKLGPISKQGDQYLRRILIVGAHSVLRRARQQPEKYPWLTQLLARRPFKVVAVALANKMARIAWALLARGGTYRAPQLVAV

SEQ ID NO: 206129 - protein, 350 aa, unidentified
MNICHYIGFDVHKKSISYCVKTADGTIVEEGKLRATHQVLRQWAGKRQEAWHGAMEATLFSGWIYDDLQPFAAKLEMGNPSMMKAIGAAKKKSDRLDARKIADLVRCNLLPGCYVAPVKMRELRRLLRYRNTVVKHAVAVKNRMSGLLMEVGAEYQKGQLHGKKYFEELLGRLEEVPETVKEMLRLSRGALEMFEETQQTIVHRLQKEPALAKRLELLRSIGGVGEITSLTWALEVCDPKRFPSIGDAVSYCGLTSALVSSAEKQQRGPISKQRNEHLQSVLIEAAKLAPRWNRQLAAVQQRERERGGNRNQATLAVARKLVAYLLAVDRSGKRFEERNPAPQEEGKTVA

SEQ ID NO: 206130 - protein, 371 aa, unidentified
MKEYSTFVGMDVHKNSIEIALADRGRSSEVRSYGKIDGSLDALDKVVRKLVSKGGPLHFVYEAGPCGYEIYRHLTAKGYDCAVVAPSRVPKRSGDRIKNDRRDACMLARLDRAGELTPVYVPLAEDEAIRDLTRAREDTKIDEKKSRQRLLSFLLRSGLRYTGKSTWSNAHMRWLSDIKMAHPSQQIVLQEYINAIGECSLRVHRLTEQIRQLLPQWRMFPVVEAIQALRGVSLIVAATTVAEVGDLKRFKNPTELMSYLGLVPSEHSTGEKTRRGSITKSGNGHVRRVLVEAAWAYRLPARVSRVLLNRQQGLPKRICEISWKAQVRLCARYRKLWAKGKPKQVIVTAIARELCAFMWAIANESQVSAAK

SEQ ID NO: 206131 - protein, 351 aa, unidentified
MNRIYIGVDFHARQQTICYLTTEGGELLFHELKHQNKAEVRAFYAQFSGQVIVGLEASGYSPWFERLLNELSCEVWIGDATEIRRRARWRHKNDRRDAELILDLMLHDEFPRLYLPPIQSREVLRMLRYRQKLIKIRTMGKNSLQALALQSGLAKGSHLFSKAGLQELRTAEMSPAMQWQRDQWLQLLDPLNQRLLETMQWLKLQSVDDSRIALVRTHPGIGLLTALCIVHSLAPVTRFRNTRKVAAYAGFDPLERSSAERQRFLGISKAGSRVLRYLLVEAAHTAVKRDDELNRFYKRLVERRGRPKAKTAVARKLLIRAFIMLRDEIDYAEFQRRAVAARCARQSTSLP

SEQ ID NO: 206132 - protein, 407 aa, unidentified
MSLVCGIDWSEQHHDIAVVDAAGAVVAKARVSNDANGFTRLLQLLASVGDNAEAPIPVAIETDRGLWVACLRSTGRKIYPINPLAASRYRARHTVTRAKSDHADAVMLANIIRTDQAAHRELPGDSDLAQAVRVLARAQQDAVWARVQIGNQLRSLLRDYYPAALLAFQALPDGGLARPEARAILTAAPTPAQAAKLTLAQLERLLKRAGRVRFLDRDAKRYQAIFRNSHLRQPQLVEDAMGIQMKALLRQFDAACQAADELATAVAAHFEQHPDAEIISSFPGLGVLAGARVLAEIGDDRTRFTDARGMKAYAGSAPITRASGKKTVITYRQIKNNRLAAVCPIWTLTAIRSSQGARRHYDRRRAAGDWHRAAQRNLFNKLIGQLYHCLQTRQTFNESIAFPPVPA

SEQ ID NO: 206133 - protein, 359 aa, unidentified
MQTQSNKIDFNGQNIYAGLDVHLKDWKVTIMTEKLTHKTFSQPPKPEALYHYLKKTFPGGTYHTAYEAGFSGYWIHNKLLNFGINSIVVNPADIPTTGKEIVMKDDIRDSIKIARSLRNGELNPIYVPSIPTLEDRTLIRTRTTLVKDLTRYKNRIKSFLYFHGIEYPEAFRRPQTHWSNRFNKWLEEVEMTESSGKASLNILLAQSSYLRASVLQTTKQIRELAKTDRYKTQHELLRSIPGIGLLTAMIILTEIETIDRFDTFDQFCGFIGLVPSTHSSGDHQVIGDITPRGHSVLRVAIIEAAWMAARLDPALNKCYHDYCKRMEPNKAIIRIARKLVSRIRFVLKNNQPYVCSVVK

SEQ ID NO: 206134 - protein, 412 aa, unidentified
MDVYCGIDWAEDHHDIAVVDRDGRLLARRRISDDAAGLAQLLGLLAEHGDTPEDPIPVAIETPRGLLVACLRATGRPVYPINPMSVARYRDRHSVAGRKSDHGDSFVLASVLRTDMHAHRPLPADTELAQAIAVLARAQQDAVWDRTTAHNRLRSHLREYFPAFLAAFADARGGITRPEARAVLAAAPTPADAAKLTVTQLRGILKKAGRSRGLDTEAARLHEAFRAGQMRQLPLVEQAMGRQALALPGQLDAACAAADDLEHAVTQSFNLHPDAGIITSFPGLGALTGARVLAEIGDDRSRFQDAKGLKAYAGAAPITRASGKTRSVTRRKVKNNRLNAAGYNWAFSALTASPGARAHYDRRKDTGDRHAAAQRNLFGRLLGCLHHCLTTGQHYDEATAFPAATKKISQAA

SEQ ID NO: 206135 - protein, 413 aa, unidentified
MLFTRAPRSCGAIRIVGHDGRAEQQTGINLSMKGHAMKKVYIGIDSHKSSNSVAVANAGGKEGSLFYGKISGSSPNMERILRRIMKQHDVSKEDVLIGYEAGPCGFVLARRLLQLGFDVIVAAPSLMPQKPGVKVKTDRRDACKIAELLRDGQLTAVHIPDEKDEAIRDLCRARTDAVDDLRRTRQRLGAFLLRNGHVYTGRSNWTESHMRYLRELVMPDPSQKVALEEYIISINAAAERTQRLEQYMERLQQDWSRTPFVKALQSFRGFQMVSSMVVTSELGDLARFVHPRKLMGFLGMVPAESSSGSRRRQGSITKCGNSHARWMLVEVAHHYRNPPKVSKELSVRQEGLSREIRALSWRAQNRLHQKYIRLKCRHLHENKVVVAVARELVGFIWELSMLMKQQDSVALKA

SEQ ID NO: 206136 - protein, 295 aa, unidentified
MRPSGERWAVPNDAGGVVTLVERLQPLHPTLIVLEATGGLERVATAALATAGLPVVVVHPRQARDFARATGQLAKTDALDARALAHFADVIRPTPRPLPDAQTQALRALLGRRQQLIGMRTAEQNRLAGTSERLTQDIEAHIAWLNARIATLDDDLETTLRASPLWRENDDLLQSVPGIGPVCARTLLLELPELGTLTRQHIAALVGVAPLNCDSGTLRGRRTIWGGRAHVRTVLYMGTLVATRFNPQIKAFYQRLLAAGKRKKVALTACMHKLLTILNAMLKHRTSWQAQEVQN

SEQ ID NO: 206137 - protein, 314 aa, unidentified
MDARFVGIDVSKDKLDVHIRPGVETFVVSRDADGLDELIKRLKSVRAVAIGVEATGGFEQVVAATIAGADLPVVVVNPAQVRAFARALGQRSKTDPIDAGVIAHFIEATKPEVRPLRDEQTKALAELVTRRRQIIQMLVAERQRRQHLLSRAMKKSVTRLILALEKELNAVDKGIDEMLRGCENWKDKQDLLKSVPGVGDVTARTLLAEMPEIGTLDRRQIAALAGLAPYTQASGKWKGKSFIAGGRSSVRAVLYMAAMTAIRVNPLLKDFYQQLLARGKARLAALIAVARKLLTILNAIIRDKTPWTPVQAMS

SEQ ID NO: 206138 - protein, 345 aa, unidentified
MQNMYYIGLDVHKRTISYCVKDSSGAIHAEGTIPAARFDLDRWMKTLPQPWTAAMEATVFTGWIYDHLQPHAAALKVAHPLMLRAIAAAKKKNDRIDASKICDCLRCDFLPECYMASTAIRERRRTLRYRNLLVRQMVQMKNKISMLLMEAGVNYNKQRLHKAGYFRELLATNPDIDEGLGSLLRLCRETVVRLQKTENALVRSLERDSLLLDRVERLMTIPAVGPITALTWALEVGDVKRFPSIKKAISYCGLCGAEKSSGNTVQRTPLSKQRNKHLQTTLIEAAKMAPRNSPELAMLYDREKQKGNANRATLAVARKLVAYLMAVDRGHRNFQVVETNNCIAA

SEQ ID NO: 206139 - protein, 355 aa, unidentified
MQSNKISFKGQNIYVGIDVHLKTWHVTTLTESGYKYSFAQHADAKELFDRLNKKFPGAHFKSAYEAGFCGFSVHYALKELGFENIVVHAADIPTTGKEKAMKTDAVDSEKIAWSLKRDELRGIYIKDKSYMDDTNLMRLRQRFIMDLSRQKNRTKHLLYTQGVTYPERFRNSRTHWSRNFMKWLREEVELLSEEKMALTLLCDQVENTRKAILAVTREIRRLSTTEKYRENYSLLASVPGFGLITSMSMLTEFDNDLTRFPNERKFVAMLGLIPTCHDSGEKKVSGVKTNRGNKQLGPLIVEASWVAIYRDYQLGAYYSNCCQSMKPHKAIIKVARKLACRAYAVLKTKTSYVLS

SEQ ID NO: 206140 - protein, 429 aa, unidentified
MNCTQNKKIEQVKETTMIVGIDVGSEKHYFRAFNWRGIELTRKPIAFSNSMEGFNSFYNTIVELMQKSELEEALVGIEPTGHYWFDLGQFMGEKDIKFVMVNPHHVHKTKELDDNSPSKNDRKDPRVIAGLVRDGRYFYSYMPTGVYAELRNASNRRFVLVEEQTRAKNRLQKWIAVYFPEYKGIYTHIDAKGGMLVLKKAPTPEEIVRLGVEGIIKIWKDAKLRGNGHKKAMLILAAAMRSIGLKAGLTEARMEIQDLIEDYELQTKRLERVNDLIKGLCQQVRYADKLLEIKGIGITTVAGFIAEVGDITRFDSTKELQKLAGLELVADSSGKHNGKTKISKRGRKRLRYLLFEAAISVVGKNEEFKEIHRYYTTREKNPLKKMQSLIVVACKLIRVFHAILTKGIRYDASKMLKDIRHPGEQLKAA

SEQ ID NO: 206141 - protein, 334 aa, unidentified
MNNVSLIGIDLGKNSFHVHCQDATGKALSRKKFTRAKLFEFLANCPSATVVMEACAGAHYIARKISDMGHKPKLISPQFVRPFVKSNKNDFVDAEAICEAASRPSMRFVAPRTESQQEILALHRIRESLVRDKVKTTNQMHAFLLEFGISMPKGLAVIRRLSVVLTENELPPYLAKLLVKLQSHYLYLVEQIRDIENELKLAANQDDTTQRLMSIPSVGPITASVLMANLGNGQQYKQSRDFAAATGLVPRQYSTGGRPTLLGISKRGNKNLRRLLVQCARVYILHLEHQSGYLAEWVRHQLSKKHSCVVACALANKLARIAWAITTKQSVYMA

SEQ ID NO: 206142 - protein, 341 aa, unidentified
MLIIACDYHPSMQQIAWADTGTGEYGERRLTHCAEAEQFYRELKQQGTSVRVGIEATGQSRWFERLLAELNFELWIGDPAQIRVKQVRKQKNDRRDAENILKLMLKDDFPRIWVPSPENRDVRQLVWHRHRLVQMRTRVMNQLQAIAMNEGVRRRRGLWTKQGRAQLEALTLPSWTHRRRQELLELLDRFDPSIDELTQAIEQEAARWPEVERLQTHPGVGPITALAYVLVLGTPDRFHCGKQVGSYLGLIPCEDSSADHWRLGHISKQGNALLRYLLGQSALRATRLEDDWRRQYAHLAMRRHHAIAKVAMARKLAVRLFWMWRRGWDYEQLKKFGSHAE

SEQ ID NO: 206143 - protein, 511 aa, unidentified
MNGLVVCRKQDLSQQPTCADGAPLWVKMVALRAGLAEPLDGDRVEAGKSAVACDPDQQSGPRCAEVPFFVAPGTREHAWQCLERTCGATIARSDAEASMRVMIERVAGLDVHQETVVACVLIGKPGERPTKEVRTFRTMTRDLEALREWLLSLGVTHVGMESTGIYWKPVYAVLEGSFELIVGNARHIRNVPGRKTDVKDAEWIADLVRHGLIAKSFVPPPPLRELRDLLRYRRKLVESQAAERNRLLKLLETANIKLASVVSDVFGVSGRAMLKALIEGTASAQAMADLAKGQLRRKRADLVLALEGRVEEHHRFLLGLQLRRLEAAEEEIAALDARIDEKLEPYRAPHALLMQIPGVDRLVAAVLIAEIGIDMSVFLSVYHLASWAGVCPGNHESAGKQKSGRARNGNVHLRTMLVGAAISASRAKGSYLKDKFYRLKARRGSMRAALAIAHKILVAAYHMLAKGVGYREIGEAYLDQISQTRTVANLKRRLERLGFQVTLQSKAQSAA

SEQ ID NO: 206144 - protein, 332 aa, unidentified
MLYKNYVGIDVSKLSLDVFIREASLHRKFRNDSSGFTLLVQWLKGHVTSSWQSLLICFEHTGLYSLSLAQFLEQEGITYAMVPALEIKRSLGITRGKNDVVDAKRIAEFAYRFSDKILPTKLPSKDIQKLHFLLTMRDKMMVNIAGYTMAQKELFRVVSVSELPTIALSYQNTLITLKEEVRRIEREIRSTISSNNTLKTTFELITTVKGIGFIVASFLIVYTCNFTRFKDWRKFACYSGIAPFEHQSGTSVHGRTQVSAIANQQVKRLLHLAAMAAIHFDSELREYYMRRQAEGKSKMATINIVRNKLLARVFAIVKRGTPFVDIHRYAST

SEQ ID NO: 206145 - protein, 337 aa, unidentified
MYYVGHDGHKDISVFCITSASGNVKETFEVPATPKGMDVLIEKMKGKKFKVLAEASTYTIDLHDYLVSKGVESYLAHPHALKLITDSCRKTDRNDSKTLASYLRLWDKHELDISISFVVDGDNRSLRELCRLRESISEMKGSTMQQIKSHMRINGQYVEFEDLKTIKARKHIREHFCEDLCLMMLLDMYVVFEDKGKILDAEIERLFGDRKEVQLLATIPGIGITTAAQLMSMIVDVSRFPTADKMRSYFGMAPTVRDSGGSLKHGHITRRGDPMMRKILSRVVAQLIKNAPDDNLAVYRESHRSAMRPGMLMVACMNRLLDIIYAVLVRGTPYIHM

SEQ ID NO: 206146 - protein, 415 aa, unidentified
MSVTLEAAGRAIGLDVHRDFCELAICEDGRVRSAGRVESTPEALGVLAESLSSSDRVALEVTGSAWEVVRILEPHVARVVVVSPGDTGITQARAKTDRLDARALAKLLWTGELDGVWTPDEPTRALRRRLARREQLVRGRSRCKNEVHAVLMRRLKGRCPFTDMFGKRGREWLGSLELPVEESETVEAALRQIEFLDHEIAAVERLIAQHTLGSRDARRLLTVPGVNLVCAATFLAAIGDIRRFRGSRQLVAYLGLDPRVRQSGATAARTGHISKQGSPQARWALVEATASVVRQPGPLHAFHQRVKARRGYSVATVAAARKLACLFWCLLTRNEDYAHTQPSLTAKKLRKLELLAGAERYERSATGIYSTNKTMREAERALARQAEASYERMVRDWQATAPKKKVGASATPERA

SEQ ID NO: 206147 - protein, 366 aa, unidentified
MKKDSIRIRNGKGDWEGNKLTIGMDLGDRTSRYCVLGEEGEVLMEASVATTQKGLSEAFGVLPPGRMAIETGQHSPWVSRHLSGLGHEVIVAHARNVRLIGESTRKDDRLDAKTLARLARIDPALLSPVRHRSAEAQAHLTRIRARAVLVGARTALVNAIRGLTKAYGERLRKCHPEQIRKELAAELSSELRTALEPLFQEVQSLTERIQHYDHEIEKIAKQHYPEVAQLQQVNGVGTLIALTYVLTVDDPHRFGKSRDLGCYIGLRPGRRNSGNSQPQLHISKEGNRYLRTLMVQGAHYILGPFGKDSDLRRWGLKLAQRGGRNAKKRAVVAVARKLSVLLHKLWVSGEVYEPLRNHREEKRAAA

SEQ ID NO: 206148 - protein, 366 aa, unidentified
MEKGITYVGLDAHKEAINVAMLLPGQTRPVEWQTSNDQSAVRRMVRKVQRAAQGEVRFCYEAGPCGYALQRWIRAMEVVCVVVAPSLIPRKSGERVKTDRRDARKLAELFRAGLLTEVHPPTEEDEAVRDLCRAREDAHADLVRGRHRLSKLLLRRGWAWTGGKKMWGQGHRLWLRSLRFEHREDQWVLDDYLLAIENLEERLRGLDAQIEQVSQDPRYARVVGALRCFRGIDTLTAMCLVAELHDFMRFDSARGLMAYLGLVPSEHSSGGKEHRGEITKTGNRHVRRLLIEASWHYRHRPSTLSLTKRRQGQPPRVVAIADKAMQRLHRRFTRMLERGKPRPKVVVAIARELTGFVWAAMRQQAA

SEQ ID NO: 206149 - protein, 415 aa, unidentified
MSLSVLYSCCAGLDVHKKTVVACVLLTAPTGKVSKQVRTFPTTTAQLHSMRDWLSGLGVTHVAMESTGVYWRPIFNVLEGSVQVILVNAQHMKAVPGHKTDIKDSEWLADLLRHGLLKASFIPPKPIRDLRDLVRARKSIVRQRAQAINRIQKVLETANIKLSSVASDVLGKSGRDMLDGLLAGITDVETLAQMARGRLRAKLPALRGALEGDVEPTHRTLLRHLLDHIAFLEGERERLQVAIDPLLAPYEQQLARLIQIPGIQRDTATAILAEIGTDMSRFPSAKHLASWAGVAPGNKQSGGKRLKAHTNKGNQHLRATLAEVVWVISHTKDNYLSAQYHRLVRRIGEKRAIVAVSHSLLVIIYHLLRTNQDYHDLGPHFFETLDTTRQRDTAVRRLEALGYNVTLQERQEVRA

SEQ ID NO: 206150 - protein, 349 aa, unidentified
MQITTIGLDIAKNVFQVHGIDAAEKVAVKKQFRRVQVTKFFEALPPCLVGMEACATAHYWARELAKLGHEVRLMPAKDVKAYVRRNKNDAADAAAICEAVRRPTMRFVAVKSADQQGQLIQHRTRDLLVRQRTQVVNALRAHMAELGIVGAQGHEGLKKLLAIVADEKDERLPVDARASLIVLTAQLQALQTMIRVIEKQIIAQHRASEASKRVATIPGIGPLGASAIVATLTDPSAFRSGRDFAAWIGLVPRQDSTGGKQKLGPISKQGDRYLRRLLVVGAHSALRRAKQSPQNHPWLVQLLARRPFKVVAIALANKMARVAWALLARGSRYRARGGSTYRAPQLAAA

SEQ ID NO: 206151 - protein, 342 aa, unidentified
MKIVMLGIDLGKNLCSLAGLDETGAIVLRRRLKRESLLRFTVRLEVCTVAMEACCGAHHLGRQIAAQGHGVRLMSPGYVRPYVKAQKNDERDAEAIAEAATRPTMRFVELKSEAQLEVQSLHRVRGRLVAERTALINQLRALMLERGITAPQGRRKLGGLLPEILADESNGLGSRLRRLIEDMRSEWRGLDERITAFDDELAVRARTDEAARRLVTIPGVGVLTATALVAAVGDARAFPCGRDLAAWLGLAPRQATTGGKPKLLGISKRGNRYLRMLLIHGARTALPSLARSDTPLGRWLKGLLVRTHRNVATVALANKLARIAWAVLAHGRRYVALQTVAD

SEQ ID NO: 206152 - protein, 402 aa, unidentified
MKSNTQNAKIEAITEKTLVLGIDVGSETHYARAFDYRGIEYSKKPFKFSNTEDGFVTFKEWILDLKERHEKDKVVPGMEPTGHYWFNLGKFLQDNEMKPVLVNPHHVKKSKELDDNNPTKNDRKDPKVIAGLVREGRYMIPYLPDGVYADLRTASNIRFQLQAELTRIQNRISRWFNIYFPEYKTVYGKPDAKSGMLILKAVPLPEDILTLGIDGVNQIWRDAKLRAVGKARAKTLIEAAEHSVGSKEGVVSARMEIRMLLEDYESRNIRLQEVMTLIEGLVKQIPMAEKLLEIKGVGIKTVSGFLAEVGDISRFNTPKELQKLAGLALVESSSGKHKGETTISRRGRKRLRYLLFEVAMSLVAKNSEFRELHNYYTTRRLNPLKKMRKCLKTWRSDHRRFS

SEQ ID NO: 206153 - protein, 429 aa, unidentified
MKIIYPRVCGIDVHKKFIVAVICISESVEPVYLKKRFSTFHNDLIRFREWLIQNDCQNVCMESTGKYYIPVYNVLESHISNIVVANPKWVCAVKGEKDDDKDAKWIADLFKFGIVRSSFIPQKDFRILRELTRYKYKLVNMRSSEKNRYQNALTSGNCKLDMVFTDVFGKSASNIIDLILSDNPYTDEDILSKVHKNCKASPDMILNSINGTDLTPVQKSRIELVNDHIKQLSSNIQRLDKLIDLMIEPYEDYISFLCQIPGVSRNSAIIILSEIGVDMNQFTSTRRLTSWAGLTPSSNQSAGKKKSVRISRAGVYLKPCLVEVAHAAVKDKNHPYYANKFNKISKRRGKKRAYIAIARKILVAAYHMLLTGEIWNPADLSEVETPVEQRIKYVKNNLKSDIKQLLDIGLTVEELTLMIQQNANIIATQ

SEQ ID NO: 206154 - protein, 441 aa, unidentified
MNNSAAGENIAGGRFASARSRSLEGNRKTVNCRLPGEPEALAATSNRTTPQEGCNISSVDGRAKQQQKFKPQHVAMNNPEQQPGSWLEQRGFGGLDWASQKHNVVVVDPQGKVIEDFEIEHSALGWKKFRERMQPYGSIPFAIETSQGAAVEQLLEAGMEVYPLNPKSAQSYRERKAPSGVKGDRLDAWSFADACRVDGHGWKALRPEDALVKELRLLCRDEVVLIEQRTAFINQLQHALAEYYPTALEAFEDWTSVSAWMFVQRFPTPQLLKQAGKRQWEKFLHSRHLWRSESGPRRMELFAHATELSGSLAMANAKSCLALSLVSMLFALEKQLGIYRQRIEELFARHPDHDLFGSLPGAGPKIAPRLLSEIGDDRDRFGEQPQALQCLAGTAPVTRQSGKPRCKPPCWPVHQRWACDKHLRHAIYLFAEQTLTRCFRG

SEQ ID NO: 206155 - protein, 403 aa, unidentified
MTSCSYFAGIDWASRAHAVCVIDAAGRVVLRLDIAHSQEGIDRLVRQLKSFAGMSIAIERPSGVLVDALIEAGLTVVPIHPNILKASRPRYRGAGKTDPADAYMLADLLRTDGHRFRPLDPQTDEIRALRALVRTRDDLVAERVALANQLRSLLESFWPGAVEIFADVDSPIALAFIARYPTPQSASHLGEKRLAGFLAQHAYCGRRPVAALLERLRSAANGCCGELEAEAKGELARSLAAILERLVGELAKLSARIEHMISNLADGQIVMSFPRSGRICAAQILSELGSVRERFPTEAQLAAEAGVAPVTFQSGKQRSVTFRWACNHRLRRALTCFADQSRHANAWAADIYRRARARGCDHPHAIRILARAWVRVLWRAWFTRTPYQAHLHRSAAALQPAMG

SEQ ID NO: 206156 - protein, 393 aa, unidentified
MSLDDRNEPTAIHTQIAAIFVSLELSRSTWLITSLSPGKGEKMSKHGVPAGHVAVLLARLAELKRKAMMRTGKNYPIIIIQEAGLDGFSIHRVLQKEGIESHVVDAASIAVPRRRRRAKTDRIDGEALLRVLLAYKRGEPRVCAMVVAPSVEEEDRRRICRERQVLIDERTAHVNRLKGLLIAQGIFGYAPSRRDRRARLEELRTNDGRALPEHLKAQIGRELDRLELLLKQIKAVEAERDAMLAAMTKTADKKTDAPHPLAMLLAPKGIGAEFAAFLWSEAFYRSFANRRQVAAYGGLAPTPWQSGAVAHEQGVSKSGNPRLRTKMIQLAWLWLRHQPESALARWFHAQGQSGRKGWRKRTIVALARKLLVALWKYVTTGVVIDGAAMKRAA

SEQ ID NO: 206157 - protein, 451 aa, unidentified
MSAKLTKVAGLPVIHDRAAGIDIGSRFHVVSVPPDLSGDPVRTFQAFTGDIQRMACWLVSTGIKTVAMESTGVYWIPVFEVLQDQGIQVIVANAREVRSVPGRKSDVNDAQWLQRLHACGLLRPSFRPERGVAALRAYLRLRERHLDYAAAHIQHIQKALTMMNLQLQHVVADVTGVTGMKIIRAIASGERNPEVLSAMRDVRCKASIATIHAALIGNYQPEHLFELTQSLALYDFYQNKIEECDVQIEQTLAALNADRPQLDDPLPEPRNRTKQPNALQFDARTALYQLTGVDLTQIHGIGSYLALRLVSECGTDMSKWPTAKHFTSGLTLAPGCKISGGKVLSARTRRSSNRVSAQLRLAAVAVGRTNTALGAFYRRLAARIGKAKAVTATARKIAVLFYNTMRFGMQYKDPGADHYERQYRERVIKQLHRRAAEFGYILHEATPASVS

SEQ ID NO: 206158 - protein, 405 aa, unidentified
MNAVGIDVSKGKSTVTIRRPGDVVLMPPCDIPHTQSAINALIEQIKTLDGETKACMEHTGRYYEPVANWLSDAGIFVSAVNPILIRDFGDDSLRAPKTDKADSKKIARYTLDRWVKLKQYGSMDKTRNQLKTMNRQFGFYMDQKTAMKNNLISLLDQTYPGANDFFDSPARSDGSQKWVDFVYTYWHADCVRSKSLQAFTEHYQKWCKRNRYNFSASKAEKIYQSSSNLIAVFPKDDSTKTLIQQAVTMLNTASQTVESLRIKMDQTASTLPEYPSVMAMNGVGPSLGPQLMAEIGDVTRFTHRGALTAFAGVDPGKNDSGKHNQKSVPTSKKGSPSLRKTLFQIMDGLIKRSPVDNPVYAFMDKKRSEGKPYYVYMTAGANKFLRIYYGRVREYLASLEESKES

SEQ ID NO: 206159 - protein, 419 aa, unidentified
MSFKILKNNCCGLDVHKTWIYACIGITDSFKRTEYKQARFSSFTKGLQELCLWLAKYNCIDVCMESTGKYWIPVFNVLEKNNIFVTLSHPKYTKPQKGNKTDRKDAKWICDLYMCGMVKPSFIPPADIRQLRDLVRYRFKLTCMITGEKNRAHNCLTVSNLKLDDVFSDIFGKSSRSITEQILQHPGEVFDVAPFVDSRCKTPIEEIQAAVDGAISHEQAVKLRQCLKHIDELEMHKAEIEREIFRLSQKYESVLDLIRTIPGFDKNPLTAIQVLSEIGADMSVFPTAKNLVSWAGCCPRNDQSSRKIKSTRISRAGSYFKPVLVQIANALIKSKKHPEFTTRYRRIKARRGHKKAIIAICRMILTAIWHILSDLKSYTPEGFLESRPVKEGKVLSTSQALNLLKQRGYIIKGEPLAVS

SEQ ID NO: 206160 - protein, 348 aa, unidentified
MKKLVAGMDLHSNNVVIGLMDLDGQRVASGKVACDLKAVEKFLAPFKARLERLAVESTFNWYWLVDGLQAQQYPVVLANPAEMDQYSGLKHANDTSDAFFLAELLRLNILPTGYIYDAKLRPVRDLLRRRLLLVHQRTALMLSFKSLYARTTGQALTLTELKAMEIPKARELYQHPANQLIAGMQLEHIEQLNASIAELEKVVLAAARELPGYARLTTLPGVGKILGMTITMEAGEIQRFADAGNFASYCRTVKAERISNQKKKGENNAKCGNKYLAWAFVEAANFARRYDEQCRRWYDRKAAKTNQIIATKALACKLAKAAWHVMTAGVDYDAQRVFGPSPAAPLKT

SEQ ID NO: 206161 - protein, 422 aa, unidentified
MKLTYPICCGVDVHKTFLVATIIKTDGLVLKYHKKRFSTFSRDLLAFKQWLLDNNCKDVCMESTGKYWIPVWNILEDVVHVVVANPKWVSAVKGNKDDTKDSRWIGDLFRMGLVPGSFVPNKKIRVLREFTRYRYKLISMRSSERNRFQNAFTVCNSTLDAVLSDMFGKSATAIQNYLLDTDVVNPAYCASLLQRTAKKKSADVMAAVEGFKMSAEQKERVRIIQEHFSDINARVARLDAEINKMVSEYESQISLLCTIPGVDRNLAITIISEIGTDMSEFGSSKRLCRWAGLTPGNNESAGKKKSVRITRAGVYLKPALVQAAHAAVKSTKSVYFKSKYERISKRRGKKRAIIAIARMILTAVFAMLKIGEVFNPCDLQKYDMPEQLKRKQIVSSAKDAVKFLVSLGVLQEDTVSLAALTG

SEQ ID NO: 206162 - protein, 408 aa, unidentified
MIFIGDDWAEGHHDIELMSPDGAVLTRFRVPENADGFEELLTKVHEHTTDDEVTVGIERDNGPWVTALRGYGFLVYAINPVQSARCRARFSLAGAKSDAGDAHVLADMVRTDRPHLREVADDTVEVEGLKILTRTHKSLIWEHNRHLNRLRYNLIQYFPAAIDAFGDLSAPESVELLTKAPTPSRAAALTLTQIKAALRRAHRRTVDERALRIRAVLRSPGRLGLPGALEDGHAVATVATLAVLATLTSQIGLLKEQVTAAFDHHPQAAIITSLPGMGPLLGARVLAEFGDAPDRYRSGKARRNFAGTSPITKASGKKTVVSRRYVHNDRLLDALTRQAFTAIRVSPGARACYDRHRLRGVEHHAALRHVANRFVGILHGCLKSGRLYDEHIAWDTRGEEIAEKCDTA

SEQ ID NO: 206163 - protein, 463 aa, unidentified
MFFERVLMPLGHSPLRRWFTLHVPRKGQLSMAKLQFPTERAIVDTTPGRWLPYGVGIDVHKEMVWACVLRPDYHSNQQSRSICKFDASYRGLAAMRVWLEQLVPEHEKHFLVESTGTYHFPVVAALQGWVATVINAQHAGSAKKKTDRWDAQKLAHHDMAGTFPAFVLPLVSDQALRVAMRRLVKIKRTITRNLNAIRTRGLIFGVRNHGYGMSGEGWDRFRRLAVGTGPYVVPGNPQDANDFQQALAHAAALPRLVHAVNQQQVDEIERLRNSYDQLLADAIRLGDAGGLLLLRSVPHVGDVAALTFLGEVGRHPLRRFASIRGIVAYAGFDPSKKVSADRATSHVPCAGNKHLRRVFLQLSGGVMLAKGTSGLAEMGQSVAASHGKKGWHAGVNAVGRKLIRYCSAVLIHSTPFAKGMFHGKAEANRVLSRLSVSPPEFDDRLPLVACGDCHDPSETEWEE

SEQ ID NO: 206164 - protein, 368 aa, unidentified
MDSPFQDGIECAKLEDQPTSVQPKGGVIMKRTTIGIDIAKNVFEIYVEDGATQGVERKRLSRKKLLPWLANRPPALVGMEACGGAHYWARELTKVGHEVRLMAPQYVKPWVQTNKSDAADARAICRAVQEPGMRFVRIATEAQQDVQAMHRVRSRLRGNRTALVNQIRGILLEYGVAVPQGVASLRNALPSLLAEERWSPLMRQFLTEQQAELTACEAQMAAVTVAITRASATQPVCQRLEQVRGIGPLGASALWLKLAGGAYQNGRHVAAALGLVPKHTGTGGKVRLGGISKRGDRYLRQLLIHGARAVVAQVGEKPDALSGWLRRLVARRGMNKAVVALANKNARVAFALMHGEHPYEVTKMCRVA

SEQ ID NO: 206165 - protein, 422 aa, unidentified
MEDSNTMNSRVDEVFVGIDWGASHHQLCAVNATGKRQREVRLSHDVAGLNQLDAELAQLGSGLPICVERSEGLLIERLQAGGHRVFPVNPRIAARARERYRVASSKDDVFDAFTLADTLRHEHPHWRPLPVASSALAELRALSRDRDRLLESQQRVEAQLHAILDAYHPAPAQLFSSIDRDITLAFIADYPTPQAAARIGEQRMAAFCRRQSYRGRVDPAILAQRLKDNLLSGAEGTVAGKSHSARVFAELLGVLNRQLAAYDRRLELALAKHPDAEIFLSFPGVGLITAATLLAEIGEDRDHYPAVGVLLAEAGLAPVTRSSGRSHRVGFRYAANTRLREACMWWAYNSLKASPWARAAYDDARSRKQPHHRALRGLGARWMRVLWRAWTDGVPYDEARHLKTGSASHDVTAEGPRAPAAA

SEQ ID NO: 206166 - protein, 349 aa, unidentified
MSMVCGLDLHREQITFDALVLESGESWRGRVWHPDRERFRRWLVHDVTRRAQGGPVALAVEGCTGWRYVVEEITAAGFEAHVAETADTKAARSRKNRAKTDRTDARLLRELLAAGELPESWIPPTDVLEWRERVRLYKSLVDQRTKWCQRIHAELFQHGVSVPEGAIRSAAVRARIGDKDVQLSVAARQRIRVGYQMIDATDTEAMPLKRALTRFGERQPACRALVNAQYGIGGLLAVAVWSELGDCQRFSRSRQAVRHTGLDVTVDASNRRRANGYLARQGPQTLRWALYEAAKNSSHQRSPDHAYYARLKDRHGGKIAAISIARLFTRRCYHILRNLDSDIVYAMPT

SEQ ID NO: 206167 - protein, 402 aa, unidentified
MTYDYVIGMDACKYFHHACVLDIDGTQVLSKRINQNEQSLRALFSAFSAYDHKVLVVVDQPNNIGRLTVAVAQDIGIDVRYLPGLAMRQLSRIHAGNAKTDIRDAYIIAHAAKNLPESLRSVDRVEEAFLQLKVLNGIDEDLARSYTRLINQIRSALVGCYPQFEQALRGQIIPRKWVLHLLARYGGPTKIKRLGKAKAAAFARRYKARNPEPVLDAIFAAISEQTVTIAGAHYAEMGVAMSAKDALLKLEHRQQIEKEVIELINDIPHTQFLLSMPGIGPKTAAQILMTAGDMSDFPSAGHLASYAGLSPRTNQSGTSIMSNSLNRAGNKKLKNALWQSSFASIRSHERSRQFYERKRREGKRHNAAVVALARRRLNVLYAMMRNHEHYHDPAPSQEDLAA

SEQ ID NO: 206168 - protein, 365 aa, unidentified
MSIRRIIALDLGKFKTVSCVMDTADRAHVFETVEMSPAAIHDLLARHATSEARDTLVVFETCDCCGWVYDLCTTLGLPARVVSANAEAWQWRRVKRKTDRDDALKLAKLALLDQLTIVHMPSPIQRQKRRLILHRRSIVSRRTQSRNAIRSIFSQQGIALVRGSKQWTKAGIEQLRQYAKPLAECSDLLDLWRGRLHAELQLMADADAQLKIFDHALDALAAEDNRVQLLQTIKGVGPRVAEAVVMHLDNPHRFTSSRHVAGYAGLVPKQIESGQMSRFGHITRRGPSLLRSMLVESAWVVWRHNDWAQAWVQKISRGSKARRKIAIVALARRLLTILWAMLRDNQPFRTPGSAPPAAFVPVPVG

SEQ ID NO: 206169 - protein, 415 aa, unidentified
MALKIVYKICCGIDVHKNFVVACIAKTDKQGVTTYELHHFSTYTKGLKQLLKWLLDRNCKDVCMESTGKYWIPVYNVLEHDCSIVLAHPKYVKAIRGKKTDKKDAKWIADLFKHDLVAGSFMPPADIRQLRDLMRYRFKLTCFKSSEKNRYQNCLTVSNIQLGNVVSDTFGKSSQKIIAKILENPDDTSFDIGSLIHGSMKDKLPELELAIDGYITPEQAAKLKIIKEHFDNLEARKAELEELILALANPYQQEISIILTAPGFKNTFTAIGIISEIGTNMEAFPSAKHLCSWAGLTPTNNESAGKKKSVRVSKAGCYIKPLLVQCANAAIKSKKHPEIRDRYLRIKKRRGHKKAIIAIARMLLTALYHMLKNGENYNSDLYQKSDILPTTREITVEQAILMAQFQGFRIKSATE

SEQ ID NO: 206170 - protein, 430 aa, unidentified
MISWLGRMSPCYDGGLVWEAFLPVSITQKGGVSLFKLFVGIDVSKEYSTVQGLDKNKKKLFYLRFPMDRGGFSELLNAIKKYSDSMAGVTAAMESTGCYHINLFSFLFSEGVPCVVINPLLVANFRRLSLRKTKTDKKDALTIAEFLLANEKSLTTRAFSQDTQDLKDLARERESLTVLISGMKNEIKRLLQGTFPELEKLCSPYGETMLHFLRLFPSARLVRAANRKDIAKALLSPGEKRKRVEVSVDDIIAAARTSVALASAAKELIISEKAATLLYLLEKSGRITDVLIETCESLRIEELDIIRSIDGVNDITGSTFLAEIGDIKNFSSYKHIIAYAGLDPSIHQSGQYEGRSTISKRGNRHLRRVIFLMTLCAVRSQNAFRQYFLRRKKEGLPPKKAVLATAHKLIRAMFSMLSNKTMFRKGVVVE

SEQ ID NO: 206171 - protein, 482 aa, unidentified
MKAKPQEKNKRATNHPTQHHWHEMNRKQRQETMRKIQSQDLSLEVVHPDAAGIDIGNESHYAAVPPSRDSQPVRCFGCTTAELKAMAAWLQQCRIRTVAMQSTGVYWVAVYDILEQAGLEVYLVNARDTKNLPGHKSDVQESQWLMKLHTYGLLRNSFRPSQEIRTMRTYWRQRNDLVQSASRHILRIKKALTQMNLQLANVLSDISGVTGQAIIKAILAGERNPHKLAEFRDPRVQASEEQIAHYLKGNWQPDLLFVLKQEQDGYEFCQQQMAECDRQLEQYLQSTEDRSQGAPLPEEKRKGRLTKKKGNKPQFDLRKGLFRMSGTDLTRIDGIDVMTVTTVISEAGYDMSKWKTEDHFVSWLRLCPDNRISGNRIIGKGRLPTNNPVSIALKMAATTLRQSKTYLGAQFRRLRTKLGAPVAIKAMAAKLARLVYRMLRYGMKYLDQGAAVYEIKHRELQVHQLKWKAAQLGYQIVQPPAA

SEQ ID NO: 206172 - protein, 351 aa, unidentified
MSEKVDTTIAVIGIDIGKNSFHVVGYDRRGAIVLRQKWSRRQVEARLANMPRCLIGMEACVGAHHLSRKLTSLGHDARLMPAKYVRPYSRGQKNDFRDAEAITEAVQRPTMKFVATKTAEQLDLQALHRVRERLVSQRTGITNQIRAFLLERGVAVRQGLRFLRAELPRILATPSDALSPRMLRVIEDLAGDWRRLDERIEGLSSEIEILARRDAGCERLMSVPGIGPIISSAMVAAIGTGDGFTKGRDFAAWLGLVPKQISTGDRTILGKISKRGNRYLRVLFVQAAWAVLIKPKSWQRHGLKPWLEAAKKRLHHNVLAIALANKLARIAWSVLAHSRTFEARRFDEVAA

SEQ ID NO: 206173 - protein, 398 aa, unidentified
MTRKNTLKSLPADTEFRVVGLDLAKSDVSVAAIPVDDNTPSLVDRMTYADLLDWAGKISPTLFAMEPCNGYSLLCLQLENLGHEIKVISGWTVSMWINTHLSGQKTDLNDAIALARLAVSDAELTPIRHKSITEIRIQTVQAVRQQLMSQRSKSIVSFKALAQQWGIPCAAGHRNLKKLRESIEAKVDLITRPVANAMLFLLDAVKSLDRQIGQLNQTLQELVMSDERGRLLQSVLGVGTQISARVITVVGNIERFNSPRSLVAYVGVAPRNFITGHKNLTKKKHGNCPDLSHKGQGKISRRGDKLLRSLFIQGAACLYMQFCKDQLPECQLKRWILKQLASQKPYGKLIVSLAAKLIRIVWAVLTYGEKFNIQKAGMTRSMWSEMALETPLNKEVPA

SEQ ID NO: 206174 - protein, 367 aa, unidentified
MEEQKKTETRFIGIDLGKRTYESAIVGKNGKVIKSNGKTSIAGRQALYKKLRPGDKVALEAGGIAFIMAKEIEAAVGCRVYVLNPSQLAVIYKSMKKTDKEDCLKLAHIIEDFREERLPIVPVPSERELRMRKILASYRRVQQSRNRDINQLHGLFVSQGITNKVKKDLAESENREEAVRELKGLEHKEAEYLLKRITLCEERIAALEKEIKIESEGDKQIEELQKIPGVGPKVAFAFLAHVAVERFENASQVSNYLGLVPRVYMSGDTVRYGKITKRGNSYLRALLAQAGWALIRSKKMSALKERFEYMTLEKSKSKKQAIVAVARRLAELMYTLLKEGTIYEPRHFVPGKENKATADLAQLALSA

SEQ ID NO: 206175 - protein, 355 aa, unidentified
MTSSKYIGLDVHKESISIAVRNAAGKIVMESVIETKASMILEFIDGLRGDVHLTFEEGTWSAWLYDLLKPHVTRLVVCDPRRNALLQEGNQNDRVDARKLAELLQNNQLRPVYHRDHGLRTLKELVRSYLTITKDLSRVMSRVKAIYRSWGILCSGTQVYTARHRVEWLEKIREPGVRRRAEIYYQELDGLRLLRLEVRKDLLAESKKHQVWKRLRGIPSIGPIRAAMLLGIMQTAHRFRTKRQLWTYSGLGVEGHSSADHQVVKGQLQWRKKPIEIRGLNKNCNHHLKNLFKAAAVNASTKPGPFQEFYAALVGKGMRPEMARLTLARKIATIVLIMWKKGECFDANHLKPQTA

SEQ ID NO: 206176 - protein, 345 aa, unidentified
MSHFVGLDVSQKMTAICVVDKDGRRVWRGQCPSVPEQISAALRRYAGDNARIGIETGAMTPWIVHELRNLGFEVVCLDARHARAALKMQINKNDQNDAEGLAQIVRTGWYRSVHVKSFDSHRARAILGARTQLVGMTTRLSNHIRGVLKTFGLLPGAMRGLPFDRKVEVLLEGRSDVAPIVRPMLVAWRQLRVQIAAFDKAIRAMVRMSGASRLLMSVPGVGLLSALAYVSTVEDPSRFARSRSVGAHLGLTPRQYQTEEVDRSGRISRCGDTLTRTLMYEAAGVILTRVKKASGLGDWAAAIAKRSGPGKARVALARKLSVILHSIWRSGEPFRWSEPKHAVVA

SEQ ID NO: 206177 - protein, 434 aa, unidentified
MEEVTDEPLYRDRVCGIDIGKAQLYATIRVPSDSNPARRASETRGFATTRRGVLALADWLRAWQVPAVVMEATGDYWKPVFYRLEAEGFECVLADARQVKNLPGRPKRDPSDSAWLAACFERGAVRPCFVPDPEFRVIRLHTRYRRDLIEERTREKNRAEKLLESAAVKLSSVVTDLHGVTGRDIMDHLIAGERNPKALAQLARARARRKIAELEEALEGAEFFTAEHAALLKAMLERIDSLNHQIVRLTEVIERLLAPYEEQLAQAESMPGWGRRSAEDAVAETGVDMSKFPTGGHLSSWAGRTPLDHQSGKRSGRARHKKGNKYLGAITGETAVAAGKTQTREGARYRKLARSRGKNKACVAVGNTQLKVYHKLLSNPGTRYQDLGPDYYERRSQTRRKIAYHVRELEELGLEVTLCRPSPAQDDPEPTQAP

SEQ ID NO: 206178 - protein, 310 aa, unidentified
MTLKAHTIIAIDIAKESLQIQSPDQAWSLDYEDSALKELIKRLKTLAPILVVCEATGGYERKLLTALHRAKLPVCLVNPYRVRAFASSEGIRAKTDPIDAQVLLRFAQEKKLHPTPPPSPKRLALTALLDRRSHLTSMITQEKNRLKNSSPLIHSMIRKMIRLIETQLQSLEAKLKKGLSEDEEYRNIDKIIQSVKGIGPVTSWTLMAHLSEITSLGRNQIVALAGLAPFNRDSGKSRGKRCIQAGRGKVRKCLYMAAQTAARFNPVIRDYVNRLIERGKPYKWAMVAAMRKLLIHIQSLLKKNKLSLAS

SEQ ID NO: 206179 - protein, 389 aa, unidentified
MKIYVGIDIAKLNHFAAAISSDGEIIIEPFKFTNDADGFQLLVSKLESFDKNSLIIGLESTAHYGDNLVRYLVTELYQVCVLNPIKTCQMRKNNVRKTKTDKVDTYVIAKTLMMQDNLRFVSFFDLDMMDLKALGRFRQKTIKQRTRLKIQLTTYVDQVFPEIQYFFKSGLHQHAVYALLKEAPSPKEIASMHMTHLANLLKVNSHGHFTKEQAKELRVLAQKSVGANDSAISIQITQTIQQIELLDSQLEKIEAEMTDIMKFNDSVIMTIPGIGYINGGMILGEIGDIHRFSNPSKLLAFAGLDPSVYQSGNFQAKTTRMSKRGSRVLRYALVNAAWNVVRNNATFKAYYDVKRAEGRSHYNALGHCAGKLVRVIWKMLTDEVEFNLE

SEQ ID NO: 206180 - protein, 340 aa, unidentified
MKVHVCGIDIGKTVFHLVGLSKEGHIVIKKRFSRRQLVTFTVNLPTCLIGIEGCPGAHFLARVLLKQRHDVKLMPAEYVRPFVKSNKNDYVDAEAIAEAVQRPTMRFVPVKNEAQLDLQALHRVRDRWMGRKTAVINQLRGFLLEHGITVAAGPAHLKRQIPSILEDAENLLSPRMRMLLLELRDEWNKLEEQIDASNQELAQFAKKEDGCRRLLTIPGIGPLTATALTAAIGNGAAFRKGRDLAAWLGLVPRQHSTGGKARLLGISKRGDPYLRRFFVHGGRAVLAQVKRERHQFGGWLDRLEARSPRNVAIVAMANKIARMAWAILTSGESYNAAFST

SEQ ID NO: 206181 - protein, 373 aa, unidentified
MENGSTCHVGLDTGKESVAGYVLVPNKAEGVEFKLANERSAVRRMVRKLMRENGGEVRFCYEAGPCGYELQRWIRAEGAQCVVVAPSLIPQRPGDRIKTNRRDAKKLAEMDRAGLLVEVHPPTVQTEAVRDLVRGREDLVEDVRRMKQRILSLLLRRGLACPGVKTRWSVGYWTWLRSLEWEEEADRVVFSDYLLGLEQAQDRLKQLESKLGEIAKAEPWRERVGWLRCLRGIDTLTAMTTVSELHGWERFRTARGLMSFVGLVPSEDSTGERARRGRITRAGNVHVRRVLIEAAQNYRVSARVTPALAKRRQGQPAWVVALADRAQQRLNRRFWRLLSAGKHRNKVVVAVARELVGFIWAILQGPRSCATVI

SEQ ID NO: 206182 - protein, 484 aa, unidentified
MSSQKKQPGQPGKKNRSAGKSRGRRRKGMTLDDRPILQPNAAGIDIGAREIFVAVPADRDENPVKVFPTFTADLEEMAKWLVSCRVTTVAMESTGVYWIPLYDILESHGITPCLVNARNMKNVPGRRTDWHECQWLQFLHSVGLLRAAFRPDGDVVAVRSLMRHRTDLVQMAAQHIQHMQKALTQMNLQIHHVISEITGVTGLAIVDAILAGERDPAVLAKLRDHRIRASEEIVRKSLVGNWKQEHLFTLKQSRQIFRYYEESIAACDEEIERLVVAFEPRVDPDERPLPPDRKAQQRKRKRRGVNPGVNPKTGFDMRTEIYKLFGVDVTQIPGLMVSPLLLFSEIGRDMSKWPTADHFCSWLGLCPDNDISGGRVLWSGMRGTRNRAGQIFRMGAFALHHDLSPMGDHLRRMKSKIGPAAAQTATAHKIAIIFYTMVKKQVEYDASIWAQKDAQREQRFEAKLRRQAHARGYKLVRNEENIAA

SEQ ID NO: 206183 - protein, 412 aa, unidentified
MLFVGDDWAEDHHDIEIVNEEGRRLAQRRLPEGLDGVSRLHALIAAAMPAAWAELDADAAAKLVKIGIETERGSWVAALVAAGYEVFAINPMSTARYRERHSTSGAKSDAGDAHVLAEIVRLDRAHHRPVAMDTAAGEAMKLVARSHQTMIWERTRHVLRLRSALREFFPAALTAFGDLDEPDTLALLAAAPDPDRAARLSTSKIAAALRRANRRNVDARAAEIRAALRAPALRQPPAVEAAFAAIAAAEVRLIASLNSEVAALGEVVAEHFGRHRDAEIYISQPGLGVILGARVLAEFGDDPHRYADAKARKNYAGTSPITRASGTKKKVSARYAKNDRLADALQQWAFGSLRGSPGARAYYDALRARKIGHQAALRQLANRHVGILHGCLKTGTRYNENTAWPTQKSAAA

SEQ ID NO: 206184 - protein, 341 aa, unidentified
MKNKSFIGIDISKNVIDASIFCEGTPIKDFPHDVFNNSRKGFGEMCTWLKKNHVVLSNCLFGMEFTGSYSMELEKFLTARKYQFCMLSTHTVKHYPMGPKDKNDKIDSAKIADFLYRYNGTECVKPYKMPDKTMQRLKTLMNERKFLVEQRTCFMNRRQLCITKEDAQLYDGYIKKFSRDIENIELEEQKLLATDDSLLSTYKNLLTIPGIGFVNAINVIVITRNFTAFETARQYASYVGVAPHFRTSGTSVRWRPRPSARCDGQAKADLSMAALIAVQYDAELQSFYNRKLGGKQDSDTKRKALNAVKFKLVLRMFAIGKQNRKWEPLDSKSSNEKLAIS

SEQ ID NO: 206185 - protein, 369 aa, unidentified
MNKVTYVGLDVHKDTIAVAVADDGRGSEIRFFGTIAHTADSVLRLTKQLVAAGRTPSFCYEAGPCGYGLHRHLTKLGFECAVVSPAMIPRKAGDRIKTDRRDAEMLARLWRAGELTPIWTPDEEQEAMRDLIRTRKQAMDAVKVAKQQLLSFLLRHGLRYENGSYWTKRHRRWLAELRRFRFSYQQLAFEELKRAVDQAEARVATLDQAIDEAVQDWRFSPVVDALRALRGVNTIIAATVVAEIGDITRFENPRQLMAWLGLVPSEHSSGSTTRRGRLTKTGNALARTMLVEAGWSYRHLPKEGQPYLKRSAHLPQEIKDIGWKAQTRLCKRFRHLSNTGKPQPRVLAAIARELAGFIWDIARKTPLPA

SEQ ID NO: 206186 - protein, 341 aa, unidentified
MPDTLLGKTVFHLVGLNLRGEVVVRKKFSRAQLLRFTANRHVGLIGMEACGGAHFLGRALREQGHEVRLMPAQYVKPFVKTNKSDYIDAEAIAEAVTRPRMRFVPIKTDDQLDMQSLHRVRERWVMRRTAIVNQIRGLLLERGITLPKGRSHVDTGLPPILEDADLKLSGALRTLLAQLKLELDQMAMRIDEADTVLSRTAHQNPACQRLVAIPGVGPVIATALIAAIGNGAAFRKGRECAAWMGIVPGEYSTGGKQKLLGINKRGNSYLRRLFIQGARSVLQHSAKQTSALSAWLKQLQARTHPNVAAVALANKLARIAWAVLAKDEPYRPPLLNSPAAA

SEQ ID NO: 206187 - protein, 335 aa, unidentified
MYDHYIAIDWAQDCMAIARMTNKLDKIRTFEGPSDVKGIREYLKGLSGSKILTIEESTASQWLYTELNDSVDKLFICDPSRNRLLSEGAKNDKIDAMKLVKLLRSGMMKEVFHSGDEFIHLRKIVSGYEDLIKAGVRLKNQRSAMYRAIGLHSKRDTFPIELKADKFVLEKIEQRIEEYEKQRAEYEAEFKRLCKKHKTIQNLKGVSGIGDIHAVQIAATIVDAKRFPTSGHFLSYCGLIKHEKMSGGKSYGKRPSRYRRSLKRVFKLAAQSATQEGCTNPFRMYYESLLNEKKLPEHTAQHAIARRIAVLVYGVLKSGKKFDYNSFRGVKKKKE

SEQ ID NO: 206188 - protein, 350 aa, unidentified
MSKQTNAIAISTIGVDTGKNTLHLVGLDRQGMIVLREKLARSRIGTRLANVPSCLIGIEAGMATHYVARELLALGHDVRQVPPAYAKPFRQGHKSDFRDAYAIAEAVQRPSTRCVPVKTDDQLDLQALHRVRSRLVGQRTAVINQIRSFLLERGIAVRQGLRFLRQRLPEILAKRVDVLSPRMIRIVEDLSGDWRRLDERIEHVTEEIEVLAHESESCRQLMTVPGIGPLIASAMVAAIANGAAFAKGRDFAAWLGLVPKQMSTGDRTILGRISKRGNRYLRTLFMQSARVILLRPASWAKHSFGPWLMAGVKRLHHNVLAAALANKLARIAWSVLAQRRNYETRAIVVA

SEQ ID NO: 206189 - protein, 382 aa, unidentified
MCRGNRLSQAEFSLTGQALPCYPSRVTEFRRERARLKRRECSRSSLNSDVPAAVSLPALVFVEVIDVAGVMIGIDPHKRSHPAVALDGREKRLGQVRVRATAKQVDGLLEWAGGWRRRTCAIEGARGLGHLLAQQLLARGERMLDVPPKLAARVRLLNTGQINKTDDNDARSVAIAALRGHDVTELSVEDQTVVMRVWARRYHDLGRLRTQAVCRLHTVLGELVPGGVRRDLQASQALAALDRIDAETPIVQAKVELARELVADLQRLDAQRREAKRRAALAVAASGTSIIEIYGVGPIVAASVLGYVRDIRRFANRDRFASYNGTAPIEVSSGDHKVHRLSRRGNRQPGRAIGERHCIQRGRLTPRHTGSSDKPLPGQGQL

SEQ ID NO: 206190 - protein, 318 aa, unidentified
MNPTTIGLDIAKNVFQAHGVDQNGKVVVRKRLSRAKVLEFFANLPPCLIGMEACPGAHYWARELMKLGHAVKLMAAQYVKAYLKGNKNDGNDAEAICEAVGRPGMRFVAINTEAQQDTQMLHRIRTRLVSERTALINQVRGLLGEYGIVFAQGPSQVRRGLAVLLAEEDPRLSGLARELLADLNGQLRALDERIANYDARVKAACATDERSAKLAELPGIGPLTATALTAAVHDGKAFDNGRQMAASLGLTPREHSSGGKQRLMGITKRGNTYVRTLLIHGARTVLRHAEGKTDRLSRWALAVQARRGANVAAVALAN

SEQ ID NO: 206191 - protein, 313 aa, unidentified
MSQNNPNILYVGLDVAKLSLQLHLAGRFHLLANDAKGHAQLLKRLRGHPHAHVVCEATGGYEQAVVRALQSAGVPVSIVEAGRVRYFARAQGQRAKTDPIDAAVLSEYGTTFQPAATAPASPQQQQLADLAQRRRQLIHLLVSERNHAEHYTDAFRVRQSRQLVKALEKQITQCDEAITTLIAQDTELARKAERLKAIPGVGPVVAATMLAEMPELGKLTTQTAAALAGVAPYNRDSGGQNGVRRINGGRAAVRCALYMATLSAVRHDRILKEFYLRLRAAGKKPLVAMTACMRKLVILMNRLLKYHDFQLAS

SEQ ID NO: 206192 - protein, 435 aa, unidentified
MSYSIAGIDVHKKVLAVVIADVEVEGEYQFERRLFSSSPDNLRLLAEWLVQQEVEEAVMESTAQYWKPLWGALERYWKPICQKRKSAGPTSGTLHLAPAQSNRGRRGRKKDFPDAERLVKRLVANELTLSFVPDVEQRLWRTVMRRKHPMTCNRVQLQNRLESLLEEAHIKLSSLVSDLLGVSARRMLKALAEGETKPTALAAMADKKLRATQAQLCDALGACTELNPVYRRLLKMTLEELQLIEQQISLLDQEMVRLLGQHQDAVKRLAEVPGLGADSAQQIIAEVGATAATFPSDKHLSSWVGACPGDDESAGVSTNHRSPKGNRHMRRILNQSANAAIKHKGSIFEIVYRRLVPHLGHKQAIGAIAHRLRIGDEKVPDAKTLARLGQLIGPEVIEELHKRIVQLAEVRHGMNVKRPKSFRISSGCCEVCTTF

SEQ ID NO: 206193 - protein, 349 aa, unidentified
MEHYAGIDVSLELSSVCVVDAKGKIVIEAKVESDPTALVAFLRELGLTLERVGLEAGPLSQWLHGGLTQGGFEAVLLETRHVKAALSAMTVKTDRRDARGIAQLLRMGWFRPVHCKSRGSQEVRALLVARKQLLDKLLDVEASIRGILRGFGLKLGFVTRKDFDARVRELSAGHTLLTNIFEAMLGARATLQTEYGKLHKAVLVIVRADPVCRRLMSVPGVGPMVAITFKTAVDDPARIRKSKDVGPLFGLTPRKYQSGETDVSGRISCAGDEMVRTALYEAANVLLSRVTRFSALKRWGMDVAKRRGAQRARVALARKIGVTLHRMWIDGSNFRWTKAESQGALIARP

SEQ ID NO: 206194 - protein, 397 aa, unidentified
MYIVGIDIAKRKHEAAVIDGEGAVIIKPFSFTNNCSGYNRLLAMLAKAKLPLDEVSFAMEATGHYWLALFTRLQKEGFRVQVINPVQTNSIRSFYIRQAKTDPRDALLIAEVIRFGHFSESTLHPENIYELRELCRGRHAIVSMQADVKRKVVALLDQVFPEYETAFTNLFGDTSMAILQTCPTPKELSEMPLEELCHLIEVSSHKRFRMAKAQELQALARNSFGFAMAGDVFSTMIRLYAKHLDFLKQQVREMDCKIAEIMDTLDTPITTITGIGPTLGAYILSEIGDISRFSSAAKLAAYAGIDPTMRQSGEYNGVRNRMSKRGSPYLRHAIWLAASSAVLHDPALKLYFQKKRDEGKPYMASVGHACRKMVSIIYAVMRDNKAYTPYIPNEISA

SEQ ID NO: 206195 - protein, 358 aa, unidentified
MKKIVVGIDISKEKIDASAIDVRDSQLGVVKLDYQVFENRPMGFCRMLVWARHLIKGVGLEDVLFCCETTGGYDRCLCDYVYAKGLDIWREGALQIKRSMGVRKGKDDKADSLMISEYAMRHMDKAVIYETASDTIRELKALFLYRHKLVQEKTEKKVRAQHLKDTAAKSKSMQFIVRDAMKSVRTVDKSIKQCEKQILELIEGDEELKKSYGHITSVSGIGIVNATAFIAYSNNFKGIVTANKMASYWGVAAFRDTSGTSVDKKAYVKCYSNSLLKAYLTEAAGWTIKENGIYYDYYLRMKAAGKPYGVIINNARNKLIHLVYSLVANDTDYERNHELLRVQRKGRTEMSAQLENIN

SEQ ID NO: 206196 - protein, 348 aa, unidentified
MDNNITIGMDLGDLEHVVVVMDEKGKEIEMKTIRNTELSLRKFFSRYKDATVAIEAGTHSPWISRLLKEIGCTVYVGNPRKLRIIWDCNDKSDLRDARILAMVCRVEPRLLWPIKHRDRQAYADLGIIKARDTLVQNRVRMINHIRSVTKTCGCRIPKCSTPSFSRRAPAHIPKELKDSLEPLITAIDLLTQQVKEMDRQISKLCKKYSETEKLLQVLGVGPVTALAFVLTIEDPHRFTKSRQVGAFLGLTPKRDQSGRCDKQLRISKAGNTYLRSLLVSCGHYIIGPFGPECDLRNYGISIVVRGGKNAKKRAAVALARKLAVLLHRLWISEQKYNPFYKNIDKAVA

SEQ ID NO: 206197 - protein, 369 aa, unidentified
MADHKEAFVGIDVAKLRNAIAIADPGREGEVRFFGEVDASDTSMRRVIQRIAAKFDRVDFCYEAGPTGYGLYRLIRLLGHECTVVAPSLIPRKPSDRVKTNRRDAVSLARLLRAGELTAVWVPDEGHEAMRDLVRARAAAVETQRAHRQQVSSFMLKHSRVFPRPKAWTMRYLRWLQEQKFDHPAHQIALQEMIEAVRTSKERVLRLEAAIEEFVPQWSLAPVVQALQALRGVDLIVAVTFATEIGDLSRFENPRQLMAYLGLVPSERSTGETVRRGSITKAGNGRVRHMLVESAWTYRHPPKVGKAKLYKLEQTSPRVREIAWKAQTRLTARYRALSAKGKKTTIVCTAIARELVGFMWSVGQEVQPA

SEQ ID NO: 206198 - protein, 310 aa, unidentified
MEKHNTARKSSCGGKRTTGKLTIGLDLGDRSSRYCLLDEQGEVIEEGSLPTTRKGLDRVFGAAGRCRLAMEVGTHSPWVSRYLARLGYEVIVANARRVRLISESSRKDDKLDAKTLARLARIDPELLSPIRHRGVQAQADLMMIRARAVLVQTRTALINAARGLTKSYGERLPSCATYQMGKDQAELLSPAIRAALEPLLAEVETVTERIREYDKQLEQLCQTRYPETKLLKQVHGVGTLIALAFVLTIEDPHRFRKSRAVGCYVGLRPKRRQSGQSRPQLGISKEGDVIFADAVGARSAPCAGPVWERQ

SEQ ID NO: 206199 - protein, 436 aa, unidentified
MKKSLEIIHPQAAGIDIGSRSFYVDAGEEEVKIFPTYTEGCHQLRDYLKERSITTVAMESTGVYWVILYGILEDAGIEVYLVNGRDVKNVPGRKSDIKDCQWIRQLHCYGLLKKSFIPQDHIRQLRIYLRLRQDHIRAQATQAHLMQKALTLMNIRLTEVISDIMGASGSRIIAAILEGERDTGILVGYCHESILKTKKELVIKALEGEYRDEHLFALGHANQTWHYYQTLIFECDKQVEKLLGEITKDKEDVSGNKKRKPIRYNKPAVKDLHQSLLKMTEGKDPTGIAGITDYSFLQIVGEVGTDMNPWKSEKHFVSWLKLAPMRSSSGNVSRRLSVKRTNKASYLFRSIAQGILTSKHLALGSFGRRIRARRGSGVAIKAIARKIACYYYRVMTKGEEFLDKGIAMYEQQQKEQKVKALQKAAIKLNMNLIPLT

SEQ ID NO: 206200 - protein, 342 aa, unidentified
MYYVGLDIHKKSIAYCVKQADGVILREGSVAARREDLRVWAAALPQPWSGAMEATLFSDWVHDHLAPFCAALKMGHPARMRAIATSKKKTDRIDARTICDLLRCNLLPPAYVLPAPLRQLRRVLRYRNLLVRAGVQMQNKIAGLLLELGVEYDTSRLHRKKYFGQLLQQKQAEIPASARRLLDFSREQYQTLHRMELQLLRGLEQHPDIAQRVARLMTIPGVGPVLGLTWALEVGPVERLGNLSRAISFCGLCSALRESAGKQTRGPISKQRNVHLQTVLIEAAHLAPRWNPLLAEVKQRELQRGHRNRATLAVARKLVAFLMAADRGHQPHPRASPMPAAA

SEQ ID NO: 206201 - protein, 314 aa, unidentified
MRKCIGIDLAKQYFDMYDLCSRQHRRLDNTAEGIRQCVQICKAATPELIVMEATGGYELALACALQTEGLPVAIVNPRRIRDFAKAAGQIAKTDKLDARIIAQFAATLEPMTTEQIDQNTQKLKALVARRNQLVGLHTAESNRLEHADNRDIRHSITVVLKVIEDQIKAVERKIEDHIRNTPELKQRSETLQSTPGIGPATASMLVTELPELGRLNRRQIAALLGVAPIARDSGTFRGKRMTGGGRKNIRSRLFLPTLVAVRYNPVLKAYYDRLIGQGKCKMVALVAAMRKLICILNTMIKKNQNWQPNFTKIA

SEQ ID NO: 206202 - protein, 313 aa, unidentified
MGQEIYIGIDIAKSSLEVAIHNQAERFSFSNDKEGIRQAVRQIRQLEPGLIVLEGTGGYEVLLVAALSVSKLPVVVANPRQVRDFAKATGRLAKTDTIDARVLAHFGAAVKPVLRPVPDEELTMLKDIVARRQQLMEMLTAEKNRLGMARNQVVKQNIGSHIDWLQKELKDTDTGLRDRIVASPVWREKDDLLQTVPGVGGTTSIALIANLPELGNLDRRQIAALVGVAPYNRDSGLFRGKRTVWGGRARVRAALYMAALVATRFNPVIRTFYQRLCAAGKAKKVALTACMRKLLTILNAMIKNNTTWRCQPA

SEQ ID NO: 206203 - protein, 345 aa, unidentified
MVMIGIDPHKRTHTAVAIDTAERVLDERLVRATSKQVPELLAWVKRLGGGDRIWAIESAGGLGYLLAQQLLAAGEHVVDIPATLASRVRLLGTGRSDKNDPNDARSVAIAALRAAELVPVRVEDHASVLRLVSRRHTQLGWSYNKTACRLHALVADLVPGGISKEVVVCQARSLLADHPSIGAVALQRHALALDLVDELERLNRQRKALRKRIAVAVDASATTLTEIFGVGDVGAAIILGQVGDIGRFRTADRFAAYNGTAPIEWSSGNPARPIHRLSRRGNRTLNHVIHIAAVTQLRHRHSPGRAYYDTKRTQGLTGRAALRSLKRRISDAIYRRLIADAAQRS

SEQ ID NO: 206204 - protein, 409 aa, unidentified
MQVVHERCAGLDVHKRTVVVCVLVPEGREVRTFGTMTRELMEMVDWLLGKRVTHVAMESSGVYWRPLFNLLEGRGVELLVVNARHVKAVPGRKTDVKDAEWLADLLRHGLLRASFVPDRSQRELRELVRYRKTLVEERARMVTRIQKVLEGANIKLSSVASNVVGKSGKAMLEQLAAGNEDAEAMAELALSNLRSKRGQLREALFGSMGEHQRFMLKSHLHLVEEMDAEIEAVNAQLGERMRPFESQIALLDQIPGIGTTSAQQILAEIGVDMSRFPTADHLASWARVCPGMNESGGKRHPASTGAGNPWLRSTLIEVALAAVKAGRRQPNFFSARYHRLSTRRGPKRAAMAVAHSLLIAIYNMLRNGSYFVDLGPTHYDQRRRNLIVKRSVRRLEDLGYKVSIEEAVA

SEQ ID NO: 206205 - protein, 341 aa, unidentified
MKITTIGIDLAKSVFQVHGVDVRGKAVLRKQLKRSQFLLFFSNLPPCLIGMEACGSAHHWARKLQGLGHTVKLIAPQYVKPYVKTNKNDAADAEAICEAVARPSMRFVAIKTVEQQAVLSEHRVRQAFVQARTAQANQIRGLLAEFGLAIPKGIANLPKQVPLILENPAYELPAVFRELMGGLLAHFHELDCQVDALGARIMAWHRDSAASRKLAQIPGIGPLGASALVSAIGDAKTFKNGRQLAAWLGLVPRHQGTGGKQTLLGISKRGDVYLRTLLIHGARSAILAAQRRSETDSWLAKLVKRRNPNVAAVALANKNARTVWALLAHDREFQSGYAAAA

SEQ ID NO: 206206 - protein, 369 aa, unidentified
MDERIKFFVGLDTHKDSISVAACDVSREPARFVGCVKPDVNGLLKILAKAGPPNQVSVVYEAGPTGFGLCRELRRRGYQCDIVAPSLIPKRAGERVKNDRRDCARLAELSRAGELRAIWIPDEAHEAMRDLCRAREDAVGMRLKARQQLKAFLLRHGRIYPGKTSWTKSHVRWVAEQCFEHLGERIALAEYQLAVQSSEERVQRLTSALEEAIKGWRFEPVVAALRALRGIDTVSATGLVAEIGDIERFASARQLMGYLGLVPSEHSSGNSVRRGSITKTGNGHARRLLTEAAWNYRFPARMSRTLQARSALLPEPVRNHAWKAQQRLCARYSQLSSRGLQANKVCVAVARELAGFVWAIARQAQHPVH

SEQ ID NO: 206207 - protein, 349 aa, unidentified
MVIVGIDAHKRTHTAVAIDEVGRKLGEKVTTATTTQVNLDLLRWADGFGTERRFAVEDCRHLSRRLEADLLAGGEELVRVPPKMMAHARDAARTYGKSDPIDALAVARAALREPNLPIARLDGPSRDLRLLVDHREDLVRDRVSHINRLRWHLHELDPSWDPSPRVLGRYKHLDAIAARLEGMDQMVARIARDLVGRIRELTVAANGFEREITQVVSALAPTLLLLPGVGALTAAKIVAETADVRRFRSKDAYARHNGTAPLPVWSGNRVRHRLSRTGNRQLNAAIHRIAITQMRIHDDAKIYLERRIGMGNTKTEALRALKRKLSDVVYRRLLADAEVTQVTSVDEAA

SEQ ID NO: 206208 - protein, 312 aa, unidentified
MNDKPAPVHAGLDIAKASLQLHLQGKSSDLPNTPSGHDQLVKRLAAIPGVHVICEATGGYERAVVAALHAAQTPVSVINPARVRQFARASGELAKTDPIDAAVLTAFGQAFTPAPAEPRTAVEIKLAALVTRRMQLIELRVAEEARAATCADPALRKLFTSWLPQMEKQITKVEALIEELLQEQTVLAGQVQRLDDITGVGRLTAVMVLATLSELGTLHRRQAAALAGLCPYNRDSGQWAGKRCIRGGRAEVRRALYMAALSASRSNHLLKPFYDRLIAAGKPAKVALTAVMRKLVVLMNHLLKNPNFSLAT

SEQ ID NO: 206209 - protein, 381 aa, unidentified
MSTVICIGIDVHKDTYSLCSYNPENGNVFYQTKCPSATENVERYMRKIQKEYPGCGVECCYEAGPTGYVLQRELARDGYKCVIMAPTTIVKPQGGVKVKNDQRDAESLSKALCFGQYKEVYVLDKKDEAVRNYTRMRDDRNDARKRARQQLLSFLLRMGKVYQGKSKWTNAHRKWLRGLRMEDEYDQLTLDECIAEEERLNGDVERFDAKIEEIAKDERYSGRVGKLRCFAGIETHTALSLVTEIGDFTRFSRADVFSSYLGLTPGQDSSGLRVKMTGITKAGNTHLRRLLTESANALRNASYPNKSKRLRLRQVGQSVDVIAYADKGSRRCKHVIRHLLGKGKPTNMAKTAAARELSCFIWGMMTGNILDPSIENASSTN

SEQ ID NO: 206210 - protein, 405 aa, unidentified
MDITPIHRRVIGLDVHQNKITACALIEQADGSVAVEQGEFGGFKRDRRALAAWVHGLAPDIVVMESTGIYWKSPYAALEKVGIAAWVVNARHVKNVPGRKTDISDAQWLATLARAGLVRASFIPPAEIRHLRLIARQRQKLGGMLAAEKNRLHKVLADAGIRLNVLLSDLHGQSARAMVKALLADQPIHAILERAGRLRASREDLFEALQPEELSAKHRFVLNEIMAHIQYLEATMARFEQQLLAGLAPWEPQMSLLETVPGIDRLGAAMLLVEIGTDMDSFGSAERLASWVGICPGNNESAGKRKSARTRKGNAWVRRLLCEFAQAASRTRCALKDKFSALAIRKGHKRSIVALAHKMLRIVYAMLANTTPYQDRSVDYEALMVGRNAPRWLKMLAKHGYIATA

SEQ ID NO: 206211 - protein, 360 aa, unidentified
MVEFTCVGLDVHARSVTGCGINRKTGEIFEKKMSHDPGIVIDWLEGLPQPVRVVYEAGPTGYGLARVLTTAGIDCLIAAPSKLLPAPGGRVKTDRRDARHLAELVAANLITQVCIPTPAQESARDLVRARDGARGDLMRARHRLGKLLLRHNMICEHKAWSGEHTKWLSKLQFDDPVLEQVFDNNWMVVHQAQTRRDMLDKQIAELIPRSEWEPIVTALGCLRGVSALTGFGLAVEIGDWSRFDGSSIGSFVGLVPSERSSGVSRRLGGVTKTGNKYVRRLLVEAAWHHRSAYRPAVSVELNKRWVKATPAMVARGDYANRRLHAQWVNLSGKGKKKPLVSAAVAREMAGFCWSLAMMAT

SEQ ID NO: 206212 - protein, 341 aa, unidentified
MTKSIYYVGIDIAADHFVASIYQSPQKPVITKEGFDNTFDGFNMLSAWLETQKINPTNCVTCMEATGVYSEGIAHFLVTQGYKVSVEPPLKVKRVFDPIGHKTDPVDSRQIAEYAYRYSDELRFWQPKDEIIEKIRHLLTAREQFTKQSVALQNAMGAYKRHVVQVNLITDAHSHILKELKKQIAEIDKELDRLIRKNPTISQMNNQLTSLPGYGLLLSSSLIAMTGAFCEISSYRTLSAFIGICPYQHQSGSSVYRSPHIRPFGPAYTRKLLMLAARSVVTHNADFKKYYLRKLAEGKAKKLVLNNVANKLIKIACALIKNNSRYESTYRSVNPMCLISA

SEQ ID NO: 206213 - protein, 346 aa, unidentified
MTIVEARAVTGGVDTHADMHVAAALDPIGGLLGVEEFPVSPAGYARLLGWLGGFGTVALVGIEGTGSYGAGLARHITAAGIRVVEVDRSDRQDRRRQGKSDPLDAVSAARAAQSGRASGAPKGRDGAVEAIRALMVAKRSARSERTQTINQARSLIVTGPDDLRARFAGHTVAALVSDLAALRPRPGAAVGYATRIALRELGRRAEFLDGQLARLDELIVPLVTARAPGLLTLHGVGPDTAALLLIAAGDHPARLRSEAAWAHLCAVAPIPASSGKVTRHRLNPGGNREANHALWRIVITRMSSHAPTRAYVERRSEQGLSKKEIIRCLKRYVAREVYRHLRAADG

SEQ ID NO: 206214 - protein, 345 aa, unidentified
MELHTIGIDLGKTVFHLVGLNLGGEVVVRKKFSRTQLLRFTANVHVGLIGMEACGGSHFLGRALREQRHEVRLIPAQYVKPYVKTNKSDYIDAEAIAEAVARPTMRFVPIKTDDQLDLQSLHRVRERWVMRRTAVINQIRGLLLERGITLRKGRHHVHAALPLILEDADAKLSGAVRMLLAQLKLDLDQLAARIDEADAVIRKTAHENEACRRLVAIPGIGPVTATALIAAIGNGGAFHKGREFAAWIGLVPREHSTGGQQKLLGISKRGNSYLRRLFVQGARAVLQQRTKQSSGLSAWLAQLTSRTHRNVVAVALANKLARIAWAVLAKNEPYRHPILADAAAA

SEQ ID NO: 206215 - protein, 339 aa, unidentified
MKYTPVGVDIAKHLIQIHFIDENTGEVVDKQLRGRDFLEYFSNREPCLIGMEACGGSQHWARELTKLGHKVRLLQARFVKAFVMGNKNDVMDARAIWMAVQQPGKEIAVKTEEQQSVLVLHRTRMQLVKFRTAQINALHGTLLEFGETIHKGRAAMEREFPEALERMKERLPPYLITVLENQYKRLNELDSLIEDIEKQLASVAKQNETCKRLLDIPGVGPLIATAAVATMGEASAFKSGREFAAYVGLVPKQTGSGGKIRLLGISKRGDTYLRTLFIHGARAAALLTKEPGPWITELKKRRPASVAIVAMANKLARTVWAIAAHDRKYDRNHVSIRPY

SEQ ID NO: 206216 - protein, 320 aa, unidentified
MMYIGIDVSKDSFVAAYPRKNGYITKTFKNDTKGVRNFITSLPENCHCVMEATGNYSMLLLYLLQQAGVPASMENPQKIKHFSRAMMSVTKTDEIDAQIIAVYGEKMNPEPYKIPAESILLLKQKRTVLRQLKKHLTATKNLQQALAVLPKQDLASKRTVEKTIKFLERQIAELEDEITNLSNKEYARQMSLLTTIKGISDTIASALIVATGGFTYFSNAKQISRYLGLCPTYQQSGTSVNVKGHINRNGDPHLRGQLYVAALVCIRYNKACKDTYENLRAKGKSAKVALIAIANKLIRQAFAVVTKNQPYVDGFVSSIA

SEQ ID NO: 206217 - protein, 412 aa, unidentified
MQTLIERGCGLDVHQATVVACLLMVHKDGKVQKQMRTFGTTTRELVGLREWLLSGGCTHVAMESTGVYWKPIYAILEGALEIVVANAQHIKKVPGRKTDVKDAEWIADLLCHGLLRSSFVPPKPIRELRDLMRYRRKLVESQAAERNRLLKVLETANIKLANVATDVFGMSGRLMLRALIAGKASPQEMAELAKGLLRKKIPQLELALEGKLEEHHRFLLELQLQRLEAAEKDLVVLEERIRQMLEPYAAQLSLLDEIPGVDWTLAAVIIAELGVDMSVFGSVSQLASWAGVCPGNNESAGKRKSSRIPSGNVYLKSGLVEAANAAARAKGTYLRDKFFRLKARRGYKRAVVAIAHKILVAIYHMLSEQVSYNDLGDLYLDKLNKNHLTRNLVHRLERLGYAVTLTLQQKAA

SEQ ID NO: 206218 - protein, 384 aa, unidentified
MEQSSTLFVGLDVHKDSIDIATADAPREGEVRHVGSIGGDLVSLDKSLRRLISRGHRLHVVYEAGPCGFVIWRHLTAQGLHCEVVAPSSIPRPPGERVKTDRRDAMLLAKLARNNDLKAVRVPDAVDEAVRDLVRAREDAVRECRNARHRLKALLLRNGIGYSGRSAWTAAHLRWLAKVTLVHAAQQIAFQEYLHAITEATARIARLEQALRDALPEWGLTPVVQALQAMRGVQLIAAMTLVAELQDFLRFESPRQLMAYVGLVPSEHSSGPKRRQGAITKAGNSAARRVLVEVAWHYQHNARVSPIIAMRHDGLPQTVTDIAWKAQLRLTAKFKRLLARRVMKTKAIVAVARELAGFIWAIGREVQTSGWRGNKAPSASGAPA

SEQ ID NO: 206219 - protein, 420 aa, unidentified
MKPWPEITHYAGFDWAKDHHEVVIVDSKGEIVADFVFDHSLEGWQRMVKETSAFANLAVAIETSQGAAVDQLLQRQYTVYPIHAVAAQSYRQRKAPSGTKTDHLDAWGLADALRVDGHGWKVLQPMDPLTQQLRLLCRDEVALIQQRTTLVNQLQQALAEYYPAALEAFDDWTDAFTWEFVLAFPTPQALVKAGKRRWEKFLHTHKLWRPETAQRRLKLFSQADQFQASDPIVRAKSQLAVSLARLLRTLREQLELYRKEIEALFKNHPDHDLFGSLPGAKKVLAPRLLAAIGNNPERYGSHEVLQCIAGTAPVSYQSGKINKVRVRWACDKFLRHTVHLWADCFRKASAWGQAYYEKKRAEGMSHACSLRCLGQRLLKIVFRMLKDKKPYDAEFHACNQQKHGSWVLKLVNPPAPKTSE

SEQ ID NO: 206220 - protein, 346 aa, unidentified
MKVKTIGIDLAKETFGLHGVDGRGRVVVHKRITRKHLVGFLVKVEPCLVGMEACGSAHYWGREIEKLGHTVRLMSPQFVVPYRKGNKNDPNDAAAICEAVTRPSMRFVPIKCEEQQDLQALHRVREQLIKNRTALANQIRGLLRERGIVVAQAIARLRAALPVILEDQSNRLSALMRELLGEMADRLRMLDDHLRQYDRHIERLCQQDERCRRLVKVEGVGPLVATALVAAIGNARQFKSGRELSAWLGLVPRQHSSGQRTVLLGISKRGDRYLRTLLIHGARAAARVAERKRDARSIWLSRLKLRGGPNVAAVALANKNARVMWALLARGDSYRVRTSMHSAAAA

SEQ ID NO: 206221 - protein, 369 aa, unidentified
MVENTLFLGLDVNKKTISVATVDGSARAEVRFYGTIENTPDAIRLLCKKLSKDGRRVHACYEAGPCGYNVQRHLTRLGHRCDVVAPSRIPRKAGDKVKTDRRDAMTLAQTLRAGQLTEVWVPDQAHEAMRDLVRLRSQAMRDLRKTRQHLLSFLLRHERISPFGHWTKMHRRWLGELKFAHPAQHLALEEMLHRIERAEELCERLKQAIGELVPQWSLAPVVQALQALRGISLITAAVLVAEIGSFERFDNPRQLMAYLGLNPSEHSSGATVRRGAITKTGNALARTSLVEAAWTYRFPARITQIIRDRLKALPEPIRAVVWKAQVRLSARYRALIARGKSAPIAIVAVARELVGFIWAIARMVEPKFT

SEQ ID NO: 206222 - protein, 367 aa, unidentified
MKKLTTTMMQRTLNKQDEHLTIGLDLGDRSSCYCVLDEAGEVLLEQKVSTTPTTMKEIFGAMPGSRIALETGTHSPWVSRLLKELGHEPIVAHARSVRLIGESRRKDDRLDARTLARLVRIDPELLCPVKHRSAEAQADLTVIRARAALVRTRTMLVNAARGLTKSYGERLRGCNARGMNPKAAQDLSPELKGALEPLMREIESVSERICEYDQLLESMARNRYPEAERLKQIKGVGTLIALTYMLTLEDPHRFRKSRDAACYVGLQPGRRNSGQSEPQMHISKEGDPYLRSLLVQAAHHVLGPWGVDSDLRRWGMRLAEHGGKRGKKRAVIAVARKLAVLLHRLWVSGDVYVPLWPSGRATLPAVA

SEQ ID NO: 206223 - protein, 388 aa, unidentified
MQTVADRPEAPTAIRTDLGAIFVSLELSRSTWLITSLSPGGGEKMSKQVVRGGDVAGLLERFARLREKARARTGKVFPFVVIQEAGLDGFWIDRALQNEGIESHVVDPASIATSRRRRRAKTDGIDGEALVRALLAFKRGEPRVCAMVKAPTPEEEDRRRLCRERKVLIVERVRHVNRVKGLLFSQGISGYEPLRRDRRQRLDTLQTGDGRLLPDHLKAQVRRELDRLELLLKQIKAVEAERDVLLAAQRVAASAPAAMLLDIKGIGPEFAAILWSEGLFRHFDNRRQVASYAGLAPTPWQSGSVDREQGVSKAGNPRLRTTLIQLAWLWLRHQPHSALALWFEERVRRNGGRLKKTTIVALARKLLVALWKYVTAGVVIEGAVMKRT

SEQ ID NO: 206224 - protein, 406 aa, unidentified
MELIYARCAGLDVHKKSVVAHVKTPEGAAAQTFGTTTGAILELADWLAQKQVTHVAMESTGPYWKPIWNLLEAGFDVTLVNPQHIKAVPGRKTDMKDAEWICDLHRHGLLARSYVPERPQRELRELVRYRKSLIEERAREVNRVQKTLEGANVKLGSVASNVMGVSGRAILEQLANGVEDPEQLVQLAKGRLRNKTADLTEALRGLMQPHQRFMLREQLLHVSDLEARIEEVEQEIQTRLDPFEDAAARLMTIPGVGRRIAEVIVVEVGPDASHFASDRHLASWAGLCPGNRESAGKRLGSRSRQGNSHLKQAMVEAAWSASHTSTYLAAQYRRLATRLKGKKALVAVAHSLITIVYHVLHDGETYIDLGQDYFEHQDRERLERQAVRRLQALGYDVALTRRDPAA

SEQ ID NO: 206225 - protein, 454 aa, unidentified
MSRRQAKQSVTVRCVHANAAGLDLSQDEIWAAVPDDRTATPVRKFGTFTPDLLALADWLTSCHIDSVAMEATGVLWIPVYEILETKGFQVFLVNARHVKNVPGRKSDVQDCQWIQYLHSVGLLSRSFRPDAAMATLRAYLRHRATLLEHRAAHIQHMQKALQQMNVQLTQVLSDITGVTGLAIIRSIVAGERDPQHLAQFRDRRCASAEAEITKALTGNYRPEHVFALKQALALYDVYTSSVSECDATIEQYMLSLAPEGEQLPPLPPSTKRDSNSKNAPSYDARTLLYRLTGVDLVAITGLNQSTVQTILSETGSDINRWPTVKHFCSWLAVAPHNDISGGKVLRSRTLKARNRAGQAFRLAAQAASRSPRSVFGAFYRRIKARLGAEQAIVATAHKIARTFYYIMKNRTAFHDIGAAEYDRQAHERELVHLRQRANKLGFALVPVSPAAAAG

SEQ ID NO: 206226 - protein, 625 aa, unidentified
MTSMPESARKSQPPVVFAGVDTHKELHVAAVITPGETVLATRSFPTTRAGYRAMLTWIGDHGTLARIGIEGTGSYGAGLTRHLAKGGVTVPEVDRPDRSDRRREGRDDDLDAINAARAALHHRRTTIPKSKDGAVESLRILRVTLAHAVRERRSALQLLRMSIISAPEELRDQVRHLTRMRLIRTLAAWRPDVSNATDPTTAYRVSLKSLERRYLELSDEIADLDELINPIVEALAPKLLERVGIGIEIAGQLLVTAGDNLDRMKSEAAFAMLCGVSPLPASSGMTQRHRLNRGGDRQANRALHLAAISRLRLDLRTRTYVAKKTAEGHRCIFRICARTAAYDGQESGGMVTPRERMQMPGRPRQDNGQVQGAAASLLNGLAVLEAFSVQKPVLGVTEVAQRVGLHKSTVSRILSGLTEAGYVQRDEETGRYRLGLGLLALSGPLLADLDVRRAAVPYLEQLTESTQETSAISVWNGHEAIVVEQVASPHQVKHTATIGTRYNKFESSSVRVFLAELAPSLVTELIGSGQILRTAGDGLPLDHTTHLQEVALQGYAVNDGSTAEEEFGVSAPVRDYRGKVVGCITAAAPFSRVHKHATRDTLVQAVQHASSEVSTRLGWSGSLPG

SEQ ID NO: 206227 - protein, 326 aa, unidentified
MTETNIGIDISKDHLDVHRLPGDERRRFDNSKAGHKALIHWIGETPARVVYEPTGYYHRALERALAAAGMPIAKVNPRQARRFAEATGNLAKTDALDAAMLTRMGAVLSLQARPVPSGIISDLRDLRTARNALIKDQVAAQTRAKAITLPLLKRQNAARLKQIDAQREAVDAEINALIQGDPDLAQRFAILCSIPGIAEVSAAMLLIEMPELGSLDEKQVAALAGLAPIARQSGNWKGKAFIRGGRRQVRQALYMPALVAIRFNADFKAKYEQLIKAGKAPKQAITAIMRKLIILANALLKKGRKWQTQLAKAGHHRHHEKAHHPR

SEQ ID NO: 206228 - protein, 409 aa, unidentified
MRIIGLDIHRAFAEAVAWEDGKLRRLGRVDMRRDLLDAFAAKLSPSDIVVIEATGNASSAAAVVAPHVKKVVIANPKQVRIIAYAKIKTDTIDAGVLAQLYASGFLPEVWIPDEPTQALRRQVTRRNQIVRQRSRLKNIIQSILHSHLIPSCPHADLCGAKGRTWLSEQVVPEDERLAIDRHLREFDRLGDDLEVIERDLARSTLEDEGVKRLMTIPGVDMTVALAMKAAIGDVSRFEEPQKLVSYLGLNPSVRQSGPGPAYHGRITKQGRGHARGMLVEAAWAAARAPGPLRAFFLRVRARRGQHVAAVATARKLAVVIWHLLMKGESYAWARPSLHAKKLRDVELKAGSKAVRGQKGAAHAYNIKSHREKERRWVEQAETAYARFVSGWNPRGPKRVRTGAANEKRL

SEQ ID NO: 206229 - protein, 343 aa, unidentified
MKLHVLGIDLGKTVFHLVGLDSTGKVVIRKRCSRTQLLAFTANLQVQLIGMEACSGAHFLGRALREQGHAVRLMPAQYVKPYVQTNKSDYLDAEAIAEAVQRPRMRFVPIKTEEQLDLQALHRVRERWVMRRTAVVNQIRSLLLERGLTLPKGRSHLDEQLPRILEDAELNLSDSFRVLLAQLKLELEQLAARIEEMDRVIQKTARENEACQRLTEIPGVGPVTATALIAAVGNASAFGKGRNLSAWMGIVPGEYSTGGKQKLLGISKRGNKYLRRLFIQGARSVLQQRHKQAPGLSRWLAQLLGRTHQNVVVVALANKLVRMAWAVLYKNERYRAPVFAGTT

SEQ ID NO: 206230 - protein, 356 aa, unidentified
MEGERFVGIDLGKRTYVVCAISRGGSLEQWHGKTDGVGRDHLAARLRCGDVVGVEAGSTAFHIARRMQTVHGVRVVVLNPGKLAVIYASMKKTDKEDALKIARLLETMREEYLPIVPLPTEAEEDMRRLAGSQIFLKKERTRLINRLHALFVGAGITTITKKDLARDESRRSMLEMLFGVYEEVAGHLVVILAEVEQQIAKLDQSIRNALIDRREQAALLMSIPGVGPVATATFLGYVGDGSRFETASQVSYYAGLVPRLDISGETQRLGHITKSGNPAIRRAMIQAAWTAVRSPLGNPFREVFERIAATRGRGIAIVAVGRRILELMYTLITRGEYYKYSSAAGRQRKLRRYKVA

SEQ ID NO: 206231 - protein, 392 aa, unidentified
MYIVGIDIGKNHHEASIVSPEGKQIGRSLRFATTHKGADSLMSFIFKNIGNSPCVFGMEATGHYWYPIYSFLKAKGYTIYVINPIQSDSLRKMYIRQTKNDSIDSFLIAEVIRFGQFGTTSMADENILAMRQLCRYRDSVISSRTEIKLRIGTIMEQIFPEYEKQFSSLWVSTSMGILEKYLTPENIENAPIDELFEIIKDKSHNRLTRAKAISIKEAAADTFGIKIAQDAFSFQLKQLIDRMNFLDKQIEALDIEIMKYYEQFDCYLHTIPGIGIIGAATILAEIGDISRFKNSSALVAFAGIDPTVRQSGEFNSTHNHMSKRGSPYLRHAIFLVATTCSFHNSPLNAYYKKKRDQGKHHLTATGAVARKLTTVIYAVLRDSKPYEPKKFC

SEQ ID NO: 206232 - protein, 464 aa, unidentified
MQENRDKNSKLDNQAGIEGLPVIRPDVAGIDLGSETHWVCAPNVDRTGLEVETFGATTPELERMAEWLKERRIESVAMESTGVYWIAPHEVLERHGLEVVLVNTRELARVPGRKKTDRVDCRWTQRLHSCGLLTGSFRPSEQVCMLRTLVRDKGNLVAEAGDWLRRMQKSLDQMNVRVHRAVSDIDGVTGMRIVRAIVAGERKAHELAKLRDRRCGKSEEEIAEQLSGHWREDHLFSLRQALKMYDAIQERIAEYEREILGKLAKMEREECHGQEPPKLNNPQKAKGIKKRGEEPLRQALYRISGVDLTGIDAIGVETVQVVLSEYGPDLSRFPTEKQFVSHVKLAPHQPMSGGKPVKKKKKRGSASTRVAAALRMAALSLRHSETALGAYYRQISRRIGGDVAVFATARKLATLIYRLLRWGQPYVDEGAAAYEKRYQQARIQRLVAMVKDLGYELTPNTSKP

SEQ ID NO: 206233 - protein, 386 aa, unidentified
MLIIGCDYHPGVQQIAFMDTETGEFGERRLEHGDGEAEKFYRDLRQAGISVRVGMEATGHARWFERLLEELHFELWIGDPLEIRATRVRKQKTDRHDAQLLLKLLLEDRFPRIWVASWENRDLRQLLWHRHRLVQMRTRIMNQLQAVALNEGVRRKKRLWGQAGRAQLESFVLAPWASRRRQELLELLDRLNPSIRELNAAVEQEAARRPEVQRLMTHPGVGSLTALAFVLIVGTPQRFACGKQIASYVGLVPTEESSGGRRRLGHISKQGNSLLRFLLVEAAQATVRSDPDWRRKFLHLAMRRERRIAKVAMARKLAVRLYWMWRKEWDYEQVKRFGSHAGQLGKFSGCVVDHRDNDWASRSPQKGEFEEVIMIEVRIEEMVGSN

SEQ ID NO: 206234 - protein, 296 aa, unidentified
MKKISTIGLDIAKHVFQIHGVDDSGEVVVRRRLRRSEVLNFFARLPLALVGLEACATAHHWARELGKLGHEVRLMPAQYVKAYVKRQKNDATDAEAICEAVRRPSMRFVPVKSAEQQAALMLHRSRDMLVRQRTMLINALRGHLAEFGLIEARGPSKIAGLVALIEGEDESIPQAARRALAPLVAQLRSTKEQIEMLEAQILAWHKESEVSLRLATIPGIGPIIASAIAATVPDAKAFSSARQLAAWIGLVPRQRSTGGKPRLGRISKQGDGYLRRLLIIGAQSVLRWSRPAKSSA

SEQ ID NO: 206235 - protein, 442 aa, unidentified
MKSLSVVDANAAAIDVGSEKLHVSVAGDVPKVFGTFTGELETLSQWLKSNQVRSVAMEATGVYWLYLYEVLEAAGLEVVMVNGRHVQNVPGRKTDMSDCQWLATLHAHGLLRGGFVPPAGIRRLQDYQRLRTDHIIGAGSQVQKMQQALERMNIKFHDVISDLTGVSGLKVVRAIIHGQRNPALLLALCDVQIQKKKATAVMESLRGCWKDEQLFALSQALELWETFQQKIVACDRQIEKLLHELVGPVPPADGTGSGPLKLAPAKDIGKNTPAIERFQELLARLCGGRDATQIPGLSLYLVLQLVSEVGTDMARWDTEKHFTSWLGLAGGRKQSGKRKGSVKAHRNRAGRLFCAAARALAQSIDKALGGFYRRLRGRVGGLAANVALARKLALLFYRLLRYGAEYVDNGLKKYEAKVLETETRLLRKLAKKQGFVLLPAAQ

SEQ ID NO: 206236 - protein, 390 aa, unidentified
MDETKQAKIVIGLDAHPYMFSAAALSGSNALHAQIEWSVDRISLNSLERILKKRTNPGDIVVLEASGNTFALAERLLRIGLHPIVLESQSVGKVGKTYCATDKTDAIKIARVYLSGLAHEVWLPNAKASEQRELFFAYRNAVGDSVRARNRIWAFLNQQCRQRPRGLRLSSPSALSGLLALHPWTPTQKWLLSEAVEAFQTAEARRKRMRSRIAEEVANDPNILKMTRLLGVRDKVAFALAAFIGDINRFENPKKLVAFFGLNPKVNRSGISGGNGSLSGYGRADVRALLIQAAQSIMRHGQGDTHKWAVALKMRKGTSIAVAALARKLVTSIWYLLKGFFTPMTEVTAHIQIKMHKIATEIGKSRLRELGYKKLVEFEAEKIKLLLETA

SEQ ID NO: 206237 - protein, 412 aa, unidentified
MSYERNAVGIDVSNGRSTVSVLRPFGEVVLLPFEVKHTTEELSALADKLTAISGETRVVMEHTGRYYESIEKVLHEKGLFVSSVNPLLIKQYGNNSLRNVKTDKADSMKIARYALDNWADLRDYTPMDKIRYDLKTLHRQFNLASKQKTATNNNLVSLTEQVFPGIRKIFESPVRRDGTQKWVDFIFTFWHADCVRKHSLKAFTERYQKWCKRHGYNFNAVKAEEVYAHAKTVVVLIPKDSITKTIVQEAARQLTSISRSVETYRAEMNRLASMLPEYEVVMKMYGAGESTGPQLMAEIGDVTRFERKQSLVAFAGVDPVPKDSGDKTSKSNKSSKRGSPYLRKTLFIVMSTILQNMPEDEPVYQFLDKKRAEGKPYYVYMTAGANKFLRRYYAKVMEYLKEKEKAETDSTQ

SEQ ID NO: 206238 - protein, 338 aa, unidentified
MVVIGIDPHKGSHTAVAIDEGEHKLDEVRVRADRRQLERLTTWAKSFPERSWAIESANGLGALLSQQLVGVGEEVFDVPPTLSARVRVLASGKSQKNDPNDAFSVAIAALRSDRLRPVVAEDHIAVLRLLWNRHKNLTSHHTQAVCRLHALLASIVPGGTRRRLSAEKAAAVLSGFRAKTAVEKARRDQAQLLVGDVRRLDAHLKASKATIVEAVAKVPSGLGELSGVGPVATCIILAHSGDVRRFANEDNYASYNATAPIEASSGPRKRHRLNPRGNRQLNHAMHIIAFSQLSHPGPGRDYYERKVAEGKTQKEAVRALKRQISDVVYRQLVRDTQR

SEQ ID NO: 206239 - protein, 312 aa, unidentified
MEAQNIEFKQIVARGCGIDVHKSVLVATIDGEGLKRETREFSAFTSSITEMKEWLVENKITHVAMESTGVYWKPVFNILEDSPLKVWVVNARHIKYVPGHKTDKKDSKWICKLLLAGLLKPSFIPPKEQRELRDLTRYRKKLAQQISAEKNRIVRILESCNIKLSSVLSDTCGVVATKLINILCKGEKVTMQEIDQVYHKKLQCTKEELLEACNGCITPHNVYLIQLVQDNIEAIQKSVEKLNLRIKAMLLSYEDVCELLKGIPGLDTKTIEDLIAEIGLDMSVFPTEKHISSWAGISPGNYESAGKKKAEE

SEQ ID NO: 206240 - protein, 460 aa, unidentified
MSRKSKRTKGIEEARPFAGMSRVNEDAAGVDIGAIEIVACVAGDENTQIVKAFGNYTVDLHSIGQWLKEHNVKTVAMESTGVYWIPLFEVLESMGFKCLLISSRSLRRVPGRKSDIIDAQWIQTLHSYGLLESSFRPQADLVALRTLLRHRAQLLEHRAPHILHMQKCMLQMNVQLSQALSDITGETGMAIMRAIVAGERDPEKLAAYRDRNCKKSAEEIGQALTGTWRAEHLFVLKQSLEMYDFYTQQVEICDAEIDRMYALTRPDWDGGELKPPSEKQRNSRSKNAPKNKEEIRQHLKRISGVDVSAVDGIGIGVAQTVIVECGTDLSQFPKEGNYCSWLGLAPKHEISGGKVLKNKTLKTKNRAGQAFRMAAQSVKKSDCVFGMMFRRFRSHMDNRQATVATAHAIARVVYRMLKYKVEYESIDVTEYEKKYEEQQIKYVTKKAAKLGFQLVPVVPA

SEQ ID NO: 206241 - protein, 419 aa, unidentified
MSNSNISRRLAQVKSGTLHAGVDLALESNVIIVLDEKARQCDRFRFPQDIDGYKYMHERLKKVCQKQGASQVVIAMEPTNYFWKLLANWLEQNQVDYHLVNAYTVNKHREGDQIDRSKDDPRDAFVIGDLSRTGKYTETQLPRGYYAELREYATLYYQTMKNVHRAKSILWGLLGQVFPELSRAFKSFSGATITALLKTCPAAVSIRALSEEDFIAKVTTAFSGKRLCRSKLRQAYRLARTSIGLVDGIQANALAIQIHLSHLETLQKEIVQIITALKSCLQQVEPAQYLLSVKGLNTLSVALILAEIGDPDRYRSASQLVKMAGIQPVPNSSGRKQRSSTPMSHQGRPGLRSTLYFACLRLTQVDRRFQEVYHYLQNRTKNPLTKMQALGVLMNKLLHILWALMHQKIFYNPNFFSAV

SEQ ID NO: 206242 - protein, 342 aa, unidentified
MEQYVALDVSLKEISVCIVDSNGEVVFEGKTAAEPAILVELIRSKAPQVKRVGLETGATSPWLFHALASAGLPVVCMDARHAHAALSMRPTKSDRSDARGLADMLRMGWYREVHAKSVTSHERRTILGARHQLVTMRSELDAQIRGILKTFGLILGTGNKDTLIQRAEKLAAGHPVMSGLVAKLAEVRRHVTSQIAAIDRDIRHLVHTEPTLKRLMSVPGVGPITALAFLSAVDDPRRFKHARDVGPYLGLTPTRYQSGETDRQGRISKCGDTFTRTCLYEAAHVLLTRVQRFSPLKAWGMRLAKRIGGRKARIAVARKIAVILHCIWTDGTEFWWTRDKAA

SEQ ID NO: 206243 - protein, 404 aa, unidentified
MDRQRTVAGLDVHKDSIYLCVMSYDEAIIFQKTYGTLTPDLRQMCADMVSHGVTEAAMESTATYWVPVWNALCDSMSLKLVNPFFIKQLPGRKSDVRDAQWIAECLLKNLIKGSFVPDAVAQDMRKYNRRIFDLNDDMVYNTNKLDAALQRCGFRLSNYVAQVKGKSYQSCIRAIVKGVTDPTELVKLVHGKTINKHGKGVITAAVTADFHQADIDLIRQYKEMIDIIERQIKECQSALTALCKEHFPTQYERLQTIPGVKERAATAIIAETGADMGHFQKSTNLVGWCGLKPRNDESNRKIKSNKITHGNKFLRKILIEIAWTASRTRNCFFSNFSYVQCTQKRKTKMKVQVAIARKILVAVWHMLSNNEDFIDVYLKRLEKEAEERRLIQESIQQIELSMAN

SEQ ID NO: 206244 - protein, 339 aa, unidentified
MQQDVVTVGVDLAKNVFQVHAIGSDGKVLVRRQLRRGEVLKFFSSLPPCLVGMEACASAHHWGRELLALGHDVRLMPPAYVKPYVKRGKTDAADAEAICEAVTRPTMRFVAVKSVDQQAVLMLHKTRDLLVRQRTALINALRAHLSEYGIVTSKGPGGVTALMKLLHEGQEKLPAYARSALHTIGAQLRSLASEVDRLETQILAWHRADDTSRRLATIPGIGPITASAIAAAVPDASLFRSGRQFAAWLGLTPRPHSSGGKERLGGISKQGDGYLRKLLVVGATAVMRMARKDASRQPWLARLLERKPVKIATVGLANKTARIAWAVMARKEVYAAAAA

SEQ ID NO: 206245 - protein, 370 aa, unidentified
MGKHSEVFVAFDVAKTKHAVAIAEGGRTGEVRFLGDVENSPLPIERTIKRLADRYGRLHVCFEAGPTGYGLYRQVKALGHDCMVVAPALIPKRSGERIKTNRRDAVTLARLHRAGELTGVWAPDAAHEAVRDLVRAREAAADDLRRKRQQLLSFLLRHGRIYSGGGHWTLAHRRWLAGQTFEHAAQQIVFQEAIDAIEDALQRLRRLEKQLALIVPDWSMAPVVEAYQAMRGASFLVAVTFAAEIGDVRRFATPRQLMSFLGLVPAESSTGDTIRRKSLTLAGNRRARRALVEAAWTYRYPARVSETLRARLEGLPKRVRDIAWKAQVRLCARYRRLSATGKKLPIVVAAIAREMAAFLWAIGREVEPAA

SEQ ID NO: 206246 - protein, 349 aa, unidentified
MQINRMGLDIAKSIFQVHGVDKRGEPVVRRRLKRREVVPFFSKLSPCLVGMEAGRGAQYWARQLLQLGHEVRIMAAQYVRPYLKGGKNDANDAEAICEAVGRPSMRFVPIKSSDQQAIQALHRVRERLVEERTAKGNQIRGFLAEEGIVVPVGIGRLRRLLPRVLEDAENGLSALLREVLAGLYAQLCQLEQWVSGAEARIRRLFNETQACQRLATMTGVGPIIATALVAAVGDPKVFKNGRQFSAWLGLVPRQHSSGGRTQLGGITKRGDTYSRGNFSSKALVRHSRLLPRKRIHKASGPCGFYNGDTSTSRPSLWRTRWRGSRGVSCGETKTIGMHSPERNTHSVSF

SEQ ID NO: 206247 - protein, 309 aa, unidentified
MKHNRKVYCGVDVSKLHLDAFIDGKTKRFANTVQGVDSLMTHAQGVHFVFESTGGYERMAAWMLMAANKPASIINPALVRHYALSVGQRAKTDRIDARMITAYASHVHPKPDQKPSKCQRMLCTYVDRRQQLTEIHTAEQNRLDTAGDPAFRRLVQKHLRWIEKEITALEEKIARTIREDPHMNEASRRIQRIQGLGKVCASTLLAHLPEIGTLSRQEAAALAGLAPYCRDSGTTCFRRHIQGGRKRLRACLYMAAVCAIQHNPVMKEFYRRLTEENHRPAKVALTAVMRKLLIAANSAVKNPDFSLAG

SEQ ID NO: 206248 - protein, 351 aa, unidentified
MIVIGADTHKATHALVAVDAGTGRIRGDREIKAEEPGHLAAVRWARELDDDRAWAIEDCRHVSRRFEQALLAAGERVVRVPPHRMGASRKGEREPGKSDEIDALAVARAVVKDGVECFPVAYLNDQSMEIRLLFDHRADLVAERTRIVNRLRWHLLELSPELERSCKRGSLSKSRVLDRVEREQVRELRRLSREIDALHCELGALVRAHRPQLLAELGCGALTAAILIGRTAGNERFRSEASFALQSGTAPIPCSSGQRIQHRLNRGGDRHLNHALHIIAITRAQRDPATKEYLDRKEAEGKTPKGALRALKRHLARHFHRLLAEPAADQQRAAVDQNSTGVAPSPMVCIS

SEQ ID NO: 206249 - protein, 391 aa, unidentified
MSKLNDLSRSLVPLNPDTTLIAVIEMSQSSWLVAGIVPGIERQPLKKLDVDKDALLKLLHRWRDEAVRAGRDITRIAVAYEAGRDGFWLARWLRAQDIEAHVIHASSVAVSREHRRAKTDRLDTELLKRSFLGWLRGERDHCNVVAIPTLEQEDAKRPNRERESLVAEHSRIVNRMKSVFALLGIRGFNPKLKSAADRLQSLRTPEGEPIPPHAIAALKRDMERRQLIRDQIRQIEQTRLESLQLTPKTGPHAMVCLLASVVGLGVGTADMLVHEVFARNMRDRRAVARYSGLTGSPDESGAKRREKGLSRSGNARVRRGMVELAWRFLRFQKDSALAQWFRTRTEHAHNTRKTMIVAMARKLIIALWHFAKEGVVPDGVVLRSPNLRPAR

SEQ ID NO: 206250 - protein, 420 aa, unidentified
MELLHERCAGLDIGKKDLKACVRTPGGKRSRRQEVRTFATTTNALLELRDWLVEQKVTLVVMEATGDYWRGAFYLLEDCLDVILVNAAHAKGLPGRKTDVCDAAWLCQMGECGLLKASFVPPEPIRQLRDLTRYRAALTSERTREAQRLEKELEDAGIKLSAVATDILGVSGRAMLAALIAGERDEKKLAELAKARMRSKIPQLIEALNGHFGDHHAFLCRLHLERIDQLSAAIEQLSARIEEKMRPFARQRELLATIPGVGQTTAEVIIAETGGDMSRFRTAANLASWAGVCPGHHESAGKRKSGKTRHGNRWLSAALGTAAMAASRTKDTTYLGARYRRLVPRLGKKKAIVAVEHSILTAVWHMLTDNVDYQDLGGDYFTRRDPVAAMRRITRQANALGFTVRFDPIETPHRRLATAA

SEQ ID NO: 206251 - protein, 323 aa, unidentified
MCKVIGIDISKASFDVGYRRKDEKFSFFIFGNNTKGFNKFRKLINNGDHCVMEATGPYYLFLAQYLFEQGIKVSVVNPLQIKHFVRMRMVRAKTDKKDAMMIALYGQSEQPELWQPNEKYIMQLQQNHTAIEGLQKQSTMLNNQLEAFSQIPDCDKAVMRELRALLKTIKMKIAKLETRMLEIVKEHYGTAFSSLQTIPGIGPKTAIILIAITNNFKKFDDIKKLSAYVGLAPRVYESGTSVKGKGHITKMGNKYLRKLLYLCAWTAKKYNNQCIAMYERLSEKGKPERVIKIAIANKLLRQAFAIGTTLGSYDKKYEKSLVF

SEQ ID NO: 206252 - protein, 363 aa, unidentified
MFQLSTRQKESEMNATTVAVDLAKNVFELALSDAQWRVIGRERLTRSQFERWFANRQVKLVVMEACGSAHHWARTFRARGIEVRLLPAQYVRAYVKRNKTDAADAVALLEAARASDIKPVAVKSVEQQALQALHRTRSAWMSTRTRRINTLRGFCREFGLVVPEGAVRGIAQIARYLADEHSGLPAILRGSMRLLLEEIRLMEARIGQLEQELSLLAQQSPACQVLTSVPGIGLLTSTAMVAAVGDPRSFDSGRRYASFLGLTPREFSSGDHRYLGRISKRGDRYIRMLLTHGARSILRSATVAKRVGRQIDRLKTWALAVQARTNHNKATCALANKLARIAWAVWSKHENYRGEPAPTVPSA

SEQ ID NO: 206253 - protein, 404 aa, unidentified
MKEFSAEAIRLETASALETVRQVEAKSGYPAYIGLDVHKESIVVAVARAGREAPESRREIANKAKSVAKLVARLHQEFGGEVLLFCYEAGPCGYGLYRQLLGLGHDCQVVAPSQIPRKPAERIKTDRRDACKLARALRSGDLTAVWVPDEEQEAMRDLTRARADFKAQEHKARQQLNGYVLRHGHGWPSNRTRWTKTHYNWLEGLRFAHDWQQVVLQEYIDAVKAASQRVADITAQMERVLPQWSLAPVVASLVALRGIDKLAAMVLLAELGDLSRFDSPSQLMSFLGLVPSEHSSGGRRRQGAITKTGNGHARRMLVESAWSYRFPARQTAHLKRKAAGASEEAKRIAWKGQKRLCGRYRTLSQAGKNTKVVCVAIARELVGFVWDIACREMVKVNVQAPAAR

SEQ ID NO: 206254 - protein, 335 aa, unidentified
MRYVGLDVHYRSSTYCILEENGREVQCETIRGHWPKLLDRLRTVEGPWTICFEATCGYGYLYRELSRMAARVVVAHPGQLRLIFRSKRKNDRVDARKLAKLLYLGEVPEAYVPGEEVQSWRELIEHRRRMVDRQTTCKNPIRSLLRSHGKIASKGLWTKKGLAWLRQEEMPTAAASLKRDLLLDELTEAKRRVRTVTQALNEIGYSHPAVILLRTIPGVGIRTAETVAAYMDNARRFARSSQVGAYFGLVPCQDASAGVNRLGHITRQGPGTARKYLVEAAWQGVYRSPAIRAYFERVLHGRPERRKIALVATAHYLLRCMHAMLVSGKPWHEAA

SEQ ID NO: 206255 - protein, 407 aa, unidentified
MRVIGLDVHRSFAQVSILESGLAKDHGRFAMDREAVLAFANTLTKHDEVVLEATGNTSAIVRLLSPFVRRVAIANPLQVRAIAWAKVKTDKIDAATLAKLHAAGFLPEVWMPTEEVELKRRCIAERAQLVSQMTRLKNRVQSVLHANLIPREVGNLFTKKGRARLEQLALPTDQKRLVMRHLDEVDRLAAELALIDKDLAQRALEDPDVRRLMTIGGVNSIVAASVLAAIGDITRFSSPEKLVSYLGLNPSVHQSGDRPAFHGHITRQGRSHARAMLVEAAWSLAPAPGPLRAFFQRISAKRGKQVAAVATARKLAVLVWHMLTKKEDYAWTRPALLQWKVRELELKAGHASRRGGSKPGPARDYSLKTVRDKERSWLGLAEEEYRRFAAAWKTLPPDKPTSATQRK

SEQ ID NO: 206256 - protein, 328 aa, unidentified
MPVIACDVSKATLDAAWLNESKQCWFDRSKIANNRRGWQEMLRWLEKSSGQGRREFTLVVEATGVYHRPLIDFAVAEGLRVIVTNPGRAAENARSHNRLNKNDRLDARGLYGYGKELKKVHEYVPDSEEISVLKALLSRLRQLDKDLLRERNRLEKCPFIAGSQGLAASNRRQIKALMREKNLIQRQIDELIRTDPRLTHLQKLLCSIKGIGKVASQWLLPLLYRQQFASARQLAAFLGLTPIHKRSGTSLKKRGRLSGRGNGYVRSRLYMPAVSAIAHNPELSRFYDTLIHRGKTPKQAITAVMRKLVHISYGVVKNDQPYRCPATA

SEQ ID NO: 206257 - protein, 412 aa, unidentified
MNERVDKACGIDIHQAFLIATVLDLAGTKDTRRFSTCIEDLLNLREWILDSKCQRVAIESTGIYWIPTYTLLEGKVETIVANPYQIKNIPGRKNDDIDSGWIAEVCLNGQIKPSYIPPIEIREIRELTRSHVKITQTRTSFKNRVHKILTRSGIHISGVLTDIFGKSGMIILNGLMDGKKIDQILNEIKNKKIRIKKAQIKESLKGELSQNDIFVIKECLDSIKFLDQKIKEFDSKINQNLKGMNEEMDILMSIPGVGFTTAAAIMAEIGNIEVFSKPKKLVGWSGLAPAINESAGKSSNGHITKKGNKFLRTILVLAANSIAKGKPNKLRFFYQRIKAKKGHKKAIVALARKLASIIHHLLTFKEVYSEEEGKEKKFKVPKFIPVPDFSIDDMIGILCEAGYSINKTAVKT

SEQ ID NO: 206258 - protein, 340 aa, unidentified
MEQVVTIGLDIAKSVFQVHGIDAQGAVVVRQRLSRSRVLPFFAKRVPCLVGIEACGSAHHWARELARLGHEVRLIPPSYVKPYVKRQKNDMADAEAICEAVTRPTMRFVPVKSPEQQSVMVLHRTRLILTRQRTQLSNAIRGHMSEFGLIAPVGRNGLKTLMEIVADREDARVPDDARGCLTMLADQLDLINEQILESDRRILANARSTDVGRRLMEIPGVGPVLASAVVATVADPAVFKSGRNLAAWVGLVPRQNSSGGKERLGGITKQGDRYLRQLLVIGALAVVRFAVRNGTRRPWLVQLLARRTPKVAAVALANKNARMVWAIMTSGERYREPLAA

SEQ ID NO: 206259 - protein, 341 aa, unidentified
MENVALIGIDLGKHSFHLHGQDRHGKAVFRKKMGRKQMLEFFATLHACSVVMEACAGAHYMARKLAGFGHMVKLISPQFVKPFVKSNKNDFVDAEAICEAASRPSMRFVTPKSESQQTLSALHRTRESLVRDRTKTINQIHGFLLEFGINLPVGQAVMTRLPAVLAEHSLPPRLVSTLERLHEHFKYLSGQIADLEKEIKHQLAEDDLGQRLMSIPGVGPITASVLATEMGDGKQYGCSRDFAASVGLVPRQYSTGGRSNLLGISKRGNKNLRRLLVQCARSYMRRLERQNGLLADWVRRMLTRRHANVVACALANKLARTAWALATHHTTFNAGEAAVPS

SEQ ID NO: 206260 - protein, 405 aa, unidentified
MNPLYVGIDVSSKTNVTYLMRPDGSKYSSFSVQNNVGGAKILSEKIVSAMNSMSLKDVVIGMEATSIYGDHLAHELREDGNLGCFHRKIHVLNPKQVRKFKEAYPDLPKNDFVDAYIIADHLRFGRIASEVYMDDYRYEALKTLTRARFYAVQNLAREKQRFANYLFQKYSELAQNPDFKNTSATMLNLVSDFESVDDLANVPLEELSAYIEKSGHGRFSDPAAVAKQIHAAAKSSYRLPKTINDSVNQAMSASIATMRAMQAQIKALEKAIEQQFEIIPNTLTSIPGIGPVYSAGIIAEIGDIHRFESQASIAKYAGLVWTQHQSGDYEAERTRMIKSGNRFLRYYLLEATNSVRRCDSEFKRYYDLKYKEVNVGQHKRALALTARKLVRLVFRLLKDNRLYIP

SEQ ID NO: 206261 - protein, 373 aa, unidentified
MKKRNSSQQGQKRAVKAKRTQESVTIGMDLGDRSSRYCMLSGDGEILREDQVPTTKVGMTEAFGALGRSRIAIEVGSHSPWVSRLLGSLGHEVVVANPRQVKLITESTRKDDRLDAQTLARLARIDPQLLRPIRHRSEAAQTALMVIRVRAALIGVRTSLVNTVRGLAKAMGERLPKCDADQMGVLKAESVPSKLRQLLEPLLKEVESLTEKIKDSDRKIEQIAREDYPETALLQQVGGVGPLIALTFVLTVDDKSRFQKSRDIGCYIGLRPRRSDSGQRQPQLRITKEGDPYLRTMLVQGAHFILSRRGPDTDLKRWGLRLAERGGKRAKKKAVIAVARKLGILLHKLWVTGEVYEPLRNQHLRELRKKLAA

SEQ ID NO: 206262 - protein, 407 aa, unidentified
MTLVHPNAAGIDIGDSIHAVAVPVSRDVESVRTFGAFTCDLEAIIEWLTKCRIETVALESTGVYGKNLFNMLVQSGFEVYLVNARHTRNVSGKKTDESDAAWIQRLHSCGLLNSSFLPDDKTETLRTIVRHRRNLTKDSSTCINRMQKSLELMNLKIHTVLNDITGKTGRAIVEAIINGERKATNFLPLVDKRVKASSETICKSLQGNWRAEHLFLLKQSYTMYKFMQEQIVLCDEEIEGVFRLMMACKNDGVVETIPETGSSTEEVSIKKRNKNHPGFNTREYLKGILGTDVIEIYGIISTVALEVLGETGTDLSKWATEEKFVSWLNLCPNRKVSGGKLISSKLLSKKANLASQAFRMAANSLLSSSNWLGDYFRRMRSKGGHKYAIVATARKIAIIYYRMVRYK

SEQ ID NO: 206263 - protein, 315 aa, unidentified
MIVGIDVSKLSFDAAWEAESRGCHRQYAYTDEGIALLLAQTPEDAHYVMEATGVYHARLALGLYESGRHVSIINPLVIKRFAQMKLSRVKSDKADAELIRRYGEQHELTSWTPAAPEVLELQQAHGWLDDLIRERTRLINRQEAHAHHTKPSSFVAKQMSSQLQQLDRQIKGCEQHLEVMVKKSFYELYERLLTIPSIGPKTAIELIIVTGGFSRFEDTKALCAYIGVSPTTFQSGTSVNGKGTIAKLGQGRMRQLLYLSSWTARSCNPACRALYARLKASGKPPKVISIAIAHKLLRQAFAVATTNRVFSAEFA

SEQ ID NO: 206264 - protein, 326 aa, unidentified
MQGKEASEQETKAKSNVGIDVSKDWLDVHVLPGGETLRVANHCEGIRKLKRWLLRFDIALVVVEATGKWHRHLRRSLDAAAIPVAIVDPFRVRMFAKAQGIFAKTDRLDARVLALFAAILAPPIRPPAPEALEDLKELVVARASAVEQQTALKNQLSAAEGKFLKRQLTRRIARSATDIAALEREILRRIKADHGLARRYAILTSIPSFGPVVAATLIAGLAELGTCTTKQIGMLAGLAPIADESGKRQGARVIWGGRASLRRILYLAAVTATRFNADMRAFYQRRIEDGKPVKVAIIAVARKLVVLANTLISQDRTWELHAPKHA

SEQ ID NO: 206265 - protein, 450 aa, unidentified
MAQGSGLTRGDRNRNRKLADLRDVVRRDRAVLAIDLGEDKQVAVVMDHECRVLARKTVRAKAHHLDTLLAWGTERAGKSGFAGVTVACEPTGHRWKALMGLADGAGQAFVCVQSMAVHRSRETDDYTLGKTDHRDAYLIGKLVTRLECYLPERADETWARLRHLGARRAALVTDVTAVRQQAADLLGCAWPAALGAAARPVESLTWRAAMAVVTARCAGRPERLRKIGYDRFLAAVRRELPRWGGKVVRHRIVKALWDALTDRRGVLQQRPGAIERIELLLEDWRGLRRAVAETEKRMLAVLDELGLTGLASSIDGVTALSAAVILAESGDPRRFSSGRALVKHAGLNPSERTSATISGQTQISRRGRPGLRTAAWRAVWGALRYNKVLQARHARLTGREEGRRLADGQARMACAAALLRWLWAVITAGRAWDPAIASGQAAARTMAGAA

SEQ ID NO: 206266 - protein, 379 aa, unidentified
MFVGIDVSKKKHDICIYDKENEKYISFQISNSRDGFEKLVSKISKDDVIAMEATGIYHESLYNFLDSNGYKAIILHPYQLKYFSKTLNNSKTDKLDAKSIAIAISDLSSRLKKVRVPSDKIKSLKEIVHHRNYVSEMLANLERKLRRELVLVMPEIEKYFSTMLSSVLLELLEKYPTPSKIISSFEEVKKIVGWEEEKINRFEQDIRKSIGIEDEYGIYAFIVVSLVKEIKHLVEEFSEIEEKIKSLIDDIPESKNLMTMKGIGLMTVATLIAEIGDIERFETKNQLTSYAGFDPITIQSGQFSNHLHISKKGSKVLRKSMYFLAVRLVRYDKRFRDFYKRLRDRGKNPKLALVAVARKALEIIFHILKTGEEYVPLTS

SEQ ID NO: 206267 - protein, 387 aa, unidentified
MIAVGIDVAKRTHEACVMGQDGRQIGKARRFHNTRRGVRALLDDLQQLSEPVIIGLEATGHYWLALHDELVRAGHTVQVLNPLQTHAYRKTTIRKLKSDRKDAWLIADVVRIGRGRAAYVPDETILQLRELTRFRWGLVDQIGDAKRRILTILDRVFPEYETLFSDVFIKSSRALLERATSAAEFADTDLEELTAVLKRHSRGRFGKAKAEALHAAARDSLGMTRLGGVARFELRALLDQITFLEQQVAGVEQQLETLLATMEQHVTDIKGISPVMAASLIGEIGDVHRFQRFESLVAYSGIDPSVFASGEFKATETHMSKRGSPHLRRALWLSAINASQSNPDLAAYLQRRLEEGKPWGTAMGAVARKLLSRIYVVLRDNRPYEVR

SEQ ID NO: 206268 - protein, 465 aa, unidentified
MAELRLGIDVACTAKHQASLADETGRFLWQGWKFRTSSEELGALWEKIPGGHDVVVVMEPTRNAWVPLAAWLRAKGARVSVVPPEQSADLRDYYNKHTKTDRLDSKMLARMAMLHPEGLREMQDLGPADPLKRAVRHRSALQKRRVACTMRLDALLELMGPHWLGVFGTVSYNKTAVSVLERYANPHALNKLGRSRLTKLLIRVSRGAFREAKADELLAAADETLKIWAAGGLNFEELADDIAIEARMIKHLDTEIVALDDRSAHLYEERDPNGIIRSAPGVGPTLAAGILGRFGDLNRFHSLAGVRAFTGLVPQIDQSGIANAHKGVTKKGDPGLRLNLFLAADFARKVDPTLAARYQRLFIDQGKHHNSALCTIAAVLATRIAACWRNGQHYVLRDVDGRPITETEGKQICATRYRIDPAQRAAKRKNTSAKQPKKVRTGPDKKESQSAPGHEPAPHQTTKAA

SEQ ID NO: 206269 - protein, 320 aa, unidentified
MYSIGLDVSKSTINCYISNGEIDLVITNDEKSLNQFYLKLKKIYKKDIDKIVFIFEPTGSYSNLVKRFCTQKNIKAYIVNPKQSHNFAKAIAQRNKTDKIDAQVLSKMISIATNSDIKVPVHDENIENIKDYMSYYKFVVKELVQAKNILEAMKHNQTNKYILNSLEKKINTFQKESLKIIEKIKEIISQDQFLLQSFNNIKTIKGVGDITAIVLLHLFLKYPAANQRQIISLTGLEPIAKSSGSSIKSKPKISKAGSKLYRGTIFMSALSAIRFNPKITQFYNRLKDNGKQSTLAQVAVMRKLIIIAHSLYKNNQEYIY

SEQ ID NO: 206270 - protein, 328 aa, unidentified
MGQPTTFVGIDVSKDTLDACLLAPGGRTRQASFPNDACGYAALLRWADQHAAGPCHFCLEATGPYSEAPALALAEASRPISVVNPARVKYAGLMRGRGNKTDPADARLIAEYARDSNPPPWQAPTPEVRTLQGLVRRRDDLREMAAREKGRLASPALPRAARRSVERTLRFLEREADRVQAQADELIAATPALQADRDLLASIPGVGPQTATTVLAELPSVERLPSAESAAAYAGLAPREFRSGSSVRKRTRLSKAGNARLRKALYLPTLTAIRFNPLLKGFFGRLVAAGKPKLQAVGACMRKLVMLCYGVLKNRVPFDPAWASTKAP

SEQ ID NO: 206271 - protein, 453 aa, unidentified
MEQPQEVVEDEEHERAWDRVAAVDVAKASGVVCTRVPDDGRAGRRRARVWTVAATMSEVTALGDYLRCQGIEVVTIESTSDYWRIWHAVLEAAGLKVQLVNARAVKNVPGRAKTDKKDAVWLAKLTERGMLQPSFIPSYDIRRLREFTRLRAELVAERTRHWSRLEKLLERALIKVTSVASAIDTMSCRDMIEALIAGERNPRALADLARGKMRAKRKALIEALDGKFEDHHAVEARILLRHVDELTRDIEDLTARAAELITQTPAAWGIDADGTTGPAAGREPDAIALPAVARLDEITGCGPVAAMAIIAEIGLDMTVFGTAGRLVSWAKLCPQTRQSGKKATAASPGKGDPWLKGPLGEVAATAARSDTFLGERYRRLARRRGKRKALVAIARSILVIIFHLLSDRAARFNDLGPGYYDDRATTERKVRNHVRQLEALGLTVTITPAENAA

SEQ ID NO: 206272 - protein, 449 aa, unidentified
MRKPLVVLDEEHERVFERVAAVDVAKASGVVCVRTPGRPGGPRQNQVFEDVAATTGAITELGRFLVAEKVQMVTMEATSDYWRIWYVVLEMAGLAVQLVPPHQARQIQGRPKTDKLDAIWLARLTEWGLLRPCFVPPGPVRKLRDFTRARADLVRDRTRCWQRLEKLLEGALIKVSSVASKLTTRSAQDMIRALIAGERDPQVLAGLARGRMRAKHDALVAALTGMFDDRHGMLAGLLLDQIAYLDNAVSQVEAATEAAIAQIPQAWGVDADGVTGPDAGTGPDAARLPAAWRLAEIAGLSYELAIAIIAEIGLDMTRFRTASHLVSWAGLCGTANQSGPRKRKDKKGHGNSYLRGYLCQAANGAARTSTFLGERYHRIARRRSAARALVAVARSILVIIWHLLADPDARYTDLGPGYHATRTDKDKKIRNHIRQLQALGLTVTIAPAA

SEQ ID NO: 206273 - protein, 381 aa, unidentified
MKNCMRWVGLDVHAETIAVAVAEGNGEVCSLGTIANRREAIRALVKRLGRPETLRACYEAGPTGYVLYWQLIGLGVRCEVIAPTLVPKKVGDRVKTDRRDAEKLAKGYRSGDLTAVWVPDASHEALRDLVRAREAAKADQLRARHRLQKFLLRHGRRAPAGVRTWTQKHQTWVKAQVHFEHAAQEAALVDYVSEVDHVAERIARLEKAIDLAILEAPEKMRAVIEGLQALRGVAKLTAVTIVSELGEISRFQRAPQLMGYTGLVPSEHSSGERTRRGAITKTGNAHLRRVLTEAAWSYRTRPSVGAALRRRQAGQSEAVKEIAWKAQHRLHTVYRRMLGKGKPSQKIVTAIGRELVGFIWAIGVIVERAQRESHLVRSAMA

SEQ ID NO: 206274 - protein, 362 aa, unidentified
MSRDIKYIGMDVHQEAIVIAVLNGSGKLVMETILETKASSILQFIHGLRGELHVTWEEGTWAAWLYDLLQPQVQEVLVCNPRRNALLKEGSKSDKVDARKLAELLRTGMLRPVYHGENGLRTLRELARSYQTIGKDLTRVMNRLKALYRGWGIPCAGTQVYAPRYREEWLSKITQAGVRRRAELLYQQLDGLQALRRNLRPEFLAESRKHKAAKLLRQIPCIGPIRAARLIALMQTPHRFRSKRQLWTYSGLGIETRDSAQYRYVAGQLQRSKKPQQLRGLNQNHNHEMKEIFKSTATRASCGTGPFHDFYAVLLAKGMKPEMARLTLARKIAAITLTLWKRGERFDAEPSAITQNRPMSIT

SEQ ID NO: 206275 - protein, 340 aa, unidentified
MQYIGLDVHKDNITVCGLSPAGKPKFEVDLKRTDQEWSVLRNYIQGMNGNDLCFMMESGTYAYLPYRIITDMGYEAHVVHAQSLKMITDTDKKTDKKDAFTIARMLRLWKKGDLELKMSYIPTREQCELKDLCRYREEISKKISDETRRIKSHMARNCQILPNGCDNFQTVKARKYVTDNYPSDFTLMQRMRSLNDMFVERDRVKKEVESRMTDSEDVELLSQIPGIGDQTAVQIMSMIIDVSRFPDAEKLCAYFGMVPRVRDSGGKQHHGGLSKNGDRMMRAIMERVTESHIRNCDSSITRYYNRIQLRMGTKKALITASVKMLEVIYAVLKRGTPFRP

SEQ ID NO: 206276 - protein, 454 aa, unidentified
MIDRILPGFAALDLGATQLFAATAESPVHSFGTFTSELRALCLWLKQRQVHSVAMEATGVYWIPVHDQLQGAGFKVTLFHGAHARNLPGRKSDVSDCQWHAMLHSHGLLHACFIPAEPIRKLRSFHRLREDHLSMAGAHIAHMQRALDLMNVRLHHVISQIHGLSGLRVIDAILAGQRDPAALAALCEASILNKKKAEVLKSLEGDWQEHHLFALRQALEAYRFYHQQIAACDAQVHGLLRTLNTDRPPQKPKPGQKVKIVRHNAPQIPDLHGQLLTLCNGRDAPLLPGISPLGWMKLIGEVGTDLSSFANEHHFAAWAGLAPQIHQSGRRSRRRPRSKTKIGQIFREAAMSIAKGKYLAMSGFYRRIKGRRGAPVAIVATARKLAILFYRAMTRGARLRRARSPPIRGRIPRTNRAPSPQNGLTPRLYSPAKNHLIYCVHWQRSRKISLPQRR

SEQ ID NO: 206277 - protein, 326 aa, unidentified
MLPTLGIDISKDSFHLELSINEKLRHRKFANRKEGFGELCAWLAKHKAIYVHACLEATGPYSEALAIYLHEQGHIVSVVNPVQIKAFGQSELLRNKDDRPDAGLIRRFCEKQRPAPWTPPPPHLRELQALTRHLENLIETRQQQINRLEATNTKNVAKSLRKLVAHLDAEIKRTEQQIDDHVDRHPDLKQQSELLDSIPGVGKRTAAKLLAEIPDIAQYKSARQVAAHAGLTPRNNRSGTIRGKTRLSKTGNARVRKALFFPAIVAKRHNPIVRAFCQRLARNGKNKMQVVGAAMRKLLHIAFGVLKSGKMFDPNHELLINPSIDF

SEQ ID NO: 206278 - protein, 427 aa, unidentified
MYRIAGIDVHKKKLAVVVTDVEVHSEYQFERCWFAANPEQLRQLSQWLAEHQVEEAVMESTALYWKPVWGALERYWQPICQKRESAGPTSGILHLAQAQSNRGPRGRKKDFRDAERLVKRLVADELKLSFVPDTEQRLWRTLTRRRYQLTRARVQLQNQLEALLEEAHLKLSSLVSDRLGVSARRMLQAIAQGETNPDALAGLADRRLRATPAQLCDALGACTELHPVYRRLIKTMLEELKVIEEHTAELNQELATLLRPHQDAVERLAEVPGLGVDSAQQILAEVGAKAATFASDKNLCSWVGVCPGDEESAGESSSHRSPQGNRQMRRLLNQAANAAVKTKGSIFEIVYRRLVPRLGHNQTIGAVAHRLCRLVWLILHKGVRYEERGPAVSQRSRQNRTGKMIRELRMLGYRVEFLNAVPSVPIP

SEQ ID NO: 206279 - protein, 319 aa, unidentified
MAQNDLVVAGIDVAKDKVDVCIRSLSLRRTFASTAEGRHELTSWLRRQKVGKAVMEASGGYERQWAKALRDAKIEVRIVDPKRVRSFARSAGRLAKNDTIDAEMIAWFAETFDEARGQAYDATREQLHQMVNARQAMKDMQAKLESQGEHAVPAAVQRMHARISKKIAVELVKIEAAISALIQATPRFTELAEIIESVPGLGRTTSAALIAAMPELGQANNKIVAALLGVAPYDDDSGRRRGERHIKGGRRRTRNVFYMACLGAATQHNPVLKTFYDRLVAKGKEKKVALIACMRKLINILNIMIERRQKWDASRYALS

SEQ ID NO: 206280 - protein, 343 aa, unidentified
MKLSRVGIDLAKNVYQLHGVDRSGKTVWKRRLKRQQWFKVLLDKTEPGCVIGMEACATAHHWGRELQSRGYTVRLIPPQFVKPYVKSNKNDARDAEAICEAMSRPNMRFVTVKTVEQQDIQATHRVREELKVRRTAKGNQIRGLVAEYGLVAPKGLSSLRAAIPCWLEDAENGLTHYFRSLLHGLWEDLLALDDRMSEMDKTIKRLAKSNEDCVRLQKLRGVGPMTATAMVATVGDARQYRKSRQMAAGIGITPRQHSSGDKHRLLGISKRGDVYLRTLMIHGARSVVTGAKHKDDPLSRWVTEIAQRRHPNVAAVALANKTARMAWAILRNKTDYDPDFAMS

SEQ ID NO: 206281 - protein, 346 aa, unidentified
MHYIGMDCHITTLDFAVVNEAGRLVKANSVATSVTGFVEFVKTVPPPRTIYMEEGTLAAWALETCVRFREKLVITDAKKNHWIGSSGQKDDSIDALKLAQLARGGYIKEIHHPIGQRRRFRELMIAYHDTVKSTTRIKNKIKARFRQNGIQCTGVTVYSETHREEWKGKLPPETTLLLILEGLWRQLEQSEQTEKELLAAARAQAKHYPEIKHFEALPGIGFIHAATISAILETPYRFADKKKVWMYAGLGIMKRSSGGKTYSEKLSTDYNRLLKYTLKQAAEAAIQAKDNPFRRKYLDMTLLHGIAPHRAKLTIARDMLATMWAIWRKGEKYNPEIREKASYKQG

SEQ ID NO: 206282 - protein, 450 aa, unidentified
MGNASGVSRGDRNRNARLARLRSLVPVTNAIVGIDLADAKQMVVVTDHDSKVLARKTFRCRAWDLGAALGWAAERAAAKGFSGVTVACEPTGHRWRVLGQLAADRSMPRVCVQPMLSSWARRSEDLTSDKTDEKDAVLIARLTAQLRCYVPEPVDETWGRLRHLGARREQVIVEMVSQIQQMRALLECVWPAALDTAKQPFRSKTWVAAMSAICERDGGDLDRTRRLGPARFEQAVRREILKRGGQKPSLRIARRLFAALTDPTGVIAHRPGALERVAFLLVDWHTAGDKLTDTEARMISVLGELKLTALATSIPGLSPVGAAAILAETGDPNRFASGRALVKHAGLAPREKLSGTFVGRTKLTGAGRPGLRLAAWRAVWGTQRGNTVYAARYRHLTSREQNKLTATQAQTVIAAAILRQLHAVITTGQAWDPDIATHGTGHRKQMPIAA

SEQ ID NO: 206283 - protein, 338 aa, unidentified
MTVVTVGIDLAKNVFAVHGVNAAGKAVLVKPLVRRAKLLELIATLPACLIGIEACTGAHFWAREFQKMGHTVRIMAPQLVSPYRMGGRHGKNDAADAAAICEAVTRPNMRFVPIKSVEQQGQLFVHRAHQGYVSERTALINRIRGLLSELGIVLPQAFKAFLSGVAQVLEDLPGYCNQVIGDLLNELYHIEEKIKNSEKLIQQLARDNSAAQLLMQFRGIGPMTATAIVASIGNGHDFKNGRQFSVWLGLTPRQQSSGGKARLGRITKAGDSYLRTLLVLGARSVLLGAAKNDDPVSRWALQLKERRGYGRALVAIAAKNARMCWAMLHLRDEFRFPA

SEQ ID NO: 206284 - protein, 318 aa, unidentified
MTHATALPVMLTSGLDLGDRTTHRCTLDSERRVTSRGRFTTTRESLQREFGGIARQRVVIEAGSQSLWVSHLLRELGHEVLVVDPRRVQKLVAGNRKTDRRDAESLARLALGVPELLGAAHHRSFEAQADLSMLRSRDILVRMRTKLVCHVRGILKAFGIKLASSSAASFHRRAIEQIPANLQPALHPVLAALGDLERRIGELDDALQLAATARHPEVKVLRQVPGVGPVVAMAFALTVGDPQRFRRSRDVGAWVGLTPDKRSSGDSDPQLSIHRRGDGYLRRLLVVASHYILGPFGKDSDLRRYGLILPRLRGHGVW

SEQ ID NO: 206285 - protein, 384 aa, unidentified
MSTAKKRGPGSSHVLRTPDHAGNVVGIDPHKRTLTATVVDLRGGVVASEHFRVSGEGHRELEVWARQFGQIARWGVEGSASWGRHTAVFLVGRGGDVRDVCANRTPRSDRARQRGKSDTLDSERIAREVLAHPLLPRAFKRAGQEQGPDEQHQLLALWHNRRRSILTSRQHLVGEAEHLLCDLPLELRDELPDAKAVRPRLAALAHRNRRRRYDAPTTVRLGMLDAYRAQIEALDREEKDVVAQLRELVAANGSTLSELCGLDTRSVAELLVEVGDPRRFTEGGFARFNASAPLAASTAEGPGEPVRHRYNPGGNRRVNAVLHRMAVTQLRCEPRAQAIYANARARGHTKKEARRILKRHLSDVIYRRMTRDLASPAAQPLLAA

SEQ ID NO: 206286 - protein, 412 aa, unidentified
MDVIVARQGALDVHKAQVTGCVRVPGADGVRVQHVKQFKTTVGGLLVLADWLKAHAVTHVVMEATGDYWKTVWHILEGDFELMLVNARHVKNLPGRKTDVGDSAWLCQLAEAGLLSASFVPPKPIRDLRLLTRYRRTQIAERRREAQRLHKALEETGIKLDCVATDILGKSGRAMLDALCQGTTNPELLAELAKGKLRPKIPALREALEGHFEPLHAVLIGAILGHLDFLDGQIQEISGAIEEQMRPFTKQAELLCTIPGVQQRTAEIVIGEIGVDMSQFPTAGHLASWAGQCPGNDQSAGKRRSGKTRKGSKHLNQALTDAAMAALRTNDSYLQALYRRKKPALGHGRALGAVKHSMLCACWHMLTTGELYTDLGGDYYARRDPERQTRRLVAQLERLGHTVTLSETPLAA

SEQ ID NO: 206287 - protein, 385 aa, unidentified
MKEQKFVPREFEIFGGLDVDKKSIAVTFMSHQGILQSFSMPYRAEHLLSYVGKHFEGKKIAFAYEAGPTGWGLYDRLTREGHICVVAAPSMIPKVPGQRVKTNRLDSQKLSEHLRGGQLKSVHVPSESYRQLRQLVQLRDTFVQDLVAMKLRVKALLLFEGLEFPPAPAGSQWSLIVRGKLKRLSCCSAVRFKLDQLMESLESTEKRVLQTIQEIRRFYQQDPELCQAMKYLKSIPGIGEIVASHLLARIGDPQQIGNVRQLAGFIGLAPTEHSTGNRVARGHITRSGDGRLRSKLIQAAWSAIRQDPELREFYRSVYQRHPRDRAARKAIVAVARKLTTRIYAVLKQQRPYVVREIVHSAPLTQEETSPQGTTRRRGEPGEILS

SEQ ID NO: 206288 - protein, 432 aa, unidentified
MNPFSVSPEASPVAAWVGLDWADQQHVICLYEVATGHSALTRLEQKPEALQDWLSQLRQRFGGAPVAIVLEQARGAVIYALLSADFVRLYPVNPQSLASYRKAYAPSGAKSDPADAVLLMEMVRNSPERFRVWKPDDADTRSLQLLTQNRRQLVNQKTALTNQLTSLLKTYYPQALQLAGALDSLQACDFLEQWPTLEALQHARAGQIRQLYREHGHPSPEQLDRRLEQIRQARPLTTDPAALLSGAMMVEALVQQLRPLLGAIERFDRQIAALFRKHPDRPLFDHLPGAGAVLAPRLVAAFGTDRDRFQSAQQAQQLFGIAPVTEQSGKQRWVHWRWACPKFLRQTFHEFAGHSRHWCGWAQALYQRLRRCGKGHHAALRVLAFKWIRILFHCWKTRTGYDEQIYLKSLQKRNPTLWAEIQLLPPRKKKVA

SEQ ID NO: 206289 - protein, 401 aa, unidentified
MNARPFGVDLAARVAGWVPEWIRHRCAQDVIDHGLHKHPRRPDMNRKTGMSAGQIIGTIDGLQVVGLDIAKLVFQMHTVDMFTGEIANVQIKRAKVLEHFANRARCLVGIEACGGAHHWARELRALGHEVRLLHARAVRPFVSGNKTDATDARAIWLAVQQPGTKFVGVKSLAQQATLTLHRQRELLMKMRVMQTNALRGLLYEFGTVFAKGSRAMLGEVEAALEALSTALPQMVADSLREQVQRIKALGEDIAAIDKRLALQLRQDPDMRRIAEIPGVGVLTATAAIATMGDARAFGSARQFCAWLGLVPAQRGTGGKIRLQGISKRGDAYVRTLLIHGARSVLTHAKEPGPWLEQIRQRRPANVVIVAQAAKMARTIWAVTARQQDYQRGHRSVRPQAA

SEQ ID NO: 206290 - protein, 377 aa, unidentified
MKIKSGPEYLYSFFELSTKSWFLGFATYSTQNPRTVKIAAGDFGRLDAEILKAKRRFGLAESAEVVSAYEAGQDGFWIHRALLARGIHNLVLDSSSLPVDRSARRAKTDRLDAISGVRMLVEYSRQGGGRLRIVHVPTCEAEDDRRLDRARKQVQRERIRLANRMVSLLRTQGIEGLKAGPRFPANLDEIRLWNGEELGRELKHELLRDNARVALADEHLRELNGRQRTRTKEGTGRLAETTRKLIQLRGIASTGGSQLSSEFFGTRHFANRRQLGGATGLVPTPYNTGQSERNQGISKRGNKRLRSLLIEYAWGWLRHQPQSDLSQWYERKYAHGGKRMRKIGIVAMARKLALELWRYVEHGVLPEGALLKDKVRI

SEQ ID NO: 206291 - protein, 319 aa, unidentified
MFNLGIDVAKAKLDCALRLPNGKHRNKVVENNQKGFIALSEWLLKQDASSPRVCMEATGTYWEKVAEYLAGCGMLVSVINPAQIKAFGASRLVRTKTDKVDAQLIADFAHERQPEPWLAPSPAEQALRAMVLRLEALQTMRQQESNRLDVAREAVRQGIVDHITWLDGQIKELIRAIKRHIDDDPDLRGKRELLDTIPGLGERTIPVLLSYYANPERFDSAKQAVAFAGLDPRQHESGSSVRGKPRMSKVGHSFLRKALYMPAMVTVYRTAWGKRFGQRLRAAGKAKKLIIGAMMRKLVHVAFGVLRSGKIFDPTLHAA

SEQ ID NO: 206292 - protein, 312 aa, unidentified
MPCKTEVAVARTIGIDTGKNTLHMVGLYQEGAIVLREKVSRTRIAARLVNVPRCLVGIEAGMASHHVARELLALGHEVKQVPPAYAKPFRQGHKNDFRDAYAVAEAVQRPSTRCVPVKTADQLDLQALHRVRSRLIGNRAAVINQLRGFLLEHGIPVRQGLRFLRQQLPQILATRNDVLSPRMVRIIGALIGDWTYLDERIERVTDEIETLARADENCRRLMTVPGIGPIIASAMVAAIGNGAAFAKGRDFAAWLGLVPKQMSTGDRTILGRITKRGPNRARDQIGAATRSRDPVSRPGCSGLRIHFRLNGS

SEQ ID NO: 206293 - protein, 423 aa, unidentified
MKNTAARKRKQVPEGYLIIGVDPHKRKHAAVAITQDFTTRDKFKFDNTREGLETMLRRARMAMVKSGCRGIMFAIETGGHYWRNVAYFLDEQGVPFRFINQFTLKRRREGKDLNRRKNDYRDSEVAAQLLCTGEFTESKLPQGVYAELRTAHNAYRRLVKERTRITNLVKGLLDALFPEFTLVFKDPCGLTALSVLSTCPIPGVIAGMTEEEFVATIEAKHQGRLMRKKLRALHHMARASIGIAAGARSVSSEISFLVEKLELISGHICIIERTLVSLVDEAEEGKYLLSIRGLNYIAVAGLLAELGCFKAYRSAKQMIKMAGSNPTESESAGKKRAKTPMSKQGRPVLRYCAWTSVIPMLRFNPDFRAWAKQRRERPVHANPLGGREVVGAALNRLLRLAFAMVKNQTYYQASKPELTLVAV

SEQ ID NO: 206294 - protein, 350 aa, unidentified
MAIVGGFDVHRKQITFDYVDNDGLVQWGQIRPATRKTLRSWLAKHCPEGAGEFALEGCTGWRYVSEELTAAGVGVHLGDPAEIAALRGPKKRAKTDRADARLLRTLLVEGRLPESWIPPAHVAEIRALGRLYCALMEERRGWQQRIHAQLFHQGCPPVKALLSEPGREVLVAAELSAAGRQYVDTALRRIDELTAEIDPLRMQLVRFARRQSGCRVLQRHYGVGWLCAAIIWAEVGDPRRFSSSDQLVRFAGLDVTVYSSDGKRAPGHLSRQGSPELRWAAFEAAKCAARRGSPDYAYYHNLAAKHEGRNGKNPTLAVERKILRRCYHTLRELGDAVLAMPIADAEEVAA

SEQ ID NO: 206295 - protein, 298 aa, unidentified
MGVDLGDQWSHYCILGLEGETLAEGQLRTNPQDGAEFFEALNAARVVVEVGTHSAWVQEVICGYGHEVLVANPRLMEGSKRRKRKNDRIDANKLARLGRVDPQSLHPIQHRSREVRQDLVVLRARDALVAARTELINATRGLVKSMGTRLPKSSNPSFAQKDEEAVPFEIREALLPLVRMAAALSDCIQGYDEKIEELGREKYGHTTLLRQVKGVGPITALAYVLTLENPERFVKSRDVGPYLGLVPKQEDSGESQPQLGISKTGDTMLRRRGAGALSGDGWILIYENQGDRSHTGQW

SEQ ID NO: 206296 - protein, 473 aa, unidentified
MIKSVGIDLAGIGEHKVRCLDERAQLCDGFSFETTTAGLEKLEERIFSDGSNPIIIFEPTGLAWLPVAVYLKARHPDSRLVRVQAQKVVALRKYLNRSSKSDKIDSLTLAKMPFIDPEKLEEIYFPPGKIYAIQRLARQRKHLENEIAGRKKRIGSIVDGHFPGIRSAFSDPWSAHARAFLRSRLNPLAVVRTGEKALHTFLIKTRKHCKVDAFVESHGVYLTCREVATLYKASSSVGTIDADFFSALQDEISRELRLMEMEETESAAIAKRLEQLYLEVHPSDNLRTIPGVGDITAPIFLATVGDPARFRSQSSFANYCGIVPGASQSAGSEAKGLRMTKAGPAIMRWALFQAGGIGRAHDPQLACVYYREMVHNGKTHMQAMGAVMSHMSARVLAVLREDKPYAIRDIDGRSVSHEEARKIILSKYQVPEEIRRERRHRKTPGNFKLQKKLGEMLVPRAHEAAEAPQPVLT

SEQ ID NO: 206297 - protein, 364 aa, unidentified
MNYRSSIGLDVHARSIKAAAFIPETGEIIERGFTYDPLKLASWIDTLPSPLQAVYESGPTGFDLARALDKQGIPCKVGAVSKMFKPAGDRIKTDKRDAVFLARMLAVGNIVDVFVPSPALEAARDLSRTREDTRKDLMRARHLLSKFLLRKGIVYDKDKSTWTKTHRAWLSSLSFEHAEEQVVFGEYLDGVIFFENRRDRLDKEIKERAALPKYAPMVNALCCLRGISTITAFSITVEVGDFLRFPNARNFMSFLGLVPSEDSTGASVVRGKITRTGNVHLRTLCVEASWHHRRTFKPLSEAGLKACKEVDGDVLLITQKANRRLYKRSAYLLARGKNSNVANVAVARELAGFIWAIGRLVQSS

SEQ ID NO: 206298 - protein, 337 aa, unidentified
MQYLGIDWGTRRASWCALDEHGALREGAIPADQDGLSRLALTLGAGEVHGCIEMMSGAVWVRDQLATVGWDVRLADARKVKAIAPLACKTDRVDARVLADLARRDLIPEVWVPSLDERANRERLRRRAHLIRLRTSAINRTFGLLTQWGLRRNLTALRKPGAIDELAEHGVPGVWRQSITTLLGVIDDLDAQLGPLERELRPHARADARVKLLMTIPGVAELLGLTLAAEIGDITRFPTARKLVGYSGLTPVIKQSGQSSRTGRISKAGPATLRWAAVEAAQQAWRSNSPWHRLYTDTKTRHGKANPAKAAVARKVLIAAWHVLARQEPFKPTCAAA

SEQ ID NO: 206299 - protein, 403 aa, unidentified
MAAVMIGVDPHKGSHTAVVISPAEEPLGELRVRASAGQAGELIGWAAAWPERTWAVEGAAGLGRLLAQQLTAAGERVLDVQPKLASRVRLLQAGDTNKNDPNDALSVAVAALRSTVCREVIAEDYRAVLKVWSKRHRDLARTRNQVACRLHAVLCDLVPGGHQKEISAAHAARILAQAAPSGAVALARAELAAEFLADLRHLDGQLRDTRKKLAAAVRASGTTLTQVFGVGPVIAGTVIGDVGDVARFPGRDHFASYNGTAPVEVSSGNRKIHRLSLRGNRRINHAIHMAAITQLRHKHSEGRAYYDKKVAEGKTHKEALRSLKRKVSDAIFARLQADARQAREKGPGGQPGNGSDSSAAGSHPERQLFGPATPGPDTTIRPGTAAGTPPPSKPATRKTRPAT

SEQ ID NO: 206300 - protein, 371 aa, unidentified
MKMYIGLDVHSKKTTCVAQDETGKGLGRMVVDTTEAGLNHMLERYGAPPKTRIGLETGCQARWVFQILERAGMDPVVIEAGEVRAKQSRRGQKDDFRDAKHICEGLVCNQWKHIVWIPGHEIDQLRYLLLRRNHYVRLCTREIASAKGLLRSRGISTSKMCLTTEAGWKKLLQRTDVTALAEDLQMLFVVWKLASKSVAKIEKRLAKARKPFVEPMKLVATFFGVGDIGSSAFVAWVGDPQRFPTSNHLISYLGLAPSTYDSGEKQRRGHITKQGPRLLRSILIELAHQARRLKHPLNPYYRRLVTKRGKKCALVAIAARIARILWQMWRKNEPFDVGKLNVTAGLVTRLKRYHYELREQVMAKHMAATRS

SEQ ID NO: 206301 - protein, 412 aa, unidentified
MNPVVGLDVSKGESQLQAFLDKGKPYRKSFSIKHDLNGLGNLLEFLEEVEDAANGNPPSVVLESTGHYHTPVIQFLEEQQYVYIIVNPLISHRAKSSNLRKVKTDAVNAYHLCELFYKEELEPYKKRGIQLLNLRNLTRQQESIAEISAKTKLQLHSLVDQVFPEYRGVFGSLYSKVSLLTLLEFPTSAAVLKMSERELADRIGALCKSRSDLWAMEKAQKLRDAALRNPFKKNLYESHIFNLEVLVTIVLQYQEHLSKIATEIDALANEIEEYHILQSIPGIGEKIAGTIISEVGEIDRFNDAKKLVAFAGVDPSVYSSGKFTASVNRITKRGSNRLRHALYMAVQSGIRDSRKKKTTDDIMARNKRLREFYDKKREEGKPFRVAVIACVNKLLHWIYALLKSRTTFQDIA

SEQ ID NO: 206302 - protein, 322 aa, unidentified
MSVSNQRCAGIDVSKSTLDIAISNIARSFTVPNEDGGFNQILKELKRNETQLILMEATGGLESGVAGYLQSEGFDVVVINPRQARDFARAMGYLAKTDQIDARVLLQMAKVINQHPEREKYIRPLPDAHRQLLAAMVVRRRQLTIMLTAERNRLHPSHPQNQESIRFIISVLKSEMARIEAEMSAYISKNFSELSALLSAVKGVGAATVAVLLAEVPELGTLSRREISALIGVAPVNRDSGTMRGRRTVFGGRASVRTALYMSALVGTRHNPVIKEFYTRLVAAGKPKKVALTACIRKLLTILNAMLKNNEAWDPLYHQHAS

SEQ ID NO: 206303 - protein, 347 aa, unidentified
MRFYTKQHKFYCGIDLHAKKMYLCILDETGEIRLHRNIKTDRGLFLKTIAPYRDDIVVAVECMFTWYWIADLCVKEKIPFVLGHALYMKAIHGGKAKNDKIDSRKIAVLLRGGMIPQSYVYPAKMRATRDLLRRRNHLMRKRAELFAHIQNTRSQYNLSDHLGRIAIPKNREGVVERFEDPSVQKMIATDLAVIAAYDPIIAKMERDIIKFAKHHDPVSHALLNTIPGVGRILSLVILYEIESIKRFPRVQDFASYSRLVKSAKESNGKKYGSSGKKIGNAHLKWAFSEAAALFLKGNEPGKKYLDRLTGKHGKGKALSILAHKLGRAVYFMLKNKKPFDQDKFLGF

SEQ ID NO: 206304 - protein, 445 aa, unidentified
MGQRTIGIDLAIRGDHVARIFDDGRPHAKPIRFRLTSDSLSSLVARLQEGLPAGSTITAVMEPTGMSWFPVARWLEKAGIKAIRVKGQRVRALRRYLSEHTKTDAADAYVLGAIPWFGGVPVDPVYVPNADRHALQRLTRQRERLEDEVSTIKRRLIDLVRWACPAIEAVLPDFRTNLALAVLHDLFNPMTVIKARRTTLLGFIAKHASGNHPHSGPFADKLVDGLKAAAMETRRLHGDAVNFEHLQLEAVIEIDRMRLLESQLGRLGREIERLYGKLHPSDALRTIPGIGDALAPLVLGVLHEARRFAGLHQLRGFCGLFPRTNSSGGADQPGQRITQSGNNRIKRALYLAADAARRIDPGLAEVYWRLMVRKGHHHKQALCGVATRLVNRIAKVLRTAEPYELRDTAGKPITVAEGRAIIAERFSIPAEIRNARRRQRTESFV

SEQ ID NO: 206305 - protein, 315 aa, unidentified
MATSNQVYVGIDVAKEKFDIAVLGESKASQVQNNEEGIERLVENLKVIKPEVIVVEATGGYQREVVMGMYEAGLPVAVVNPSRVRQYARAKGLIAKTDKLDALVLAEFGKQMKPRQFEAKSESGRYLTAILVRRRQVEEMLKAERNRLRTVHIDMRNSLERMIKILKEEMQELEKELEKFMTKHEAWNEQEQILCSAKGVGRVTAATLLAELPELGKLDRKKIAALVGLAPMNSDSGKKRGYRKTKGGRMEVRNVLYMSTLVATRYNPLIKMQYQELLKRGKVKKVALIACMRKFLTILNAMMRDKVPFRQTVIA

SEQ ID NO: 206306 - protein, 412 aa, unidentified
MAMEALVERCAGLDVHQASVVCCVLVGPPGCRPRKLLRTFGTTTHELGKLRAWLAEHGVTHVGMESTGIYWKPVYAALEGHFDLTVGNAHHIKNVPGRKTDVKDAEWIARLVRHGLIGKSFVPPPPIRDLRELVRFRRALVEARTAERNRLLKLLEGAGVKLAGVASDVFGVSGTAMLKALAEGAAEPAAVADLARGRMRRKLEALAAALDGQVREHHRFLIAVQLRRLEAIARDLGELDARIEAQLEPFRAQHRLLMQIPGVDRVVAAGIIAEVGVDMDVFATAQRLAAWAGVAPGNHESAGRRKGAATRKGNVFLKATLFAAASAAVKTKGSYYRDKYHRLRARRGPVRALVAVAHKLLIAAFHMLRTGSPFRELGEDFLDRVSRKRSTTKLVRRLAALGYDVLLVPKAA

SEQ ID NO: 206307 - protein, 355 aa, unidentified
MSQEKYIGMDADQATISVAVMDAGGKLIMECLLETKAATIVEFIRGLHGTLWLTFEEGTSAAWLHDLLKPHVNRLVVCDPRKNALLKDGNKSDRVDARKLAELLRGNQLHAVYHGEHGVRTLKELGRSYLTITQDVTRVMNRIKALYRSWAIPCAGTTVYAARHRAEWLAKIAEPGVRVRAQRLYQQLDLLQPVRLEARREFLAESHKHSAVKLLRQIPSIGPIRSALLVALLQTPHRFRTKRQLWAYSGFAVETHDSGEYRSVRGKLQRNRERMTVRGLNDNHNRDLKNLFKSAAISASTRPGPLRDFYVARVEKGMRPTMARLTLARKIAAISLTIWKKGVEFDPQHLHRQAA

SEQ ID NO: 206308 - protein, 345 aa, unidentified
MSEISTIGIDLGKLVMYVCCMNSSGRVLLRKKLYRSDFLSFMSEQPRCLVGMEACAGAHNWGRELKKLGFEVKLMPPKYVKPYVKTNKNDTNDAEACAEAVTRPTMRFVSIKSEFQQELTQLHRVRERLVKSRTALVNELRGFLAEFGVVLAQGRNKLAGRVRELLLEDKYLFPETCRRTTQRLLEELSRLEDEIEYYEKQISLVVKSQPCCQQLMTISGVGELSATAVIAAVGNIENFKNGRQFAAFLGLVPRQHSTGGKDRLGGISKRGDGYIRKLLVQGAHSVLRHVGDKTDKRSVWIRSLRERRGTCRTAVAIANKNARIMWALLAHGGSYRAFGEMKVAA

SEQ ID NO: 206309 - protein, 456 aa, unidentified
MRTDKKQWRNRKAKKELARQLQSENPGLEVVHPHAAGIDVGNSAHYVAVRPDRDPQPVRRFECFTADLHRLANWLQSCGVQTVALQSTGVYWIPLYDILEERGFEVYLVNARHTKNLPGRKSDVQESQWLLKLHTYGLLNNSFQPLSKIRILRTYWRQRLQHVTGAATCVQRMQKANVISDLSGVTGQLIVRAIVGGERDPWKLAELSHPRIQASRGEIAKSLEGNWRQELIFVLQQEMEMYDTYQRRVAECDQELQKHLRAFADTVPPPVKEELPPKKKKKQNKNNPHFHLAEELQRITGVDLTRIDGVDVIVAQTLVSEVGLDMSRWKTEAHFASWLGLCPENRISGDKVLSRGTRHVLNRAANALRLGASTLLKSQTYLGAQYRRLRSRLGAPKAITAMAHRLARLVYRMLKYGQHYVDKGAEYYEQRNRQQQIDFLRKKAAQLGLQVTAPHA

SEQ ID NO: 206310 - protein, 414 aa, unidentified
MDNSPTPRFVGIDLHKHFAVVAAVNAQQRLVLPPTRPIDLDEFPAWASTHLYPTDVVVLEATSNAWWLYDLLAPRVQRVVVANPLQVKWIAHAAVKTDKHDAIRLAKLLAANLIPEVWVPPRHVRELRALLAHRRALVKQRTAVKNRLHSILHRQALKLPSGDPFAAHNRTWWLALDLSPTERLRLRQDLDTLEHVEKQLADLDSELARLSNQSPWNLAMPFLIQLPGLALLSAMTVLAAIGDITRFPTAKHLVGYAGLGTRIHDSGETSSEGHISKEGRRDLRRILIEAAWIAVNTHPYWKAEFERLCRHKPQGVAIVAIARKLLVVIWHVLTERAADHHADPVMVACKLMRWSWELTEEQRGGLTSRQFVRYGLLRLRLGNDLTTFTYGGMPRRLASVEEMLARFPDLAESS

SEQ ID NO: 206311 - protein, 316 aa, unidentified
MPKKREKSVNVGIDVGKTQLDVVIHEREIHFSAPNDAVGIRYIIGRLRRYAVERVVVEATGRREYAFVLAAAERGLPVIISQPIKVRRYAGAAGILAKTDKLDAKVLAEYAAVMRPEVRPIALGNIRKIKDMTARRRQLIEMSTMEKNRLDVMPKFLLGDIRRHIRHIQSQIDKLDRQIAELVEQIDEWREKRDILLSVPGVGTQVVNTLLADLPELGMLTNKQIAALVGVAPFNRDSGAFRGKRRIQGGRASVRTVLFMAMLTSIQHNTLIRNTYQRLLANGKHKKVAIVACMRKMITILNSMLRDNTMWNEKHA

SEQ ID NO: 206312 - protein, 440 aa, unidentified
MSQVVKPFISIGIDVAADFSEMAICLPTLQFLDKRSFRIYHFKPESLAAALEKIKKAEDEYSMKVRIFMESTGIYHYPLFCFLRDAGFEVNVINPLITNSSRNSNIRKVKNDNFDARRIAKVGFDPKLKLSNMPQELVMNFRNLTREYYSLVDFKSSYVLKLGTQIRIAFPQFKGIFSDLTGKTSLMILKKYTSPDEILKADPDVLAEEIAISSRRRSTAAKKRDLIIQAATDAKTFGCGVDSNFHLIKKFIQIIEFYEQEINDILQQMKSLIDEHSEELFIKQVELLQSIKGIGFLSALTLMCEIGDFDAFSKPKQLFAYFGLDPSVNQSGKFNGSRMKMSKRGSRIARRVLHMAAVQAVGTTIKGDAKNPVLRDFYLKKCGEGKAKMVALGAVSHKICNIIFAVLRDHKPYVMKTTQQHCLDYVVPCASSTTTLNLVA

SEQ ID NO: 206313 - protein, 339 aa, unidentified
MSKSTNPQQTTVFCGIDVSAATLAVAVIEQDQPLQQREFANRASGHKALIGWLGKGKARARVSLEATGIYSLDLALALDAAPHIELAVLNPKMVNRFAQTLRRSKTDAADAAVLAEYSRRMPFLAWTPPSLNGLRLRALGRHIAALVAQHTREQNRLHAARSSRTVPGCVLQDLKRSLASLTRRIAKMRRAAMELIRADAEIEQRFRLLTGMPGIAQTSAVQILGELALLSPHLTVRQWVAHSGLDPVHQDSGTSVHKRSRISRAGNRHLRRALYMPALSAVRWDPHMKAFYEALQARHKTKLQAIIAVARKLLHAIYGIFRTRTPYDGSKLFPQLETA

SEQ ID NO: 206314 - protein, 381 aa, unidentified
MKRNKKLTPTSHSQTEATAEVIKLGIDIHKSKYVAIRQIDNQPPQSPQSFSPDEFLVWVQRQRLLAKRVVSCYEAGCFGFVLHRKLEEVGVENFVVRPRNWDEYGSSVKTDARDARELCGHLDRYLAGNDRALCVVRVPSLEQEQERSLSRQRETLAKERKRLQNVGTSSGLYHGVDVPANWWKPKVFAELCAEIPDFLKRILEPFQQVIEVIDKQLRETTAREERKANRKIPVGLGALTTSILDQEFVDYTRFNNRGQVSSFTGLCPGESSSGNKRQQGSINKHGNPRIRHMLLEAVWRMIQFQPDYKPIVHWKTRMANEPFGAAKKKKMAVAIARQFAVDWWRIQTGRIQPEDVGLRIEYPSAYSTRALREGRISKVYA

SEQ ID NO: 206315 - protein, 354 aa, unidentified
MIEKLSSVIAVIGIDIGKNSFHVVGLDGRGAIVLRQKWSRGQVETRLSNMPACLIGMEACVGAHHLSRRLKLLGHDARLMPAKYVRPYSKGQKNDFRDAEAIAEAVQRPTMKFVATKTADQLDLQALHRVRERLVSQRTGIINQIRAFLLERGIAVRQGIRFLRAGLPGILATPPDVLSPRMARVIEELADDWRRLDERIEGLSSEIEALARQDSGCERLMSVPGIGPIISSAMVAAIGTGEAFSKGRDFAAWLGLVPRQISTGDRTILGKISKRGNRYLRVLFVQAAWVVLIKPKSWERYGLKAWIEAARKRLHRNVLAIALANKLARIAWSVLAWGRNFEARKTDDAAAQSV

SEQ ID NO: 206316 - protein, 414 aa, unidentified
MDIVHDRCCGLDIHKKTVVACLIAPGPDGKPKKEIRSFGTMTGDLLGLADWLQRAGCTHVAMESTGVYWKPIYNVLEDRFNLLLANTKHLKMVPGRKTDVKDCAWIAELLRVGLVQPSFVPERAERESRELTRYRSSLVRERTAEINRLQKTLEGANIKLASVASEVMGKSGRAMLEALVAGIADPTVLADLALGQLRRKIPELQRALVGRFGAHQCFLVVEQLAHIDELEQRIERVSQEIRERMRPFETEIALLDTIPGVNRWTAEVLLAEIGFDLSRFPSAGHLASWAGLCPGNRESAGKRKSGRTRKGSPWLRVAVTESAHASGRGKTYLAAQLHRLIPRIGLKKAAIAVGHSILVIVYHVLTRHQPFQDLGALYFDHRHRASLEQRLIHRLEALGNTVTIERTQAPASAA

SEQ ID NO: 206317 - protein, 382 aa, unidentified
MPRYWGLDLHARYVHVCEWRPEEQKEKHSRFPNTPEGWARFLQTLGPDCRVALEVTGNAFEVHDWLSPHVEQVLLANPVELRRLGSGRHTDRVDAARLAKMLAMGTLPTVWVPPQPVRELRRLLRYRERLLNVATRLRNQIRAVLRRYGERPPRGVDLDTFLTPDRLGSFVASDRVIVLSALRQLQCTREECAAVDAEIAEHLAQTPEGQVLLTITGVGPITAAAIWAALGDPRRFHTPKQVARYAGLDPSVHQSGETYFHGKISKNGNPLLRTYLIEAAHILARFDVGPLGQFYHRKCRQLGHKRAVVALARKLLIVAWRMLLTGEPYRHQRPKTVQNKRYQLRSLRSQQRNWEDVMRTLLGDPEAGLRLRQGKGQTPVPA

SEQ ID NO: 206318 - protein, 341 aa, unidentified
MDKHFYFIGLDMAKETFVASIYHTPDRPVLTKENFSNNPQGYKELIVWLQDNQINTTNCHICLEATGVYSDGVAYYLSAQGYRVTVEPPLRVKRAFHPAGHKTDPVDSRQIAEYAYRFSDQLIPWHPKEEILEKIRQLLSVREQFTKQKVALKNARNAYQRQKVQVELIQRAHQETLVQLEKQITQIDQELVRLMKENPDLSRKFHYLKSIPGFGLLLSAHLLVITENFTSINDYPRLAAFIGIVPYQHQSGTSILKKARIRHYGPRACRKLLRLAAQSVATHNMTFRKYYLSKLAEGKAKALVLNNIANKLLKLACALIRDNSRYIKDYHSLHPMYVKGT

SEQ ID NO: 206319 - protein, 367 aa, unidentified
MKIIGCDFHPGYQQIAMLDKNTGEVTENRLSHSNAGEEAKKFYAQLTGPVLVGLEASGQSQWFERLLAELRHTLWIGDAAKIRASTERKQKTDRRDANLLLELLEQGRFPRIWVPTPAERDVRQLLLHRAKLVRVRTQVKNQLQALALNQGVQRKRKLWSAVGRKQLENLPLLPWASRRRADLLKLLDELEGSITALDGAVLQEANTRPAVRRLMTHPGVGPITALAFTLTLGPTERFRRGKQVASYFGLIPSEHSSGGKQRLGHISKQGSSFVRGLLVEAAQSAVRHEPQLRREYQRLAQEKVPCVRPKWPWHGSWRCGCTGCCAKKWTMRSCSRVPMQDSPSHLVVVVKTVGLSGHSASLKSRGV

SEQ ID NO: 206320 - protein, 313 aa, unidentified
MAFLHQQPQLCLGFDIAKDTITVSDGTSTRTIANQRRAIRTFLKGYKHIDLVVCEPTGGHEGLLLEECLRAGIACHRADTLKVKSFIRSYGTHGKSDAIDAGMLSGYGCERWAKLDLWQAPAPDEMDLRVLVRRRQELITIKVAEKNRAKAPGGRRLATSFEAVIKVVERQIQAIDAAIRELIANSSTLKHRAAVCMAMDSLGPIVAAKLLAILPELGSMTRRKAAALAGVAPHPNDSGLKRGYRKIRGGRPDVRTTLFMPALRAAAGKGEFAAFYKRLIANGKKPMVAIAAVMRKIVVTLNARLRDASIPQS

SEQ ID NO: 206321 - protein, 393 aa, unidentified
MVCVGIDVAKDKHDCFIISSEGEILADVFTIRNNAEGFDTLLQAIRRSTRPEDKIKVGLEATGHYSYNILGFLLDKGLPTYVINPLHTNLYRKSLSLRKTKTDRVDARTIAAMLMSDVDLKSYTDTVYHNEELKSLTRYRFDKVRERAKLKQSVSRLVTILFPELEKLVSSLHSASVYALLSEFPGAKQISSTHMTHLKAVLKNASQGRYGQEMAETIRNAARSSVGSVMPAKSLELQHTIRLIRELDAEIEDIETAIQAIVDEMQSPITTIPGMGVRMGAVILAEIGDFSRFDSPDKILAYAGMSPSTYQSGQLSLSGAYSHMEKRGSRYLRYALYNATKHVCHWDPTFAAYLAKKRAEGKHYNVALSHAAKKLVRLIFAMEKSQRPYCAAA

SEQ ID NO: 206322 - protein, 317 aa, unidentified
MDSRTTESFAGIDVCKASLEVALSGGKQVLSFRNDKRGVRALVGHLRGEQPALIVLEASGGYERLVVTALTAAQLPVVVVNPRQVRDFARATGTLAKTDAIDARILCHFAAAVRPEPRRLATAEEQALSDLQARRQQLVEMITAEKNRLRTAGPRVAPQIARHTRWLERQLQDLEGELRDLVQSSPVWRAKGELLQSVPGIGPALSAALLANLPELGELNRREIAALVGVAPLNRDSGVFRGKRRVWGGRRNIRTMLFVGALVASRFNPVIKAFYQRLHAAGKPKKVALVDCMRKLLTIVNSMLRTRTPWNPKPAHV

SEQ ID NO: 206323 - protein, 373 aa, unidentified
MKKNSSSKPRSWKRLARGKGDGWTIGMDLGDKTSRYCVLDENGAVLLEDSVATTRGALTKKYAGLVPCRIAIEVGGHSPWVSRLLQKMGHEVIVANARKVQLISASSRKDDRLDAQMLARLARVDPELLGPIRHRSEEAQLDLMEIRIRAALVEARTGLINTARGLAKSVGERVPSCDADSLDVERLAELPKTLQETLKPLLETIASLTEQIHSEDKRIEQIARSKYPETERLMQVSGVGTLIALTFVLTIEDEQRFGKSREVGCYVGLRPKRSESGQSQPELRITKEGDVYLRKLLVQGAHHIVSKRGPDTDLQRWGWKLAGQGKKNAKKRALVAVARKLAVLLHRLWVTGEKYEPLRNSQVAAADTKRRAA

SEQ ID NO: 206324 - protein, 372 aa, unidentified
MESIIYVGIDVHKDTYYLSSYLPEKNLIFAQTEIKADSKNVMKYLDKVSEMNNSAIVICGYEAGPTGFKFCRDLTRRNYNCVVMAPTSIAKTTRDKMVKTDKADSVLLAKSLAFHSYKQVVLPDENIEALREVVRLRHCAQKECKRAKQSFLSFLLSNGFSYPYGGKDSYWTKKFMLWVNSIHFTSEYLNLCKDEYLAEAVRMIQRVKSLDKKLEELQESEEIRDKVKSLKCICGINTLTAMTLVTEVGDFNRFKTAGNFASYTGLCPGSHSSGLTDRTTGITKQGNRIIRKLLIESAKAIGRSEAHKSVSLLKRQEGMPSEVINYADKASNRLRKRIRRLENQGMHYNKISAACARELACFVWGMMTNHIA

SEQ ID NO: 206325 - protein, 414 aa, unidentified
MTRKECFIYVGIDLHKETHTAVILNCWNEKLGEIIFDNKPSEFNKLTKKVNKYCIDGMEVVYGLENAYGYGRALAVWLIEKGYQVKDVNTALSYAQRKSVAMYQKNDSYDAQAVALVLINQLDKLPDAVPDDAYWTLGQLVNRRDNIKTHQTRLKNQLHEQLCVSYPSYKKYFSDISRQTALYFWDTYPSADYLKGKTPEDLAKELRAVSHNNCSINKAKIILDSVRTDGDTKRDYQESRDALTRSIIGDLKHYNKQLEDVEKAIEDLYPVFGCTLMTMPGIDITTATNILAEIGDINRFPNADKLAKFAGVAPVKFSSAGKGEDHASKQGNRRLQSIFYFLAIQMIQVTKSGTPRNAVFREYFIRRTLNGKNKQQVLICIARRLVNIIYGMLKNKTEYREPVFTKDLSPLKNQ

SEQ ID NO: 206326 - protein, 376 aa, unidentified
METQPTAQPKLYIGMDIHKKSWSVHLRTDISDHKTLTIPPDCDTLYDYVENNFQDHEVSLTYEAGCCGFSASRYFMNLGWNVLVVNPADVPRMDKQNYQKTDKIDCRNLAKQLHAGQLKGIYIPDESQDLLKSLVRQRAETSKHLRHIKLSIKSLLLYHGMKIPKEYDNPHWSKAFIEWIEKINWAKPTGKICMSSKLRMLEVIHQEYLQLANELRSYCRKHHKKDYYLLKSIPGIGGYLASAILAEVGDLRRFKSETQFASYIGMIPSIRNSGGTEKMQGVTPRCRGLLRSYIIESAWVAFRLDPEMQAYYRKHVGKNPKSIIVKIARKLLNRMLSVIKNETPYKINYGMEKQKSRLQNSTGESIPKDDITPLSV

SEQ ID NO: 206327 - protein, 347 aa, unidentified
MKFYNQQHKYYCGIDLHARKMYVCILDQKGKTMIHENIKTDPEMFFKLLSPYLEDIVVGVECVFCWYWVSDLCAKHKIPFVLGHALYMKAIHGGKTKNDKIDSYKIALLLKGGNFPTAYPYPAEWRATRDLLRRRMYLVHRCGELVAHIQNTNTQYNLPAFNKKLSRKYNHAGVAEQFENPEVRKSVEVDLAAIGSLNKILNQLEWHIEKTAEQHDYHTLYLLRSIPGVGLILALVMLYEIQDIKRFPSVQDFSSYARLIKPVKESDGKWAGKSNGKIGNHHLKWACNEAAILMLRESEKAKQYVAKLERKYNKGKALGIFTHKIGRAVYFILKNKEAFNMEKFYSQ

SEQ ID NO: 206328 - protein, 304 aa, unidentified
MNGIGIDVSKRQLDVGTTDGKTLQVSNSRSGFAELDLWLQGHPAVQIVLEATGGYEQPVLDFLHNAGHPVVRANALRARKLAQGLGHMAKTDRLDAYALAKMAALVKLRSYQPLEPWQREMRDFVRARRQAMHALTVARQQQEMVGNRELRRLLQANITCLQRTVERLGKRISEQVSKQPQLAVLKSMKGVGPGLQAVLASYLPELGKISGKAVASLVGVAPMSHDSGTLRGKRSIHGGRAEIRQVLYMASMSAMRHEPRLRDFYQSLRARGKEGKVAIVAVMRKMLVILNARMRDAQSRPIPT

SEQ ID NO: 206329 - protein, 361 aa, unidentified
MQSTTIIAFDQHAATTVAAVLLPTHRTPALHSLTSDVATIVRFVERVRRQGAVRCCYEAGPCGFELQRALTAHAAPCEVIAPALIPRRAGDRIKTDRRDASQLAILYRAGALTAIHIPTDQEEAARDLLRCREDIRADLLRARHRLSKFLLRHGRRFTGTKKAWTRAHDTWLRTQAWSIPALDQTHAAYLRAVDEAVARLRAVEDDLRSLLDLEPLCSRVQRLRCFRGIDDLTALTIAAELGDPRRFPSAPRTMAFVGLVPSEHSSGTRQARGAITKTGNAHLRRVLVEAAWHYRHRPFVGGALRRRQHGAPAAVVAQAWTAQQRLHRRYHRLAARGKPKQHVITAVARELTGFVWAALIQ

SEQ ID NO: 206330 - protein, 399 aa, unidentified
MLAVVVAHPSQPRETEWKRRKFGATVPELQRLREWQGAEGVQEVVMESTAQYWKPVWIALEGEFELQLTQARSNKAPRGRKSDFADARRLVKRWRAEDLTVSYVPAAEQRRWRAMTRFRRQAIRQRVQLQNQIESLLEEGQIKLSCVGSDLLGMSGRRILRALADGETDPQKLAEMRDARVRASEEEVKAALGGQLHSLHCRLLRLSLDRVEQIDQQIGELDMDLGQAMQAHQEAIARLVALPGLGVDSAQQVIAQIGPEAAAFPTPEQLASWVGVCPGRQESAGVSMSQRSPKGNRPMRRLITQLAWAAVKAKESYFQILFRRWVPRLGAKKAIWAVAHRLLRLIWKVLHKGVSYEERGPLGLNKNALHRRKRRLLRDLRALGYKVILEPLPTQGSTM

SEQ ID NO: 206331 - protein, 428 aa, unidentified
MPYNIAGIDVHKRMLHVVFSDVEVDGEYQFVRQKFDTSPSQLRMLADWLLEQQVEEVAMESTAQYWKPVWETLERYWKPVCEKREGAKPESGTLHLAQALSNRGRRGRKKDFRDAERLVKRLVANELILSFVPDPEQRLWRTVMRTKYQMTCNRVQLQNRLEALLEEAHIKLSGLVSDLLGASARRMLKAIADGESDPAALAALADRKLRATPQQLSDALGACTELNPVYRRLIKMALEDLESIEKRIVQLEQEMAVLLRPHEDQVKRLAEVPGLGVDSAQQIMAEVGATAATFPSAEHLSSWVGACPGDEESAEVSQSHRSPQGNRHMRRILNQAANAAVKLKGGIFEILYRRYVPRLGHNQSIGVIAHKLCRLVWKILHQGVHYEERGPAVSKVSKQKRTQRMLRELRALGYRIELAATQAGSPSA

SEQ ID NO: 206332 - protein, 441 aa, unidentified
MSKIINLNAAGIDISSKEHYVAVPEDRSKQSVRCFQSFTDDLHDLAKWLKECKIETIAMESTGVYWYHLYTVLLEYGFEVYLVNAYYVKNVPGRKSDVSDARWLQQLHSFGLLNGCFQPDNQTRSLRNYVRQRKQLITQMSREVQRMQKAMEQMNIKLNNVIRDIMGKTGMAIIRNILDGERDPQVLAQYKDPRIKASKEKMIKSLEGNWREEQLFNLKQAYEHYFFLKRQLAECDKECERLVNDMSDNDVPKKKIKSGVKQKNNPNFNVSQHLYNALGVDVTQIYGMKSTTALTVFAETGSDLKNKFPTEKQFLSWLNVVPDNKITGGKIIYSRVKRKKNKAGLAFRDAANSLWKAYNPLGEYLRRKKAISGGRQAIVATARKIASIYYKMVTEGVEFDPRVLEYKTQEYLIKKLKRLEKNIQKTKSLITENELVSESVI

SEQ ID NO: 206333 - protein, 332 aa, unidentified
MYLGIDVHKRYAQVAVMDEAGEIVEEVRVENANLDDLAQRYAGAQAALEATSNYYHIHDTLSQHLDVTVAHPKKLNQIADTDKKTDRVDAKELARMVRLNAVPESYVPTEEVREARALVRGRQTLIENRTKYANKIHGLLSDHGITEDVKPLTVEGREFLRELSLPTPWDALLGSYLDLIESLTEEIQKLDETIEDRAGSLKETQLLMTIPGVSYYTALTIYAEVGEINRFDGDKEVVSYVGLNPVIRESGDSRIEGSISKRGSGRVRWLLVQAANTAVHTCDDEYLSRFYDRLANRKNSQKAIVATARKMLVSIYHMLDRGEVYDPPGVSA

SEQ ID NO: 206334 - protein, 364 aa, unidentified
MNNQIYIGMDLHKNTSSFSVKDKEGKVIDECKLPTEPSAIKGYLKRFPDSSLAVEPVSQWYFYGDLIQGLGIDVHLANPLKVKAIASARVKTDKIDAGVLCDLLRSNLLPEAYFASPDARYWKEMVRYRSSLIRLRTQIKNKIHSILFRNGLRHPFTNLFGVGGRKWLESLDLAEHFAFNLKQYLGLIDAFSQLIKEADERIEKVVGDNQPAKLLTSIPGISYISALTIMAEIGTIERFASAKKLQGYAGLVPSTYASGDRVVHGRLTKQGSRWLRWTMIEIAQRQLLCKRKPGFGWYYQRIKQRRGSGAAAAATARKLLAVVWRMLKDNRPFEIVPPAPRSKTSLLRDKSGAKDAHRKNIVSH

SEQ ID NO: 206335 - protein, 347 aa, unidentified
MRFYTKQHKFYCGIDLHTKKMYVCILDGEGQIRLHQNINTDPTAFLNLIHPYRQDIAVAVECMFTWYWIADLCVEQKIPFVLGHALYMKAIHGGKAKNDKIDSHKIATLLRGGMLPQAYVYPARMRATRDLLRRRNHLMRKRAELFAHIQNTQSQYNLPDPLGCIAKPQNREGIAQRFDDPSVQKSMAVDLEMIEAYDHILTQLERDIIACAKEHDLRSYALLQTIPGVGRILALVLLYEIESIERFPQVQDFVSYCRLIKSIKESNGKKYGSSGKKIGNAHLKWAFSEAAVLFLKGNEPGKKYLQRLAHKHGKAKALSILAHKLGRAAYFMLKNKEAFNQKKFLGL

SEQ ID NO: 206336 - protein, 359 aa, unidentified
MIVFGIDPHMKTHTAVAIDAVTGRSLGEKTVGSDGDGHDKLLTWARKFGADRIFAIEDCRHVSGRLERYLLPRGERVVRMPPKMMAGARSSARTYGKSDPIDAACVARAALREPNLPEASLVGAEHDVRLLVDHRDALVGERRRIQQRLRWNCHDLELALELPPRVLDRYVWLDRLEVALRSLPASTRLRIALDQVARCRELTVGIRALEREIKVLTLELIPELLAFPGCSAVGAAHLVGETAGASRFSGEAAFAMHTGCAPLPVSSGKSNRHRLNRCGNRQLNSTIHMIALTQARMHPPAIAFMERKRAEGMSHREALRCLKRHISRVVFKTMLRAESARAGQVLQVDFNAGSVVVAV

SEQ ID NO: 206337 - protein, 352 aa, unidentified
MSKQVTALSPKLFIGLDIHWKTWKFHFTTDLVEGSGHTFPPDTKKVKDYVLRNYPDYKIFVAYEVGCCGYEPARDFISFGWDTFVVNPADIPRPAKNNFVKTDKIVAKNIAKQLRSGNLRKLVIPDKPREALRCLTRQRTALIRDYRRIKSRVKSLLLYHQIHIPADMDTPKWPIRFLDWLKTLKFENQNTRFTLNSMINQYQFIDKEIKQVSIMVRAYCKKHYKMDYNLLRSIPGIAGLTAAYILAELGDLRRFTSFKKFASYVGFVPGVQQSGDSLYNTGASPRANRHIRNMIVEAAWIAIRTDPVMQNYYRSHPGKNSKAVIFKVGRKLLSKLLGVIKSGIPYSVGVIR

SEQ ID NO: 206338 - protein, 343 aa, unidentified
MDHFAGLDVSVKETSVCIVDDTGRIVREVKVASEPEALLQELAKSAYRFKRIGLEAGPLSQWLFSGLAEAGLPVICVETRHMRAVLKAQINKTDRNDARGIAQMMRAGLYRPVHVKTLRSQKLRMLLTHRKLLQAKAIAIDNDLRGTLRNFGLKVGVAGAVKFEARIKELVENQPDMAALVEPLLIVRRVLRQQLGILHRRLLAVVRDDDVCRRLMTVPGVGPVVALTYRATVDVPARFRNSKAVGAVFGLTPSTHQSGESERTGAISRCGDEMMRVMLYEAAQSMLTHTNKWSWLKAWAMKIARHRGMKKAIVALARRLAVIMHRIWVDGTEFRWTRETAAA

SEQ ID NO: 206339 - protein, 340 aa, unidentified
MTIVMGFDQHRAQVTTEWTDTVTGEIGRARIVPAHREGVRRFLHRFAGQELEVALEATTGWRFVVEELRRVGAGVHLAEPAQTSALRGNKKRPKNDRADARHLRELLMIGRLPESWIPPDHLLDLRAKVRLRHTLVDQRGEWQQRIRAVLYHHGLAHRRELHLLSGEGQAWLERVELSDAAREQITVAIAMTDALDAQIAPLDRQLRLYARRQAGCKALMGHYGIGELTSVAILAELGDCRRFSSSRQAVRYAGMDITVYQSDKRRSPGHLSRQGPPALRWALYEAAQVARRAGSPDRGYYDQAAERLGSNRACVAVARKLLMRAYHTLRELGEEALQPA

SEQ ID NO: 206340 - protein, 417 aa, unidentified
MKNWNEITHYLGFDWAKDHHQVVVVDRQARIVAEFEFEHSLEGWLKFREQLRDYPVVAVAIETNQGAAVEQLLQSGVNVYPVNPRCAKAYRERKVPTSNKTDRLDAWSLAEALRVDGHTWRALQPLDPIIQELRLLCRDELHLIGQRTALINQLQQALAEYYPSALEAFDDWTVPATWKFLERFPTSGALASAGPRKWQAFLHCHKLYRQNTHERRMQAFSKAGQWTTSAATERAKSLLVLSLVKLLVILEKQLQEYRKQIEKLFASHPDHDLFGSLPGAGPKIAPRLLSELGDDRDLFPDADSLRCYAGTAPVSYQSGQVHKVYLRRQCNKYLRNAIHLWADLSRRWCQWAQVYYRQMRQRGKSHAEALRCLGHRWLKIIWKMWQTGTAYDSDLHMRNQLAHGSWVFQIITQTNGE

SEQ ID NO: 206341 - protein, 298 aa, unidentified
MRIIGCDLHARQQTLAMLDTETGEVVNLTLMHEGNNVREFYSKLPRPVLVGIEATGSMPWFLNLMEELGIECRVGHPAQIRAAEPRKQKHDRRDADLILKLLAQNRFPAIWLPSKELLDLRALLLHRHQWVRMRVRMQNALQAIALANGLRRGPALWSYDGQAKIAFLPLLPHAAYRRSALQAMYKNMQSEIENLTRRVAEQAGNRCGARLLMTHPGVGPVTALATEVFLGDPQRFTDSKTLASYVGIIPREYSSGEHQRLGGVTKQGSPLLRFLWGEAGAHAARRDPELKRFYRGDA

SEQ ID NO: 206342 - protein, 341 aa, unidentified
MEQATTIGLDIAKHVFQAHGADAAGRMVFRKRLTRAKLLGFLATQKPCVVAMEACAGSHYWAREISKLGHTVRLIPPAYVKPFVKRQKNDAADAEAICEAAQRPSMRFVPIKDEEQQASGVVFRARDLLVHQRTQCINALRGHLSEYGYVFPQGITHAAILIAHVEDRNTTLPDNARTILKILIGTFVALESQIKELDAEINRRSKEDALARRLMTIPGVGPITATAITALVPAAEQFRTGRDFAAWLGLTPLQKSTGGKQKLGAVSKRGERTIRRLLILGASAVIRQACLRGAPAGSWLAQMLQRKPKMLVTVALANKMARVVWALLVKGGVYKAPAVAA

SEQ ID NO: 206343 - protein, 353 aa, unidentified
MRKMQEYILKGKKIFVGLEDSKRTWKVCVRCDGMVVNEASMPAEYGVLRAYFQNQYPECRIKVMYEAGFQGFWLHDKLEEDGIDCIVTPANKVTWAKDDRVKTDKRDARRLAQNLENGDYVSCNVPDRERREDRQISRTLDQIQKDIKRTKNRIRKFLDYHGLNDGLKTGNWYDKDYMSLKDLQLSKSLKISLEASLSLLEGQLKIEKELLAELHALCEKEKYEQGVKSKKSAPGFGWLTAIRMTLEWGDMSRFITGKHIASYAGLTSSEYSSGDTVRRGRITAQSSDQVRSWLIEGAWRAIRKDPVLLEKFQNVWRNSGSKKKAIVAVARKLAVRLWALETTGQPYCIGVIE

SEQ ID NO: 206344 - protein, 353 aa, unidentified
MPRSTNLSVATMGIDIGKNSFHVVGLDQRGAIVVRQRWTRSQIRARLANMPPCLIGMEACVGAHHLSRRLHSLGHDARLMPAKYVKPYRKGQKNDFRDAEAIAEAVQRPTMKFVATKTADQLDLQALHRVRARLVSQRTGIINQIRAFLLERGIAVRQGLRFLRAQLPEVLGKRTDVLSDRMVHVIEDLAADWRRLDERIQGLSGEIQIVASQDPGCKRLMTVPGIGPIISSAMVAAIGSGAVFSNGRDFGAWLGLVPRQLSTGDRTILGKVSKQGNRYLRVLFVQAAWVVLIKPQIWERYGLKQWITAAKRRLHPNVLAIALANKLARIAWAVLSNDCDFKCEKTDETPRCA

SEQ ID NO: 206345 - protein, 430 aa, unidentified
MEIVYPRACGVDVHKSFIVAVICISESIKPRYIKKRFSTFNNQLIQFRDWLIENNCHNVCMESTGKYYIPVYNALEGHIPNVVVANPKWVKAIKGEKDDNKDAKWIADLFKFGIVRSSYIPEKDIRILREFTRYQYKLVNIRSSEKNRFQNALTVGNCKLDLVFTDVFGKSASSIVDTILSDEPYTSEDILSKVHGRCKASSDDILSAVEGTNLNQYQKVRIKIVQKHMEYVDSLLDEVQHHIDMMIESYENYIQLLMTIPGVNRKSAIIIISELGIDVSQWSSAHKLAAWAGLAPGHNESAGKKKSVKISKAGIYLKPCLVQVAHAAVKDKTCSYYAEKFGRISKRRGKKRAIIAIARKILVAIYHILKTGEVFNPSDMADVETTKEQRIAYITNNFRNAFNQLSRTGLSEEEILSIIIKKSNNSPQTE

SEQ ID NO: 206346 - protein, 343 aa, unidentified
MDKIATIGLDIAKQVFQVHGADAQGVTLFNRKLRRSEVRPFFEKLPPCIVAMEACGSAHYWGREISALGHEVRILPGQYVKPFVTRGKTDAGDALAISQAMRRPDIRSVRLKTAIEQAAAMVLRTRVLFVRQRASAINALRGHLTEFGLVADRGIPNVSKLAAAIPEKGDARIPPAARSVLDEILAEIEVLTSRIERIDRQIASEAKRDEDIRRLTAIPGVGALMASTIKAYVPDPAAFKSARHFSAWLGLTPKLNSSGGRLRSGRISKMGNPELRSLLYLGAVSVLIAARRRGTAWTWLRRLMDGRPLKVAAIAVANKTARIVWALLTKGGRYEAPGERVGA

SEQ ID NO: 206347 - protein, 343 aa, unidentified
MNSTIVGVDLAKEVFQVCVVEDGGVSYNVEMSPINFEHWLYTKSPLTIVFETCGASNYWKQKALKYGHNARLISARLVSTVRQNQKNDHNDALAIAQAALLPEVNFVSGKNIEQQQMQSILRLRELSVKHKVATYNQIVALLFEFNIKVTNKKNSLRDVIQSTLEDAENGLSVAFRNAIDRSWKQYQEIIQSIAIYDDCIEKSIQESLECKRLMKLEGVGVINAINLYMLLGCSDEGVFKKGRDAAACIGLTPIQHSTGGKTKLGSIGKHIKNNMLRSQLITGAFAYINHVAKREPRSKKDRWIISLIERRGKKCAAVALANKTVRTAFSMLKNNTEYKVCQL

SEQ ID NO: 206348 - protein, 442 aa, unidentified
MSRKRHKPEEIVSKLRQVDVLVAQGTPVGDAVRTIGVTEVAWPADMNRFIYRSRRRVGWCEFSDGVFGLLPPAHSLKVRRSRLRVQRGCGLEPQWETRSMKHYAGLDVSVEETSVCILDETGRICREVKVTSHPEDLRRILQDPIWHFERIGLEAGQLSQWLFDALADAGLPVVCIETRHAKAFLKAQVNKSDRNDARGIAQMMRVNLFRPVHLKPLTSQKRRVLLTARKLLQEKAIAIENDIRGLLLNFGLKVGVVGAAKFEERIHELIRDMPDLAEILERLLDARRRLREHFAALHRKLLALARGDAVCRRLMTIPGVGPVVSLAFVATIDTPARFRKSKAVGPVLGLTPVRSQSGNTDRVGRISLCGDGMMRTLLFEAAQTMLRQTTRWSWLKAWAMRVAQRRGSRKAVVALARRLAVIMHRMWCDGTEFRWTREAPVA

SEQ ID NO: 206349 - protein, 388 aa, unidentified
MPRYLGLDVHQRYVHACEFRPELPEGQQERHFRFPNTPEAWTAFAAELDREAVVALEVTGNAFEVHDILLPHAGKVLVANPVELKRLGSGRHTDRVDAARLAKMAALGIVPTVWVPPQLMRQVRRLLKTRERLDSQRRALLNQARAALGRHGIPVPRRVDPAVLLERVGRMPLPWGERVAVQATLRAAWALEAQVEALTVEIARQVADVPEVRLLLTITGVGLLTAATIWAKLGDPWRFRGPKQVARYAGLDPSVEQSGERDRRGRISRHGDRLLRQALVEAAWSVARHDEGELGRFYRRLAAKKGAKKALVALARKLLIVAWRMLRTGESYRAQKPATAQRKLVGLQRLVRRQPADWEVIRREVLPGWAQAVEGTTRRSGEELERAS

SEQ ID NO: 206350 - protein, 351 aa, unidentified
MLIIGVDYHPSFQQIAFMDQGTGECGERRLSHSDGEAEKFYRDLKQRGVSVRVGMEATGYSRWFERLLAELSIELWIGDAAKIKTKRVRKQKTDRQDAQLLLRLLLEDTFPRVWVPSPENRDLRQLLWHRHRLVQMRTRIMNQLQALAMNEGKRWKKKLWSEQGRAQLEKLPLAAWASRRRQDLLELLDRMNPTIEELTAAVEQEAKKWPEVLRLMTHPGVGPLTALAFVLIIGTPERFRCGKQVGSYIGLIPSEDSSAGHQRLGHISKQGNTLLRYLLGEAAQAAVRCDSDWRRRYVHLAMRREKNIAKVAIARKLAVRLYWMWRNGWEYSQSIEFGSYAGELATGHGVK

SEQ ID NO: 206351 - protein, 415 aa, unidentified
MIGVEAVYQRCVGIDVGKAEVKVCLRVQGRGSRPTRCTVSSWSTRTPQLIKLRERLVAEKVERVVMESTSDYWRPVFYVLSEELDVVLVKASDVKAIPGRKSDVSDAEWLADLAAHQLVRASFVPPEQQRQLRDLCRSRARLLQDRTREVQRLEKNLEDACIKLSTVATDLQGVSARQMLDALIEGRDDSAAMAELAKGRMRGKIIELAEALTGRVNEHHRFMLWFRLRRIDAATDDLALLDARIDQLIQQAPGFSQARDLLLTVPGVGLRGAEDLLAEIGPDMTVFASSEHLASWVGVCPGSHESAGKKKNAATRPGNRYAKRALGMAAKNAIKRKNSFLAARFKRLAARRGFTKALVATEHAMIIAIWHMLSSGTSYHDLGADYYTRRTPQKAIRRKIEDLEAAGYTITKTAA

SEQ ID NO: 206352 - protein, 395 aa, unidentified
MPPRNATAAPASAESCTLYVAIEISRTSWMVGIKSPVNERIGLHTIEAADVDALRDLIERHRARAEQVLEREVRVLNCYEAGYEGFWLARWLDGAMALETVVLDAASLLVNRKAKQRKTDRIDAKKMVRALLAHDRGDAAVLSRVRVPTVEEEDRKRLLRERQRLVKERTSLANSIKALLKLHGIFDMQPRSKDFEAKFANAKTAYGAPFPPRARQEILRIASRLALVEEQIAQVEAERDAVMRSGETVSMADAPQSSEARAAAKIAALTRLKAIGPNDATVLTHEVFYRGFRNRRELAGWVGVTPTPWASGDTRRDQGIGRDGPAWIRAQLIQIAWRWLRYQPDSALSKWFNERTAGSRGRIRRVMIVALARKLLVALWRFSETGLVPTGAKLV

SEQ ID NO: 206353 - protein, 470 aa, unidentified
MNHRRLVGIDLGIATAHTVRVLDGEGTIVAKRKAWPTVEGLTAVEAAALAGCPEGTRLEVVIEPTGPAWLPIAVFFTRRGHRVFRVSSQKAADLRRFLSRHAKSNGIDADTLARLPLFDPAGLAPLVLPGAERAALDRRVRATDRLTQLAAEHKTRIKDLARQLLPTSPLGGGLGAADLAVLERYADPRALLRLGAARLIALIVKASNNHQGAERARQWLDAARASLDLYGGHPAIDFTGLAAEVATEVRLLRATCAELAAHAAERETRYQRVDPAALARSLPGLADVGGPALTACMGDPARFTTGKKFRSFTGLTPKASETGETDRKGQPMSKAGSSLLRTTLVRAADTARKQDPQLARIYYLQMTERGKDHLGALCVVAASLAERAWTVMRRGTPYVIRDTDGQPVTPDQAKTIIAGRWTVPSEIRARRRSKKTGKAPQKVLEGQYERGSLPRSATPPRHTRPVKQAT

SEQ ID NO: 206354 - protein, 316 aa, unidentified
MASFLGIDVSSLSFDAAVRPQGIKMHLSNDPTGFEALLESLRKLSIKRVLLEATGGYERDVMRFLQDAGYKVIRVNPRRARSFADSLGIKAKTDAIDAEVLAHYAEVIPDQPSLRISPERALLRELLQQRDRLVQQRDDDLRRLKQVQSIAVANYLNANLKHFKAQIKLVEREIEQQTAMLNDERVTQLIKVKGIGMVTAGKLVALLPELGRVESREIASLVGVAPFNHDSGKFMGKRSISGGRFAVRRSLYMACLVAMKYNPALEARYQSLRERGKLPKVAIVACMRTFIVRLNAMLRTGTSWLDLVLPQPESTT

SEQ ID NO: 206355 - protein, 344 aa, unidentified
MSNITIIGIDLAKSVFQVCGLNQANKRQFNISVKRAKLVSTVLQHPNATIAMEACGSSHHWGRVFTELGYQVKLIPPQFVKSFCRGNKNDALDALAIAEASMRPDMHCVTIKTIEQQDYQTLLRGRTRLIEQRTATINQSRGTLAEYGLILPTSVAAFKRGIPEVLEDANNDLTPIMRTFIHSLYEDYQTLTARIDAFGRQLAAIANNHSIMRSLLRLRGIGPISAVAIYASIGNGSQFTNARQLAAWIGLVPKQHGTGGITRLGSISKRGNRYLRLLLIHGARTVMNWMKNKTDDLSLWTKQLIERRGRHKAIVALANKTARMIWVVLNRGIDNVPVQHLSPI

SEQ ID NO: 206356 - protein, 417 aa, unidentified
MVGCGVGDAFEQNEEVPVPRLWAGIDAGKTHHHCVAIGEDGKRVLSRRIANDESELLALVADVLSAADGDEVLWATDLNQGGAALMISVLVDNGQPVLYISGRTVHHASRTYRGDGKTDAKDAGIIADQARIRRDLQPIRSGDEIATDLRLLSAHRTDLVCDRTRAFNRLRATLLEYFPALEAAFDYSQRKGALVLLTKYQTPDGIRRAGASRITAWLRKQGTYSPAAIAEAAIEAANRQHTTVNGQKTAAMLVERLAAEILRLTGEIEETERLIEARFREHEHAEILLSIPGFGPLLAAEFVAVTGGTITNYESAGRLAGVAGVAPVPRDSGRITGNHHRPKRYDRRLLRACYLSAQTAAMHCPVSKSYYSRKRAEGKSHKQAILALARRRINVIWALLRDGTTYDQRGLAAPLPA

SEQ ID NO: 206357 - protein, 391 aa, unidentified
MIYAGIDVAKDKHDCFITNSDGELLFKSFTIPNNREGFETLFQKIQSVSDDLTKVKVGLEATGHYSYNLLGFLLDKGLPTYVINPLHTNLYRKSLSLRKTKTDKVDAHTIASMIMSDVDLKSYSDTSYHNEELKSLTRYRFDKVQERAKLKTSVSRLICILFPELEKLVPTIHMASVYTLLSEFPSAHAVASAHLTRLTNLLSESSHGRYGKDTAVMFREAARNSIGSNMPAKSLELKHTIKLIQELTSEIDEIETEIKSIMDEVYSPILSIPGINYRMGAMIIAEIGDFSRFDSPDKILAYAGMSPSTYQSGQLDNCYSHMEKRGSRYLRYALYNATKYVCHWDESFGTYLAKKRAEGKHYNVALSHATKKLVRTIYAMEKTGQSYSSAS

SEQ ID NO: 206358 - protein, 339 aa, unidentified
MKLYGGMDLHSNNSYRVLIDESGAVVQRRRVGNEMGRVLQTLEAYREQIDSLVVESTYNWYWLVDGLKAAGYQVRLAHPSALQPYEGLKYSDDRSDAHWLAEMLRLGIVPSGYIYPEAQRPLRDLLRQRSFLVRQCTSQLLHMGNILSRNRGRKTSRQQLRQMTVAEVRELFPDRERTLAVESSLRVIEVLEQQIRAIEKQVLERIKPEAGFRNLQTVYGVGPILAMTIWLETGEIGRFKQVGDYASYCRCVTSTRISNAKKKGQNNRHNGNAYLAWAYVEAATYAARFYGQAARFVERKTAQVNRTLAIKALAHKLARACYYVLRDQVRFEPARLFGG

SEQ ID NO: 206359 - protein, 418 aa, unidentified
MDTVYPHCAGLDVHKDTVVACVRHHDAGKRARQEVRTFATHTRALEELADWLAGEGVTHAAMESTGVYWKPVFNILEGRVAILLVNPHHIKQVPGRKTDVGDCAWIAQLLQHGLLTASFIPPARQRELRDLTRQRTQLGAEQTAVANRIQKVLEDANIKLASVAADVLGVSGRAMLDALVAGQENPERLADLARRRMRGKIPQLREALRGRVTDHHRFLLRLLLEHLDHLNRLVAQLDARIEQLAVPDAEALALLTTIPGIKQHTAEVLLAEVGPTVDPFPSAGQFASWAGMCPGNNESAGKRRTGQTRRANRWLRQAVVQAGWAAAHSKKTYLGARYQRVARRRGAKRALMAVGHTLLVIVYQVLRRREAYREIGADYYDRLQPERLTRHLVHRLEQLGHKVTLEDRAAEERAEQPG

SEQ ID NO: 206360 - protein, 414 aa, unidentified
MSVAEEPTGTPPCAGVDWAKDDHAVCIVGAGGEALQRFMVSHDRAGLKDMVRRLLRSGVDEVGIERPDGPIVDALLMAGLTVLVISPGQVKSLRSRYGSAGNKDDRFDAYVLADVVRTDRRRLRPLERDTAATTALRTTVRARRDIVIHRVAVANQLRAHLQIVFPAAAGLFDKIDSDVSLQFLERFSTQGQADWLSPKRLGSWLASIGYSGGTDPAVIHARITAAPRGTTGPDAEILAGTTHAYVAVLRTLNMQIRTLAAGIAEQLDVHPDAKIFTSLPRSGSVRAARLLAEIGDARGRFPTASSLACLAGVAPSTRQSGKVKAVTFRWGADKELRDALCDFAGDSRHSNPWAAAVYAKAIARKCDHQHAVRILARAWAGIIWRCWQDNTTYDPANHGALQHLLNQDQQTVAA

SEQ ID NO: 206361 - protein, 388 aa, unidentified
MEAQTVDTLPPVAADHDPVRCLLAIELSKKSWIVAITTALSDKISRYTLDGCDWKGLLELMERVRTRVAREVGRPVEMISCYEAGYDGFWLHRLLERQGVRSHVIDPASVQVDRRARRAKTDHIDAKRLLRSLMAYLRGEPKVWSVLCVPSVAEEDDRRLHRERDRLIAERGQHVNRIKGLCAIHGIYDYEPMRRDRMLRLEQLHTGDGRELPPRLKAEIARELQRLELILGMLKEIETERDAVALTENVSAHTNAKKIQNLVKLKAIGAEIATVLTGEVFYRPFNNRRQVASYVGLTPSPFQSGSKCRDQGISKAGNPKARSTMIELAWLWLRHQPDSPLSIWFQERVGTLKGRIRRITIVAVARKLLIALWRYLETGMVPTGAVLN

SEQ ID NO: 206362 - protein, 440 aa, unidentified
MEKLRENAAGIDIGAKNIFTAIEGKEVRSFETFTESFRQATSYLLESKVETVAMEATGVYWIILYEMLESAGLDVWLVDGRQTRQVPGRKTDVKDCQWIQQLHSFGLLNRCFVPDEQVKAIRGYHRLREDHIRSTAMHINHMQKALTEMNIRLKEVLSQIHGASGLAVIQAILKGERGTHKLLSLCHHSVIKKKADQVLKALEGHYTETGIFALNQAYQGYMFYKEQISECDQAIQKSMEQINNYLDDQDTKKQIDSVKGRKPIRHNKPEVDHLGGHLMKIFTGKDATVLPGITDYTWMQLYAETGSDLSRWQSEKHYTAWLGLAPGQHNSGKKKKTRNRKYRPKAGQIFRQIAQSLIESKKIALGAFGRRLKGKRGPGIAVKATARKLAVLYWRLMVKGLEYTERGIQDYEAKMKLQKERWLQKTVQELGYELVLHSAT

SEQ ID NO: 206363 - protein, 335 aa, unidentified
MEIPVEIKMKTRKTNHENIINAGVDVSKDNLDALLEGWNHSRRFANTPAGRRKMRSVLAKAAPNDRMLRIAVEASGGYEQPLLEECWTKGIACTRLNARQVRDFAKSKGILEKTDDIDADAICQFATVLKPEIGMPARKSVRKLSALVRRRDQVVDASRVEKTRLQQARHCGSGAFILRSIRKQIGACEREIVQLEKEMHRVVASDEQLAAEFAALIAVKGFGPVTVWALLGEMPELDRMNGNEASKMAGVAPLAYDSGSKKGVRRIFGGRSLVRRILYCAAMSAAQHNPILKAVYDGLIAAGKKRKVALVAVMRKLVRLANLILSDNDFVLSEA

SEQ ID NO: 206364 - protein, 347 aa, unidentified
MRFYTKQHKYYCGIDLHTEKMYVCILDERGNIRVHQNIRTDPEVFVSVITPFREDIVVAVECMFTWYWIADLCVEQNIPFVLGHALYMKAIHGGKAKNDKIDSHKIATLLRGGMLPQAYVYPARMRATRDLLRRRNHFMRKRAELFAHIQNTRSQYNLPDPLGCIAKPQNRQGIAQRFDDPSIQKSISANLLMIEAYDRLLTQLEHDIIASAKEHDLRSYALLQTIPGVGRILALVILYEIESIERFPSVQDLVSYCRLVKCIKESNGKIYGTNGNKIGNAHLKWAFSEAAVLFLKGNEPGKKYLLRLAHKHGKAKALSILAHKLGRAVYFILKNKEAFNQKKFLGL

SEQ ID NO: 206365 - protein, 316 aa, unidentified
MSETVLGIDVAKKKLDLCLMTGGKVLMKKFDNDAKGIRLLQGWLRSLKIERVHACLEATGTYGEMIAEFLHEHGHLVSVVNPLRIEAFARSDLKRNKTDTADARTIAEFCLEKKPEAWHPLPPEIKQLQALTRRIEVLERMRASEQNRFDVAPDPVRPSLKRVIADLKKEIQNVQRLIKDHIDNNPDLKEQSELLQTIPGIGEKTARLLLGEIEFRQFSSARALAAYAGVTPRRYQSGTSLNRTRLSKLGNGRIRKALYFPAIVAVRYNKVINLFAQRLKENGKTPMQVVGAAMRKLLHIAYGVIKNNRPFDPTPA

SEQ ID NO: 206366 - protein, 416 aa, unidentified
MNAVGIDVSSRKSTVAVLRPLGEVVCLPFDVTHDIAGLASLAEKLKALDGETRVVMEHTGRYYEAVEKALHEAGLFVCAVNPLLIKEYGANSLRRVKTDKADAVKIARYALDNWADLRDFTPMDAIRYDLKTLNRQFQLASKQRTASANNLIALLEQSFPGIRKCFDSPVRSDGTQKWVDFAHSFWHVDCVRKQPFPAFCERYRKWCKRHAYFFKLSNAEEVYALAKRAVVLTPKSKVVKVLVQEAANQLSSISRSVEVYRAEMDRLAAMLPEYPVVMAMYGVGKSYGPQLMAEIGDVRRFERKQALVAFAGIDPMPNQSGDKNVRSNKSSKRGSPYLRKTLFNVIRTYLQCAPQDEPVFQFLNRKRAEGKPFYVYMLAAANKFLRRYYAKLRDYFASLDTLQSVDPIPATLKASL

SEQ ID NO: 206367 - protein, 326 aa, unidentified
MSQASQASLGIDVAKATFDAALLMEGKLLQRSFAMTAQGFEALHAWIGKQGLEQVHACLEATGEYGAALALSLYEVGHMVSSVNPARIAASAKSRLARTKTDKADAALIAHFCRTQQPLPWTPPPAAVRELQARVRRVERLQEMAQQEVNRLHSGLHSPAVRASMEATLAFLRQEMAQMQRLVQEQVEQSADLQHQQRLLCSIPGIGRWTAARVLAESDQVRTSLSARQLAAYAGLTPRERTSGTSVRHQPRLAKTGNSRLRRALYLPAIVAMRHNPAVRAFAERLRARGKRPMVIVGAAMRKLLHLIYGVLKSGRPFDPALAMAA

SEQ ID NO: 206368 - protein, 323 aa, unidentified
MTPQDSGPSVGIDVSKKHLDVAQEPRKGPQKGDFRTGNHDTDIARLITRLQKLNPRIILLEATGGYEFQLVAALREAQLPVCCINPLRVRNFARSLGILAKTDKLDARVLARYAHALRPEPRPLPEAQQQELNQLMTRRRQVLKMIQMEKNRLDTAPFPSIQRSILQVLDTLKAQLKDLDRDLKEFVRRDPLWVEDNQLMQSVPGVGPVTSYAALAWLPELGAANRGEVSALVGTAPFNRDSGALRGTRCIQGGRHKMRQALYMATLAALRFNPVIRDFYQRLLQAGKAKKLAITACMRKLLCILNAILKNRQPWNPQMAQTT

SEQ ID NO: 206369 - protein, 342 aa, unidentified
MDIKVLGIDLGKTVCSLAGLDEAGAVVFRKRLQRHRLLAFLDGLPPCVVAMEACGGAHHIGRFCLQKGHEPRLMSPLYVRPYVKVHKNDDRDAEAIAEAATRPTMSFVAIKSEEQLDFQALHRARERLVTDRTRLINQGRGFLMERGIRVGSGRHVFQKELTRLAVQGTDDLSPRMLMLLSDMASELDVINDRVAAIDAEIKALARTDANMQRLMEIPGIGPTIATALVAAVGTGSSFGKGRDLAAWLGLVPRQITTGGKAKLIGISKHGNRYLRKLFIHGARTVLHLVRDRTSPITAWADDLKERAHVNVAAVAMANKMARIAWAMLTKGERYRPNALSGL

SEQ ID NO: 206370 - protein, 340 aa, unidentified
MNRTIYGLDVAKRVFQLYWIDVDTGEIYNRRFSRQQLIEFLANRPAGQVALEACGSGHWWARKIQALGHEVMLIHAKFIRPFVQTNKTDAADARAIWRAANQPEMRTVAVKSEEQQAMLGLHRMRSQLIKFRTMQVNQLRGLLYEFGFVFKSGRKAGLAEIRTRMAELEQAVPGLLWEAVKAQLVRLTQLDDEVKALEARINHWQKAQPACKAIAEVPGFGPLVATAFVATIGKANAFQSGREVAAFIGVVPKQSGTGGKVKLGGISKRGDPYLRTLLIHGARMVLTRAKDKGAWAESLLKRRPTNVAVLAMANKMARTAWAILAHDRLYQRNYVSVKPA

SEQ ID NO: 206371 - protein, 378 aa, unidentified
MSSPSTTPRSIIYLGMDVHKDSITIAVLPAGAKTPTRLERLPNDLPKLKRWIERVARDGEIRACYEASGAGYVLHRALQEWGYACEVIAPSLIPKRSGVQRKHDKRDATDLARLYRAGELVAVRIPSEADERVRDVVRCRETFQREILKSRHYILKFLARRGFVFREGTNWCTPHLQWLQHLTTDGSALASQDRLVFREYHALLMYKLQRRDELDRQIEQLALLPALAPMVARLQCFRGISLHSAMVLATEIVDWRRFERPAQLACYLGLVSREDSSGDRVRLGSITKAGNSHCRHVLVQAAWSYRHRPQTSVDLKRRQAGQPPAVITHAWKAQQRLHQRYTYLSDRKRPQIAVVAVARELVGFLWAVMRDLEPASAA

SEQ ID NO: 206372 - protein, 422 aa, unidentified
MSYRIAGIDVHKKMLAVVVSDVEVDGEYQFERVRYSSSPEHLRFLAQWLITQQVEEVVMESTAQYWKPVWEALERYWKPICQEREGAGPVSGTLHLAQAQSNRGRRGRKKDFPDAERLVKRLVADELVLSFVPDTEQRLWRTVTRRKYQLTRNHVRLQNQLEGLLEECHIKLSSLVSDLLGASARRMLKALAEGETNPVALAAMADKNLRATQAQLCDALGACTELKPIYRRLLQMFLEELKFIDQQISKLDQELASLLSRHHDAVVHLAEIPGLGVDSAQQIIAEVGAGAATFPSAKQLSSWVGACPGEEESAEVSKSHRSPKGNRHMRRILNQAANAAAKSKGTIFEIVYRRLVSRLGHNQTIGAIAHRLCRLIWIILHRSVRYEERGPSVNAKSRRHRTNRMIRELRSLGYRIEPLVTA

SEQ ID NO: 206373 - protein, 407 aa, unidentified
MDEIGKRYIGLDVHKHYLIALGVEANLEVVMPARRVELSNLEGWMKKNLTKQDEVVLEMTTNTWQLYDELVEYAGSVMVVHPPHVALITRSQVMNDKIAASILARLLAKGLLVGIWVPPQEVRELRGLVAQRQKMTRLATQAKNRLHAVIQRHHLMPPEGNPFAKKNNGWWESLALGRMEKMNLQSDLETLQFSEKQESRLQEEMTSIAAENEEIGRLLHIAGFGVITAVTVYAAIGDIHRFEDAKHLVGYAGMGTRVHDSGLTTRTGKITKAGRRDLRVALVEAAHVAANSHPHWKAELARLEPRLGRNKAIVAIARELLVTVWHVLARKVADRFAEPEKVSKKMLHIAYEVGKANRAGKSAAQFTRERMDTLGIGQDLTSIPWGAKKPIPLPPSKLKKESDVPNK

SEQ ID NO: 206374 - protein, 437 aa, unidentified
MIPVTFSELVIRNQQRSIAVSKIKSQKIKSVNDQTMIVTLDIGKGSHYGYFRAPDGQDVEPFAFYNTYDSFHSFWKKLSRFKKAHGCRHVVVGFESTGPYAEPITHFLKQQPVTLVQINPMHSKRVRELTGNSPNKTDRKDPRVIADVIMLGHALRVVIPQGASAHLRRLTQARERAIRDRTAIVNQLQHLLFVIFPEFLKVIKKISCKTGLYLLRHYPSRQAIAALGEQQLSRIIKRVSRAKMGQRHAEQLCQAAQASVGINEGQESIVEEIGHLVDKIKRENDFIDRVECQMRVHLEQIPYSRYLLSLPGVGLITVAGLIGEVGDFRQYGTVAEITKLAGLDLFEVSSGKHKGRRRISKRGRPLMRKLLYFAAINAVKSTGTMHQPYTQMLARGMPKIKALVAISRKLLRVMYALARNQSMYVENFASHRYHLAA

SEQ ID NO: 206375 - protein, 389 aa, unidentified
MLHDHPSDGPTAIRTQFGAIFVSLELSRSNWLMTSLSPGKGAKMSKQSVTAGDVAGLMKLFAELRRKAEVRTGQSYPIITIHEAGLDGFWLHRVLHQEGIESHVVDPASIAMPRRKRRAKTDRLDGETLLRALLAYKRGEPRVCAMVVAPSPEEEDRRRLCRERRTLIEERVTHGNRIKGLLFAQGIFDYAPLRRDRRARLEALCTGDGRELPAHLKAQIGRELDRIELLLGQIKAVEAAQEALLAAARTPASQEAAPDPVTMLLALKGMGPNFVAVLWSEAFYRQFANRRKVAAYAGLAATPWQSGGIRHEQGVSKAGNPRLRTTMIQVAWLWTRHQPQSALTRWFKERSPQGRKRAIVALARKLLVALWKYVTQGVVIEGAVMKPAA

SEQ ID NO: 206376 - protein, 385 aa, unidentified
MSAHSTPIQAAAQLQAHTLVASLELSTARWLVTVSAPGSDKLARHQVPGGDGQALLELLWRLQAAAARRTGAPVMIIVIQEAGLDGFWIHRLLVQNGITSHVVDPASIAVNRRHRRAKTDKIDGVKLLRTLMAWMRGERQVCTMVQPPSPEDEDRRRLARERARLLRERIQHTNRIKGLLSGQGIPDYDPLHRDRRPCLAALTTGDGRPLPERLKAEIDRELDRLEMVVSQLTVVERERDALVARTAEADACAAPAALARLRGIGPELAALLWLEALFRRFDNRRQIAAYAGLTPSPWQSGGIDREQGIAKSGNPRLRRAMIELAWFWVRHQTGSALSRWFVERVGTARGRVRRIAIVALARKLLVALWRYVTQGVVPQGAVLKA

SEQ ID NO: 206377 - protein, 313 aa, unidentified
MERIKFVGLDVHAETIAVAVAEQGGEVRSLGVIPNREESIRKLVKKLGPVEQLRFCYEAGPTGYVVYWQLTALGAKCEVVAPTLVPVKAGERVKTDRRDALKLARNYRAGELTPVWVPDAAHEALRDLVRAREAAKKDQLRAKHRLTKFLLRQGRRPPMGVKPWTRNYLAWVKNEVHFELGEVSRFTGARELMGYGGIVASEHSTGQSTRRGSITKTGNAHLRRVVVEAAWAYRHRPNIGETLRKRQEGVSEEIREIAWKAQHRLHARYRKLMARGKVKGKVVTAIGRELLGFIWTIGVKAEAAQKETKLRAA

SEQ ID NO: 206378 - protein, 331 aa, unidentified
MKILDTVGIDISKLTFDVRIHKTKSYEQFENSKKGFAELIKWVDKNSSVSKENRLFAFEYTGLYSHQLSVYLTEKEVSFVLIPGLEIRRSLGIARGKDDKIDASKIALYTYRLRDEIEPTELPTEQIQLLKSLLSLRGRLVKQRAGFKASLREQKRILIKKKHEVLLSIQEKQIKYLSKQIKNVEKEMSDIVSSDEQLNEQFKLIMSIKGVGEQTALFMIVYTHGFTKFKTWRKFASYCGIAPFPNSSGTSIRGRTKVSNLANKKIKSLFDLCAKSAIQHSPEMKVYYNKRVEEGKNKMSTINIIRNKLLSRIFAVVERQTPYVDVMKYAA

SEQ ID NO: 206379 - protein, 345 aa, unidentified
MSEVTTIGLDIAKAIFHAHGADASGRMIFSRRLTRAKLLAFFADQPRCIVALEACGGAHHWARELASLGHDVRLIPPAYVKPFVKRSKNDAADAQAICEAAQRPSMRYAAIKTEKQQAAGMVFRTRDLLVRQRTQLINAIRGHLAEFGWVAPKGPSHISVLAGLLDQSEELGASLPEAARSMFVVMTEQLEQLNDQIALLDKEIARRAREDVSARQLMTIPGIGPITATAILALAPPPESFAKGRDFAAWLGLTPKQHSSGGKEKLGSISKMGERTLRRLLIIGSSAVVLQASKRGAAAGSWLEQMLARKPRMLVTVALANKTARIVWAVLTKNEDYKAPVAAAA

SEQ ID NO: 206380 - protein, 317 aa, unidentified
METTALYVGIDVAQAHLDVAVCPSGEEWRVAHDPDGITALVERLTSLAPALVVLEATGGLEMPLAGELLDAALPVAVVNPRQVRDFARAMGKLAKTDTLDAQVLARFGEGVKPQPRPLPDAQTQELKALVVRRRQLVEMTTAEKNRLRRAAPRLRPQLQEHIDWLKRQSQELDKALGELIRSSPAWRAKEKLLDSVPGVGPVLCTTLLAQLPELGDLSRRQVCALVGVAPFNRDSGTLRGRRTVWGGRSQVRAALYMGTLVASRFNPVIKAFYQRLCAAGKAKKVALTACMRKLLTILNSMLKHGNTWNPELLQQNP

SEQ ID NO: 206381 - protein, 311 aa, unidentified
MSADEKELSHKSFDNTPTGIQSLLDWIAGYHLSLSKLLFCAENMGSYVTELSVSSVSMEFSLALVCPLTIKKSIGLQQGKNDRIDAKRIANYAVLHYRKLELYKLPNKDLVRLRGWIIIRDNLVKQKVSSIKLLETFSRMAKLADVTESISFLEEQLKSIKERILEVEEDMEQLIAASTSLYTNYLLLRSIKGIGIINAIVLLCVTDNFQRFDNPRKFACYCGVAPFEHTSGIYIRGKTQTSSLANKEVKVYLTRAAITAISWDPQMKAYYKRKIAEGKHKAAVINAVRAKIIARSFAVIRRQTPFVTLAV

SEQ ID NO: 206382 - protein, 339 aa, unidentified
MMTCYAGIDLHATNSVLVVIDDADRVLYQKRLRNNLPLLLAALEPYRVALNGIAVESTYNWYWLVDGLMDAGYDVHLAHAPALPQYSGLKHADDQHDAQWLAHLLRLGLLPTGYIYPKTERAVRDLLRKRSQLVRHKTMVVLSLQSLLTRLTGMRLSLPRLRQLTPEGVRALVPFPEQVQAVESSLTVLRCLEQEVRTIEDRVREAGRTQPGYALLQTVPGIGPILAGTILLEAGDMRRFATVGHFASYCRCVGSEHVSNGKRKGAGNTKNGNKYLSWAFIEAAHFAIRYEAVIRTYYQRKQARTHPLVALKAVAHKLARACYHMLREQVPFELSRAFG

SEQ ID NO: 206383 - protein, 379 aa, unidentified
MTTTDAAAEARETVYVAIELSKKTWVLGIAHPDRARPSIHRVCGGNIAELVSRLRVAARNNRRILVCYEAGYDGFWLARALAKMGIECRVLDPASIQVNRRARRVKTDRIDVLALLRALIATDRGERHVCAIVRVPSVEEEDARRSHRERQRLVRERTGHINRIKGLLFAQGIRDIKPKLRRSRIDFAALETAEGHPLPDRLRRELEREYARLSLIATQLREVEKERDTADAQDPVVEQKRQLLVALHGVGATSAAILAREVFARSFASRRQLGSYLGLTPSAYDSGSTTRCQGISKAGNSWARRILIEVAWLWQKYQPASPLSHWYIQRTAGQSSRIRRIMLIALARKLAISLWRYVETGLVPEGVAIARAEPRCAPA

SEQ ID NO: 206384 - protein, 403 aa, unidentified
MTAFFAGLDWASQSHAVCIIDDHGNVRERVDIAHSAAGLTQLQRSLVRDERPPIAIERPSGIVVDTLLDAGFTVIPIHPNAVKATRPRYRSHGAKSDASDAYLLADLLRTDGHRFAPLPAQSDDIRALRALVRGRDDVVAARTQLANQLRSLLASFWPGAAEVFADVDSPIALAFVERYATPESAHRLGPKRMAAFCAQHAYSGRRSAQDLLARLQQAPAGVCAEMEMEAKGELARSLARALSQLVEQIRLLSSRIEHHVESLDDGRIVMSFPRAGRICAAQILAELGSVRERFANEARLAAEAGIGPVTYPSGKSRTVTFRCACNHRLRAALTCLADNSRHASAWAAHVYNRARARGCDHPHAVRVLARAWVRVIWRAWTDRKPYDPTRHGAAQLLAKSAGG

SEQ ID NO: 206385 - protein, 345 aa, unidentified
MHVVTIGIDLAKNVFQVHGVDANDKVVFNKPLRRSQVLPFFAKLPPCLIGMEACASAHYWARELKKLRHDVRLMPAKDVKAYVKRNKNDSVDAAACCEAVRRPTVRTVPVKTPEQQAQLMQHRVRDLLVRQRTQAINALRSHLAELGIVAAQGYDGLKMLLAIIADGSDARLPENARASLSALVVQIASCQSEIGAIEKRLLAQHRKSDDSKRLESIPGIGVLGASAIVATVPDASIFKKGRDFAAWIGVVSREDSTGGKQRLGPISKQGDRYLRRILVVGVFAVIKQARAHPEKYPWLTQLLARKPVKVVAVALANKMARIAWVVLTKKEIYRVRQIAATSVGG

SEQ ID NO: 206386 - protein, 402 aa, unidentified
MNCVGIDISKGKSMIAVMRPFGEVVISPFEVLHTANELSELAGLLKSLDGETRGVMESTGNYHAPVAWLLHDAGLYVSVVNAMLVHDYGNNSLRRAKTDKKDAVKLANYGLDHWLTLPRYVPDEDTRLMLKTCYRQYQQYSKVQTMLKNNLISLLDTTFPDANRLFTSPPRADGSEKWVDFVAAFWHCECVCGLSEKAFTAKYQKWCKKHGYNFSEDKALDIYASACGHFGVMPKTDTAKLLVEQAISQLRATSAALAALKQEMQSLAASLPEYPVVMEMFGVGPTLGPQLMAEIGDVRRFHSKKSLVAFAGIDAPPYQSGQMDVRSRSISKRGSASLRRTLFLVMGVLLQCAPMDEPIYQFMNKKRSEGKPYRVYMMASANKFLRIYYASVKAYLDSLEHN

SEQ ID NO: 206387 - protein, 356 aa, unidentified
MVVTVGIDVHKDTHCAVAVDAAGRQLGRDRTFRAIDAGHRQLLRWVLTEFGREVEFAVEDCRQFSNRLERSLPAAAQTVIRVPPELMALTRQNTRTRGKSDPLDAVNIARAAVREPGVPRAEHPHASRDVKLLVDHREDLVGSGTAIQNRLRWLLHELDPRIDPEPRQLDSMRELDRVRDRVAALPVTTETATVIRIALEQFGDIRQLTVRARELEKELVLLVQQQAPQLLDLPGCGVLTAAELIGETANPCRFRSEACFAMHAGVAPIPASSGRTQRHRLARGGNRHLNAALHRIAVTQARLDCPGRDYYQRRKTEHQDSTMEVLRVMKRKIARIVYQLLNTPTTTAAACQPVAA

SEQ ID NO: 206388 - protein, 340 aa, unidentified
MTPIRIGLDIAKNVFQAHGVDGKGTVVIRKRLRRPDILRFFASLPPCLIGIEACSASHYWARELIRLGHDVRLMPARYVKPYVQRGKSDALDAEAICEAVSRPTMRFATIKTAEQQSVLTLHRSREILVKQETMLANLIRGCLGEFGIVAPLGIRRVCELIAVIKDDADPRILPEARIAMRAVADQLCDLQTRIKQIEQAIRAWHRGNEASRRLATIPGVGSITASAIVATVANATEFKSARHFAAFLGLTPKQYSTGGRQRLGRISKQGDAYIRRLLVLGGTSLVRYARGAGGSVWAKQLLARRPTRIVTVALANKAARVIWALLTRGEVYRAPQPQAA

SEQ ID NO: 206389 - protein, 269 aa, unidentified
MRSTVAQSVGVDISKDTLDVAIHPGGESFRITNNPEGHRALIKRLKGFDIARIVFEATGAYHRLFQQAMVEVGLPWVKVNPCQARRFAQATGKLAKTDRCDALMLARMGAVLELETRAPASKTVEALRELVNARDALIKDRVAALNRQAIAVSPLIKRQLAQRLRQIDGQIEAIDRRLKTLRNADSDLCQRFDILTSIPGVGEVTANVLVVETPELGRLEHAQAASLVGLAPVPRDSGQTHGKAIHPRRAPTSQTGSLHARPQRHPIEP

SEQ ID NO: 206390 - protein, 477 aa, unidentified
MNKKQGDNLQPPKAKSKRRRRNKGMCLEDRPVLEPNAAGIDVGAREMFVAVPPGRDENPVRVFATFTEDLERLTDWLEQCGVTTVALECTGVYWIPLFEILEQRGIRPCLVNARHMKNVPGRRTDWHECQWLQFLHSVGLLRAAFRPGQDVCAVRTILRHRNELVAAASQHVQHMHKALTQMNLQIHHVISDITGLTGRTIVDAILAGQRDGAELAKLRDPRIKADTETIRQSLEGNWRPEHLFTLGQSRDLYRIYQQQIVNCDLEIEKMLQGFAPRIDPGEKPLPPDRKRNRAGSKRRRKNGHPHPEFDLRTEAYKLFGVDVSQIPGLEENALPLFSEVGRDMSRWPSAAHFVSWLALCPDNDISGGKLLWRGARRVKNRAGHLFRMAAYALHRSLTPLGNYLRRMKAKLGPQAATMATAHKIAVIFYTMIKNQVEYDETIWDARDAQREKKLQAKLKRQAKQLGYELVPIEPQAA

SEQ ID NO: 206391 - protein, 314 aa, unidentified
MKKAVEIFVGIDVSKAWLDIAVHEQKETTRFRNDETGISSLVKKLKKLKPKLIVLEPTGGFEMLVVAELSQAGLPVAVVNGKRVRDFAKATGQIAKTDKLDARVLAHFAAAIRPEVRSLRTEEEEQLTALLTRRRQVLDMLTVEKNRLGTVRAKMRPDLETHIHWLSNNLKELDQEIEEFVKGSPIWKEKDTLLQSVPGVGPVTSATMLGMLPELGLLNRQEIAALVGVAPMNKDTGSKQSKRSIYGGRAAVRSVLYMAALSAKKHNPFIRKFYQRLIQHGKEKKVALTACMRKLLVILNAMVRTNQPWRSQTA

SEQ ID NO: 206392 - protein, 421 aa, unidentified
MRGIRGKRVKRVKEGTLIVTIDVGMTTNRGYCTTMDGRDIKPFKFENSREGFEKFLHMIVASKHKFGCTEIMVGYESTGPYAEPLAQYLMDKPVTVVQVNPLHTKRLKEVNDNSPRKTDEKDPRVIGDVLRLGHALSVVVPEGDAAYVRRLNNARERHVGERTALLNQIQQLVFLIFPEFKKVFKDVTIKTPRYLLRRYTTPAMIAGLDKDGLAGEIRKQSWGKFGMREAEALITLARDTVGIREGVPGIALDIQHILAQLEALNAFIDEIETEMAKALDRIPYSARILSIKGLGVVTVAGLIGEVGDFSKFRTQAEIMKLAGLDLFEISSGKRKGQKRISKRGRSLLRKILFNAAVGTVRKNGIMCDYYARLIARGMVRTSALVVVAKKLLRIIHAMLRDGRDYIPNYESPKRVVIKKAA

SEQ ID NO: 206393 - protein, 371 aa, unidentified
MDQSSKTLYIGLDVHKESIAVAYAPEDRSAEVVSLGPIGTRQCDIDKLIRRLESKAAPLVFVYEAGPCGYGLYRYLTGKGFACHVVAPSLIPRKAGDRVKTDRRDAMTLARLMRSGDLRAISVPGVEDEALRDLSRGRDDAMQDLTRSKRRLKSFLLRQDIRYEGRATWNAAHLRWLAEVVCPTPPPQIVFQEYLRAVSEQHERRQRMEHELHEAVTGWRVYPMVQAIQALRGVELTSAVILMTELGDLTRFETPRQLMSYLGLTPSEYSSGARRQQGGITKAGNSHARRALVEGAWAYRYPAKVSRHLQLRLETLPAEVQAISWKAQVRLCTRYRQLTARGKHVNQVVVAIAREMAAFAWAIAKLVPRAS

SEQ ID NO: 206394 - protein, 350 aa, unidentified
MRTRAYFVGIDLHKEVIQVCVLDGRVRQVSEQRFRGSSLAEGQAVVEALRKWKRGGRYAVEAVGMNRWMVNAMRADGMDVLVVDPVRLDLRSTGKKTDRRDAFEIARRLWLGDLDRSARSYYPSEEEYGCRKVLRTRHRLVQIRQQLVNQVRGVLNAYRITTPRGELASKKNLDWLSKTELPGRLLQDCLRALEPALRSVQASIEALTERIKEEALKEPVGSLQANLESVGPQTALSLVRELGDVTRFTSTRAVASYVGLAPKVANSADKSHHGRITRRGNSELRWILSEWAVRLMARNPLARRWAAPRLRRMHKNKIRIALARRLLIGVYYQLRHGEVFSLERCLGVRP

SEQ ID NO: 206395 - protein, 402 aa, unidentified
MNAVGIDVSKGKSMVAIMRPFGEIVSAPFEIKHTASDINSLVELINSVEGESRIVMEHTGRYYEVLAHQLSEANLFVSAINPKLIKDFDNDSLRKVKSDKADAVKIARYALDKWQNLKQYNVMDELRNQLKTMNRQFGFYIKHKTAMKNNLIGILDQTYPGVNTYFDSPARSDGSQKWVDFASTYWHVDCVRKMSLNAFIVHYQNWCKRKKYNFSQSKAEEIYGKAKELVPVLSKDAITKLIIKQAVDQLNSASTTVESLRTLMNETASKLPEYPVVMAMKGVGTSLGPQLIAEIGDVSRFTHKSAITAFAGVDPGVNESGSYEQKSVPTSKRGSSDLRKTLFQVMDVLIKTHPQDDPVYQFLDKKRAQGKPYYVYMTAGANKFLRIYYGRVKEYLSSLPES

SEQ ID NO: 206396 - protein, 370 aa, unidentified
MREPTTFFVGLDVHKDSISVAYASEDRNAEVCFVGPIGTRQCDIDKLVRRLHSKASRLVFAYEAGPCGYVLHRYLTGKGLDCLVVAPSRIPKRPGDQFKTDRRDAVELARLLRSGDLISVYVPRVEDEALRDLSRARYDAVKDLKAARLRLKSFLLRLGIHYVGRATWNDAHQRFLARVVCPTPAQQIVFQEYLHAISEIAHRLKRLEAQLREHASSWRLCPLVAAFQALRGVQDTVAITTVAELGDITRFDNPRQLAAFVGLVPSLYASGPSRRLGSITKAGNSHARRVLVEGAWAYHHPAKVSESIRKRLELLPKNIQDIAWKAQLRLCKRFRRLTARGKHPNVVVTAIARELLAFMWAIAREVKITA

SEQ ID NO: 206397 - protein, 421 aa, unidentified
MEDDLTVFVGVDWADEEHDVVAVDQTGRELEAFQVAHSGLGLRRLAQRLTELGGGNPGTVAVSIETSHGTIVDTLLERGFSVFSVNPKQLDRFRDRFSIAGAKDDRLDALVMASCLRTDRKLFRQLQPDPPEIVKMRELSRTTKELVNERQRLTNQLREQLHRFYPQMLELGVEMHLDWFLDLLALLPTPAKAQKVRKAKVARLLTKHHVRRFDAEGLLKVLRQPELPLAPGAVEAAEAHTMLLLERLALVCRQHKRAEKTLTQMLSDYAKEQEIEEQHDVEILRSLPGTGLIVLTTLLAEAQGPLSRRDYHALRGLSGVAPVTRRTGKKGKQKKWTVVMRRACNSRLRDAMHHWCRTAIQKDPWARAFYDELRGRGHKHGRALRGLGDRLLKVACAMLRDGTMYDPDRKLCAMAVTERAA

SEQ ID NO: 206398 - protein, 299 aa, unidentified
MVETTIIGLDVAKQIFQVHGVSADGKVTVKRQLRRSEVLSFFGKLVRCIVGLEACGGSHFWAREIRALGHDVRLIPPAYVKPYVKRGKTDAIDAEAICEAVSRPTMRFIPIKAAECQATLMVLKSRDLLVRQRTQAINAVRGHLAELGIVAAKGLAKVETLIAIVRDENDERLPAAARMALKLLADQIEGLTDCVDTLGREILAEVRRDDTMRRLATIPGVGPITAATIQALVPDPGAFTSGRHFAAWIGLTPKMHSSGGKERLGKISKMGTRRYVLFSSWAQRQCCDMPAAAPRYHLG

SEQ ID NO: 206399 - protein, 322 aa, unidentified
MGCRAASYLYGSPDHVRPKPDGQRTPSNGMDAPTRNGFDVPRWKCHRPLEPRGASITKVTTIGIDLAKSVFQIHGVDERGHVVIRKQLRRDQVAVFFANLPACLVGMEACGSAHHWARKLQGCGHRVRLISPQFVKPYVKSNKNDAADAEAICQAVARPNMRFVPIKTVEQQEVLSVHRVRQGFVKARTAHANQIRGLLAEFGLVLPQGITNVLRRVPQLIDGAAELPASMRQLIDRLLENMKVLDRRVKEFEAQIRAWHQGSELSRKLEKIPGIGPLAASALVASIADARSFKNGRQVAAWLGLVPKQDSSGGKPKLLGMG

SEQ ID NO: 206400 - protein, 414 aa, unidentified
MIVTEEPTAKRVCAGVDWAKDDHAVCVVGPEGEALQRFMIKHDRAGLKDMVRRLLRAGVDEVGLERPDGPIVDALLQAGLTVLVIPPGQVKNLRSRYGSAGNKDDRFDAYVLADVVRTDRRRLRPLELDTAATTALRTTVRARRDMVIHRVATANQLRAHLQIVFPAAAGLFEAIDSDVSLRFLERFNTQGQADWLSVKRLGSWLTSIGYTGGTDPAVIYARITAAPRGTTGPEADILAVSTRSYIAVLRTLNTQIRTLATSIAEQLDVHPDAKIFTSLPRSGPVRAARLLAEIGDARGRFPTASSLACLAGVAPSTRQSGKVKAVTFRWGANKELRDALCDFAGDSRRANPWAADLYDRARARKCDHPHAVRILARAWANIIWRCWQDNTAYDPAEHGGLQRILNQDQQPAAA

SEQ ID NO: 206401 - protein, 361 aa, unidentified
MKKSTQHLIAEVPRRQPRVEMTIGIDLGDVWSHYCKLNEDGEVVDRGRFRTTPKAIEKWFTDVPPARVAMEAGTHSIWTSEQLQELGHEVIVANVRELRAISHSDRKSDQVDAEKLARYARLDPNILRPIAHRTVEQQEALTLIRARDLMVRLRTAAVNAVRGLTKSCGHRMPASSTRCFAKRSLAVMPPGLAQALGPVLEQIATMTMKIKQYDRQIQELGQAKYPETQALLKVHGVGHITALTFVLTLGSKERFKQSRDVGCYLGLRPRRSQSGDRDPQLGITKAGNVYLRSLLIECSNHILRPHGRDSSLRQWGLHLASRGGKQARNKAVVAVARKLAVLLHHIWTTQEPYMPFYEQAA

SEQ ID NO: 206402 - protein, 363 aa, unidentified
MEIVYERVAAIDVGKKVIAVAIRTPDQGAGKRRQQVRKFNTFYRTLVEMVGWLVGEGVTHVSMEATGVYWRPVFHALCEAEYPLEVLLVNARHGKNVPGRKSDALDAVWLAKLTECGLLRGSFIPPAQIAAIRELTRYRKKPIEQRTSELQRLGKVLEDGGIKIDSVASTLKTLSARDMIEALINGERDPAILADLARGVMRRKIPDLSLARAGRFGDQHALMCTLHLEHIDHLSDMIARLDTRIDEASLPFARQTRLLTTIPGIGERAAQVIISEIGVDMTRFPTAAHLASWAGLCPGNHESAGKHRTDRTRKGGTELRATLCESAWAAGRTSTYIGAQFRGFHRRFGKPAARRPPPPPHTP

SEQ ID NO: 206403 - protein, 325 aa, unidentified
MMNVDLIYVGIDVSKTSLDVCVGVAGSVSTLSNDSAGHDALCKMLLPLKVGLVVLEATGGYEFACASALQAAGLPVAIINPRQARDFAKAMGKLAKTDRIDAQGLAHLAQVWAARPDAAKLVKPLPNEQKQKLAALVGRRRQLVELRVMENNHLGTAHRSTHKSIKSVIKSLGTQLRHIESELESHLKQYHADLSALLSDVKGIGAVTVATLVGELPELGTLNRRQISALAGVAPYNHDSGRLKGQRSISGGRATLRTALYMATLVATRYNAPIKAFYQRLVDAGKPKKVALVAAMRKPLTILNAMVRDGKPWDESIHVKGAKMA

SEQ ID NO: 206404 - protein, 348 aa, unidentified
MQFTSALPVIGMDIAKNVFQIHVVDVETGEIGRHKLKRERVTAFFANRQKSLVAMEACGGAHHWARTLQALGHEVKLLPAKHVRPFVLRDKTDARDAQGIWVAAQQLQIKAVPVKSEQQQACLALHRMRAQLMKMRIMQTNALRCLLYEFGIVLPEGHRILLDRIQGELGKAQERGRLPAVVVLSVQEQLKRIEGLQADIDQLDKRLASLAKHNQQMQALLAIPGIGPLTATAVVSAATDITSFESGRQFAAWLGLTPRQTGTGGKTRQLGISKRGDAYVRTMLMHGARAVIARSRHGGWIESLLQRRPYNVVVAALANKLARTAWAVLAKGKAFDPLQWNPTEITPA

SEQ ID NO: 206405 - protein, 414 aa, unidentified
MVWGRRRGMVHHRRWKQPMERTMQQSNDQSRSLVALEQDSTLIAVIEMSQSSWLVTAIVPGVTREPLKQLAPEPDLLRRQLQRWGEQARKAGCPIKPVTVAFEAGRDGFWLARWLRAREVEAHVIHPTSVAVSREHRRAKTDRLDLRLLRRAFLGWLRGEAAHCRMAAVPSLQAEDARRPSRERETLAGETTRIVNRLKGALARLGIRGFKPTLRGAAARLAELRTPEGAPVPANSLAELRRDMARLRLVKEQIKEIEAARLERLERAPASEPHAMVRLLARVHGLGIETADMLVHEVLTRRLRDRRAVARFAGLTGSPDESGKRRREQGLARAGSARVRRGMIQLAWRFLMFQKDSELAKWFATRTQNTKGARKTMIVALARKLLIALWRLATTGVVPAGVVLRAEPHAAGQA

SEQ ID NO: 206406 - protein, 427 aa, unidentified
MAYRIAGIDVHKKVLAVVVADVECDGEYEFERRRFGSNPEQLQLLSEWLIEQQVEEVVMESTAQYWQPVWGALERYWRPSCQKQEGAGAMSGKLHLAQAQSNRGRRGRKKDFPDAERLLKRLVAQELVLSFVPDPEQRLWRTVTRRKLQMTRLHVRMQNQLESLLEEAHIKLSSFVTDLLGVSARRMLQALADGETDPAALAALADKRLRATPAQLCDALGACTELNPVYRRLIKMALQELQFLEQQMGQLDQEIANLLRPHEDAVKRLAEVPGLGVDSAQQIIAEVGPTVATFPSDKHLCSWVAVCPGDNESGGVNYSHRSPKGSRQMRRILNQAANAAARTKGSIFEIVYRRQVARMGHNQAIGVIAHRLCQLIWILLHRKVRYEERGPAVTETSKRKRAARMIRELRALGYRVEALNLQTAASI

SEQ ID NO: 206407 - protein, 372 aa, unidentified
MNENIVYVGIDVDDARYHGSALNPCTGEVLDFQCRATLKGLVAQLEKVQAHFADARFKLCYEASYVGFSLQRDLNDRGYDCAVVAPTSIPRRAGKSVKTDRIDATELAQFYANALLTIVTSPDAQVEHDRDLLRSRQQLMHQQGALRKHIQSLLRRNGFHYKAQTQRKTHWRKHHYAWLEKTVERCPTTLKTNLSLLLRQLKSLDAILAAYTEQVQALAATPRYREPVKALSCYKGIKHLFALTMITEIGNVKRFAHPQKLVSWIGMDIREYASGGKSSRFGMTRQGNRYLRTAFIEANQRGYRTARLSKDIKARRAGVKPEYIAIADRCLRRLNTKGNRLLLAGKHPNKVKVACAREMVGFVWESLNRVAA

SEQ ID NO: 206408 - protein, 459 aa, unidentified
MMKGKKKQKPNRIRQHVSEDMPAINPNAAGIDVGGSEMWVSVPPDRDDEAIRRYDVYTQDLCAMADWLKQCGITSVAMESTGVYWIPVFQSLQKRDIEVILVNAKYAKNVAGRKSDWLDCQWLRILHTFGLLAGSFQPAADIGVLRSYLRHRQMLIQYGAAHIEHMQKALTQMNVQLANVVADITGLTGMRIIRAILNGERNPQRLASMRHWRTKNDEATIAKALEGTYEPEHLFALKQAVELFDFYQQQISACDQQIADYLRSLESKINTEVNPIPPARAPKNNHRNSPKFDCRSEAYRISGVDLTQIPGISESAALTILSEVGIDMGPWKTEKHFASWLTLSPNHKITGGKIFQRSTRKSHNRVRDVLCVCAQTLFNSRTALGAFSRRMRSRLGPEKAIVATAHKLALLIYRSLTFGKLYVDIGQDAYESQFKERSIRNIARKAKEFGFQLVAVAES

SEQ ID NO: 206409 - protein, 385 aa, unidentified
MKGETFKPTDYEVFAGLDVDKRSISVTFTNHQGFIRSFRMPYSVEHLVNHVRKHFADQKVAFAYEAGPTGYGLYDGLVAKAYPCLIASPSMIPKAPGQRVKTNRLDSRGLSENLRGGQLKSIHVPSALYRELRHLTQLRDTFVREMVGMKQRIKSLLLFKGIEFPPAPAGRQFSFMVKDKLRKLECSQTVRFKLDQLLDSLEFSEKQVLKATREIRRFCRNDAELSQCIGYLMTIPGIGWIVASQLMARIGDWRELKNIRQLGGFLGLVPTEDSTGDRTDRGSITHTGDGRLRSKLIQASWSAIRQDGELRDFFRSVCRTHARHLASRVAIVAVARKLSVRISVVLMKQRPYEVRQKVQSAPLTQEETSPQGTTRRQAEPGEKNS

SEQ ID NO: 206410 - protein, 423 aa, unidentified
MISAVLECCAGIDVGKKWIAVCVLKGPANGDAQAEIRRYQTTNQCLEQLCEWLVECGCTHVVMESTGEYWRPIYNVLEEATDLEIILANSQQVKGLRGHKTDPSDAHWLAHLLRHGMIRPSYIPPLPIRQLRDLTRRRKQLVRSGAQERNRIQKILEDANIKLGSVLTDVFGLSGQLMLDKLLEGEATPEEIADLAQKRARKKIPQIRASLEGHRMNALHRRLINLSLDHMAFLEEQISTLDEEIVQHIQAHGLEKPYQLLQTIPGVKEEGAASLLAEFGPDMEVFGNAKKLSSWAGVAPGNNESAGKKRRAPALRGNPWVRSTLTEAAWSASRKKDSEFKDHYDGWKGRLGHKRAIVAVAHSLAETVFEVLSTGQPYTKPGADPMSETKAAHLIRHHTRRLKTLRKRLKPQYQRHETQHATP

SEQ ID NO: 206411 - protein, 319 aa, unidentified
MNISEYPFSTFIGIDISKDKIDIAELKGAAGKTIGNNKQEICRWITSLKETCQTIVVMEATGGYESLLVKLLHEHQIALAVVNPRQVRDFAKGLGYDAKTDPIDACVIARFGDVVHPTPQAAQSDEHIKLGALVERRRQLLDLVNQEQNRLQQTADAEIRKSIQTVLKGLKTQVKKMDERIAKAVEADVANARTVEILNSVKGIGPVTVSTIVAELPELGKLNRQEVAKLVGVAPMNNDSGKSTGKRKTTGGRHTVRRTLYMATLVATRFNPTIKAFYQRLLAKGKLKKVALTAAMRKLIIILNTMVRTDQLWRESAIG

SEQ ID NO: 206412 - protein, 395 aa, unidentified
MFIVGIDIAKRSHEAIIIAEDGQVVRKAFSFRNNCTGYNLLLEQVRRLTLVKSQIVFAMESTAHYWLALYARLLKDGYAVMVLNPIQSHSLRELYIRKAKTDARDSLIIADLVRFGRCKASNVPQDKILALRELCRSRAYLVDMAADLKRKLIALLDRIFPEYESLFDSVFSKASIAVLSKYSTPQKVKNANLRKLTDILMESSNGHFGEWKAHQLKEAACSSFGIDDSGGVYSTLLGMFLEQILSLTAQADSLEKQISVFFQEFNNPLTSIPGVGTVLAATILSEIGDITRFSSADKLLAYAGLDPSVKQSGEFKSNQNRMSKRGSPYLRRAIWLASTVAVHRDPMFQIYYEKKISEGLHYMNVIGHVSRKMTAVIFAVLRDGQPYQPILQSAG

SEQ ID NO: 206413 - protein, 336 aa, unidentified
MAMKTNAFAGLDQAVSLGIDVSKATLDLCWVTDQGAPGCEIGNRRPALMRLAEALVAADFHGKIIIESTGYYHWLAVVILSEAGLDVRLVNPLLAHKHHQGGIRKVKSDPVDAATLARMALTEQRLPPCWDKGAAWVAHRHRVGLICSLDKSLQQFKAALSSHRDALALMGVKDDPTVAAIQAQIQQLEKTKRQTEAELARTLAALSEVNRQRYASIPGISDYLAGVMNLMLRPEARQAKSWIAFVGLDISVRESGQWRGRTRLTKRGMGYLRKKFFQAAWGAKQHDPQIRAYYKQLMQQGRPYVECLLIIARKLLRIAYHLQKNQEMYDPNKAWA

SEQ ID NO: 206414 - protein, 347 aa, unidentified
MKYSGVDLHSNNSVVTVTDDEDRVIAEKRLPNDLTKIVGFLLPWRDELKAVVVESTYNWYWLVDGLQEAGFVVKLANTCAIKKYDGLKHSGDEADARQLAHLLRLGILPTGTILPPEQRAQRDLARKRMQLVRSRTSYILAIENIVARQRAMKINSNQVKQLTADEVDQIGLSEDVALTVKSNLAVTLSLSAQIDIIEKRLQERVGKRKEFVLLNSVPGIGNILATIILLEMGTIERFAFVGNFASYARCVDSQHMSNGKKKGEGNTKNGNKYLAWAFVEATNFALRFNAEAKRFYERKKAKTNTAVATKALAHKLARACYYMLKENQPFDAMRCFACVLTAATSPA

SEQ ID NO: 206415 - protein, 334 aa, unidentified
MEQVTTVGIDLAKRVFALHGVDRAGRVVLRRTLGREQLLEVMAALPPCVVGMEAGSGAHDWARQLQKLGHTPKLMAAKFVSPYRRKGKNDGNDAEAICEAVSRPGMHFVPVKSLEQQALLSLHRVRQGFIVERTATINRLRGLLAEFGVVLPQRAIVVRRGAGKAAEGLPIVGRRAIEDLLVHLRTLDERIATYDRELEAQARQSEPARRLMKIRGVGALSALAIVATVGNARDFRSGRQFAAWVGLTPRQHSSGGKTRLGHITKRGDPYLRCLLVQGARSVLHTASRHADQLSRWAQTVESRRGYHRALVAIASKNARIAWALLSRNEVLRPA

SEQ ID NO: 206416 - protein, 346 aa, unidentified
MIVIGCDFHPSWQQVCWLNMVSGETNNEKLVHASGDAEKFYRRLTVPVRVGIEATGNCQWFLELLGKLGHEVWVGDAAKIRACDPRQQKHDPRDARLLLQLLVENRFPRIWTPSSEEKDLRQLLLHRYKLVRMRVQVKNELQHLAMNKGITKGRRLWSAAGEKVLCELPLAPWASRRREDLFKLRSMLNEQVAALDEAVKNVAEENERARLLMTQPGVGPITSMAFVLTMGDVSRFPRGKQVASYLGLIPREYSSGGHQRFGSISKQGNRFMRMLLVEAAQCVVRYDAGFRNEYLHRCHTKPRGVAKVAAARKLAVRLYWMLRTNTAYPEIARVGSSSRVALDGAS

SEQ ID NO: 206417 - protein, 347 aa, unidentified
MNYIGVDCHISTLDFAVVTKTGRVKNKARVKTSVKEFMEFIKTVPKPRKIFIEEGTLANWLLETSMRYGEKLIITDPKTNKWIGKSMNKDDAIDAEKLAHLARGGYVKAIYHPVNKKRRFKELVFAYHDTVKSLTRIKNKLKARFRAEGIPCNGMTVFSEHSRNEWRSKLPTNPIARLIADELWNQLDQLHEAKKTLRKNIGTESRQYPEIKRFMKVPGIGLIHASTIFAIIDTPYRFSNKKKLWMYAGIGLAERSSGGTVYSKRLTREYNRQLKDAVKKAVEAAICAKDNQFKRQFVRLTIKQGLPAHKAKLTVARSILATLYGMWKNGEEYDPDIDRKRQEGNKK

SEQ ID NO: 206418 - protein, 410 aa, unidentified
MKRDEFIYVGVDLHKFRHTAVVVNCWGEKLNETTFMNKPSLFPDFTRFVEEQAEKGITPVFGLEDVNGYGRSLAVYLLERGYTVKSVNPSLSYAERKSHAMTKKSDSWDAECIAEILARKIAQLPDAAPSDVYWTISTLVGRRDALVKSFSSLKNQLHLQLSHHYPSYHQFFSQIEGKTALAFWEKYPSPHHLEGGTMDELRLFLLDASNNSLSTKKAQAIISLVKFDGETKRDYQLQRDFIIQSLVRDIRFKQEEIKKVEKELKGLVKSLGMQLETMTGIDTVTASALISEIGDIHRFSNSNKLARYAGIAPVLFGSGGKEAYQKSQQGNRNLHHIFYNLAVQQVQVCKGSKTPRNPVFYEYYQKKLSEGKTNKQALICIMRRLVNIIYGMMKNKTAYIMPEQVETKAS

SEQ ID NO: 206419 - protein, 398 aa, unidentified
MRKVVGVDVSKAKLNFCILNDTFEIEREGVVENNLLGFEKLTALLESSKVEVEIIFEPTGVYSQKLQYYLHLNDFKYVIINPLLAKKEMDTLRKTKNDRLDAKKLAIVQVKNKYDFTVMNKLIYSELRYAHRYYQVISQDHINAKNRLHRSLQLTFSDVEKLYSSNKTDVFYNIVKIIPHAGIIAGKNTDEVFAILGGLLSKSKKSHIKRVNRLIELANITAVAVPVESVMNDQVSHWASEVLRLQLLKDRIIEDMVKKAAKLEEFEKLCSLPGFAEVSVVGLIAELGDIRRFKTSQKLNAYVGLDISFYDSGQFKSKGRITKRGNPIARRILYLDTLNMIKTAKRTHEDNPVARWYEHRSKNELNGKKKILMGATDRMLRLVHKLVTTDATYTYSND

SEQ ID NO: 206420 - protein, 327 aa, unidentified
MDKSVAIGIDVGKFTLSCSAPNCKVQDFDNNRAGIGAMLEHCCRCAPPSRLLFVMEASGGYSEFAARTLLELVPTSVAIVPPICISSFIKSRIKRLKNDHADALAIRLFGEKTELKPWLPPSLAQRRLRELLLVLDNIKQTVVRQKCLMEKLTTSPAPESFAVACLATIRAEAEAQRRQLEAEIEAVIASEPQLAADSANMLSIPSVGPALRTVLLALCHRQLHELSQRRLLARCGLAPQENQSGKSAGHTTLNKAGDPRIRRTLYMAAQCAIRPGGILHDYYQRQRQKGKSGKSALMSVMRKLLHLIQAVVKSGTRFDKERYAHAA

SEQ ID NO: 206421 - protein, 345 aa, unidentified
MLHVGMDLSRHRLDVRVLEEGGATVAEVAVAPTGVELRLLAARFVVEGPVRAVIESMNGARFVHDTLELAGWDVEIADAQKVKGLAPLACKTDRIDAWVLAELSRRDLVPAIWLPDPTVRAHRERARFRLHLVHHRVQLKNRIHASLIAFGHACPTSDLFGVTGRQRLAELEFPEPWASDIAACLELIDHLNTQIAGIEADLRREGADHSYVPLLMTTPGISWILAYTIAAEIGDIARFEAPKKLCGYSGLCPRVYQSGDTDRRGKLTKNGPKYLRWALVEAAIHAARHPVYVDHYQRTKVRLGRQRGAKVARVEIARKLTEAIWHMLTKGEPFAPAGPTQTLAA

SEQ ID NO: 206422 - protein, 312 aa, unidentified
MEGLFVGVDVSKAWLDCGTEPPAGVSRFGNDVAGIQALVTWLRERSPTLVVLEASGGWETEVASALVAADVATVVVNPKQVRAFAKGMGLLAKTDRLDARVLALFGQRIRPAVRPLPSAEQRDLAELLDRRAQLVAIRAQERARLVTALAIAKPSLQEHIRWLDERIRQLEVDLTAQLRTSAAWQVKANLLQGVPGIGKITIFTLLARLPELGHLNRARIAAVAGLAPFADDSGNRRGARFIQGGRAEVRSVVYMSTLTATKHNPVIKAYFERLIAAGKPFKVAMTACMRKLLTILNAMLKTNQPWRAPTTA

SEQ ID NO: 206423 - protein, 324 aa, unidentified
MIDAVLGIDVSKNTFDTNLGAGTKARSKSFANSPDGWHHLIAWLGEHKIGQVHACLEATGRYGLGIALALHEAGHVVSIVNPAQIRDFARTKLGRNKTDQVDAVHIREYAELFKPRPWTPPSPAMRRLCELQTIRAGTVAGLTEWKNRRGSGITDDLTRSLAETTIRHFTSQLEAVDQAIAETIDNDVELSAKRDLLVSINGVGKALAGIVLAELPGPDILGSSAAAAAYAGLNPQQHQSGISVNRPVRISKIGNAVLRTALYMPALSAMRYNPAVAALVDRLKAQGRLKGKQIVIAAMRKLLVLCFGVLKTGKKFDPAMAMGK

SEQ ID NO: 206424 - protein, 315 aa, unidentified
MTQTNMTTAGIDTSKLKLDIAVHGRTERWKVANALPGWRALAANLAKADVTRVGIEATGGYERGVVEHLRAAGLIVLVLQPVQVKAFGRVHLRRAKNDALDAELIAACAAAIDRLRMVPDARLTELAGHLTFLEQTEEDIARFKTRLEHIDEPGLRRIVNSDIARLKARKAAQIRDIAKRLRTHDDLAERLDLVLSIPGIGERTALALLIRMPELGQVSREEAAALAGLAPFDDDSGQRKGQRRIAGGRGRLRRSLFAAALPAAYRWNRALIALYARLKARGKAHNAALVACARKLLIYANTVVQRGTPWTEKAA

SEQ ID NO: 206425 - protein, 331 aa, unidentified
MCVVGIDIAAKSFDLVVRRNGTNAKVRRFEQTPAGHAQAAAHLKKLAPERVVMEATGVYFVDLAVALHAAGLPVSVINPRSFKHFAQIKLKGSKTDAIDAALLAEYAQRMAPALWVPPAPDRLALRDLGRQINRLIHARTQAKNRLHALQARRDVSALLIDDEREGIEQLDARIERLKGAAQQRIEQCAQLSVMAQHLRCAKGLGAASTLAILAELCVLPTQMNSAQVSCFAGLDVRLNQSGSSVHRPGRLSKAGNAYLRAALFMPAMVAVQSDPNAKAFYEALLARGKKRIQALCALMRKMLTGIWACIRNGTPFDSSRLFSCAQTLLKA

SEQ ID NO: 206426 - protein, 354 aa, unidentified
MIIIGCDYHPGFQQIAFVDTETGDCGEQRLEHCQGAQEFYHELATQGKKVRVGMEASGHARWFERLLEELKIDLWMGDAEVIRAKRGRKPKTDREDALHILNLLLTGDFPKIWVPSWENRDLRQLLWHRHRMVQARTRAMNQLQAVALNEGLRCKKKLWRAHGREQLEAFRLAPWASRRRKDLLELLDRLNPTIAELTQAIEQEAEKCPQAQRLMTHPGVGALTALAFVLIIGKAERFQCGKQVGCYLGLVPLEDSSGERRRLGHITKQGNSLLRFLLVEAAQVTSRTLPEWRSKSIHLTMRRGRKIAKVAMARKLAIRLFWMMRQGWNYQQVMKFGSHVEQPGHRDGVQSNTE

SEQ ID NO: 206427 - protein, 394 aa, unidentified
MDVLHPRCCGLDVHKSSISACILLREAGRVQKHQRRFGAMTQELQELAEWLRQFGVSQVARNPAVFTGSQSGTFWEGQFTVVLANAQHIKNVPGRKTDQKDAEWIAQLLQYGLLRPSYVPCEIIRDLRDLTRMRASLSQEASRISSRIQKVLEDANVKLASVATNVLGKSGRAMLEDIISGEDDPEHLASLALGHLRVKIPQLRFALEGKVRSHHRFLLRRLVDQIQFVEHEIGLLDERLEEIAQQRPELSQAVARWDTIPGIDRVAAWALLAEIGDNMAQFPTAGHLASWAALCPGNHESAGKRLRGTTRQGSPWLCRMACQCAWAAARTKNTYLTSQFRRLAARRGKKRAIIAWRIPSSSLAITCRRTRATMRILAETTSIASTPTVSNGTW

SEQ ID NO: 206428 - protein, 351 aa, unidentified
MKEYIAFDSHKRYTLMEREQVKSGKTTHLRIEHAPGAIRQCLRNREPGTPVAVEATGNWYWIVDEIELAGLEPKLVHPRKAKLMMGMINKTDKLDAHGLNRLQRNGTLPTVWIPPRELRDQREITRGRMVMTSQRTRLKNRIQSTLSKYGWAGTEASDPYGKKARAQLNQAIQQLPPETSQITAALLEQLDFIQGQIEATEKRIRELVCDTPEMDWLRTLPGIGWILSAVIGLEIGVIGRFASAERYASYCGTTPRVHASGDKIRFGRLRPDVNRYLKWAYVEAAHSVCLQRGKFPLRHSSRLYERIRKRKGHPKAIGAVARHLAEATFHVLTRGQPYCDPGLKAGQSREV

SEQ ID NO: 206429 - protein, 355 aa, unidentified
MLGVLTVNTTKEAPVSAHYDGPQYVGIDLHRRRSVIVRMTEAGQQLEAVRIDNDPVALALEIAKAGPDPEVVLEATYGWYWAADVLQAAGARVHLAHPLGVKGFAYRRVKNDVRDAADLADLLRMGRPPEAYLAPPAVRDLRELVRHRAKLVALRSGLKAQVHAVLAKQGVHVRVSDLFGVAGRSLLDDASLDPPYRARVNALLRLIDAYDFEVELVLRGRLATDPGYRALLTLPGVGPVLAAVFRAEIGDVARFPSARHLASWAGLTPRHRESDTKVHRGSITKQGSTLVRWAAIEAVQKLPADAGWLVASRARLTAQRGRNIATVAVARKLLTLVYYALRDGHVRALRRGQAA

SEQ ID NO: 206430 - protein, 346 aa, unidentified
MEYVGFDLGKVNSQICVLTEDGELVEKRLKTERETLAQFFGRRFGQVCVLIEASTESEWVARCLEEIGCRVIVADPNFAPMYATRSKKVKTDRRDARALCEACRLGAYRTAHRISDEARATKNLLAVREQLVLTRSRYISFAKSLLRGEGLRLNSVDADRLSRKLEAMELPTVLRQTLTPLIAAMKTLDEQIKITDKELERLAADNETVKRLQTVPGVGVITAASFAAVIDNVERFETAKQVRMYLGLVPSENSSGERQQRGRLTKTGNRRLRYLLVEAAWSLLRSKKADTAKLQKWTQTIAARRGKQVAVVALARKLAGILYAMWRDGTEFGIVGQESQLMMTGS

SEQ ID NO: 206431 - protein, 397 aa, unidentified
MIAVGIDVSKSKSTVAILNGDGAIRAKPFDVHHVAGELHALVDYIKRTSEPPTILMEPTSHYHYPLLKAFQEADLPVCLINPYQMKKYGDTALRKAKTDKRDALRIAQYALEKSYSLVPYTPQDQKYEDLRFLSRQYSQRISTLTVAKVQLLSLLDETMPGITTILPLKSRDPDNCVLLRFIKRFKSFDVIRKMSKTRFLDSYQVLVKKTKDRFAGAKGLAIYELVLNSVTTRGENPLSAMTQDQCVDLVSTSQKAADEINLQMRIIAETMPEYKILRSMAGVGDRLGPIILGEIGDIRRFHSGKALNAYAGNDAPPYQSGQFESRNRHISKRGNPALRKACFEVMQALKLTKPQDDPVYLFLLKKEQEGKPYNVAKMAAVNKFLRIYYARAMELYK

SEQ ID NO: 206432 - protein, 426 aa, unidentified
MQYALIQVLPDIPPGGVCAGIDWAAADHVACVVDMAGRVTDRFSAAHDKAGIAAMIARLRQNGAVEAAIERSDGVLVGALLAAGLTVVVITSRQVKNLRSRYSSSGGKDDRFDSYVLAGTLRTDRARLRPLAPDTPATITLRAAVRARKDLVAHRIAACNQLRAHLAVAFPAAIGLFSELDSQISLAFLARFGSQDAAAPLDEDAIAAWLSTLPARGNPAPPGVLCARLHSAPAGATGRDGAAQAGVTAALAAAVAGLAAQIKTLETQISEQLAAHPDRHIFTSLPRAGTLRAARLLAEIGDCRSRFPDPWALAALAGAAPVTRRSGSHISHTFRWAVSHQLRDAVCDFAADSRHASRWAASIYDNARDRGKDHPHAVRILARAWIYVIWRCWQDGTAYDPAKHGALQRILDQQHPAAGAAPQEDR

SEQ ID NO: 206433 - protein, 356 aa, unidentified
MTISTSNEQGVVVGVDTHADQHTAAVMNRDGKVLDLHQFPTTAGGYQAMLVWAQQWPVTAWGVESSGSYGAGLCRVLRDHGHTPTDVALPDVLVRTRQGKSDTIDAVMAADAVRSGRAQTMAKDTRSVVESIRLLLITRESAVKARSVAYNQLRDLVTTAPTTLRDSLPTTKTARAAACRGLRPDPTRLVDPTQAAKTALRSVARRIDDLDTEIKALDAALNPLVADVAPRLLARPQVGPLIAARILITLGADPQRVTTDAKFARLTGVAPIPASSGHTNRMRLHRGGDRQANKALHLVAVGRKKNYPPAVAYFKKRTKEGLSKRDTIRAMKRLIARELFYVAKADLTALNQLDGL

SEQ ID NO: 206434 - protein, 344 aa, unidentified
MGEVSTIGLDIAKSVFQVHGVDGGGAVIIRKRISRAKVVQYFSELPPCLVGIEACPSAHYWGRELQELGHTVKLMPPSYVKAYLKRSKNDANDAAAICEAVTRPSMRFVPIKTKQQQTALMLHRTRQLLVRQRTMLSNALRGHLAELGIVSAKGRNGTGELLRIIADGADTRVPTAVRSILDVLARQYSAIGTEILSIDKNILALHRSCEASRRLAEIPGIGPIVATALVAEIGDWKTFSSGRNLAAWIGLVPKQHTTGGKDRLGSITKQGNRYLRWLLVVGAMAVIRYAQKHGTKKRPWLGRLMERRPTKVAAVALANKIARMAWAIMVRGDKYKEPKLLLAA

SEQ ID NO: 206435 - protein, 474 aa, unidentified
MSNTGYRRCCGMDVHKKVVAVHVLPPDGAAGEDKYREFRTFRRDLDRMRQWLVQCKVTAVVMESTGQYWRPVWEALEGWMEELVLMNPQHVRGLRGRKTDRADAKWLARHLARGELKGSFVAPRAVRELRELTRARVHLLEDINRVKNRIGQVCETGNVKISSVASDLFGVTGRRMLNGLVEGQRDAAWMADWARGRLRSKRGELRMALEHRMSEHQRWLLKLLLEQLGALERQVAELTAEIERRVAERQELIERLVSIPGVDRIVAWTVLAEIGFDMAVFEDSGHLASWAGLCPGNHESGGKRRSGRMRKGNLYLRRILNQAAWGASRKKDSFWESLYRRYRARMGHAKAIMALAHRLLAVIYHVAAGQSYRELGADFHDRSQRRRVTRQMVERLEKLGYKVTLEEPAPEPGDQEATTDLPPLPKKRGRPCKCAERGIPCPHAAKWAAKCASPTDPAQTQTVDSTPDQIVGFS

SEQ ID NO: 206436 - protein, 401 aa, unidentified
MPRLWAGVDAGKTHHHCVVIDEDGTRVLSRKLANAEDEILDLVTDVTALTDGGELVWATDLNQGGAALLIAILAANGQGMLYIPGRTVHHAARTYRGDGKTDAKDAGIIADQARMRRDLSPVRGADEIAVELRMLAAHRADLVADRTRAINRLRATLLEYFPGLEAAFDYAGRKAAVILLTEYQTPEQLRRAGVARVIARLRKAGARLPEQIAKAAVDVAHAQHTVVPGQDAAAAIVKRLATEVLRLREEVEEVESQLETRFRRHRHADSLMSMPGFGPLLAAEFIAFTGGTLTAFESADRLAGIAGVAPVPRDSGRISGNLHRPKRYSRRLLRTCYIGAEVAARSHPESRAYYDRKRREGKNHKQAVLALARRRINVIWALLRDGTTFHQESPAPTPIAA

SEQ ID NO: 206437 - protein, 360 aa, unidentified
MKSFIGCDAHKRYSVFASINEAGQKGVDVRVENNRTLFRRFLSELPRGSVIALETVGNWYWMVDEMEKARHVPQLAHAAKAKLMMGQINKTDKLDARALALLLRNGTLPTVWIPPGELRDQRELPQMRMALVQMRTKFKNRIHATLDKYALQIPDVSDIFGMTGRLILRNRLRELPPYTRQSVETQLALVDQVENHIRLCEKNIEEVVKKTPTMELLMTLPGVGYILAVVMALEIGEVGRFPSSHHLASYAGTVPRIKESGGKSFRGKVRPDVNRYLKWALVEAANIIIMNQRRWSSHHVVRLYWRIKERKGHAKAVVAVARHLAEAAFWVLKRNEAYKEPQWNKAVSSTRKSTRKMHET

SEQ ID NO: 206438 - protein, 330 aa, unidentified
MKQYDHVFGVDVSKKTVDITHVINQQFTHRQFTNNEVGMEQLMQWFKELTPEFDRTLFCMESTGLYCFTLTHFLASHSIDTWIEHAAQIKKATALARGKNDKVDSHRIALYATKNFDRLHLWKPVNATLEKIRHLASLRERLVDTKKRLSVPIKEFEEVGNLAMAKLLTKTIKSSLAAIDKDFKNIETKIIDVINEDDNLKLLYKLITSVVGIGFVTAVNLIVHTNGFTMLKDTRKLACYCGVAPFEYSSGSSIRGRTKVHYMANKKLKCNLHMASLTAVKLDADLKAYYKRKVGEGKNKMSVLNAVKNKLLARVIAVVNKQELYVKKTA

SEQ ID NO: 206439 - protein, 344 aa, unidentified
MGEVSTIGLDIAKSVFQVHGVDGSGTVVIRKRVSRVKILEFFAELAPCLVGIEACPSAHHWGREVALLGHTVKLMPPSYVKAYLKRSKNDANDAAAICEAVTRPSMRFVPIKTKEQQTALMLHRTRQLLVRQRTMLSNALRGHLAELGVVSAKGRNGTAELLKIITDVEDDRIPPAARGILDVLARQYGAIGAEIGSIDKSILAWHRSCEASRRLAEIPGIGPIVATALVAEIGDWKAFASGRNLAAWIGLVPKQHTTGGKDRLGSITKQGNRYLRWLLVIGATAVIRYAQKHGTKNRPWLGRLMERRPAKVAAVALANKIARMAWAIMVHGDRYKEPKLLMAA

SEQ ID NO: 206440 - protein, 350 aa, unidentified
MPIVADTYPYVIGVDTHSRTHTYAILNTRTSEVHGPHTFPTHPAGRARALAWIHRHTNGEPVLLAIEGASSYGQPLTLDALTAGLPVTEVRPPVRASRARYGKTDEFDALAAARATLTCPVDQLAQPRQGDLRGALDVLVLTRDQLTRDSTSTSHELTALLRRYDLGHDARRALTPAQIHTITGWRDRATDTLEQRFARRRAVVLAKQWAQFRHQLDQNQRDLTDLVGQLAPTLLEQVGVGPVSAARILVAYSHKGRIRSKHAFARLAGAAPIPASSGNQHDDRLDRFGDRALNSALYRIVQTRLLHDPETKAYFERRTKEGKSRKRIIRCLKTIIARKVFTHLNQVMTA

SEQ ID NO: 206441 - protein, 479 aa, unidentified
MTASSMPQPNAASQLPHDLGEAVLGVDTHKDVHVAAVVSVVGVLLGSQEFPASEAGYQQLSSWARSLGQVVRAGVEGTGSYGAALTRHLQGEGVTVIEVNRPDRQMRRSRGKSDATDAHAAAMAVLSGRATAIPKAGDGQVEQMRIYKVAKDSAVKSRTQAINQLKMLLVNAEPWLRASLTGLTNVTLVARCAELRPEDHSGTVAASMHTLRLLAHRIQYLNGEVRDLERCITDAIKAVAPDLLEEFGVGADSAAILLIAAGDNPGRLRDEASFAALCGVSPVEASSGKSRRRRLNRGGDRQANAALFRVILTRLRCDERTRDYVVRRTADGLSKREIMRCLKRYLARTLFRIIRPAISVHSAPVRQHGDHEPGSDRQGPQALDHPLESRPERLRHHLRRPSDPDHPLIKQDRDTPLTGHTHTWWSEKLAKNVARDIATNEHLQQAGWHVIRIWEHEEPSEAATRIVNEVMRHGRAGGA

SEQ ID NO: 206442 - protein, 407 aa, unidentified
MEVVYRCCCGIDVHKKVIVACLVNGGEQELREFGTTTSEIKTLANWLTESGCEMIAMESTGVFWKPLYNLFELMDLDAMIVNAAHMKALPGRKTDVKDAEWIADLLRHGLLKASYIPNREQRELREITRYRKSLTEERCREVNRLQKILEGANIKLDSVVKDITGKSARKLLQRIIDDDIPDSDEVSKLVHGRMRPKLDQIVASIEGITTPLQRKLLAQIIDHIDDLNRRIGELDKLVQEYMAEYEAAIEAIDEIPGIARRSAEVILAEIGLDMGRFPSAAHLCSWAGVCPGNYQSAGRRKHGKTTKGNKALKTILTQCAKSAKTVKSSYFSAQYQRISARRGKNRATLAVAHSMLIAIYHILKNKTAFHDLGSDYYDSFNRDRKISSYLKRLKALGWEPDAISNSA

SEQ ID NO: 206443 - protein, 359 aa, unidentified
MLKYSLGMDASMKDIHVCLSVIDSRQQVKVKASSKFSNNVQGFKDLLVWVGRHKKESDIPLFSVIEATGVYYEACALFLFKAGFDVAVILPNKAKKYLQALGLRSKNDKIDAAGLARMGAEQCLDLWQPMDEFFYTLRAMTRHYQSLQELKTNINNQLHADEHSIYSSKAVMKQLKKLIDTIEKQLKDADQSIHDHLYSNDEVGQRVNHIIDIKGLGYMTVAVVLAETNGFALFKSASQLVKYSGYDVIENQSGGHRGKTKISKKGNSHIRRAMHMPAFNVVRYEKGNFKTFFERIFARHHQKMKAYVAIQKKLLVMIYTLWKKNEAFNRNAKIDTSRKEETVPSFALTAGQLNEVAPA

SEQ ID NO: 206444 - protein, 391 aa, unidentified
MSMYFIGIDISKYKHDCCIISAADQKVVSKVTIKNNKAGFNELLTIIHSLANPADIRIGFESTAHYALNLELFLENSLLTFMEVNPVLISEYKKSKTLRRTKTDSVDCESIARWLMTVEYKPHSKGFYHSYSLKSLTRLRDRLIRQRSFYLVKITNVLDHTFPEFKPFFNERLSKTAIYLLENYGSAEKMAHMNSASYDKLRCASRGKFSIQQFLRLKELAANTVGVNNSIFDIELNSLLTLYNSLCKEIKTLEAEITKLIEEVHPHYMSIPGIGPISAAVIYAEYGDISNFSNPGQMLAFAGIEPGINDSGTESHGGRMVKHGSSQLRYVLLNACLPLIRFDITFATYYAKKRAEGKKHRVAITHVAKKLIRVIYALERQDVDFNVQKLR

SEQ ID NO: 206445 - protein, 319 aa, unidentified
MSDIILGIDISKATFDVALLFNNKVKTKKFNNNKKGFTELKQWLRNKEVDTAHVCMEATGGYEAKLAQYLYDNDFKVSVVNPARIKGFSMSKLLRVKTDKADCELIAYFCQAMKPDLWQPVPPHIQELQQWVRRLDSLITNRNQEKNRLDEASNGVATNISAHVKFLDQQIKEVEELISHHIKEHKDLNNKHKLLDSIPGIGEKTIGVILAFLSVVNFDSAKQVAAFVGLNPKPRQSGSSVRGVGRISKTGSADLRKAFYMPAIVAIKYNPIIKRFSQRLHVAGKSKMVVVIAAMRKLLHIIYGVLKTQTVFNSNVQTI

SEQ ID NO: 206446 - protein, 319 aa, unidentified
MDMVSQEQIIGIDVSRDCLDVHCLPDGSRLRIANTAQGHEQLAEIAHDRRALVCFEATGGQEWRLWAALDAAGIEARQLPPAQIKAFATSRGTRAKTDRIDAELIARFMAFRPDAGRTLPAQKLRLLRALTGKRGQLVETRKRLLLQIKARQKQGLGEQFKKMDDALHLLLDAQISELENKIERLVAADEALAETARILRSVPGIGPVASTMLIAEMPELGQISGAQAAALTGLAPIARDRGALRGKRAIGGGRHLLRHVMFQAALVASHHNPVLKPFADRLRAAGKPHKVVITAVARRLVTIVNALCKSRQNWTVPAT

SEQ ID NO: 206447 - protein, 393 aa, unidentified
MICVGIDVAKDKHDCFILSSEGEVLADVFTIQNNAEGFDMLLQTIRRCARPEDKIKVGLEATGHYSYNILGFLLDKGLDTYVINPLHTNLYRKSLSLRKTKTDRVDARTIAAMLMSDVDLKPYTDTAYHNEELKSLTRYRFDKVRERAKLKQSVSRLVTILFPELEKLVSSLHLASVYALLIEFPGAKQVAGAHLTHLKAILSDASKGRYGRDMAVTLRDAARCSVGSVMPAKSLELQHTIRLIRELDAEIEDIETAIQSMMDEMQSPITTIPGIGVRMGAMILAEIGDFSRFDSPDKILAYAGMSPSTYQSGQLSLSGPYSHMEKRGSRYLRYALYNATKYVCLWDPAFAAYLAKKRGEGKHYNVALSHAAKKLVRLICALEKSQQSYRNAA

SEQ ID NO: 206448 - protein, 314 aa, unidentified
MNTNTLQNINVGVDTGKTQLDIYIRPLDIYFNVTNDEKGIKQAIRTIAKYHPERIVIEATGRLEMPFILACENANLPYVIANPLHIKKFSGALGNRAKNDRLDAALIAHYAEAIKPKLTQLKSENIRLMSDLVTRRNQLLSMQTMEKNRHQILPQSLASSIKPILTALKNQITKVESRIEKLIETCPDYQAKNEILQSVPGIGKIAAASLISNVPELGYITNKQAASLIGVAPITRESGSFKGKRMIKGGRMQVRTVLYMAMMSAMQCNPVFKETYQRLLAAGKPKKVAIIACVRKMVVILNSMLRGGMAVCGM

SEQ ID NO: 206449 - protein, 466 aa, unidentified
MARKNRFRLPTVTEAMPVTNPRAAGIDVGSRMHAVAIPAHLSAEPCRTFGCTTPDLQEMAAWLCSVGITTVAMESTGNYWVQPLRILEAAGLHVILVHPEYARQAKRTKYSDLDDSLWLQQMHAYGLLPASFLPPALFQRLRTLWRHREKLIGLQASCLQRIQNTLELMNVQLHKAVTDISGLTGLRIIRAIVAGEHNPAQLALYRDPHIHCSFDDLVKALTGDYREEELFVLRQLLAGYDFYQQQLDACDAEVDAFLHTVAASLPPPVPAEPARGKASVRPASALWKRPSKHEPTRYDWHALLTKLCGVDATRICGLSVLLVLAIIAEIGTDLTPWESVKRFTAWLGLAPDHRISGGKVLKRHTRRGKPHAAHPFYVAALAAAKSQTPLGEFFRYQKARIGGAKALTATARKIAELYYSLLTYGPDFVEHGQQVLQHQSQERKRRKLARLARELGVTIVEPAVAA

SEQ ID NO: 206450 - protein, 428 aa, unidentified
MKVLYERVAGIDVHKDMLKVAIRSPGGKPWTRATEVLEFRTFYGVLQEMARELRRRGVTHVVMEASGVYTEPVYYALAEQDFTEVAVINPAHARALKGHKTDARDCARLAELFECGLLRGSYIPPAELKEMRDLTRYRMKTVQARTSEIQRLGKALESAGIKLGSVASSITGKSATAMIEALIDGERRGGVLADLALGRMRAAGKLADLSMALAGRFTEHHALLCRLHLDRIAVLDDAAGGLDSRIAGKAARWQREADLLKSVPGFGDVVTWAWLAEIGPAPHRYFSSHEKLASWATLCPGNNISARKRKHGRTGDAGIYIKPMLIQAAWAAIRTRGRLQARYSRLVRRLGGEKNPVAKKKAITAIAHTLLKIAYQVLKSGEPYTDLGADFCTRRESPVQRQAWLERQLQKLHPGCAITITISPPEAA

SEQ ID NO: 206451 - protein, 398 aa, unidentified
MTESSDYESVQVFIGIDVGKDTHHAVAINRSGKRLFDKALPNDENKLRSLISDLKQHGQILLVVDQPATIGALPVAVARSEGVLVGYLPGLAMRRIADLHAGEAKTDARDAAIIAEAARTLPHALRTLKLADEQIAELSMLCGFDDDLAAQTTQASNRIRGLLTQIHPALERVLGPRLEHPAVLDLLQRYPSPEKLASLGEKKLAAQLCKLAPRLGKRLAADIAQALAEQTVVVPGTNAAAVVLPRLALQLITLRKQRDEVALEVEQRVLAHPLYPVLTSMPGVGVRTAARLLTEVACRAFASAAHLAAYAGLAPVTRRSGSSIRGEHPSRRGNKALKRALFLSAFAALRDPLSRAYYTRKMSQGKRHNQALIALARRRCDVLFAMMRDGTFYTPQGS

SEQ ID NO: 206452 - protein, 354 aa, unidentified
MSGLVPGVMRQPLKKQPADPERLLALLHRWREEAVKAGHAISRIAVAFEAGRDGFWLARWLRARGIEAYVIHASSLAVSREHRRAKTDRLDTETLMRAFLGWLRGEVRHCQMAAIPTLAQEDAKRPSREHESLVAERTRITNRMTAILVWLGLPKVNIKLRKAAEQLAGLRTPEGEPVPPNTLAELHRGLARLAVIRAQIKAIEEARLERLKAAPAQGTHPMMLMLAKVLGLGIETADMLVHEVLARGLRDERAVARYGGLTGAPDESGSKRREQGLAKAGNGRVRRGMLQLAWRWLMFQHDSALAQWYRSRTADGRRDTRKTMIVALARKLLIALWRYVTTGELPQGVVLKAA

SEQ ID NO: 206453 - protein, 355 aa, unidentified
MKHYIGIDFHKQFSSVAVMDDKGTIIDERKLFHDQPDEMNGYFAQFKGNANVSLEATRNWYWMVDALQEQGFDVKLVHAKKTRIIAESTIKTDKIDARVLAHLDRCNFLPEAHIVDKKTRYERELLRYYISLVKVQTSAKNQIHVILAKHNIHHNFSDLFGLGGMEFLKTLELPTIFRFKLDGYLELLSKVADILKRAKQEIKRHCRAWPEADLLTSAPGIGELTGLMLAAEIADIKRFGCVKKFCCYGGLASSTRQSADKTYNGHIIKDSNKYIRYAVLEAVPNAIKKDPRLFRFYSKLERTKGRKRARIAIARKLLVAIYYMLKNRVPYQIAHKSNIHQVNPRLLLGAVTATL

SEQ ID NO: 206454 - protein, 375 aa, unidentified
MTKIIRIGVDTSKSVFVLHGVDAAERVVLRKRLRRRQVVELFAQLGPTKVGLEACGAAHYWARELQGLGHEVVLLPPQYVKPYVKRNKNDAADAEAICEAMSRPTMRFVPVKTAEQQAALMLVGTRDALVRRRTQLTNAIRGYAAEFGLIAAKGLDKIEPLLARIAAHAPLPGLARELFAAHAKEYARLQAQIREIEAKLRAWHKHNELSRRLAEVPGIGPIGATLAVMKVPNPKAFRCGRDFSAWIGLTPKDHSTAGKTRLGVITRAGDEALRSALVAGATAVIQHVKQGKGHPSPWLIELVRRKPAKLAAVALANKNARIAWKLMVSTERYNPAHFVGAPRRAPRSRRMTSLARSPRRPGPNEFSARATFASR

SEQ ID NO: 206455 - protein, 313 aa, unidentified
MNVAKCRLSEGELNLINMQVAQGLVPVGVDLAARVFQVCYYDLDKKVVKNFQLTREKFFDFLRNPPFEQKMLVGFEACGACNYCAREIKALGHQYKIMPTKAIKAFLQLAKTDKIDALGIFKGTFTPSINTISARDEQNQTLLNLLGIREQLSKQLVQTGNNQRAMLYELGVVCNEKKTGVDYVIKASEELLEKLKQENSPAYSSVQVGLEALRSNVRNIEAQIKNIEQYLLDYAKSNEDCKNLMSIPGIGALSAVILHAVMGDVNSYPSSRHFAAFAGFAPRVSGSGGKVTVGEIVKTGNRHLKKVLYMNGM

SEQ ID NO: 206456 - protein, 403 aa, unidentified
MPSMLLRQDDVIVGVDTHKDEHVAVLLDGIGGRLAELFIPASLDGFAQLLAFCLEHVGPSGCLFAFGVEGTGSYGVGLARFLRRNGHKVQEVHRPPRKGERRLSGKSDTIDAEHAARQVLAGLATAVPKTADGAIEALRVLKIARDTAVKARTTAMITLKATLVTATDELRAELEPLTDYKLIEACSALESAATVAAPDAAMRHVLRSLSRRWLLLHEEIKIHSKHLKKQTKAAAPRLVEAVGVGLDIAAEMLITAGDNSDRVRSEAAFAKMCGACPIPAGSGKTNGRHRLYRGGNRQANAALYRAVIVRMRWHQPTIDYVERRTAEGLSKREIIRCLKRYLAREIYRLLPDPAAGDSAQDPASVTVEAVQPMRVRFLEAGRPSLAPLDGSGSEKPTVRFGAR

SEQ ID NO: 206457 - protein, 392 aa, unidentified
MYIIGIDIGKNHHEASIVSPEGKQIGHSLRFATTHKGADSLMSFIFNNIGNSSCIFGMEATGHYWYPIYSFLKARGYTIYVINPIQSDSLRKMYIRQTKNDSIDSFLIAEVIRFGQFTTTSMADENILAMRQLCRYRDSVISSRTEIKLRISTIMEQIFPEYEKQFSSLWLSTSMGILEKYLTPENIENAPIDELFEIIKDKSHNKLTMKKAISIREAAADTFGIKIAQDAFSFQLKQLIDRMNFLDKQIEALDCQILEYYEKFDCYLHTIPGIGMIAAATILAEIGDINRFKSSSALVSFAGIDPTVRQSGEFSSTHNHMSKRGSPYLRHAIFLAATTCSFHNSPLNAYYKKKREQGKHHLTATGAVARKLTTVIYAVLRDGKPYEPKSFC

SEQ ID NO: 206458 - protein, 337 aa, unidentified
MSYLGVDLHTNSFTVCYRSCQGKQRIETFDIRRMDRFRKTLRKADEVAVEATGNTAWFVERICDRVSRVVVVDPHQFEVIRRSVKKTDKHDARTLAYFLSKDMLPEARMKSKENAQLHSLAGTRDKLVKQRTALVNKIYNVLNRHGLSWKKETLTTEKGLKSIMAFDWEPIVRMELEVLAEQIRSLTRSIKKLDDQISQEGKKLDGHKNLTSIKGIGERSATVLLSVIGDIADFADENKLAAYFGIVPRVSDSNGKIYHGRITKNGSKLGRTTLVQCTLAAKRYSPYLCEHYERIKRHRGSGKAIIATARKFLGIIYQTLKNDWIFEDFPNFVIANT

SEQ ID NO: 206459 - protein, 465 aa, unidentified
MKSKTAKNKKQSKKVYVNVVWEPVNLHAAGVDIGSREHWACVPPEATTNNVRKFGSFTADLEAMADWFHECGVTSVAMEATGIYWLALFQILERRGLHVILVNARQTKHVAGRKSDVQDCQWIQRLHTYGLLQGSFRPEDAYCVLRTYLRYRDELVGARSTQCLHMQKALLQMNLQLPHVLSDVTGVSGLAIIGAILEGQREPVKLAALVHRSVRATAATLQAALTGDYREEHLFVLRQAYELYQTYEAKIQACDEQIVRETAGLPAKVDPVLKPLPARKPGRKPYLDKLAGVDLRPELYEKFGVDLTGIEGIGVLTGMVLLTEVGPNVSRFRNEKHFCSWLGLCPDNRISGGKVLSSRTRRVVNRATDALRLAASTLERSQTALGGFARRMKARLGAAEGITATAHKLARIVYRLIKHGEAYVRQGVEDYEKKFQAGKLRALQKTAKAFGFELVAKQPLAAGVS

SEQ ID NO: 206460 - protein, 337 aa, unidentified
MEYFAGLDVSMAETRVCVMDRDGAVVFEAKVPSAPADIAAALAQAPACGRIVFETGRMAPVLYHGLSQLRLPIVCIESRQAYQALKSLATHKTDRNDARGLAHLARTGFFKPVHVKSLPAHAIRSLIIVRKKLVGQRVTLENQIRGLAVVFGVRLPRALSSAFIRRALQASDGIPGLSAAMRGLAAARSAVLAAVVAIDADIRRMVRASDACRRLMSIPGVGQLTALAFTAAIDDPERFRRSRDIGAYLGLVPRRYQSGEVDYTGGISKCGDRRVRTLLYEAANVMLTRYKGSLKLKDWAFAIAQRSTMRKARIALARRLAIIMHAMLRRGTEFQPA

SEQ ID NO: 206461 - protein, 367 aa, unidentified
MKKISTVVAKQGRNNSQQELTIGLDLGDRNSWYCVLDEAGRIQLEQRVRTTAKALQEVFGTMPRSRVALEIGTHSPWISRLLKQLGHEVIVANARKVRLIGESRKKDDRLDAQTLARLARIDPELLYPVKHRSAQAQADLMMIRARAGLVRARTSLVNTARGLAKSYGERLRGCNVRDMDPEKAENLSPELQRALEPLLATIEELSERIVEYNDRIEALAQTSYPQVDLLKQIKGVGTLIALTFLLTLEDPHRFGKSRDVGGYLGLQPGRRNSGESEPQLHISKEGDPYLRTLLVQGAQHILGPFGIDCDLRRWGLKLAERGGRNAKKRAIIATARKLAVLLHHLWVSGEVYEPLHNSRRLTVAAAA

SEQ ID NO: 206462 - protein, 330 aa, unidentified
MRKAGAGGDPHAEVRMFVGIDVAKATVVVALHPSGETWTTGTSAKELRALARRLAALRPAHVVLEPTGGYELPVLMALGAQALPVSLVAPARVREYARSHGQFAKTDVLDARMLARFAAERPVQAVTLPDAAHRTLMQLVARRRQLDEMLVAERLRLDQQRLFPDSPVVADIEETIAFLEAKGRDLDRQLQAHIAAHPQWRETAALLRSVPGIGPVTVATLLAFLPELGTLSRREIAALVGVAPLAQDSGAWHGRRHIRGGRADVRRVLYMAALTAAHHNPALKAFYARLRARGKTAKQALTACSRKLIVVCNTILKTKQPWQAPRPATA

SEQ ID NO: 206463 - protein, 359 aa, unidentified
MAKARTLVGLDVHATKIVAAVLDAETGQLQTFRMSGESETAAGFCAALPRPVRVAYEAGPTGYGLARELAKRSVECVVAAPGKIPRAAGDRIKTDRRDAEHLVRLLLAGKLHAVRVPGDEEEALRDLIRAREAVRLDLMRCRHRLSKLLLRHGIRFDDGHAWTDRHRQWLDTIALRWPAAQTTLIDARGAIDALVHRRDQLEREILALLPDSPWAGQTGRPRCLRGIDTLSAVGLCAEVGDFERFAKAQQLMSYIGLVPSEHTTGEQRRLGQITKTGSGHARRLLVEAAWHYRKRPAIGKALSARQAGQPAAAVAIAWSAQRRLHRVWTRLEARAKRRTIIAVAARELAGFCWAITQTE

SEQ ID NO: 206464 - protein, 419 aa, unidentified
MSFKILKFNCCGLDVHKTWIYACIGITDSNNRTEYKQARFSSFTKGLNELCDWLAKYNCKDVCMESTGKYWIPVFNILEQREIWVTLSHPKYTKPMKGNKTDRKDAKWICDLYMCGMVKPSFIPSADIRELRDLVRYRYKLTCMITGEKNRAQNCLTVSNLKLDDVFSDVFGKSSRSITEHILQHPGEKFDVTPFINGHCKTPIEEIQAAIDGAISKEQAVKLRQCLNHIDELNKHISEVEQEILRLSDKYEAALNLIRTVPGFDKNPMTAIQVLSEIGGDMSVFPTAKHLVSWAGCCPRNDKSDRKIKSTRISRAGSYFKPVLVQVANALIKSKKHPEFTTRYKRIKARRGHKKAIIAICRMILTAIWHILTDLKPYTPDGFLESRPVSREKVLTTSQALNLLRQRGYLIKDDPLPAS

SEQ ID NO: 206465 - protein, 393 aa, unidentified
MILKYSVGLDVSGKDIKAAICTIDMEQRVKVVGSKTIANTKSGFAVLEEWIGRKHKENSVPLSICMEATGVYHENCSFYFHIKQFRVSIILPNKAKRYLESLGIKSKNDSIDAKGLAQMGAEQVLKQWEPMNGYFHTLRGLTRQHQSLQEQRTVAMGQLHAHEHGMETDRFIAKQLKGRIRFLEKQITEVLMQIDTHIASDKDVAQRIDRVCAIKGLSILSVSTVVAETGGFELFSNYKQLVSYAGYDVVENQSGNRVGKTRISKKGNSRIRRILHMPAFRAVSCKEPVLLSLYQRTFARHGIKMKSYVAVQKKLLMMIYHLWKNETDYDKNHFMNSIQEQEQKPLSGSVPNPEKKVAPLKGEATQGKHPANNRSMPPLGGTKLKKTEKMLAD

SEQ ID NO: 206466 - protein, 359 aa, unidentified
MDTDSMTRPRIVVGVDTHKDQHVAVALSELGVRLGDLSVPANREGYATLLDWARELGEPRIFGVEGCGSYGTGLYQFLRRNAVLVTEVSRPARKGERRLLGKSDVIDAEHAAKEVLSGRPFTAPKTANGSIESIRLVRIARKAAVKMQVTAMITLKATLVNASDELRGALEPLSDYRLIVACTELDDDGDLVDPLVAMNYALRSLASRWLAVHEEVKAHSRHLKRLVEQTAPELVDAFGIGPDIAGELLVAAGDNTDRIRSESAFAKLCGVAPIPASSGKTSGRYRINRGGNRQANAALYRAVIVRMRWHEPTIAYVKKRTADGLSKRDIIRCLKRYLVREVYRLLPPPTRSDLVPVAA

SEQ ID NO: 206467 - protein, 391 aa, unidentified
MYFVGIDCSKYKHDCFIATEAGEVIRDTFTFDNSGTGFSQFFSILEALSCPKSQIKVGFESTSHYMVPLMKHLSVKGYEFILLNPVIVSRFRRSTTLRRIKTDKIDAKTIAQVLASQDFESYHMQVYHFPELKSLTRLRDRLVKQRSYYLVMLTNVLDEVFPEFKEFFNDSLKSKTAFYLLDTYKIPTRMANMNASSFDNLKKVSYGKFSYAKFIKLKELAKNTIGSSSDADELEISSLLSIYKSINDEICRVESKIEEIMNIIDSPTVSIPGVGLMSAASIIAEFGDLSRFANADKMLAYAGLDCGRSQSGIADYKGKMVKHGSGYLRQALMNVVETMMIHAPVFYDFYHKKRDEGKSHRVALSHLARKLVRLIYKLETSHSRFDLNNSK

SEQ ID NO: 206468 - protein, 355 aa, unidentified
MLYLGIDQHARQITISLRNEEGDVVQSRQVSTEPERINAFFQHLTREYLSHGESFIAVVEVCGFNDWLIRMLRDYRCHQVILIQPEERKRRKTDRRDAAALSETLWVNRTRFLQGKPVRGLRQVDIASTTDQETRRLTTLRKDAGRARTRVINQIKHILRRHNLQWEMPTKKFPTLKAIAWLKQLVFSEVDQLEVNHLLANLEHIQQQYKELEKVIADRCGTSEAATILVSMPGVAHFTATALACRVGRVQRFPRSHSLANYWGLTPGCRNSGENNHRLGHITKAGSGMARWLLAQVTTKVLRTDKNLKEWFKRIKRRRGSGIARVAVMRKLATIIWHMLTKKKTYAECRGFVTE

SEQ ID NO: 206469 - protein, 319 aa, unidentified
MSVISVVGIDVAKAHVDVCVLGANRDTQQFANDAEGHSALAATLQPLGIGLVVMEATGGYEAALVCALQAAGQPVAVINPRQARDFAKSMGRLAKTDAIDARMLAELASVLVQREDLARFLRPLADAQQQWLAALVTRRRQLLTMLNAERQRLQITPAGLHPSIEAIVAAIKAQLDDVEAQMVGHMREHFGELDRLLQSASGIGPVASATLIAELPELGRLSRREIAALVGVSPMANDSGSSRGRRRILGGRFEIRRVLYMATLTATRHNPAIKAFYQRLTAAGKLPKVALVACMRKLLTVLNAMVRTSTPWGKSLHRT

SEQ ID NO: 206470 - protein, 459 aa, unidentified
MKSTLVLGVDVSKGYGDFVLLDTCKKVVEESFRLDDNKQGHDILKRQLLHWKKEHSVARLLLVTESTGGYEDNWLRVSKDKALCSFVESYRINAKIIFHEYEAQRRNSIDDGISALTIAEHVVKNLENFSVTKSFHETAYTPARSLVRHYASLQQERSSHKNGLLKLIYQYLPSLEAIKPSEWPSYWLEIFVRYGSRKSIQIAASKGFKQLKRVPKGKAKEIAEALANGIDVRHTPQMVVFAIRSKARQIKRINEELQEIKKMIIDQAPVDADQVDLLKSIKGMGDITPVILLSFIEEVSRFKDAKHMASFFGVQPRVKRSGDGSYKTKMSKQGAGLVRRELYLLAFRTLSQEPYLRAIYAKARAKGMVHDAALGVLMHKILRIIYGMLVSNTRFNAGIDQLNQHQTGAESKLQKQKKNAARRFQPASTVAPVSFRQRKKRKRDHELQADGISESTESS

SEQ ID NO: 206471 - protein, 327 aa, unidentified
MKIHTIGIDLGKTSFHLAGLNERGEVIVRKRFSRAQLLRFTANRKVHVIGMEACGGAHYLGRALQEQAHEVRLIPAQYVKPYVKTNKSDYIDAEAIAEAVGRPTMRFVPIKSDDQLDLQSLHRVRERWVTRRTAVINQIRGLLLERGITLRKGRRYLDEALPGILEDAEAKLSGTLRLLLTQLKLELDQLALHLEEAEALIEQTVQESEACQRLMQIPGIGPVTATAVISAIGNGAAFRKGREFAAWTGLVPREHSTGGKQKLLGISKRGNRYLRKLFVQCARAVLQQKTKQTYDFLPGLLANNEMAQRSNPALSKPASGQSLPRLQ

SEQ ID NO: 206472 - protein, 377 aa, unidentified
MKNLLCQNLGVDVSKDALEVVLSTLDMERRVKVKASRKFTNTPTGFKQLQRWLEGKRAADVELRLLMEATGVYYEQLAWFLYHEGYQVSVVLPTKAKRYLQALGNKSKNDRIDARGLAQMGLEQLLELWQPLSKNIYRLRLLTRQLEDFSNQRTVCLNQLHALHHGALVVKQVERNLQKLVGTLDKSLQELEEAIGELLYQDPLLAERVEKMRSVKGVGLKTVAVLLAETNGFATFERQGQLVSYAGYDVVEHQSGQRSGRSRISKKGNAHIRRAMHLPAFTVVRYKEPVFTALYERLVKRGKTKMQAYVAVQRKLLVLLWTLWRKNEAYDPQYGQQPAEPKNNIQIQEAGASLSGVSAADEDAITQETQPETAEKK

SEQ ID NO: 206473 - protein, 355 aa, unidentified
MNDAKYIGMDVHQATISAAVRDSSGNLVMEATLETKAEIILEFVHGLRGSLRVSFEEGTCAAWSHDLLKPHVTEVLVCDSRKNALLRVGNKNDREDARKLAELLFLNKLHSVYHGEAGIRTLKELARSYLTITRDLTRVMNRLKAIYRGWGIACAGQQVYAPGYRAEWLAKIAEAGVRRRAEIYYQQFDVLAALRQQARRELLAEARKHPALRLLRQIPSIGPIRAALLIALMQTPHRFRTKRQLWAYCGLALRTYDSGEYRFVGGQLKRTKKAVTIRGLNQNHNHDLKNIFKGAATRAAAIAGPFQNFYQARLASGMKPPMARLTLARKIAAITLLVWKKGVRFDATQLKQQAA

SEQ ID NO: 206474 - protein, 415 aa, unidentified
MKAMEVIHPRCAGIDVHKETAVTCIRQSRAGDEADEEVRTFATTTAGLLELGDWLVKQQVPIAAMESTGVYWWPVWNLLEDRLKLMLVNPRQTKQAPGRKTDVRDGRWIAQLLSCGLLSPSFVPPKPQRELRDLTRGRSSLLQDKARVANRLQKILEQANIKLASVATDVLGVSGRAMIRALIDGTLTPEQMAELARHPMRRKIPALTLALTGQVTAHHRFMLKMLLEQIESIENQVDQLDRRIGEVMGPLEKTALEMLDEIPGINRRAAENILAEIGADMSPFPTAGHLASWAGLCPGNHQSGGKRGSGRMPDGNRWLKATLNQCAWAASRQKESYFAAQFRRVRARRGVKRAIMAVAHSQLCVCWQLLKHGQAYHDLGRDYFEHADEERTRRQAVRRLERLGYAVHLEKKDAA

SEQ ID NO: 206475 - protein, 316 aa, unidentified
METQQQWIGIDISQTRLDVALYPLGVSFSVNQTEGGRAELVSKLTGYAIAGIVLESTGGLERCVMAELEAHGYETRRVNPAQVQHFAKAMGRLAKTDRIDAEMIARFGESRNPEVTRLPEATIRELQALVARRQQVVELITMEKKRLHSCESWVRESVNSVLSALETELKTLEARLAELSAKRPEWQEHLAILTSVKGIGTVISQALLVSLPELGARSGRTIAALVGVAPFNRDSGKLKGQRRIQGGRKELRSLLYMAALCAVQHNPVIRDHYQQLTKRGKAKKVALVACLRKLLVILNAMLRDRQPWRHPAPSAV

SEQ ID NO: 206476 - protein, 413 aa, unidentified
MEVMIETCCGIDVHKTFVVACIASTNDKGVTSYESHRFSTYTSGLKTLLQWLLNRNCKDVCMESTGKYWIPIYNILENDCSIVLAHPKYVKAIRGKKTDKKDAKWIADLFKHDLVAGSFMPPADIRQLRDLMRYRFKLTCFQSSEKNRLQNCLTVSNIQLGNVVSDTFGKSAQAIPDKLLENPADTSFDLEPLVYKSLKKKLPELRDAIDGYVTPEQVCKLKVIKAHYESLESRKAELEELILALAAPYQQELAILQTAPGIRIDFTAIGIISEIGTNMEAFPSAKHLCSWAGLTPTNNESAGKKKSVRVSKAGCYIKPLLVQCANAVVTSKKYPEIRNRYLRLKKRRGHKKAIIAIARMLLTALYHMLKNGENYNAELYRKYDLTPVDREITVEQAIIIARNQGYKIKSATA

SEQ ID NO: 206477 - protein, 343 aa, unidentified
MQSISTIGLDIAKSVFQVHGVDAAGQVVLRRQLRRRQVLAFFQRLPPCLVGIEACASSHHWSRELQALGHTVRLMPPAYVKPYVKRQKNDATDAEAICEAVTRPNMRFVPTKTTEQQSCLMLHRARHLFIRQQTAVINSIRAYLAEFGIVAPVGRRGVEHLLEVVADPANRRLPDVARACLAALGSQLRALKAEILEFDRCIIAWHRSNATSKRLDAIPGVGPVLATALVASVADPRTFRSGRDFSAWIGLVPKQNSSGGKDKLGSISKQGDRYLRSLFTTGALAVIRYAKIHGTRHRPWLTALLARRPTKVAAIALANKLARMAWAMMARNELYKEPAALTA

SEQ ID NO: 206478 - protein, 338 aa, unidentified
MKLYGAIDLHSNNNVTVLIDEQDQVVYQKRLANDLALMTQQLAAYRDSLQGIVVESTYNWYWLVDGLMEQGHRIHLANTAAIQQYDGLKYTDDQSDARWLAHLLRLGVLPEGYIYPKQERAVRDLLRKRGQMVRQRTANLLSVQNLFSRNTARSMSANRIKGLDSKQVDELVPNEDLALAIKANVSMLRCADEQIDTLEKTVIDRVKLKPEFRFLKTVPGIGLILALTIMLESGDITRFPTVGDYASYCRCVGSKKISNGKKKGSGNTKNGNKYLSWAFVEAANFATRFSARIKSFYQKKRNKSSRALAIKAVAHKLCRACYHIMKEQVAFDITKAFA

SEQ ID NO: 206479 - protein, 416 aa, unidentified
MEVVFKFCAGLDVHKKIIVACVLLSSPEGLQRHIQTFSTMLAGLEALAAWLAGFGVTHVAMESTGVYWKPVFNVLSTQFDVWIVNARDLQQVPGRKTDVKDAEWIAQLMRFGLLKRSFIPAVEQRDLRDLTRYRTRLTAERAAASNRLQKVMEDANIKLAAVATNSQGVSARAILEALIRGETDPAQLAELAKGRLRAKIPALEQALSGRVREHHRFMWREVLEHIDALNTRLLTLNERIQALTAPYERIIQRLDAIPGVDRYTAEIILAEIGPDVTPFPTAKHLASWACLCPGNDISANKRRSGKTRRGNNWLRTALVEAAWAASRAKDTYLSSQFHRLRARRGDKRAAVAVAHSILIVVYHLLAKPEAVFTELGGDYFCKRNPEQEQRRAIRKLEGLGFTVTLTPVVLAAAAAP

SEQ ID NO: 206480 - protein, 340 aa, unidentified
MGQYIGVDLHQKTSYVTRVNEKGKVLEQIDLKNDADTLKAYFKKQPVSSQVVVEATGHWYHFYELIEDRFPNLVLAHPQKVKAIASAKIKTDKIDSGILAQLLRVDLLPRAYVPPREIRDLREILRYRASLVQLRTQAKNRMASVMTKAGIETVTKNRFGIKNFRELATVETRPCYRLELDGYMEVIRELGEEIAKSEEVIKKMAEESPEAQLMMTMPGVGAFSALLILSEIGDIRRFPDAEHLCSYGGLVPSVHASGGKSHNGHITKQGSKWIRWILVENSLHAIRKTRRYGALYTRVKKKHGHNAGRIAVARAMLKSIFHMLRKKEAFEDCPASSEGV

SEQ ID NO: 206481 - protein, 371 aa, unidentified
MKSILSVGMDVHKNSFSLCAYDGYTGEIVSESTFASDVKLVIKFIETLKSRYENDIEIKCGYEAGCLGYSLYKSLTARGVDCIILAPTTMQVSAKNKMVKNDRMDALNIAKNLASGSYKSVYAPDEEDVEIKEYIRMIHDFKKELKRVKQEICAFVLRHGYQYDGKSKWTIRYMNWIRELEMSEIQRETLNEYIAEMENLNDKINRFMNRIDEMYQSERYHEKVSKLRCFKGIETFAAMTIQVETADFERFPSAKAYASYTGLTTGEHSSGDKNNRIGITKQGNTVIRKTLVECAQSLVKGNVYAKKSQGLKSRQKGMDVNIIAYADKATERLKKKYQKLIERNVPRNKAIVAVARELACFIWGMETGNIH

SEQ ID NO: 206482 - protein, 344 aa, unidentified
MDNHTQYLGFAGVDLAKKVMQIHFVTADGEITDKSAKRAEFLDFFRNRTKCLIGMEACGASQDWARKLEAMGHEVHLLPPKAVKPFVSGQKNDHNDAIGIYKAMFNGVRRVPVKSTEIRDLQTLRRIRSQVTKDKVKEINHVRGLLAEYGIVMGKSLNAFNKDISSALGILTERGDVSPLVAEELRTTVEAIKAKIERQKKLDQEIEQLARGCKNYENFLKTPGVGPFTAAMLCVLLCDPAIFANGRQFAAYIGLAPRSRGSGGKNFIIGIPSKFNCDSESRAVLVECAQAIARCKNKSLWVEEILRRKPKKVALIAIANKLARQVWAMANKGESFKQMTILTA

SEQ ID NO: 206483 - protein, 344 aa, unidentified
MQVAIGIDTHKGSLAAAAVDALGRVLGAREFTNDPTGHRSLLRWVKEQRGQPRTIGIEGSLSYGSAAARMLLGHAEDVREVAPSLTHLERRRRAKGKSDPVDAVAIARVVAADGTLPSARRTTLLVDLKLLVDYRDQLVHARTQVSNRVHADLVVIRPGYEQVVPNLRAKRHVAKARSLLSRDRSVQAELVRRRLGEILRLEAQIAEADRRITDKLAEADTTLTQIPGVGPFIAAKILGEVGEISRIRSKASFAMLSGTAPLIASSGQTHRHRLNRRGNRQLNWALHYVALVQSRTSPEAKAYLVRQREAGKSHKEAMRCLKRHLSNVVYRHLLLDARRLGQAA

SEQ ID NO: 206484 - protein, 351 aa, unidentified
MQPVPVLNLKVMDKFTKKSCFVGIDLSKPHIDAAMVNEKEPKRFQNARFSNDINGFEALEKWILKQGVKVKDCLFCMEHTGTYGLLLFAWLTKQNLDFCVEPGLQIKRSLGMTRGKDDKVDARRIATYAMEKKAKLKQYELPSENLIRIKQILTYRDQLVRLRTSLKNSFQSHKEYQQISSLDFVTKDIQKQITHLDESIESCEKQIKEIIKSEKDIQQNFKLATSVKGIGLVIASFMLVSTNNFSGFENGRKYACYAGIAPFPNESGISIRGKTKVSHLANKKIKTLLSNGANAAKSHDPEIKTYFERKIKEGKDYKSVINAISCKLVNRVFAVVKRQTPYVSTYQQKIA

SEQ ID NO: 206485 - protein, 415 aa, unidentified
MEPIHQRVAGIDVHRMKHVVTILIGQEDGTVSSETREFGGFKRDMRALVAWLQMHRIQQVVMESTGIYWKSVFAHLEAAGIPALVVNAFHVKNVPGRKTDVGDSEWLAQLARFGLLRGSFIPPKDLRELRIVSRYRRKLTGMLAGEKNRLHKLLDDAGIKLGGVVADIDGVCASKMVEGLIAGGKPDELAALGRGKVRATTDILEAAMDGALSARHRLVLDIAHDHLRYLEGKLAALDRYLIAAMQPYAWAWRLLQTIPGIDAISAAMILIEIGDDPHRFRSPARLASWSALCPGNNESAGKRKSGKTRHGNPIVRYLLCEAANAARRTQTVFRAKYESLVIRRGHKKTIIALAHKLVRTIYFVLVRRKPYRDSTVDYEAASVAKNAPRWIRALKKYGYWPQVAVPKSPIDMTAT

SEQ ID NO: 206486 - protein, 343 aa, unidentified
METFVGLDVSLGETSVCILDKDGTRIFEGKVASEPAPIARLIRKRAPGVVRVGLESGPTSVWLTHALTAEGLPVVCLDARHAHAVLSVQINKSDRGDARGLAEMIRVGWFKAVQVKSLNAHERKALLIARHQLVDMRVRIDNQLRGILKTFGLVIGKCGRGQIGQRAQELSKGQLGIDGVVASMVAVRDSLLEQIIVCDRAIRRLAKKDDTARRLMTVPGVGPVVALAYISVIDDPKRFTHARDVGAYLGLTPKRYQSGEVDLAGRISKCGDGFARTCLYEAAGVLLTRVERWSPLKAWGVRLMKRIGATKAKVAVARKLAVILHCIWTDGTEFWWTKEAATA

SEQ ID NO: 206487 - protein, 391 aa, unidentified
MTSSHRIDTLAAGDKDGTLYVAFELSKSKWLIGLVVSGESKLSRHQVSGGDTAAVWQLISKKRAYAEKKLGRAVRVVSCYEAGYDGFWLARRLGEQGIDNRVLDPSSIEMPRRARQAKTDRLDLERLMRVLIRHDGGEPRVCSVVHPPSPEQEDARRLSRERDRLIGERTGHGNRIKGLLHGQGVREVEPRRKDFLERLAQARTGDGRVLPARLVAEIKREHARLVLLGEQLAEVEGQMRAEREAAAPDSRARQVNQLLGLKGIGAVGGETLVNEVFWRDFQNRRQVGAYFGLVGTPFDSGQSSREQGISKSGNARARTLAIELSWLWLRHQPDSALSLWFKQRVGDQKGRVKRVAIVAMARKLMVALWRFLTLGLVPENAIVRAAAPAGR

SEQ ID NO: 206488 - protein, 400 aa, unidentified
MTDETDIGVYLGLDVGKGEHHATAVNRAGKKVLDKPLPNSEPTLRELFDKLRAKHGTVLMVVDQPASIGALPLAVARDAGCQVAYLPGLTMRRIADLYPGEAKTDARDAFVIADAARAMPHTLRTIDPADETVAELAMIAGFDDDLAGESTRIANRLRSLLTQIHPSLERALGPRIQHPAVLRLLEQFGSPAQIRKAGRRRLVTLIRPKAPRMAERLVEDIFTALDEQTVVVPGTDAAALIVPSLASSLQSVLDQRKLLAAKIEELLEAHPLSQVLISMPGIGIRTAARILIDVGDGSGFATAGHLAAYAGLAPVTRNSGSSIRGEHPSRRGNKQLKRAFYLAAFASLSQPESRAYYDRKRREGKHHIAALIALARHRIDVLFAMLRDGTFYQPPTPATA

SEQ ID NO: 206489 - protein, 427 aa, unidentified
MRSIALDVHRDFCEVAIKDESGLRLAGRVKSSVEQLERFAQSLAPDDEVALEATGGALAIARILEPHVGRVLIANTRKLSAIAESKVKTDKVDASTLCELLAAGFLPAVWSPDEFTRALRRRCQRRSKLVRSRTRSKNECHAVLQRNLKGRPPMSDVFGKGGREWLAALELPADESETLQCCLREVDFLDNEIGLIERELARQALSSEEIRRLMSVPGVSLVSAAAFVAATGDIHRFSSPKKLVSYLGLDPRVRQSGEGPARHGHISKQGSAEARHMLCEAAWVAVRTPGPLRAFHERVRARRGAQIALVASARKLGVLFWHLLTREEDYAFGRPSLTRRKLRALELKTREGWRRGRYSGPRVNESRKEREREAEFAEQMESAYRRLVEDWQPKAPKSGAGATRGRASSKPSSGKQRGRASVPNSAL

SEQ ID NO: 206490 - protein, 392 aa, unidentified
MLYIGIDVAKSKHDCFIIDSDGAVYTDNLRIPNNRAGFNRLLETILNALNGEPVKNAKVGLEHTGHYSINIKRFLESQGFVVTSFNPLGTNAFRKASTLRKTKTDKGDAKTIAAMLFSNESIPTLNPSYQIQELKSLTRHRFRLIGYRGKLKTSLTRIIDIVFPEFPDFVWSVHQKSSQQLLLELPTPDAIAHCHLTRLTNLIRKESRGRYGREKAVALRKLAASSIGLSDEALAFELRQTIRMIQNVQTEIDALDQKIKSIVRELDTPLLTIPGISYTLAAIILAEIGDIDNFSHPSKLQAFAGLDPSTYQSGKYTASHSTMVKRGSTYLRWAVFQAARLVAMRDKTFADYLAKKRSEGKHFNVALSHVSKKLLRTIFYMLKHNEAFVPQN

SEQ ID NO: 206491 - protein, 341 aa, unidentified
MNKFIRIAVDLGKRYFQVHGLESEGGRSVSRKLKRSRMLEFFSQIERCRVGMEACGSAHHWARELVAMGHEVVLIPPAYIKPYVKRGKNDAVDAAAICEAMSRPDMRFVPIKSADQQAVLMLHKTREMFVKQRTMSVNALRGHLAEFGIVVAKGIGRVDELLALAESDAALPQVAKSIVAGLAQHLEGLDQSIEAVEDEIARAHGQNPTSRLLDEVPGIGTLIASVIAASVPDPGVFKSGRDFAAWLGLTPRQNSSGGTEKLGAITKQGNRYIRKMLVTGSTSVLRVAGKRKGALADWINALRARKPERVVAVALANKLARICWAIMTTGESFRVDTYVKA

SEQ ID NO: 206492 - protein, 361 aa, unidentified
MIADENPAHPGALEPEPQLGVSSACPSNPNSRMGRRKASPLLQGGMKMDFIIVGIDVAKDKLDIALLPSGESFVAARDADGLEALSQRLLALDPHVVAIEATGGYETIVAATLSELGLPVVVVNPAQVRAYAKALGKRAKTDPLDALVIARFAEATRPDVRPLPDAAARLLSDLVTRRRQIVAMMAAERQRQKRLPEKRLQKSIEQLLEALQKALSAIEIDIDEAVRGSPLWLAQEDLLQSVPGIGPQIARALIADLPEIGTLDRRQIAALAGLAPWTRQSGQWKGKSMIGGGRGAIRSALFIGAMSASRFNPPLAAFYQRLIAAGKPKLVALIAVARKLLTILNAMIKSKKPWDEEHAHA

SEQ ID NO: 206493 - protein, 357 aa, unidentified
MKSQEIKYVGIDCGKKTLEVIRIGDNSLHQRQQFSTTEIGISKLINWLNPNDVVGLEAGSQSFRIAKSILNKGIQVIVLNPGDLATIYQSLKKTDKEDSLKIARLIQRFPIEELPSVPIPNDEEEDNRRLCTEQENWTRQLTQSKNRLHSLFTQAGLTHITKKHLRTKANREISVALLPSRYQKEAERILKVLDLVEQNLKLIEEEIKEALKKNKAYAQTIMSMPGIGMITSLAIMSYMGNCKRFSSAKQAAYYVGLVPRVDISGDSAYYGRIVNRGCHSIRRVIVQAAWSLVRCQYGGKIKEFYQRLYPKKGAKKSIIATSRKMIEILYTMIKTGELFDSMPEKVLNRKLTQYGLM

SEQ ID NO: 206494 - protein, 341 aa, unidentified
MKQDISVLGLDIAKRVFHAVGLDAMGKIVLRKPLSRHALMSFIAQLPPVLIGMEACGGAHYWARRFREHGHEVKLMAPQFVKPYVKSNKNDARDAEAIGEAVTRPTMRFVPTKEVDQQDIQALHRVRERLMGARTALVNEVHGLLHEYGIVLPKGVAKFRQAVVGILESEKDKLTPLSREMFWKLVDEFAAVEEQLAYYQEKLETVATTHPECRRLMTIPGIGPLTATALLAAVSDASAFKNGRQFAAWLGLVPRQHSTGGKERLLGISKRGDGYLRKLFVHGARAVVRGVREKTDRRSGWIRGLIARRGFNRTTVAVANKNARIVWALLTSHQDYQPTTG

SEQ ID NO: 206495 - protein, 388 aa, unidentified
MQVAADRTDASTAIQTDLPAIFASLELSRSTWLITSLSPGAGEKMSKHSIRAGDVAGLLVRLAQLKEKARGRTGRDFPIIAIQEAGLDGFWIHRVLQSEGIESHVVDAASILTSRRRRRAKTDGIDGETLVRTLLAYKRGEPRVCAMVKAPTPEEEDRRRICRERKTLVGERVEHVNRIKGLLFAQGVSDYEPLKRNRRARLEELKTGDGRPLPAHLKAQISRELDRLELVLPQLKAVEAERDALLKPVSEGCPAPAAMLAQLKGMGPEFTAILWSEGLFRSFSNRRQLAAYAGLAPTPWQSGSVAHEQGVSKAGNRRLRTTMIQLAWLWLRHQPTSALSVWFQERVQSNGGKMRKTTIVALARKLLVALWKYSTSGVVIEGAAMKTI

SEQ ID NO: 206496 - protein, 337 aa, unidentified
MTIIRIGLDTAKHVFQVHGVDENEQTVVRRQLRRGEMGKFFNRLAPTRIGLEACGASHYWARLLRGLGHEVVLLPPQYIKPYVKRGKNDANDAEAICEAMSRPGMRFVPIKSAESQAELMPLGVRDLLIKQRTAVINTIRGYAAEFGVIATKGPVKVAELLQQAHAEEASVPVLALDMLRLLAAQLDALDVKLKLIETRLMALHRENPVSQCLASQPGIGPIGAVSFALRVTDPKSFRSGRHFAAWLGLTPKDNSSGGKRRQGRISRQGNEALRKLVVLGATAVIRFARPGHGSPWLLNLLARKPKKLAAIALANKMARTLWAMMVSGEVYRRPLPA

SEQ ID NO: 206497 - protein, 357 aa, unidentified
MSSENNILNFNNQRFYIGIDVHKKSWKVTIRSGAIALKTYSMNPSSQELSKYMHEKYPGGIYHSVYEAGFSGYWTHRQLEQLGFKNIIVSPNNVPTNAREKVYKTDSVDSRKLARELESGSIKGIYVPDQLHQELRSIVRLRYQIMNSNVRLKNQIKSYLNFYGHKFPENYETKHWSGIFIKYLRTLSFEYTMGKEQLEIYLSELTEKRELMVEIIKRIRHYCQGYGFDKEIQLLMKVPGIGFITAVTIYSELIDINRFPKLDNLASYVGLTPSVRSSADKEKNLGLKMQHNKYLRSMLVEAAWIAVRKDPALTACYNEYIKRMSKQEGIIRIAKKLLNRIRAVLMGNREYVCSVVK

SEQ ID NO: 206498 - protein, 405 aa, unidentified
MNAVGIDVSKGKSTVTIRRPGDVILMPPCDIPHTQSGINDLIGKIRSLDGETKACMEHTGRYYEPVASWLADAGIFVSAVNPILIRDFGDDSLRSPKTDKADSKKIARYTLDRWAKLKQYGRMDKTRNQLKTMNRQFGFYMNQKTAMKNNLIALLDQTYPGANDFFDSPARSDGSQKWVDFVHTYWHVDCVRGRSLNAFTEHYQNWCRRKGYNFSADKAAKIYHLSSDLIAVFPKDNNTRLLIRQAVAMLNTASETVESLRQEMDAAASTLPEYPVVMSMNGVGPTLGPQLMAEIGDVTRFTHRGALTAFAGVDPGKNDSGQHIQKSVRTSKKGSPNLRKTLFQIMDSLIKRSPADDPVYAFMDKKRAQGKPYYVYMTAGANKFLRIYYGRVKEYLSTLPENEEM

SEQ ID NO: 206499 - protein, 352 aa, unidentified
MAEKLSGVIAVIGIDIGKSSFHVVGLDARGAVVLRQRWSRGQVEARLGNMPPCLIGMEACVGAHHLSRQLRTLGHDARLMPAKYVRPYSKGQKNDFRDAEAIAEAVQRPTMKFVATKSADQLDQQALHRVRERLVGQRTGISNQIRAFLLERGIAVRQGLRFLRAELPAILAKRCDVLSPRMVHLMEDLARDWRRLDERIESLSGEIDALARQDAGCERLMSVPGIGPIISSAMVAAIGTGDAFEKGRDFAAWLGLVPKQISTGDRTILGKISKRGNRYLRALFVQAAWVVLLRPKSWERCGLKPWIEAAKRRLHHNVLAIALANKLARIAWSVLARGRGFEARSIVTAQPV

SEQ ID NO: 206500 - protein, 315 aa, unidentified
MEQSFFAGIDVSEDRLDVAFSHGDEILEFYSIPHTEDEISHLIEKFQKTSPSLIVVERSGGLERCLVACLAGAGLPVVANNPRQVRDFAKATGVLAKTDKIDARTMARFAAAVKPPQRPIKDAERQQLADRVARRRQLVHMLAQEKNRLSRSLGPVRADIQHHISYLQERLDKSNKDIDQIIKGTALYQDTLELLSSVPGIGPVTSASLIADCPELGSLNRRQIAALVGTAPFNRDSGKRSGTRCVWGGRRTVRAHLYMATISAIKCNHKIKTFYTRLIAAGKKPKVAITACMRKLITILNAMVKNQEPWQTSAA

SEQ ID NO: 206501 - protein, 345 aa, unidentified
METMYYIGLDVHKKTIDYCVKDGSGRIYAAGSIRATRLELDMWMKTLPRPWTAAMEATIFTAWIYDHLQPHAAAVKVAHPLMLRAIAVAKKKNDRIDAKKIADCLRCDFLPECYMASTEIRERRRTLRYRNLLVRQAVQMKNKIAVLLMEAGVSYNKQKLHKVGYFRELLATNQDIDEGLKPLLRLCRETVVRLGKTESALVRSLQRDSLLVERVERLMTIPAVGPITALTWALEVGDVQRFSSIKKAISYCGLCGAERSSANITMRTPLSKQRNKHLQTVLIEAAKMAPRNSPELAMVYDQEKQKGNANRATLAIARKLVAYLVAVDRRQKEFLTVERENRTAA

SEQ ID NO: 206502 - protein, 328 aa, unidentified
MHYLGIDVAKAKLDCVLLNPESGKRKNKTVPNASEGITALLNALRTWSVAPAQVHVVMEPTASYHELAALALSDAGCVVSLINPAHLRRYAQAVGVRSKTDAADSALLARYGAAEKPEAWMPPSASVRALRALLARRDAVAEDLQRERNRAEKMAVTEVPESVRQSLLEVTAFLEVQLARLQREIDQHIDNDPDLRDKRELLLSIPAVGERVAQNMTALLASRRFDSAEQLAAYLGLVPVDWQSGSSIKGRPRMSKAGPAHLRKLLYMPAIVAVKHNPHIRAMYERLIARGKPKMAAIGAAMRKLAHLCFGVVHSGKPYSPNFRTENP

SEQ ID NO: 206503 - protein, 346 aa, unidentified
MNQIIRIGMDTSKHFFQLHGVDAAERPVLRRKLRRNEVLAFFAKQPPTVIGMEACGAGHYWGRELRKLGHEVKLIAPQHVKAYVKRNKNDGRDAEGLCEAMSRPTMQFVPVKTEEQQAALMLAGVRQQLMTRRTQLSNAIRGYAAEFGLITAKGLVKVEPLLADIAQDESLPALAREMFAVHGREYARLQVELKAVEARLMAWHRANADSRRLAKIPGIGPIGATTLIMKAPDPGLFPSGRHFAAWIGLTPKDHSTAGKTRIGKITRAGDEMLRSVLVAGATAVIQQAKKGRGRPSPWLVALLARKSPKLAAVALANKTARIAWKLLTTGESYDGARMPVASALAA

SEQ ID NO: 206504 - protein, 345 aa, unidentified
MNEISLVSIDLAKRVFQVEASDACGRRLWERRVWREQLVALIGSLPATTIAMEACATAHHWGRLFSAMGHKIQLIPPPEVSRLVDRRKKNDRSDTRAIRKAAGDEDVRAVALKSTQSQAEQFEHRVREQWVNQRTATINQVRAMLSEFGIVLPKGAGVLLSRRADLLTDRRLAGMDRLKRLMEAQFELLERLSTMIDQADRRLRQLARTSPVARQLTSIPGVGPVISTAMAAAVPDAKAFANGRAFAASLGLVPSQHSSGQTVRLGPITKRGSRYLRANLVHGARSLLTRVKRSAAEPSDGLMVWARGLLGRMHWNNAVVAVANKLARIIWALMANGGLYRPRPA

SEQ ID NO: 206505 - protein, 400 aa, unidentified
MAVLVGVDWGCGAHAVCVIDAKGLVLERFGIGHDRAGLALLLTRLKTHGAPSTIPVAIERPSGLLVDTLVEVGFVVTPIHPNVVKACRPRYRAVAAKSDPGDAYILADILRTDGHRLRPLEPQSDAIKALRGLVRGRDDLIRARVALANQLTALLAGFWPGAAQIFADVASPIALAFLERYPTPEAAVRLGPKRLAGFLAQHQYCGRRAPEALLERLRSAPEGAAGEAEGEAKGELVRALARTLQVLIAELAKLTSRIEHAVAALPDGRIVMSFPRAGRICAAQILAELGDVRARFPSEHQLAAEAGVAPVTYQSGKSRGVGWRWACNKRLRAALTCMADNSRHQSPWAADVYKRARARGCAHPHAIRILARAWARVLWRAWTDRKPYDPRQHRGAQAFA

SEQ ID NO: 206506 - protein, 319 aa, unidentified
MTQPERFIGIDVSKATLDVAFGHDEQAPVESIPYTPDHVARLVARLQQLQPTLIVLEATGGWERPLVEALQQADLLVVRIQPQRVRALAKAEGLLAKTDRLDARLLARFGERIRPPAEAAADPQQQEMSDLLARRTQLLQMRTAERNRLGTAGPAVRKRIQEHLDWLDKALAEIEHDLEDRINSSNDLPRQQQLLQSVPGIGKITAQTLLIRLPELQSKDRKAIARFVGVAPLANQSGPKDKKRHIYGGRQDVRSVLYMATLSATRCNPVIRAFYQRLRQAGKPFKVALVAAMHKLLTILNAILRHNRPWDPTLHASKT

SEQ ID NO: 206507 - protein, 409 aa, unidentified
MGLLEVALDPATVVVAVDPGKVMNRVWVSNGAGLLEEPVSLPVARSGIAVLEKMLAAHAGERVIAIEATGSLHRAWAAELERLHPGALRLFAPSETKSARTQLGSGRFKTDDRDCAALTYLARQGAGRRQAEEATVEELRAAVRHRRGLVADRKKAQQRLHDQLNALCPGLSAPAGHGRSLPIETATGQAVLACAVAFAGRPPSTRSLIARSPGKLTRATADYWANRWRDCLPPPPDAGARATRLGRDLDRYRSLLVDVAAVEDEITVLLARTQGQVLTSLPGVAANRAAAFAAHSLPIARFPDAKHLYSATGLAPGMYESATLRKRGRISRQGLAEHRDALMGIAWGLSLYSPAFAERSAELRARGMAPIQARVALARNACRLIYRMLVTQQPFDEQAYRRGRLSRGR

SEQ ID NO: 206508 - protein, 453 aa, unidentified
MSQQRRRRVQLEELAQINLDAGGLDIGASEIWACVPADRDEEGVRCFKTFTPDLHALADWLADCGITTVAMESTSIYWIPIYEILESRGMRVCLVNAQATKNVSGRKTDVVDCQWIQQLHTYGLLAASFRPPADVCVLRSYVRQRESLLQQRAREIQHVQKALHLMNLKLTTVITDLTGLTGMQIIRAILAGERDPVVLARFRDPRCKSSEAEIAKALTGNYQPEHLFALRQAVEGLDFYTGQLVACDAEIEAHYAVFHPQVDLLEQPLPNEKRRHRPNHPNYDLRTHLYLTAGVDLTAIHGIDVLLAQDILAEIGTDMSQWKTEKHFASWLGLAPNNKSSAGKVFSRHTRATSNRAATAFRLAAQSAHRSQNALGAFYRRIKAKHGAPVAITATAHKLARIVYQMLKHRTPYIDPGLDAYFDQQRQRALRSLHRLAHKLGFQLVSVSQPAVS

SEQ ID NO: 206509 - protein, 338 aa, unidentified
MKKFSGIDLHSNNSLIVVSDEADKIVYQRRHPNDLEEILRALEPHRKELVGIVVESTYNWYWLVDGLMNAGYVVHLANTAAIKKYEGLKYSGDDADAAYLAKLLRLGLLPEGYIFPPEGRATRDLSRKRMQLVRCRTLQILSIESILARQTGSRLKSAQVQRLTAEEIEKLGFSPDVTLALQANAAVMRTLQNQILVLEERLQQRVRLSEEFALLKSVPGIGTILATTIMLEVGTVKRFVKVGNFSSYCRCVQSLRVSNGKKKGEGNSKNGNPYLAWAFVEAAHFALRHCPQAKSFYERKKQQRNAVVATKALAHKLARACYHMLRERKSFEVERCFV

SEQ ID NO: 206510 - protein, 335 aa, unidentified
MEFTYFIGCDVSKNELDFAVMQGKQFLFHKEIANEPDAIKAFVNELKKLPEFDLVKAIFCMEHTGIYNNHLLVYLHKKKANSCLEAATHIKNSLGNIRGKNDKVDAIRIAEYAYKNREELRLWQPKREVIQKLAYLAATRTRLIEAQKQLKTPLKESNVFVSKSIANQTEKICQRTLNSLEADLEKVNDAIDELIESDEGLKRLFAIITSVNGVGTVTATQILITTNEFKDIKDPKKFACYAGVAPFTKESGLFKGKARVSHMANKKVKTLLHMSALTAITYNPEMKNYYDRKVNEEKKNKMLVINAVRNKLILHIFACVNQNRKYEKIYTRTVV

SEQ ID NO: 206511 - protein, 404 aa, unidentified
MWFAGIDWADTHHDILVLDERGQKLASFRIMHTSKGLDELASRLTAICGPEHKAELACIVETTRGLLITHLLEAGFAVYPVNPKTVDRKRSASGAKTDQIDAYLLAKHGRSEIADLRRLEPDSPLIAELKALTLDQDGLIQMQTRLVNQLTACLKAYYPVALTLFTKVQQPSTLHFLLAYPTPQEAMNASCEEIAELLRSTGYPTPKKTAASIVYQVHQPQLTADDVTCRTKSRLLIALIRQLQPVMEEIAAYDQEIERLFLMHADSHLFRMLPRAGKRIAPRLLAEIGDDRSRYQDTASLQALAGTSPVPYESGKYAKPHRRYACIKPLRNVLQQFAWQSIQTEAWASEYYERKRREGKSHTVAVRALANVWVRILFALWLKGEHYQSAIFEQARHMHAPRAA

SEQ ID NO: 206512 - protein, 438 aa, unidentified
MAMDVVHPRVAGIDVHKKIIWVAVRLPGEAPGQRTVVVKSFRTFWRQLCKMAAWLAELGVTDAAMESTGVFWWPVYHALAGAGIGVCVCNAAHMRNVPGRKRDVSDCQWIAELHEHGLLRPSFIPAAEVAALRARTRYRKKLIEQRTSEGQRLSKTLEDGGIKIDSVASELLGKSGRAMIEAMIAGERNPGVLADLARGVLRRKTDDLQMACDGRFTGSHAQMCRLHLAAYDHLTAQIADLDELVAEAAAPFQRLIARLMTIPGVGLRTAQVIVAETGGDMTRFATAARLAAWAGLAPGDNESAGKRKKAATRKGNQHLKTAMTESAWTVGRTATRPGARFRRLARRFGRGNEKKAAVAVAHTLICIAWAVITHDQDYADAGEQYYEQRDQRNREHLTRHHQQALARLGYQVTLTGPGDGRPPPGTGTPPTTAPGQAA

SEQ ID NO: 206513 - protein, 457 aa, unidentified
MMETKRRREQRSMLPVHPDAAAIDIGATVHVAAVGPARDPEPVRSFGTFTGDLHRLADWFAQCGIKTVVMESTGVYWIPIYEILEQRGFEVRVVNARDAKHVPGRKTDVSDAAWLQRLHEFGLLRGSFRPHGAIAALRAYLRQRERLLDYAAAHIQHMQKALTQMNLQIHHVISDITGATGMRIIRAIVAGERDPDTLASYRDIRCHSSAETVRQALIGNYREEHLFALAQAVELYEVYQAKVATCDEKIEGVLERLKQPGRAPAKPLRAARHKTRQPNAPAFDARGALYAVLGVDLTQIHGLGPYLALKLISECGTDLSAWPSAKHFTSWLSLAPGNKISGGKILSSRTRPSGNRAAALLRLAATTVGRTETALGAFYRRLSARIGKAKAVTATARKIAVLFYNAVRHGMDYADPGASYYEERYRRRVLTNLQRRAKAFGYVLQPTEIKVVPMAVS

SEQ ID NO: 206514 - protein, 376 aa, unidentified
MSASALLTERQTPIEFPHPHHPASMRNLAAMTADLTASSRRCVHPSIVYLNHGRDIMQIQTQVLNIGADVAKDEIVVACSERSFPVRKLANQRTALLAFLKGLPTGSRIGMESTGIYNELFASLAHKLGFIVFVLNPKDARHYAKGVGLRGKTDRVDAEMLARMIAHEHANLHIWIPPTPEQREIDRLIKRRAKLSSLRQALGMSLKGLDGFKTDLKTLRMRFDQVIAHIDQRVKALIDANPDRKEHVMHLSTIYGVGPVVSAALVNTLERVPLKNADAFVAFTGLDPRPDDSGQHRGKRRLSKRGPSELRRLLYLAALSAIKTKTWRPLYEHYRDKGLSSTAVIVILARRIARTAWSMYTYKTEFDPGRLTKGLT

SEQ ID NO: 206515 - protein, 385 aa, unidentified
MDQTSSSAISTNTLHCALELSRNSWLLAIQFPDREQPSLYPIEGGNTEKLMAKLTAALDCWAKVSGSPPAITLCYEVGYDAFWLARFLMGRGIECLVIDPGSLQINRRGRRVKTDRIDVKMLLRTLIAWCRGERHVWSLVRIPSIDEEDLRRSHRERGRLVRERTAHINRIKGLLFGQGIRGINVKSKYKTLAVDNLVTGDGHRLPPRLACEIARQIQRLAMVQEQIAKIERERDTAPTPCEATERKRHLLLQLKSIGPAISALLSREVYYRQFANRRQVGSFLGLTPSPYNSGAEERCQGISRAGSGHVRAIMIETAWLWIRHQPKSALTRWFVERTAGQNTRVRKIMIVAVARKLAIALWRYVEHGMVPQGAILNPPTTGNAR

SEQ ID NO: 206516 - protein, 400 aa, unidentified
MLSIGIDVSKGKSTVCGMKPGGEIVYTPFEIQHTREGMSELVSLLHNSGEEVRAVLESTGSYHCPVVAALLENGIFVSVVNSLRMKRFCSQSIRKVKTDQIDAMQIALYGLAYWQELQPTKLPEDTYRELQLLARQYYQMTSILIKAKVDFNALCDQVLPGMQELMSDHAGRHKLSDFVLRYHHTAHILKMGETRFRKDYCKWAEKKGYRNHERMAALIFATAQNGIPVLPDAPSTQIVITEAIRVLHTVEASRDAILTQMQALAKTLPEYSLVREMPCIGDTLAPRLIAEIGDVRRFHSKRALIAYAGIDAPPYQSGKFCANNRHISKRGNRYLRKTGYEVMQSYVMHKPANDPIFTFIEKKRGEGKSGKLAMVAGLNKFLRVYYGKVTELYRSLPAIE

SEQ ID NO: 206517 - protein, 395 aa, unidentified
MFIVGIDVAKRSHEVCMITSDGQTVQRPFSIRNNCTGYNLMLEKIRKHTNIKSQIVFAMESTAHYWLALFTRLRKDGYHVILLNPIQTSAMRDMFIRKIKTDAKDSFIIAELIRFGRYAESNVAQDRLLALKELCRNRFYLVDMAGDLKRKLIALIDRVFPEYEAQFDTIFCKSSVAVLKKYPTPQKLSNAHLDKLTELLWNSSNGHFGEWKARELKELARNSFGVEDCDGAYSTLILLMLDQIQSLSGKADALEKEISQLFQSFDTSVTTIPGVGPIIGAVILSEVGDISRFSSADKLAAYIGVDPSVNQSGEFQAAHAHMSKRGSPYLCRCIWMASQVAVQRDPMFRAYYEKKAAEGLKYMTIIGHVTRKMTAVVFAILRDHKVYEPILPTAA

SEQ ID NO: 206518 - protein, 392 aa, unidentified
MKYVGIDIGKRFHLVCSMDEQNIFSKHIKIDSLQKGYDELKRFLTSEEKRENIVIGLEATGHYWLPLFEKLKRDEYSVFVLNPLQVQSFRNEKIRGTKTDDADCELIAKVVKFGIGRETKIPNEELFQLKQLSRFRGDLVQQVTGVKLQVMKTLDIIFPEYDTIFSNMFGTTSKQVLSEYTTPEVIANLDISKLTKALKKASRNQIKKQQAELLQETAKQSFGLQYGIDAFSLELKCMIEHINHLTKQIVRVEERIKLFVEKQQTQLLTIPGISHVTAGFILGEMTDFNLSEQTDPRSLLAFAGLDPSLNQSGLMKGTAKMSKRGSRYLRQAIWQASLTAATRDPMFKRIYEKQKGKGKHHSVCLSHVAKKLVYVIFSILKSGKEYQPVLVN

SEQ ID NO: 206519 - protein, 349 aa, unidentified
MSQNLNSAVAVIGIDIGKNSFHVVGLDQHGAIVLRQKWSRGQIETRLANMPPCLIGMEACVGAHHLSRKLKAFGHDARLMPAKYVRPYSKGQKNDFRDAEAIAEAVQRPTMKFVATKTAEQLDLQAMHRVRERLVSQRTGIINQIRAFLLERGVAVRQGLRFLRAELPRILATPSAVLSPRMVRVIEDLTEDWRRLDHRIDDLSNEITLLARRDAGCERLMSVPGIGPIISSAMVAAIGTGDAFSKGRDFAAWLGLVPKQISTGDRTILGKISKRGNRYLRVLFVQAAWVVLIKPMSWDRHGLKHWIEAAKKRLHRNVLAIALANKLARIAWGVLAGGRTFEASKLQAA

SEQ ID NO: 206520 - protein, 446 aa, unidentified
MSRKKRTHLRGKRGQAFADKMRGISLERILCVSLDIHKYFHVVMLHNALGEIITPTFEIDIFQSGFEQLCQAIKEASHRIGAQVVLTGMEPTSHYFENLARHLQDGPYPVTLINSFAVKENRDQQMMHYEKDDEIDTAAIGDLLRRGEGSPYRPARGIYLKMQQLDRVRIGKIKIRTMLKNQIIAHLDRIFPGLVIVADAGKERYTPMFATNFWSCQTMQHLIRVCPDPRQLAAMSTQDLIDVFHAHHCAMGHITANKIITYARKILLPDPELIAIRSELLTHDIALFDDVQNHITQLEGRLCTLLAKTPYYIWARLKGFSLIQVASLAAAVGDPANYNVAKQVFRRSGLVCGRHDSGTRKRKGKGKHVSKAGDVYIRRNLMNSVSTLLLHQPVLYRYYQKLKLTKHDGVARVATARRAMGILWAIQRDQHSQTLVFKKGQQNVDR

SEQ ID NO: 206521 - protein, 323 aa, unidentified
MTKHTMICAGIDTGKRKLDVAIEGNCAQLQVENTSDGHAVLLAWLRRHRVKRVGIEASGGYEQPVVTELRRKRFVVVVFQPAQVRAYAKFHSQRAKNDKIDAALIAVCTAAVRKIHAAPDPRLLPFAEQLTMIDQVNEDIARLKNRIESCRNAQFRKLWQEDIARLEQREKAELKALVTSIRKHPDLARRLELINSVSGIGLPTAVAILVRMPEIGQITREQAVALAGLAPYDDDSGEQVGVRHIEGGRKRLRRALYTASLAASFRWNQQMIQLYQRLIAAGKEHKRALVACARKMLIFANTVVARGTPWQDSPPEKAALTTG

SEQ ID NO: 206522 - protein, 355 aa, unidentified
MKNQAIHYLGLDVHQATTVVSVRNEHGTIVMRATVRTNADAILSLVQGAGKRVRVALEEGTQAQWLHDVLQPHAEQVIVCNVRGKSEVANKSDRIDADDLSEQLRLGSLKPVYHGAPSVLTLKELVRNYNSLVEDATRVMLRIKALFRARAIRTPGTSVYRAARRKEWLDQLTTPGARVRAASLLEQLDLLLELRPKAKAAMIAEARKMPGWKPLRSIPFLGDVRTAQLLAIMATPYRFRTKRNLWPYAGLAVVTRSSADHDFAGGQLRRRARAPRTRGLNRNHNPLLKSILKGAATAAAAKAGPLKDIYEACLARGTRPEMAALTLARKIASIALRLWKKGELWDPAKLTMQTT

SEQ ID NO: 206523 - protein, 347 aa, unidentified
MNFYNNTHPYYCGIDLHARSLYVCILDQRGKTCLHKEISADPDKLQQLLEPYIGNIVVGVECMHCWYWVADFCEDAGIDFILGHALYMKAIHGGKAKNDRIDSFKIANLIRGGNFPLAYVYPKEMRATRDLLRRRMKIVRHGADLKAHVANTTSQYNLPPNKVNLKNKATREQLRSTFPERSVQKNIDLDMVILDCYVEQLSKVEWYIQQQAKQHKPNHFHLLKSVWGIGPILALTIIYEIGDIDRFESVQKFASYARLVKCKAESAGKTYGTSGNKIGNAHLKWAFSEAAVLYLRGNKKAQKYLLKLQKRMSKAKALSALAHKLGRCIYFMLKNESVFDETRFLKG

SEQ ID NO: 206524 - protein, 340 aa, unidentified
MDITTLVIDLAKSVFQLHGVDAQGVIVLQKKLRRGAVVKFLSKLEPCLIGIEACATSHYWAREIAALGHDVKMIPPAYVKPYVKRQKNDAADAEAICEAVTRPNMRFVPVKTEEQQAVLVLHRSRDLLMRQRTMILNAIRSHCAEFGIIAAQGARKVSELVTKLRNDDTLGVPEVGVSALLSLASQLDCLEQEVRKIEHQLLAWHRQNAASQRLETIPGIGLITATALAASVPDPAVFKSGRQFAAYLGLVPRQNSSGGKDRLGRISKMGNGYLRRLLVVGATSVTRRAPTTDTRTGTWVRSLLERKPTRVVTVAIANKTARTAWAFLSKGESYKAVPAI

SEQ ID NO: 206525 - protein, 338 aa, unidentified
MNISLVGLDIAKSIFHLVGLNQAGKPVKRKILKRPHLLRFFSQLGPCTIVMEACGSAHYWAREFQKQGHQVKLIAPQYVKPFVKGNKNDYNDALGIAEAGQRPNMRFVPIKALEQQDIQMVHRLRERLVKNRTALVNQIRGLLAEYGIAIRKGIYAVHAELPLILEDAENGLTVMARESFNALYAELLELNVKHRACEKKVIEINKANEICLRLDEVIGIGPVTATAVYAAVGDDRDFENGRHFSAWVGLVPKQHSSGGKANLLGISKRGNAYLRTLFIHGARSVLQYVDGKDDRFSRWASALVERRGKNKACVAVANKLARMAWVIMAKGERYRVAE

SEQ ID NO: 206526 - protein, 417 aa, unidentified
MLKIVFPICCGIDVHKTFLVATIASTDRSSVTTYQTKRFSTFTKDLENLSKWLLDNQCADVCMESTGKYWIPVYNVLELTCEVILAHPKYVKSLRGKKTDRKDSVWIADLFKHGLVKASFIPEKAIRDLREVMRYRTKLVSMKSSEKNRYQNALTVSNVQLASVVSDTFGKSAQALINQLLQQPKDTSFDVLPFLHGSLKKKAEQISESLNGSIDDIQAQKIRSCTSHMAELDSHIEDLQVAADLIASPFTAALRIIESVPGIGHLSALTILSEIGTDMSKFLSAKHLCSWAGLTPCNDQSAGKKKSTRISRAGCYIKPILVQCALAAIKDKSFPYYGQRYQVLKHRRGHKKAIIAIARMMLSVIYTLLSRGELFSKELYEESLKNPMVILSPEEQLQRLAKKFGYVVVKVHEPVPV

SEQ ID NO: 206527 - protein, 411 aa, unidentified
MENVFPCCAGLDVHKESVEACVRRIEPNGRVHSETHHWGTMTCDLLVMADWMTVQGVTQVAMESTGVFWKPIYNILEGRFTMLLVNARHLKQVPGRKSDVRDCQWIAQLLQYGLLKGSFIPTRSQRELRDLTRHRTQLVEEKARAANRIHKVLQDTNIKLSSVATDVLGASGRAMLEALITGEEDPVKLADLAQRKLRGKIPQLEKALEGHLTEHHRFMLKLLWKQLAQQEELIAELDRKIEEQTRPFAAEIDRLDAVPGVDRRVAEVVLAEVGPDMKAFPTHENLASWAGMCPGNEESAGKRVRKRITPGNHWLKRTLAQATWAASHSKNTYLASQYRRLAGRRGKKRALIAVGHSILVIFYHMLKAGTSYTDLGRDFFDRLEPQRLTRYYVKRLESLGHKVTLESCAAA

SEQ ID NO: 206528 - protein, 373 aa, unidentified
MIFVAAQKLTERRLAMNHVKSSRLDFTGQPIYIGLDVHKKSWSVSIFSNCGEYKTFSQPPEVDKLLHYLRHHFPGGDYRSVYEAGYCGFWIHDQLREKGIQCLVVNPADIPTKNKERRTKRDRIDCRKLGRTLRNGEITGIYVPSRSKLEDRTLIRTRQGMVRKQTRCKNQIKGMLLFYGVVIPEEREMGHWSQRFIQWIEGIRMERASGDIALRAHLEELNHLRQLIASLNRAILRLARTEEYRPLVRLLKTVPGISTLTAMILLTELGEITRFPSLDEMSCYVGLIPDTHESGEKEYVGSITQRRHSQLRWLLIEASWVAIRKDPALLMAFQEYCRRMRKTKAIVKVARKLLNRIRYVLKNQAEYVPCVIQ

SEQ ID NO: 206529 - protein, 354 aa, unidentified
MHQPEQATEVIIGVDTHKDTHTAVALDTLGTRLGTTTILVSREGYRQIEAWARSFGSVRAFGIECTGSYGAGLSRALQASGHRVLDVNRADRRARRRHGKNDPLDAEAAARAVLSGQATALAKSGTSSVEMVRHLKLARDSAVKARAQAMQMLKALIVSAPAELREQLEGIRGKVTLVRHLAALRPGPMTSTTASAKVGLRAISRRWLSLSEEIEAHDRDLDVLAATHTPELITAPGIATGTAAEMLIVVGDNPERIRSEAAFAKMCGTCPLPASSGKTSRHRLNRGGNRQANAALHRVIVTRMRCHQPTIDYVRRRTAEGKTKAEIMRCLKRYVAREVFTHLCKPRQPASETA

SEQ ID NO: 206530 - protein, 275 aa, unidentified
MRLIGCDLHASQQSIAMLDRDTGVVVEKTLKHEGEAVREFYASIPPPVVVGIEATGSMGWFLRLMEELAIECRVGHPTAIRKAETRRQKHDRRDAALLLQLLAEDRFPAIWMPSTEYRDLRSLLLHRHQWVRMRTRVQNALHAIVLAHGVRRGHTLWNRDGQALLASLPLPPHTADRRSELQALYQHLQTHIDRLDDRVEHVANERARATLLMTHPGVGPVTALATEIFVGDPARFLDGKALASYVGMIPREYSSGKRQRLGALSKQGNPFLRFL

SEQ ID NO: 206531 - protein, 430 aa, unidentified
MDECQALGPIGLGLRLLCRFYGASGEEITSIGADVNRATEPQMPQQRKPNDLGRSLISLAMDTTLIAVVELSLSSWLVAGIVPGVERQPLKKLKTDENALLALLNRWRDEAVRSGHKISRIAVAFEAGRDGFWLARWLKARDIEAHVIHASSIAVSREHRRAKTDRLDTELMKRAFVGWLRGERDHCKTASVPSLWEEDAKRPSRERESLVGEQSRLINRMKATLIRLGIRGFNPKLRHAEQRLETLRTPEGEPIPPNTLAELKRDMQRRRFICDQIQSIEQDRLERLERTPHTEPHAMVRLLARITGIGIETADLLVHELLLRNMRDRRAVARYGGLTGSPDRSGGTNREKGMARSGNARVRRGMIQLAWRFLLFQKNSALAQWYRRRTEHAPKARKTMIVALARKLLIALWRLVREGVVPEGVAMRPA

SEQ ID NO: 206532 - protein, 505 aa, unidentified
MGPGASTKTLVTPLSKGDPVLGDCTPFDARTNPPAVERRKNMQEEKYTKKRSNNKHKDSNASVPVLHPDAAGVDVHPTNIFVAVPPERDVEAVRTFSTFTADLQSAVDWLKKCRIRTVAMESTGVYWIPFYQMLSDHGFQVCLVNARHVKNVPGRKTDVGDARWLQYLHSVGLVRGSFRPSQTICALRSISRHRESLLKMGAVHIQHMQKALDQMNLHLHHVIDDIVGVSGLAIIEAILAGERNLQRLAELRHYRIKCDEPTMMKALEGDYRREHLFVLRQSLNSWKLIQQQIADCDAELELLTRNLQERFNAVEVPLSPSRRKKISKNQPKGNWQKLLAQAFGVDITAVPGVQTATAQTLFMELGIDWSCFSSSHRFSSWLGICPDKEISNNKVVRRNSRHVQKRLRVTLRMAALSLHQSQTPLGDEFRRRRAQLGPAGAITALAHKLARILWHIVTYKQPYDETIFAKSAEKHKKRQERYFIKRVESMGYRVMAAPMVPAQVP

SEQ ID NO: 206533 - protein, 339 aa, unidentified
MELYSGLDLHSRNTYIGILNTDFKRIFKKRVSNNLDLILETLEPFKDQIKGLVVESTYNWYWLVDGLMDAGYGRVHLANPSAIRQYEGLKHSDDKHDAFFLAQLLILGILPQGYIYPKEDRPVRDLARKRMFLVKHKTAHILSLQSLIARCSGQRISSNQIRTFTRADLKQLLKEEYLVLSAQANLDSISFLKQQIHGLEKVIKNKLKLSQAFNGLLTVPGIGNILAMTIMLEVGDIGRFAKVGNFTSYCRCAPTQRLSDGKSKGSGNRKNGNRYLSWAFSEAAQLARRFNARFHRYYDRKAAQTNTIVARRALSNKLARVCYYIMRDQVTFNDELILH

SEQ ID NO: 206534 - protein, 408 aa, unidentified
MEMLHSRCAGLDVHKDLIVGSIRIQEGGVPSHELRSFGATTSELLKLLDWLSAAGCTHVAMEATGVYWKPVWHVLEGPFELVLANAAHIKGVPGRKSDVNDATWIADLLAHGLIRSSFVPPQEIQEVRDLTRTRSNFVREVTRHTCRIQKLLEDCNVKLSSVLSDINGVTGRSILTAIAKGQKDPERLADMATYNLKASRSELVESLRGRFTPHHRFMLSQELKAIEELQKIIASIERRLGKAMEPFRAAVKRLTTIPGVSDTASKGIVAEIGLDMNRFPTDGHLVSWACLCPSLNKTAGKNRSTRIRKGGNHLKDLLVQCAWAAIRTKGSYLQSKYLRLKSRHGPKKAIVAIAADMLRAAYFIIRNNVEYRELGADYLQVRDRSKIAKKLVERIKKLGFEVDLREVA

SEQ ID NO: 206535 - protein, 392 aa, unidentified
MVVSVGIDVSKDKHDCFILSSEGEVLVDGFTIPNTMDGFNCLLQRIQDCTTPQDKIKVGLEATGHYSYNLLGFLLDNGLPTYVLNPLRTNLYRKSLSLRKTKTDRVDARTIASMLLSDAGLKPYTDTAYHNEELKSLTRYRFDKVKERAKLKSSIARLVCILFPELEKLVPSLHIASVYALLEEFPGAKQVANTHLTRLKALLETASNGHYKRDMALEIRNAAKNSIGSQIPAKSLELQHTIRLIRELDREIDEIEEQIQSIMDELHSPITTIPGLGFRMAAMILAEVGDFTRFDSPDKLLAYAGMSPSTYQSGQLKNCYPHMEKRGSRYLRYALYNATKYVCHWDPAFADYLAKKRAEGKHYNVALSHAAKKLVRLIFAMEKSRQPYCSAA

SEQ ID NO: 206536 - protein, 356 aa, unidentified
MSIIESGFKAANIIIGVDTHKSTHVAVAVNKQGARLAAISVPANSNGYMELNNWSRSLGSVQAFGIEGTGSYGASLSRYLMSQGLNVIEVTRPNRQLRYQHGKNDSLDAEGAARSVLSGQAIAAPKTQSGSVEMIRHLKIARDTAVKSRSVAMVTLKTLIINAPAELRDGIDQIKGKIALIRHIAAFRPGPIISTTASAKVAMRSLARRWLMLNDEVAEHDKELKTLIEAKAPSLMSSHGIATLTIAEMLILVGDNPSRIRSEAALAKLCGVCPIPASSGKTHRFRLNRGGNRQANAALYRVAIVRMRSHEPTLAYVRKRTKDGKSKSEIIRCLKRYIVREIFTHLCRPETLKNLC

SEQ ID NO: 206537 - protein, 442 aa, unidentified
MSDLAVLDPRAAFVDVGSEKMHVSIAGGQPAVFGTVTSQLHSLRDYLAEHQVRSVAMEATGVYWLPLYGVLEAAGMEVVMVDGRQTRNLPGRKTDMKDCQWGATLHAHGLLRAGFVPPADIRRLQDYLRLRGDHIAAAAGHIQHMQKALERMNIKLHEVISSLTGASGLAVIRAIVAGERDPQVLLGLCDIRIRNVKAERVVESLRGDWAEEHLFALAQAIQCWDHYQGLIAACDHQIEVVLRQMPDANTPPSAASTQTGKSRTRPGVNAPDIADLRGILARICGAKDLTTLPAHSEYSVLQLIGEIGTDLTKWRTEKHFTSWLGLAPGSAQSGKRKVPVKRRRNRAGRLFCVMARSLARSKYVALGGFYRRMAMRRGGLVANKALARKLATLFWRVMVKGLDFVETGVAQYEAKVLETKHRILHRLARQLGQTILPNPAAV

SEQ ID NO: 206538 - protein, 307 aa, unidentified
MILEGSTVQSHKRRGTGHEGQGTILGLDVHAETIAVAIAEADGEVRSLGTIANRAESIRKLVKKLGPVEQLKACYEAGPTGYVLYWQLAELGVACEVIAPTLVPMKAGDRVKTDRRDAERLARSYRSGDLTAVWVPDEGSESLRDLVRAREAAKQDQLRARHRLSKFLLRMGQRPAAGMKAWTAPYMAWVRQVHFTQVAREATMLDYLHEVDHMGERVKRLEQAITEAVKLASPAVQEVVKGLQALRGIAEISAVTIVAELGSITRFDTPRQLMGYSGAVPTEYSSGQRTRRGSITKTAEHPFADWD

SEQ ID NO: 206539 - protein, 414 aa, unidentified
MELLHERCAGLDIGKKDVKVCVRTPSPGGKRSRRQEIRTFATTTNSLLALRDWLVAEKVTLVVMEATGDYWRGAFYLLEDCLNVVLVNAAHVKGLPGRKTDVSDAAWLCQMGECGLLKASFVPPEPIRQLRDLTRYRTTLAAERTREASRLEKELEDAGIKLSCVATDILGVSGRAMLTALIEGERDVHVLAEMAKARMRSKIPALVEALTGNFGEHHAFLCRLHLERIDQLSAAILELSTRIEEEMRPFARQREQLATIPGVGQATAEVIIAETGGDMTRFRTAGHLASWAGVCPGHHESAGKRKSGKTRHGNRWLGGALGTAAMAASRTKDKTYLGARYHRLVPRLGKKKAIVAVEHSILTAVWHMLTHDTDYHDLGGDYFTRRDPQRAMRRIIRQANALGFTVRFDPIEAA

SEQ ID NO: 206540 - protein, 317 aa, unidentified
MASEMFIGIDVASRELVISSPQGLTTITNTQAAIEAWLMGLPTGSHIGVEATSHYHELVADKAVIAGMVVYVLNPRDTRHYMLGLGRRSKTDRVDAGMIRRMVMAEHAQLRPYQPAAAVHRQLALLQRRRGGVVKHRQALSKALRQIGTLGTALDQALAALDTLIAQIDQQLDTLLNSQEGLAVDARRLETIAGIGRQTSTQLVTLFKRVGLANSDAAVAFVGLDPRACDSGQKSGRRRLSKRGSAELRRLLYNCAQAAARTQTWKPYYTQLKSGKFSTTQALVIIARKLLRIAFSLWQQPGVQFNAQKVACLGLIS

SEQ ID NO: 206541 - protein, 314 aa, unidentified
MTSQSVSTAAGIDAGQRFLDVALAPSGKTFRVPNLASGIATMIARLTAAGVTRVVLEAIGSYAQTAVAALTAAGFQVGIVNPRRIKAFRDAEGRRAKTDRLDAQLIARFALVMTDADRPLPSAEQQTLKALSLRRRQLTEMIAMEKTRLKQTLEPLLIESHRATIAELAAQCERIEAELARRIAADAELVRVSRILTSIPGIGTRIATVLVTDLPELGHRDRKSIASLAGLAPHVSQSGNAPPRAAISGGRPCVRTALYLAALVAVRHNPKLRDDYKAMRDQGKPAKVALIAVARKILVVANGLVKADVVYAPA

SEQ ID NO: 206542 - protein, 386 aa, unidentified
MPTEAATCAAVIGLDVGKFSHWACHVTRQGEVLRSEPVANTEHDLDGLSAQAEAGTLVVVDQVRNIGSLAVSRARLAGLPVAYLPGIAAHGAAKLFAGDAKTDERDAAVIAKTALGIPDSLLPVPKHGERLEAARSMAAQRSHMAACSTRGKNRLRSILLESCPEFEALADLADPHWLRMMESLGGPWGIVDAGKAAVGAVTRGANRARIDAAVAAAASTRPSEYRVMAENPQVKVLARRIRESAEEAARLDAEITALLAGDETYACLPTIPGIGPRTESELVTSIDIGDFPDHDHLASYCGIAPRNRRSGKSISSVSSSRQGNKRLKNLLIFSCNSLSRSKGRFGDYYRSCRERGMCHGEALKAVARKRLKVIYAIMRDKVPYSA

SEQ ID NO: 206543 - protein, 375 aa, unidentified
MKVYVGIDAHTTNYTLATVVTFDNPPVNVNTYSPKVSNIVAYCKAAKKQFGKDAEIVTGYEAGTLGFSLRRDLEKYGIPCIVMAPSTIPGTELNRKRSKKNDKRDAKAIAKALLTHDYSEVHMPDEKDEAVRDYIRFREDIKLEQKRVKQQISALCHRHGLHYEEGSTYWTKNHIAWLRKLPVEGYLKETLDGYLRTLDYYTDRLNECDIRINEIAETDKYRESVHKLICFKGIRTLTALALIVEIGDFTRFAKAKNFAAFLGLVSGENSSSDGQQLLGITKQGNRFLRRLLTESVQGFPRSACKKSKELLRRQSGNTEEIIAYADKANERLRKRYYRLVIHNKKCPNKASTAVARELACFVWGMMTGNIHTTLA

SEQ ID NO: 206544 - protein, 412 aa, unidentified
MDVLVERCAGLDVHRDSVMATVRLPGKRSRQREQHTRGFGSTIAELHALGDWLEDFGVTLVGMEATGIYWRTVFDALEPRFQCWLLNARHLRNVPGRKSDVIDSAWICQLVEHGLVRPSFVPPPEIRRLRDLTRLRKAQIEERTRAIQRLEKVLQAAGIKLTSVASATYSVSARAMLEALLGGVTDPAELAELARGRLRAKIPQLREALAHRFDLAHHGVLVVQLLTHIDSLDLAIETLDQRIAHVTEPMAEPTELLCTIPGVKLRTAQVLIAECGIDMSVFPTVGHFASWAGICPGTNTSGGKRYSGKTRPGSKWLRQALSESAQAAARSKGTYLASHYWQIRGRRGTPKAIGATRHDILVAYYHIVRDRVPYRELGPDWLARRYSPEHRARRLVRQLEALGFNVSMEAAA

SEQ ID NO: 206545 - protein, 354 aa, unidentified
MSLLSSGIAAVGIDIGKNSFHIVGQDERGAIVLRQKWSRSQIDARLANLPACLIGMEACVGAHYLSRKLQALGHDARLMPAKYVRPYSKGQKNDFRDAEAIAEAVQRPTMKFVATKTAEQLDLQALHRVRERLVGQRTGIINQIRAFLLERGIAVRQGLRFLQAELPTILGAPSDALSPRMLRLIEDLAGDWRRLNERIEAISGEIEALARQDQACERLMTVPGIGPIISSAMVAAIGTGDAFSKGRDFGAWLGLVPKQISTGDRTILGSISKRGNRYLRALFVQAAWVVLVKLGKKWERYGLRSWIEAAKKRLHHNVLAIALANKLARIAWAVLHKGRAFECVKMDEMVSRPA

SEQ ID NO: 206546 - protein, 405 aa, unidentified
MPAEPAYGSSGEWAQTQRLLELGSNAWKLELMHVAVGQPTQEVKETPMNSVGLDVHKTRCVACVKTPEGRIVEEFAFQNNPHGHEELITHLKAYPETQVAIESTGNLWIPIYNRLEDEHIHTILTNPKKTRMIAEAKIKTDRLDARILADLLRANLLSASYVPPPEIRMQRSIIRERARLTRLRTIIKNRTHTLLDKHSIKTPYTDISGKHSLEWLHKLELPAGDRILLDVNLEQLNSLNRSIERLTETIAISAIENPEVKLLMGFTGIDYYSAMLLINEIGPVARFASPKKLVSYAGLAPSTRQSGNHTTHGHITKEGNSHIRWILVEAAQHASRHDATLNQFYLRVMKRRGHNRAVVAVARKMLVTIYHVLNHHQEYRGLRPELFENKIRRLERITQSSLQTT

SEQ ID NO: 206547 - protein, 392 aa, unidentified
MNALRVAVDVGSRLHQVAIGDGSGRLLEEFQIDHCRAGFERFFERVTRHAATDIRVAMEGYNGWARPLDQQVLARGWRLYNVNNLKLARYKEIFPAPAKSDAIDTRRMLELFAFDGQRPLGRDVLQEVTTSTTTQRELKYLTRRRRQQVADRATRLTRLRADLLAVCPDLLALTKAVDNLWFLRLLTCRDRLTALPRLREKTIASIRGVGAKKRPCILEWQKTATFGSTIDLADTDIVADAAAILALDEQIKTLDARIDIVAGDCPMARRLSTVPGFGVTGTAELSGEIGTLDRFDSEASLSLYLGMAPLDNSSGLRQRGKRPKCVNRRCQAALMTCIVRHMACVAESRSYYDRKRTQGKRHNQAVRALGRHLVRVIWRMLKNERDYEIKSE

SEQ ID NO: 206548 - protein, 464 aa, unidentified
MPLRLGIDIACRAAHQVSLADEQGRFIWTGRRFRTTPQDLDRLWAMLPDDTDPAGVLVVMEPTRNAWVPLAAWFRRRGADVVLVPPERSADLRRYYAKHTKSDRLDSQLLARLPMLHPDGLHVEQGLGPGDALKRAAKLHSTLTHRRSQSLARLDALLEILGPAWHAVIGADLANRTPLKFLAAGYADPHVVKRLGRTRLARFCYRHSRGAWGEPHAAALLAAAQETLQLWSGGELAYPDLAEDIAIEARLALQLTEEIKDLDERTALLLRETDPTGIVTSAPGVAAITAAAILGRLGDPNRFTSLAGARAFTGLVPTLDASGVNNRHGGPTKRGDAVLRQALFMAAGQARRIDPTLAAKYHRLMTDAGKHHNSALCHIATTLLTRIIACWRAGQPYQLRDVDGTPVTIDQARAIIAERYAIPKDRRARRRTTTDTGTDRRSKESPSAPSTGPSTPNATTTTAA

SEQ ID NO: 206549 - protein, 304 aa, unidentified
MKFYTTFNKYYCGIDLHARILYVCILDERGSKLVHQKIKADKHELLKLILPYLEDIVVGVECMHCWYWVSDLCAEHNIDFVLGHALYMKAIHGGKAKNDKIDSYKIASLLRGGNYPPLELHMKNKCVRQEFQTRFDDQAVQRNVNFDLAILDAYAEELKKLEYYLESKAKKHQPNYYAQLRTIPGIGLILAMTILYEIGDINRFESVQKFSSYCRLVKCKAESAGKTYGTSGNKIGNGHLKWAFSEAAVLYLRGNDKARRYLNKLQKRMSKAKALSVLAHKLGRCVYFMLKNKTVFDGERFLKS

SEQ ID NO: 206550 - protein, 330 aa, unidentified
MYLGIDTHTQYSQVAVVDDDGNLQDETRLPNDRLDELAEEYTGSEAVIEASGHYRPVYEMLDEHLDVTLANPSKNRIIADATVKTDRIDAKRLAHMLRADMLAESYVPEDEIRELRDLVRTRKSLVEERTAEKNRVRAVLKRTNNSYNSELFGPTGREFLAELSLSDADRKIAEAHLSVIDEFTEQIGRLEDTIEKRVLESPAAQRLLSIPGVGQSTAALITAEVGEISRFDRHEELVSYAGLDPMVHQSGETDVHGSISKEGSAPLRWALVQCAHVSVKYDDYLENFYTRLKRRKNHQIAIVATARKMLVSIFYMLKRQEPYDPPEVSA

SEQ ID NO: 206551 - protein, 422 aa, unidentified
MLEETGDTEEIIARVAALDIGKKELVCCVRVPGKKEQGRRLQEVKAYSTMTRSLLVLADRLAELGVTRVVMEATSDYWKPPFYLLEAHGFEVWLVNARDVKHLPGRPKTDRLDAVWLCKVAERQMLRPSFVPPPPIRRLRDLTRYRVDLVAVCTAEKQRVEKLLEDAQIKLSVVASDIFGVSGRAMLDALVAGERDPKTLAELARGSMRGKRGQLVEAFTGHFGDHHAFLLATMLGRIDQTSADIAAVEAHIATQIAPFAKAVDQLDEITGVGRTAAQVIIAEIGVDMGRFATPGHLVSWARYAPGVKESAGKKKGKATTGHGNPYLARVLGEAAVAAGRTNTFLGERYRRIARRRGTKKAIVAVGRSILVIVWHLLSDPDARFHDLGPGFYDTRIDAERKKRNHIRQLEALGYKVTLQPAA

SEQ ID NO: 206552 - protein, 466 aa, unidentified
MTTGLPAPDTMVQLKTPCLMKALPILDPNAAAIDVGSETLHVSIAGDAPKVFGTFTGELERLRDWFKEQGVRAVALEATGVYWLYVYEVLEAAGLEVVVVNGRHVQNVPGRKTDMADCQWLATLHAHGLLRGGFVPPAHIRQLQDYQRLRGDHLIGAASQVQKMQQAMERMNIKFHDVISDLVGVSGLKVLRAILKGERRPGELLALCDVQIQKKKADRVKESLRGCWKKEQLFALRQGLELWETYQQKIADCDGEMEALMREMTHPEAPAGGSGPAVSVGPVALAPAKPAGKNAPVIEKLQELVVRLCGGRDATQVPGLSVYLVLQLVSEVGTEMARWPSEKHFTSWLGLAGGRKQSGKRKGSVKAHRNRAGRIFCAAARALGRSVDKALGGFYRRLRGRLGGLAANVALARKLALLFYRLLRYGAAYVEKGLKNYEAKVVETETRLLRKLASKQGYTLIATTNN

SEQ ID NO: 206553 - protein, 400 aa, unidentified
MSKRQARVWCGIDAGKGHHWAAVVDETGATLWSKKVENDESAILTGFGEILELADEVHWAVDISGTASALLLALLAAHGQQAVYVPGRTVNRMSGAYRGEAKTDARDAYVIAETARHRNDFAAIDVPAQLAADLALLTAHRSDLVADRVRMINRLRDMLTGVFPALERAFDYGSHKGALVLLTGYQTPAAIRRRGRAKLAAWLANRSVRGADTVAATALEAADAQQTALPGEDVAAQIVADLATQILALDDRLKRIDKQISDTFRTHPQAEIIESLPGMGPILGAEFVVAAGDMSAYADGGHLASAAGLVPVPRDSGRRTGNLHRPKRYSRRLRRVFYLSAQTSMMREGPNRDFYLKKRSEGCKHVQAVIALARRRASVLWALLRDKRVFTSAPPVTQAA

SEQ ID NO: 206554 - protein, 438 aa, unidentified
MTRYVGIDLHKHLIVGHIVDPGGKTLDTFRYTRVDAATLDHLGRRRLTREDEVVLEATTHCWAVVRALEPFVARVVVSNPMATKAIAKAKVKTDKVDAAVLAHLLRLGYLPEVWQPDPATRHLREWTARRSRIVGQRTAVINRLRSTLAQRLLHCPYEMTSPAARDWIAGQPVEEDTRWLLESDLRLMDSLQTELDAMEKLLAKRGYVDPRVKLLMTLPGVSQHTAQALLAAIGQIARFRNADSLACYLGLVPSTRQSANRCYHGPITKQGRGHTRCLLIQAAHTVHTHPGPLGHFFRRLQKRKPYNVAVVAVAHKLALLAWHVLTKGEPYRYALPQATNAKLSKLRVLATGRKRPGGGTRGTKCRPKLPGAEGGSRTIKSLAEVYAIEGVPAATAAPPGEQRHLAANRLDTFAAELQQTRVVPRRAPKLPGALPGDL

SEQ ID NO: 206555 - protein, 489 aa, unidentified
MNSTVLPASVQPNIDCNYIGLDVHSDNVVVCVRRNILKVGGELQGKTIKLKKVSICDSQDSLTQLLSEYADGQQHVMTAESTFNWYWLADIAEEHGWNFRLADPCTVSQANIKAANDETDAQYLAERLRMGSLKSTTVLPRALRGARDLTRHRMRVMQEVSEKKIRLSNLYHNHCAHPLHGKQLQDLQFAYEENGIDAVLASGISGNGSELIIADLLAGLHDAQMRLERIEAQVYERLDQIDTYREGRLLLKNSMKGCGDVLSAVIITEIGDISRFRTMGEFVSYCRLAPASKLSNGKSKGQGNAKNGNAYLSWALTELATLMARYNKSIQHYLERKVKKTGLRVIGIRALAAKLARCVYQVLRKKEAFDLLLAFGGSHPQEPSASRAKTEESSQRKTATKSSETKVTGMTRTVVTDKKKIPGKKPALAVTQTQRLKSAVGQKTASVASRLKAPCALTTTKPAYADRGCVKSRLPPHRGGSPPLSRVGT

SEQ ID NO: 206556 - protein, 439 aa, unidentified
MILIREVADALVIMGISKPAGLKIQRRGGEIVNPLFVGIDVSSKNNVTYLMKPDGSKHSSFSVQNNLGGAKLMSEKIVSALEAMQLSDVVIGLEATSIYGDGLVCALREDGRLGQYQRKIHVLNPKQVKKFKDSYPDLPKNDWVDAFVIADHLRFGRIGKEVYMDDYRYKSLQTLTRARFDVVQNLTREKQHFANYLFLKCSGMAQDKDIANSSVTTIALMERFETVDELAYTDLDELTAFIGKSGRGRFADPEATAKAVQAAARGSYRLPKTVNDSVNQAMSVTIATMRALDGQIKILDKAIEQQFQIIPNTLTSIPGIGKVYSAGTIAEIGDIHRFNSQASVAKYAGLVWTQHQSGDFEAQHTKLIKSGNRYLRYYLLEAANSVRRCDSEFRRYYDLKFKEVNQFQHKRALALTARKLVRLVYRLLMDNRLYITPEG

SEQ ID NO: 206557 - protein, 370 aa, unidentified
MPLQNAIDTKLFIGIDIHKKSWSVSIRTESFDHKTFSMPPDPDVLYDYVAAHFPTHEVAMTYEAGCCGFSAARYFLNLGWAVTVVNPADVPRMDKQNYQKTDKIDSRNLCKQLQKNNLKAIHIPTEEQEQFRSLLRQRTNITKELRRVKSHIKGMLLFHGIKIPPEFDNVNWTIEFKKWLSELKWTSTCGKESMESKLRTLNFFHSEYLNGGNLLRAHCRKHISTDYYLLTSIPGIGGFLAAAILSECGDLRRFDNEKQFSSYIGVVPGIFNSGGSESNLGVTPRANTILRPYIIESAWIAIRKDPEIQAYYKSHFGKNPKCIIVKVAHKMAKRILSVIKSGKPYQINKNITLDNKIKLPEDIEVMEDEI

SEQ ID NO: 206558 - protein, 403 aa, unidentified
MAAVSGIDWASEWHDVDIADEHGTRLLAARFAHDERGVCALIAALLEHRVARVAIERPDGLLVARLLAAGITVLAIHPNQVAAARDRFRAAAGKSDQFDGFVLRELCRTDSHRFHVLAPCGDETLALRALVRTREDLVGARVALANQLRAQLDAAWPAATPIFRDTDSPISLAFLARYPSHADARGLGAKRLDAFLARHGYSGRKTPEALLGRLRCAPAPAIGEHESDARRNAVVGLVAALTPLVAQISQLTGELRGAIGRHPDGAIFLSLFRDPKSVVTAAGLLAEIGDNRARYPTDDTLAADAGQAPVTKQSGKHHAVSFRWACDKRLRNHIGVLADSTRHWHPWARDIYQRARDRGADHPHAIRILGRAWTRILWRCWQDHHPYDPSQHRALTRHLATQG

SEQ ID NO: 206559 - protein, 482 aa, unidentified
MKKRNIYQNQSQELLHLFEGAGSSEKVMCVPMDYAKNDHLVMFCNGHGDILRKPFSVKNTPEGIAYIADQVTLSCRRRGIQKKHVFFGGEDANSFAKNFVSTLRSKGFLVANVNAHDAKKQRGNVQASTDRIDLMGVATMLLNCRANCGPAQSGIYRNLRTLVRHRRKLVQMLTEVKNRVHGIVDELFPGFLNEKNSGIIPFTQSSLYLMEDRFSPKQIRRRRRQTLIDILKRFGTSKAEKTAVKLQQYAAKVLHASVEYVDTMQLSLAQHVKHIRCLKESVAQMDKEIALNLAQTQGAFLTSVRGIGLVLAAGVTAEIGDLNQQKPLNNLASYSGIIPRVKQTGGSDGKTYTGPVAKRCNRILKDYVVKSAYHLGLHGPQDLMADYKRRDASGQHADFGMGRRYLRMAINLMRTSQVYLPPNLRKDDYTLEERAGYYLMSWPYLKEKWKKVGALEAAFAKDRPLGLWRQIVQELYDIKLKL

SEQ ID NO: 206560 - protein, 328 aa, unidentified
MNEATLPTLGIDISKDSFHLELSCNNKLRHRKFTNRQEGFAELCVWLVKHKVQQVHACLEATGPYSEDLALYLYQHGHRVSVVNPAQIKAFGQSELRRNKDDQPDAGLIRRFCEKQQPAAWTPLPAPVRELQALTRHLENLHETRQQQLNRLEGNKTKGVVKSLRKLVAYLDTEIARTEKQIEDHIDNHPDLQGRCQLLESIPGIGKRTAAKLLAEIDDISQYKSARQVAAYAGLTPKNNRSGTIRGKTRLSKTGNARVRKALFLPAMTAKRYNPIVRSFCQRLASHGKSKMQIIGAAMRKLIHIVFGVLKSGKTFDPNHELLLNSAP

SEQ ID NO: 206561 - protein, 347 aa, unidentified
MNITTIGVDLAKRVFQVHGVDERGKTVLRKVLKRAEVMSFFARLVPCLVGMEACGSAHFWGRKLSELGHTVKLMAPQFVKPYVKSNKNDARDAEAICEAVSRPNMRFVALKTTEQQALIAIHRARQGFVSARTAQSNQLRGLLSEFGIVMPKGISTLQRRMPQILEDAENGLLGSSRELFARLYTHFKELDRQVDELEGQIKAWHRGNIASRRLEAIPGIGPLSASALVASIGDAKAFKNGRQLAAWLGLVPRQHSSGGKELLLGISKRGDTYLRTLLIHGARSVLLSLKRHAHQGEGWLARLAARRNANIAAVALANKNARIIWALLAHDRDYQAGYVAASEQTAA

SEQ ID NO: 206562 - protein, 408 aa, unidentified
MNPLYVGIDVSSKNNVIYLMLPNGDKHSSFSLANSHDGSTQLVKRIFTAMTSNNIDSVLIGLEATSVYGDNLVYFLKEDTTLASFDRKIHVLNPKQVNKFKESYNDLPKNDYVDAFVIADCLRFGRINKEVYMDDYRYKALQNLTRARYFAVTNLTKEKQRFINVLFKKYSTMTQEKVFSDTFSTTALAVYEKFESAETLAKMDLQELTAFIMEKGKNRFPDPDAVAKALQKAARRSYRLPKTVNDSVNQVLAISITSIRALESQIKAFDKAITKQMELLPNVLISIPGIGPVLSAGIMAEIGDINRFQNQAALAKYAGLAWQQHQSGDFEAQTTRMIHSGNRFLKYYLCEAAFSLVRCDKEYNRFYHIKYKEVNRFQHKRALALTARKFVRLVFALLKDNRLYRPAE

SEQ ID NO: 206563 - protein, 391 aa, unidentified
MSMYFVGIDISKYKHDCCIISAADQQIVSKFTVKNDKDGFEHLLTTLNSLSNPEDIKIGFESTAHYALNLELFLENAHHSFMEVNPVLIKEYKKSTTLRRTKTDSVDCESIARWLMTVEYKPHSKGFYHSYSLKSLTRLRDRLIRQRSFYLVKITNVLDHTFPEFKPFFNERLSKTAIYLLENYGSAEKMAHMNSASYDKLRCASRGKFSIQQFLRLKELAANTVGVNNSIFDIELNSLLTLYNSLCKEIKTLEAEITKLIEEVHPHYMSIPGIGPISAAVIYAEYGDISNFSNPGQMLAFAGIEPGINDSGTESHGGRIVKHGSSQLRYVLLNACLPLIRFDITFATYYAKKRAEGKKHRVAITHVAKKLIRVIYALERQDVDFNVQKLR

SEQ ID NO: 206564 - protein, 388 aa, unidentified
MYYVGIDIAKYKHDCYICTSEGVTVLESFSFDNSNTGFKELQSALDHLDHSQQIKIGLEATGIYGKNLKLFLSSIGYDFHEFNPLLVKRFHDSLSNRKTKTDKIDARIIALYLSTGASRTYLYSSYHIEALKQLSRARNKLIRSRSDQYVIITNILDVEFPEFKAFFHNKLSDTALFLLNKYKTVDRMKRLTYQDCVLLHNKSRRIPTSSFEELRDLAKHTIGHHFNYNDLILSSALQIVNTLERQIESIEKEILAIMEELRSPIDTIPGISTLSAATILGEFGDFSKFSNPKQLCAFCGVEPAIYQSGTSSHKGKMVKHGSSQLRYVLFNAVPYLVIHNITFREFFYKKLHEGKNYRVAQSHVVKKLLRVIYHLELTGESFDPTFLY

SEQ ID NO: 206565 - protein, 369 aa, unidentified
MGEDSTVFVGLDVAKDRHAVAVAEAGRGGEVRYLGEIGADTVSVRRLVARLAKRHGKLHFCYEAGPTGYGLYRMLTAMGHGCSVIAPSLMPRKPGDRIKTNRRDAVQLARLLRAGELTEVWVPDGAHEAMRDLLRLRDAAVNDVRRKRQGISSMMLRTGRVFEGKTSWTRKHRQWLQRQRFDYPAQDLVLQDMLVALQQAEARLEQVEDKVREFVPQWSLAPVVAALQALRGIRLVAAASIMAEVGDLGRFATARQFMGYLGLVPGEHSTGDKVRRQGITKAGNTRARRTLIESAWSYRHLPRTSPRQRRAQEGVSPAIKAIALKAQSRLCGRFRKLAAKGKPLTVANTAVARELAGFVWAIGRAALAV

SEQ ID NO: 206566 - protein, 370 aa, unidentified
MIQHTTDTIWVGMDVHQASITAAILHGDDVEPQVVRLPGDLNAARRLFRRLAEKGIPRACYEASGAGYVLQRALSDDGFYCEVIAPSLIPSRPGDHRKTDRLDAVHLARQFRSGHLTAVAVPDVDQEAVRHLVRAHLFNRRQITRAKHRIAGILRTGGYHFTETKSGWTKQHRAWLAKLRHELTGPMQTVVTSELHHLEYLEASLSSLEAAITEVSVQPPWREPVEALCCFRGIKTLTAMTIISEIGDIKRFGSPRQLMGYVGLVPSERSSGERSHRGPITKAGNRYLRRILIESSWHYSKRACSTLRLQRRRAGQDPAIIGIALKAQHRLERRYQHLSRTKHTNKATTAVARELCGFLWAMLWEVEGRK

SEQ ID NO: 206567 - protein, 352 aa, unidentified
MKIIGCDFHPGFQQIAMLDVETKQRVKKKLHHASGEAEQFYRSLQGQRVRVGIEACGNTRWFERLLQRLGHELLIGDAARIRAAAVRKQKNDERDADHLLQLLEIGKFPAIWVPSPEERDLRQLLLHRHKLVQLRTRIKNQLQHVALDQGLQKKRQLWTERGRQWLLELSLPCWTERRRSDLLVLLDGLGPAIAELSQAVEMAAQQDPRVQLLRTHPGVGPITALAFVLVIGDVQRFAHSNQLASYLGLIPSEDSSAGRRRLGAISKQGNTLLRTLLVEAGQSAARWDPQLKRAYQRCCHRKSHTGIGKVMVARKLAVRLYWMLRTNQPYPPARMQGSPSHPVSTREGSSIV

SEQ ID NO: 206568 - protein, 376 aa, unidentified
MPFAVVYTGSELKELADYLKSLDGETRVVMEHTGRYYEPVARFLHDEGVFVSAVNPKLIKDYGNNTLRKVKTDKADSRKIARYGIDNWAELRQHTPMDTIRMQLKTLNRQQSLYTKTKTMMKNNLIALLDQTYPGVNALFDSPVREDGSQKWVDFATTFWHVDCVRNMSLTAFAERYRKWCKRHGYNFSQSKAVEVHAGAQDLIAMLPRDALTKTMVRQAIDALNAISASMERLKAEMQALAAQLPEYPVVMAMHGVGDSLGPQLMAELGDVTRFTHRNAITAFAGVDPGADQSGTHEAKSTRVSKSGAPELRRALFLVMDCLLKTQPQDDPVYRFMDKKRAEGKPYLVYMTAGANKFLRIYYGRVKEYLASLEGN

SEQ ID NO: 206569 - protein, 314 aa, unidentified
MADPATVPLAFIGCDVGKAEIVAFDSRDKRIRSIPNRAENLAAFAQTLDVDCFVVCEATGGHEQALLAAMVAAGIPCHRADARKVKAFIRSYGTLGKTDAIDATALHRYGEERHSSLIRWRTRDTWRDTHQTLILARQDLVATRVAYANRLGAPSDAAVRPFFEALLASLEGQIAAIEAAIRTLVDDNAPLKQAVTLLTGVVGIGFKTASSLFALMPELGGLTGAQAGALGGLAPHPNQSGASEGYRRTKGGRPEVRKVLFMAAMSAARHHKTLRPFYERLIAKGKKKLVALVAVMRKLLVICNAVLRDGAVAA

SEQ ID NO: 206570 - protein, 342 aa, unidentified
MNLPVRIGMDTSKSVFQLHGVDENEVVVVGRQFRRAEMIRYFERLPPVLVAIESCGSSHHWARLLQSFGHEVKLIPPQYVKAYVKRGKNDAADAEALCEAVTRPSMRFVPVKSKERQAACMLMTVRERLVSVKSQLSNAFRSYAAEFGIVGPAGRQNVTALIKRVLVDDSLPEMARDLFRLQAEEYAAVQARLAKIEAKLMKWHREDDVSRRIATIPGVGPIGSSMLSMKAPPPETFRSGRDFAAWLGLTPKDHSTGGRQRHGGITKAGDSALRSTLIVGATALLRHIRKGRHKPTLWLASLLERKPPKLVAVALANKFARIAWRLMISGGVYNRPVAAMPN

SEQ ID NO: 206571 - protein, 346 aa, unidentified
MQYTAFDAHKHYTWARVERPDGTVVREKKILHERGAFRQFLASSEPGSLVAVETVGNWYWIVDEVEAAGCIPQLVHARKAKLMFGSVNKTDRLDARGLVRLQRAGTLPVVWIPPRALRDARELPRTRMVLVAQRTRLKNRIHAALSKYGILLADASDLFGKRGRQELQARLGELPPHTSFVVTRLLEQVDQLDREVEALEQRMGELFEVDEAIQLLMTLPGVGFILATVLRTEIGEVSRFSRGEQLAAYAGTVPRVHESGGRRHYGPVRSDVNQYLKWAFVEAANVICRHRRKHPQRHTSRLYDRVAKRKGHQKAIGAVARHLAEATYWMLAKGEAYRDPGSSTGA

SEQ ID NO: 206572 - protein, 345 aa, unidentified
MDTMHYIGLDIHKKTISFCVKRMDGTICMEGAVAARRSDLDGWMKTLPPLWTAAMEATIFTSWVYDHLRTCGHAVKVAQPAMLKAIAASKRKNDRMDARKIADLLRADLLPECYMAPSAIRELRRSLRYRNLLVRQMTQTKNKVSSLLMESGVEYNKQKLHQKKYFRELLKTAEHMPLSLQPLLELSRTTLDAFGKMERQLVKGIQLDPLLCERIERLMTIPAVGPITAVTWALEIGDVDRFPNHKQAVSYCGLCGAEDSSAGKTKRTPISKQRNKHLQTVLIEAAKLGPRLHADLALIHAKELEKGNHNRATLAVARKLVAYLLAVDRRKTGFNREGITKPQAA

SEQ ID NO: 206573 - protein, 332 aa, unidentified
MDLAKKIMQIHFVTEDGEITDRQVKRAEFLDFFRNRSKCLIGMEACGASQDWARKLEAMGHEVHLMSPKAVKPFVSGQKNDHNDAIGIYKAMFNGVRRVPVKSTEIRDLQTLRRIRSQVAKDRIKEINHVRGLLAEYGIVMGRSVAAFNKGISSALVNLKERGGVSPLVAEELRTTVESIKTKTERQKRLDREIEQLARGCKNYENFLKTPGVGPFTAAMLCVLLCDPDIFANGRQFAAYIGLAPRSRGSGGKNVVIGIPSKFNCDSESRAVFVECAQALTRYKNKSPWIEGILRRKPKKVAVIAIANKLARQVWAMANKGESFKQMTILTA

SEQ ID NO: 206574 - protein, 373 aa, unidentified
MKPNFEPGMLFMQCVGIDIAKGTFTACLCMYEFNQGCSTVPVVFNNDKTGFNQFVRWSRKEALKSYPLRYVMEPTGVYYEQLAAHLSKLGLDVCVVLPNKAREFAKYEGILTKTDDMDAYTLGMLGCLDKRLKPWAPPSPIYRELRQMTRFVADINKVKTELRNHLEALTHSEIAEKSIVKHYNKLIDEIDKLLDSNQKAIREKIKQEPGLSERIDRITTINGIGFMTAVTVVAETNGFALITNRKQLARYAGLDVPAHQSGPVDPKRHISKKGNVHIRTALYFPAIVSTQCNPQMKDFYGRLCARNTQSKMIGVTATMRKLLLLIYSLWKSGEKYDPTRDRQKKEAETTEGQPHGIDAGTLAEELPQNAVFP

SEQ ID NO: 206575 - protein, 334 aa, unidentified
MDSQGKLIMESILETKASTILEFLAGLRGTLSLTFEEGTWAAWLYDLLKPHVAKLVVCNPRKNALLKQGNKSDKIDARQLADRLRLNDLKSVYHGETGVRMLRELARSYLTIVKDLSRVMNRLKALYRSWAIPCAGRDVYYTRHRSEWLEKIPEAGTRRRAEQLYQQLDMLQHLRQQARRELLAESRKHPVTAKLRQIPSLGPIRSALAVALIQTPHRFRTKRQLWTYSGLGLETRDSGEYHFVKGQVQRKKPVWIRGLNKDYNHDLKGLFKAAALRASIQPGPFQEFYQRSLAKGIKPTMVRLTLARKIAAITLTVWKKGENFDVEKLKSQAA

SEQ ID NO: 206576 - protein, 413 aa, unidentified
MDVIHPRCAGIDCSKKDAKVCVRIQGQGRRKKSATVSTWGATTAQILALREHLVAAKVTCVVIESTSDYWKPFYYLLDDALEVMLVNAAAVRNLPGRKTDVSDAAWLADLGAHGLVKASFVPPAPVRELRDLTRTRTVITRERTREVQRLEKLLEDTGIKLSSVASDITGVSGRAMLEALIAGQRDPAVLAELSRGRMRQKIGALTEALTGRFTTHHAFMTRLFLDRIDAHSADIARLDARIEEAMAPFLPARDLLISIPGFSRITAEVFVAETGADMNVFPTAGHLASWAGLSPGSNESAGRVKSTKTRPGNRYLKGALGAAALTAARSKNTYFSAKYKRIATRRGPMRAIVAVEHAMVIAAFNLLTYGDFYRDPGPNYYTARQPARTRARAISQLETLGYRVTLEPLTNTA

SEQ ID NO: 206577 - protein, 485 aa, unidentified
MAVAERRVLGIDLGITSAHTAAILDQAGQVLGRRRCRPTVASLEAVEAAALAGTPAGTRLEVVVEPTGPAWLPVAVFFAGRGHAVYRVPVAKAADLRRFLSRHAKSNAIDAETLARLPLVDPGGVQPLELPDGPRASLDRRVRTCQWLTEQATAHKVRIRDLARQLFPTLNDAVDSELRSADLAVLERYGDPRKLLAAGPEPVAGLLRAGSTGRMAAAKVESRARAWVGVAQAAVELYGDSGAMPYADVAAELATEVRLLRAVLAEQKPHQQARERAYLKVEPDELARTLPGIAEVGAPLLVAAIGRPQRFASAAKFKAFTGLTPKASETGETDRKGQAITKAGAARLRKQLVCSANTARQVDPQLAAVYYAQMVERGAHHIKALCIVAAKLAERFWAVQASGKPYVLRDVDGREVTVEEARRIIAERYTVPEEVRRRRRSTKPRTGKAPQHVLSGHAQRGTSRAEPRRPSPCPILGPGHGTVNR

SEQ ID NO: 206578 - protein, 379 aa, unidentified
MSANCAPTTIATIGIDLGKNTFHLVGLDTRGAIVLQLKLSRGQIERRLANVPCCLIGMEACSGAHHIGRRLTELGHDVRLIPAQYVKPFLKGHKNDYRDAEAIAEAVQRPTMRFVAIKTPEQMDLLALHRVRSRLVGQRTGVINQIRGFLIERGITVRQGVMPLRKALPDILSSNQDALSPRMVGLIADLAQDWRRLDERIAAVSAEIEALARQDDSCQRLMTLPGVGPIISSAVVAAIGNGNGFKQGRDFGAWLGLVRCSCRPPTSSWRGGRVRRCAVCGRGLSRHPSGSIATCWRSRSPISSLVSPGQFSPAVEPTSRGSPPMPNKGSLGFTKGMAAIPPPPSLTTLGERATVAPRGWLHVIPLTATEDGDRVSQYR

SEQ ID NO: 206579 - protein, 351 aa, unidentified
MKIIRVGLDLAKQSIQVHGVDRDDRVVLKRSIKRDAVLKLFATLPPCVIGMEACSGAHEWARQLSRLGHQPKLMAAKHVKPYTQGQKNDANDAAAICEAVSRPTMRFVAVKSVEQHDLQALHRIRSQCVEQRTAKVNLIRGLLAEYGIVVAQQISQLRNALGVLLEDAENGLTGDFRELLVGLQQDLYFLDDRITELTQRIERHVKVHDTTRRLLAIPGIGPISASALFAAVGDGRAFANGRHLAAFLGLTPKQYSTGGKNTLLGIHKQGDSYLRGLLVHGARAVQRMAVKKTDPRSTWLNALGKRRHKNIATVAQANKTARIAWAVLQGATYRPEPARRLTPDAHIELAA

SEQ ID NO: 206580 - protein, 391 aa, unidentified
MIYVGIDVAKDKHDCFITNSDGEILFPVFSIQNNRDGFDDLFSKIRSISTDLSNIKVGLEATGHYSYNLLGYLIDKGLPTFVINPLHTNLYRKSLSLRKTKTDKVDARTIAMMLMSDVNLKSYSDTSYHNEELKSLTRYRFDKVQERAQLKQSVSRLVAILFPELEKLVATLHIASVYALLSELPSAGKIASCHLTHLTKLLENASKGRYSREKAVEIREAARVSIGSNMPAKSLELRHTLKLIGELDSEISEIESEIKRIMDQISSPILTIPGISYRMDAMILAEIGDFSRFDSPDKILAYAGASPSTYQSGQLESSYSHMEKRGSRYLRFALINATKYVCHWDKTFGTYLQKKISEGKHYNVAITHATKKLVRLIYAMERSGKPYKKMA

SEQ ID NO: 206581 - protein, 391 aa, unidentified
MTVVSDRVVIGMDPHKRSATIEVMARDETVVGGGRFDTGRDGYTAMRRYANRWPNRVWAIEGCQGIGRHIANRLLADGEQVVDVPPKLSARARVFATGQGRKTDATDAHSIALVGTRMAGLRPVVNDEQLALLRILVDRRRSLGEDHTRMVSQLHQLLLELIPGGAKKSLSAAQAKALLATVRPRDAVGKARRRVAAELIADLERIYRRTKEADKELKDLVASTGTTLMNLHGIGPSGAAQLLVEVGDITRFPNRAHFASWNGTAPIDASSGEQMRHRLSRAGNRQINRVLHIMATVQLRNPTEGRAYFDRKKAGGKTSMEAMRALKRRLSDIVYRSMTNDAVATAAGPGGQRGTATGSSVTDSHPPAGSSEKSLPGPAATQDRTLLPAVS

SEQ ID NO: 206582 - protein, 344 aa, unidentified
MQYYVGLDVSVKETSVCIVDKAGKVMREVKVATKPVAILAVLTEEGLAIERIGLEAGPLSQWLYSALAEAGLPVICVETRHMKAALSAQINKSDRNDARGIAQMMRVGLYRPVHVKTLASQKRRMLLTSRQLLQAKALDIENDLRGTLRNFGLKVGMVGTVKFEARIRELVADHPDLAAIVEPLLIARRVLREQLGVLHRQLLEIVRHDEVCRRLMTTPGVGPVVVLTFRATVDVPSRFTSSKAVGAAFGLTPRRQQSGEIDRMGGISKCGDVMMRKMLFEAALVLMTHSRKWSWLKAWGMKIARHRGMKRAIVAVARRLAVIMHRMWVDGTEFRWTREEAAAA

SEQ ID NO: 206583 - protein, 403 aa, unidentified
MNNVAGIDVSKGKSMVSVLRPFGEVVAKPFSVGHTGSELKELADYLKSLDGETRVVMEHTGRYYEPVARFLHEEGVFVSAVNPKLIKDYGNNTLRKVKTDKADSRKIARYGIDNWAELRQHTPMDTIRMHLKTLNRQQSLYTKTKTMMKNNLIALLDQTYPGVNALFDSPVREDGSQKWVDFATAFWHVDCVRSMSLTAFAERYRKWCKRHGYNFSQSKAVEVHTGAQDLIAMLPKDALTKTMVRQAIDALNAVSASLERLKAEMQALAAQLPEYPVVMAMHGVGDSLGPQLMAELGDVTRFTHRNAITAFAGVDPGADQSGTHEAKSTRVSKSGPPELRRALFLVMDCLLKTQPQDDPVYRFMDKKRAEGKPYLVYMTAGANKFLRIYYGRVKEYLASLEGN

SEQ ID NO: 206584 - protein, 385 aa, unidentified
MQTLNDLSQSRIVLKQDSTLIAVIEMSLSSWLVAGLVPGVERQPLKKLAVDESVLLKLLHRWGEEAEKTGRRIERIAVAFEAGRDGFWLARWLRARGIEAHVIHASSAAVSREHRRPKTDRLDTELLKRVFLGWLRGERDHCKMVTVPTIKDEDAKRPNRERESLVGEQTRIVNRMKAALSRLGIRGFNPKLKKAAARLEDLRTPEDEPIPPNTLAELRRDMERRRLISDQIRQIEDARLERLERMPNDGSHAMVRLLARVIGVGIETADMLVQEVLSRTMRDRRAVARYAGLTGAPDESGAKRREKGLARSGNARVRRGMIQLAWRFLMYQKDSTLAQWFRARTENARGTRKTMIVALARKLLIALWRLVTTGEVPAGVVLRAA

SEQ ID NO: 206585 - protein, 321 aa, unidentified
MTYVGIDVSKATFVAAYSSAKTGRTKTFKNTVKGVHEFIQTISAAEYHCVLEATGNYSALLVYLLSEAGITVSLENPLKIKNFARVMLTVTKTDEIDARLIALYGEKMQPAPYKLRSEPILILKQKRTVLRQLKKQLVATRNLKSSMEALPHFDPECRKTIEQTIIFLEKQIKAMEEKLASLAQGEYKKQMDLLTSIKGIGVTLAAALIVATGGFTYFDNAKQLTRYLGLSPTYQQSGTSINVKGHINRNGDSNLRSQLYVAAFSSLRCNSECKACFDRLRSNGKPGKVAVIAVANKLVRQAFAVVTHGKNYVDGFKSAKP

SEQ ID NO: 206586 - protein, 385 aa, unidentified
MQANTTKSPAAIRVDLAAIFVSLELSRSKWLVTSLSPGGGERMSRHLVSGGDIPGLLDHFAELQRKAEVRTGQSFRIISIQEAGLDGFWIHRVLEREGIESYVVDPASIATSRRRRRAKTDRIDGEALVRALLAYNRGEPRVCAMLRVPTPEEEDRRRLVRERKALTNERIRHVNRIKGLLFSQGVSGYEPLKGDRRKCLDALITGDGRPLPPALMAQISRELDRIELLIQQIKDVEEARDALLVAADEPTPALLLSLKGIGPEFAAVLWSEGLSRKFDNRRQVAAYAGLVPTPWQSGQINCEQGVSKSGNPRLRSTLVQVAWLWVRHQPNSALSQWFRARVIQNGGRYKKTAIIALARKLLVALWKYVNAGVVIEGALLTKPSA

SEQ ID NO: 206587 - protein, 369 aa, unidentified
MPKRIIAYKTKVMENRLKQCLGIDVSKLNLSLTIGFLHGDLGKKFEVHPDITNDLSGFKELHRWLKKTLAPNVGFIVLMEATGVYHQGVAHYLYEHGYAVCVMQSGRVKRYAQSLDQRSKTDALDSRMLSMLGLERDLRLWCPPSVGLQHLKGLSRERSSLLKDKTTETNRQGAIISSYYNNSKAKKRHLNRLRLLQSQIVSIEEEMRDLISKDDVLKKKLCFLESIPGISFISAATVIGETLGFESISNAKQLTSYAGYDVVLRESGNFKGKTRISKKGNSHIRAALHMPSMTCVRCNPTLKTFYTRLKPKKAKPLVALIAVQRKLLILMFTLWKNEENYDAEFEKKKQQRQKTLAAQDNNLINQLAS

SEQ ID NO: 206588 - protein, 415 aa, unidentified
MTKIIRIGMDTSKSVFVLHGVDAAEQPILRRKLRRKQVLEFFAKLEPTKVGLEACGAAHYWARELRALGHEVVVVPPQYVKPYVKRNKNDAADAEAICEAMSRPTMRFVPVKTAEQQAALMLAGSRDGLIRRRTQLSNTIRGYAAEFGLTAAKGLDKIEPLLARIAAAALPELAKEMFATYAREYARLKVEITKIEAKLMAWHKDNELSRRLEEVPGVGPIGASLAAMKVPDPHAFRCGRDFSAWLGMTPKDHSTAGKTRLGVITRAGDEALRRVLVVGATAVIQKVKQGKGQPSPWLVALLKRKPPKLAAIALANKNARIIWKLMVSGERYNPARAAAARGEGVEVPSCTSGTPCSPPSRTLRAAAGDGPRGPSLTAAALGVTGPRQVGTEKRPSGRTKKLTLKKLENVAPAAV

SEQ ID NO: 206589 - protein, 353 aa, unidentified
METAYDGRQVVGMDLHRRRSVLVRMTEDGRRLGTVRITNSAAELRAQIARAGKNPKVVLEATYGWYWAADTLAAAGAEVHLAHPLGVKAFTYRRVKNDERDAADLADLLRMGRLAEAWIAPAEVRELRELTRYRAKLVSLRTSCKDQVHAVLAKLGIPVTCSDIFGKAGSAWLDGLRLPQPYAGKVTSLRQLTGELTTEITMLSQVIADLLAGDRGYQVIQQLPGIGPVLAAVIIAEIGEVSRFTTPAQLCCWAGLTPRHRESDVKVTRGRITKQGSRQLRWAVIEAVQRIPKDSVIGTAKEAIIARRGKQARNIAKVAAARRLMTLIYYGMRDGQIRCLARSSEDPPPAHAA

SEQ ID NO: 206590 - protein, 331 aa, unidentified
MKSKTFICGIDVSMASLDVCFNDRGGKVHWLKVANNAKGHSLLINKLGINRTYVMESSGPYYLRLAFLLKERGADVRVENAIVVKRFIQMHMERNKSDKKDAGWLYRYALEREAAEWDLPSKEQLYCSQMLGAIDLFKRQLTMLTNQLHSIDQLPLPCKEVKKGLEQAKTKLQNEVIKLEDQLQALLNSWQGQQQKDLSTIPGLGKRAVAILIVYTEGFKKISNHRQLIALAGLAPREYTSGSSVRGRKGICKMGNGYLRNVLYMCSMSAIKYNKACKDLYERLRAAGKNGKVALIAVCNKLLKQAFAIATKGTTYQADYKSSLNENKLVF

SEQ ID NO: 206591 - protein, 340 aa, unidentified
MRVQKVARSCESGKSAIVYDQYIALDWSLKTMAIAHMSRRDDHPRIFEREADMKELKEYLGSLKGRTIITLEESGTAHWLYLELLDCVERIVVCDPFHNKLLWHGPKTDKIDAGKLCELLRAGLLKEVYHSDNGVYELRTLVSAYQDVVCAGVRAMNQKKALALGHRDKGKSASFIGEMLQENIDLYQRSKQQYERRLATVARHNTLIRYQREIDGIGTIGAVRIVATVVDARRFPCAGKYLSYCGLVKHEKLSGGRSYGQRKPRYNRILKSVYKTAALAALRGANPMREYYDHLLAQGVAEHNARHAVARYIARISYGMLKSGTRYEPYRWRGEAKKVI

SEQ ID NO: 206592 - protein, 500 aa, unidentified
MKTKRSKAKIGVGQKRWSVICSEPEQKLEVLRPDAAGIDCGAEEHYIAVAPDRVRAGEPTVRCFSAFTEGLDAAVDWLKACRISTVAMESTGVYWIALHQKLEAAGIEVYLVNARHVRHVPGRKTDVRDSQWLRQLHRFGLLNASFRPQDIICRLRSLHRHRDNLVSSSASEIQHMQKALQQMNLHLHHVVSDITGLTGLRIIDAILAGQRDPEQLVKLRDKRVYKSTPRQMQAALVGDYRAEHLFVLSQSVQAYRFYQSRIEECDREIEPVLQKLAQEVEAASAKLKLDALKPSSAKDGATTPEPLSESKPACGLKAKRKHKPRANEPKIDLAGLLERICGIDLTKVVGLHVLNVLLIVSEIGVDMSKWRSAKAFCSWLGLCPGNKISGGKVLDSRTRQVVNRVADALRLAAQSAGRTETCLGIFYRRKQAHLGAPKATTATARKLACLIYYLLKYKQPYQEPDPAIYQLRLKKSALTKLQRQAVALGYTLLPTTPAPA

SEQ ID NO: 206593 - protein, 403 aa, unidentified
MFYLGIDIARASHCCCLLNNEGEQVGKTFDLPSSQNSFNALIAKINTLKIDQGELLIGMEATGNLWENLYDFLNTKGFKVFLLNPFQTRKYRDLIGKKAKTDAIDSFVIAGLLRSGESTKSFVPDDQIQSLRDLVRLKNSLFETLKTYKRKAYALLNLIFPEYLTLVKNPFGVVSLAILKQFPSAKDVAGAKPRQILKIARHFQGNNFDEELAKRMISSAQSSIFSGRANQARGLALRVMLSQIEQLQNHIEQIEQAVEEILEPTEFSQSLGGNLLSIPGVGPKTVATLLAEVGDMQRFSSVKQLIGYVGLYPQISESGNSKKIPVLTKRGSPLLKHALYLAAVACVKHNPYLRKLYHQKVSQGKCAKQALIVVARKLLCIFYSMLKYNTEFDPIRLNLAVAV

SEQ ID NO: 206594 - protein, 348 aa, unidentified
MERYIGLDAHSQSCTLGVISESGKRLKSGVVETNGQALVEFIKTVPGRKHLCLEEGTQSGWLYEVLSPHVDEIVVTHLSGRSRGRKDDETDAFARAQDLRLGSVTAVFKDSGAMGELRAHVDVQAQVTVDHARVQNRLKALLRSRGVSTAGRAVYSETCRERILSELQKPYRGAALLLYAQLDALRAVKKAADKQLIEQSHKHAISHLLETCPGMGPIRVAQLIATVMTPYRFRSARQLWSYSGLGIVMRSSADWVMTPNGFARAQVNKTRGLNRNYNRRLKHVFKGAATTVIGAHMQPLYGDYQRMTEQGTKPPMAKLTLARRIAATTLTMWKTKEEYNPDKHRNKG

SEQ ID NO: 206595 - protein, 355 aa, unidentified
MAPYTYSPATFDTYIGNDVDKRSYCLTVRDHHKVIMTKTIPADPKNLYNFIKHNFGDSKVVVGYEAGPTGFGLYDYLTGRNQSCVVIPTSSIPHAANERVKTNKIDATKLSSMLKEGAFSPVRVPEEPYRDLRNFVRLRFNYIRGQQVSKQRIKSLLLYNSLHTACPEIEKNWSGRAIERLKTLECSDSVRLRLDMLLEDLSYNREHLLKVGKHLRAFCKNTSEIKDYMRYLCSIPGIGIITASATLGRIGNPLNLKGPREIGAFVGVVPTEHSTGDDTHRGSITRIGDGNLRSLLVEAAWVSIRHDKELEQFYNRIRKRHHPAIGSRKAIVAVARKLTLRIYRVLKERREYVVH

SEQ ID NO: 206596 - protein, 349 aa, unidentified
MIWIGVDAHKAVHEAIALGQEGVVGQRRLANTPEAWAALLEWAGQWPERIWAIEGAWYLGRGLAQYLAEQGERVHEVNGRWTARRRRGMRTPGKNDRLDARSVATLLREEAATLPRVYAEEDELASVQLWSRTQAELTKDLTRLINRLHELLLQCDPQYKDKLPALTTKAAIAALATYSAPGQGVLAREREALIHQTAAQLALLDEQDRELRRKLERASKSRFFPLRQVEGIGALIACAIVAEVGSPRPGFGEQQLAALGGLCPLEASSAGTIRHRLNRLGNRRLNMLFHQIVLTQARIYPPARTYLLRRKAEGRTAREARRALKRLIVRRVYQAWTACFETNLERVAA

SEQ ID NO: 206597 - protein, 426 aa, unidentified
MNQNNYFDGHEAVNHICAGIDVHRDKVNVTIAKSEGDQVRFYYNVYWTIKSSMEEMLSWLKSYGCTVLGMESTGKYWRPVFNVVEGSIPIYLYNARHIKNIPGKKTDKKDSQWIARITRYELIGHSFIPDSLTRSTRDFVRYRKSIVESRTRVRQQVHDILTSCSIRIAICMSDIFGISGRFLLESIAHNWPLSKAILESKMRPPLNKKVDEIYEALDGFVKEPDRVSLRMHLAEEKRLCNEIDDIEDKLEKMVLCTPEREDVVTRLIEIPGFSKRSAILLVGEIGIDLSSFPDPKHFASWCGLAPGKKESAGKNLSGRIHVRQHYLRSLLVEVAFASTHCKDTYFNSKFFELKKRKSTQKSVIAIARKLSLAIYMIINKGKQFKELTANYVPIEAHARDLRNIQRLARKIGKEATIAYLEQIFEP

SEQ ID NO: 206598 - protein, 343 aa, unidentified
MQTIATIGLDIAKSVFQVHGVDAAGQMVVRRQLKRRQFLAFFAKLPPCLIGIEACASSHYWARELQALGHTVRLIPPAYVKPYVKRQKNDAADAEAICEAVTRPNMRFVPIKTIEQQGCLVLHRTRHLMVRQQTATINSIRAYLAEFGIVAPVGRRGVEQLLEIITDASDARVPEVARSCIAALGAQLRQLKAQILELDRRITAWHRSSELSRRLNEIPGVGPLLATALVASITDPKVFRSGRDFSAWIGLVPKQKSSGGKDKLGNISKRGDRYLRSLFTAGALAVIRYAKIHGTKHRPWLVALLARRPTKVAAIALANKLARIAWALMTKGSHYRQPAALRV

SEQ ID NO: 206599 - protein, 431 aa, unidentified
MMNDALCVVHPRAAGLDVHKGHITATVRLCTQTGGEPQGETRTFSALASGLAALVAWLTGHRVEAVAMEATGVYWHTPWQALTDAGIQAELLNAQQVKQLRGRKTDVEDSRWLARVCQFGLGRPSFVPSQPFRDLRTLSRHRRTLVARRSQVRNQVQKVIDRAGVRIGAVLTDIFGSNGRRILDGLVGRLPHADILASLSGHVRRKLAPLGDALGLELREPERLLLADLLSEHDTLSRRIQDFDRHIDQAIAPWAEQCRLLETLPGIDHTGACAILSEVGPDPAAVFGNGHRLAAWAGLCPGNNESAGKRRSGRIRRGNRTLRAVLVECAHAAARTHKCQFQAHHQRLTRKRGYKRAVIATAHKLLRCIFALLRNGTPYRDPATDYEALLVQRNASRWLRKLQEFDILVHNDDGTLSLRWPSRQARTVPVH

SEQ ID NO: 206600 - protein, 443 aa, unidentified
MATRTRRTLDIAYPNAAGIDIGSASHYVAVPADRDDEPVREFKSFTCELDNLVTWLTACNVDIVAMESTGVYWIPVYELLESRGFTVHLVNARHVKNVSGRKSDVLDCQWLQQLMSYGLLSGAFRPTDEICALRAVSRQRDMLLRYQARHVQHIQKALSQMNVQLANVISDIMGETGQKIVRAIIAGERNATTLAKLKHARIRASEEEIVKSLQGNWRSEHLFTLKQAMSLYDAYGVELMACDQQLEAMLAVLQKHAGAQDKPQRPSRGKNAPRFDLRTYLIGLCGVDLTRINGIDTATALKVISETGPDLSRFRSAKQFVAWLGLCPGTKISGGKILSSASKRTTNRAAQALRLAAAALRTSQSALGAYYRRMCARLDRPKAITATAHKLARLIYAMLTKGGEYIDQGQDYYEERYRQRVMHHLARRAEKLGFKLTPVSEAA

SEQ ID NO: 206601 - protein, 372 aa, unidentified
MKYTTFVGLDVHKKTIAVAVAYSHTNQVEFWGTIPNTPDAIAKLLKKFKELKNVLFCYEAGPCGFVIHHQITLSGGNCVVIAPSLIPTKPGDRIKTDKRDASKLARSLRNGDLTVVWVPSKEQEALRDILRARQDAVKDYSRKRNQLSKFLLRLGFVTPEGINPWTVKHRRWLESIKLQEHFHRICLREYLHSVDETKAKIARLEDEILPAIEKIVDNKLFFALQALRGVGKITAATLIAEVGDFVRFREPDQLMAYAGLVPSEYSTGTSRRQGRITKTGNSMIRFIAVESSWHYRFPPKVNQTLKKRQEGLSAEIVAIAWKAQHRLNHKYRLLLAKGKPKQKVVVALGREFLGFVWAIAKQVAIESDIKAA

SEQ ID NO: 206602 - protein, 412 aa, unidentified
MPVYCGIDWATGHHDVAIINGDGGLLAKARITDDVAGLATLLALLAEHGDSPADPVPVAIETSRGLLVAALRSTGRPVYAINPMAAARYRERTAVTRKKSDHLDALALAGILRTDRDRHRALPVDSEPAQAVAILARAQQDAVWDRTQAANKLRSHLREYFPAFLAAFGETAKFTGPVARTILAAAPTPAQAARLTPGKLRTLLTRAGRTRGIDAEATRIRTEFNAPHLRQPTLVEDAMGRKAKALLRQLDAACASADELERDATASFNQHPDGEIYLSFPGLGPLLAARVLAELGDDRARFADARGLKAYAGAAPVTRASGKTLSVSLRRVKNDRLAAAGYMWSLCALTASPGARTHYDHRRESGDWNASALRRLNNKLLGCLHHCLHTRVLYDEATAFPATETKIPHLAA

SEQ ID NO: 206603 - protein, 347 aa, unidentified
MIIGCDFHPSWQQVSWLDTETGETGERKLVHASGDAKGFYQQLAAPALIGMEATGNSQWFIELVQDLGHEIWIGDAAQIRASYVRKQKTDKRDAAHILKLVVEGRFPRLWTPDREQRDLRQLVLHRHKLVEIRSRVKNELQHLSLNKGMQRKAKLWSQAGQKLLRELPLKPWAACRREDLLGLLAMLDQQIGKLDQAVQQAADQHPQAKLLMTQPGVGPNTALAFVLTIGDVSRFPRGKQVASYLGLIPREESSGGRQKLGAITKQGNRLVRSLLVEAAQIAVRFDPGFRKQYLHRCHQKPKGVAKVAAARKLAVRLYWMLRTQTAYPEIVRIESSPRVPLVARHGE

SEQ ID NO: 206604 - protein, 417 aa, unidentified
MEHFAAYLGIDWSDQKHDLCLVDAFTGHKEKKIINHTPEALDEWATTLRTRFSGQPLAVCLEQSRGPLIYALLKYDFLVLFPVNPQTLAKYREAFSPSRAKDDPQDAEYLVELLVHHRDRLKAWLPDDEKTRTLQLLVEHRRRLVGDRTRISNRLTALLKGYFPQVLTWFDDIRTNLVCDFLTTWPTLEAVKRATPKTLQKFFHEHNSVGTDTNQRRIASITEAMPLTTDKAVINSSVMMTKALASQMKTTITAITEFDTEIAALCQTHQDYRLFDALPGAGPVYSSRLLAAMGTNRARWTTADELLCFSGIAPAIERSGKSERIRWRYFCPKFFRQSFIEYAGESIKHSFWAKAYYSSQKAKGKSHQAAVRALAFKWIRIIYRCWQTKTPYNEVTYLESLRKKGSPLLNYAANNPA

SEQ ID NO: 206605 - protein, 348 aa, unidentified
MLGVGIDWAEAFHLVALGRPDQGVIQLRRVEHTPAAVAGLLAHIATLEPDPAEVRVVLETRHGTLVERLVDAGFTVLPVNPDLVARRRGPARKKDDAEDARSCCVLALDRYMSLRPLLAHGELAAELRAIARDDERAARDQRRLLNRLRADLLASFPAALQVAGDDRGAPTILRLLERWPTHQALATASRAELLDFARAAHHGWPERFADQVAQALAADHFTPRDYLVRAKADTIRLAAVQLLAIGTQRRVWERSMGALLLGAPRRGRANTPQPDELDQGQAFPGGEVYLSFPGLGDRLAARVAGEIGDHPEQFESPNALACYAGKAPVTRRSGKSELVVACRLACNR

SEQ ID NO: 206606 - protein, 331 aa, unidentified
MTFKTYVGIDVSKLTLDVFIREKQIHRQFRNDANSFISLMLWLEKQTMQPMNSILICFEHTGIYSLPLAIFMEERQIAFSMIPALEIKRSLGVTRGKNDYVDSKRIAEFAYRFRDKISQTKLPARDVSKLQSLLNLRDRLSRSLGGYTVSKNEIQRAMGKNVLPELFSTYNKMIIAIKEEMKLLEKTIRTIIKENEELRTSFELITSIKGIGLIVASNLIVSTHNFTRFDNWRKFACYSGIAPFDYQSGTSIRGRTQVSSIANKQIKKMLHLAAMCAIHTDAELREYYWRRLAEGKSKMTVINIIRNKLIARVFAIVKRGTPFVDIKKHIA

SEQ ID NO: 206607 - protein, 380 aa, unidentified
MKKPTKTTPSVVLTSSAFAPLRRDKPAAVVSGFTLGLDLGDRSHHVCVLDAAGEIVREGALPNTRPALAKLLADFPGATVALEAGTHSPWISRFLTELGAKAIVANPRKLHAISRHERKCDQRDARMLARLARVDPALLHPIEHGSAQAQHDLLGLKLRDALVRTRVNLINAIRFTLKSLGHPLCNPSSESFHKTVLADIPADCLPVIQPLITVLVQVTEQIKGMERDLVRRSKTEYPATQRLQQIAGVGPLTALCFVLKIGDPQRFNRSRDVGAYLGLCPRRDQSGGTDKQLRISKCGDGLMRRLLVSAAHYVLGPFGPACALREHGRRLAGTGSAREKKRAVIAVARKLAVLLLSLWKHGTNYEPRATASPVLVMVPA

SEQ ID NO: 206608 - protein, 416 aa, unidentified
MRSCPREAMGRAAEVVAPSSSIRTDGGYPVAQVNDLSRSLTAFDPISTLVVVVEMSKASWLVSGAVPGVERQPLKKLEPDATALLRLIERWRNEAVRAGRPISRIALAYEAGRDGFWLARWLIARGIEAHVIHSASVAVSRERKRAKTDRLDAAMLMRVFLGWLRGERGHCGMVAIPTMEEEDARRPSRERECLVNERSRITNRMKSALARLGVRGFKPHLRKAPERLAGLRTAEGTGLPMNIIEEFRRDMARLALVREQISSIEKTRAERLERAPDTGPHAMVRLLARVIGIGIETADMLVREILSRKLRDRRAVARYAGLTGSPDESGLKRREKGLAKAGNARVRRGLIQLAWRFLMFQKDSALAQWYRTRTEGPSGARKTTMIVALARKLLIALWRLVTTGEVPDGVELRPAA

SEQ ID NO: 206609 - protein, 368 aa, unidentified
MIKYTLKAGPTALSKEENSQKESKANRIVIGVDVHLKSYQAARKIDNGAVGVVQTFRSQEALLLYVEKQREQAKEVVVLYEAGPLGYPLYRQLKASGIECLVCAPRSGEQKRKRRKNNAIDARSLSSDLSNYLNGNEQALQLVRVPSEAQEQARVQSRQQDALVQERKRLGAMGNALLLSQGYGSQSNWWRPKAFERLSKQVAGWILKHLQRWVGLLRELDQQIQQAKVELSQQWQGPRPKGMGALSLVQLSAEVLDWNLYSSGRKISCLAGMVPSEWSTGEGQRLGSITKVGLPALRRIITEMVWRMILFQPEYKAVQKWRQVLEGSNRGLKKKAVVAIGRRLMVDIWRLQTGRISVQELGLIMIEG

SEQ ID NO: 206610 - protein, 340 aa, unidentified
MNQSMTIGIDLAKHVFFVAALDGSGKPPRRKKLRRHEVLSFLANHPGAVVGIEACSGAHHWAREIRALGHSVQLLPAQHVKAYLRGQKNDYNDALAIAEAVQHGRIRCVEIKTVDQQLDQSLHRLRQALVTEQTGLINRTRALLAEHGVDLPEGKHRFRQAVIAQLEDAQNGLPWRLRELLGRQYQLFIALEQELAWYEREIKTKAAENEACQRLMSVPGYGPIVSSAFYGWLGSGQQFRCGRDVAAALGLVPKQYSTGGKTVLGGISKRGDRHLRALLVHGARAVARYAKERDDRPSRWVCSLIERRGYNKAVVALANKLARIGWAVVVRGQPYQAIAA

SEQ ID NO: 206611 - protein, 352 aa, unidentified
MKYIAFDSHKRYAFASVEDQESGEVSDKRIEHERGALTAFLSRYEPGCPVAVETLGSWYWIVEEIEAAGMEPRLVHARKAKMMLASSKKTDKLDAHGMNRLQRTGTLPTVWIPDGELRDKRELFRTRMVLSRQCVRVKNRIHSTLGKYGIQIEGTSDVFNKKGRAAIEAALDLLPEQTGFSVKELLAELDSIEESLRTFERRMAEVFNDSQDVQLLRTIPGVGQILSVVIASEIGDIARFPSSEHLAAYSGTTPRVHASGGKCHYGRAPADTNHYLKWAYTEAANTIMRNRHRMCLRHAADLYERVRTRKGHSVAIGAVSRHLAEASYWILKKREPYREPSKKVEAVSSTNG

SEQ ID NO: 206612 - protein, 348 aa, unidentified
MSPTNMHQYVGLDVSLKETSIRVIDEAGKIVWRGRRDSTPEAIAEAIEKHARHAVRIGLESGQLSTWLYHGLKERGLPVICIDARHARAALSLKVNKTDDNDAEGIAQIMRVGWYREVTVKGLDCQAVRALLVARAQLVSQITTLKNCVRGILKTFGLIVRKRLRSQFSQHVREAIRANPVLAAIVEPMLRVLETTRDQLRIYDRAVIRRARGHETARQLMSVPGVGAVVVLAYMTGVEDPVRFRRSSSVAAYFGMTPARYKSGEVDRAGRVSKCGDSMVRGLLFEAAKVLLSRLARPCALQTWGRALAERIGGKKATMAVARKLAVLLHRMWSSNTTFRWPTGALAP

SEQ ID NO: 206613 - protein, 394 aa, unidentified
MHKDTHCAVVIDCWMNKLGEVNFENRPSKFPAFVEDVRRICGTKEFVFGLEDTRGFGRNLAAYLVGRRFEVKHVNPAYTSAVRLANPIIYKDDSYDAYCVARVLRDMVDTLQDAKHEDIYWTIRQIVKRRDLIVKSNVMNKNQLHSQLSYSYPSYRKFFALIDAKSAMCFWENYPSPEHVKATTPEKIYETIKPVHQALKMQRIHEIIAMIEKDGDTRKDYQPERDFIVRNIVKEIRHNKELIAEVDAELRKLLPLTGYKLHTMPGIDIATEAQLISEIGDINRFPDSDKLARFMGLAPVQFSSAGKVKDQRCRNGNRALNAIFHFVAIQMVAISASGKPRHPVFREYFEQKVKEGKNKPQALVCVARRLVRIIYGMMKAKTEYRPFEKADGMN

SEQ ID NO: 206614 - protein, 457 aa, unidentified
MLRNERCVDYAHAWTEAACFLEAYVPVKKPGPGEAADPAVVAPCVTPFRKVIRSESPSGVFNLREMSMSSRRGSATGLPVIHDRAAGIDVGSRFHVVAVGADLSEEPVQTFQAFTGDLDRMADWLVSLGIKTVAMESTGVYWVPVFEILENRGIEVIVANAREARAVPGRKTDVNDAQWLQRLHACGLLRASFRPGRDIAALRVYLRLRERHLDYAAAHIQHMQKALTFMNLQLHHVVSDVTGVTGMKIIRAIVNGQRDSKVLAEMRDVRCKASIETVRAALVGNYQAEHVFALGQALELYDFYQARVDECDAKIEEVLAVLAAKKSTPSTPMPTARHRTAAGNAVNFDVRPVLYQLAGVDLTQIHGLGPYLALRLIGECGTDLSRWKTAKHFTSWLTLSPGSKISGGKVLSAHTRKTTNRVVAHLRLAAVTVGRTNTALGAFYRRLAARIGKGPRL

SEQ ID NO: 206615 - protein, 444 aa, unidentified
MLRFVGCDVHKRTAVFTILLSDGTLFATYTVPVTREGLAAFAERQLAQEDRLAMEATTNTWAVAGVLRPFVKEIVIGNPLKVRAIAEAKIKTDKVDSRVLAELLRCEYLPIVWQPDQETQRLRRLTHRRAALVSDRTRLKNRLHSILHHTLVPLPECDLFSKRGIAWLRQVPLAEEEALARESDLRLLELTELEIAQLDDLLVREAWQDEKVRLVMSIPGIDYTVAQTCLAAIGDIARFANAKKLSAYLGLNPSTRQSGAHCYHGPITKQGNAHARWLLVQAAQHLAQYRGPLGQTMRKIVKRKNRNVAVVACARKLAVLLWHVLSSGEPFRYAQPKSLQAKFSRLRVRATGQRRRGGVAKGTPRSPQYGHGRTRAVPSLPQVLAENGLREIAALAKGEKVMLERKRLDAFYRELQTPSRIQANTPNPKIEEIEEDLKSELTQS

SEQ ID NO: 206616 - protein, 372 aa, unidentified
MKQSTTRKEAASATALSACTSLAVDLAKQVFQIAAEDALGQVLHEQRIKSRQAFRAFLSSLPTGLSVLMETGPGAQAWARQLIEAGHAVRILPAQRVAEHRSGAKNDRNDAHAILRAGHDAKIAAVPVKSAQDLALQALHRVRQSHVRRHTALGNQMRGLLLEHDIALAKGDVALLRGVPRALEDTSVPELLRELLADLLAEWRHLDDRIQALTLKLHQQARQHPRARQLMSVRGIGPITATALLTKQIDPERFANARQFAAYFGVIPDQHSSGQKLRLGRMSKRGDGYVRSLMIEGAQAVLRHVRPQSEHGDDQRLLRWMQRHGRKGAAIRLANRNLRIVWVLLQNEQQTYCRQPQSKAQTPQTEESAMHE

SEQ ID NO: 206617 - protein, 338 aa, unidentified
MNKRDISLPDDNMRMFVGLDVHKKYTEVAIVDEDGVVEKQERIKNEPRQIEEFSNKLSNAIMVLESSSSWYWLYEILSRKHRVVLSNPAKTKAIASAKLKTDKVDALMLANLLRGGYIAESYVPSRRVMSLRELVRYRANLVRMRGTVKNRVHAYLLMNNIKIGGSPFTKNFLEELKKVKDDRVEGYLRIIERLNLEIHEASKKICNEALNDEGARLLMTIPGISFYSALLLVSEIGDVDRFPDSAHLVSYAGLASSTHSSGGVTYHGRITKAGSPYLRWVLNQCTWVHVRNEPDGNVATFFRRLSGKKGYSKAMVAASAKLLKIVYWVLKEKRPYQG

SEQ ID NO: 206618 - protein, 423 aa, unidentified
MMRLIYPICCGLDVHKKVIVATIVTTDNAGISTYKQRSFSTINSDLRLFHDWLLENGCKHVCMESTGKYWIPVYNYLEADIEVCLTHPKYVKAIKGQKTDKKDSKWIADLYKFDLVRCSFIPPKDFRQLRELARYRFKLVCMKASEKNRVQNCMTVSNIALANFVSDPFSKTATDILSYLLQHTSDDICDKDIQKLIRKNSKASADEIFAAVKGYTIEADQAKKLELARNHLDYLDEMIKATEVELYVRIKPYWEYVEIVSTMPGMTQLSSTIALAETGVDMNVFDDAGHLCSWCGLTPRNNESAGKKHSTKIMKAGAYLKPMIVQCALAAIACTKQPYFAVKYRRIKKRRGHKKAIIAIARMMMVCIYHMVKDKKPFTPCDYEELMDPQKHPQKVVLNDANVFEYLKSQGYDTSSLVKCNDN

SEQ ID NO: 206619 - protein, 372 aa, unidentified
MASIIYVGMDVHTTNFTFCCYTADSDRGFAVAQTEPDYRQVIKYMERVQKQRGEECKFVCGYEAGCLGYSLYHQLTRCGVDCVILAPSTMHQEKGKRIKTDRRDAENIARCLAFSLYSPVYVSTTEDDAVKEYIRMRDDIKADLKRVKQQIIAFTTRHGFAFDGKSYWTQKHLKWLETLVFEHPLYKETLQEYLILYYMLDEKVAVYDTRIGEMSHLEHYEENVQKLCCFRGVAAHTALSLLVEVGDFQRFRSAKHFAAYLGLVPGEHSSSDKQIRTSITKAGNTHLRRLLVEAAQSYNRGAIGKKSAALKARQGGNPAEVIAYADKANERMQRKYYRIAFKSRHNIAKTAIARELACFVWGMMTGNISNAA

SEQ ID NO: 206620 - protein, 386 aa, unidentified
MQTPNDLSQSRIVLKQDSTLIAVIEMSLSSWLVAGIVPGVERQPLKKLAVEESALLKLLNRWREEAEKGGRKIERIAIAFEAGRDGFWLARWLGARGIEAHVIHASSVAVSREHRRAKTDRLDTELLKRAFLGWLRGERDHCKMVAIPTIADEDAKRPNRERESLVGERTRIVNRMKAALSRLGIRGFNPKLKKAAERLEDLRTPEDEPIPPNTLAELRRDMERRRLVSDQIRQIEDARLERIEHAPNDGPHAMVHLLARVIGVGVETADMLVQEVLSRNLRDRRAVARYGGLTGSPDESGKKRREKGLARSGNARVRRGMIQLAWRFLMFQKDSALAHWFYARTKNAPQTRKTMIVALARKLLIALWRLVREGTIPEGVVLRPAL

SEQ ID NO: 206621 - protein, 410 aa, unidentified
MEVLYPHCAGLDVHKDTVVACVRHMVNGSVRREVRSFKTTTKELLALSDWLAGEGCTHVAMEATGVYWKPVWHVLSDGDFTLVLANAAHVKNVPGRKTDVNDATWLADLLAHGLIRSSFVPDGQTQEMRTLLRTRKQLVRECSRHVQRLQKTLEDANIKLDSVISDIVGLSGRRMIEALIAGETEPGALAAMAHRRIKATPDELEAALRGRVTRHHRFLLQLHLQQIDAVNAAIDQIDQEVDAYVEPFRATVRLLTTIPGIDELSACVILAEIGRDMSRFPTAGHLISWAGLCPKNDESAGKRRSTRMRKGAPWLKTTRVQCAAAAARKKASYLQAQFHRLRARRGAKKALGALAASILTSVYHMLISGELYRDLGPHHFDQRAKAVNTRRLVVRLQNLGYAVQITPLAA

SEQ ID NO: 206622 - protein, 367 aa, unidentified
MPEGMRWVGLDVHAYETACAVFDGMTGEVEHRRVSGRPDELLGWLEQLERPLRAVYEAGPTGYGLARRATERGLDVRVCAPGHIARRPGDRVKTDKRDALRLARLLAAGDLTLVVVPPIEHERVRDLVRCREDVRGDLMRVRHRIGKFLLRRELYYPGNGRGRGGRNWTQHHRDWLSSLRFPDLASELCFADYLHAHDVLLARRAGLDRALSEIADACPWSETIGRLRCLRGIDTLTALGLCAEVSDFGRFPGPEAVGAYLGLVPSESSSGERRRQGSITKAGSGHARRLLVEAAHHYCRPPRVSGALRARQEGQQAWVIETAWRCQRRLFGRWQRLRVERGKRGGIVIVAIARELAGFCWELAVTE

SEQ ID NO: 206623 - protein, 412 aa, unidentified
MERHYLGLDWGDESHAVWVVDERGERVWAGQVEQTAEDLAEFGRRLYEWGSHGVEVWAALEKPEGRIVDFLLDHGVVVYPVNPKSLDRARDRFRVSGSKSDPFDARVLAEFLRTDHGHLRPLVPNSAEAQELKLLTTDHQRVVRHQTRFLNQLTATLKEYYPRALEMFPDLNTAVALDFLARYPDPAALAGLAQEAWQDFAREHRLRGERTARLWEQLKAPQVAIPAHVVRAKTRLVRLLSAELETVRTAVGEYREEIERFFASMPAAEIARSLPAGKTGVVIPTIWAEMGDIQDRWQSFRHLQAQAGSVPVTKRSGKSQFVQFRFACNKRLRYALDRFAFLSLRRSAWAAAYYRQQRARGHRHSHALRALAAKWLKIIFVIWSRHVPYMEERHLATINRQTKSQLSPIAGT

SEQ ID NO: 206624 - protein, 338 aa, unidentified
MTHYAGIDVSLESASVCVIDAAGKMIREGKVASEPEALRDWLEATGVRLERVGLEAGPLSQWLHAGLRRAGIASELLETRHVRRAFEIMPVKTDRKDAQGIAELMRMGWFHPVHCKSIDAQETRAMLTARKLVQKQVFEVESSLRGILRGFGLKVGKTTPTRLEERVKELVAGHPSLERIAGSLLATRAVLRREFNGFERQLRGMARNDTRARLLMSTPGVGTIVALTYAAAIDDPSRFTSSKTAGAHFGLTPKRYQSGQIDYSGRISKLGDASVRAALYEAAHVILTKPLKGCTALKSWAMRIARRAGMSKAKVALARKLAVIMHRMLANGTTFQSA

SEQ ID NO: 206625 - protein, 410 aa, unidentified
METMYRCCAGLDVHKETVEAHLRRMEADGKLWQQTRRWGTMTGQLEAMAEWLAGEGVTQVAMESTGVYWKPIYNILEGRFTILLVNARHMKQVPGRKTDVKDCQWMAQLLQHGLLRGSFVPPRGQRELRELTRHRTQLVGEKTRIANRIHKTLEDAHIKLGSVASDILGVSGRAMLDAVIAGERDEKKLADLAQRKLRGRIPELQQALRGRMTEHHRFLLRLLRKELEQQEGFIAELSQRIEEFTRPLAEERKRLIQIPGIEQRAAEVLLAEIGPDLKSFPTAKQLSKWSGMCPGNNESAGKKKSGRTPPGSRWLRQVLVQSAWAASRSKKSYLAAQYRRLAARRGKKRALMAVGHSILVILYHLLKEQREYVDLGANYLDQLDPQGLIRYHVKRLESLGHTVTLSAHPA

SEQ ID NO: 206626 - protein, 357 aa, unidentified
MKTALVMRRGSVVGKDIYVGIDVHKESWQITVRTQGEEIFNGRIPGQYQSLKKFFERYQGCRMKVAYEAGPFGFWLSDKLTMDGIETLVVPPSLIPTESGNRVKTDRRDSKKLAKLLESNMLKRVYVLTPEEREHRDLLRTRRQIVDHRNDVARQIKSKLLFYGITPPLTTSERWSLTYIKWLRTLQFDTTYLRECLDLLIDLYEYLTRQIVRINKKVALLCRDKKYRDRIRLLCTAPGIGRLTAIEILVELQDMSRFESAEELASFIGLTPSEYSTGERTRQGRITRCGNKRVRTYLVESTWILIAKDPAMRLKYLKLKNLRGGKRATIAIARKLLLVIRRMLLDNVPYRMTAMAA

SEQ ID NO: 206627 - protein, 419 aa, unidentified
MKNSKTKNLKTVNERTLIVTIDIGKSVHHGYFRAPGGQDITPFPFYNGQKSYEDFWAKIVIFKQKNNLEEIVAGFESTGPYAEPLMNFLATKSVKLVQVNPMHTKRLKELTGNSPNKTDTKDPRVIADVISLGHALTVVVPKGPAAELRRLTQARQRASKNRTALVNQLHHLMYVVFPEYTQVMKKITSKSSLYLLNNHTSPEEIVELGFANLQVILKKVSLGRMNHSKAKALFEAARNTTGIDEGRESLITEIRHLVSCIERESQFMDHLENQMSQYLNQITYSRSILSIKGIGEITAAGLIGEVGDFRQFKTISEIMKLAGLDLYEISSGKHYGQRHISKRGRSYLRKLLFFIAINTIRTSGIMHERYLGMVDRGMPKVKAVVAISRKLLRIIFALVRNHSTYIENYDHLNCLKLAA

SEQ ID NO: 206628 - protein, 311 aa, unidentified
METHDVYIGVDVSKASLDLSRFDGRAGRIPNSAKGVGDLIRRIRALGRSTLVCCEATGGYERVLCSTCLAAGIPVAVVNAKRVRDFARSKGLLAKTDAIDAQVLADYAATNHPRTVTRRAVWQPEAHALLTRRDELQAMLRAEKTRLAPLPPACVRADIRSHVRTLEARIAKLDARLAQLRKDHPDLDALVQRITMIKGVGTLSATALLAFVPEMGHLSGNEAAALVGVAPFNADSGAFKGRRRTMGGRPRVRRILYMAALSASRCNPRLKAFYQRLTGKGKPHKVALVAVMRKIVNLVNLLLADPTFQPS

SEQ ID NO: 206629 - protein, 361 aa, unidentified
MITVGIDAHKDSYTLVAIDEVGKRIAALTVPARKAGHIRILEWLDEFGMVKVAVEDCRHLTRALEASLLLAGHQVLRVHTRLMAGMRRSSREPGKSDPIDAEAVARVALREDNLPTAHLAGPDRDLKLFSDHRKRLVEHRTGLQAKLRWFLHELVPDLEVPSRGIRRATVFDQITDAIAGIDGAVAEIARDLLADIITLTQRITAIERQLTAIVRAEYPTLLDVPGMGVLGAAAIVGETAGVSRFRSRDAFARFNGTAPIPVWSGNNVKVRLSRGGNRRINTSLHMAAVTQQRLGGEGAVYFAKQVGAGKTRVEALRLLRRRISDRVFTALRQDEAARATSDHRTPITLNTTLKSILATAA

SEQ ID NO: 206630 - protein, 345 aa, unidentified
MPIVGGLDIHRKQITFDYLDTVTGEVKRGQIAPADREHVRGWLARFAGHDDVAFAVEGCAGWRYVAEELAAAGVAAHLGEPADTAALRGRKRHAKTDKTDARHLRTLLAEGRLPECWIPPAQILEYRALLETYHDLRAAHTAWVQRIHAVFFHQGAPPLAEGMLRTEQGLAGLRAAAAALLSAAGQQQAATAVDMLTAAEAQLGPLRHQLRHAAAHLMGAKVLAARLYGVGPVTALALTCWLGGKDRFSSSRKAVRFTGLDITVHSSDRKGPPGRLSRQGPPVLRWAVYEAGKTHARTTAPDHGYYATVKDRKNSKRAALSEARKIVRQACHILTELGDDALTAA

SEQ ID NO: 206631 - protein, 359 aa, unidentified
MDAQEAAVRRIVGGVDTHKDLHVAAVVDEQDRVLGTQSFASTRQGYRQMLAWMRAFGEVQRVGVESTGSYGAGLLRFLQQAGITVLEVTTPDRQDRRRRGKNDDFDAQNAAHAAFAGIRTVTPKSRDGMIEALRVLSVCRKTAVAARRIALQMIQNTIVCAPESLREMLRRMTRMQLVRTLAAWRPDLTAYRDVEAAYRISLKSLARRYLELHDEIADLDAMITAIVEELAPNLVARNSIGHVGAAQLLLTAGDNPQRLRSEAGFAALCGVSPVPASSGKTARHRLNRGGDRAANSALHIIAIGRLRTEARTQTYVAKRIGEGHSKMEAIRCLKRYIAREVFMLIKQRQKEINQTRIAA

SEQ ID NO: 206632 - protein, 365 aa, unidentified
MPRGPSSTSLEVDEENPKLCALQAIGIDLGDRESTYCLLDENGDILDQGSVQMNRMAFTELFGDWPAVRAVLEASCQSQWVARCLEEMGHEVIVANPRQVHLISKSDRKSDRNDAVVLARVGRIDPELLRPVKTRSAKSATIRALLSARSQLVSARTRMINLVRFEAKVVGSRIPKCSADSFHHRARPHLPESFRTALEPVLDVLAEIQTRIRTYDREVLRLCSKEYPETRVLRQVRGVGALVALTYVVTIDDPARFTRSRSLGAFLGLTPRSYQSGGRDPQLRISKAGDGELRRLLVGAAAYAMRKASPDCDLKRYGLRVAGGNSKRDRARARVAVARKLAVLLHRLWLNGEVYDPDYVAKRAA

SEQ ID NO: 206633 - protein, 411 aa, unidentified
MGLLHEALPASTLVVAIDPGKVSNRVWLSSSAAGMAVEPLSLPVLRPGLEALQRLVLEHLNGTDPVFAIEATGGLHQVWVRELDQRFPGSVRLFAPSETTAARAQLGSRRFKTDDRDCAALTYLARQGQGRLVTDGVDDALATAVRHRRGLVAERRVAQQRLHDQLNALCPGLSAPVGHGRALKLEGVIGQAVLDCAVAFAGRPPSVRSLRSRAHGRVLDAEAQFWVDRWRACLPPPTDAPARAARLGRGLARWRALTADITAVDGDLTGLLAGTDGQILTTLPGVATSRAAAFAAFSLPIARFPTAEHLYSATGLAPASYQSATLNRRGRISRQGLPEHRDALMNLAWGLSQHCGVFIERHQELRARGMRPIQARVALARHACRLAYTLLTTQQPFDEQRYRRARHQSER

SEQ ID NO: 206634 - protein, 397 aa, unidentified
MYIVGIDIAKRKHEAAVIDGEGTVIIKPFSFTNNCSGYNRLLAMLTKAKLPLDEVSFAMEATGHYWLALFTRLQKEGFRVQVINPVQTNSIRSFYIRQAKTDPRDALLIAEVIRFGHFSESTLHPENIYELRELCRGRHAIVAMQADVKRKVVALLDQVFPEYETAFTNLFGDTSMAILQTCPTPKELSEMRLEELCHLIEVSSHKRFRMAKAQELQALARNSFGFAMAGDVFSTMIRLYAKHLVFLKQQVQEMDRKIAEIMKTLDTPITTITGIGPTLGAYILSEIGDISRFSSAAKLAAYAGIDPTMRQSGEYNGVRNRMSKRGSPYLRHAIWLAASSAVLHDPALKLYFQKKRDEGKPYMASVGHACRKMVSIIYAVMRDNKAYTPYIPNEISA

SEQ ID NO: 206635 - protein, 489 aa, unidentified
MKAKAVSVSRDRRGLPAVMRPTLPHVVELASQTTQKRKTDTMKDYILRTHAAVEPQMTPTSQRIDQKPDLAASVAERQLQAHPQVDPKAPTSLADVAPRGSQPCALPAGPVLFTGMDVHNDSIAVSLAPSDSIEVRRYGIIGGSHDDVLKLAKKLQAAHPDRALHFCYEAGPRGYPLCRFLRAMGYSCILVAPSKIPRKPGERVKTDRRDADQLARLYRAGELSAIYVPDPHDEAVRDLIRARYQISRQQHRARQQLKMFLLRHNLRYPGKTAWSPAHLRYLARVKLPFAEQQFVFQEMLDVITEAGKRLERYEAQLPGVVAGWRWEPVVRALMSLRGVALLNAATLVAELGDLNRFPTANQLMSFLGLVPSEETTGNDRRQGGITKMGNGIARRAIIEAAWHYRLPARISPTLQVRQEGLPKTVTQAAWDAQTRLHRRFKHLTGVRHKKSQVAAAALGRELAGFVWAIARMVKPHALTDEKRTAMPGA

SEQ ID NO: 206636 - protein, 412 aa, unidentified
MEVMFERVAGLDVGKAAVTVCVRTPSTRAGRRRSETRTFPTMTRSLGVMRDWLVAEGVSIAAIESTSTYWKPPFYCLEEVMDVWLLNAQHMKAVPGRKTDVRDAEWIAQLLEHGLLRPSFVPPPPIRRLRLLTRYRDQLLADRTREMIRLELMLEDASIKLSAVVSSLKTVSARAILAAMIDGEDDSRVLADLAKSKLRRKIPQLTEALIGHFDDNHARLARSILHRLDLVEAALAELDEVIEQACAPWAHQIELLCTIPGVGVKVAQVFIAETGADMSRFPSAAHLAAWAGLAPAIYESAGKRTPAGARHGNKWLNHMLVESAGSVARMHGKKYLAVQHARLTKRRGMGRAQVAVAHSILVAAYWMLKRDEPYHDLGPDWHVRRDTEAHTRRLVAQLERLGHTVALDTPAA

SEQ ID NO: 206637 - protein, 418 aa, unidentified
MKVVFPTCCGVDVHKTFVVATIITTPADSLQPHYQKKRFSTFNSDLNRFADWLLEHNCLDVCMESTGKYWIPVFNILEKTCWVTLAHPKYTKPQKGNKTDRKDAKWICDLYMCGMVKPSFIPPPDIRQLRDLMRYRVKLTNMLTGEKNRAQNCLTVSNLKLDDVFSDVFGKSSRSIIQYILEHPGEQFDVTPFIHRRCKHPVEEIQAAVDGVVSREQAAKLKECLLHIDQLNAHRERIEAEILRLAEPYPYQLELIRTVPGFAAAPLTAVALISEIGVDMSVFPSAKHLASWAGCCPRNDQSNKKVKSTRISRAGCYLKPLLVQIANAVIKSDRHPECRERYRRIKARRGHKKAIIAVCRMLLTAIWNVLSKLEPYSAKGYLADKLTEHSVVISKAEGLALLRKRGYIFKDELAVESG

SEQ ID NO: 206638 - protein, 432 aa, unidentified
MPRYVGLDVHKQFIEACFIDEQGKQLQRCRVAVTRESIQTFVAKCLQPSDHVVMETTTNTWEVADLILPQVAKVAIANPLKVKAIAESKIKTDKVDAGVLAQLLRCDFLPEVWIPDKATRLLREMCAHRAGLVADQTRIKNRIQSLLAQRLIPVSVPVLFNGCGRNWLSNLELNPQDRVLVDGYLRVLDQLELEESGLQKALAQLSYDNDQIRLLMTLPGVGTAGAQALYAALGDWKRFKDGAHVASYLGLSPSTRQSANHCHHGPITKAGNSLARWLLTQAARQVAQHPGPLAVFFRRIHKRKNFNIAVVATARKLVTIGFLMLKNAEPYRYSLPGPTQRKLSVFRVEATGSRRSKSKLRLPMQRREPGTRVQSIPSLDEVYFSENLPPITKADALASGERRMLQQMGIANLPERLQVVQTRTYQSRKTAS

SEQ ID NO: 206639 - protein, 362 aa, unidentified
MTKSTTIIAFDQHAATTVAAVLLPADRTPALHKLTSDIPTILRFLERMRRGHAVQCCYEAGPCGFELQRALSGRGIRCDLIAPALIPRRSGDRIKTDRRDAAQLAVLYRAGALTAIHIPTEQEEAARDLLRCREDIRADLLRARHRLSKFLLRHGRRFTGTKKAWSKRHDVWLRAQAWPIPALDQTHRAYLRAVDEALARLRSAEEDLRALVTLEPLQARVQRLRCFRGMDDLTALTIAAELGDPRRFASAPRTMAFVGLVPSEHSSGTRQARGAITKTGNAHLRRVLVEAAWHYRHRPFVGAALRRRQRGAPDAIVAQAWTAQDRLYRRYHRLAGRGKPHQQVITAVARELTGFVWAALVQ

SEQ ID NO: 206640 - protein, 347 aa, unidentified
MIVVGIDPHSRLHAAAAVDEQGQLLEGIQVGSGPGELARLQAWIERLPRPRLVAIENARGYGLAIVRLLLAQGEELVDVPATLTSNGRRGSGQRGKTDQGDALVVARIGLRDQDRLPRLDATLLDDELKLLADTRDQLIVEAGRWRNRAHALLRVSSPGYQSKTGALASAGSVRRARTIAKRSVAEDPVRGRLAVQALDRLASLERDAGKLEREIRELLRVRGCTRLLAIRGVGPIVAATILGETRGIGRFRSAAAFAAHSGTAPVPASSGRTQRHRLNRGGNRQLNRALYTIAMVQARWDPAARAYLDRKLAEGKSAAEARRCLKRHLANLIYRALTADTEAATLT

SEQ ID NO: 206641 - protein, 351 aa, unidentified
MWIIGVDYHPSVQQIAFVNNDTGECGERRLSHSDGEAEKFYRELRAAGCKVRVGMEATGHGRWFERLLAELGFELWMGDPARIKAKRVRKQKTDRLDAALLLQLLLEDRFPRVWVPSPENRDLRQLLWHRHRLVQMRTRIMNQLQAVAMNEGVRRRAALWSKSGRAQLESLLLAPWAARRRHDLLELLDRLNPRIEELSAAVEQQAQQRPEVLRLMTHPGVGPITALAFVLIIDSAERFACGKQIASYVGLIPCEDSSADRRRLGHITKQGNTLLRFLLVEAAQAAVRRDPDWRRRYTHLAMRRERRIAKVAMARKLAVGLYWMMRKEWNYLQLKKFGSYAGESKYGHGVQ

SEQ ID NO: 206642 - protein, 365 aa, unidentified
MSKYIWIGLDVHVDSITAAILEGDQEKPDVVKMSGDLMKVRRLFRRLAKRGAIRACYEASGAGFVLHRVLKRDGFHCEVIAPSLIPRKPGDRRKTDRIDARMLSKLYRSGHLTPVHVPTEDQEALRRLIRLRYAYQEQCKSTKRRISGILLSHGLVFRGTKSLWTKKHIAWLQEMRRELTGPLHTALVAELEHLEYMQTQRNALDSDIERYAQSPPYRGQVEALCCLRGVKTLTAMTLFSEIDDIRRFRSPRALMAYLGLVPKEKSSGEKERKGSITKAGNSHARRVLVEAAWNNRHNAGAELVLRRRRQGQPPEVVAIAMKAQHRLSRKFRRLWLKKHPNVAVVAVARELCGFVWAIMKAAPQY

SEQ ID NO: 206643 - protein, 351 aa, unidentified
MIVLGADTHKRSHTIAGVGATTGELLGERTVQVGRAGFGALLAWARALGGERVWALEDCRHVSGSLERFLIERGERVLRIPTNLMAETRKSARQRGKSDAIDAVNVARAALREGLATFPAAHLDGPELDLRLLVDHRERLVIHRVELNNTLQWHLHDLWPELELPGGALFSKKWSTRIARRLSRAEQTMRVRIARDDLRRLRELTETIKALAREITQLIEQIAPRLLAEPGFGPLIAAKLVGEIAGAQRFATDAKLARAAGAAPIPASSGNTRRQRLDRGGNRQINAALHRVIVTRARCHQPTRDYIERRRREGKTTRDAIRCLKRYLARQVWNLLRASPPNMTLTTPSIS

SEQ ID NO: 206644 - protein, 383 aa, unidentified
MRKTQETLRIKDSIKEAVLYIAFELSNSKWKLAFSDGNKVRYKTISAGNLVQLQAEIKLAKRKFKMTEEVKVLSCYEAGRDGFWIQRYLESQGIENLVVDSASLEVNRRKRRAKTDRIDAGKLLRMLIRYWGGEKKVWSVVRVPSEADEDARHLHRGLEDLNKERTMHRNRIKGFLVLHGIKLSNPSHKRFLEQLESLRTWDGRQVPPDLKSTIIREYDRLQMVEDQIRVLEKEKAERLKNPDTDSLQQVVKLASLYGIGSVSSWTFVMEFFGWRQFQNRQEVGALAGLTPTPYDSGKSLREQGISKAGNQRIRGLAVEIAWSWLRFQPQSHLSQWFMKRYANGGKRMRRIGIVAVARRLLIELWRYLEYDRIPQGARLKSIS

SEQ ID NO: 206645 - protein, 404 aa, unidentified
MQTVAGVDWASEKHDVLIEDLDGVKVWAGEVTHDENGISELCRTLLAAGVTRVAIERPDGLLTERLLDAGLAVLPVHPNQVKAARPRFSVSGGKSDRFDAFVLAELARTDHHRFRVLVPDSDQTKALRALTRGRGELMSLRRSLCNQLRAELERCWPGAIRAFPDLHRQIVLAFLDRWPTATDAARLTERQLAAFLAKHHYSGNRTASQILDKLRTAPTGRAGHSETAARRHIIRAMTYTLRPIVEQITLLDHQIADAVRTHPDGQIFLSPFKRADSTLTAAVLLAEIGDQRARYPTSEALAGDAGQAAVAVESGKKKVATFRRACDHRLRDAFCTLADTTRHHNPWAHRLYTDARSRGHDHQRAIRTVGRAWSRVLWRCWQDGVPYDPNRHNTLQQQLLILGG

SEQ ID NO: 206646 - protein, 421 aa, unidentified
MNTDQKRAYAATFPVHVGVDTAKIFHKLVVRGPDGQRTKAYKVLVSRAGFEAADAHLRDSYPGIAPQQVLVGLEFAGHHGFTFAHFLAARGYVVVNVLAAHTKASKEIEDNNPRKDDAKDAAQVCKLVGDGIFVRFPFLEHPYLELRLLTVHRHRLTVEATRYKNRLQGLLDLAWPEFMGQFSNLHKATPRAILERWPLPQDLLAASIRTVRKEIHTASRGHISREQIDELVASARTSIALTQAAPERRLEIQSLLVRWALVRKQLVVLERRIAALVEQCPEAKILTTVPEVSAVCAATLVAELGTPKDYTHYRQVLKLAGMNLASRSSGQTEGRKWQSKRGRPMLRRQLFLLAGRWCLTRGLYHNDYLALKARNGGAGTKAVCTLARKLVPMLLKVMQSGEAFDRDRWLANRRVREAVVS

SEQ ID NO: 206647 - protein, 379 aa, unidentified
MNNYSKYVGMDVHKERITVAIAKAGTEGPLQYGEIVNSAEAIQKLSKKMRAQGEEVLFCYEAGPCGYSIYRQLKNMGYDCMVVAPSLIPRKAGDRIKTDRRDAVTLARLCRAGELTAVWVPDKEQEAVRDLTRTREDMKKMEQHARQRLGAFLLRHDRIYPGKTTWTQKHFLWMEGLSFEHPSQQIVFQEYIDAVKYARSRVQSLEQQMITVLETWSMKEVVIALMALRGVKLVAAMTVVAEIGDISRFESARQLMAHLGLVPSEHSSGQMKKRGGITKSGNGHVRRVLVEAGWCYRYPARKTTDLRQRAEKTSAEVQEIAWKAQKRLCSRYQYLLLRGKLKVEVCTAVARELAGFIWAIACNVMEKQGTGMITKAKAA

SEQ ID NO: 206648 - protein, 320 aa, unidentified
MDGKRVIGVDIGKRWVDVAREGAAEVERHPNEPAAMAALVATFDARSDIIVFERCGGYERKLEAALAAAEVPWAVVHSAAVKAFRQVQGIKAKTDAIDARLLRGFGRDRLNAGKLRLGRTEDVVLDALMARHRQLKAALHAEQCRRETAAIASVQASIERMIAHLEAELAVVAAELSMHESNDAQLAFKEAVLCERKGVAQATARALLAELPELGRLRSKQITALGGLAPRVHQSGRTQWRRGLAPGRISIKVILFNPARSAMRWDPEIRAFCNRLRARGKPGKVIMVAVMRKLLVRLNAAVRDALNQQEVLNPAALAAA

SEQ ID NO: 206649 - protein, 391 aa, unidentified
MRFTGIDVGSEHHTIAIVDEHGDPIQRSLSITEDADGYRRLRDVLGDPTDCLVAMEATGHYWRNLFASLTTDGFTIALLNPIRTRRFAEEELQRTKTENVDALGIARFAAQKRPKATQPPHQATQELRQLVHLRRQAIQHLGDRVRNLHRAIDLTFPEFTRYVRGLDTELANAILSRYPSALSLAAVTVTKLAKLCFDGRRRVGPTLARALIAAAKQSVGSLQTAPFELEVRYACQDICEMRERCRQLEGDIQRRIDSHDLGKLFTTIKGISTLTAAAIIAEAGDPARFPNAATFASYVGVVPRLHHSGKRKFSGNGAIPLGNARLRHALWMPVLVAIRVNPWLRAYYQRLRAVGKRPKVAIIACMHKLLAAVYSVAKNRRPFVPRLSADL

SEQ ID NO: 206650 - protein, 318 aa, unidentified
MLNESFVGIDVSKDWLDVGWEPAQQTERLVHDEVAMVGLCERLAQERPCLIVLEATGGLETHLASALAAAGLPVAVVKPRQVRDYARACGRLAKTDRIDALVLAAFARAIRPQVRAPRDDETLELGALLARRRQLIDMRVQEKLRLERASPVQRDSIKEHIAWLTERIARLDTDLTHRLRSSSLWRDQEDLLKAIPGVGTITRVTLIALLPELGKLNRREIAALVGLAPFNRDSGQHRGERVIWGGRAQVRRVLYMASVAAIRSNPVIRAFYQRLRAQGKPGKVALVACMRKLLTIMNAMLKHNTPWNPNALDLEHSC

SEQ ID NO: 206651 - protein, 442 aa, unidentified
MAMRKREDSPEVFPNAAGIDIGGSSHWVAVPKGAAEEPVREFGTMTDDLHEMADWLLACGVDTVALESTGVFWIPVYEVLEQRGLTVWLVDARQMKYVPGRKSDVMDCQWLQKLMSLGLLRAAWRPGDEVCVVRAVARQREVLLTEQAGWVQRMQKALVQMNLQLTEVLTDVMGVTGQAIVRAIVAGERNPKVLASHRHGRVRASAAEIERALTGNWRDEHVFVLGQALAMFDSLGERILECDAKIEALLKPLGVHEVELSGPGKRGGKNTPHFDARTALARWAGVDLTRINGLSITTVMTILSEIGPDLSRFANVKHFCSWLGLCPGTKISGGKVLSARTRRSTNRVRQALKLAAMSLSRNDSALGAFYRRLCARMDKPRANTAVAHKLARMVYFMLTRGEAFVDEGQQRYEEQQRQRNIAALRRRASALGFEITPAGQVA

SEQ ID NO: 206652 - protein, 393 aa, unidentified
MRKPKQQHRPLNGLSRSLTLFHPNHTLIAVIEMSKNSWLAAGIIPGVERQPLKKIAADENDLLKLLERWRTEAEKAGHKIARIAVAFETGRDGFWLARWLRARGIEAHVIHAASVAVSREHRRAKTDRLDTEQLKRAFLGWLRGEREHCKMAAIPTFAEEDAKRPHRERETLIGEQTTIINRIKATLARLGIRNFNPKLKEAPERLEHLRTPEGVPIPPNTLAEMRRDMERKQLVAGQIRQIEKARLEQLKRTPKAGPNLMVLLLMRVMGIGIETADMLVKEILSWNLRDRRAVARYAGLTGSPDESGKKRREKGLARSGNAWVRRGMIQLAWRFLGFQEDSALAKWFRSRTENARGSRKKMIVALARKLLIALWHFVRDGVVPEGVALRPAH

SEQ ID NO: 206653 - protein, 310 aa, unidentified
MDATVIGIDVSKDKLDVHVLPVEEAFAVPRNGAGIEELASRLAALAPVVIAIEATGGFETIVAAGLAGAGLPVVVVNPAQIRAYAQAIRRRAKTDAIDAAVVADFARATRPEVRPLPDEATRLLADLVARRRQIVEMTAAEGQRERRTANKRVVKSIARVRKTLEAELAALDQEIDDQVRGSPAWRDKEDLLVSVPGVGPVVARTLLAELPELGRLDRREIAALAGLAPFTRQSGQWRGKSFIGGGRATVRTALFLAAMAAARFNPQLKAFRDRLVQAGKPKMVALVAVARKLLTILNAIVRDNKPWQTA

SEQ ID NO: 206654 - protein, 409 aa, unidentified
MDVLYERCAGLDVHKDVVVACARVQRGGKPERELRRFSTMTSGLLELSEWLASHQCTHVAMEATGVYWKPVWHVLESSFELVLANAAHIRNVPGRKTDINDATWIADLMAHGLIRGSFVPPTPVQEMRDLTRTRKQLVREVAQHVQRIQKTLEDANVKLDSVLSDVVGMSGRAILEAIVQGKTDPSALAALASMRVKASPEQLRESLRGRITEHHRFLLKLHLGQIDALQSAVRDVEARMGKALEAFRAQVDLLLTIPGVKRTTAETIAAEIGFDMSRFPSAGHLISWAGLCPRMDESAGKRRSTRTRQSAQWLKPMLVQAAWAAGRKKGTYAQSQFQRLRARRGGKKAAVAVAASLLTAAFHMLRDGTTYQDLGGTFFDTRNKANVTKRLLRRLEDMGVHVAPVPAPT

SEQ ID NO: 206655 - protein, 350 aa, unidentified
MTAKKGYIGIDAHARNSVMGWRDGRGKYQGAQRFETSESNLLKHLQDIPAQEKHLTIEEGPLAGWIARTLMPHAKRILICDPKKNTSIQRDSNKNDLADTEELSRLLWLDQLTEVYHPADDERAIFKAAVQQYLDLRNEQVRMKHKIKAKYRMWGVSAVDGMKVYGPKNRRSFLEQVQQPSIRHQLQRLYVVMDTAEEQMEKSFEEVRALGRKYPEIQEFLKIPGVGPVGSHVFDAFIQTPRRFANKQQVWRYSQLAIRDRSSDNKPLGFRRLDYNGNPELKAMSYWAWMGALAREEDNEVKRLYQASLERTHNHVHARLNTQRKIIAVMWTLWRKQEAYKPELFFLSPT

SEQ ID NO: 206656 - protein, 331 aa, unidentified
MTTILGIDIAQEKFDITLLRDGHDPEIATFDNRQKGFQQLLRFLKRRKCQALHACMEATGVYYEELAHFLHNKGYRVSVVNPLQIKAYAQSQLRRNKTDRIDAAIIADFCQTQNPPLWTPPDPSYYELRALVRHLEDLENDRQRQRNRLHAIKHSALPSDVVVANLKRQIDFLSQQIKQVKKQIQDHISQHPDLKKQRNLLASIKGIGFLTAAKLLAEYGDMSQFDHVGQVVAFAGLNPKHRQSGSSVRGKTHISKIGRSTIRALLYMPAISAKRYNPLLQPLVKRLQAQGLCGMEIVVAVMRKLLHLAFGILKSGQPFDPNYLKKEAAFA

SEQ ID NO: 206657 - protein, 402 aa, unidentified
MNPVVGLDISKEESHGQAFLARGKPFRGTFHFEHTRDGLANLHQVLKDVETASKLRPLLILEATGHYQSPVVQFLEEHHYIYIIINPLISNRLRKSQLRKVKTDAADAYLLGELYYKEEFEPFKKRGVQLLNLRYLTRQYESLSKMCVQTKLQFQAVLDQVFPAYKGVFGAMYSRISLRFSSKFPTSYSVLQTDEITLKAKMKELLSSKRGRSEGWINQRVQRLLDAAKQNPFQQTMYASHLINLKVLITLILQYQEHLAELEQNIDALAEEIEEYELIQSIPGIGHKIAATILSEIGEVNRFDHPKKLVAFAGIDPSVFASGKFTATRNRITKRGSRQLRYALVMAVQCGLIRSRNMRIKAFYDRKRAEGKPHKVALIACANKLVHWLYAILKNKKEFRPI

SEQ ID NO: 206658 - protein, 355 aa, unidentified
MNSGKYIGLDVHQATICVAVMDAKGKVVMESILETKATTILEFFAGLRGTLSVTFEEGTWAAWLYDLLKPHVANLVVCNPRKNALLKHGNKSDKIDARKLANLLRLNDLEPVYHGETGVRMLRELARSYLTIVKDVSRVMSRLKAIYRSWAIPCAGRDVYYTRHRGEWLGKIPEAGSRRRAEQLYQQLDMLQPLRQQARRELLAESRKHTITAKLRQIPSLGPIRSALAVALIQTPHRFRSKRQLWTYSGLGLETRDSGEYHYVEGQVRRRKKQVFIRGLNKDHNHDLKGLFKAAATRASVRPGPFQDFYQRSLAKGIQPTMARLTLARKIAAITLTLWKKGENFDAEKLKAQAA

SEQ ID NO: 206659 - protein, 372 aa, unidentified
MPETPVSYQSFIGVDLHKNTVTLAAVDPRGESLAKLTISTKSVGKIEAWLLALPRPSQLAVEAVGFVEWFIERFRPCVDRIEIADATELANRRGKRRKSDPNDALDAAKRLARGECPLGYIADDELMQLRKLGRHWRQLSSVMGRAKHCMKSMLLAANLRGPKFDGGSTHRWLLAHGHLLKPAQRQAFAHFSQIIQLIEIQREPLRYAIIEACRSPRFSPITTLLQTVPGIGEIWSCIIAAEIGPFDRFPNADTLEFWAGLTADVKESAGRTQSGKITKAGSRTLRWALCNAALTLCHCDATQEAIRQRIIRRTGNIKGKANVAMGRRLLRLLYAMVRDNKPYQRGPRRDRTSAANKARAAKRAGKTRKEAA

SEQ ID NO: 206660 - protein, 356 aa, unidentified
MTSTSSKYIGMDVHKESISIAVMNAVGKIVMECVIETKANMILQCIDGLRGDLHVTFEEGTSAAWLYDLLKPHVTELIVCDPRKNASMREDNQNDKIDARRLAELLRIDHLSPVYHGEHGLRTLKELVRSYLTVTKDLVRVKTRVKAIYRSWAIPCNGKEVYAACHRAEWLEKINELGVRRRAEFYYQELEGLRVLRLGVRRELLAESKKQKAWKRLCQIPAIGPIRAAVLLGILQTPHRFRTKRPLWKYSGLAIETCSSADHRSINGQLQRSEKNSVRGLNRNCNHDLKNLFKGAAVIASSKPGPFQEFYAALLAKGMRPEMARLTLARKIATIVLIVWKKGVSFDAQHLKPQTA

SEQ ID NO: 206661 - protein, 338 aa, unidentified
MQAITTIGLDIAKSVFQVHGIGADGQVVIRRQLKRRYVLAFFQKLPPCLVGIEACASSHHWSRELKALGHTVRLMPPAYVKPYVKRQKNDAADAEAICEAVSRANMRFVASKTPEQQSCLMLHRTRHLFIRQQTSMINAIRAHLAEFGIVAPVGRKGVEELLDVVADSNDERLPEVARACLVALGAQLRSLKAQILAFDRQIIAWHRSNTTSMRLDAIPGVGPALSTALVASIADPKAFRSGRNFSAWVGLVPKQHSSGGSISKQGDRYLRSLFMAGALAVIRYAKIHGTKHRPWLTALLVRRPTKVAAIALANKIARMAWAMMAKGESYKEPVALAA

SEQ ID NO: 206662 - protein, 443 aa, unidentified
MSRKKQTHLRGERGQAFADKIRGISMEQILCVSLDIHKYFHVVIIHNALGEIVTPTFKIDIFQTGFEQLCQAVDEAIARTDAQVILTGMEPSSHYFENLARHLNERPQPVTLINSFSVKENRDQQMMLYEKDDEIDVAAIGDLLKRGEGSPFNPPQGIYLQLQHLARVRTSKVKMRTMLQNQIIGHLDRIFPGLVIVGKEAKKRCKPMFATDFWKCQTMQHLIRVCPNPHQLTAMSSQDLIDAFHAHGYAMGPVRAAQIITYAQRVLLPDRALVAVRCQLLPHDLALFEEVELHIAQMEADLCTLLAETPYQIWSKIKGLSDVQAADLAAAIGDPGNYRHAKQVFRRSGLVPGRNDSGTRQRKGKGSKIVKVGDVYLRRALMNAVATLILHQPILWAYYSKLKASKPAGVARVATARRAIGILWAIQRDQRSDTLILKKETLR

SEQ ID NO: 206663 - protein, 435 aa, unidentified
MRIVVKRGAGLDIHKKTVVATRMRVGEDERLEWETKTFGTMTVELLGLYDWLQEWGCTHVAMESTADYWKPVYNILEDAFEVLLVNAQQVKHVPGRKTDAKDSEWLAELLIHGLLKPSFIPPKPQRHLRDLTRYRATLVQERARIVNRVQKLLEGMNIKLASVATDVLGVSGRAMLEALVGDRLSPDEMAQLARGRLRNKLPELEKALTGIVAPHQRKLLALQLEHIDFLDEQVEELSDEIRRHMVEMDRGPSNDNQTADNSSTDETSSGEPLPPMSYGQALIVLDSAPGVNQNIAERILAELGVDMSRFPTPEQAAAWAGLAPGNNESGGKRYSGRIQKGNFALRTALVQAAWAAIRTKDTYLKALYHRVVVRRGKKRAIIAVAHSLLRSIWYMLAYHELYQDLGVDYFDKRNKESKVKYHLRQLEKLGCPVQI

SEQ ID NO: 206664 - protein, 393 aa, unidentified
MSQHFRFDASRSLTTLEQDSTIVAVIEMSQTKWLVAALVPGVERQPLKKFDAEEEMLLKLLHRWRCEAGQAGRNIKRIVVAFEAGRDGFWLARWLRARGVEAHVIHPTSIAVSREHRRPKTDRLDTELLMRVFLGWLRGEKRHCSMVAIPTIEEEDARRPNRERQNLIIEQTRIINQIKAIFTRFGIRTLRPTMRKLAERLEDLPTAEGTPLPRNTLSELRRHLARLHFVRNQIRAVEQERLRELAVAPPAEKNSPGARVHLIARVLGVGIETADMLVNEIFSRQWRDRKAVARYAGLTGSPDESGSRRRERGLARAGNVRVRSGMIQLAWRFVRFQKNSALAQWFAARTADGRASTRKTMIVALARKLLIALWRLVTKGEVPQGIVLRPTSV

SEQ ID NO: 206665 - protein, 398 aa, unidentified
MTESSDYESVQVFIGVDVGKDTHHAVAVNRSGKRLFDKALPNDETKLRSLISDLKQHGQILLIVDQPATIGALPVAVARSEGVLVGYLPGLAMRRIADLHAGEAKTDARDAATIAEAARTLPHALRTLKLADEQIAKLSMLCGFDDDLAAQTTQASNCIRGLLTQIHPALERVLGPRLEHPAVLDLLQRYPSPDKLASLGEKKLATQLCKLAPRLGKRLAADITRTLTGQTAVVPGTNAAVVVLPRLALQLITLRKQRDEVALEVEQRVLTHPLYPVLTSMPGVRVRTAARLLTEVACRAFASAAHLAAYAGLAPVTRRSGSSIRGEHPSRRGNKTLKRALFLSAFAALRDPISRAYYTRKMSQGKRHNQALIALARRRCDVLFAMMRDGTFYTPAAS

SEQ ID NO: 206666 - protein, 335 aa, unidentified
MALYCGIDLHSNNHVVVVIDDEDRRILERRLGNELTLTLQALEPFRSELVGVAVESTFNWYWLVDGLQAAGYPMRLVNTTAVQQYAGLKYTDDRYDAYWLAHLMRLGILPTGYIYPKEQRGIRDLLRRRMQLMQAASTQLISVQSQIWRETGERIATRRLKQADFVVDLPGAAQQLSAQSALLVYRAIHAQQTVLEQVLLQVVGPQPNYQLLTTIPGVGAILGMTIALETGDIRRFPGVGHYASYCRCVRSEKVSNGKKKGEGNAKSGNKYLSWAFAEAAHFAVRYQPLAKRFFDRKQRKTNGIVAIRSVAHKLARAAYYMLRDQVPFDAHQLFA

SEQ ID NO: 206667 - protein, 434 aa, unidentified
MSGIMIGVDPHKVSVTIEVRDEREVLLATGRFGTDTGGYKAMVRYCRQWPRRAWAVEGANGTGRPVAQRLLADGERVLDVPAKLAARARVFDTGNARKTDAHDAHAIVMVALRTQGLRELTVDEGLAVLRLLADRRDELSRSRAQTVNRLQRLLAELVPGGAKRDLSSFKARDLLARVRPRDLPGRTRRQLAVDLVVELEAVDHKLKELTRRLRQEVLASGSHLMDIFGVGPAGAARILADVGDVARFPDRAHFASWTGTAPIDASSGEQCRHRLSRAGNRRLNHVLYMAGIVQMRHDTDGRAYYRRKLTEGKTPMEAMRCLRRRLSDVVYRQLVADAQAPATTSGSPPAESKAGPGGHPGATLQSSAADLPPDIGTSDQSLPGPAPVTLAPPRTAAHTRAASAAAPQRRRARGVKVERPTGRTTLTPTSAGAP

SEQ ID NO: 206668 - protein, 331 aa, unidentified
MSSDIPQVVPQVVVGIDVSKDRLDVHVWPADQAFHADNTPAGIAPVIERLVPLGVTLVVVEATGRYERRVAFELMSAGFEVAVVNPRQPRDFAKATGQLAKTDRIDAKILARFGAVIGPRTSELPSENQLLLDELVGRRRQLVDILTAETQRHEQAFNGKLRTSIAKLLRTLDRERKLVEARIAELLDRDDDWRAKLQLLKSVPGVGEATAATLIAELPELGQLNRQEIAALVGVAPMNCDSGKHRGQRHIIGGRQSVRNILYMATLTARTYNPLIRAMATRLTQAGKPFKVMMTACLRKLLTILNTMMRNNEPWRATCENESTKNQIQPA

SEQ ID NO: 206669 - protein, 350 aa, unidentified
MMIIGVDFHPEFQQMASLDTESGEFEEKRLAHREEAENFYRALALRNQPVRVGMEASGHGRWFERLLAELHFELWIGDASEIRTRRVRKQKTDRQDAQLILKLMLQDDFPQIWVPSWENRDLRQLLWHRHRMVQTRTRIMNQLQAVALNEGLRCKQRLWREHGRQQLESFSLAPWASRRRHDLLQLLDRLNPTITELTQAIEREVEKYPEARRLMTHPGVGPLTALAFVLIIGEVERFHCGKQIASYLGLVPLEHSSGKRRRLGHITKQGSSMLRFLLVQAAHVTARSLPEWRSQYFHLMMRRGPKIAKVALARKLAIRLYWMLRKRWDYEQLRKFGSHAGQPESCNGVQ

SEQ ID NO: 206670 - protein, 302 aa, unidentified
MSQPNLQCMGIDVAKLSLDIATTDTIEPFTVGNDEDGFAVITDKLKHTKINLILMEATGGLEAAIACKLQSEGYDVVVINPRQARDFARSMGYLAKTDKLDAAMLAQLALVIDRHPDRSRYIRHLPDEARAVLAAMVVRRRQLNHMLVAERNRLYPSHPQSRKSIDNIIDALQNELDRINEQMKQHMTAFFQEQARLIGSVKGVGDITVASLIAELPEQGKLNRREISALTGVAPLNRDSGKMRGKRTTFGGRAGVRATLNMAALVATQFNPAIKLFYQRCLPPENPKNLLWSPACANSSPF

SEQ ID NO: 206671 - protein, 412 aa, unidentified
MTATNQFAAHVGLDWADKKHDVCVQFKNGERVFDVIEHTAEALDAWLTELHQKVKGRIAIALELKKGPVVYALQKYPFITVFPVHALSLARYRQAFSPSGAKDDPQDAELALELMLRYPQKIKAIEPDNADIRLLQQLVEQRRQLVEDKRRFVNRIINTLKQYYPQPLEWFSHRGSLLLCELIIRWPSLQQLKRARRDTIRNFLNAKGGRAMALTEQRVASIDNAIPLTTDPSVIEANALMAAALATQIKVVSEIIKTYDERIETLFDTLPDAGLFKSLPGMGPCMGPRMLAALGDNRDRFNSAEEIQNYAGIAPVTERSGQKSWVHWRWQCAKFVRQTFVEWAAKTVNSSYWARLYYQGLREKGKSHQSAIRALAFKWIRIIYRCWKARTQYDEAKYLLALEARHSPLLKP

SEQ ID NO: 206672 - protein, 408 aa, unidentified
MKTLHKRCAGLDVHKAEVVACLRVVNRGKESYELRRFPTTTRGLIGLGDWLEQAGCTHVAMEATGVYWKPVWHILEGRFQLILANAAHIKAVPGRKSDTHDATWISDLLAHGLIRASFVPPQPIQEVRDLTRTRKQLTREIVQHTQRIQAVLEEANVKLSSVITDVMGVSARRILKAIVAGETDPMKLAELGGPRLAATKSELADALHGRVRPHHQFLIGQHLKTIEQLEETITAFDGQIEAALAPFRNAIERLKEVPGLSETAAQILLAEIGTDMRQFPTAGHLLSWAGLIPRLDESAGKRRSTRVRKGAPWLKPVLVQCAWAASRKKNSYFEAQFLRLKARRGPKKAVVAVAASILTTAYHMLADGTCYQDLGADHFARRNPARAAAKLANRIRNLGFHVEIRPTA

SEQ ID NO: 206673 - protein, 369 aa, unidentified
MAETTEAFVGIDVAKLRNAVAVADAGRDGEVRFYGEVDASPESMRRLAAKLAGKHERLHFCYEAGPTGYGLHRLLTGLGHSCVVVAPSLVPRKPGDRVKTNRRDALSLARLLRAGELTPIRVPDTAHEAVRNLVRARAAAVKDVGLKKRQVGAFLLRHSRLFPRKKNWGARYRSWLETQSFEHPADQIVLQEGIESVRLAEERLARLDRAIGEFLPTWSLAPLVEALQALRGVDLVTAVTFVVEVGDIRRFESPRQLMGYLGLVPGERSTGETVRRGSITEMGNARVRHLLVESAWTYRHPPRVGKAKLPKLERVSPKVREIAWKAQSRLTARYRALTARGKKTTVTCTAIARELAAFMWAVAREARPA

SEQ ID NO: 206674 - protein, 422 aa, unidentified
MQTDTMSNSPEALSPEVWIGLDWGDQNHAFALRDRSGHCEDGTFEHSAENLHQWLEELAGRYGSRPVALAIEASRGAVIHALLQYPWVTIYPINPVTSARYRSAFTPSGAKDDVPDAKVLLELVHLHTAKLRPLEPQDSATVQLTALVEARRGIVDRRTAVTNQLSSLLKSYYPQALQLLGELNTELAVGFLGRWPDLISLKAAKPRTIKQFYYHHQVRSTQLVDERLALIAKARPLTTEEARVSVAVLQLRQLLDQLEVFQKHIPLFDAQIKAAFAAHPEAALFRDLPGAGPQLAPRLCVAFGTIRSLQVDSASMQKLVGVAPVREKSGNQLWTHWRWQAPVFLRQTFVEWAGQTVRYSVWAKIYYERMIKKGKKHAVILRALAFKWIRVLWRCWQDRQPYDEARYLKQLAHRKSPNAVAA

SEQ ID NO: 206675 - protein, 442 aa, unidentified
MATKLVNPNAAGIDVASNEHVVAVREDKSKDSVRTFKGFTRDLHQLAKWLLSCKVETIAMESTGVYWFDLYTILLDYGFEVYLVNAHHVKNVPGRKSDVSDARWLQQLHTFGLLRASFQPDNLTRSLRNHVRQRKNIVQQMSRQTQHMQKAFDQMNIKLNNVIRDLNGATGTKIITAILEGERDPKKLAQHRDRRIKASEQTLIKSLEGNWREEQLFNLQLAYDHYIFLQQQLKQCDAESEKIIQKMTSGNSPKSRTKKIQKSKNNPDFDVAQYLHAALGVDVTQIYGIKEVTALTIFSETGANLKEKFPTEKQFLSWVNVVPNNKITGGKVISSKVKKKKNLAGQAFRDGASALWRAKNPIGDYLRRKKAKSGAKKAVVATARKIAAIYYKMVTEKVEFNPLELTKGKEQYLQKRLKQLEMAKEQTQMLLSDFQQQNSLVI

SEQ ID NO: 206676 - protein, 343 aa, unidentified
MNHVAIDLGGRESQICIRQPDGMIVEERKVPTRKLVELIATWTPSRVVMETSAEAFRIADAAIAAGHEVRVVPGTLVRLLGVGERGVKTDQRDAQQLSKASWQTDVPSVHIPSKPARELKSICGARDVLVGTRTKLINNVRGWMRTHLWKLRGGTTATFAERVRGHAAALGEPLPEHIERQLRMLSVVVEEVKAADKQLQKLAGEHQVCRRLMTVPGIGPLTALRFVAAIDEPGRFATAHHVQSYLGLTPGEHSSSERERRTGITKAGPMALRRTLVQAGWVAMCLVRTSHPMIDWARRLAERRGRPVAAVALARKLAGILFAMWRDGTTYQAKRSADAVTHS

SEQ ID NO: 206677 - protein, 347 aa, unidentified
MTLYIGVDFHPHQQTVAWCDTQTGETSTCTLQHNLSEVLKFYQSVSPSIVGIEASSRAVWFEQLLSETNHQLLVGNPTLIRARARSRHKSDARDAQLILDLLVKDEFPAIWRRSAASSQIIDVLHLRRQLVGQRTQTYNCLQALAHSGGLPKGKMKTLGFQSLLKQVPMNESSQMQRDHLFSLLEQLTKQIRELQSWLRQKAASDNQVQLLLTQRGVGYLTALATVHTLGDVSRFQKVSKQAIAFAGLDSLEKSSAGKTRFGRISKAGSPLLRGLLGQSANIVIRYDARLKAFYKGLAKRKPKAIAKTATARKLLVKLAIMLRDNITAEEFDRRGESSWQCSILDKV

SEQ ID NO: 206678 - protein, 391 aa, unidentified
MRNRYESVACGGADVHKTFSTVVWRNAAQRVVLRERLDHRDRRKVREQLASWPKGVPVVLEASFGWGWLSDEIEAAGLVPQLSNCYKVEQMRQARGQVKTNQKDADLLSLLPFEAEPWWQVWRAPPAVRDRRERMRYRATLVEAPSELKQRIHAWLNRQGIVRTESDLFGADGRRFLDAVVQAGRTAEVVLGPGAHAALKGLVEHLEYVRNELAVIAWTLREELSHDPMTRRLDTAPGFGLILSHVVMAEVGSFDRFTEEGKLARYSCLAPLSRDSGEPDPTQPPKSRHLGRRGNLTLKWAFIEAAHGAVRHGGRWRAMFDRATDGGRRDCGHGYIKVARELVNVVYAMMKHGTDYTETPPARPGSVHARKSDRCSGTGQPNAPTVRASRA

SEQ ID NO: 206679 - protein, 517 aa, unidentified
MLVVAKIRSLRSRWSRSRGTAVRRSLGARGNRERDDARLLELFHATIALDASDRPRLCPLRDRWDESAPIGAEAAVPASTVNAEPPGSVKPRTVPIARSRTSKKKVADLSSTAFAVDTSTRSGGAVESEAKERSTMRSVALDLGARKISLCEVADGRVVQRRTVPDLGTLEDTLGPKSAPACVAIEACREAWHVHATLSGWGHKVLLVDTSRARQLGIGHHGKKTDRVDAEVLALAVERGHIPLAHVLSAARQRLRLELGVRRALVETHSHYITTVRGIVRARGSRLPTCSTDDFLSHFRQAVLDETTRALVDPLGSVLAQVERQIVEVDRRLEDLCRQEPAIERLTTAPGVGLIVASVFVSVVDEAHRFRHAHQVEAYLGLVPGETSSGGRRRLGAITKHGNAYARAMLVQAAWRILQPHSTDDPLRRWGQDVARRRGRCVAAVAVARRLVGVLWAMWRRGTVYDAGRVGHASARGMTAHAQDLQVRAAAMKRAATKTQLRERRTRKLAERSPHLT

SEQ ID NO: 206680 - protein, 309 aa, unidentified
MSTVGIDVSKAKLDVAVRPSGERFTCTNDAGGLKQLVKRLLKVKPERVVLEPTGGYEATVVDALVAAQLPIIVVNARQIRDFAKATGRLAKTDQIDADAIAHFGEAVKPEFRPLPDAAQRELEALVSRRRQLVEMRAGEAKRAETARPVVRANIGAVIAFLSKQIEDLDDDLKKLIRSTPAWRENDDLLQSVPGVGPVLSATLSALVPELGRLNRKQIAALVGVAPLNNDSGTITRKRSTWGGRAAVRAVLYMAALSAKRCNKTIAAFYDRLFSRGKTHQVALVACMRKLLVALNAMMRDRRAWTPLGT

SEQ ID NO: 206681 - protein, 310 aa, unidentified
MNVHHYIGFDVHKKTIYYCVKLIDGTIVEEGKLAARRATLRQWASKRTEPWQGAMEATLFSAWIYDTLKPYAAKLEMGHPARMKAIGASKKKNDKLDARTICDLLRCNLLPTCWVAPAEIRELRRMLRYRNLVVGQAVQMKNKIGGLLMESGAEYNKKRLHGAKYFGELMENLEEVPESVKKLLKLSRGSLEAFQATQQQLLAQLRTHPQLAERVERLKSIRGVGDVVALTWALEIGDPKRMPSIDNAVSYCGLTSALVESANKQKRGPISSAHVSAVMSPTPRMLFNRSTRSANCTCLRSCLISSSCVF

SEQ ID NO: 206682 - protein, 319 aa, unidentified
MNTNTKAHLRNTQRNIGIDVGKHFLDVYVYELDLHWQAQNNPAGIKQLLVRLNRYNLTRIVVEATGGYERQILEMAAAKNLPIVVVQPVQVRQFAKAQGLFAKTDKIDARLIAQFGVVMKPPIRALASHKVRLFRDLLARKRQLNEARTQELNRQHKAPKILEASHRRLLKLLDKEIQGINDRLNQEVVEVTEWRRTCEILLSTPGIGEGVAYTLLGELPELGQLTNRQISALCGLAPFNRDSGKMKGRRRIRGGRAPIRTVLYMAMLSAIQHNPVMKDFYQHLVAQGKHKKVALTACMRKMMTILNTMVRNNQEWQMK

SEQ ID NO: 206683 - protein, 394 aa, unidentified
MRFVGIDIASEIHVVAVVDETDAVLVRPTKFTEDAPGYDRLFGLLGTPADTLVALEATGHYWKNLFAVLVTRGFAVALLNPLRTRRFADEELARTKTDAIDARGIARFAAQKRPAPTRLPDRATEERRELVRLRDRLVQDFGDRLRQLHRLVDLGFPEFTRHVKSLDSELATAILHDYPTAAAFRNVSARRLAGLRYDGRHKVGDDLARALLAAATRSVGQHHGEAYRLQVRYACEDLDLLRRRLRTLERDIERTLDDHEIGTLLTTIEGIGPQTAARLIAELGNPAEFRSAAALASYVGVIPAIRQSGKWTSSRAGLNPLGHAALRAALWMPVLTAVRKNPWLRAYYQRLTARGKLPKVALIAAMRKLLIAVYTVAKTRRPFVSQRAPQEARA

SEQ ID NO: 206684 - protein, 373 aa, unidentified
MQPILEPILECCCGVDVHKNMIEACIIKGIYEPIFIRKRFSTFQNELIDFAHWLYEHDCYHIAMESTGVYWRPIYEAIEEYSPYYENIIVTNAHHMRNLPGRKSDVKDAEWLATLMQRGLLKGSFIPERTIRDLREFSRIYKNAVNEKSRCLNRLEKFLQTHGFKLSSVLSDINSVSGIKILTTLSQKGSLTIEDIQNAVGNRTKKSSEEIQLAVCGKLNANGCFLLADFLDQLKWIEQHIEKILNKMIEIAEPYRDVLERLDSIVGIDITAALLILAEIGGNVQQNFQTAGHLCAWAGLKPRNDESADKFKSKKTAKNRKNPFGHWFWSHQGKLGKKKAIIAVSRKILALAYYLIVTNQLYDNEIAMRPYLN

SEQ ID NO: 206685 - protein, 311 aa, unidentified
MESITVVGIDVSKDRLDVAVRPSGEVFLVERNGAGLEQLTTRLQELAPQVVALEASGGFETIAAAALAAASLPVVVVNPAQIRAFAKAIGQRAKTDPIDAATIAHFAEATKPEPRPLPDEATRLLGDLVARRRQIIEMIGAERQREQRVTIPHLRRSITRLLRALEKELASLNTDINDAVRGSPAWREKENLLSSVPGIGPVISSTLIAELPELGQLGRREIAALAGLAPFTRQSGRWRGKSFIGGGRTAVRTALFMGAIVAKRHNPVLKAFFDRLVAAGKPKMVALIAVARKLLTILNAIIRDSRPWQTA

SEQ ID NO: 206686 - protein, 377 aa, unidentified
MNKYTTKYVGMDVHKETIAVAIARGGRGGAVYYGEIPNNAEAMRKLVKKVTSDGESVSFCYEAGPCGYGIYRQLIELGQKCDVVAPSLIPRKSGDRVKTDRRDANTLTRLHRAGELTPVWVPDKEQEAIRDLTRAREDLKNMERHGRQRLSGVLLRHEKRYSSGKSKWTPGYFGWLETIQFESPVQQIVFQEYVDMVKILQGRVASIEQEMRNALADWSLGCVVEALMALRGVNLITAMTVVAEIGDMSRFENPRQLMAHLGLVPSEYSSGNRRKRGEITKTGNGHVRRVVVESAWSYRLPARKTAHLQRKAKKTSEAVQEIAWKAQKRLCRRYWHLIQKGKLQVQACTAVARELVGFIWAIAREVMIHKNFCMVTV

SEQ ID NO: 206687 - protein, 356 aa, unidentified
MTWVGLDVHARSTHAAAVDVLTGELKRARFGPGSDEVVDWLGQLAQPHAVYEAGPTGFALFRAAQAKGIAVDVVAPSKTARPAGDRVKTDRKDAELLARLGLAGQLHVVAVPDAFVESARHLSRAREQLRQDLMRCRHRVSKLLLQHGRVYPEPTTWNTRHQNWLARQRFEHEPTELAFIDLLAAVDGLMTRKAALEERLAGLAQDERLAPTVARLRAFRGIDTLTALALHLELGGDWERFSSPRKLFSWLGLTPSLDQSGESSSQGAITKTGSGYARRLLVEAAWHYARQPRIGATLRNRQQGQPDHVLQISWRAQHRLFRLYRRLRERGKPHNVATVAAARELSGFLWAAAVAP

SEQ ID NO: 206688 - protein, 341 aa, unidentified
MQITTIGLDIAKNVFQVHGIDAAEKVVVRKQLRRSQVMAFFASLPPCLIGMEACATAHYWARELTKLGHEVRLMPAKDVKAYVKRNKNDAADAEAICEAVRRPTIRFVRVKSAEQQGQLMQHRTRDLLMRQRTQATNGLRAHLAELGIVAAQGREGVKQLLAIIADDRDERLPIEARASVMILAAQLQALQTLIGSIERRIIKQHRSNEASKRVATIPGIGVIGATTITAVVPDAKVFRSGRDFAAWIGLVPRQDSTGGKPKLGPISKQGDRYLRRILVVGAHAVLRRARQQPEKYPWLTQLLARRPFKVVAVALANKMARIAWALLAKGGTYRAPRLGAA

SEQ ID NO: 206689 - protein, 386 aa, unidentified
MQTPNDLSQSSIVLKQDTTLIAVIEMSLSSWLVAGIVPGVKRQPLKKLAVDESALLKLLNRWREEAGKAGHKIERIAVAFEAGRDGFWLARWLRARGIEAHVIHASSVAVSREHRRAKTDRLDTELLKRAFLGWLRGERDHCKMVAIPTIGDEDAKRPNRERESPVGEQTRIVNRMKAALSRLGIRGFNPKLKKAAERLEDLRTPEDQPIPPNTLAELRRDMERRRLVRSQIRDIEDARLERIEQAPGDGPHAMVRLLARVIGVGIETADMLVQEVLSRNLRDRRAVARYGGLTGSPDESGKKRREKGLARSGNARVRRGMIQLAWRFLMFQKDSALAHWFYARTKNAPQTRKTMIVALARKLLIALWRLVREGMIPEGIVLRPAL

SEQ ID NO: 206690 - protein, 377 aa, unidentified
MSNVRFIGLDVHAETIAVAAAEPAGEVRSLGVIPNRIESIRKLVKKLGPVKQLRVCYEAGPTGYVVYWHLTALGVKCEVVAPTLVPVKPGDRVKTDRRDALKLARSYRAGDLTPVWVPDAAHEALRDLVRAREAAKKDQLRARHRLGKFLLRHGRRPPTVMKAWTQAHLAWVKSAVHFDQAAQEATLLDYIHEVDHVAARIGRLEAAIDAAVQTAPARMRAVIEALQALRGIALVTAVTIAAEVGELSRFAKPRQLMGYSGAVASEHSSGERTRRGGITKAGNAHLRRVIVEAAWAYRHRPAVGAALRKRQVSASAEVKEIAWKAQHRLHARYRALIGRGKCKQQVITAIGRELLGFIWAIGVHVESATADGKTVAA

SEQ ID NO: 206691 - protein, 356 aa, unidentified
MTKVTASFENQTVYVGLDVHKRSWNASLFLNDQYLRNVHQPPSPQALYKFLQTNYPGADYECAYEGGKFGYWIQRHLSSKGIKCIVVNPADIPSTHKDEVSKTDARDARGIALALQCGQLRGIYIPPQQQESDRSLVRHRKKIWRDLVRCKNRIKGFLDYTGVELPNKFSNSNWSKNFMHWLAAIKFEYSSSGITLNYMIKEMELLRKELLSISNDIRKLMRSATYKKIYYLLRSITGIGPLTAALLITEIGDMKRFASFYELNSFIGLLPSEHSSGERESKGRLTIRRHRQLRSDLIECAWTAKRTDPALSLFYMEQLRKGKEPKLIIVKIARKLLSRIRYVWLTEKRYERGVVK

SEQ ID NO: 206692 - protein, 344 aa, unidentified
MEHFAGIDVSLEQSSVCVVDGAGNIVREAKVVSEPEALIGFFRGLGSGLTRIGLEAGPLSQWLYAGLVAAGFEVVLLETRHVKAALSAMVIKTDRKDARGIAQLLRMGWFRPVHAKSPGSQEVRALLVARKLLQTKLLDVEFSIRGILRGFGLKMGEVSKGRFAARVRELAAGHAMLERITEPMLRAREALRTEYARLHGEMLAIVKPDPVCRRLMTVPGVGALVAITFKSAVDDPTRFARSRVLGAHFGLTPRKYQSGETDVTGAISRVGDAMVRTALYEAAHIMLGRVTRFSSLKRWALDVAKRRGLKRAKVALARKLATVLHRMWVDGTTFHWGKQAVAAV

SEQ ID NO: 206693 - protein, 432 aa, unidentified
MSERKSLELRVSVDVGSRRHSVAIGLPDGQVLEEFEIAHRPEGFQEFFSRIEKHQKAQGCGVAVAMEGYNGYARPLDTLVRQRGYRLYNINNLKLARFKEIFPGAAKKDRIDARKGLELFQLRDHLPLAKGVLQEVTGTPKENEILKRLTRRRRRLVNERVRVVNNLQSDLQAVCPGLLEITTEASNQWFLNFLLSADSLPQLARLRKSTLLKIPAVGRKYASLIEQWQKRAHFSDEIEWVNEMVREDALRCLELDEKIRTLEAKIEEIAKSSEIAKILLSIPGFGPVCTSELAGEIGTVERFSKEGSLALYLGMSTLDNSSGDYHGSKQPKHVNTRAKAAMMIALDRHRKYVPESQRYYEKKRTEGKKHNQTIRSLGRHLCRIIFRMLRDQRNYEIRPQQRNTKTKVRSRSCVKTKIRRPKISATHLKQKV

SEQ ID NO: 206694 - protein, 327 aa, unidentified
MAKRTTICAGIDTGKRKLDVALDGSSEQLQIDNTPEGYKVLLDWLRCHRVKRIGIEASGGYEQAVVAELRRKRVVVVVFQPAQVRAYARFHLQRAKNDKIDAALIAACTAAVKKIHPPPDARLLPFAEHLTMIDQIGEDIALLKNRLETCRNPRIQQVWKEDLARLAKRERIEFKALVAAIREHRDLAERLDLIYSVSGAGLPTAVAILVRMPEIGQLTREQAAALAGLAPYDDDSGKHVGVRHIDGGRERLRRALYTAALPASFRWNPQLITLYKRLIAAGKGHKRALIACARKLLIFVNAVVARGIPWDHERPPTVAATALPQTG

SEQ ID NO: 206695 - protein, 400 aa, unidentified
MNEYDETGVFLGLGVGKSAHHGHGLTPAGKKVFDKQLPNTEPKLRQVFDKLREKFGTVLVVVDQPASIGALPLTVARDTGCQVAYLPGLSMRRIADLYPGEAKTDARDAAVIADAARTMPHTLRSLQLTDEITAELTVLVGFDQDLAAEATRTSNRIRGLLTQFHPSLERVLGPRLDHQAVTWLLERYGSPAALRKAGRLRLVEVIRPKAPRMAKRLIDDVFEALDEQTVVVPGTGTLDVVIPSLTRSLGAVREQRRAAEAQITALLEDHPLSKVLTSLPGVGVRTAAALLVTVGDGTSFPTAAHLASYAGLAPTTKSSGTSIHGEHAPRGGNRQLKRAMFLSAFAALHDPASRTYYDRCRARGKTHTQALLRLARQRINVLFAMLRDGTFYEPRTPRLA

SEQ ID NO: 206696 - protein, 461 aa, unidentified
MKEKKNASVKNEKTQGIGLPVLQPHAAGIDIGSQEHWVCCPPKPDGSVNVRRFGSRSCDLEEMAAWLKSEGIETVAMESTSVYWIPLYELLEVKGFDVLLANAKQLANVPGRKTDMQDCQWIQLLHACGLLRGSFRPGQEICALRALMRECSNLADERRRCVQRMQKALDQMNVQVHRAVSDITGFTGMGIIRAIVDGERDPLVLAGLRDRRCKKDVKAFAEHLRGTWREEHLFNLKMSLELFDKLNEMIDVYKRKVEQLMRELTPEERRHAPKPEHPSKTKARSIRKTGQEETRESLWRFSGVDLTRIDGINTGAANTVLTEIGLDLSDFPTEKHFVSWLRLSPRYSISGGKVLKKKRNAVGATRVATMLRTCATCLERSQTALGAQFRRTSRRKGRAVAVFALARKLAILIYRMLRYGQDYVDQGVEAYEEQFKQKRIQNMISAAKQMGYELTPISIAA

SEQ ID NO: 206697 - protein, 341 aa, unidentified
MSEYVGLDVSLEETSVCILNAAGSITFEGKVASDPVSIAALLEKRAPQAVRVGLETGPTSTWLWHELKAANVPVICIDARHAQTVLSVRINKTDRNDARGIAEMMHANWFREVKVKELNAHRDGALTASRALIVRQRCELENQIRGLMKNFGLRCKVTRRGGFEPAVLLLVRHHPALAEIIVPLLAARAALRAQEAVLSTKIKQRTQASPICQRLMTMPGVGAVTALAFSATIDDPTRFRKSASVGAYVGLTPRRYASGEQDRMGRISRCGDALARSYLYEAANALLLRSRTTHPLKGWAQKLAKRVGLKKARVALARKMAVVLHRMWVSETDFGANTAAA

SEQ ID NO: 206698 - protein, 461 aa, unidentified
MPNSQKSGDRPGSPRTIAGLPMIRAQVAGIDIGSERHWVCARGLEGSGREVENFGATTAELVRMAEWLKERKIESVAMESTGVYWIAPHEVLEKDFEVLLVDTRQLARVPGRNKKTDPSDCEWIQRLHSCGLLNGSFRPQEQVCMLRTLVRDKANLVAESADWVRRMQKSLDQMNVRVHRAVSDLNGVTGMAIVRAIAAGERDAQKLAQLRDRRCRQSEQEIAEQLSGHWREDHLFSLRQSLQMYDAIAERITAYEQEILRKLATMEIGEYPGGVVPPVKNLEKGKAIKKRGQEPKRQALYRMSGVDVTQIDAIGVETVEVVLSEYGPDLSRFPTEKQFVSHATLAPRVPKSGGKPLKHKKRNSASTRVAAALRMAALSLRHSATALGAYYRRLARRIGGDVAVFATARKLATLIYRLLRWGQPYVDEGAEAFEKRYQQQHIKGLAARAKELGYQLMPTTT

SEQ ID NO: 206699 - protein, 338 aa, unidentified
MNNSVVGLDIAKNIFHMYSIGIDNQIIKKKLKRSDLLAFFANYPTSLIGIEACGGAHHWARELIKLGHEAVLLNARYVKSFVVGNKNDFNDAQAIFDAVIRPNKRVVAVKTLEQQDIQLVHTVRQSLVDQRTALVNQIRGLLSERGIVIHLGIHQVRQQLPSILEDADNNLTPLSRELLNERYEQLVQLDDAIKQQDRRMSRLCADNDLSKRFLDVPGVGPMIATIIVSDIGDGKRYASSRDYAASLGLVPRQHSSGGKMIYLGISKRGNRYIRTLLIHGARAVLKNCSNKTDKLNLWLRALIERRGFNKAAVALANKNARILWSMATKGQVYQSLPA

SEQ ID NO: 206700 - protein, 321 aa, unidentified
MKSTQQPLNIGADIAKDEIVVACAEQSFTPRKIANSRSALLAWLNKLPQGSRIAMESTGSHHERLAELAHKLGLTVYVLNAKDVRHYAKGVGLRGKTDRIDAQLIARYLAKEHVELHPFVPPSAQQRELERLLRRRTKLVRIRAAVKQSLNGMRGFAVEVKGLLARLDALIKRIDIKMRASIEACPHSQEACARLQRIPGVGPLVGGGLLNTLQRVPFGSAAAFVAFCGWDPRPSDSGRKSGRRRLSKRGPSLLRYLLYNAAMAASRTKAWRPLYQRSLAKGLSRTEALVILARHIARTAWSIYTHKTLFDAQRISQQVLT

SEQ ID NO: 206701 - protein, 357 aa, unidentified
MDHYIGVDFHTQESTVTVMQQDGTIMDERKLYHRDLAGIDRFFSQFAPGTPVAIEATRNWYWFVDFLQGKGLAPHLVHAKKARIIAESTVKTDVLSSRILAHLDRCNFLPSAYIADQKTRSARELLRYHMSLVRIRTSVKNKIHAILAKNNVQHSFSDLFGTAGSAFLMSLELSEVFRHELTGYLKLLDALKERINEVASEIRSLCAETPSTDRLRTIPGIAYFSALLLHAEIADIARFRSPKKLLAYAGLASRIHQSADTVHHGPLIKDSNKYIRYVLIEAVPFAVRKDPKLFAFYAKIRSKKGHNKAKVATAAKLLRAVYYMLKTNSDYRIDDRRNNAFQVNPTTKLGALHTQAR

SEQ ID NO: 206702 - protein, 466 aa, unidentified
MRECQSPVLTGALAGGAPVPIGWGVPLQEVAARMKVMYERVAGIDVHKDMVKVAIRSPGEKPWTRKTEILEFRTFYGVLQEMARELRKRGVTHVVMEASGVYTEPVYYALAEQDFTAVAVINPAHAKALKGHKTDARDCARLAELFECGLLRGSYIPPAELKEVRDLTRYRMKTVQARTSEIQRLGKALESAGIKLGSVASSITGTASTAMIEALIDGERRGGVLADLAIGRMRAAGKLTDLSMALAGRFTEHHALLCRLHLDRIAVFDDAVDGLDKRITGKAARWQREAGLLTSVPGFGNVVAQAWLGEIGPAPHRHFATCDKLASWVTLCPGNNISARKRKHGRTGDAGTYIKPMLVQAAWAAIRVRGRLQARYNRLVRRFGGDKNPGAKKKAITAIAHTLLKIAYQVLKSGTPYQEPGADFYTRRESPEHKQAWLERQLQKLHPGCTITVTISPPEAALPPRG

SEQ ID NO: 206703 - protein, 402 aa, unidentified
MIFINCLGIDISKSESVVAHYKDEVFVKELVIQNNQNGYRYLKNDIKHLDSLFILFESTGVYSRGMKHFCEIHKINYLEMNPLEAKFKTNSLRSWKTDKSDAHKLALLAFRMKDSKVQRHPEEIYFELRERARFHLEMEINQNCLKVELVETLHQTFPGLEKLFTNRYSKIALNIAKAFPHPDYVSILTHDELVEKVLHSTDKGISIKKAHKYAKKLIEIKNNSFPNVRKSSFLLQKVQYLCDKLLIGIEEMKAFNQEMIDLAKNTTEFENIISIPGIGELTATLLIGELGDIREFKTNKQLNAFVGIDIKRYQSGTSKSRDTINKRGNKKARRLLYLITMNILRGRNHYQSHIVDYYYKLREQPHGKPHKTAVIASINRLLKTIHYLIVNDKLYDYQKAPH

SEQ ID NO: 206704 - protein, 454 aa, unidentified
MSIHSTDPVTGLSPVRVQVGIDAAVVANHHVCVREILPDGQVRLSRFTAPPTLAGLAMLSDRLRGFPGVVAVAEPTSMTWLALSIAMHRGGGDLSLLGARHAARLRGAIIGKDKSDVIDADVLATAGEVFTLTPLRPLTPPQLALRRAVTRRGKLVVDGNRARRRLISLARWAFPDVWSAFAGSQPTAVAVLTRWPDLRALGSARRSTLTGVVAAHTRGVPDVPARVEAIRAAARAWSDFWQGHLDLDALAWEVAEHLHDMAEADQRIARATAQATRYWADLYGDDPLLLSVPGMGPMTAPAVRAFLGDGGAFTTAKAAASYVGMNPSTWSSGTVVQPSRAITKEGPAVLRLAFYQAAGGARRVDPQLAAFYRHLMVDRGHSHTKATVAVARKLIERTWTVLHRDQPYQLRDIDGTPLTRVRAKEIARTHAVPPEVRARARAQSAATHRSKLTR

SEQ ID NO: 206705 - protein, 353 aa, unidentified
MKKIAIGIDFSKKTFDVTIMRRDGDIYTELSYSKFNNDAKGFKALEKLVKASLKGTPEAKDKSSWIFCGEHTGTCSIPLCDYLAKKQYFMWLESALVIHRKCGIVREKNDKVDSRRIAEYALRNFSTDVKAYELDSKDLKKLKSLYAAHSMLTRDKIAKINQLKSGTLDASVSARHEIDRQLTSIRKSLKDIDDEIKRMLAESEEFSHNFTILNTFKGIGFLTIACLIIKTRNFRDMRDARELGCYIGVVPHRQQSGTSIDKPSRTSKYRDKDANALLSTCVQSALRYGNPIIRQYYDRLVKRGVNHYKALNNCKFKIINVLLAMLRNDTEFSMDIHGKSKAQWESHRISAAS

SEQ ID NO: 206706 - protein, 385 aa, unidentified
MIDAVIERCAGIDVGKRFLVVCVMTGPLDAEPKTEIRKFGTIVAELERLRDWLIAERCSHAVMESTGSYWKPVFNILEDGIQVILANAYDVQNRRGHKTDPNDSRWLAHLLRHGMIRSSFIPERPIRELRDLTRRRRQLVQEAARERNRVQRVLEEANVKLGDVLSDVLGLSGRLMINALLEGVLAAEEIAQLAQRKAKQKIPDLIAALRRHRLTDHHRFLLRHALRHIDFLEKEIEVLNVEIRSRLDAEQFRQAHALLQSIPGIKEDASAAILVEVGPDMAQFPSSSHLASWAGLCPGNHESAGVRKTGRTNRGNKWLRSVLTQCAWAASNKKNSALQSFYSRLSSGSRRKRAIVALGHRLLRIIHGVLLHLQPYREPWKPVRT

SEQ ID NO: 206707 - protein, 394 aa, unidentified
MKLIGIDIGKNKHFFCIMDKDSGEIVSQPASFSNDKEGFDFLVQKIKSYPKNSVLIGMEDTGHYHFALLKYLLDLQYTVALINPKTTDFNRKMQGGITKNDKLDTINICDVLDTPERKKQYRITKVNKFDLYEQKQLTRQHHNLKEELNVYKNRLQKSIDIVFPEFNSLFKSKYGTVYMNILKTFGSAENIANTDIRTIRKCFEIDGRGNRISLTPERLKERARSSIGISSIAEVIQIKHLSAQIELIEEQLSEIDKKIEEFSIQNNSPILSIPGISHFSGTSILAELGDISNYSKPSQIIKFAGVAPLHYESSQFNAQHTAITKKGSKYLRKALYQIILPVIRHNPVFNKYYQLKISQGKGHRCAQGHCVRKLLRIIYHLLKTNQQFDSHLLR

SEQ ID NO: 206708 - protein, 308 aa, unidentified
MIMQNYVGCDISKMWLDFFDETSGHCQRIDNQADAIAAYVAGLQPGRDSVVMEATGVHDRLLRHALAKAGVAFSRHNPAHTHHYAKSTRRRAKTDRLDARMLSSYGRHYHPEAEPAPREEGEHLQSLARHRDQLVEIRARLKKLRSEAFDAVVIEDLEDTIANFDTRIKAIEARIAEAIRQSKETARDNVLMVSVPGVSKVTAFSLLAHLPELGLRSPKSIAALAGVAPFDNKSGKLNRRSQIQGGRSRVRRALYMAALGAIRACERFRTFYSAIAARSGSKKLAIIAVARKLLVVLNAIIRDKKAFA

SEQ ID NO: 206709 - protein, 362 aa, unidentified
MFTERTSVGLDVHARSVTAAAIDGVTGELVQAKLTPSHEHVRTWIGGLPGPVAVAYEAGPTGFGLSRSLNGAGIRCEVVAPSKLQRPSGDRVKTDAKDAVHLARLLRLDEFTAVAVPTVEQESARDLVRAREDARGDLMRARHRLSKLLLRQGYVYSGGHAWTGAHDTWLRRTGARLDSAATRATFESDYDAVLSVKARRDRLDVMIEQIAADSEFTPVLRRLGCLRGIGTLTGFALAVEVGDWERFTGKTIGSFIGLVPSEYSSGQSRVQGSITKTGNTHLRRLLVEAAWHHRPAYRVGKTMRDRWELAGPAARARGDEGNRRLHHRWNTMRARHKRHTVTTVAIARELAGWCWSLAMLEE

SEQ ID NO: 206710 - protein, 429 aa, unidentified
MNYNTQNAKIASITEKTLIVGIDVGSETHYARAFDWRNYEYSKKPFAFNNDEAGFAAFKAWMEDMVEKYGKEVVIPGMEPTGHYWLNLGAYLQEQGMKPVHVNPHHVKKSKELDDNNPNKNDRKDPKTIAGLVNEGRFSYPYIPTGIYAEIRNLSNLRIQTQEEITRIKNRIARWFSIYFPEMKDVYKKPDAVSGMMVIKKAPLPCDIKKLGVDGVNQVWRDAKLKGAGIKRARTLVSAAEHSIGSTEAPGSARIEIRNLLNDYEVYKNRMDDLMQEIEAKLSEIPYIDKLMEINGIGLKTVSCFIAEVGDIRRFDNPKQLQKLAGYAIVADSSGKHNGESRISHRGRKRLRYALYEAAISVIGKNKEFREIHDYYRTRKQNPLKKMQSVIAIACKLIRIFYTILTKGVDYNGQKMLSDIVRTEPIMAA

SEQ ID NO: 206711 - protein, 338 aa, unidentified
MRHIGVDLHTNSLTVCFLEEGKEERFATYKVEELEQFQQELQLDDVLAVEATGNSNYFYDRLVDYVEEIVVVAPNQFDVIRRSVSKTDKNDARALAFFLSKGMLPRARVKKKEYRELASLVETRDKLVKLRTVLLNKIHGLLNAQGIKIKKESLSSKKGLLRTLDYPLSDVARIECEIIVEQVQQLNKSVARIDEASSDQAKKLDGFENIVSIKGVGEKSAAILLSVIGDVNEFESENKLAAYFGLVPRVSNSNETERSGRITKRGSKIGRTTLVQCALVAIRYSNYLRQFYERVKSRRGSSKAIIATAKKLLGVIYHTLKNKWVFEDFPNFVIKNTV

SEQ ID NO: 206712 - protein, 472 aa, unidentified
MYTLKKAYYKEVSPERIQQAMIMEEKEHGNYNLLRLVSVGNKNTLTGGVTAMRRKNDNRQVEKRQRITDATLVIGMDIGCEFNAMCLMSKEGTILGRYPKIYNSRKGFDYFHGIVESMKEKYGFTDVLIGMEPTGHYWRKIAYFAMDKQYEVRFIRTTALKHQRELDESSSAKNDIRDAYTIANIAREGKYIDTVIEDNIFRQLRTLAHTREKIQRISTGAKHALKGMLEDYFPELKHIFWSMKAKGLWALLEHYPFPEDVLKTDIDTVTELIAQSTRRKIQAHEKALQIYKAAQHSIGLQRVGDADRWRVAAYLSEIRHSETQLKEIGAQMEALLKKIPFAEYILSMPGIGTLTCGVFLGELGNPCNFTNPKQIVKYAGYDPKEHDSGQRTGRRIISKKGRWLLRKYLYFMAMRVVHRSPFLKDYYENKQKTMTKKEALCAVVIKLIKVIFALLRDKRTFTEKQSCLKQAA

SEQ ID NO: 206713 - protein, 340 aa, unidentified
MVHVGVDLDKRSSQIAVLTEEGEISQQRLPNDPVRLEKFFAELPPHTPVAIEASGTWWWLVDLLEQLGHDPILSHPKQTKAIAAARLKNDRVDAERLALLLRGDLLPTVWIPSAALREARELVRHRVQLVWLRGIVRNRLHAMLARRNLQPVSTKTWLTQRGQRELQRVPLADTPSRIREDCSALLPLLDAQIRRLDGELGARWGRDPRVHRLTTIPGIGPFIAIVLVLELGDIARFPSAKQVASYVGLTPRIRASAGRIRAGHISKEGNRLLRWVLVLAATQAVRRPGPLRTWFHAVKKRRGKKVARVALARRLAEIVFHVWKHECDYFTVVRHGVVRG

SEQ ID NO: 206714 - protein, 353 aa, unidentified
MKSRMESKMSSPMVIGVDIGKEVFHLVGFTADGKIAFRRRIRRLGLKDVFEKLPPCIVAMEACLSAHFVSRTLRALGHEPRIIPAIYVKPFVKGQKNDYNDAEAIAEAALRPNLRFVQEKSQDQLDLQACHRVRSRLVSRRTATINQIRAFLIEQGIAVRTGPRALRKSLFSILENRKEEISPRTAKLIRGLYEDWCCLDERVETVTGEIEILSRSEAKCRQLMSVPGVGPLISTAMVAAIGSGEAFERGRDFAAWLGLVLRQYSTGGRSILGRISKRGSKYLRTLLIQAAKVLLMRPQNWARYSFGPWLNAASERLHRNKLAVALANKLARIAWSVLRNDKAFDTHIEVAAI

SEQ ID NO: 206715 - protein, 317 aa, unidentified
MKTVPFEQVILRGCGIDVHKDMVVATISGEGLKTETRSYKTFSSSLTELKEWLLSSGITHVAMESTGVYWKPVYKILECPDMKVWIVNARHIKYVPGHKTDKKDSAWICKLLLAGLLKPSYIPEREQRELRDLTRYRNKLIQHVSSEKNRIVRILEDCNIKLSSVVCSLDGVVANKLIDMLIDKGHVTMDDITCIYHKKLEASPELLYQACEGFIEPHHIYMLQTIRKDMEQTKAIIADLTCRIKEVLSPYENVMELLQKIPGLSRKTVEDLIAEIGVDMEAFPTEKHLASWAGVWPGNNENAGKKKVVEPPMATNS

SEQ ID NO: 206716 - protein, 339 aa, unidentified
MTHTIVGVDIAKSVMQVHWVDPETGEIVNRPVKRAAFLEYFANRSPCLIGMESCSGSQHWARRLIEMGHRVKLMPAKFVKAFNIRNKNDAADARAIWMATQMDSKEVAVKTEAQQAVLALHRMRQQLVKFRTMQINNLRGLLTEYGEVMGVGRAALDKAIVGVLEKLSGRLPAILIDTLREQWKGLEDLDRQIGQIERRLQEWMKDDQAAKLIAAIPGIGLLTATAAVATMGHAKTFKSGREFAAWLGLVPAQTGSGGKIELQGISKRGDTYLRTLLVHGARSIIYRVKDPGPWVTQMKQRRPLNVVIVAMANKLARIIWAILAHQLPYKKDYESVRPT

SEQ ID NO: 206717 - protein, 347 aa, unidentified
MSITMIGLDTAKSVFQVHAVDEAGKVAIRRKLRRSELIPFFEKQEACTVVMEACGAAHHWARVLTGLGHDVKLIAPEAVRPFVKKGKKNDAADAAAICEAASRPDVTFVPIKSLEQQGILALHSARSLLVKQQTMLANAIRGLAAEFGLIAPQGIGKLGELMALVEADEAFPEKARQAVRGLLDQRRWLAESTETFEAEIVAHARHDETARRLATIPGIGPITASLIAATVADIGAFKSARHFAAWLGLVPRQHSTGGKTRLGRITKTGNREIRRLLVLGATSMIYRAEAWNSAAGAWVRKILERRPARLATVALANKMARIAWAVMTRKEVYHAKGRVAAVAAVAA

SEQ ID NO: 206718 - protein, 343 aa, unidentified
MQVSTIGVDLAKNVFQVHGVDSAGKVVITRQLRRKQVIDFFSKIPACLVGMEACGTAHHWAREVSKLGHIVRLMPPSYVKGYVKRSKNDAADAAAICEAVTRPSMRFVPIKSADQQALLMLHRTRDLLIRQRTQLINALRSHLAEFGLVAATGREGLAQLAAIITDESNREALPSAMKQALQAIVDQLAALELQIGTLDRAIHAHHRANDMSCRLETVPGIGVIGATAIASTVTDPNDFKSGRDFAAWIGLVPRQHSTGGKERLGGISKQGDRYLRRLLVIGATAVVRHARQHPQKHPWIMRLLARKPAKLVAVAVANKMARIAWAIMAKGGCYRAPELAAAA

SEQ ID NO: 206719 - protein, 355 aa, unidentified
MKEYSMIVGLDLGDTYIRYCALDAEGEVLSEGRIRTTEKGLRGHFERLEPCLVALETGTHTWWTARLLSELGHEVVVANTRRVRAISHNERKSDRADAEMLARLARTDRELLHPVRMRGGQAQTDLAMLKARDALVRARTKLINTVRGLLKSFGTVLPKCSAHAFADKVRDSVPAEHKDALAALLDHIGTLTESIDEYDAKLEAMVMEKYPEAQLLRDIPGVGPLTSLGFVLVVDEPMRFENSRDIGPYLGLTPRRDQSGDCDPQLGITKAGNGFMRRLLVCAAQHIMAHESADGDLRRWAWKLAGGEGSKDKRRKKRAVVALARKLAVVMLSLWKNGACYEPFRGETSTPEATP

SEQ ID NO: 206720 - protein, 362 aa, unidentified
MTFFIGVDLHKTQFTVHVRTDEMTETLKQIRQYKTDKSGYAEFIERIQAYRESGACVKIGVESTGNTRFFKHQVEKAGAEVTVINTLKFKVINESAKKTDKHDAATISEFLAKDMLPESYLCSKETENIRRLLKSRERLVHSIVGQKNEVHALLVSMGLKDEQRSLQSKKGRQKILDVLESNNDYVLEAQSVKLMVEIISQMEAAVKVIEKQLSELTKDDQMVNRLLTIRGCGKITAWTIRAYTEDISRFSSAKKYAAFCGLVPWVSDSNETIRHGKITKRGPQELRVSFVQMVMGIRRCKDTANWRIMQRYDYMKTHKGSGKSIIAAARKLAEIVWAMLSNNNDFDREKMYGKYKPTPLAV

SEQ ID NO: 206721 - protein, 368 aa, unidentified
MPSTNLQNSVDFSGQKFYVGLDVHKKSWSVTVRSLGIQVAHFTQPPSAEALVATLKKKFPGGIFFSAYEAGFCGTVSHEQICKLGIDNIIVHAADIPLTDKEKKNRTDLHDSRSIAQRLEKNDLHGIHVLSREQQELRSLFRLRESKVQDVTRANNRLKGFLMYFGIEIPCTISQKEFLSKKVLEWLDNLELASEAGAISLKQHLETLRYQRTKLYQITKLLRNQIQTIHDQAYLRLLTVPGIGGVVAMGFLAEIADFSRFDDPDNYCSYLGLMPWNYSSGESIRTKGIQPRCNKHLRPLIIQASWTAIRHAPELLAYYSKHAAKNNKHAITKVARRLALIARGVVLKNQDYQADYLQKNKKQQKEVQ

SEQ ID NO: 206722 - protein, 457 aa, unidentified
MHQESAVFVGLDASTLKISVALAEDGRQGEVRFLGDIDHTPEAVRRLVTKLAGQYRRRLFCSEAGPTGYGLQRQISALGHDCAVVAPSLIPKRPGERVKTNRRDALTLARLHRAGELTAIWVPDPGHEAVRDLVRARDAAMEDLREKRQPLQAFLLRHGRIYPGLRPWTQVHARWLSNLSFAHPAQYLVLREYRQAIEDAEARLERLTQQVSEVVSSWSMAPVVEAYQAMRGVAFLTAVTFVAEIGDVRRFETPRQLMASLGLVPSERSTGEQVRRGRITKAGNPRARRVLIEGAWTYRYPARLSRPLQVRQESLPKTVRAIAWKAQLRLCARYRRLMATARPWSRQRSPAKWQPFSGRSVTRLSRALPEVERAPRRGGGSDQLGSTKAVAQRRRQGLGGDPSKEVWGRCPSLTPAGRSRQPRTNTRKCGDQPAHQSLLNRRLDGPVSGTAQPLHSA

SEQ ID NO: 206723 - protein, 458 aa, unidentified
MYRELIPLRQALSLELKANLPPAMPGLDLEHLLQAYLNQLTMYTGTDVADQTFSLFAVDAAGNELGHLLDVPNTPAGFEVAWAWLEDLRCQHHLRITLLAVETTGVYYWAWWDFLAGRPNLARVLYNPRTTDSMTDVLSKKVRNELVDAYALAEQARLGGTPEVILTEDPDLLSARFCSRAARDLAQQINRKKNQLRALLRAYNPALGQVFPEAKLHHPAVYALLQHYIFPDEFVTAGVDAITTILSQHCRTAFGPQHARQLVALCAQTLTHPIGRPPIHQRVQQLTRDILSDQQHQQDFLHTGYALIQHRSEAQLLQTTSGAGISNTLALVSEIGDFCRFPDGEHMASFLGLTTSKHISGTTLFQSKHITKQGSPNGRYAAINLAHHLTRYVPKYQQMYERIKNRKPPHKGHFVALVAVARDFVANVLYDMWRNQRPFFEQVEDYRAYRQAHPRSDD

SEQ ID NO: 206724 - protein, 366 aa, unidentified
MIVIGADTHKATHALVAVDAGTGRIRGDREIKAEEPGHLAAVRWARELDDDRAWAIEDCRHVSRRFEQALLAAGERVVRVPPHRMGASRKGEREPGKSDEIDALAVARAVVKDGVECFPVAYLNDQSMEIRLLFDHRADLVAERTRIVNRLRWHLLELSPELERSCKRGSLSRSRPLGRVERGLRKLPAGARVRVAREQVRELRRLSREIDALHCELGALVRAHRPQLLAELGCGALTAAILIGRTAGNERFRSEASFALQSGTAPIPCSSGKSIQHRLNRGGDRHLNHALHIIAITRAQRDPATKEYLDRKEAEGKTPKGALRALKRHLARHFHRLLAEPAADQQRAAVDPNSTGVAPSPMVCIS

SEQ ID NO: 206725 - protein, 464 aa, unidentified
MTIDKKQRNRKERKELARRLRSEDPGLEVVHPHAAGIDVGNSAHYVAVRPDRDSQPVRRFECFTADLHRLADWLQSCGVKTVALQSTGVYWIPLYDILEERGFEVYLVNARHTKNLPGRKSDVQESQWLLKLHTHGLLNNSFQPTSEIRVLRTYWRQRAEHARGIGTCILRMQKALTQMNLQLANVISDLSGVTGQKIVRAIVAGERDPRKLAELSDPRIHASKEEIAKSLEGNWRQDLLFVLHQEIAMYDIYQQRIAECDQQLQEHLSSFADSVPPPPKEGEPKKKKGKPYKNNPQFHLADELQRIAGVDLTRIDGIDVMVAQTLVSEVGLDMSRWKTEAHFASWLGLCPDNRISGDKVLSRGTRHVVNRAATSLRIAATTLLRSQTYLGAQYRRLRSKLGAPKAITAMAHRLARLVYRMLKYGQQYVDKGAEYYEQRNRQQQIEFLRKKAAQLGLQVTAAHP

SEQ ID NO: 206726 - protein, 478 aa, unidentified
MNNKIGQEKNQVINNNPIVKALSREEISRRIAEIQDSLKASTWKELETKGKFTKDDKLTFITDDMLIIGCDVGSETHYARAIDLRGRELSRTPFSFRNDSDGFQSAKQWALDLAARHQKKQIVLGLEPTGHYWFCLAAWMVSNGISVVQVNPYAVKQTKELEDNSQNKNDRKDPKLIANLVKDGNYGMPYLPEDVYAELRRLSRFKDQLSEDRIRVINRLHREMAIYFPEYKDAIGKIESAFALEVLKEAPFPEDILAIGADGLRDIWRRAGLKGRGYGRAGKIVSLASGSVGLAHGTQGGREAARWFAMELGRLNREMADIEEMLHSRCRDIPSASNVLEIRGIGENILSGILSEMGDISRFDDAKEIQKMSGLSLVSSSSGKHKGDTKISRRGRKRLRYWLFQAARSSVAYADEFKALHIYYTTRKENPLKKMQSLIVIACKLLRIIYMLLRTGRSYDPSRMLSDIHRPAEKTSAA

SEQ ID NO: 206727 - protein, 351 aa, unidentified
MIVLGADMHKRSHTIAAVTAGTGELLGEQTVPAGAKGGAVLLRWARGLGAERVWALEDCRHVSGSLERFLIERGERVLRVHSKLMSASRRQARGRGKSDSIDALAVARAALREGLDMLPAAHLDGPELDLRLLVDHRERLVRARVAVNNTLQWHLHDLWPELQLPGSSLFHGNWGPRIARRLARAEQTTRVRIARDELRRIRELSQTIKTLEAEIADLVAHIAPHLLAEPGFGPLTAAKLVGEIAGASRFASDAKLARTAGVAPIPVSSGKTNRHRLDRGGNRQINATIHRIAVTRLRCHPETQDYIARKRAEGKSTKEAIRCLKRHLTRRIWHLLQPPNPGPGHPHPSPS

SEQ ID NO: 206728 - protein, 387 aa, unidentified
MPQLNDLSRSLIALDQNSTIIAVVELSHSSWLVGGVVPGIERQPHKKLEPSPERLLALLHRWRDEAVRAGSTITRIALAFEAGRDGFWLARWLAARGVEAHVIHASSLAVSREHRRAKTDRLDTELLKRGFLGWLRGERGHCSMARVPTIAEEDAKRPNRERDCLVGERTRIVNRIKSTLARLGIRNFKPTLRKAADRLATVHTPEGMPLPPNTLAELQRDMARLGVVISQIRQIEEARQKRLDQQHETGPHAMVRLLARIVGVGVETADMLVHEVLSRPMRDRRAVARYAGLTGSPDESGVQRREQGLARAGNARVRRGMIQLAWRFLMFQKESALTLWYRARTADSRRGTRKTMIVALARKLIIALWRFVTTGEPLEGVVLRPAT

SEQ ID NO: 206729 - protein, 347 aa, unidentified
MNVTTVGIDLAKLVFQVHGVDGHGKAVIRKQLKRTEVAKFFANLPACLIGMEACSSAHYWARKLIELGHTVKLMAPQFVKPYVKTNKNDARDAEAICEAVTRPNMRFVPIKNVEQQVLLGLHRARQGFVKARTAQANQIRGLLAEFGIVMPKGARFIAQQMPGILEDAENDLPHRSRELFAQLLTHFRDLDRQMDELGRQIKEWHRQNEQSRRLEKIPGLGPLSASALVASVGDAKTFRNGRQFAAWLGLVPRQRSSGGKDQLLGISKRGDTYLRTLLIHGARSVLFSLKRRGEPATGWLMRVAERRNPNIAAVALANKNARIIWALLAHGREYQPGYVSSSIAVAS

SEQ ID NO: 206730 - protein, 366 aa, unidentified
MASLPPGPGVVHVGMDTSMREIVCGVLRPGMEVPAVDRIPNDEESVRRLIGKLGDRRLLSVCYEAGPSGYELHRLITSMGVACEVIAPSMVPKGASDRVKTDRRDAVRLTLALRAGMLTPVRVPSPPEEAVRDLVRARGDLLDDRKRTQQRLNALLLRHGRTWRGGAKWTYAHRAWVDRQEFSEPALQDVLDAYRGALEAREAELRAAGARLSAWAGREPLAPAVARLGAYRGIAELTALTLAAEVVDWHRFPTARAFMGFTGLIPSEYSSGTRTRRGSITKAGPEGVRTALVEAAWSYRYRPAIGALLRRRQAGADPGTLARSWKAQQRLNATWKKMTARGKPSGVVVTAVARELAGFVWAEMTS

SEQ ID NO: 206731 - protein, 402 aa, unidentified
MFCGWDWGSTVHGVCLIDDQGVLVKSWMVQHTEDQLVSIFRELAQLVGGDVGQVPIAIERGEGLVVGLIAGAGHPVWMVEPAAFKAARPRWGSAGAKSDLGDAFMLADYARTDGHRLRRVEPVERATRELAALVRARTTLVEARTAASNQLWAILAEHWPGAAMVFQKLTSQIALAFLTDYPTPQAAALVGEGRMAQFCRRHSYRGGKSPAELVRRLRAAPASANPIAPKILEAIVRASTAQIRLLNTEITRLEADIADALAAHPKTPLLQTLPRVATVSLAALIAEIGPLLERCENPEQVAAMCGAAPVTRASGKSRAVSFRYTANKPARVAITGFADNSRHSSAWASDAYRRARARGARHPHAVRILARSWVRVIWACWTTDTIYDPSRHRTEQLLTAAS

SEQ ID NO: 206732 - protein, 343 aa, unidentified
MNEVTTIGLDLAKNVFQVHGVDEAGEVVIAKRLRRRQVIPFFERLPVCLIGMEACATSHHWARELGVLGHEVRIMPAGYVKPYVKRSKNDAADAAAICEAVTRPTMRFVAVKSREQQSLLMVHRSRSLLIRQRTMLVNAIRAHLAELGIVAPVGLRGLKVLLAVICDPKDERLPSLARTCLESLAAALMTVEQEAASAERRIHAWHRSNEASRRLETIPGIGLIIATALIASVADPSIFKSGREMAAWIGLVPKQNSTGGKQRLGRISKQGDHYLRWRLVAGAMAVIRHGRKTNFAARPWLADLVEHKPAKVAAVALANRIARTAWVLLAKGGTYRQPGMIMP

SEQ ID NO: 206733 - protein, 423 aa, unidentified
MKSSGTQTFRAYVGIDWADTKHDFCLQERGSDRREFGCIAHQVECIDEWAKSLQQRFGTPVAIALELAKGPIVYALQKYDFLVLFPINPLTLAKYREAFKPSRAKDDPSDAELALDLLIRHPERFAALRPQSVGMRTLISLTERRRELVNDKIRLTNRLTHTLKEYYPQALDWFDQHDTVLFCDFLTRWPTPLQARRAHQASLKAFFHAHNAHRPQIIAARLKAIKAAVPLTQDPGVIVPCRLHVMVLIEQLRLALQAIEQFDRHIAELAPTLPDYRLFAGLPGAGPHLAPRLLVAFGEDRERFQRAEELQKYAGIAPVTERSGKKTWVHWRWQCPTFLRQTFIEWAGQTINKSFWAGAYYYQQRARGSTYQAAVRALAFKWIRILYSCWKTRTLYDESKYLNALKRRQSPLLNNLVPIPQNA

SEQ ID NO: 206734 - protein, 505 aa, unidentified
MTAAATRRQPASSTSPSGKQAQAQAQRRAYNRRKTRAKDKSEALRQKEAAQMEALPMQHSHAAGIDIGSRSHWVCVGFTTEANSSLIQEFPAHTAGLKAIAAFLREHQVNTIALESTGIYWIPLYELLQAEGFEVLLVDPSYSHQLRGRPKTDRRDCQWIYRLHSVGLLAAAFRPDEKTCQLRAYLRQRGNVIRQASQHVQHLQKALEQMNLKLTEILSDITGVTGRAIILAILRGTRAPEKLAKYRDKQCKASAAEIAQALTGSYREEHLFELKQAYEAWQFSLKQVEKVDEQIALQLKRMKCDRALPPLKAKARPKRRVNSPRFDVRTALYYVVGLDLTEIEGISDLTALTLISEIGPGVSQFATVKKFCSWLGLCPNWKKTGGRVKSSRTRRGVNRAAQALRLAAQSLHHSQGALGGFLRRMKGRLGAQAAVTATAHKLARIVYLALKHGMTYVRQSQEEYEAQMKEKQIKALRRKARQLGLEIIEKTSGSVATAEAASAQG

SEQ ID NO: 206735 - protein, 342 aa, unidentified
MENIMIGVDLAKNVFQVHGTLRTGEVQFRKKLTRAQFPVFLAQQEPCMVIFEACGSAHYWARKMEELGHEVKLIAPQYVRPFVKRQKNDTADAEAIVIAARQPEMRFVEPKTVEQQSRASIFRGRERLVHQRTADVNALRALLYEHGHVFPVGMRNLNRMTALVQNEASDLPALIREECLDLLAQITEKTVRITERTKKLATLAAQSDKARQLQTMPGVGPLTAIAVEAFAPDMAQFKAGRDFAAWLGLVPRQHSSGGKERLGRMTKAGQADIRRLLIIGAMSRLNWLGKRTIAEGGWLSRMLARKPKMLVAIALANKMARQIWGMLTKNEDYRDSALANVA

SEQ ID NO: 206736 - protein, 400 aa, unidentified
MECVFGIDVSKENANVAVLVDNVVIKQFKIGLDRLGFSLLSDELNSFNAPLIIYEATAMYSRRLRAFLQRDGWKYTELNPLAAKKVMEEFRHTKTDALDAVGLARAMIKNHFRPTYQESPVYTELHDLERTYQQFNKDIVTNKNRLHRALQLTFPEIEHFMSSTDGVLYWHIVQRFPHPAIVLSHEENELTEIILTETSKKIGLKRAMKLANRLLALAQNSAPAKEPQSHAVRAVITLAKEVERINQLKAQIIVEMTTLGENLSEVPLLVSIPGIGIKTALCLIAELGDVRRFHSANAINAYIGIDLIRYESGQYEAKMHIRKRGNPYARKILYRAILNIISVSQYQPTLISANYKRKKQSAQSHGTKKIAIAAMSQFNRLMHHLILNNELYDSTTFMPE

SEQ ID NO: 206737 - protein, 326 aa, unidentified
MEHELHYIGIDTAKEKLDVDVLRPDGRHRTKKFANTTKGHDELVSWLKGHKIDHAHICIEATGTYMEPVAERLYDAGYIVSVINPALGKAFAQSEGLRNKTDTVDARMLAEFCRQKRPAAWEAPHPLERALRALVVRHQALTDMHTQELNRTETAREVQRPSIDAHLLWLEAELKRLEKQIKDLTDDDPDMKHRRKLLESIPGIGEKTSAVLLAYIGLKDRFAHARQFAAFAGLTPRRYESGSSVRGASRLSKAGHVSLRRALYMPAMVATSKTEWGRAFRDRLANNGKKGKVILGAMMRKLAQVAYGVLKSGVPFDASRHNLVAA

SEQ ID NO: 206738 - protein, 482 aa, unidentified
MAKRKMSTFERLRSGKMNRKERKEWQQRLCAEDAGLEVVHPDAAGIDVGNASHFVAVPPDRDEPPVREFGSWTADLRRMAEWLKRCKIRTVAMQSTGVYWVALQEILEHEGFEVYLVNARGTKNLPGRKSDVQECQWLMKLHTYGLLRNSFHPPEQIRAVRTIWRQRDRLVKEAGREVQQMQKALTTMNVQLANAISDVSGLTGQAIIRAILQGERDPQQLAKLRDWRIAASEAEIAHSLEGNWREDVLFELQQVVDAYDFHQKQIAACDVQLQRYLSAVPMRSRLGAGEPSTADAPSEKPKKQRKHKWQKNQPVFDLAVELQRTMGVDMTAIDGVDVMTTQVILSELGPDLSMSFPSESHFTSWLELAPRRDVSGGKVIRQKSRKSNNRVATALRMAAQSLWRSDSYLGARYRHLKARLGGQKAIKAMARYLACLIYRLLTKGQAYVDRGAAHFASKRTERELLALQRKAAGLGMQLVAIS

SEQ ID NO: 206739 - protein, 413 aa, unidentified
MACKVHIDDLVVIQPDAAGIDIGSESHGVSVPADRDGEAVREFSALTHGLLALADWLEKCGIRRVAMESTGVYWIPLYELLCDRGFEVAWVDGRKVKHVSGRKSAPIDCRWLRKLHSCGLLQGAFRPEQGVCELRAIVRHRGRRIEEAARYVPRMQKALTEMHLKLDRVLSDIAGATGMAIIGAIVAGERDPAIVAQHRDKRCQRSVEEITRARTGTWRAEHLYVLAQALSTYDHFQAQVRAGDAEIERRLAQWPTRTDAPAPAQSKRKPQRNPPQIDLHTALHHLLGVDIAGMPGMDPYTVLRVLSEVGTPLERFESVKAFAARLGLCPGTRISGGKVLCGKTARITHRAARAFRLAAQAVGQTGYRPRGFLPTPQGPPGRPQSADRHRPQNGSPVLHLDQARPGLHRTRRR

SEQ ID NO: 206740 - protein, 400 aa, unidentified
MPHHTIVIKTEWEIGTHYRLDFPRQNQTEVIMTFFIGVDLHKTQFTVHVRTEEESESLDQIKQYPTTAAGYAEFLARIAAYKATGSDVKIGVESTGNTRFFKNQVEKAGAEVTVINTLKFKVINESAKKTDKHDASTISEFLSKDMLPESYLCGKETENLRRLLKSRERLVRSTVGQKNEIHALLVSLGLSDELRSLQSKKGRRKVLDTLESNNDYVLEAQSVKLMFEIIERIEESVKSIEKQLVELTKEDEMVNRLLTIRGCGKITAWTIRAYTEDISRFASAKKYAAFCGLVPWVQDSNETIHHGKITKRGPQELRVSFVQLVMGIRRCKDTSEWRMMQRYEYMKKNKGSGKSIVAAARKMAEIVWAMLSDKQDFDSAKMIGRYKPMTLADEALSAMN

SEQ ID NO: 206741 - protein, 413 aa, unidentified
MDVIVERCAGLDVGKDEVVACVRTPGAGGKGRHAELGVFATFTSSLEDLADWLSGNGVVEVVMEATGPYWKPIWYVLEDRGFDLKLVNAKHVKMVPGHKTDMADAAWLAELLEHGLLRGSFVPPPAIRELRDLTRYRKRLIQTHAAEQQRAQKTLEDAGIKLDSVASDIFGVSGRQMLSALIAGERDPETLAELAKGRLRAKIPTLREALRGRFGEHHATILKITMDHVAHLEDAIASLDAEVDRVMDPFSAARDHLDTITGVGKRSAECIIAEIGVDMGVFPTAAHLASWAGRCPGNNITGGKRRSGTTNKGNRWLGEILNQCAIAASHTRDTYLSAQYWRLARRIGKKKAAVAVGHSILVICWHLLTNECDYQDLGGDWFTRRTDTDKRRNHLIRQLHDLGYGVTLTNLAA

SEQ ID NO: 206742 - protein, 391 aa, unidentified
MYYCGIDVGKNSHTVLVMNERGEVTRPAQRIENDREGLNQLLGLLSSYAGQIFIGLEATGHYWLALFEALTRHNYPLVVLNPMQVRAYRKIDIRKRKTDRQDAYWIADFVRFAQPSPSSLDIPVYLQLRELSRFRFRLTQQIGDCKRKIICILDRVFPEYKRLFSDVFLRSSRQLLQGAVTAEDFAGLDMTELEQVLNRVSRGRFGYEQAKAIQEAAQKSIGVSFLTDAVHIEMSCLLKQTGLLEQQQKTVERKLEEMMAQIPQYITTIPGVGLATGAMLLAEIGDIHRFESLEKLVAYAGIDASVYQTGLFEGDQMHMSKRGSHYLRYALWQAASASLLHNPEMKSYYDKKRGEGKPHGVAMGAVCHKLLGRVYVILKECRPYVIYPQKN

SEQ ID NO: 206743 - protein, 413 aa, unidentified
MLMPKIVYPVCCGIDVHKSFVMACIAATDEKGVTTYSKPKRFSTFTNELRRLSAWLAANNCRDVCMESTGKYWIPVWNILEPTCNLVLAHPKYLKAIKGKKTDKRDAKWIADIFKHDMLNGSFIPPADIRQLRDLVRYRNKLTSYMTGEKNRAQNCLTVSNIKLDDVFSDVFGKAAGAITEKLLESNEPFDVTPYLTKGIKASPEEIQAAVDGVMCAEQAEKLRIIRSHMKSLELCKTNLESAILTIAEQFLTQINLVLTVPGISTFSAIAIIGEIGVDMTVFQTSRHLCSWAGLTPQNDSSAGKKKTTRISRAGVYIKPLLVQCANAAIKSNKHPEIRNRYNAIKKRRGHKKAIIAIARMLLTAVYNILKRNEPYNAELYNKSNLPPTNRELTLEQAIFIVQRQGYIVAASP

SEQ ID NO: 206744 - protein, 378 aa, unidentified
MAEITRALIARVGVDLAKNVIQVHGVDAAGRRVVSRSIRREQFMAWCAQLPTGSVVAMEACSSAHHWARRLRAAGVDARLIAAHFVSPYRMEGKSGKNDATDAAAICEAASRPSMRFVPVKTAQAQGVMSLHRVREGFKEERTACINRIRGVLAEFGLVFGKSPKALRARLADVLEDADNELDGRARLVVQRAFEHWRHLDEQMTWCDRQVGQHVRGSEQARRAAGVTGIGELGASALVAGVGEFEQFRSGAQFGAWLGIVPRQNSSGGKASLGRITKRGDDYLRTLLIQGAKSAVMSAHRRDDAISRWLVQLIARVGWQKACVAMANKNARILWAVMTRQARYDPSHVSVKPQAKVPVAERLVATTPMPAGLIGCPA

SEQ ID NO: 206745 - protein, 426 aa, unidentified
MYIATQKLLHERGFIMNHPKMQYTYVGVDSHKNTHTAVFIDCFFEKLGELQFGNLPSSFDEFMQQAQTYLMPGTRFMFGLEDCTSYGRILMAWLKQGGYDVKHVNATLVAQERKGQTTTQKTDSIDAECAARVLLSRLSSLPDASQDDKYWTLRSLVARRSLLVRHRAATKHYLHSLLTQQYPNYRTFFDNIDCRTSLAFFERYPSPGLLRDTTVEELAAFLEIPSNRTVGMAKAKQILANLHDTATQYQDVRDSVIKSAIRQIQFNTAQVEELEQRIESFLAEFNCTLTSMVGIDTVSAAQILSCIGDIKKFSSPAKLARYAGIAPVTYASGKRDTQFANQRGDRELNSLFFWLAVRLCNATGSNQRVINSFFYDYYHRKMSEGKTKRQAIKCVERRLVNIIWTMLTNGEEYVNPPAYNLITKLE

SEQ ID NO: 206746 - protein, 412 aa, unidentified
MEVMYPRCAGLDVHKETVVACVRIASGGEASSSVRTFATTTAGLIELGEWLEENGCTHVAMEATGVYWKPVWQVLADSSFELILANAAHVKNVPGRKTDVNDAMWLAELLAHGLVRASFVPEPAIQELRALLRTRKQLVREKASHVQRVQKTLEEANIKIESVLSDVMGRSGRAIIQALIEGETDPAKLAALAHWKVRASAATLREALRGRIKRHHRFLLQLHMQQIDALDAAIAELDREVDTGLACFRDAVERLSTIPGISQLSAQVIVSEIGTDMSRFATDAHLRSWAGLCPRSDQSAGKRRSTRLRKGAPWLKAMLVQCAWAATRSKGTYLHAQYLRLRSRRGPKKAICAVAASILTAAYHMLKDGTFYNDLGSAHFDRRRPETQARRLVKRLADLGFSVQLKPVASAS

SEQ ID NO: 206747 - protein, 400 aa, unidentified
MPYHGGLDWGGAAHAVCVVDATGRIVARIEARHDAAGLADMLARLKRVAPPAELPIAIERPSGLIVDALVEAGHPVIPIHPNVVKACRPRYRAAGGKSDPGDAYMLADILRTDGHRFRPLMPLSDDIRALRALVRARDDLVSQRVTLANQLRSLLEGFWPGAATVFAAIDSPIALAFVSRYPTPDSASRLGEKRMASFMAQHAYSGRRTPAELLARLRAAPTGLASNAEAKAKGEVVRALASLLERLVGEIAKLSSRVEHAVAELPDGKIVMSFPRAGRINAAQILAELGDVRERFPTEDQFAAEAGVAPVTHASGKSRGVVFRWACNKNLRQAITCFADNSRHASSWAADIYARARQRGCKHAHAVRILARAWVRVLWRAWQDGTGYDPAKHKAATRIA

SEQ ID NO: 206748 - protein, 350 aa, unidentified
MTMLADLVEVVIGVDTHSQTHTAAVLHARTGAVLARATVGADPDGYAALVELADQHCGLRAWAMEGTGGYGAGLARHLAAGDELVVELDRPKRPARRAGAKSDPIDAERAARDALARTQLAQPKTGAERAALQMLLTARRAAVEAASTGQRQLLAMVITAPEPVRARFRGQTTRAMIDTAARLRPGASSGNVETVTALTVLHTLAGRIRFLQAEALDHEKAIRAIVRSWRPDLLELTGVGPIVAATVLTAWSHPGRCRNDAAFAMLAGAAPIPASSGKTVRYRLNRCGDRQLNRALHTVVLSRLQRDERTRAYADRRRAEGRTDREIKRCLKRYIARELYRRLESPPTAA

SEQ ID NO: 206749 - protein, 341 aa, unidentified
MSAIGIDTHKDTLAACVVDTLGMPRAECTFDNDPPGHRALLAWAQAADPDAVIGVEGSASFGAPAARFLIAAGCSVREVPPQLSRRERIRTRRAGKSDPGDALAIARVTLRESDLPPVRLADRSLDIQLLVGAREDVVTEMTRVRNRLHADLRILVPGYGAKASNLATVQHQHTVARLLGSRVGVQAELARGRLRRLRALAGEEHALAAQIGVRVDGHPLLTLPGAGSIVTAMLIGEVGDIRRFRSADAFAALAGVAPIPASSGQTQRMRLNRGGNRQLNRALYTIALSQAFHHPPAKAYIARKRAEGKTWREALRALKRQLVRTVFSLLQAGAGSLELAA

SEQ ID NO: 206750 - protein, 363 aa, unidentified
MKCNLKTEQQIVAASDSESTIGVDLGDRWSRYCIVDSAGTVAKEDRVRTTPEALEERFRKIPSSRVVIEAGVHSPWVSRLLQKLGHQVIVANARKVRLIYESNQKNDRVDARMLAKLGRVDVSLLAPVLHRSAEAQTDLIAVRGRDALVAARTQLINAVRGVVKSTGARLPASTTSAFATKVLPLIPSLLKVALTPLLKSIQHLSEQIHRCDQRVEELAEKKYPATKLLRQVKGVGPLISLAYVLTLENPARFQKSRMVGSYLGLQPKQSQSGATAPQLGISKAGNSLLRRLLVQAAQYILGPLAADSRIRRWGLELACRGGKNSKKRAVIAVARKLAVLLHKLWVTGEVYEPLYGIPQLQTI

SEQ ID NO: 206751 - protein, 354 aa, unidentified
MQNDRQSSETVILGVDTHLDIHVGAVISQAGKLLGTHIIQTNQAGYLELLDWARSFGSLERAGIEGTGTYGAALTRYLIKNSIYVVEVNRPDRSKRRLEGKSDPLDAENAARTMLSGSSKAIPKMQSGACEALRIISVARRSAVKACTQAINQLRALLVSAPQDVRDKLWKSKPHECVTACINSEVSEHSPLRIALCSTLRSLAKRWMALTEELNELDESLDKLTRKYASNLRSQFGVGPQTAATLLAVAGDNPERLKNEAALASLCGVNPLPASSGKTVRHRLNRGGSREANNALWTIALVRMRSDPRTRIYVDRRTGEGLSTKEILRCLKRYIVRELYPLILSDLAYANRRS

SEQ ID NO: 206752 - protein, 342 aa, unidentified
MKIIGCDFHPSFQQIAMVDMPTGEYTERKLTPEEARQFYAKLKGPVLVGMEACGNTLWFERLLAALGIELWLGDAGKIRAMEVRKQKTDRRDAQLLLQLLLENRFPRVWVPSVEQRDVRQLLLHRHKLVAMRRQVKNELQHLALNQGVQQKRKLWSAAGRQRLEELPLEGWTKQRRQDSLELLDELNRRVAKLDVAAQQEADRDAVAKLLQTHPGVGPITALAFSLTLGEIKRFARSRQVVSYLGLNPAEHSSGGRQHLGGISKQGNPMLRSLLVEAGQSAARSVPELKRAYQRLKHRKHSGVGKVMVARKLAVRLFWIWKTQQPYTAARTQGSPSHHVVAV

SEQ ID NO: 206753 - protein, 480 aa, unidentified
MTTSAIAVSTDQQNTPVRTERVYVGIYLAYREHVVAATPLQAFNPQRQPEGWKRVKTLKFGSDAAGYQRLQRYLERCSADPTDFLVLLEPTGGYYGLSLILYLLGKGYRILQVDNRTVKEYREKVFGLETKTDDVDARLMARMGFLHEMVGEEFSIQPVYLVDGDAAALRVIVRDLEKLTREITRRRNQLQQIAAATFPEFKTFFRGSTASFAARALLARFPTPQALAEAETDQVADVLRSANAYKHAKRATELQELARSSAGALMLSHHQWRQGWIIRQLDGLEAARGELLDQIRQLLATHPYTPIIESLPIKSPIWTATLIAAIGDIRRFNDHRAFKRYLGWTPEVAKSGSSTDKSKLARSGVRIARGALGQMALILLAPSVRNTAFREDYQRMIERHVRPATAVGHLAGKLSTVLYGMLRTMAPYDEAKHRREMGLPPLNDVNRPAEAPLEIERDLVDQIELQDEQHADGAVPADSA

SEQ ID NO: 206754 - protein, 344 aa, unidentified
MKITTTGIDLAKTMFQVHGVDERGKAVLRKQLKRKDVLSFFANLEPCLVGMEACGSAHYWARKLSALGHTVRLMAPQFVKPYVKTNQSDRNDAEAICEAVARPNMRFVAVKTAPMQAVLALHRARQGFVRARTAQANQMRGLLAEFGIVIPKGIGHIAKRLPEILEDGENALPGMMRELLERLGENLKDMDRQVGELERQIVLWHRENEASRKLEAIAGIGALSASALVATVGDAKNFKNARQLPALLGMVPRHEGTGGNVKLGGISKRGDVYLRTMLIHGARAVIAHIERKPDHADAWLKKLLARRNKNVAAVALAVKNARIAWALLAHERSYQDYVATRKAA

SEQ ID NO: 206755 - protein, 385 aa, unidentified
MIYIGIDISKYKHDCFIATKSSLSFSFENNQSGFKTLLDHFQCLQKQDMIIGLEATGHYGDNLKSFLTSHGYTFMEVNPFLVKKFSDSKSLRKIKTDKKDAKLIAEFMSTVDYKAYHHQSYHISALKSLTRWRAKLISFRTSQYNMMTKTLDIIFPEFKPFMNEQGFSDTSLYILKRFTTPAKIAKMNDSHYDTLRKRSMGKFSYPKFTKLRSLASETVGISKPFQVAKLKSLISYVEKLNEDIQHLESEITSIMKNYPTYFQSIKGMGIITAAIILAEYGEISLFDNPSQMVSYAGLDSSIHQSGTMASTGKLVKRGSKYLRSALINVTMTVMIYNPVFYQYYDTKRKQGKHHRVACVHLAKKLIRIIHHLEKTQTMFNPQLLN

SEQ ID NO: 206756 - protein, 342 aa, unidentified
MGQVTTIGVDIAKSVFQVHGVDATGEVILRRRLTRARVVPFFAKLAPCLVGIEACATSYHWARELRKLGHEVRLMPPSYVKAYVKRQKNDTADAEAICEAVTRPTMRFVEVKSPEQQSIMVVHGTRTMLMRQRIQLSNAIRGHMAEFGVVAPVGREGLLTLTDTLHDEADDRVPAEARHCLQMLAAQLRLVNAQILENDRRIRLSARATDVGRRLMGIPGVGPVLASAFVATVPDPHAFRSGRNLAAWIGLVPRQNSSGGKERLGGITKQGNRYLRQLLFVGAMAVIRYAERHGTLRPWLVRLLARRTTKIAAAALANKTARMVWAIMTSGQSYREPELRTA

SEQ ID NO: 206757 - protein, 412 aa, unidentified
MNQSYSLFVGIDWATQEHTICVMDGAQKVLDQRTVEHSGSGLQQLCDVLAKLSGGNPSAVAVAIEVPRGAVVECLVERGYVVYSLNPKQMDRFRDRYSVAGAKDDRRDALVLADALRTDLHLFHRVQLDDPSIIRLRELSRAEQDIQREQTRAAHQLRELLNRYYPQMLELCPAVDEPWFWDLLVLAPVPGILPARSKIQKLLSANRIRRLDADAVGAALRVPALQLAPGAAQATSEHVLLILPMLRLLRRQRQDLERRIEALLERMSVEGQFAEHRDVIILRSLPGVGRVVAATMLAEASQPLAERDYHALRCYSGTAPITHQSGKRKTVVMRRSCNLQLQNAIYHWSRVSTQCDPRSKQHYADLRAKGHSHGRALRGVADRLLALLIAMLRSGTVYDPGRHALAAAATPA

SEQ ID NO: 206758 - protein, 423 aa, unidentified
MHVSIAGGLPKVFGTFTSQLHELRDWLLGEGVHSIAMEATGVYWLSLYGVLEAAGLEVVMVNGRQTRNLPGRKTDMKDCQWGATLHAHGLLKAGFVPPAHIRKLQDYQRLRTDHITSAASHVQHMQKALERMNIKLHNVISSLMGVSGLAIVHAILDGERDPAKLLELCYSTIRHKKAKDVIEALRGTWEPEHLFALRQALQSWEHYHRQIAECDQQIQLLLQEITFNDTQGGGIGEKPKATAGKHPSANAPQISGLHSMLIDLCQGKDLSMLPAHTDYSVLQIISEVGTDLSKWPTEKHFTAWLGLAPGTSQSGKRKSNVKHSRSKVGRYFCIMARSLARSKDMALGGFYRRLAARRGGLIANIALARKLAVLFWRVMVKGTEFVEEGLAAYEAKFLEGKKRSLRRLARELGQTLSPIPVTV

SEQ ID NO: 206759 - protein, 316 aa, unidentified
MTNYIGVDVSKDSFDAHSTSLGSRQFSNDGTGFKLFKKWIGISAHVVMEASGPYYLRLADDLYRSGFLVSVINPLVIRRFCQMNLQRAKTDRKDAIAIAQFAHLTNPSVWSPAPEHLQQLLQMQSVMEQLTKQLTSTRNALEALHQHPHIYQGALKSLQQVERAQQQQIVQLEKEIMELTKLHYQAEFGSLVSIPGIGKKTAVLLILSTHGFGRFENVKQFVAYTGIAPRIFQSGKTINKKPKISKLGMADLRRSIFMCSLKAIKYNQACKNLFDRLRAKGKAAKVALMAVSHKLLRQAFALAKSKEIFQSELSLV

SEQ ID NO: 206760 - protein, 457 aa, unidentified
MKRQTKAVAEPTLPILNVNAAGLDIGSAEIWVAVPADRDPQPVRPFGTFTPDLHALAEWLKACRVETVVMESTGVYWIPIYEILDAQGFQVAVVNARHVKNVPGRKTDEKDCQWLQRLHTYGLLSASFRPDAEVVALRAYLRHRASLLEHRAAHIQHMQKALQQMNVQLTQVLSDITGETGLAIIRKIVGGDRDPVTLAQLRDPRCQHSEDEIAKALTGNYRPEHVFTLKQALALYDFYTQQVRECDSEIEKQFSVMKPRHDQNDLPALDLSDKRDSHSKNAPSYDARTLLYQLVGVDLVAISGLNESTVQSILSEIGTDMSKWPTVKHFCAWLGLAPHHDISGGKVLRSRVLKTHNRAGQAFRLAAQSASRSPRTSYGAFYRRVCGRLGPAQAIVATAHKIARAFYHMLKHRVAFRDLSAEEYEQRSRDREIANLRKKAARLGMSLIEQATQPATA

SEQ ID NO: 206761 - protein, 408 aa, unidentified
MQRYYLGVDWADKSHQLYVADQDGKKIKEMEVQQTADGLAEFGRWLDESRSKGIELWAAIEKPQGRIVDFLLDHGVVVYPVNPKALDRARDRFRMSQSKSDAFDAYVLATFLRTDHSHLRALEPDSAAGQELKMLTRDHQRLLRQKTRLLNQMKITLKEYYPRVLELFDDLETKIAMDFIKAYPTPQELSKVTRRQWKRFAKTDHHLSEARWQELWATINKPQITIPEHVVRAKAKLLLALVVQLEVAVKAVNRYAQEVEGFFADLPAAKIATTLPGAKSGTTMPMVWAELGDAKSRWNSFRHLQAESGTVPVTKASGKSRVVQFRFACNKHLRNAMYWFAFNSRTRCEWANKYYRDQRAKGHSAHQAIRALGAKWLKIIFTMWRDHKPYDENYHLASIARQTMRQAA

SEQ ID NO: 206762 - protein, 429 aa, unidentified
MRTESTPGARGPVFCGVDTHADSHWLCVLDWRGRKVLSRQFPADAAGYEALAGAIAAAGEPACVAMEGTSSYGAGLTRHLASLGMPVREALSPARTQRRRPGQGKCDESDAERAARAAMSGSKLGTPKSQDGWVDGVRCMLAARSGAVKARTSAINTARSLLTTAPEGLRSRFRGMAGPRLMEELPSVRAEGARGAALGALADLWAAARDAALDMERAIEASLEENCPALLAMYGCGPVSAAQLAVAAGDNPGRLRSEASFAAICGACPIPASSGKTVRHRLNRGGDRQANSALHEIARQRVMRDPETAEYAERARARGKSDREVMRCLKRYVAREAYRALMRPHEVRRPEDASGLVAARRAARVSQVRAASILGTSEKYISMLERGQRELKPIRRAYEAWVEAGLPLDWDRQAFEAERKMDSKKHLAK

SEQ ID NO: 206763 - protein, 351 aa, unidentified
MTAETIHVTGGIDTHSDTHHAAALDQVGRLLGTREFRANPAGYHQLLDWLASFGPITRIGVEGTGCYGAGVTRFLRRHHIHVIEVNRPDRRARRVRGKSDPFDAESAARRALAGEDQITPKDTTTIIEAIRVLRIARTGAVKSRTAAYNQLKDLIITAPDPLRETLRGKTLHRVALEAARLRPDISRLADPTQATKLALRTIAVRIAAHTTEIAALDTQLRKLVTAAAPRTLALLGVGTENAAQLLITAGGNPERLRSEASFAALCAASPIPASSGKTNRHRLNPAGDREANRALYMITLVRLRYCPDTQAYLQRRLTQGLTKQEAIRCIKRYVARQTYHTIRADLATTGP

SEQ ID NO: 206764 - protein, 356 aa, unidentified
MTSNSKYIGMDVHKESISIAVRNSAGKIVMESVIQTKASTILQFIDGLRGEVHITFEEGTWSAWLYDLLKPHVSKLVVCDPRRNALLKEGNQNDRVDARKLAELLQNNQLRPVYHGDHGLRAQKELVRSYLTITKDLSRVMTRVKAIYRSWAIPCSGTQVYSARHRAAWLEKIREPGVRRRAEIYYQELDGLRSLRREVRKDLLVESKKHQVWKRLRGIPSIGPIRAAVLLGIMQTAHRFRTKRQLWTYSGFGVEGHSSADHQVVNGQLQRKKKPIEIRELNKNCNHHLKNLFKSSAVLASSKPGPFQEFYAALVAKGMRPEMARLTLARKIATIVLIVWKRGVCFDANHLKPQTA

SEQ ID NO: 206765 - protein, 321 aa, unidentified
MTYVGIDVSKVTFVVAYSSVKTNKTRTFKNTVNGVHEFVQTISASEHNCVLEATGNYSALLVYLLSEAGITISLENPLKIKNFARVMLTVTKTDEIDARLIALYGEKMQPAPYKLRSDAILVLKQKRTVLRQLKKQLVATRNLKGSMEVLPFFDPKCKKTIEKTITFLEKQIKEMEEELASLAQGEYKKQMDLLTSIKGIGVTLAAPLIVATGRFSYFDNAKQLTRYLGLSPTYQQSGTSVNVKGHINRNGDSSLRSQLYVAAFSSLRCNTECKACFDRLRSNGKPGKVVVIAVANKLVRQAFAVVTQGKSYVDGFKAEKP

SEQ ID NO: 206766 - protein, 361 aa, unidentified
MIVVGVDCHKKTHTAVALDRATGAKLAELTVAARERGRERLVTWARTIDAKRSFALEDCRHVSGTLERYLLVSGEAVVRVPPKLIAGARRSSRSRGKSDPIDAEAVARAAIRLPDLPAARLEGPERDLRLLVDHRETGVRRRTRVQSRLRWLLHSIDPEIRVPPRALDRYVHLDRLEAHLAALVQTVEVSIARSLVGSCRELTREADAREREIGALVRELAPELLGLPGCAELTAAKIVGEVAGVSRFGSEAKLALHAGVAPLEVSSGERRRHRLNRSGNRQLNAALHRIAVTQMRIHEPARTYLERRQREGLSKREALRCLKRHLVKVIYRRLGEAEARRSLQPSRPTTEPMTDEMSAVA

SEQ ID NO: 206767 - protein, 317 aa, unidentified
MEPTPVFVGIDVAKTQLAVALHPAGEAWTVPTTPAGLAALVPRLQALGPALIVLEATGGLETATTAALAAAGLPVAVVNPRQARDFAKATGRLAKTDRVDAHGLAHFAAAVRPPVRPLPDPATQALAALVTRRQQLVDMLTAEQNRWAAALPAVRPRIQRHLTWLRRELAAVDTELGTAVRQSPVWRVKDDLLRSVPGVGPVLATKLLAGLPELGTLTRKQIAALVGVAPFPRDSGTSLRGRRIIWGGRAEIRRTLYMATLVGVRYNPVLQPFYQRLRAAGKLPKVALVACMRKLLTILNAMLKQRQPWAPREVAAA

SEQ ID NO: 206768 - protein, 366 aa, unidentified
MKKIAYVGVDYHIKSVTIAVMIEGEKDVNDTVHLKNDDKVIRKYLKKLATKFVIRICYEASAAGYVFQRKVWKWGYHCDVIAPSLIPKKPGDKRKNDYRDAVNLTGLYARDMLTVVHPPSEKEESIRSVIRCRISLKEAEKKVKQQINTFILGRGFNWSKSKWTEEHRRWLLKMELCDSHSQMVLEEYLGHLAYLGTRIQGLEKEIEKIAHSETYAPSVKKLVAFRGIGTLTAMVLIAEITDFRRFPNPRALMAFLGLVPSEDSSGERRGGGGITKAGNRRCRTFVIEAAKHCMKKPRISSKMRDALGRVSAREVNIAMKCMKRMHDRYWALTMKGKNRNKALTAAAREFVGFIWAMMQPEAEAYN

SEQ ID NO: 206769 - protein, 350 aa, unidentified
MRKPIFYVGIDIASTSFFAAAGRDNKGIWHLSVKPKRFENEYDSLPKFLSWMQENHILPNNSIICMEATGVYNEILAHFLFVNQYRLSIQSPLDVKRAFKPIGHKTDPVDSCQIAEYAYRFYDELNQWRPREEILEQIKTLLATREQFIKQKTAQKNALHAIKRKVVRTPLAEKLHEDGILRLEENIKAIENEIERLIDQDPTYKQMIGLLMSIPGIGFTLASHLLIVLKSSPEPFNARKMAAFIGICPYQHRSGSSVNRPASSRHYGPPGLRRLLYLAAMSVRMHNPYFRQYFARKVLDGKPKKLVLNNIANKLLRIVCAVARTRTPFIPGYRSVHPRLLVCKRVLTMS

SEQ ID NO: 206770 - protein, 347 aa, unidentified
MDKYVGLDVSQDETHICVVDRDGNKLWEGNCESTPEGIGAAIKKHAADAVKIGLESGHLSTWHWHGLNEMGLPAICIDAYHAHGVLRLQMNKTDKNDAHGIAQIMRCNWYKEVTIKSFENHESRALFRTRSNLVSMRTDVVNQIRGMLKTFGILIKGIAGVTFESRVQEIIDESTALAAPLQIQLEMLQMVKRKIGELDELVLDHAYACQDCRILMSIPGVGPMTAANFVLAVYDADRFKQSKSVGAYFGLTPRRRQSGEMDYNGRISKRGDRVIRHQLYEAANSILTRVKKPSSLQAWGLRIAKRSGMKKARIAVARKLAVIMHQMLQTGELFCFNPATGERAIYA

SEQ ID NO: 206771 - protein, 350 aa, unidentified
MKIVGCDLHTRYQQIAMLDTETGELTERRLEHANGEARAFYASLQGPVRVGIEASGHTGWFERMLAELGHELWIGDAAQIRASMVRKQKTDARDAAHVLQLLVEERFPRIWRPSWAERDLRQLVWHPQKLVWMRNAVGNQLHALAMGEGLCRKKQLWTKKGRAELEGLRLGDWAGYRRQELLTLLDELDGWLAKWDRAVEEQSQQNRAAVLLRTHPGVGPVTSLAFVLTLGPVERFARSKQVVSYLGLNPREHSSGGKQRLGAISKQGNPLMRSLLVEAGHTAARLDAELKQDYQRLKLRRGTGVAKVAIARKLAVRMYWMLRSQVSYAQLVRMQGSSRGTLVRGKSPLA

SEQ ID NO: 206772 - protein, 582 aa, unidentified
MSTATPLDRIGVGIDTARYGHRVSFRKPDHQPAAKPLTVLENQAGYRALQERLEQLHQKHPQAHFHVRIDAAGQYAANLETFLRGMDLPLTLSIGEPKRNKDYQKAHFPKRTTDDTESQAMARFAVVELPAATPAPVPELVLLREIAGRLQAQVKQSTQATNRLHNLLARCFPELAALTDDISARWVLQLLDQYPSAERIGQARLSSLQKIPYLPADKAQTLHQAAQQSVGSLRGAVAETLVRDLVGQLRHCAQTEQKMRHLLIAAYNDLPPGGHRQLVTIPGIGEATAAVLTAKISAIDRFLTPYHLVAYFGVFPEENSSGVDKQGNPLPPGTLRMSHKGNDLVRSYLWNAARSAITHNPAIRALYRRLRAKGKRGDVAIGHCMRKLLHLVFAVWKTDRPFDEHHFPWEPTTDTPVSTPNSSEPAALVPPAANAEAVGHTRAMPDKQVVTTASSSVAPAPTSVNPPPPAPAARPRIDFAFLRGQVTMEQVLAHLGLLEQLHGRGHQRRGPCPLHGNPGDRTHTFSVHLGKNVFQCFQADCAVHGNVLDFWAAVHRLPLYDAALHLAATFQLRRNREEEPVT

SEQ ID NO: 206773 - protein, 349 aa, unidentified
MTERRIVYTGERVYVGIDVHKETYTVTCVCHQQIVKTATVPAEPASLAASLLRWFPGATLTSAYEAGFSAFVLHRALTQVGITNIVVNPASIAVAANDKVKTDRRDSKRLARDLADGRLRGIYVPTETEELARLLPRTRAQIVKHRATIARQIKAKLHQFGLIAPSSRRLISSRYLREIAAWSLPPELRVSLTLLAEQWRFATRQLIEIRRLLRDQAQAQEEIEKVYRSVPGIGEVVARTLATELGDMTRFANERALFSYTGLTPSEYSSGASVRRGHISRQGSSRVRHLLVETAWRAMPRDGVLKEMFDRIAATRGKKRAIVAIARRLTGRIRACFRQGTTYAVGTYA

SEQ ID NO: 206774 - protein, 315 aa, unidentified
MGATTFVGVDVSKLQLDVAVRPSGELWQFGYDDRGVAALIKRLMPLQPQLVILEATGGLEAPLVAALSHAGLPVVIVNPRQVRDFARATGRLAKTDKIDAHVLALFGERVQPEVRPLPDDTALAFHALLTRRRQIIGMLTEEKQRLSQAPKGPLRTGIAKHVRWLEREIKAVDSDLNDTLTKSPIWRAKDALLQSAPGVGRVFSFTLLAGLPELGRINRKEIAALVGVAPHACDSGSMRGRRMIWGGRAAVREVLYMSTLAATRFNPVVRAFYKRLLATGKPKKVALIACMRKLLVTLNAMVRENTPWRESPSTL

SEQ ID NO: 206775 - protein, 319 aa, unidentified
MSVSSVVGIDVAKAHVDVFVLGAEFKPQRFVNEAEGHSDLATALAPLGVRLVVMEATGGYEAALACALQAAGLAVAVVNPKQARDFAKGMGYLAKTDAIDARALAAFADALSRQPDLVSYIRPLTDEAQRDLAGLVTRRRQLLAMMLSERQRLQLAVAKVRPSIEAMIEHIKAQLDEVDGEMVGHVQEHFGQLDTLLRSTKGIGPVASATLIAELPELGKLNRRQIAALVGVAPMANDSGNSKGRRRVTGGRFEIRRTLYMATLTATRYNPTIAAFYARLLAAGKLPKVALIACMRKLLTTLNAMAKSGMPWDPEFKTA

SEQ ID NO: 206776 - protein, 348 aa, unidentified
MVRFVGLDIGKWKCRAAIMNQEGLILDEFTFTNNPEGIQSLTSKLTLDDRVVMESTGSVWTNLYDRLDDRHIHVSLANPLKTKAIASAKIKSDKVDARILAHLLRSNLIAESYVPEKHLREIRALIRHRVAIVKIRTMIKNQIHAIVDKHGYACEYSDMFGKGGIEWLRGLELPSLDRLILDNHLTHLQSLNQQTDRVDEEVHHKACEDEDVRLLLSLTGVDVYTALLIRSEIGSINRFTDYKKLVSWAGLAPSLHQSGRVEYHGSITKQGSKMLRWIMVEAARVAVNHDPRMRGFYERVKHRRGDQKAIIAVANKMLKITWFMLTRKEPYESRNEKRYQQKLNSVAA

SEQ ID NO: 206777 - protein, 355 aa, unidentified
MTSTKYIGMDVHKESISIAVRNAAGKIVMECIIETKASMILQLIDGLRGDLQVTFEEGTWAAWLYDLLKPHVRKLVVCDPRKNKSMREGNQSDRIDARRLAELLRLDHLTPVYHGEHGLRTLKELVRSYLTVTKDLARVMSRVKAIYRSWAIPCSGKQVYAARHRAEWLAKISEPGVRRRAAFYYQQLDALGVLRREARRDLLAESRKHKVWKRLCEIPSIGPIRAAVLLGILQTPHRFRTKRPLWAYGGLAIETHSSADHRSVDGQLERSRKNVLVRGLNRNCNHDLKNLFKGAAAVASSKPGPLQEFYTALVAKGMRPEMARLTLARKIATIVLIVWKKGVCFDAQHLKPQTA

SEQ ID NO: 206778 - protein, 426 aa, unidentified
MNFKMQNKQNQLIERISDTHLIVGVDIAQQFHVARAVNYRGIIVGDPLTFENNEEGFVKLLNWMQDLQKLKHLNSEIVGMEPTGHYWINLSKWLFDKGIEVVTVNPHSVKRNKENRDNTQSKSDKKDALVIADMVKNGYYSFVRPSSESFEKLRVLMSNRDVIVKRLVMAVNQINRWVDVVFPELRHVFKDVSCKGAIATLRLFPTPKEISSMTSLDIMAGWKSLMKRQPGPQKAQLLIKLAKSSIGTGQALDAYKFHLEQLLEEYDLAVKQLERVEKQVKEVLNQISFARKLLAMKGISDISLAGILGEAGDLSGFSHGNSLLRHAGLHLAEASSGKWKGKIVLSKRGRSRLRRFLYLATMSLVMNNPEFKAIHSHNVKVKKMKKMKSIMKLIGKLARIFVGIARRNESYCPSKVQVQESIHLAA

SEQ ID NO: 206779 - protein, 323 aa, unidentified
MTLPALGIDVSKDTLDISVVTGGKPLSKQFANAQAGYAALIGWLRHRKLGHVHACMEATGRYSLGVALALHAAGHTVSIVNPAQIRDFARSRLGRNKTDRVDCGHIRDYAAMVVPPAWSPPSPAMLRLCELQTMRAGFVASHVEWRNRAGSGNDAAASALAQATIAHLAQQIEAADRAIAQVIDEDDTLRSQAELLLSIKGVGDGLSAVILAELPGPDILSSSAQAVAYAGLNPRHYQSGSSINHPSRISKIGNATLRAALYMPALSAMRYNPAVAALIARLRARGRLRGKQLVVAAMRKLLVICFGVLKSGKPFDAALAMPD

SEQ ID NO: 206780 - protein, 407 aa, unidentified
MDLLKTVFGIDVSSRKSNVCIMVNGQKVNDYAISNDMVGFNQLLGDLKQVTNPQIIFEATGVYSRRLQAFLDIHELRYVMMNPLEAKRKTKDDLHQNKTDKLDALYLAKLQSEHPQRLAYVQSEEYQELMANNRIYEQASHDLITNRNRLHKAIQLTFPEIEHLMVNPRGKNYWSIVLRFPHPDIVLETKEVDIIDFLKGLTGIGKKRANDIAQSLIRLAKVACPAVKKNSAHIRGLKMAINNILSAEEECQTALQEMAKLAPKRDLEILTSIPGIGENTALRIISELGDIRRFNNPSQLNAFVGVDPQVYESGNLTAHLSISKRGTAIGRKVLYLAINQIQSAKKAGNPCHIADYYEKRKRSSETASHKKAAIASIHKLLRTIFALIKNDQLYSYDVAKHNQRLLS

SEQ ID NO: 206781 - protein, 463 aa, unidentified
MSANKPTGKPGRSVQKKVRVDWKALEIVHPDAAGIDVGGSEHWVAISPDRDPEPVRRFGCFTADLREMGRWLVEKGVRSVAMQSTGVYGMPVFEVLEQQGLEVFLVNAQHTKNVPGRKSDVQECQWLLKLHAFGLLNNSFQPTDEIRIARTLWRQRGNLVAEASHVIQRMQKVLTEMNVQLSNVWSDISGVSGMNIIQAILDGERDPWQLAALVESGVKATPEDIAKSLEGNWREEWLFVLRQHVELYRIYQKKIDDCDVPLGKHLESWGAKVDLQTQPIGPRPKGKNKSRNAPAFDRRTELYRITGIDWSQINGIDVLTAQTVIAEAGVDLSAFPSEKQFASWLGLCPSNETSSGKILKRRTRKLVSRAATAFRNAAVTLLRSQSYLGAQYRRLRTRLGAPKAITAMARKLACLFYRLIKHGQQYLDKGTEHYEAKYRAQQIRSLTKRAQKLGLQLVIPKTA

SEQ ID NO: 206782 - protein, 356 aa, unidentified
MGEGSWVGLDVHARSVVVGVLEGASGELRSSRVPASSEETVAWLRQLPAPVRVAYEAGPTGYGLARACAAAGIACTVAAPSKIPRAPGDRVKTDRRDAERLARLLRLGELVSVRVPEPHEEAARDLVRAREDARGDLMRARHRLSKLLLRNGLVYDASAWTLAHDGWLRRQRFERRPLALAFDESYGAVLQAKTRRDALDRAIVELASEPPFVDVVGRLVCLRGVSTLTALALTVELGDWNRFRPQSLGPFLGLTPSEDSTGERRRLGAITKTGNTHARRLLVEAAWHQRRPLRASAALERRRQGQPAAVRSQADHSAHRLHQRWHALESRGKRRTIVAVAVARELAGHCWALATM

SEQ ID NO: 206783 - protein, 473 aa, unidentified
MTSLFFGFDVSKGYADFCCINQAGSRIGEVAKFDDDLIGHTTVKVLVEGLKSKYPDAQMIFGLENSGGLERNWAVFLKALVTPFNGKVFTLNPLAVKKFLDRGLHRNITDAISAQGIANYLRQGLRSAEVPFDDSLSGPVSLYRCLRNAISRCAQMQNELQNLLPRVQPELVQFCRHELPDWVLKVLQKWPTASRLAKAKRTQLVKVPHVTDERAGELVAAAKESVASQDDLFTEATMSFLVEEIIHAQETISTLKKQVTGSLANEQGVITMMTIPGIGAWGAACLCLEIGAIERFPSPEALVAFAGLDPRIKQSGDSTKHVGISRRGRKQIRAILYPLVLSAIRYNPALKEFYARLRAKGKKHLVSATACMRKMLHIIYGCWISGKPFDPCYEKNRLGNKSQAVSPQEEQVDKPKEVSPQEEKPAPKIYILKVKAPVSRREAAKRRKAATMPQTGISRRERGPITASGNNAT

SEQ ID NO: 206784 - protein, 334 aa, unidentified
MLADQVDVVLGLDTHRDRHALAVLEAGSGALLAAAEFPAEAAGYAGALQVAARHPGRRAWAVEGTGASGAGLARSLAAQGERVIEIDRPERRGERTRAKSDALDAARAARTALSRSQQASPRAGGIREGLRVLVVTRAGAVEVRRRAILKLRALIVSAPEELRSRLRRLSGLTLLTRCLTLRSPRGADPALRSTISALKSLARRALAATDEAKQLERDIAGHVRALCPQLLAEPGVGPISAAQLLISYSHAGRWPDESAFAQLAGVAPIPASSGQVVRHRLNRGGDRRLNQALHTIVLVRRQRDARTKADIERRIAEGKCAREVSASRIWWEIR

SEQ ID NO: 206785 - protein, 358 aa, unidentified
MRIIGCDLHARQQTIAMLDTDTGEFVEKTLEHDGEELRKFYSGLTRPVLVGIEATGSMQWFVELMEELSIECRVGDPAKIRAAEPRKQKNDRRDAQLLLKLLSENRFPTIWMPSTEQRDLRTLLRHRHQWVRMRTRVQHTLQSMALNHGLRRGHSLWNQAGQQELRALPLAPHASERRKALMTLYPRLQESIDELDREVSQQAQNHPAARRLMTHPGVGPITALATEVFLGDPLRFTDGKAVASYIGMIPREHSSGGRQRLGAMSKQGNALLRYLWCEAAMHAVGRDPELKRFYRRKLVQKGMGKARVSAARKLGIRLWIMMRDQIDYQEFCRRGKARQESGSVCAGMSDITNGPAEA

SEQ ID NO: 206786 - protein, 411 aa, unidentified
MEMIVERGCGLDVHQRTVVACLLTGAAGTKPTKQLRTFGTTTGELEQLRDWLKAERCTHVLMESTGVYWVPVYSVLEGSFEIVVGNAQRIRNVPGRKSDVKDSDWLSQLLRHGLVQKSFVPPKAIRQLRELLRFRRELVEARAAERNRLIKLLESANLKLASVASDVFGVSGMAMLRALAQGQRDPVQLAELARGLLRHKLGPLTQALAGRFEQHHALLLKHQLKRLDETEAHIREVEQDIDRRMEPYREQQQRLMEIPGVDRILAATLIAELGVDMSVFKSAGHLASWAGISPGLNRSAGKDLSAHAPLGNPYIRRALVQAATAATHCKRGYLRDKFYRLKARRGYRRAIVAIAHKILIAVYHMLSSGSHYKDLGDNYLDLIDRSRVKSQLVRRLQRMGYEVILHQKTAA

SEQ ID NO: 206787 - protein, 357 aa, unidentified
MNEISTSTDIIIGVDTHKLTHAAVAISALGARLGTTTIPANCSGYQALQAWAQSLGSIRAFGIEGTGSYGAGLSRFLCEHGYPVFEVNRPNRQLRHQKGKDDALDAESAARSVLAGQAMALPKSGTNRVEMIHHLKVARDTAVKGRSQAMQTLKAIIVSAPSALREQLDRLAGKMTLVRHLAALRPGPLTSTTASAKTSLRAIARRWLTLNEEIKTHDAHLEQLTSQLAPELVKAHGMGAGTAAEMLILVGDNPERIRSEAAMAKLCGACPIPASSGKTNRHRLNRGGNRQANAALYRVVIVRMRAHQPTLNYVKRRTAEGKSKPEIIRCLKRFVAREIFGYLCRSPGPTQSTLSGS

SEQ ID NO: 206788 - protein, 353 aa, unidentified
MNSLTDLREAVDVVIGVDTHVHTHSAAVVDAATGGVLDEITVEATTEGYCELVEFANNHPMLRAWAIEGTGGHGAGLSRHLLEMSEIVIELDRPKRAARRNGAKSDPLDAIRAAREAMARPRLGTPRTGGERQALSVLLAARRSAINASTEAQQQVFSLVIAAPEPIRVRFRGQKLAAMLNTAANLRVHASWDTETTSTVVALRTLARRAHAMLKEARELQKAIVAIIRSWRPDLLEEFGVGPIVAATVLCAWSHPGRIHSEAAFAMLAGVAPIPANSGKVTTRYRLNRYGDRQLNNALHTVVQSRIQYQPATRDYVARRTAEGKTSREIKRCLARYVARDLYRLLENTATAA

SEQ ID NO: 206789 - protein, 321 aa, unidentified
MSLFDLGLDVAKAKLDCALRLPDGKHKSKVVENNSNGFKALIEWLAKHGAASAHVCMEATGVYWEAVAEYLAGKGMVVSVVNPAQIKAFGQSQLVRTKTDQVDARLIADFCADRHPAPWQAPSANEQALRAMVLRLESLQVMRTQESNRLEVSRDVVKPSIAAHIEWLDETIKALAKEIREHMDGDDSLKDKHALLDSIPGLGERTIAILLAYYADLERFGNARQAAAFAGVDPRQYESGTSVKMKPRMSKIGHAFLRKSLYMPALVALYKTAWGKRFRERLAAAGKPPKLIIGAMMRKLIHVAFGVLKSGKNFDPGLHGC

SEQ ID NO: 206790 - protein, 337 aa, unidentified
MDHYAGIDVSLESASVCVVDAKGKIVRECKVASEPEALVACFGGLALPLSGIGLEAGPLSQWLCAGLRRAGFAVELMETRHVHAAFQVMPVKTDRKDARGIAELMRLGWVRPVHCKSVGAQETRTLLNARKLVQSKLKDVEMSLRGMLRGFGLKVGRTTEKRFPDRIRELVAGQETLEFVAESLLAAHAVLLCELNRFDKRLRAQARDNPAVRLLMTAPGIGPLVGLTYAAAVDDPRRFKSSKTVGAHFGMTPRKYQSGETDYSGAISKVGDGAVRTALFEAAHVIMTRPIKGGWLKSWALKLAKRVGQKRAKVALARKLAVILHRMWSDGTSFRFA

SEQ ID NO: 206791 - protein, 459 aa, unidentified
MAQSKKRKGKGAGGTRMLPVLHPDAAGIDVGAEEVFVSVPPDRAAEPVRSFQTFTRDLYELADWLQFCRVRSVAMESTSVYWIPLFQILETRGFEVFLVNAQHVKNVPGRKSDVSDCQWIQYLHSVGLLKASFRPPDQICVVRSLWRHRESLVQMAAEHTMHMQKALTQMNLQLHHVLSDITGLSGMRILDAILSGERDPVKLAALCHGRVRSPRETVAKSLEGDYRAEHLFALRQSLVGFHFYQQLIRAVDQELEGAMRQLPRAEGAPEQMPPRTKKCFYQKAGNEPAFDLKAELFRISGVDLTDVPGISAITAHTILIEVGPDLSRFRNASAFASWLGLCPDRKVSGGKVLYTGSRKVKNRIAIALRLGAQCLYHANNYLGEYYRKMKWRLGAPQALTATAHKLARIVFHMLVTKQPYNESILVKWDQQANMRAELRIRTQAAKLGFDLTPAAKPRT

SEQ ID NO: 206792 - protein, 485 aa, unidentified
MNSIFKKRNPDVEALFEKSGKKSKVMCVAFDYAKKMHTCAICDGEGRKLKGCFNIDNNLHGLKYLLKIVTGLCRKHCIKHEHVFFGGEDCGSYAFNFIHALASRGYLVIGMNAKQVKHERENSIASTDVIDTIGVIGMMIKMTGRTIGVATGNVHGLKRLRRQRGSLVRSHVASSHRLYRITDELFPGFLSRENTGITPFCRASLWLMDDRFSAAEIHARQRPSLVRKLRELNLKDPDGTVDKLRALADISLPPSAAMIPALQRSLSEELNIYSVVKKGIHGLDVDIAKQLALTPGAMLSTIPGIGMSWAPGLYVELGDPARRRNVHSMAALGGIVPRVKQTANKPAVIGHRSKGCSVFLKYVLMSGAVTLSQYGHPEIREAYEADKECGRDARTKLAQHLLRVSLHIIDSQIFYLPPSLHKNGTFKQIRAYYAKAWPKVLIKWRNGGAILEAVAEGSPLRQWRDMAQEKYDLELSIKSPQSRRK

SEQ ID NO: 206793 - protein, 412 aa, unidentified
MSKQNVELAAFIGLDWADEEHAVCLQGAGESRKEISTLDQTPEGLQAWIHQLRARFGGRPVAVAVEQARGSLIYALMHVDFLHLYPVNPQTLAKLRQAFYPSGAKDDPGDAQLLLEVLLNHRDHLRVWVPDDVLTRSIQLLTEGRRKLVGERTALTNQLIAALKMYFPQALDWFGDLHTPRACAFLYRWPSLQQLKTATSSSVRKFYQNQGYRGEDKLKQLIQDIQQALPLTGDEAVLLASTMMVQALVKQIPSLTESIEEYDRKIAALFKSHDDSTLFGSFPGAGPTLAPRLLAVFGSDRSRFEYAAEVQQLSGIAPVTEKSGKACWVHWRFACSKFLRQSLHEFAGQSILKSAWARAYYQQQRARAFKWIRIIFRCWKDRTPYDEAKYCQSLQLRGSRLASTLKTASTEV

SEQ ID NO: 206794 - protein, 428 aa, unidentified
MRSIALDVHRDFCEVAIVEDGEVRSAGRIATSPESIALFAGSLCPTDQVVLETTSGAIEIARLLGPHVARVVLANAADVRAIAHARVKSDRFDAATLARLLAAGMLDGVWVPDERIGALRRRIARRAALVRQRTRAKNEIHAVIMRCLLGRPPASDLFGKKGRAWLTTQQLPPAEAETVAGCLRQVDFLGTEIAAIDAKLAEFALTSPQAKRLMTIPGVDVAAACTLIAAIGDIRRFDSPRKLAAYLGLDPRVRQSGEKPARHGRISKRGNPHARHVLVEAAWQAMRTPGPLRAFGERIRARKGTQVAAVAVARKIATIAWQMLTRSEDYAFQSPSLVRKKVRNAELKSGAPRLSTRHTGTRQRVTPDERERDRELQQQAENGYRRLIADWQATGPKAGAGATPGRASSRPSTRQATRQTTEPQTSAL

SEQ ID NO: 206795 - protein, 345 aa, unidentified
MELHTIGIDLGKTVFHLVSLNLRGEVVVRKKFSRKQLLHYTANLRVELIGMEACGGAHFLGRALREQGHEVRLMPAQYVKPYVKTNKSDFIDAEAIAEAVARPTMRFVPIKTDDQLDMQSLHRVRERWVMRRTAIVNQIRGLLLERGITLRKGRRYVDAALPGILEDATAKLSGALRVLLAQLKLELDQMAGRIDEADAVLNKTARENAACQRLLAIPGIGPVTSTALIAAIGNGAAFHKGREFAAWMGIVPREHSTGGKQKLLGISKRGNTYLRTLFIHGARAVLQQRAKQTSGLKAWLAQLSARTHPNVAVVALANKLARIAWAVLANNEVYRPLALIGPATA

SEQ ID NO: 206796 - protein, 386 aa, unidentified
MKRNDLSRSLVAFDQASTMVAVVELSFRSWLVAGLVPGLTRQPLKKLGPDAQALLTLLRRWQGEATKAGSTINRIVVAFEAGRDGFWLARWLRARGIEAYVIHPTSIPVSREHRRAKTDRLDTGLLMRAVLGWLRGEPKHCSMAAIPTIAEEDARRPNREHQTLVQERTRIVNRMKATLIRFGIRTFNVKLRKASDRLAVLRSPEDEPLPPNTGAELRRDMARLQLIRDQIKVIEEARLQQLKLAPRKGTHPMLLMLAEIIGVGVETADMLVHEVLSRKLRDQRAVARYGGLTGAPDESGTKRREKGLARAGNARVRRGMIQLAWRWLTHQKNSELAQWYQTRTTGAKPAARKTMIVALARKLLIALWRYVTTGEMPAGVTLHPAT

SEQ ID NO: 206797 - protein, 403 aa, unidentified
MTKESLCVFAGVDTHKDVHVAAVVDERGKILDTASFDANAKGYAALQRWLEEFGTLVRVGVEGTGSYGTGLTRHLQGNDVEVVEVNRPNRQMRRQRGKSDPVDAEAAARSALNGEATVVPKDHDDIVESIRVLRVAFCSARDTRTRLALQIRDLIVTAPAALRESMPAKTADRVAHCAKFRPGNVRDPHEATRLALKTLSRRYQDLTDEMRDLTKFLDELTKEANPALRAAKGVGVDVAAILLVAAGSNCHRLRNESAFASMCGVSPILASSGQTNRHRLNRSGNRQANNALWRIAMVRMTTDEETRTYFARRTAQGKTKRDVTRCLKRHIAREVFLLLQNPAYEEVGPQLRTTRTSAHISLQTVSDDLGVWPTKISRIERGLDHDDEFVAIYQAWLNERMAA

SEQ ID NO: 206798 - protein, 338 aa, unidentified
MPLYCGIDLHSTSSYLLILDERDKVIRERKLPNRLEVFLGELEPHRGELSGIAVESTFNWYWLVDGLMEAGYRLHLVNTAAVKQYEGLKYIDDRHDARWLAHLMRLGILPTGFIYPKEERPVRDLLRKRGHLVRQRTSNLLSLQNLWVRNTGELVCGNALKKLTAADLEPSIADPELRLAMASTLVVIRTLAEQIDRLEQVVRDHGKLKPEYRYLLSVAGVGKILALTILYETGDIARFPAPGNYASYCRCVNSRRLSHGKKKGEGNKRNGNRYLSWAFVEAANFAVRFEPLAKRFFERKRAKKNRALAIRALANKLARASYFVMRDRKPFDPALLFR

SEQ ID NO: 206799 - protein, 453 aa, unidentified
MAKKAKKTQTDKGLKLKIVNPNAAGIDIASGEMQVCVPQDRDGDNNRTFGSFTNDLKAICKWLKLCQIDTVAMESTGIYWIPLYFMLQQEGFDVILCDAKSVKNYSGRKTDESDAEWIMLLHSYGLLKACFQPENTAHMMRNLTRHRNNLLKSCSKETEHMQKSLDQMNIKLCNVISDLLGKSGQSIISAIINGNHDARSLSTLADSRCKASPEIIEASLNGTWDEDHLFTLRQSYELYQYIQEQIKECDNKIEALMSQYKAAVSTETPVKFIKNNKRIAKKNAISFDVQTYAFSLWGINPLDIPGMSNGAIMQLIGELGHDFTEKFETATKFCSWCNLVPNNKISGGKLLSSKVPKHKNHVGQIFRLCANSLKSEKTTMGFYFRRIQSKSGYLQAIVATAHKLAKVFYTMVKNKTSYDEKKVGLDEAELLKRKIQRTQLMLDRLNRKINGAA

SEQ ID NO: 206800 - protein, 338 aa, unidentified
MNIQTIGIDIAKNVFQLHGVNRSGHVALKRRVMRDQLLTVLAQIDPSTVVVEACTGAFYWARKFEALGHEVKIISPQYVKPFVRRQKNDGNDAEAICTAARQPHIPFVPKKTVEQQDIQALHRARQRMVNHRTAVVSQIRGLLLDRGFAIAKSITRARRAIPEIMAGQDNELTAMVRDAIAELYDLFRDLDRRIGLFDKKIDRIFHENEACQRIAKIKGVGPKTATAIVAAIGDGSEFKNGRHLAAWVGLVPRQFSSGDRKVLMGISKRGNQHLRSLLVHGARAVVRTAPRKTDPNNQWVNQLRERRGFNRATVAVANKNARIIWAVLRTGETYRAAF

SEQ ID NO: 206801 - protein, 344 aa, unidentified
MMLWTTPASGISVNVFQVHGVNEQHEVVLVRQLRRKKMIGFFSKVAPCLIGMEACATSHHWARELTKLGHTVRLIPPIYVKAYVKRQKNDAADAAAICEAVTRPTMRFVPIKTEEQQAALAVHRTRNLLIRQRTQLINSLRAHLAELGIVADQGREGLAKLVAIISEASSTQSLPSEMLQALDVMLAQLASLQLQIGELDRCIQAQHRASDVSRRLESIPGIGVIGATAIAATVTDPSQFKSGRDLAAWVGLVPKQNSTGGKVRLGSISKQGDRYLRRLLVIGATSVVKLARIFPAKYPWIVKLLARKPAKVVAIAVANKLARIAWAIMSKGETFRRPVYTVRM

SEQ ID NO: 206802 - protein, 353 aa, unidentified
MKKYIGCDAHARYSLFAILRENGQWEPPVRVEHNGMEMERFLKQLPVGSPVAIETSGNWYWLVRAVEEAGLDARLVHALEAKKRMPGRHKTDHLDAQGLALLLRNGALPEVWKPPLRLLDLRDLMRTRLATRQQGSELKCRILAALRRYGVRDYSHGSDLFASCRRAQLAVSIARLPQECRIATSEEWALLDQLEDHVEALERRIRERVASLGWVRLLKTLPGVGTILGSTIYLEIGDVTRFPDAAHLASYAGLVPTVHSSGGKCWQGPTPRAANHFLKWAFVEAANGIVMRQKAWAGKHVVRTYQRLKVTKCHAKAVTAVGRHLAESSWWILTKKQAYREPALATRSSSENG

SEQ ID NO: 206803 - protein, 355 aa, unidentified
MKQLCAGVDVSAASLEVAWRGKDGRIVRRTVRNDVTGHRALIKELRRAGSGAPVRVAMEATGIYGLDLAVALDGAEGVEVMVANPRVIANFGKALLQRSKTDVLDAETILMFVERMPFIAWHSPSAAALQLRAIARRIAALTKMASGEKTRRRHAAASEVIGTLLERSARQTAALLEREIAKLRKAALALIAADTQLARRMSLLTSIKGIGEVSAVPILAELMLLPADMTDRQWVAHAGLDPRLFESGSSVRARTRISKAGNHYLRASLYLPALVASRYEPNVKAFREHLSARGKRPKSIIVAVMRKLLHAIHAMFRNDALFDGTKFYRSTPARVAATSGIPPSAIFEVSSALSS

SEQ ID NO: 206804 - protein, 389 aa, unidentified
MRTDPTRTSQGSTLPTIVPTLYVAFELGGSSWKLAATTGLGQPPRLRSLPARALPRALDELARAKARFHLDPAAPIVSCYEAGRDGFWLHHALTAHAVRNHVVDSSSIEVNRRQRRAKTDRLDARKLVSMLLRYAEGDRQTWHVVRAPSSEAEDQRQLHRELKTAQRERLAAVTRVESLLVTQGLTLPLSGRETVAEVRAAVAALRRWDATPVPPALQTRLVREWGQVVALTAQLRALTRERAELLRTGDAPALAAVRQLMRLKGVGVATAWIYVMELFAWRTFRNRRELGALTGLAPTPDQSGTGRQRERGMGKAGNRWVRAVAIEGAWCWLRHQPQSELSQWFERRFARGGSRQRRIGIVAVARKLVTALEHYLRTGTPPAGAAVRA

SEQ ID NO: 206805 - protein, 310 aa, unidentified
MESVFVGIDVSKEHLDVAVRPSGEAFVVERNAAGLDRLITRLRELSPHVVALEATGGFETVAAAALAGAGLPVVVVNPAQVRAFAKALGQRAKTDPIDAGVIAHFAEATKPQLRPLADEATRLLSDLIARRRQIIEMISAERQRENRITVPRLRKSIARLVKALEKELASVNTDIDDAMRGSAAWRDKEDLLASVPGIGSTIARTMIADLPELGRLGRKEIAALDGLAPFTRQSGKWRGQSFVIGGRKAVRSALFMGALVAKRHNPVLKAFFDRLVAAGKPKMVALIAVARKLLTILNAIIRDKRPWQTA

SEQ ID NO: 206806 - protein, 366 aa, unidentified
MIRKEYYVGMDVHKEFVQMAVFEEKGEEPIYERRLNNDTELLVKEARRYSQKGMTEVAYEAGSLGYVIQRAMEKAGITCYVLPANKVAKKRDTRIKTDKRDARLIGRELRSKNIRPISVPDAVDEAARDLLRCREDVKGDIRRAKQRLLKFLVRHGHIFTEGKDQWTLKHWRWMDKIQFSHKHETKVYEEYRSQIKSLEERLDRLDKDLIETAESPRYKASVSKLRAFKGIDYIIALSVICEIGDFRRFATAKAFMAYLGLVPSENSSGGRRNQGSITKAGNGHLRRLLVEGAWHYAKPPRVGVKLEQRRRGCPVSIIDTADRALHRLHKKYVRLLFGGKHKNVAVTAVARELAGFIWAIQVSSAA

SEQ ID NO: 206807 - protein, 383 aa, unidentified
MTQVTLKTNATANEALLHMAFDLSHKSWKLAFSDGKKYRFCSVEGKNLPALSKAIDQAKKKFGLTEDCPIVSCFEAGRDGFWLHHHLESIGGKNLVVDSASIEVNRRKRQAKTDKIDAKKLLNMLMRHMSGERKHWSVVNVPTQEDEDLRRIQREIDRLTKEQGQHTTRMRSLLNLHGIVIEGAIGGKDWETTVSQLRTWENEPLKPFMAAELLRENERLMLVRQQRQGQEKEKHRLLREELDHYPTLQEVHKLQLLRSIGEASSWIYVMEFFGWRQFKNRKEVGALAGLTPTPFSSGNDNREQGISKAGNKRIRHITIEIAWLWLRYQPQSELSLWYEKRFAHGGARMKRIGIVAMARKLLISLWRYLETDELPKGAVLKPC

SEQ ID NO: 206808 - protein, 435 aa, unidentified
MKSRTNFDIILSKGYDVMRVNEKLMRITEDTIVVGIDIAKYKHYARFIDYRGNVVYKTISFDNNKCGFDKLIDTISIVKDKTGKGDVIIGCEPTGHYWFNLRDYLKDQQIELVIVSTYATKNAKEFDDNSPTKSDPKDALVIAKLVAEGRYSIPVIREDLFQEINNAHSIIEDIDEEIVRIKNKIHRWNDIYFPEIENVYNINSREYEEFAKLTLTPKEVKNTSLEELIVKLKENNHYASKNKIGIIKTLAEVSVGCEANDYAKMEIQRLIKRLRELTDEKENLQKELEVKASEIDYVKNIVEITGVGYGQMVSIMRECGDLKNYDHYKQLMKMAGLGLKENSSGTKKGRKHINKRGRAQLRKILKLTALSLIKNNDAFKSLHVYYTKKRERCLEKLVSVNVIIHKFVRVMMAIVKKGEKFSKEKMIKESIISYS

SEQ ID NO: 206809 - protein, 413 aa, unidentified
MEQLIQRCAGIDVGQAESMVCVRVPDAVTGAPAELIASYGTTTPDLLELVDWLRCLGVTDVAMESTGVYWKPIYYLLEDDFTVLLVNAAHIKHVPGRKTDTIDAAWIAQLLAHGLLSASFVPPPPVRELRDLTRYRKALINEKTAQVNRIHKVLQDSGIKLTTYATDVMGVSGRAMMRALIAGQSDSAALAELAKGRMRTKIPDLRKALTGRFREHHGFLLKQMLDHVEAQEADIAALDERIEAALAPFVAQVELLATIPGVDRRSAQVILAEIGPDMSVFPTAAHLASWAGMCPGQRDSAGKHGSGKTRKGSKWLRGALVQSARGASRSKGTYLSERYRQVMRRRGDAKAIVALGHEILLAAYRVLATARPYTDPGPTTLSRLTAQRLTRQAVRRLQDLGYQVTIEPRTDAA

SEQ ID NO: 206810 - protein, 339 aa, unidentified
MVEVYVGLDVSDKSTHLCVVDGSGAVIWSGACATDPEVIARTLKTRAAGVARVVLETGPLSAFLYHGLVERGVPVICVCARHAKGVLSARVNKSDPHDAEGLAQMARTGWFKAVRIKAEATHMDRARLKIREQLIASRRAMAGQLRGLLKLFGLRLGQATTPGRRRERLAALFALKPELEPILAPLIESLEALEAQIDRSSRELAARAGADPVAVRLMTTPGVGPITALVFKTSIEDPGRFDRGEDAGAFAGLAPRRNQSGERDYRGAISKAGDPMLRSALYEAANVLLSRVKRPCALQTWGRRLAQTKGAKRARVAVARKLAILLHQLWRSETDFRWA

SEQ ID NO: 206811 - protein, 323 aa, unidentified
MESGEASKEVYVGLDVAEKTLSVSILPSRESSVVENTAESLEVLGKRLKVLSPRIVLLEGSGGLQAPVAVALGLMGLPVVVVNPRQVRDFARAMGYLAKTDRLDALVIAEFASRIKPEPRALADEETLALNELLTRRRQLVEMRKAEEQRLQRMEARRMGLRVRQDVTAHIRYLSSGIEKLDGEMQQMVKQSPLWQGKLDLLLSVPAIGQKVARTLLAQLPELGSLSSRAIASLVGLAPFNDDTGVRRGRRRIRGGRSEVRRMLYLSAMVGVRYNVVLKRTYERLLSSGKPKKVALIACAHKLLTIINAMLRDQRAWSPGLAY

SEQ ID NO: 206812 - protein, 340 aa, unidentified
MIAVGVDTHKERHFAVVLNQLGELLGEIVIDVCAAGYGELERWAAGFAPDAQQIVFGIEGAGSWGAGLCEHLQRCGCMVVEVERPRRRDRRAGKSDRIDALAAAKRVLVGEGTSTPRQRGILSVLRALLVAQRSATCERTRLLNEIQALHATAPFALRERVGEGSGKQLERRLGGMRTRASAPVDERAVFAVMRDLAARSRALAVDARRYERELADVVRSLDPTLLREVGVGPISAAKLLVCDPARFTSEAAFARCNGTAPIPASSGKTVRHRLNRGGDRQVNNAIHTIALSRSLHHPETRAYLDRRISEGKTKREAMRSLKRHLSRRLFQRLIEVPLTS

SEQ ID NO: 206813 - protein, 376 aa, unidentified
MKSTRFVGLDVHAATIAVAVAEPDGEVRAVGTIPNEPEAVRRLVKKLGPAEHLRACYEAGPCGYVLYWQLTALGVACDVIAPTLVPVKAGDRVKTDRRDAERLARSLRSGDLTAVWVPDAAHEALRDLVRAREAAKKDQLRARHRLQKFLLRHGQRPPAGTTVWTTRYRAWILALRFEHLAQEATRLDYLHEVDHAQERITRLERALDEAVAAAPAAMRAVIEALQALRGVAKVAAVTIVAEVGTLSRFARARQLMGYSGAVASEHSSGARVRRGGITKTGNAHLRRVVVEAAWCYRHPPRLGYALRRRHDRLDEAVKAIAWKAQHRLHSRYRRLLGRGKSKQHVVTAIARELLGFIWAIGVAVEHDAGRGSRQVA

SEQ ID NO: 206814 - protein, 346 aa, unidentified
MNEITTVGVDLAKEVIAVCAADRAGRIVFTRIFRRDTFATWAVQLPPCVFGMEACGAAHHWARWLRSHGHTPQLMAAEFVQPFRKSRAAKNDRNDAEAVLTAVRQPNMRFVAVKSVEQQACLSWHRMRQGWSEERTGLINRLRGLLGEFGVWRGRSAAILTRALPGLEHDEALPLMVRRLLGEAGAHLARLDEAIAGCEKEIKTHIKDNTAAEHLSAINGVGPLTVAAVLATVTDARDFKNGRAFAAWQGVVPRQHSSGGKARLGRITKHGDAYLRGLLTQGARSALQATLSKPPQSLTRLQKWILQLYLRVGYHKTLVAIANKHARLIWVLLTRDEPLHAHAAVD

SEQ ID NO: 206815 - protein, 339 aa, unidentified
MEEVYAALDVSDKTTHVCVVDGAGAIVWRGVCATDPEALAVVLKKRCPAVIRVVLETGPLSAFLYHGLIERGVPAICVCARHAKGVLSTRTNKSDPHDAEGLAQLSRTGWFKAVRIKQEATHIARAHLKIREQLITSRQAMANQLRGLLKLFGLRLGKVTTPGKRRERLEALFEQKPELRSVMQPLIESIEALEAQIKRSARLLAASAEADLVAARLMSVPGVGPFVALTYKSSIEDPGRFTRGEDVGAYAGLVPRRNQSGERDYKGRISKAGDAMLRSALYEAANNLLTRVKRPCALQTWGKTLAETKGPKRARVAVARKLAILLHRLWQSEAEFCWT

SEQ ID NO: 206816 - protein, 341 aa, unidentified
MKNTKYFIGLDVHKQKTTYVVRDRIGNIIIEGTTSTLYSELHKRLETYLKSSIIGLESSISYYALYKGFLKNGYNIKVANTIQLRQLITKNDKLDAKRLSEMLRLGTFPCSYIPDEKIQHLRSLLQVRHSLIEEKTRCNNRIQAFLDRNGIVMPNQEAFGKKWRQKLLQYIGSGEVSLELRYEYDHFKYLEEKSEHLGLEISGYTQKHWKKEYKLLQSITGLGPILSCYIIAHILPISRFSSNRKLRRYAGVIPTCHESGDKKSKGHIPKTSSRKHLRWALIQAANAAGRTNTKLGYYYRKKKKQKKNAGIAHVAVASSMIDIIYKVLTTKKPYNTKNNVC

SEQ ID NO: 206817 - protein, 440 aa, unidentified
MAVRKREDEVFPNAAGIDVGASSHWVAVPKHLAEESVREFGAMTDDLNAMADWMLACGVDTVALESTGVYWIPVYEVLEQRGLKVWLVDARQMKYVPGRKSDVQDCQWLQKLMSLGFLRAAWRPDGEVCVVRAVARQREVLLIEQASWVQRMQKALVQMNIQLTEVLADVMGMTGQAIIREIVAGERDPKALAKHHNRRVKATVEEITKALTGNWRDEHLFVLRQALAMYDDIARHLSECDAELQTQLRALGQRNVDLGKAPRADSKQRKEFDARQTLANWAGVDLTRINGLGLAAVMKILTEIGPDLSRFANVKHFCSWLGLCPGTKISGGKVLSAKTKRSANRARQALKMAAMSLSRSSSALGAFYRRLCSRMDKPSANTATAHKLARMVYFMLTRGEDFVDKGQQHYEEQQHQRSVAALKRRAAALGFEIKLTSVPA

SEQ ID NO: 206818 - protein, 419 aa, unidentified
MSSKKTKKVKNINHKTLIVTFDIGKNIHYGYFRAPNNKEIKPFQVYNSGYSFNKLWSKICHFQKQQELEEIVVGFEPTGPYAEPLVHFLRKKPVKLVQVNPMHTKRLKELTGNSPNKTDKKDPRVIADVISLGHALTLVIPEGAAAELRRLTQARERSIQKRTATKNQLQHLIYILFPEFLEIMKNISTKSAIYLINNYPTPESIISLGLDSLTLALKKVSRGKLGQERAKKLFEAAQSSVGINEGKRSIVLEIKYLVTDIKTHNQFIDEFEKHMAEYLDQIPYSHSILSIKGMGEITVAGLIGEVADFREFNTISEIMKLAGLDLYEVSSGKHQGCHHISKRGRPLMRKLLYFAAINMVKSEGIMHKRYQNMLNQGMPKIKALTAISRKILRIIFALTRDNTMYDENYNEIINFKKAA

SEQ ID NO: 206819 - protein, 320 aa, unidentified
MTNVILGIDISKLTFDVTLLIDNKVKNRKFDNNKKGFDTLIQWLKTKGVDTGYACMEATGSYGLKLARYLYENNFKVSVVNPARIKGFAQSKLCRVKTDKADSDLIAHFCQTMKPDLWKPTSLHIQELQQLVNRLDALISIKNQETNRLEGLSDLVATNIKDHIIFLNKQIKEVEQLIANHIKTHQDLSEKSTLLASIPGVGEKTISQVLTFLSNIDNFNSPKQVIAFLGLNPKQRQSGTSVRGTSRISKTGNAELRKAFYMPAIVSLKYNPVIKGFVKRLSITGKPKMVIVIAAMRKLIHIIYGVLKNKTLFNEKIKVV

SEQ ID NO: 206820 - protein, 332 aa, unidentified
MIVSNGCQGLELVCKVENMMSNNSQYVAIDVSKSALDIAMPGANRIWRSSNTLTGVAALRKRLQPLEHPHIVCEATGRYARLLAQQMEQANIPLSIVNPRQVRDFARATGQLAKTDALDASIILRFADAMQPAPTPPTPENQVRLAEQVRRRRQLVDMLATEKQRLCGLDNADTLASIRAHITFLQGQIDQCDARIKAEIGADASLTRKAALLESIPGIGATTAAVLIAELPELGRADKKQIAALAGVAPMNRDSGQWRGQAHITGGRLSVRCALYMATLPAIRCNPTIRAFYQHLRAQGKAPKVAITAAMRKLLIIANTIVQHDKPWANLA

SEQ ID NO: 206821 - protein, 333 aa, unidentified
MYYSGIDLHSDNSYITTIDESGTVIKKKRVENSNELVLDYFHSLPGSHQAVVESTTGWYWLNDLLGDNGIELVLAHAKYLKAISYAKVKTDKVDSQTLAILLRQGLIPRAHKISRELRGLRDTMRIRLRLVQQRTACLLRLYSIHAKFNGSVPDPYRFQLAVLEHTRDTFSEQILALEKSLHPVLIPNDDIQRLLNIPGIGKLSAFTIYLEIDGIERFDSDKRFVSYCRLVPAADNSNRTVHHRSSKDGNKYLKIAFSDAAVHAVQYYPEYKRLFQKLARRSNEPTAYAVIAKELAKIVYYVLKNKTQYKGLKGQPISRQKSQQWPRLTSPLS

SEQ ID NO: 206822 - protein, 310 aa, unidentified
MEQTFVGIDVSKDRLDVHVRPSGEAFTVSRDGTGLEQLVDRLRTLTPMLIAVEATGGFETIVAAAIGGAQLPLVVVNPAQIRHFAQAVGQRAKTDPIDAEMIARFAEAVKPAPRPVPDEAARLLGELVARRRQIIEMLVAERQRDKRAGNIRVRKSLARHIKVLERELQELTDEIGGLIRGSPAWRETEDLLVSVPGVAEKTSSSLLAEVPELGRLTRRRIASLVGVAPYTRQSGRWKGKSMIAGGRAAARSAVFMAALTASQHNPLLKAFYRRLLAAGKPKMVALIAVARKLLTILNAMIRDKKPWQHA

SEQ ID NO: 206823 - protein, 331 aa, unidentified
MKNKEFIGIDVSKNVLDIFILKLKFHFVVINDPSGFAKLLEICCIKLSCTKDKLFFCFENTGRYSRLLSIFFHESEIMYAMVPALDIKQSKGMTRGKSDKKDAKSIALYAWRKKDELGPTKLHSAEVGQLRQLLALRDKLIKHRTAYKNAINDLNDCFYEGETEFIRETQLRLIKQLNIEINNVEQQIEHIIQVLPEWKTNYKLIQTVKGIGPVIAKYFIIYTENFTRFSDPKKFACFAGIAPFEYSSGSSIKGKTKLHPCANKHLKSLLNIAAMGAIQLKGEYKIYYQRRTQDGKNKMSTLNIISNKLVTRVFAVVKRQTPYVDFSTFAA

SEQ ID NO: 206824 - protein, 373 aa, unidentified
MPKYSTAFGMDVHLRSTTVCALDADTGEAVTRRFPGNPWGEIAGWMDGFPGPSLAAYESGYLGFAPQRELAGLGVECVVAAVSKIPRSAADSASKNDRNDAARMAKAILAHDISPVWVPSPEVEGIRDLAGAYDGATARLATAKQRLLAFLAKRGFVYGGTTPAGNPRKYWTYDFLRWLDKVRPEDDGGVRALAALRNEVEAAAEARADLLSEYRAAVDASPIAAEVAALQSIKGCAFALAAAFSAEVGDFTRFRSGRQVTAYFGLAPSQRSSGDSVRLGGISGAGNALVRKLAVEGSWCYAAARHQPKLMPRDTGVPLEIRMHGRKGSERLLRRREEMLARGVPAAKANAATAAELVRWLWALGMMCREGAE

SEQ ID NO: 206825 - protein, 319 aa, unidentified
MMAQNDLVVVGIDVAKDKVDACIRSLSQRRTFPSTAEGRRQLISWLRKHKATKAVMEASGGYERDWAKALREGIEVRIVDPKRVRNFARSAGRLAKNDVIDAEMIAWFGETFGEAKGQAYDAAREKLVQIVRARQALLDLQTSLQNRGEHAAPEVVQKMQARLLKKIAAELATLEVAIAATIKATAHFAELAEIIESVPGLGEGTAAGLIAAMPELGQVSNKVAAALLGVAPYDDDSGKRRGERQIQGGRRKVRNLFYMACLGAATRHNPMLKAFYQRLVARGKEKKVALVACMRKLIVILNIMIARRQTWDPSRFALG

SEQ ID NO: 206826 - protein, 400 aa, unidentified
MSGLKGSFDCFVGIDVSKDKFDACGITGEEVKLFQISAGMDRKGFEKLKGHLASVSVSSVLIGMESTASYHVNLFSYLVSEGYKVILINPLLISNYVKMQLRKTKTDKKDAVVIAQFLLANGDTLIQRITPSLISDLRDLSRQRESLVDEMTSLKIEIKQLLNITFPELEHMVGIFTKSILNLLQQYPSAFALRDADLDQLSQMLIADSYGHKREAFAAALIKAAHSSIGINSTAKEMILKQKIALLFHLEDALQEITGMLIEMARKLMEEDINIMTSIKGIGDKTATNFLVEMGGDINQFERSGKIIAMAGLDPAVYQSGKHEGKGRITKRGNRHLRRIIWLMTTKVIQYTDIFNAYYQKRRKEGLPYKMAVLATAHKLIRVIYAMLTQRTTFCPQMNS

SEQ ID NO: 206827 - protein, 404 aa, unidentified
MDHELLAYDVYVGIDIGKYKHYVLAQTAKDQKTVLSKEVKQDEKEIRDVLDECSAFGRMLVAVDQKGSIGKLVVVTTKAVGIDIGFLTPNDFYNFSKGYSEVKSDAHDAYIISDVAMRFTHRLFAIDDEEGEAQESLKALCASRKALVEENTRDKNRIRASLIQTHPSLEAIIDRDDLDRAVYLHILMRYGGSEGIRKAGQNKLEGFIAKQPYYKNKASELAERIFGALSMQTVSMPGAAAREAAIKQAAASIIARNARIDTLEDQIEVLYRSFPDSAVLDSVPGVGKVYGPVMLSEIGDIEQYKDAGHLAAYSGTGPSKRQSGKTLDTAKKKVKCNRRLKEAFCQSAWSSVSWDEWSAWYYNKKRAEGKEHRQAILALARHRTDIIYAMLKNGSLYEPKTMKP

SEQ ID NO: 206828 - protein, 370 aa, unidentified
MRIIGCDLHARQQTLAMLDTETGELVDLTLMHEGDKVREFYSKLPRPVLVGIEATGSMHWFLNLMEELGIECQVGHPATIRAAEPRKQKHDRRDAELILKLLAENRFPAIWLPSKELLDLRALLLHRHQWVRMRTRIQNALQAIALANGLRRGPSLWSYDGQTKIAFLPLLPHAAYRRNALQAMYKNMESEIENLTQQVAEQAGNRSGARRLMTHPGVGPVTALATEVFLGDPQRFADSKALASYVGIIPREYSSGERQRLGGVTKQGSPLLRFLWGEAGAHAARRDPELKRFYRRKLVQKGLGKARVAVARKLGIRLWIMLRDEIDYHEFCRRGQRQQKTVRPVAGMPETGNGAKSHRQSDEATRLPGS

SEQ ID NO: 206829 - protein, 523 aa, unidentified
MATRFRSRTRRSGRFLTVAKPSGSLHPRVQKVGPEHFGIVAVDCAKARSKWMLADFYGRILIEPTVVEHNKRGFDSAIAQIRRARESHALGDIIVAIERTGIYHLPVKRVFSSNSFETRIVHPLTTRQYRLPADPGNKTDDTDLLAIHRATTNGFGLIEPQLDEVHGPLRLLARYRRTLVRKNASSRNQLITLLDVVLPGYTGLFHDIFNNPAALAIARTVTSAAEVQALGVDGLAQVLKTLEVRSQRRTLEQILAWTKGIENTADYAAMSNTIIVSLDDDRCARLQQIGMMEQKMAGLLARTPYVVLLSIPGIGVVTAGEFAGEMGPIANYASDQAITGRAGIYPSRYQSDKVDRCDGPLVRRANRSLRGVILLIADNLLLINRFFQGLKMRWQAEGMDYRDMCVHAAKRFCRIAFQMVAGRQVFRHPSCQKRDAILRKLTCFHVDHGTSMAQVLTDLQAAIDHIPKSEHTPEAKSLFDAMQPRNRRQQTGLRRLGEILPGVLAKVGVTAVELSSKGENDLT

SEQ ID NO: 206830 - protein, 342 aa, unidentified
MNVKTIGIDLAKAIFQIHGVNEYGKCLFNKQLKRAQLISFFANLPPCLVGMEACSSAHYWARKLQGLGHTVKLMAPQFVKPYVKTNKNDAADAEAICEAVSRPNMRFVPMKSSEQLAVLALHRARQGFVKARTAQANQLRGLLAEHGIIIPKGIAHIGKHLPEILEEYENGLPGTFRQLLERLGEHLKALDRQVQELEVQLQSWHRENVARKKLAQIPGIGPITASALIASVGDAKSFKNGRQLAAWLGLVPRQHSSGGKQTLLGISKRGDSYLRTLLIHGARAVLRVAERKAQHANSWLAGVMGRRNHNVAAVALANKNARIVWALLAQEREYEANYGVVA

SEQ ID NO: 206831 - protein, 333 aa, unidentified
MHMLSPSNLLWIGVDVSKATFDAALWGHQDFQKMATAAFPRTEEGVRAFRTWALAHGGDAVGVVMEATGCYSQELGRWLQRDMPGSRVAIVNPSLVKAFGRSLALRNKTDRLDACMLARYGQERAPEAWMPMAPERAELRDLIRTRAKLVRLQVTIRLRLEDALGRIGSPAGKAQQKVLKVLQGQVEALDKAIERQLRQVAELGHAVELLTTIPGVGRVTAATLLGEAGDLRAFRRGRQLTAFVGVSPRRYDSGSSVRGRTRMCRIGGVHARTVLYMAAVSASRTGTPLGDFYRHLVDQGKPKKSALGALMRKLVLVMRAVLIQDKPYSPLPA

SEQ ID NO: 206832 - protein, 349 aa, unidentified
MKHYVGLDVSLKETSVCVVDEGRKVVKEGKVASEAEAIAAFLTQMGLPIELVGMETGSLAPALYHGLVALEVRVVCVDARHMKGVTSVMPVKTDRVDARNIAWAMQAGWYKRVHVKSLATHKLRMVLRSRKILVDLRLDIDNHIRGVLKAFNLKVGKASPGSFEKRVQELVADNADIAAVIETLLQARAELVRRVEVLHRMVLSLTKRDPVCRLLMTVPGVGPVTALAFCTAIEDPRRFSKSALVGAYFGLTPRKYASGEIDRTGHVSKCGDTMVRSLLFEVANALLTRVQSWNWLKRWGLEVVKRRGKRRAQVAVARRLAVIMHRMWLDRTDFRWSRNGETPTAAAAA

SEQ ID NO: 206833 - protein, 416 aa, unidentified
MSQKLKEQRLKELAFVGVDTHKDEHTACIANCFGQSLGVFTSENRPKELKGLLEKVDETAKSHNLKPVFGLEDVMGLGQHLARSLISGGYHLKEVNPIETERKRLKNAHPDKSDPLDALAISRVLITDFDKLPTIQSLNEIYLAIHELSNRRDSLVKEKTRIKNKLHILLHREYPYYQTMFKNTFSKAALAFWERFPIASLLKGIGVERLAQYLRANSNNTVSTKKALSILKLVDKDSVPSCLNLVHSSIIRNLVKHLRFIEEQIAIVEKELEPLVDETGMKLSTLTGVDLVTAAKLIAEIGDVNRFSSSDKLARCAGIAPQQKSSGKKLKFKKSNRGRRQLNTAIYHIALSQISRDRSGKPRNSKARDYFLRKISEGKTKKEALACLQRRLCDIIYAMMKNKTEYRFQRTTNLVT

SEQ ID NO: 206834 - protein, 310 aa, unidentified
MDAIVVGIDVSKDRLDGHVAPSGEAFFIANDAAGVEELAGRLAALSPAIVALEATGGFETLAVAQLAAAGMPVAVVNPAQVRSFADAMGKRAKTDPIDAAVIARFAAASDVKAKPLSDEQTQLLAALVARRRQITAMIVAEEARLKQALGKKLKQSIARLLTALRRELKSLDGDLDGQIHASPAWRLKEDLLSSVPGVGKGIARTLIAELPELGSLDRRQIASLAGLAPFTRQSGKWRGKSFIGGGRASVRAALFMGALVAARHNPVLKAFRDQLVARGKPKIVAIVATARKLLTILNAIIREQKPWQIA

SEQ ID NO: 206835 - protein, 340 aa, unidentified
MINNFLGIDISKDRFDVSLSFISNKGKRETRKRSFKNNDHGFQGLLSFLQKHNVEQVKACMVATGCYSEALAEFLHNTGHFVSVVNPACIRFYAKSKLIRQKNDQTDAEIIADYCQRQEPIRWAPPSPELKKLKHLYRCSAALKDELTLVNNHLEKKERLPKEVANAWEDLAMNIKQKIERIKNSLRELLNKHKELLENFQLLLTIPGIGEESAVAILAEVPNIKAFKDARQLAAYAGAIPRNITSGTSVHAKPRLSKSGSRTLCKAMYFPAIVAKNHNPTIMTFCKRLKEKGKHNMAIVGAAMRKLLHIVFGVLRSKKAFDPDHIKNYRARSLAESLVL

SEQ ID NO: 206836 - protein, 357 aa, unidentified
MTPMLTDKVDFVIGVDTHRDSHTAAIVTAAGGLVERLTVATDAFGFRKLDTFAAKHATGRRVWAIEGTGSFGAGLTTHLLGRGEWIVEIDRPARPARRDGAKSDDLDAVRAAREALTREHLAAPRARGDREAMRVLLTAREGAILARTKAIGQLKAMIVNAPQSLRDQLRRGTTDEQLNRCARLRTLPSHSVEHRATVRAIRATARRALMLEAEAAEHETELELLVTAACPQLLDRPGIGVITAAQFLISWSHRDRIRSEAAFASLAGAAPIPASSGATVRHRLNRAGDRQLNRALHTVALTRLRFEPTTKAYAARRTAEGKTPREIKRCLKRAIAREVYRIMQTDAASITTIETAA

SEQ ID NO: 206837 - protein, 366 aa, unidentified
MVRCSISGASVLYEAIGIDLAKNCVSAALLTTDGEVVCIDRLDYSELEKSAQALSSTTFAMEPCTEMNYLVQKLEAWGHRCLVIGGKNVQNYVENHFSGQKTDLNDAQALAFLAQDTQLRTIKAKDVEQQKYASLTTLREQYIKQYRQTIVSLKGICQAWGLNISKGISGKARLKDLIENHAAFPEELKESLVDMVTHAQTAQKALNKITKTLELLAKNDKVCQLIQTIPGLGSICSCRLRATVGDIKRFKSPKDFPAYYGLVPRSIATGHNERKGKITHRGDRTMRSLMVQAAGSLVNMATKGKLKSKQLTKWILKKQKEKMPWGKLVCAVAAKLLRIVRAVLISNKPYNSKIAGVAKCSLPKGS

SEQ ID NO: 206838 - protein, 337 aa, unidentified
MKYSGIDLHSNNAVVAVIDDQDRVLYCKRLTNDLSLIVAALAPWHAELQGVVVESTYNWYWLVDGLMAAGFVVHLANTAAIKQYEGLKYADDKRDAVFLARVFRLGLLPEGYIYPPQERSLRDLARKRMQLVQQRTLHILSIESLLARQLNLHINGEQVQRLDDAVVHALGLPAYVERSLMANLAVLRTLRMEIASLETILHQEVKLRPEFQILKTTPGIGDILAATIMLETGTIKRFPGVGHFSSYCRCVESKRISNGKKKGEGNARNGNKYLSWAFIEAAAVALRCCTQARRFYERKKAKRLPVVAMKALAHKLARAAYYMMRDGKPFEAQRCFG

SEQ ID NO: 206839 - protein, 322 aa, unidentified
MKHILGIDVAKAKLDVSLRLPNGKARSKVVDNTPAGFTALSAWLQKHDVDTLHVCMEATGVYWEAVAEYLVDAGFIVSVVNPAQIKAYGAASMVRTKTDKVDARLIADFCLAQSPDPWQAPPPALRELRALVARRDALDAMRTQEQNRLLVAREVVKASIEAHLEQLDKAIAEVDKAIRQKIDDDPELKEQSDLLDSVPGLGAKTIPVLLSYYGGPQRFEQAKEAVAFAGVDPRHHESGSSVRGKARMSKIGHAAIRKALYMPAMVALHRTVWGRVFRDRLASAGKIPMVIIGAMMRKLIHIAFGVLKSKSPFNPELHGVVA

SEQ ID NO: 206840 - protein, 264 aa, unidentified
MSLGTIGTRQADIDKVIRKLQAKGARLVFVYEAGPCGFWLYRYLTRQELTCVVVAPSLIPRKPGDRVKTDRRDAITLARAMRSGDLTAIYVPGIEDEALRDLSRGRHDALQDLKRSKRRLKSFLLRQDIRDEGRASWNAAHLRWLAGVVCPTPPQQIIFQEYLRAVTEQHERRQRLERELHDAVKSWRRYPLVQARQALRGVELTGAVILATELGNISRFDRPRQLMAYLGLTPSEYSSGDRRRQGSITKAGTSHARRALVEGA

SEQ ID NO: 206841 - protein, 366 aa, unidentified
MLRTQQEAETGVGVVLGVDTHLDAHVAVALDQLGRRLDAVSVPADARGYEALVGWAEGLGPVVCAGIEGTSSYGAGLARHLSRAGIKVVEVERPKRRHLGRNGKSDPKDAEAAARAVLAGDVAGVPKSGDGLVEMIRALRAARRSAVKARSQAANQLRSLRVTAPDGLRERLRGLSTKRLVAAAVRFRPGALPETPEEATKVALRSVARRHRVLSEEIAELDAQLDRLVAEAAPGMLALLGVGTDHAATLLVAAGDNPQRLQSEASFASLCGASPIEASSGKVMRHRLNRGGNRDANRALHLICVVRMRYDRRTKLYVARRTAEGKSKREIIRCLKRYVAREIYRVLVSGTAPPPIGSPTMAATSM

SEQ ID NO: 206842 - protein, 323 aa, unidentified
MSQPNLQCMGIDVAKLSLDIATTDTIEPFTVGNDEDGFAVITDKLKHTKINLILMEATGGLEAAIACKLQSEGYDVVVINPRQARDFARSMGYLAKTDKLDAAMLAQLALVIDRHPDRSRYIRHLPDEARAVLATMVVRRRQLNHMLVAERNRLYPSHPQSRKSIDNIIDALQNELDRINEQMKQHMTAFFQEQARLIGSVKGVGDITVASLIAELSEQGKLNRREISALTGVAPLNRDSGKMRGKRTTFGGRAGVRATLNMAALVATQFNPAIKLFYQRLLAAGKPKKLALVACMRKLITILNTMLRKGEEWNASFQSQVIS

SEQ ID NO: 206843 - protein, 424 aa, unidentified
MKVTYQTCCGVDVHTSFLVATIVKTTGGIEPSYQKKRFSTFNNSILEFKQWLLDNDCHDVCMESTGKYWVPVFNLLEDDINVVIANPKWVKAVKGNKDDTKDSKWIGDLFRLGLVKGSYIPCKKVRILREYTRYRYKLVSCRSSEKNRYQNALTVCNAALDSVVSDIFGKSSTSIIDYLLEQSGSSINHEEIASKLLRSLKSKEYAVIESVEGYQMTDAQKYRMRLVRAHMDYITAEINDVDKMIENMISSNTDFENAVQFLCTIPGVKRDSAITIISEIGTDMSQFSSSKRLCCWAGLTPGSNESAGKKKSVRITRAGVYLKPALVQCAHAAVKSDKSPYYKKKYESLVKRRGKKRAIIAIARMILTAIYQMLSTGEQWNPSDLYKIDMPVALVEKQKAKAIKQAKKLLQREGLLPPDEPLAS

SEQ ID NO: 206844 - protein, 429 aa, unidentified
MIYAGVDVAKANHVIGAVGDDGQPLCKSMEFKNSDAGFERCSAWLEGLAEEPSDVFVGMEATGHYWMALFARLAAEGYSVCVINPMEVKAVRKLKGKSKVKNDRVDALLIAETLRIGEYVETKLASDEVQSLRTLTRYRQAIKEEAAQVKIRLTCVMDSYFPEYAGVFSDMFGSASLAVLEKSPMPSELLRRKAPSLASDISKAARRQIGQAKASELKAAAKSSVGITLGLGAASFEVRSMVSQVRFLDERASEAEERIEELLMGIEPLVLTIPGVSLATGAQIVAEVGDVSRFRSAAALVSYAGLNSSVSQSGQFDSGGGPITKQGDPYLRRAVWLAANRARQHDPALKAFYDKKRAEGKRHRVAVTAVARKLCHIVYAVMRDQVPYDPNRQAALRTSSPAGRASGPASACLQAFGIRLSKCAFQCFL

SEQ ID NO: 206845 - protein, 326 aa, unidentified
MDVLGIDVSKLSFDATLLTATGTSHYQAFPNTPEGFAQLQLWLAEHQITSLHACMEATNIYWEALASWLVAHNAIVSVVNPARIKGYAQASMQRNKTDKLDSAVIADFCLKQRPSAWEPASEQQRHLRALVRHRDDLLQTQLQQQNRMRDSTDKLVRASLQSLLKAIGSELEAIERQIKELVATQASMSANLVLLTSVVGIGMVTAAKLLAEFGDLEQYQTAKAAAADAGLTPSHYQSGTTVRRRPKMSKIGKAGIRAALYWPAITAMRHCPAVKRFAERLAARGKPKKVVIGAVMRKLVHICYGVLKHQTPYDPAKAFGHTSSAT

SEQ ID NO: 206846 - protein, 334 aa, unidentified
MQNVALIGIDLGKHSFHVHCQDKSGNALLRKKFTRTKLIEFLAGCSSATVVMEACAGAHFMARRITDLGHEAKLISPQFVRPFVKSNKNDFVDAEAICEAASRPSMRFVQPRTEAQQAMRALHRVRESLVRDKVKTTNQMHAFLLEFGISMPIGTAVIKRLSTVLAENELPPYLAQLLMRLHAHYLYLVEQISELETALEQELSRDEAGQRLQTIPGVGPITASVLSSQLGDGKQYGCSRDFAASTGLVPRQYSTGGKNTLLGISKRGDKNLRRLLVQCARVFIQKIDYQSGKLADWVRAQLARKHSCVVCCALANKLARIAWALTTQKTVFEK

SEQ ID NO: 206847 - protein, 377 aa, unidentified
MRVLYDRVAAIDVHKDMVKVAIRVPGAKRGTRKTDVLEFRTFYGVLQAMARELRGRGVTHVVMEASGVYTDPVYYALRELDFEEVMVINPAHAKALKGHKTDAKDAIRLLDLYECGLLSGSYIPDPDLREVRDLARYRMKTVQARTSEIQRLQKTLETAGIKLSSVVSDVTGGSATAMIEALISGERRGSVMAGLAQTRMRTAGKMADLSMALAGRFTDHHALMCRLHRDRITIFDDAVKDLDAKIAPLVARYAREAELLKTLPGFGDVIVAGWLGAIGPAPHQHFATASRLASWATICPGNYRSAKKSKGGRTGDGGAYIKPLLIQAAWGAVRYRAGCRPGSAAWSASSAVRGTRGRGSGRSPRSPTPCSRSPTPS

SEQ ID NO: 206848 - protein, 346 aa, unidentified
MKQYVGLDVSLKLTAICIVDQTGKIEREGMVASNPEAIAAFIKSHAPHVARVGLETGATATWLWTELNKMGLPIICIDARHAKAALKMQINKSDRNDAVGIARIMQCGWYKEVRVKDLDSHAIKALLVSRALLVKIKRDLENQIRGLLKNLGLVIGRAKMNMFALRAAELTEDRPELAGAVEPLLNAREAIERQIADLDRKVLRLARNDAQVRRFMTAPGVGAITALCFLATIDDPTRFKSSRSVGAYVGLTTRRYASGEVDWSGRISKCGDKLLRSYLYEAANVLLTRVAKWSALKAWGIRLAKRSGLRKAKVALARKLAVILHRMWIEGTEFKWSSKEATNQPA

SEQ ID NO: 206849 - protein, 386 aa, unidentified
MIIIGVDPHKRMHVASAIDPATNHRVAALQVEASLAGYRRLLKWADTFGERRWAVENAHGLGRHLAQWLLARGEAVEDVPSTATARVRELSRGGRRKNDVIDAAAAASVAALHGDANPVLPEDLTTVLGLLDERRTNVTTQRTRLVNQVHAVFRDLLPGGAPQNLTAATASRLLAGIRPVGPVEAARKQLARDLVSEIRDADQRLKLLTAQIAETVAATGSHLSEVDGVGPIVSGRLLARTHKMSRFPTAAAFASYAGVAPVEVSSADRVRHRLPRGGDRQLSHALHIAAVNQIRMPSSAGRAYYDTKIAAGKTEKEARRCLKRRLADHIWRLMIRDERDDAAGPGGQQGTTVQSSAAGSTPNTSSSDKSLPEPATPDSTTSQTAA

SEQ ID NO: 206850 - protein, 358 aa, unidentified
MDKSKGNRVHFKNQPIYIGLDVHKKSWSVSIFSKYGEYKTFSQPPEVDPLVHYLSHHFPGALYFAVYEAGYCGFWIHDRLKEKGIECIVANPADIPTKDKERRTKRDRIDCRKLARSLRNGEIEQIYVPSRSKLEDRTLIRTRQSMVRKQTRCKNQIKGMLLFYGVRIPEQKEMGHWSRRFIQWIEGIRLERASGDTALKAHLEELTHLRQLIASLNRAILHLARTQEYRPLVRLLRTIPGISTLAAMILLVELDKITRFPSLDQLSSFVGLIPDTQESGDKQYIRGITHRRHSQLRWLLIEASWIAIRKDPVLLMAFEQYCQRMRKTKAIVKIARKLLNRIRYVLKNEAEYVPGVIE

SEQ ID NO: 206851 - protein, 355 aa, unidentified
MSQIIKQVIGIDCSMDTLDCSYGFLGSDLKQSIQPVQVFSNDAKGFKKLVAWSQKKIDKSVSNVFLVEATGVYHELLANYLVDNELKVSVVLPNRTSNFFRTTKIKTINDPSSSRMITQFGLEKEIDLWKKPDAVFLFLKQLTREREQLVGERTSIKNQLHAETKGAFPDSGSVKRIKQRLKLIGNQIKEIEKEILDQVEKNPELKRKVENICTINGVGLLTCIIVIAETNGFDLIRNKKQLVSYAGLDVIEKQSGTSVRSKPRISRKGNRHIRKALYFPAFSAIKYTDQMKNHYAHLISRHGIKMKAAVAIQRKLLVLIYTLWKTNEIYIENYEQKKLGRQLLATPMELDQVCS

SEQ ID NO: 206852 - protein, 339 aa, unidentified
MRREDFECIGVDVSKDTLDVALFRGKVDWNEGHVKVSNNESGYKELKKWLRSKQAEKQRMRVCMEYTGLYAHDFRTWLEKEDITYYMVDPKRMHNFAPPLSIKGIRQTKTDKADAFRIAIYCSLFHDSMEPSRLPSPVFFKLKRLLAERKQYQKQVVLYKQQLHDISVYDTVSSRMRKQKELTNLGRCVRQTEKEIGEIIESDAAIKKNYDLLLSVVGIGLVVAVTTIVLTENFTVFANPRKYASYIAIAPFPHESGTSVRGATRVSRQGFRQAKADLSVCVLTAIRLDPDIKEYWQRKKAEGKHTGVVFNAIKFKLVLRMFAVVKRGKPYVNTKGYKG

SEQ ID NO: 206853 - protein, 415 aa, unidentified
MALKIVYKICCGIDVHKTFVVACIASTDNKGITSYESHRFSTYTSGLKDLLQWLLTRNCKDVCMESTGKYWIPVYNILESDCSIVLAHPKYVKAIRGKKTDKKDAKWIADLFKHDLVAGSFMPPTDIRQLRDLMRYRFKLTCFKSSEKNRLQNCLTISNIQLGNVVSDTFGKSAQAILDKLLENPADTSFDLEPLVFRSLKKKLPELRDAIDGYITPEQAGKLKIIKAHYENLESRKAELEKLILALAAPYQQELTILQTAPGISSEFTAIGIISEIGTNMEAFPSAKHLCSWAGLTPTNNESAGKKKSVRVSKAGCYIKPLLVQCANAVVTSKKHPEMRNRYLRLRKRRGHKKAIIAIARMLLTALYHMLKNGENYNAELYQKSDLPPVDREITVEQALIITRNQGYKIKSATI

SEQ ID NO: 206854 - protein, 396 aa, unidentified
MNGPIISFDVSKGSSHMQGFLDHGKPAGKATVIRHDLKDFAKIDALRGKIREETGSNPAAVYEYTGVYSHTLERYLDSIGMRRYAISPLESAKVRKAMIRPTKNDSLDCRTIAEVYYLRTLREVRNDDEIHDSLRDMGRFYHYLLEVKIVEKGRYYRCLDDVWPCFDKVIEPNSPKSLAIISHYGHPSKIRSKEQVKNFLMKLPRHGRVSTDELAEKIAAYAKTHVSGASPDSYKVKEVKMMSARVKGIINESERVMDSMISKAENLPEFALLKTIPGIADVTATRLIAEIGDINAYPKADSLIAYAGLDPAVMQSGQMTGEHMHITKKGNPHLRATLYVAVINMIMSKAENMITRYVLKKKNSGPSYKAAVIAGCSKLLRLIHAMLRNGTCYSDK

SEQ ID NO: 206855 - protein, 349 aa, unidentified
MFIIGCDFHSRFQQIAMLDPTTGEVLERRLEHENEEAKKFYASLPGPARVGMEATFNAQWFERMLQEHHHELWIGDAAEIRAAMVRKQKTDPRDALHILDLLLTNRFPRIWVPSPAERDLRQMLRHRHKLVRFRTSVKNQLHALAMTQGLCRRKKLRGRVGRKELESLVLDPWASRRREDLLKLLDQLDPWIDNLDEAVIQAADGFPQAVCLMEQAGVGSVRALAFVLTIGPVSRFANSKKVVSYLGLNPSEDSSAGRQRLGAISKQGNSMMRYLLIEAAQGASRLDPELRRDYQRLKFRRGSAVAKVAIARKLTVRLYWKLRAAQPVPSARMQGSPGTPVVGESLSPN

SEQ ID NO: 206856 - protein, 350 aa, unidentified
MLIIGCDYHPSFQQIAYVDNETGELGERRLLHREEAEQFYSKLREQSAVVRVGMEASGHARWFERLLHELQFELWVGNAAEIRTKRVRKQKTDRQDAQLLLRLMMEDRFPRIWMPDAENRDLRQLLWHRHRLVQMRTRVMNQLHVVALNEGLRRKKALWRPAGRKELESFVLAPWASRGRQDLLDVLDQLTPKIQALSRALEVEVEKRAVTRQLMTHPGVGPLTALAFELVIGNPERFHCGKQIASYVGLVPTEESSGDRRRLGHISKQGNALLRFLLVEAAQVTVRSQPEWRSTFFHLAMRRGRKIAKVAMARKLAVHLYWMWRQGWDYGQLQKLGSHAGEPGNRDGVQ

SEQ ID NO: 206857 - protein, 350 aa, unidentified
MNKDITVGLDLGDRFSHFCVLDEAGAVLKEDRVRTTPEALQERFGAMKPVVLAMEVGTHSPWVSRVLSELGHDVVVANPAKLRMIYQNPSKCDRADAMMLARVARLDRALLSPIHHRSRGTQRDLQLLQTRNALVKTRTQWINHMRGLAKALGYRLPSCSAPSFHKRVAKDLPEALRETMGPLLELMGRLTERIAEYTKKIELMCRDKYPQAAVLREVPGVGPITALAFVLTLEDPKRFTKSRHVGPYLGLVPRRDQSGDSDKHLRITKAGDRYLRWLLVNCAHYILGAHGPDSELRRWGLARCAQGGKTGKKRAVVAVARKLAVLLHRLWSTGEVYDPFYTPESKTAAP

SEQ ID NO: 206858 - protein, 424 aa, unidentified
MKVTYQTCCGVDVHKSFLVATIVKTTGGIEPSYQKKRFSTFNNSILEFKQWLLDNHCHDVCMESTGKYWVPVFNLLEDKINVVIANPKWVKAVKGNKDDTKDSKWIGDLFRLGLVKGSYIPCKKVRILREYTRYRYKLVSCRSSEKNRYQNALTVCNVALDSIVSDIFGKSSTSIIDYLLEQSGTSINHEEIASKLLRSLKSKEDAVIESVEGYQMTDAQKYRMRLVRAHMDYITAEINDVDKMIENMISSNPDFENAVQFLCTIPGVKRDSAITIISEIGTDMSQFGGSKRLCCWAGLTPGSNESAGKKKSVRITRAGVYLKPALVQCAHAAVKSDKSPYYKKKYESLVKRRGKKRAIIAIARMILTAIYQMLSTGEQWNPSDLYKIDMPVALVEKQKAKAIKQAKKLLQREGLLPPDEPLAS

SEQ ID NO: 206859 - protein, 403 aa, unidentified
MEGPLISLDVSKGKSNYRFFENGTDRKGKKGVIRHDIQGFDSIRDEAEKMEKRLRIKPSVIFESTGVYSDVVEKYFTDKGFDVYVISPLLSASMRKEGVRPAKNDSLDTLSIAKVFYSKDDLRKCSENDKKAERLREMSYELDMMNRRIRPMKCQFLRLLDKVWPCLDEVSDYSSRFMLDFIIAFGHPENIKTVKGVLSVIRKSEMGTAGRKDKIAQDLFDYCHTHLSAVSKDSSYVELLKRMAIELKAMAKKKSELIDRMAEEARNKDEFARLLTIPAVAKTTALKIMARVGDISRFRNAEALVAYCGLDPRVYQSGKMTGEHRTITKKGDCILRSTLFLAVKLMVMLYPDTKVARFVAAKAKNGLSYKQAVVAGSAKLARIIYSMLTHHENYVEFNANIVA

SEQ ID NO: 206860 - protein, 370 aa, unidentified
MRHGSTLYVGLDVPKDSIAVAYATTDGPSDPVHVGAIGTRQCDIDALVRKMQSKSAPLVFIYEAGPCGYWLYRDLTRKALTCVVVAPSLIPRKPGDRVKTDKRDAVTLARLARSGDLTPVYVPDVPDEAIRDLARAREDALRDLNAGRYQLKALLLRHDIRYVGRANWGPEHVRWLARLVLPTPAQQIVFQEYVRTVTERTELLHRLEAELLEQAKPWRLYPVVDALQALRGVQFTVAITTIAELGDLTRFDNPRQLMSYLGLTPSEYSSGDRRRLGGITKAGNGHARRVLIEAAKAYRHRAKVSEQIQARQQHLPAPIRDIAWRAQVRLCGRYRKLLARGKHPNTIAAAVARELAAFMWAIARTQAVSA

SEQ ID NO: 206861 - protein, 312 aa, unidentified
MDSIVVGIDVAKDRLDVCVRPSGESFVAVRNSAGIEDLAQRLKQLAPRVVAIEATGGFETVVAAGLAAAGVPLVIVNPAQVRAFAQALGKRAKTDPIDAAVIAHFVEATQAQPRPLPDETTRLLAELVSRRRQIVDMMSAEGQRDRRLTNKRLKNSIARLRRALEKELAEIDSEIDDHVRGSPAWAAKQDLLASVPGVGPVIARTLIAELPELGSLDRRKIAALVGLAPWTRQSGQWRGRSFIGGGRKTVRTALFMAAMVAARHNPVLKIFRDKLVAAGKPKLLALIAVARKLLTILNAILRDNRPWQPKTA

SEQ ID NO: 206862 - protein, 377 aa, unidentified
MSKLRFVGLDVHAETIAVAVAEAGGEVRSLGIIPNRLESVRKMIGKLGSVGTVKCCYEAGPTGYVLYWQLTQLGVACEVIAPTLVPTKAGDRVKTDRRDAEKLARCYRAGELTAVWVPDAAHEALRDLVRAREAAKKDQLRHRHRLGKFLLRHGMRPRDAGKAWSKKYLEWIRIHVRFQQPALEATLAHYLHEVEHAAERIGMLEQAIDEAVAQAAPEIRAVIEALQALRGVAQMTAATVVCEVGSLARFENPRQLMGYSGLVSREHSSGNRVQRGAITKTGNAHLRRVLVEAAWAYQRRPNVQGRLLRRQQSLALSEEAKRIAWKAQQRLHKRFTALAARGKNKNQIVTALARELLGFLWAIAVHTEAQFKLAKAA

SEQ ID NO: 206863 - protein, 341 aa, unidentified
MSESALIGIDLGKHTFHLHGQDKSGREVFRKKCSRAQMMQFFGNVPSCVVVMEACAGSHFVARQLMAMGHTAKLISPQFVKPFVKGNKNDFVDAEAICEAASRPSMRFVTPKTESQQTLSVLHRMRESLVHDRTKTANQMHGFLLEFGISLPKGLAIMKRLASVLAEHDLPVRLTVLLQCLHDHFVYLDEQIKALDKELAGQLANDDLGSRLLSMPCVGPITASLLAVEMGDGKQYRCGRDFAASVGLVPRQYSTGGKANLLGISKRGDKHLRQLLVQCSRVYMQRLDHQKGALADWVKTLLSQRHSNVVACALANKLARIAWAIAARHTQYEAGPDALNA

SEQ ID NO: 206864 - protein, 418 aa, unidentified
MEVEHDDQEIIQRVAALDIGKAELVCCVRVPGSGRRRLQEVRTFSTMTRSLLTMSDWLAGLGVTRVVMEATGDYWKPPFYLLEGSFETWLVNAKDVKHLPGRPKTDRLDAVWLCKVAERQMLRPSFVPPEPIRVLRDLTRYRVDLIGARTAEKQRVEKLLEDAQIKVSVVASDIFGVSGRAMMTALIAGERDPETLADLARGRMRKKTTQLQEAFIGRFNDHHAFLLTKMLARIDQLGADIADVEERTTTQIAPFADAVASLDQIPGIGVTAAQAIIAEIGLDMTRFPTPAHLCSWAKFAPGIKESAGRKKGNGDTGHGNRYLARVLGEAAVSAARTDTFLGERYRRIARRRGKKRAVVAVGRSILVIIWHLLNEENAHFHDLGPDYYDSRVNLNRKMRNHVRELQHLGYRVTLEPAA

SEQ ID NO: 206865 - protein, 387 aa, unidentified
MAQSNDQSRSLAALDQDSTLIAVIEMSQSTWLVAGIVPGINRQPLKKLAADEAALLQLLYRWRDEATKAGRTIDRIAVAYEAGRDGFWLARWLRGRGIEAHVIHPTSVAVSREHRRAKTDRLDTELLKRAFLGWLRGEPRHCSMAKIPTPEEEDAKRPNRERENLVGERTRIVNRMKSALARLGLRGFKPTLRKAAERLDRLCTAEGVPLPPNTLAELRRDMARLRFVMDQIREIETARLVRLEQHPEQASHPMVRLLARVIGVGIETADMLVHEILSRNLRDRKAVARYAGLTGSPDESGARRREKGLARAGNARVRRGMIQLAWRFLMFQKNSALAQWYHRQTADSRGTTRKTMIVALARKLLVALWRLVTTGEVPEGVVLRRAA

SEQ ID NO: 206866 - protein, 352 aa, unidentified
MDTSKYIGMDVHMATTVIAVADKVGRIVAEAVIETKPPAILDFLKSQRGAVHVTFEEGTQAAWLHDLIRPHVAEVVVCNPREISVKDNKADKSDAKRLAELLRTHGLKAVYHGEHGIQALKELTRSYGAILSDSIRVKNRLKGIFRGRGISCTGTTVYSKKGRDQWIQKIDNNAVGSRISKQFKELDCLTELRNEAEKELLAEARKHTATKILRSIPGIGPLRAAVILGFTSTPHRFRTKNQFWKYCGLAVTSEVTGEYTFIDGQVCRSRKKPLVRGLNINYNHALKDAFKGAATTAAMGAWRSDFNAMVANGTRSSLVLLTLARKIASIALAVWKKGELYDSKKLKFKHAV

SEQ ID NO: 206867 - protein, 447 aa, unidentified
MAQRKRPTTQSAITLTHPNAAGIDIGSVAHFVAVPPDRDDEPVREFASFTADLHRLADWLDACGVDTVAMESTGVYWIALYELLEARGFTVLLVNARHVKNVSGRKSDVLDCQWLQQLMSFGLLRGAFRPADQVCVLRSLSRQRTMLLRSQGRFVQHMQKALTQMNIQLANVISDVAGETGQKILRAIVAGERDGLALARLKNSRIRASEDEIAKSLQGSWRAEHLFALKQALDAFDFCGTQLAECDAQVQAQLQALHVREDEPAQGKKRGRARNAPKFDLRTQLFQMCGVDLTRIDGIDVTTALVVVSEVGADMCKFPSDKHFASWLGLCPGTKITGGKVMSGKTKRCANRAAQALRLAAAALRSSQSALGAYYRRMCARMDKPKAVTAAAHKLARLIYAMLTHGQEYTDRGQDYFEERYRQRVLHNLAQKAKAMGMQLVPSDNTA

SEQ ID NO: 206868 - protein, 365 aa, unidentified
METIYIGVDFHARQQTICYLKTETGELVTCELKHQDKQKVRGFYAQFGGRVIVGLEASGYSPWFERLLEELGCEVWLGHATEIRRRARWRQKNDRRDAELILELLLHDEFPRLQRPAMQSREVLRMLRYRQKLIKIRTMSKNSLQAIALQSGLARGSRLFTKEGQQQLGTAEMSPVMHWQREHWLQLMAPLNQQLLETMVWFKAESKGDLSVMRLRTHPGIGLLTSLCLVHTLQPVSRFRNTRKVAAYAGFDPVERSSAERKCFLGISKAGSRLLRYLLVEAAQTAVRKDEDLKRFYQRLADRRGRPKAKVAAARKLLIRAYIMLRDEIDYAEFRHRAVAARLARRGQRPEVPEVLIGQPASPEQ

SEQ ID NO: 206869 - protein, 355 aa, unidentified
MNDAKYIGMDVHQATISAAVRDSAGNLVMEATLETKAETILEFVHGLRGSLHVSLEEGTWAAWLYDLLNPHVAEVLVCDSRKNALLRVGNKNDREDARKLAELLFLNKLNPVYHGETGIRTLKELARSYLTITRDLTRVMNRLKAIYRGWGIACAGQQVYAPRYRVEWLAKITEGGVRRRAEIYYQQFDALAALRQEARRELLAEARNHPAMRLLRQIPSIGPIRAALLIALMQTPHRFRTKRQLWAYCGLALKTYTSGDYRFVGGQLKRSKKAVAIRGLNKNHNHDLKNIFKGAATRAAATTGPLQNFYEARIANGMKPPMARLTLARKIAAITLLVWKKGVRFDAEQLRQQAA

SEQ ID NO: 206870 - protein, 398 aa, unidentified
MKTSGLDVHKDSIFCAVYDGKSYSVVKEFSTTTNSIRLLGAYLQSEKVKKVAMESTSSYWVPVWDILYEMGFELKLVNPLHIKQLPGRKSDAKDAQWIAELLHKNMLRGSLVPSPLIQELRSYSREYRTLVNQRTKVLTQMDRILVVCSIRLSSCISNIDSKSFMQIVEALIRGDTDPETLVRLVYGNRKNKESGKLKECLTGNMKAHHRLKLSTCKQQFDLLESQIQLYLNEMQKLCSEHFSEEISNLTTLPGVSQISAMIIVAETGGDMSAFENSGKFTGWTGLRPRNDESAGKFKSTATTKGNKHLRAIIVQVAWAASRTKGSFFMDRFQKLAMRKSRKKALVAIGRKMLVIIWHILSEKMQYNPHLVHIYDPVKVEHKIKYHEREMERAKKLIA

SEQ ID NO: 206871 - protein, 371 aa, unidentified
MTETVKYVGLDVHKETIAVAVADGERGGEVRFVGTVANEDDAIRKLVKRLTGPGVTLNVCYEAGPCGYGLHRLLTKLGQNCIVIAPSMMPRRPGDHVKTDRRDAMTLARLLRAGELTAIWIPDEAHEAVRDLIRARRSAQDDAIGAKQTVRSFLLRHDRRFGGKAAWTKMYWRWLSEQRFDFPHQQLAFEEMQKRVLEAQARVGRLEAALTEAVDAWCFAPLVRNLQVLRGIRLVSAATLVAEVGDLTRFDNPKQLMAYVGLVPFEHSSGARTKRGRITRAGNAQARTMLIEAGWSYRLPAREERRYRERVIDLSEDIQAIGWKAQVRLCQRYRRLAATGKPQPKVTTAIARELVGYAWDIARRVSPAIAG

SEQ ID NO: 206872 - protein, 342 aa, unidentified
MKFYCGIDLSARDCHVCVIDEQLKVMVQQKLRNELPKVCQLLAPYKANLKIVVESTFNWYWLIDGLQAEGFDVVLAHTLGLYLITGAKVKTDRRDAYSLAKLLLVGAVPAAYIYPVETRPVRDLLRRRAHLVQVRAGEYGSLRRLLLRQGILSSKQQEIKTATETELEQWFAHPLVRLHASQELQRIELYSQQIAELEKTILLLAKTEQSYELLLKLPGVGQTIALTILYEVGERTRFANVKVFSSYCRVIPGIAQSGNVTRRGRASKQGNHYLKAAFSQAAVHAVRCYPKVRRYYERQLKRHQGRGRQMICYNIIAHKLAQAAFHVLKEQTEYREELLFGR

SEQ ID NO: 206873 - protein, 313 aa, unidentified
MKKTICGVDVSKAKLDVCIEPGHRLASFNNDAAGIAELAAFCSEHAVTLVVMEASGGYERRAFVELWERGISCALTNPRNVRRYAEAMGILEKTDRIDSSVIARFADAKNLAPTPLPSQAQQRLKALVARLRQVTDDLTVQKQRRASLLDNTEMRSSIDEVIALLKRQSRKLEGEIASMIDDDPLWAKLAETWREVKGVAGRTVARLHAELPEIGILTNKAAAKLVGLAPIANDSGKRKGKRPTRGGRAGVRSILFLVAAIAARYDKSLADFRDRLVAAGKEKMVIRIALARKLLVRLNAKARDARAAYANAT

SEQ ID NO: 206874 - protein, 317 aa, unidentified
MTNVTFPPLIQRGCGIDVHLKVVVATIDGVGIRKETRSFDTFTSCLTEMKEWLLAKGITHVAMESTGVYWKPVMRVLEADIPNVWIVNARHIKNVPGHKTDKMDSEWICKLLLAGLLKPSYIPPKEQRQLRDLTRYRNKLIQAIAAEKNRMMRVLEDCNIKLSSVVANTSGVTATALIDMLCEGRKLTIEDIESVYHKKLSASPQELLEACTGFVEEHHVYMLQMIRKSIAQTQGLVDELSKRIKEILIKYDNVLELLKEIPGFNTKVVEDLVSEIGLDMSAFPSEKHLASWAGICPGNNESAGKKKAEELLTVTNK

SEQ ID NO: 206875 - protein, 381 aa, unidentified
MKKDSIAKLQVTKSQIRRMAAKQRLTVGLDLGDRSSRYCILNEAGGKASEDQLPTTKAGLDSLFGKMAVCRIALEVGTHSPWVSRHLAAMGHEVIVANPRKVRLITQSVKKNDRMDAEQLARLARVDPQLLGPIRHRGAEAQGDLAVIRARGELVDCRTALINTARGLAKPMGERLKSCDADYVKESLAEGLSEATQNAIRPLLKSVEEITRQIGAYDKKIQEIEKRYPETKVLKQVHGVGTLIALTFILTLEDAERFAHSRDVGPYLGLTRKLRDSGESQPELGISKAGDVLLRRLLVQAAHCILRDGAPDSDLKLWGLTKVQAGAGKKGSKRRKKRATVAVARKLAVLLHRLWVTGEVYDPQYNRKAVEAAKGRGKAAA

SEQ ID NO: 206876 - protein, 333 aa, unidentified
MSRFWVGIDVSKRKLDVALLNDAGKVKSKSLANDPSGFAALMTWLEERGADPASTHVCMESTGTYSDGCATAFADAGWLVSVVNPAQPKSFGQSELNRNKTDVMDAALLARYCSKMAPAAWQPPPLEYRKLRSLVERLQALKDMHQQEANRLEATAEAAAHQSISEHLTWLEARIVELDKDIDDHIDRNKETLGKDAKLLTSIPGIGKTTAAKVLGLLGDLRRFSSGKALAAFIGVTPKRHESGTSIRGRSSIGRAGHPRIRHALFMPTLVAAKHNPTIKAFRDRLVAAGKPKKSAALASMHKLVHLMHAIVCKGVGFDPRFGQLALDGQDGI

SEQ ID NO: 206877 - protein, 431 aa, unidentified
MSKRKYRAVQVKDVSTSQLKESLVGRSVVAIDVAKEDFFAAVMDALREVRVTVKWKHPVQSDEFVRFVSAVAESVELDIAMEPTGVYGDALRARLCTAGHEVYRVSPKRAHDMAEVYDGVPSWHDAKSAAIIAKLHLDGASEKWPVASDYERRLKAALRVLDLHHQEELRNRNRLQSCLARHWPELTRILSAGSATVLELLKAYGGPATLAADADGARELMGSVGGRFLSQEKIDAVVASAQTTFGMDPIDEEVRLVQAVAGECRRHQQASKAARRRVEEISASSGSSRHMAPVVGKTTAAVLTASVGDATKYDTAAAYEKSFGMNLKEKSSGKQRGALHITKRGPGTARLYLYLAVLRLIMSDVVVRAWYAKKVKRDGGTRQKAIVAIMRKLIRALWYVAQGEAFDSAKLFDVGRLKLEPANTTQETATM

SEQ ID NO: 206878 - protein, 419 aa, unidentified
MTRRDDSRIIGVVYPICCGLDVHKESISACVIWADKDGVDQYEVEVFGTFTDDLMRLRQRLLDYECPVVAMESTGIYWRPVHNVLEGYLRVVLVNARDIKNVPGRKTDIGDSKWLAGLLRHGLLKSSFIPPQQVRQWRDLTRLRMKYVHTVRDYRKRTHKLFESANIKIDSVVSDLFGVTGRNLMDLLVTDRKALTLSDVAGCVRGQLRGKEAELFRSIQGFFTDHHRFILKMLLSTIATLEAQIEALDHEIGCAMKGNEPLLERMKKAPGISDVSAFDILAEIGPNLDSFPTDSSLASWSGLCPGNNESAGKRKSGRSPVKKHHLKTIMIEVAWADIKKKGSYFKDKYYRLKARRGPKKAIVAIAHRILLGIYHVIKDGVDFRDLGEDYLTLKNKSQKIFHLRRQALSLGFDLVSQTM

SEQ ID NO: 206879 - protein, 358 aa, unidentified
MAGKVTEAAVVGGVDTHKDLHVAAVVDQNNKVLGTRFFSTTRQGYRQMLAWMTSFGVLKRIGVECTGTYGSGLLRYLQNAGLEVLEVTAPDRMERRKRGKSDTIDAECAAHAAFSGIRTVTPKTRNGMIESLRVLKTCRKTAISARRVALQIIHSNIISAPDELREQLRNMTRMQLIRTLGSWRPDASEYRNVTNVYRISLKSLARRYLELHDEIADLDVMIAAIVDELAPELIKRNAIGYESASQLLITAGDNPQRLRSESGFAALCGVSPVPVSSGKTNRYRLNRGGDRAANSALHIIAIGRLRTDDKTKEYVARRVAKGHTKMEAIRCLKRYISREVYTLLRNQNRQINSIPITA

SEQ ID NO: 206880 - protein, 374 aa, unidentified
MSYVTSIGLDVHARSITAVAFDPATGEVRSKRFGYAPAEVAAWTLAFDSPKAVYESGVTGFHLVRALRGLGVDCIVGAVSKMHKPAADKRKKNDRNDAEFLARQLAARNIKEVWIPDEECEAARDLSRVLEDVREDLTRAKHRLTHLLIRHGYAFDEIGPDGKRKGKWTRAHWEWIRSIELSEAAARDALDFYVSEVRHIEAQKKAIEKEIADYARADRWRGRVEALRRLKGIETMTAFSLVAEAGGFSRFESARAFSSWLGLTPSEHSSGERVSRGGIIKAGNTHLRKQLVESSWHYTRATTKRKRDQRGEEVPLAIENYAARGREAPCREAGSLCKAQSSPGGGQRGHRKRALLLGMGCGLHVGRGSRIETR

SEQ ID NO: 206881 - protein, 316 aa, unidentified
MVDHPVYVGIDVAKATLDVAVAPTAERWTLAYTEREMAGLVTRLTALAPALVVLEATGGLEGPLVGALAAAGLPVVVVNPRQIRDFAKATGTLAKTDALDATVLARFAATVRPTPRPLPDAATQTLAALVTRRRQLVEMLTAERNRLGSAPRTLRAEIQAHITWLKRRLARLDTDLGQAIRTSPAWRVQDDLLRSVPGVGPVLAATLLASLPELGRLDRKAIAALVGVAPLNRDSGTLRGRRRVWGGRAAVRAVLYMGTLVAVRHNPVLRAFYQRLRAVGKLPKVALTACMRKLLTILNAMLKHQQPWTPAYAHPA

SEQ ID NO: 206882 - protein, 368 aa, unidentified
MKQQTSATTETLNKGKTMIDFTGKTIHVGIDVHNKDWQVGQFHAGLVLGNHRITGDSQVLIDFLKKRYVGGTLKCVYESCAWGFNLQRQLTAAGIECIVVHAGDVPGSDKEKKNKTDKVDAVRLARHHAAGLLKAIHVPDEELQKERNLMRFRKKLVGDLTRSKNRLKSLLKFQGIEIPAKMDNPNWSKNFITWIEEQVANDTLLHDTVGLMLEEVRLQRQLLLKTEKKIRQLMSSEKYAAKTKLLRSVVGVGPIVSTLFLLEVGDIKRFKGFDPLNNLIGFYPGSNSTGDKDIDTGISKRKHKQLRTMLVEAAWQAIRQDPALLDAYQQLTKRMKGNEAIIRIARKLLRRMRAVLMSGQQYQTGVVK

SEQ ID NO: 206883 - protein, 355 aa, unidentified
MKKIFIGIDFSKKTFDATMIQVIDEETETRLYAKFDNHKKGFKKFFRWAKKGAKDVPYTDWLLCGENTGLYSIPMAEWAYEQGIFIWIENALSIKRSLGLVRGKNDQLDSARIAEYAMEKRKKARSWHPLSKSLKSLKTLLQRRDSIDQCRRKLLNIIKEEREILGHNETIDYIYNRVKEITDQLKELACEIKQKMKEMALADPELATNYTIIDSFKGIGVINAVTLLVYTNNLKDVPTANKLATMYGVAPFGEDSGDTIHKEPHVSHYANKWLKAQITNAAKSAVIWNDKITAYFLRLTETEKKPYGVAMNNVKSKILHIVFTMVKNQEVFDYAYDVKKKDKNKKGEPKVLNQS

SEQ ID NO: 206884 - protein, 400 aa, unidentified
MIEIGEVGVFLGLDVGKSAHHGHGLTPAGKKVLDKPLPNSEPKLRAVFDKLRDKFGTVLVVVDQPASIGALPLTVARETGCQVAYLPGLAMRRIADLYPGEAKTDAKDATVIADAARTMPHTLRSLELTDEVTAELTMLVGFDQDLAAEATRTSNRIRGLLTQFHPSLERVLGPRLDHTAVTWLLERHGSPQALRKAGRRKLVEVIRPRAPRMAQRLVDDVFDALDEQSVVVPGTGTLDVIVPSLARSLAAVHEQRRALEVQIAALLEAHPLSQVLTSMPGIGVRTAAVLLTTIGDGSSFPSAAHLASYAGLAPTTRQSGTSIHGEHAPRGGNRQLKRAMFLSAFAALHDPASRGYYDRCRARGKTHTQALLRLARQRISVLFAMLRDGTFYKPRTPRLT

SEQ ID NO: 206885 - protein, 343 aa, unidentified
MQTITTVGLDIAKSVFQVHGVDAAGQVVIRRQLKRRSVLTFFQKLPSCLVGIEACASSHHWSRELQALGHTVRLMPPAYVKPYVKRQKNDMADAEAICEAVTRANMRFVPTKTPEQQSCLMLHRARHLFIRQQTAVINSIRAHLAEFGIVAPVGRKGVTELLHIVADPSDKRMSEVARVCLAALGSQLLALKEQILEFDRKILAWHRSNQTSKRLHYIPGVGPLLATALVASVADPRAFRSGRNFSAWIGLVPKQHSSGGKDRLGSISKQGDRYLRSLFVVGALAVIRYAKIHGTGHRPWLTALLARKPAKVAAIALANKIARMAWAMMAKGERYRNPVALAR

SEQ ID NO: 206886 - protein, 387 aa, unidentified
MEARIVNTPSAALDNEPARCFFAIELSKTNWLVAAQGPAGNVSRYQLPGCDANALLELIERIRARVKRETGRPVEMVSCYEAGYDGFWLHRFLVARGVRNCVIDPASLQVDRRARRAKTDRIDAERMLRALIRYLRGEPDACSVVRVPSVEEEDAKRLHRERHRLVAERVQHVNRIKSLCALQGIYDYQPLRPDRMERLDHLRTGNGQALPVRLKAEIERELERLQLVLEMIVSLEAERNAITKDKAPTAHLHADKIRKLVRLKAIGPEFSTALVGEVFYRQFANRRQIGSYVGLTPSPFSSGAIARDQGISKAGNPKARTMMIELAWMWRRHQPGSALTVWFNERVGNLKGRPRRIAIVAMARKLLVALWRYLETGLVPTGAILKA

SEQ ID NO: 206887 - protein, 412 aa, unidentified
MVVFCGIDWAEEHHDVALVDGEGTLVAKRRISDDAAGFTALVQLLADAGDTEDQRIPVAIETNRGLLVACLRATGRQVFTINPMAVSRYRDRYSVSRKKSDAGDALVLANILRTDLAAHRPLPSDSPLAQAIAVLARAQQDAVWDRTTAHNKLRSVLREYYPAILDAFADKRGGLLRSEARTLLAAAPTPHAAAELSTAKLRALLTRAGLQRNIDPEAYRLREILQREYLHHPQLVEEAFGRQALALLHQLDAACASAEDLAAAAAEQFDRHPDAEIITSQPGLGSLTGARILAEIGDDRTRFTDARSLKAYAGSAPVTRASGKAITVLHRRVKNQRLAATGYIWAFAALTASPGARAHYDRRKATGDRHIAAQRNLFNRLIGILHHCLQTRQRYDETTAFAATAIPTAAVA

SEQ ID NO: 206888 - protein, 356 aa, unidentified
MSQKLNAAIAVIGIDIGKNSFHIVGHDHRGAIVLRQKWSRGQVETRLANLPPCLIGMEACVGAHHLSRKLQMLGHDARLMPAKYVRPYSKGQKNDFRDAEAIAEAVQRPTMKFVATKTADQLDLQALHRVRERFVGQRTGIVNQIRAFMLERGIAVRQGLRSLRSELPGILATRTDVLSPRMLRIIEDLAGDWRRLDERIEELSSEIETLARQDKACERLMTVPGIGPIISSAMVAAIGTGDVFSKGRDFGAWLGLVPKQISTGDRTILGKISRRGNRYLRSLFVQAAWVVLVKIGPKHWDRYGLKSWIEAARKRLHHNVLAIALANKLARIAWAVLNKGRAFECVKTEETASRPA

SEQ ID NO: 206889 - protein, 402 aa, unidentified
MNAVGIDVSKSKSVVAIMRPFGEIVSTPFEIKHTASDIHSLIELINSVEGESRIVMEHTGRYYEVLAHQLLEANLFVSAINPKLIKDFDNDSLRKVKSDKADAVKIARYALDKWQNLKQYNVMDELRNQLKTMNRQFGFYMKHKTAMKNNLIGILDQTYPGVNTYFDSPARSDGSQKWVDFASTYWHVDCVRKMSLNAFIDHYQNWCKRKKYNFSQSKAEEIYGKAKELVPVLPKDAITKLIIKQAVDQLNSASTTVESLRTLMNETASKLPEYPVVMAMKGVGTSLGPQLMAEIGNVSRFTHKSAITAFAGVDPGVNESGSYEQKSVPTSKRGSSDLRKTLFQVMDVLIKTHPQDDPVYQFLDKKRAQGKPYYVYMTAGANKFLRIYYGRVKEYLASLPES

SEQ ID NO: 206890 - protein, 423 aa, unidentified
MEVMHERVAGLDVHKTLIVACVRITAGGKISRECRTFETTTAGLEALLGWLTASGCTHVAMEATGVYWKPVWNILSDGAFELIVANAAHIKNVPGRKTDINDAMWIADLVACGLVKASFVPEQQIQELRSLLRARKQLTREQTSHIQRIQKTLEEANIKLDSVISDILGVSGRRIIEAMIAGVRSPLRLAELADRRIKASPKALYDALRGRLTDHHRFMLKLYLGQHDGLAAAVAKIDQAVDGLIARMDEEVAAGQATFRSLIMLLCTIPGVSVLSARVILAEIGRDMSRFPTAGHLLAWAGLCPGQNESAGKRKSSRLRKGAPWLKTALVQCAWAASRKKDSYYKAQFNRLRSKRGPKKAICAVAASMLTAIYHMLKDGTLHHDLGADHFDRRSAEVKAKRLVAQLTKLGFQVELQPLPQAA

SEQ ID NO: 206891 - protein, 418 aa, unidentified
MSRRIAEKLTLVRPGTLYAGVDMALERNFAMIITERAETLAQFHFPNDRDGYDYFHRRLGTLQERQQAPEVLVGMEPTNYFWKLLAADLEQRQRPYQLVNPYTVKKHREGDQLDRSKDDPRDAFTIADLLRTGKYTETRLLHGHYAELRQSVTLHDRLQRDIRRCKTLIRNTAGQLFPELTTVFQDFTAPTILALFRSCPAAALIRAVSAEQLVQWARSQFQGQRLQATKVRRIYELAATSVGLREGLQSLQMTLRLYVDQWQQLQSQAEEVRAVLTDAFLAVPEAPYWLSLHGLGAVTAATILAEIGDPSYYRQPAQWVKLAGIQPVPNTSGRKAHSQTPMSHKGRSRLRTALFFAVMRLVQVDESFARSYGYYQQREKNPLTKMQALGALMNKLLHVLWALGKRRVFYDPAFAMPA

SEQ ID NO: 206892 - protein, 421 aa, unidentified
MRGLRTKKVNTIKEGTLIVAVDIGMVSNHGCCTTADGRSTKTFSFDNTRDGLDILWNMILASKNRFQCNEVIIGYESTGPYGEPLIHYLKQKPVTIVQVNPLHSKRMREINDNSPLKTDRKDPRVIADVIRIGHALSVLVPEGDAAYLRRINNARERHIKERTALLNQLQQFVFLIFPEFSRIIKTIYSKTALYILKKYTTPAKVCSVNIEKLGEEMRRRSMGKFGVEHAAALINYAKTTIGIQEGLDGLVMDIQHALVQLEMADSLIAELEHEMETTLHRIPYSRKLLAIKGLGIVTVAGLIGEVGDFTKFTTQSEIAKLAGLDLYEISSGKRQGQRRISKRGRSLLRKILYYAAMQAIRKNGIMHDYYQKLIGRGMKSMMALVAVSRKLLRIIFAIVRDDTEFILNHESQRKEEMRRAA

SEQ ID NO: 206893 - protein, 344 aa, unidentified
MKKKVFIGIDFSKLTIDVTFFYAESPDLFYYQMFANSEEGCKKMIKWIKKLQPLTSDWLVCGEYTGIYTMTLALVLNEQNIDLWLENPMQIKLSSGINREKNDKVDSRQIALYAARFEDRVKLYKPQGEVLLKVRELVRHKDRLTKVKTQLKVPAQELKRVRNNCDIAACINRSSQEIIKVIDSEMKDVERQMMFLLKSDPELKRLYKLVTSVVGVGMQTAIYLLIHTSGLTSFASPRQLACYCGVAPFAKRSGTSIKGKTQVSHIANKKLKTLLHMCALNAIKYDPIIKKYYERKIEEGKHKMNILNNVRNKLIHRIWAVVQAGEEYDKNYQHVEILELDKVA

SEQ ID NO: 206894 - protein, 391 aa, unidentified
MTMYFVGIDISKYKHDCCIISAANQKVVSKFTFKNDKSGFEQLNLILNSLSTPEDIKIGFESTAHYALNLELFLENAHHSFMEVNPVLIKEYKKSTTLRRTKTDSVDCESIARWLITVEYKPHSKGFYHAYSLKSLTRLRDRLIRQRSFYLVKITNVLDHTFPEFKPFFNERLSKTALYLLENYGSAEKMARMNSASYDKLRCISRGKFSIQQFLRLKELAANTVGVNNSIFDLELNTLLTLYKSLSDEINTLETEIIKLIEEVHPHYMSIPGIGPISSAVIYAEYGDISNFSNPGQMLAFAGIEPGINDSGTESHGGRMVKHGSSQLRYVLLNACLPLIRFDLTFATYYEKKRAEGKKHRVAITHVTKKLIRVIYALERQDVDFNAQKLR

SEQ ID NO: 206895 - protein, 363 aa, unidentified
METATIIGLDLAKRSFQAHGAQADGSVAFRKKLTREKVLGFLAEQPRCVVAMEACGSAHHWGRAIRDAGHEVRLIPPAYVKPFVKRQKNDAADAEAIAEAASRPTMRFVAVKTEEQQARAMLFRTRDLLVRQRTQLINALRGQLSEHGVVAPQGPANVVILAQAIDDMTPSLPLLVVELARVYLDQIDGLSQKVAGLEKAIACEAKRGGMTRRLQTMPGVGPITAMAIETFAPPMEVFRRGRDFAAWLGLVPVQHSTGGKQVLGKTSKMGQRDIRRLLITGAMVIVRWACRKGAQEGTWLHRMLGRKPRMLVAIGLANKMARSIWAIHDKGGRLSRSCGCEPLIHDQVERPRERRACEEVEER

SEQ ID NO: 206896 - protein, 341 aa, unidentified
MTDVITTVGLDIAKNVFQVHGANAGGEAVFKKRLRRGQMSSFFAQLPPCTVGMEACGSAHYWARELSRLGHEVKLIAPQFVKPFVKTNKNDSADAEAICEAMLRPTMRFASVKSAEQQSVLMLHRVRQLLVRQKTQLLNALRGHCGEFGIIAPLGASRVGELIAIIQDDDDKRLPLVARQALGFLIGQLRSVKEQLAALEKQLKVWHRGNQASRRLETIPGIGVITATALVATIGDASQFKSGRELAAWLGLVPRQNSSGNKHRLGRISKRGDKYLRTLLVHGARTVLRWSKAKKENRSPQLEGLLKRRPANVVLVAMANKTARVVWALLSREESFQIRTA

SEQ ID NO: 206897 - protein, 342 aa, unidentified
MEHFAGLDVSVKETSVCIVDETGKITREVKVASEPDALLAVLTNPVYHFKRVGLEAGPLSQWLFSALAEAGLPAICVETRHMRAALKAQINKTDRNDARGIAQMMRAGLYRPVHVKTVRSQKLRMLLTHRKLLQSKAIAVENDLRATLRNFGLKVGMVGTVKFEARIKELVEHVSDLVVLVEPLLIVRRVLREQIGILHRRLLAIVRDDDVCRRLMTVPGVGPVVALTYRATVDVPARFRHSKTVGAVFGLTPSRYQSGERDRTGGISRCGDEMMRAMHEAAHIMLVRSTKWSWLKAWAMQIARRRGMKKAIVALARRLAVVLHRIWVDGSEFRWTRETVAA

SEQ ID NO: 206898 - protein, 338 aa, unidentified
MTLYCGIDLHAKSSYLAIIDEKRQRIFKRNVANDRQLILSFLAPYKAELAGVVVEATFNWYWLVDTLMEEGYRVHLANVCAIQQYAGLKYVDDKHDAFWLAELLSLGILKEGYIYPKKERPVRDLLRKRGHLMKLRTSLLLSLQNTVANVCGIKVPGHQVKSKEDHVSAHLSQHESLALMGQVSRASIDALTLQIKTIEAHVEKQYRIEPTYAGLQSLPGVGKILGLTIMLETGPIVRFPQVGDYVSYCRKADSTWKSAEKVKGKGNIKNGNRYLSWAFAEAAEHARMFDTASRNFYNRKVHERNAAVAHSALANKLARAAYYIMRDQVPYKEAKLFG

SEQ ID NO: 206899 - protein, 387 aa, unidentified
MIYVGIDIAKRTHYASVMNSDGEILAEPFPFTNDLAGFQKLLSCIGSFPKEQLLIGMESTAHYAENLTCFLFSRDFQVCIINPIQTASLRKSNIRKTKTDSVDTFLIIKALSLHDYRRFSKRDYDSLQLKNLCRFRQKLMKARTKVKIQLVSYVDLIFPELQYLFKSGIHTKSCYALLKTESNPDRIAKMHLTRLSNLLKKTSKGHYTKNHAIALKELASQSVGIKDDTLSLQILQSIEQIEMYTQQISKVEASICEIMDHMDSVIKTIPGIGNLNGAMIIGEIGDISRFEKPCQLLAYSGLDPSVYQSGKFTAARTRMSKRGSKLLRYALINAAWQLTLHNETFKAYYDLKVSQGRRHYNALGHVAHKLVRVIHKMMTDNRVFDLD

SEQ ID NO: 206900 - protein, 488 aa, unidentified
MAHSANTEFSSPAVAPARKAGRVHAHCARLRSPYAAQDKPFASGSTNPDRKGCDILLKINYMSTLFVGIDVSSKSNAVYAMDFEENKYISSSFGNNQPGADELADMIAKCMQKHKNLDTIIVALESTSVYSVHIANFLSTCETLMPYKPYVFCVNPKATSNYRKSYIGMEKTDPIDAFLIADFARVGRTKKLEPWRGGQFIALKRLTRHRMHLSECITREKTYMVSNLYLKFSELQLLEGDNKPFSNIYGATSSAILTEFLSPQEIIDLSEEELLSFLAEKSRNRISDISRTSELLRKAARDSYRLDQCMYEPLNISLASSFNCIQAYQKEIKLIEQAIEKCINGMNPNAFLILKSIPGIGPVWASGMLSEIGDITAFHSSDALAKYAGLYWLKNDSGDFISEDNQVSKVGNPYLRYYLGEAANSVRKHVPEYTEYYAKKYAEVTKHQHKRALALTSRKLVRLVFGLLVKNQLYTGEKLDTQSNINKN

SEQ ID NO: 206901 - protein, 358 aa, unidentified
MGKLYVGVDLHKRSCWVTVLDADGHVLESRRIGTTKPELLEFFGKVRKPAALAVEATFNWYYFLNVVEPLGLELHLVHPWKTRAIAAARIKHDKLDSRVLGELLRTGFLAEAWIAPCAVRERRQLLRYRVHTVQWATRAKNSIHGVLNRNGIRSPLRSPFGPQGREFLSQVELPGGDRWEVDGQLERLDLLGEQLAALDQEIRKRAKASPVAQALEEIPGIGPFIASLIIAEVGDLRRFPSAKHLVSYIGLAPSLYASGEHRWGGPITNPGSSVLRWALVQAARRAALNPRFYGFYQRQRERHGANRATVALARKLAVIAFYRWRHASHAPQPLPHGEKVRERTSGGAWSEHRPSMSD

SEQ ID NO: 206902 - protein, 414 aa, unidentified
MNDPTVTPLSTGAVFAGVDWASADHAVCVVDAAGAVLWRHTVAHSRAGLARLTAGLTELGVARVGIERPDGPVVEALLDAGLRVAVVPPRQVKNLRSRYRGAGKDDRFDAYLLADAMRTDGHRFTDLTRDTAETVGLRALVRARQDLVEVRVGLVNQLRHTLELAFPGAVGLFFDLHSPIARAFLRRFPTAAEAAVLDEESMTAWLAAEGYSGRTPAAVFIDRLRAAPAGLTGIEATARRHITLALLAAIDAIEDQAAELSRRVKEALALHPDAPIFTSLPRAGQIRAAALLAEIGDARGRYPSPDALAAAAGVCPVTVESGKHRAVGFRYIADLKLRRALTDFADDSRHANPWAADIYTRARARGMRHPHAVRVLARAWTAVIWRCWQDGIPYDSARHGALNRYLGQAALAAA

SEQ ID NO: 206903 - protein, 377 aa, unidentified
MTRKNTLKSLPTDTDFRVVGLDLAKSDVSVAAIPVDDNTPSLVDRMTYADLLDWAGKISPTLFAMEPCNGYSLLCLQLENLGHEIKVISGWTVSMWINTHLSGQKTDLNDAIALARLAVSDAELTPIRHKSITEIRIQTVQAVRQQLMSQRSRSIVSFKALAQQWGIPCAAGHRNLKKLRESIKAKVDLITRPVANAMLFLLDAVKSLDRQIGQLNQTLQELVMSDERGRLLQSVLGVSTQISARVITVVGNVERFNSPRSLVAYVGVAPRNFITGHKNLTKKKHGNCPDLSHKGQGKISRRGDKLLRSLFIQGAACLYMQFCKDQLPECQLKRWILKQLASQKPYGKLIVSLAAKLIRIVWAVLTYGENSIFRKPA

SEQ ID NO: 206904 - protein, 360 aa, unidentified
MLTQRTELDFKGQNIFVGIDVHLKSWTVTILTEELTHKTFTQPASADTLNNYLRRNFPGGTYNSVYEAVFCGFWTHYKLKAMGINNIVTNPADVPTSQKEKLQKDDPTDSRKLARSLRSNDLKAIYVPDPATLEDRSLVRMRATLVKDMTRFKQRIKSFLYFYGINYPPQFEKSGSHWSKRFMKWLNEEVILEHDTGAQALKILVQEAEQQRKLLLEVLRKVRLLSRSEKYAANMALLRTIPGIGPITSISFLVEIENIERFENTDHFAGYVGLTPNRHSSGDKTNDGEMSFRGNKTLKSLLIESSWTAARSDPALILSYHSYVRRMEPNKAVVRIARKVLNRMYYVLKNKTEYVPGVVK

SEQ ID NO: 206905 - protein, 341 aa, unidentified
MVTTIGIDPHKATHTAVAINESETVLDEITIPADRDQTGKLIDWAAELDGDGRCWAVEAAGGLGHLLSQQLIAEGEHVVDVPPVLASRVRLLGSGRSDKNDPNDARSVAIAALRQPGLAVVLREDHTQVLRMLAKRHLELTSLRTQTACRLHAMILQLRPGGITRRLSATNTARMLRGMRNLDLIGEQRRMMAKAHLADIRRLDREIKVNKVLISKAVATSGTTVTDVYGVGPVVAAFLIGYTSNIGRFASADHYAAYNGTAPIEMSSGGKTKHRLSMRGNRMLNHAIHMAAVTQIRHDTPGRIYYNRKQAEGKTRKEALRALKRRISDVVYRKLVADQQS

SEQ ID NO: 206906 - protein, 317 aa, unidentified
MPDFGVIVGIDVSKDRLDVYVRPEGVRFSVCNDEAGRRALAGRLNLYVVKVVALEASGGYERPVVADLMAAGFAVRLLNAGQVRKFALAGGLRAKNDRIDAEVIAHYAEVFDGPVCQSDSQTALLGELVGTRTLLVEQKVALGNRRRMMSDAGVRDGLDTAIAELDRQIREIEGRLADIVAADPVLERKAEIVTSVIGVGSVVSWTVLAQLPELGTLGRKPIASLVGLAPFDRDSGAYKGLRKIEGGRKPLRDVLYMAAQSARRYNPDLAAFDERLRAKGKKKKVAIVAVMRKLLVMLNALIRDNRLWMPDHVSVRP

SEQ ID NO: 206907 - protein, 343 aa, unidentified
MQVTTIGIDLAKNVFQVHGVDANGKVVFNRPLQRSRVLSFFAKLPPCLIGMEACASAHYWARELKKLGHEVRLMPARDVKAYVKRGKNDSVDAAASCEAVQRPTARTVPVKTPEQQAQLMQHRVRDLLVRQRTQAINALRSHMAELGIVAAQGYDGLKELLAIIADAGDARLPENARASLSGLVQQIASCQAEIGALEKRLVTQHRKCADSQRLETIPSIGVIGATAIVATVPDASIFKRGRDFASWIGIVSRQNSTGGKQRLGPISKQGDRYLRRILIVGAFAVLRQARAHPEKYPWVAQLLAHKPAKVAAVAVANKTARIAWAVLTKKETYRAHPTTAAAT

SEQ ID NO: 206908 - protein, 345 aa, unidentified
METMYYIGLDVHKKTISYCVKDGSGQIHSQGAIPATRLDLDLWMKTLPQPWTAAMEATIFTAWIYDHLLPHAAALKVAHPLMLRAIAAAKKKNDRIDAHKIADCLRCDFLPERYMASTEIRERRRMLRYRNLLVRQAVQMKNKIAVLLMEAGVSYNKQKLHKVGYFRELLATNQDIDEGLKPLLRLCRETVVRLGKTESALVRSLQRDSLLMERVERLMTIPAVGPITALTWALEVGDVQRFSSIKKAISYCGLCGAENSSANIIKRTPLSKQRNKHLQTVLIEAAKMAPRNSPELAMVYEQEKQKGNANRATLAVARKMVAYLVAVDRRQKGFLVVENKNRTAA

SEQ ID NO: 206909 - protein, 385 aa, unidentified
MGSQTFIPREYEVFAGLDVDKKSISVTFADHQGFLKSMRMPYSVDHLVNHVRKHYGDKKVAFAYEAGPTGYGLYDGLVAQQYPCLIASPSMIPKAPGQRVKTNRLDSVGLAENLRGGQLKSIHVPSTLYRELRHLTQLRDALVSEVVAMKQRIKSLLLMEGLEFPPAPAGSQWSFLVKDKLRKLPCSSVVRFKLDQLLDNLEFGEKQVLKATREIRRFCQNDAELSQCIGYLKTLPGIGWIVASQMMARIGDWRQIKNIRELPAFLGLVPTERSTGERTERGSITHSGDPRLRSKLIQASWSAIRQDGELREFFRTVARKHPRHLGPRVAIVAVAHKLSVRASVVLMKQRPYEVRQKVQSAPVTQEETVPQGTTRRQAVPGEKTS

SEQ ID NO: 206910 - protein, 369 aa, unidentified
MGDRITYIGLDVHKDGIVVAVAEGGRRGEVREYGRIGNTPAALQRLASKLGREGVELRFCYEAGPCGYGIQRQLSAHGHECIVVAPSLIPKRPGDRVKTDRRDAASLAKLHRAGELTAVWVPDRRHEAMRDLVRARLDAVRALRRARQQLSGFLLRQGCHYGRPAWTKLHRRWLAGLRFEQAVHHIVLEDYIAAVEAAEARRDRLTAQIEAMLPDWTLAPVVAALQTMRGMALVNAATLVAELGDLSRFANPRQLMAYLGLVPSEHSSGASVKHGGLTKAGNSAARRLLIEAAWTYRFPARVSRELRLRQEEQPRPICEIAWKAQLRLCVRYRKLARSGKPANVVTAAIARELAGFVWAIARRLPPAAG

SEQ ID NO: 206911 - protein, 414 aa, unidentified
MLWGQAVKVWHPSALSKPTERSFCPMSPQNDQSKKCFTAFEQASTMVAVVELSKKLWLVAGIVPGIGRHPLKKFEADENRLLALLHHWQQQAVKAGREIKRIVVAFEAGRDGFWLARWLRVRGIEAYVIHPTSVAVSREHRRAKTDRLDTEHLKRVVLGWLRGEPDHCRMVAIPTVEEEDAKRPNRERETLVGECTRIVNRVKACLARFGIRGFNPTLRKAADRLETLVTPEGARLPPLTLAEMLRDIARLRFLREQIKSIEKARVQRLRDAPATRTNAMVNLIARVFGIGIETADLLVHEILSRNLRDRRAVARYAGLTGSPDESGDRRREKGLARAGNARVRRGMVQLAWRFLGFHPDSALTQWYNKRAADGRGSTRKTMIVALARKLLLVLWRMVTTGEVPADLKLRRTTA

SEQ ID NO: 206912 - protein, 381 aa, unidentified
MTNCIRYVGLDVHKQSIAVAVCDEAGRTQSLGTIPNRPEAVARLMRKLSAGTTLQVAYEAGPCGYVLYRQLQAMGLACIVAAPTLIPVRSGDRVKTDRRDAVKLARYLRSGDLVPVWVPDPAYQALRDLLRCRQDAKQDQRRARNRLGKFLLREGLSSPEPLKAWSAPYRSWLGTLSLAPAAKQRTFEDYLAQVDHQDQRLKLLEADLQEQVPTLPAQMQKVVGALQCLYGVQLLTAATVVAEAGELGRFAKAGQLFSYAGLVPSEYSSGGPEGQQRGGLTKTGNGHLRHILVEAAWHYQKRPGLSAKLLQRRQGQDPVVIELADQAHKRLYRKFTRLVQKGKPSCKAAVAVSRELLGFMWAIAKQAQRPKEPAPTRQATA

SEQ ID NO: 206913 - protein, 345 aa, unidentified
MFVAGIDAHATYSVIAIVSNTGELVQKPVRVRSSEADRLDALLEPFRPLEVVVETSPAWPWLFDRLEGPGVHFVLAHAKRLRVIAESNYKSDDIDAELLARMRLAGLIPEVHTKSVEQREQAVLLRGRARLVRQRTQMANRIHSQLHNVGLCLERGHLLTQGGRAWVRTEAWPRLGEERRMFITMQWALIDQLEPMIKTLDRRVERMGRDNPAVALLETIPGIGAYRALVIATETLPITRFRTPAHLVSYAGLAPRSSQSGMRPIRHKSIPAGANRWLRGTFVRAVVSHVANAPDSWLSESYEQMKQRLGWQVARVATARRLARAVHAMLRTGEVWRDQPISQKN

SEQ ID NO: 206914 - protein, 362 aa, unidentified
MFVERTSVGLDVHARSVVASALDTVTGEVVEARLIPKNEIVTDWIRQLPGPWAVAYEAGPTGYGLARHLASVGIRCEVAAPSKLQRPSGDRVKTDLRDARHLGKLLRLDEIVAVRVPSLEQEQARDLVRAREDARQDLMRARQRLSKLLLRHGHVYSGGNAWTLKHDAWLRSVRFTDRVGAITFDSDYDAVLSVTARRDRLDDAIEVMAADSVYTPVVARLGCLRGISTLTGFALAVEIGDWDRFTGRSIGAYVGLVPTESSSGEQTARGSITKAGNGHARRLLVEAAWHHRKPYRPGVTLRRRWDAAPAAARARGDAGNRRLRRRWVAFDARSKKPTIACVAIARELAGWTWSLATLDPDT

SEQ ID NO: 206915 - protein, 321 aa, unidentified
MQVIGNDMAKATFDVALPLSDGKYRTKAKFPNTTKGYTEFLAWRAKHAPDAAVGMEATGIYHEALARALVEAGVTVYVANPARVKAFGQAEGVRTKTDRSDAKLIARFFEAQRPEKLHPYVPPTPSEVKLRALVRRRDDLQEMLQMEQNRLEVADISVQQGINDVIRTLEEQIKQVRKAIQDHIDNDPDLRGRHQLLTSIPGVGDTSSAQLLAFLGDLNKYSDVRQVVAHAGLNPAQRQSGNYEGKARISRVGDANFRKKLYMPALTGKTYNPTLKAFAERLSEKGKPFKVIMCALMRKLIHLVWGVLKSGQPFEPEVVLA

SEQ ID NO: 206916 - protein, 405 aa, unidentified
MFYVGIDVAKEKHYVCILDDTKEIAIKPFWIYSDILGLRDLNTKLSELSLNNNDFIIGVESTGTFSEELYEYLSDADYKVILLNSYQTAKFRDFSTGRKIKNDSIDAYVIAELLSTGKYKESFISNNDYQSLKVLGRLKPSLMDKIKTIKREISTVVATVNPEITKVFPNIFTKTAIVIIKAYPTAVDISKATPQKLTKIFRHIKGNNFNDEKAKLLIELSKSSIYGGRACEARALMIRTNVKILELICQEKDEIEAQINSLLYNKIEEIDSSIENIKTIPGVSDKTISAVLGECGDIKRFPSVKSFIGYLGLYPTQYQSGNSMRVGRLAKRGIPIAKHALYMAAVASVIHNEQLRKIFRDKVSTGKSKKEALIIISKKLAAIIYSVFKYNKPYQPNRVFIPYKK

SEQ ID NO: 206917 - protein, 340 aa, unidentified
METVAVVGVDLAKSVFQMHGVDESGAVVLRRRVSRAQFLKLFAKLPPCLVGMEACSSSHHWARQLMALGHEVKLMPAQYVKPYLKRGKNDAADAEAICEAVTRPTMRFVGVKSPEQQAVMMLHRVRKILTRQRTQLTNALRAHLAEFGITARVGRLGLDRLLAVVADPNDDRLPTQARESLAVLASQLEMVKEQILDNDRRIMAEARRSEAGRRLMKIPGIGPLLASAIVASVADPAMFSNGRSLSAWIGLTPRQNSSGGKERLGSITKAGNGYLRELLVMGAMAVVRHAQRSSAKRPWLAQLLERKKPKVAAVALANKNARIIWAMMTRGESYREMQAA

SEQ ID NO: 206918 - protein, 311 aa, unidentified
MNNTIGIDISKDTLDAHRLADGQHKQFLNGKTGHAQLVKWIGKQSDPLIIFEATGAYHRQLERVLCTHIIPFVKVNPKQARRFAQASGKLAKTDRVDCEMLAKMGAALQLMPKPFTAENLYDLRELLSARRALIKDRTAAKARKATVINALIKQQLEKRLRQIKNDIAKIDALMLDVAREDQYMSERLDILFSIPGIGVITALMILVDMPEIGALNNKQVASLAGLAPMSQSSGKWIGKARIQGGRPNLRNAIFMPALVAIRHNADLKTKYDQLVTAGKEKKVAITAIMRKLLVLANALLRDNRKWAEKAA

SEQ ID NO: 206919 - protein, 423 aa, unidentified
MKLASEHRFTALVGIDWSDRKHDFCLQAAGSEQRESGVLTHSPEAIARWATGLYSRFGGPIAVCLEIAKGPLVTALQRHGFIVLFPVNPATLAKYREAFVPSRAKDDPSDAEIALELLLRHRDKLHSLQPQSANMRTLATLVEQRRDLVGDKTRITNRLSSTLKEYFPQALHWFEDRDTLLFCDFLQRWPSLKHVKRARQTTLRSFFSAHNLRRARLVEERIHGIRSASDLTDDPAVIRPRQLLVQALVAQLRVTLQAIDDFDAAISEVAERLPDYSLFAALPGAGSILAPRLLVAFGEQRERYGSAAEIQKYAGVAPVLERSGNKSWVHWRLACPIFLRQTFVEWAGSTIPRSFWASAYYQRQRAKGCSHQAALRALAYKWIRIVYRCWKARTPYDESVYLNALKRRGSPLIGDMATTAQIS

SEQ ID NO: 206920 - protein, 411 aa, unidentified
MENVFLCCAGLDLHKKSVEACVRRREPNGQVHQQTRHWGTMTGDILMMADWMAAQGVTHVAMESTGVYWKPIYNILESRFTVLLVNARHLKQVPGRKSDIRDCQWIAQLLQHGLLKGSFIPPRPQRELRDLTRHRTQLVEEKTRTSNRIEKVLEDANIKLGSVASEVLGVSGRSMIQALLQGEKDPTQIADLAQRQLRGKIPQLEKALEGNLTEHHRFMLRLLWKGLTQQEALIAELEAKIEEVTRPFASEIERLDAVPGVDRRVAEVVLAEVGANVDPFPTHQQVAAWAGMCPGNEESAGKRRKRRITPGNRWLKRTLVQAAWAASHAKNSYLASQYRRLTGRRGKKRALIAVGHSILVILYYLLKDGSQYADLGVDFFDRLEPERLTRYYVKRLQGLGHNVKLEPCVSA

SEQ ID NO: 206921 - protein, 418 aa, unidentified
MAFKIFRKNCCGLDVHKTWIYACIGITDANNRTEYKQARFSSFSKGLQELSSWLAKYSCTEVCMESSGKYWIPVFNILEKTCWVTLAHPKYTKPQKGNKTDRKDAKWICDLFMCDMIKPSFIPPPDIRHLRDLLRFRMKLTYQITGMKNRALNCLTVSNLKLDDVFTDVFGKSSRSIIQQILDHPNVNFDVTPYVDKHCKHPIEEIQAAIDGAICTEQATKLKICLDFIDEQKKRIAELDTEIFRLAEPYTSVLEFMRTVPGFSKEPLTAIRLLSEIGSDMSVFPTSKNLVSWAGCCPRNDSSAQKVKSTRISRAGSYLKPLLVQIANALLKSKEHPEFKERYRRIKARRGHKKAIIALCRMLLTAIWNVLSKCEPYSAKGYLADKLTEHSVVISKAEGLALLRQRGYIFKDEVADFA

SEQ ID NO: 206922 - protein, 332 aa, unidentified
MYDHYIALDWAKANMAIARMTQHDDKIRDNKDVPADIEDLKAYLSLLRGKTILTFEETTSAHWLYTELCTMVTEILVCNPHRNHLLSEGGKNDKIDAAKLVRLLKANMLKPVFHSGDFFFHLRKLTSGYEDLVKVGVRTKNQKSALFRALGVSKEADVSSKYDVFVFNGQQTLIDCYETEKKRYEREFSMLRRSNPLIKNLATVPGIGPINAVKLAAIVVDANRFKSKSAWLSYCGLVRLEKMSGGRSYGTRMPMYCRTMKNIFKTAALATIQNGYDNCFRDYYQHLITEKNYPSHNARHSVARRIAVITLGVFRRNKPFQDNWRCDSDNIS

SEQ ID NO: 206923 - protein, 403 aa, unidentified
MWFIGLDWADEHHDICVITDVGKQIGSLRIAHSPQGFENLKEFLLSITGPNKEEVACIIETNHGLLISWLLEAGYPVYPVNPKTIDRHRRPSGAKTDKIDAYLLAKYGRSEIADLRRLEPDSAIVAELKALTRDQDSLVRSQTRLVNQLTACLKAYYPVALKLFSKLQQHSTLAFLQAYPTPQDAMAASVGQIAQVLKEAGHPTAAKVAPKILETLHQPQLTADAITLRTKARLMQVLVKQLLPLVEEIAHYDKVIQELFLTHADSKLFRSLPRAGKRLAPRLLAEIGDDPDRYAEAASLQALAGTSPVLFESGNYSKPHRRYACSKPLRNALQQFAWQSTQRAGWARDYYQRKRKEGKSHTVAVRALANVWVRILFAMRSSHSCYCAATFEEAQRKHAPRAA

SEQ ID NO: 206924 - protein, 343 aa, unidentified
MIYIGVDLHLRFCYMTVLDASGAILRQGRVANAAESLQAFFKTWKFSGKEEEKILVAVEACGFWAAFLEIVEPLVERVVLVHPAKVKAIASAKLKNDRVDSATLAQLLRANLLPEAWKADRATRELREILRMRVSLGQDRTRYKNQVHAVLHQHGLRAPVSDLFGHAGRAWLAAVALRPAARQAIDTGLRMVEQLDQEVERLDQQLRQAAREDRDARCLMTIPGIGAFTAMVLKAEIGDIRRFRDKKSLFNYAGLVPVIRDSAEHQRRGGITHAGSPLLRWVMSEAAMTAARYSAAARAWYERLARRKHPHVARTALARKLLGAVWALWTHGVCFDERIFAAM

SEQ ID NO: 206925 - protein, 337 aa, unidentified
MRFYTKQHQYYCGIDLHARTMYLCILNQAGDILLQAIAPYRDDLVIAVECLFTWYWLADVCAGEDIAFVLGHALYMKAIHGGKAKNDKIDAHKIALLLKGGMFPQAYVYPAHMRATRDLLRRRMHLARQRAHLIAHIQNTIHQYNLPALGVRLGKPTERGEVDRHFPDPVVRQMVQFDLGLIDYYDTQLGKLERDLTQQAKGHDAQMFHLLASIRGIGRILTLLLLYEIQDIHRFPTQGQFLSYARLARCPKESAGKVVGKSNKKIGNSYLRWAFGEAAVLFLKGNPPAQRWLQKMAGKHGKGKALAILAKKLGVMVYAMLTKNQCFDELRFMAYLK

SEQ ID NO: 206926 - protein, 331 aa, unidentified
MEKDGWAGIDVSAARLVAAIEDARGRVQRVEVANDAAGHRTLLRQVRKAGRQVAVCLEATGVYHFDLALALHRASGVTVMVANPRSTAHYARAAMRRSKTDRVDAALLLDFVKRMPFRAWTPPSTVVLNVRAFARRIEALIQTRAQEKQRLHAITRSAEFSPALAAASRAHLAFLQSSIRSLTVDAKALVQTDPQLARRLAQLVSVPGIGERSALRLLGELAVLPADMTVRQWVAHSGLDPRHLESGSSIHRPPRISRAGNTHLRHALYMPALVAIRVDVAVGHFYRTLLGRQKRPKQAIVAIMRKLLHAIYGMFLHDEVYDATKCYPQAA

SEQ ID NO: 206927 - protein, 400 aa, unidentified
MHCTDHPAHLKASVREEDRSLFVALELSKSIWLIAASAPGSEKISKYRVAAADVAALLALLARLKAQAERYCGGPVRVVSIHEAGLDGFWVHRMLEANGVESHVVDAASIAVDRRSRRVKTDRIDVERLLRTLMGWARGERRICSMVRPPSPADEDERRLTRERGTLVTERTRHVNRIKGLLATQGVFGFEPLHKNRRKRLEELQQWNGQPLPPRLKTELVRELDRLELVMSQLAALEAERDRALQARRTAVSNTTKAPSPGTASAGEVGSQLLQLRSIGPEIASVLSLEAFYRNFNNRREVAAYAGLAPSPWKSGGIDVEQGISKAGNARLRTTMIQLAWLWVRHQPGSALSRWFHERVGDKRGKIKRIAIVAVARKLLVALWRYVTQGVVPEGAELKA

SEQ ID NO: 206928 - protein, 331 aa, unidentified
MQRKQFFIGVDVSKLTLDVAVHGSKNHIRISNNSEGFKQLLAWLKSLKIALQECWFVLEYTGGYEYRLVQFCNAKQISFTRVPGLQIKKSLGMQRGKNDKIDSKRIAEYGYEKREKLQQSKACDPAITRLKQLLTQRSGFVNDKKAHEHRMKELLAMMEFKPNDAVIKNYKIAVDFALKMIEKTEVEIKKVINKDEAMSRNFTLVTSIPGIGNVNGWMTIAYTENFESFADGRTYGAYIGVVPYEHSSGTSIKGKSRVSHMANKPLKADLSMAAKASVQHDPEMKEYYERRLAMGKRHMGIMNEVKFKLVLRMFAVVNKGVVYVKKQKLAA

SEQ ID NO: 206929 - protein, 348 aa, unidentified
MNGISIIGLDLAKEVFQVHGADEAGRCVLRKQLKRREVLRFFAKLGRCLVAMEACGTAHHWAREIAKLGHEVRLLPPSYVKPYAKRGKNDRIDAEAICEAASRPTMRFVPVKTVESQSVATLHRSRDLLIKSRTMLINALRAHLAEFGFVAAKGIGKLPDLIKIVSEAPAAALPDMVRATLSGLLDTIVGLNAQVAIIEKRLVAWHKTSTDSKHLTTAPGIGLMIATACCALVPEPRAFKNGRHFAAWIGIVPKLDGTGGKTRLGRISKAGDRYLRRLFVLGATSLLRSLENKTTPLALWVQGLLARRSRRAVTVALANKLARIAWAIMARGEKYRPLAAAQAQAGCA

SEQ ID NO: 206930 - protein, 404 aa, unidentified
MITQNPPSTPPATATAATATPPSATATPSPKPHRVIKLGVDVHWREHVVVRQIDGTSPQPAQRFAPEAFVAWVAKQAQQADVVHCCYEAGPFGFVLHRRLVGLGVKSLVVRPRNWDEYCKKVKTDRRDALALVSCLDRYVAGNTEALTSIRVPTENEERARSVSRQREQLLEHRKRLAAQGLSCARYYGHDLPDEWWRAKKFELLQAELPEFLVGLLASVQRIALLVHAELEAHSAEVESAQTQELPTGLGALTAQILDREIGDWGRFKNRRQVASYTGLVPSEHSSGERRQRGAITKHGNPRVRHILIEASWRLQQFQPDYRPLKSRQGALDTAKRKGDKPARKKLCVALARQFIVDWWRIRTGRTTPAKLGLQMSWPAAYVLRGKAPQPVVAPLAVPQPAAA

SEQ ID NO: 206931 - protein, 355 aa, unidentified
MIIIGVDFHPEFQQISSVDSDSGEFQEKRLGHREEAETFYRALAAVGQQVRVGMEASGHARWFERLLAELQVELWIGDAAEIRARRVRKQKTDRQDAQLILKLMLKDDFPQIWVPSWENRDLRQLLWHRHRMVQARTRIMNQLQAVALNEGLRCKKRLWREHGRQQLEAFRLAPWASRRRRDLLELMDRLNPTITELSQAIEQEAEKCPEARRLMTHPGVGALTALAFVLIVGKAERFQCGKQIASYLGLVPLEDSSGNRRRLGHITKQGSSMMRFLLVEAAQVTVRILPEWRSKYLHLMMRRGRKTAKVAMARKLAVRLYWMMRQGWIISSGTSSVRTQDSPDIAMVCSRTPRN

SEQ ID NO: 206932 - protein, 408 aa, unidentified
MMVFVGDDWAEAHHDVHVMDGSGERLASRRLPEGLDGIGGFHDLMADHADDPSEVIVGIETDRGLWVTSLVATGYRVYAINPMSVARYRNRHRVAGAKSDAGDAKVLADLVRTDRHSHRPVAGDSPDAEAIKVLARAHQSLTWVRNRHTNRLRNALREYYPAALEAFSDLADRDTLAVLGRAPTPDAGARLTVTQIRAVLKRGGRQRNLDRRSEEILQALRTDQLTAPAQVAAALGATTKAAVAIIGELNTQITQLETELGAHFEQHPDADIYLSQPGLGDVLSARVLGEFGDDPNRYADTKSRRNYAGTSPLTIASGKKRAVLARHIRNRRLYDAIDQWAFCSLTRSPGCRAFYDHHRTKGDGHHQALRALGNRLVGILHGCLQHHVPYHEHTAWAHRTTTQTDQAA

SEQ ID NO: 206933 - protein, 311 aa, unidentified
MKSSEVFVGIDVSKETLDVAIRPSGEGRRFAHNEEGLSQMAEWIQAVSPQLIVLEATGGLEIEPIRALISRGLLPVRMNPRQIRDFAKATGTLAKTDKIDAQIIARFAEAVRPEVRPLPTPEAQELGALNTRRRQLVEMLTAEKNRLRMVPPAIRKGIQAHILWLEKNLEKVNTALSDRIQANPLWRNKDEILRSAVGVGPKTSTTLLSDLPELGTVNGKKISALVGLAPLNRDSGKFRGRRMIWGGRAVVRSALYMSALAAKRFNPVIRDFYERLRAAGKPFKVAMTACMRKLLIILNAMLKNQTPWQTT

SEQ ID NO: 206934 - protein, 589 aa, unidentified
MDRDTVNWNERTAFVGFDWASDHHDVIIVDERGTIVEDFRFDDTSEGWQLFHRKLGSYPNPAVAIETSSGATVERLLEAGCAVYPINPKAAKRYRERKAPSGTKTDRFDAWSLADALRLDGHTWRALKPDDPLTVELRLLCRDEIGLIRQRTALVCQLRAALGEYYPVALKAFDDWTSPSSWAFVEAFPTPEALHQARKRRWEKFLHVHKLYRPETYEKRLALFAQARAFCGSKPAAQAKSLLALALTAQLRALQNHLDKYRERIQELFAQHPDHELFGSLPGAGEKLAPRLLAELGDDRERFDSPQALQCHAGTAPVSYQSGQINKARFRIACQKLLRHTVHLWANLSREKCPWAEAYYRTKRAEGQSHACALRCLGQRWLKILWTMWQTRTPYDELVEAFEEEEKRDATEDIDTRKRVAEFRRDAEFEAEQDRINKQQETVLKVNETVVAHQTEVVDDALEQWSRHAKRVSAERLREWERELVGGPPVRPDGHSGAESDQSNSRIETSQPAAEQTATMWPLAATGPVVLDKPHASSSIGTASRVGGSYPQSPAPGGVSAGPLPHWMSDTTWANGPAAHLQPPESMQQ

SEQ ID NO: 206935 - protein, 345 aa, unidentified
MKKVMAGIDLHSNNVVIGIMDTDGKRVASGKLPCELKEIAKFLAPFKKRLEQVAVESTYNWYWLVDGLQALKYPVVLANPAAMQQYSGIKHADDTNDAFFLAELVRLKILPTGHIYEAQLRPVRDLLRRRMTLVHQRTALMLSFKSLYTRTTGQEMTLSQLKELEIKEAQELYAHPANQMIAGMQIKHIEQLTESIEKIEKVVMASARELPSYGKLTTLPGVGIILGMTMTMEVGDIKRFASPGDFASYCRTVQAQRTSNSKKKGENNSKCGNKYLAWAFIEAANFARRFDEQCRKWYDRKAAKTSKMIATKALACKLAKAAWFLMSQGSEYDAQRMFGQPATTK

SEQ ID NO: 206936 - protein, 383 aa, unidentified
MQPTQGTDFTPSEELLAVSLELSKGSWKIALHDGKRDKPSIHTVASEQAAKRLEEAAAVIEATKKKWGLPERTRTVVIYEAGQDGFWIQRALSGMGYEALVVDPASIPVERRARRAKTDRLDAIKLVVSLLGWLRGEYDRMHVIRVPTEEAEAQRHLARDRGELQKEIGQHRDRMRKLLRTVGCWDSVEGKFAERLAQGAVQSHDGRPLPAQLKARLERECERLELATKQLAALEESLVEELPEAVRGRIGQLMRLKAIGRVGALRLVLELYWRDFDNRRQVGSCVGLVPQPYDSGESRVDQGISKQGNRRVRALLIEMAWFWLRYQPDSELAKWFARRTQGSGTNKRGKRIAIVAVARRLAIALWRYLKDGVVPEGAALKAG

SEQ ID NO: 206937 - protein, 337 aa, unidentified
MRKITLIGIDTAKNVFHLVGIDKRGNYTYRKKLSRRQLLPALVRLDPCEVVLEACAVSHHWARQIAQIGHRVRLISPQHVKPFRRGQKNDYRDAEAIISAALSPGMHFVGVKSVEQQAEQALHRVRSRLLSHRNAAASELRGLLGEYGLAFSKGIKPLRAGAVRFADSEQAQALGLVDLVWDVLEELDQLQQRLDGYTHRIEQRVRNDVTSQRLRDELLGVGPLSASALRVKVADVRDFTNGRNFAAYLGMAPGHRGTGGKVKIGKIRRGHDRYLRQLLIHGARAVVQHLGDKQDPQSRWLRGVLERRGFNIAVVAQAHKNARQAWAILAKEQALQS

SEQ ID NO: 206938 - protein, 412 aa, unidentified
MDVILERCAGLDVHQATVTACLRLPGPNRKRTQVVQTFGTTTPDLLALRDWLAAHEVTHVAMESTGVYWKPVYYVLEDGFTLLLVNAAHLAKVPGRKTDVADCAWIAQLLECGLLRGSFVPPPPIRELRDLTRYRKALLQDRTREANRLHKVLQDAGIKLATVATDILGVSGRAMLTALVIGTTDPTVLADLARGALRKKLPALRQALTGRFRAHHAFLVTQLLAHLDYLDETIATLSAEIAGHLSPFAPEVTRLQTIPGVKQRTVENLLAEIGVDMSPFPTAGHLTSWAGLCPGNNESAGKRRRGRTRKGDRWLKITLLEAALAAIRVKGSALGARYRRICRHRGHKIAIVAVAHAILEIVWHLLTKGTTYHELGATYLDRRDKEQAARRYVRLLENLGHRVTLEPTAIVA

SEQ ID NO: 206939 - protein, 355 aa, unidentified
MSQEKYIGMDVHQATISVAVTDSRGKLIMESILETKAATILEFLQGLHGSLSVTFEEGTSAAWLHDLLKPHVTRLVVCDPRKNALLKDGSKSDRIDARKLAELLRGNQLTSVYHGEHGMRTLKELGRSYVTITKDLARVMSRIKALYRSWAIPCSGTSVYAPRHRAEWLGKIPEPGVRLRAERFYQQLDLLQPVRQQARRDLLSESRKHHAVKLLRQIPSIGPIRAALLVAQLQTPHRFRTKRQLWAYSGFALETHDSGEYRYVRGKLQRNRERMTVRGLNNNHNPEVKNLFKGAAISASTHPGPLYDFYVALLEKGMRPTMARLTLARKIASITLTIWKKGADFDATQLHRQEA

SEQ ID NO: 206940 - protein, 375 aa, unidentified
MIENSTPRSTRFVALDVHKATIVVAVAEDGDQQPESWDKIPNDPSAVRKMVKKLGQDGHQLKAVYEAGPTGYGLQRQLADLGVECIVAVPTLIPRAHGRVKTDKRDAILLARLLRRGDLVPVWVPDPTIEALRSLARARYDAKENHQRERQRLNKFLLHWGVRPPAGVRAWTNRHYRWLKEVQLSEPAAQVAFEDYRAFEQLAQERVRRLEQELRTWAEQHPRLALIVAALQILRGIGFLSAATIAVEVGDFRRFAAATSFMHFIGITPSEHSSGESQQRGGITHAGNRYLRHVMVQSAHHSRHQPGVSRELQKRMEDMPKDMIEIALKAQQRLHYRYRSLSRRIGQPKAIVAVARELAGFVWAMGQHMEEVLAA

SEQ ID NO: 206941 - protein, 336 aa, unidentified
MEYFAGLDVSMAETHVCVMNRDGAVTHEVKAPSTPADIAAALAQAPTCARVVFETGRMAPMLYHGLSQLGLPVVCVESRQAYQALKSLATHKTDRNDARGLAHLARTGFFKPVHVKSLSAHAVRSLIIARKKLVGQRVTLENQIRGLAVVFGVRLPRALTAAFIRQALRASEGIAGLSAAVRGLVAARTAVLGAVVAIDADIRRMVRASDACRRLMGIPGVGQLTALAFTAAIDDPERFRRSRDIGAYLGLVPRRYQSGEVDYTGSISKCDRRGRTLLCEAANVMLTRYKGPLKLKDWALAIARRFTMRKARIALARRLAIIMHAMLRHGTQFQPA

SEQ ID NO: 206942 - protein, 339 aa, unidentified
MKHTTVGVDIAKNVMQLHYIDAETGEIVNKPVRRGAFLEHFANLAPCLIGMEACGGSQHWARKLTTMGHEVKLMPGKFVKAFVMGNKNDAADAKAIWLAVQHAGKSVAVKTETQQAVLGLHRMREQLVKFRTMQINGLRGLLAEYGEVTGKGRAALDKAIPGVLERLVDRLPAILIDTLREQWNGLAELDKQIASIERRLQTWMREDKASKAIAAIPGVGLLTATAAVATIGDAKTFKSGREFAAWIGLVPRQTGTGGKVHLHGISKRGDIYLRKLLIHGARSVLCLAKEPGPWAEGIKKRRPLNVAIVAQANRIARTIWAILAHDRQYERGYVSVKPV

SEQ ID NO: 206943 - protein, 387 aa, unidentified
MPQPNDLSRSLAALDEDSTLIAVIEMSQSSWLVAGIVPGIERHPAKKLEPSEAGLLRLLHRWREEAEKAGHTINRIAVAFEAGRDGFWLARWLRAHGIEAYVIHPNSIAVSREHRRAKTDRLDTALLKRGFLGWLRGEREHCSMAAIPSLIEEDAKRPSRERENLVGERTRIGNRIKSTLARLGIRDFKPTLRTAAQRLERLRTPEGEAVPPNTLAELRREMARLCLLAEQIREIETARLQRLEQQPNSGAHPMVRLLAQVRGLGIETADMLAHEAFSRSLRDRRAVARYGGLTGSPDESGARRREKGLARAGNARVRRGMIQLAWRFLMFQKDSALAQWYRARTAEARGATRKTLIVALARKLLIALWQLVTTGEVPLGVVLRPAL

SEQ ID NO: 206944 - protein, 370 aa, unidentified
MNDLIRIGIDTSKSVFVLHGVDAAEQPVLRRKLRRRQMLEFFAKLAPVQIGIEACGAAHYWARELMALGHEVRLLPPQYVKPYVQRGKNDAADASAICEAMSRPRMRFVPVKTAEQQAALMLVGVRDQLVARRTQLSNMIRGYAAEFGVVAAKGLDKIEPLLARLAREPAVPAQAKALFAVLGEEVVALKPKLRKLEAELLAWHRHNELSRRLAEIPAIGPIGSALLAMKVTNPQAFRCGRDFAAWLGLTPKDHSTAGKQRLGVITRAGDETLRRVLVVGATAVIQQAKHGRGNPSPWLTGLIRRKAPKLVAVALANKTARIAWRLMVSGERYDRQHARGGFVPPAGSLAPGARRQGRGAPPAAVACGQP

SEQ ID NO: 206945 - protein, 282 aa, unidentified
MTTIVDYIGFDIHKKTISFCAKAQDGTILEEGTIPALRNKLLAWAKARPRPWIGAMEATLFTGWIYDLLKPLAQELKVAHPPMLKAIAVAKKKNDKVDARMIADLLRCNLLPECYMAPVAIRDLRRVLRYRNLVVREATRMKNRIAGLLMETGTAYNKERLHGKAYFSELLGSLQEVPGSVVELLKLSRGQLELFAAIQRRLLKGLREQADLNQRVMRLQTIPGVGEILALSWALEVGEVKRFPSIGQAASYCGLTSAQHSSAGKEQPSRSPSSATNICRRS

SEQ ID NO: 206946 - protein, 390 aa, unidentified
MERPMQKLNDLSRSLTALEPNGTLIAVIEMSLSSWRVAGIVPGVERQPLKKLAVDESALLKLLHRWREEAEKAGRRIERIAVAFEAGRDGFWLARWLKARGIEAYVIHASSVAVSREHRRAKTDRLDTELLKRSFLGWLRGERDHCKMVEIPTMQDEDAKRPNREHDSLIGERSRIVNRMKAALVRLGIRGFNPKLKRATTRLDGLHTPEGEPIPPNALAELRRDMERRRLVNNQIRQIEEERLERIEQAPCDGAHVMVRLLARVMGVGIETADMLVHEVLSRNMRDRRAVARYAGLTGSPDESGRKRREKGLARSGNARVRRGMIQLAWRFLLHQKNSALTKWFRSRTENARGTRKPMIVALARKLLIALWRLMREGIVPDGVVLRPAQ

SEQ ID NO: 206947 - protein, 334 aa, unidentified
MWHVGIDLHRVTVVMAAVNDAGEAMSPISIRCADTAAIVEAVKRLGPFRAVIEASGTYRWLYDLLRPYGAILLAHPHRLRAMIQRRTKTDKLDAQLLANLLRINQIPLAYIPPEPYHQLRELTRCRARLGRGLAEAKIRLRAILARRNMEAPYQVPFGRRGLAWFREQDFGRIENLVRDELLGRFAHFSGQIAILDQRLVEVQAEFTETEAVLDIYGIGLFSALVIVAEFGEVERFRSAKQAGAYTGLTSRVHQSGGHCYRGSITRQGSPWLRWVLVEAAMKAVRKDVALQNFYTRVRKRSGAKIARVAAARKLAEICWKRLRRWQREHASRAA

SEQ ID NO: 206948 - protein, 397 aa, unidentified
MYIVGIDIAKRKHEAAVIDGEGTVIIKPFSFTNNCSGYNRLLAMLAKAKLPLDEVSFAMEATGHYWLALFTRLQKEGFRVQVINPVQTNSIRSFYIRQTKTDPRDALLIAEVIRFGHFSESTLHPENIYELRELCRGRHAIVSMQADVKRKVVALLDQVFPEYETAFTNMFGDTSMAILQTCPTPKELSEMPLEELCHLIEVSSHKRFRMAKAQELQELARNSFGFAMAGDVFSTMIRLYAKHLDFLKQQVREMDRKIAEIMDTLDTPITTITGIGPTLGAYILSEIGDISRFSSAAKLAAYAGIDPTMRQSGEYNGVRNRMSKRGSPYLRHAIWLAASSAVLHDPALKLYFQKKREEGKPYMASVGHACRKMVSIIYAVMRDNKAYTPCIPNEISA

SEQ ID NO: 206949 - protein, 281 aa, unidentified
MQAPRHIGIDLHRNQFTCCVRLENGRNYLTDWKLEDLPQFVKKLRPGDEIAVEVTGNTRLFRDAVSPHVARVVAVDPNQFKVISHSVKKTDPNDARNLALYLAKDLLPEVRMKDKTQAQLASLTHTRDTLVKLRTALKNKINNILSAHGINLEKEALSSEKKLNEVLAMKFDPMVKIELEVIVEEIRSLNQKVAKLEKTIAEEGSKLEGHKNLTSIKGIGPLTGSILLSVIGDINDFADEGKLAAYFGIVPRVSNSNETERSGRITKRGNKLGRTALVHAL

SEQ ID NO: 206950 - protein, 409 aa, unidentified
MEKTEKRYIGLDVHKHYLIALGVDEELNIVLPARRVELSRLEAWMKKTLTRQDEVVLEMTTNTWQLYDELVVYAGSVLVVHPPHVALITRSQVMNDKIAASILARLLAKGLLVGIWVPPQEVREMRGLVAQRRKMTNLATQAKNRLHAVLQRHHLAPPEGNLFGASNQAWWQSLSIGKLEKLNLESDLDTLQFAEKQVNRMTEIMEGMAVEQEPIGRLLHLPGFGVVTAVTVWAAIGDIRRFAEPKYLVGYAGLGTRVHDSGMTMRSGKITKAGRRDLRTVLIEAAQAAASSHPHWQAELTRLEPRLGHNKAIVAIARKLLIAVWHVLAQKQTDRFVEPEKVSQKLLRFAYDVGKRNRAGLSAAQFVRQRLDALQIGQELTSIAWGSKKPIPLPPSTVKPEGSDVPNTK

SEQ ID NO: 206951 - protein, 429 aa, unidentified
MNCTQNKKIEQVKETTMIVGIDVGSEKHYFRAFNWRGIELTRKPVAFSNSMEGFNSFYNTIVELMQKSELEEALVGIEPTGHYWFDLGQFMGEKDIKFVMVNPHHVHKTKELDDNSPSKNDRKDPRVIAGLVRDGRYFYSYMPTGAYAELRNASNRRFVLVEEQTRAKNRLQKWIAVYFPEYKGIYTHIDAKGGMLVLKKAPTPEEIVRLGVEGIIKIWKDAKLRGNGHKKAMLILAAAMRSIGLKAGLTEARMEIQDLIEDYELQTKRLERVNDLIKGLCQQVRYADKLLEIKGIGITTVAGFIAEVGDITRFDSTKELQKLAGLELVADSSGKHNGKTKISKRGRKRLRYLLFEAAISVVGKNEEFKEIHRYYTTREKNPLKKMQSLIVVACKLIRVFHAILTKGIRYDASKMLKDIRHPGEQLKAV

SEQ ID NO: 206952 - protein, 438 aa, unidentified
MPEKKSAREVLQSLREEIRSSQNTLIVGIDIGKFRHCACFAASSGKVLRRRFFFTNTIDGFNNLIRQSKYYQKKNNLPKVIFGMEPSGSYWFHLYEFLELRGKKAVTVSPLAVRRNRETINVSKDKTDPKDAHNIADLVGQGKFYLPIYRDKEIRQLKRLMQLYYRLIRQRASLRCRLRGVVGYIFPELEHYFTDITAKSMILILEKAPFPEKIRKMGKSRFTSFLAKKNPYLGRRRAEEIFKLARSSVGIRGEEEATSLEINLLLRELRSIKENVALINVQVGGIVKMREDYQLLLTIPGVGPITAASLIAEIGDATNFSSGKQLIKLAGLDLYGLESGISIHSQRKISKRGRKTLRTVVYQAAVGCIRCNVHLKACYLELLAHQAGKKKIKPKALVAIASKLLRIVFRMLTEKKAFDAHYDEMLKERFALRARKAA

SEQ ID NO: 206953 - protein, 361 aa, unidentified
MSTLKVNVGIDAAKDCCDCNLSKLTAELDVKVIAAKRFLNTEHGMEELVKWLIKNCPADCRKVHAVIEASGVYHERFALGLQQAGYIVSVVLPNKAKKYMESLGLKSKNDSIDAKGLAQMGCEQKLEEWTALSPFYHKLRTYTRLHEDIQETKTQSTNQLHALNHSAVQMKDAIKVLERLIKVFDAELSKIKKLIDDHIASNAEVKERMDKICDIKGVGTLSAATVVAECNGFGIIKNIPQLISFAGYDVVEDQSGKRKGKTKISKKGNAHIRRILHMPALNMNTYEVGAMPALFERTFDKHGIKMKSYVTLQRKVLILIYTLYKKNEAFDKNYHTRDKSARVEKVEASSRLSLEEAGKAA

SEQ ID NO: 206954 - protein, 412 aa, unidentified
MRRVIGLDIHRTFAEAVAWEDGRLIRLGRLDMTRTALEGFGKSLRPSDEVVVEATGNAMAVVRVLSPFVARVIVANPLQVKAIAHAHVKTDKIDAGVLASLHAAGFLPEVWTPDPETERLRRLVARRNQVVRHRTRIKNEVHSILHAHLIPRCPHADLFNRRGRDWLSRQPLPVDEKATIDRHVRELDRLAEDLDVLDREVAQGAIGNPSIERLITITGVNLTVAAGLVAAIGDIRRFTSPQKLVSYVGLNPRVRQSGLGLAQHGRISKVGRSHARAMLVEAAWAAAKAPGPLHAFFVRIRARRGHQIAAVAVARKLAVLCWHLLTKETDYLWARPALVAIKKRSMELQAGQPTKKGNQRGPAYAYNVKALRNREMLVATQAERAYEHFVGQWRPRGPGKGVRERLNPARHE

SEQ ID NO: 206955 - protein, 367 aa, unidentified
MKKVSTAATKQTHNFGEQRLTIGLDLGDRSSWYCMLDGSGAVLLEQKLGTTPKAMQEVFGGMPRSRIALETGMHSPWVSRLLHQFGHEVIVAHARNVRLIGESRKKDDRLDARTLARLARIDPQLLSPVKHRSAKAQADLTVIRARAGLVRARTALVNTARGLAKSYGERLPGCNVRNMNPEKAEGLSPELQTALEPLLAAIESLSERIREYNEGIERLAQESYPQVALLKQVKGVGTLIALTFLLTLEDAHRFHKSRDVGCYLGLQPGRRNSGQSEPQMHISKEGDPYLRTLLVQGAQHILGPFGIDSDLRRWGLKLAERGGRNGKKRAIIATARKLAVLLHRLWVSGEVYEPLRNSGELAMPAAA

SEQ ID NO: 206956 - protein, 424 aa, unidentified
MNTHWTEQAYFAALDWAKDHHDVVVVDRIGTIVAEFQFAHTAAGWAQFEQQMQAWSRCPIAIETSSGPAVDQLLQRQYPVYPVNPKAAERYRERKAPSGNKTDRHDAWSLAEALRTDGQGWRPLRPQDEATATLRLLCRDEQALIEQRTALVNHLQAALGEYYPLALESFVDWTQPFAWAFVQAFPSPAALQQAGKRRWEKFLHLHKLWRPDTAAQRLAAWAQGQPLNASAAILSAKSLLALSLVRVLQSLQKQIDEYRARIRAAFEAHPDHDIFGNLPGAKDKLAPRLLAELGSVREIFPDAQSLLCYAGVSPVSFQSGQICKARIRWACDHFLRHTVHLWADQSRRRCAWAQAYYQAKRDKGHSHASALRCLGKRWLKLLWRLWQDHLTYDESVHLQSLRTHGSFVANILALQPAEPAAPCE

SEQ ID NO: 206957 - protein, 343 aa, unidentified
MDHFAGLDVSVKDTSICIVDDTGRITREVKVASEPGALLAVLMNASHRFKRIGLEAGPLSQWLFRALAEAGLPAICVETRHMRAVLKAQINKTDRNDARGIAQMMRVGLYRPVHVKTLRSQKLRMLLTHRKLLQSKAIAVENDLRATLRNFGLKVGMVGTARFEARIKELVENVADLVVLVEPLLVVRRVVREQIGILHHRLLTVARDDEVCRRLMTVPGVGPVVALTYRATVDVPARFRKSKSVGAVFGLTCSRDQSGERDRPGAISRCGDEMMRAMLYEAAQAMLLRSAKWSWLKAWAMQIARRRGMRRAIVALARRLAVIMHRMWVDGTEFRWTKEAAAA

SEQ ID NO: 206958 - protein, 355 aa, unidentified
MVVVGTDVHKHNHTFVAVDPVGRELGQLTVKAVSSGHARAVAWAREQFGTELVWAIEDVRNLSARLERDLLAAGQHVVRVPTKMMAAARAAARTRGKSDPIDAAAVARAYLHDPDLPVASHDDVSRQAKLLTDRRDALVVNRTRLTNSLRNRDHEMDPDREPGPRKLTALKHQEHLRQWLSTQPGVLAQIALDELDDIIACTRKIKAYDKQIRDLARQHAPALLDIVGCGDLSAVKLLGESAGALRFKSEAAFARHGGIAPIPVWSGADNNKKVRLSRSGNRQINAAIHRIAITQIRDKNSQGHAYYAKQRAAGKGKADALRRLKRHLCRITFRALTTDHERRQPTPTTALQTAA

SEQ ID NO: 206959 - protein, 316 aa, unidentified
MSEKLQESFVGIDVSKNSLDVRIEPLGESLCVAYDDTGISKICQRLAEVSPTLIVMEATGGLETRLASELAAQGLPVAVINPRQARDFAKATGQLAKTDLVDAGVLAAFAQAIRPAVRPLKDADTRELGDLVTRRRQLVAMRVQETLRVGATNSKALQKNLKSHIAWLDKQIAKLDDELIQRLRNSGVWKAKDDLLRTVPGVGAVTSLTMLAKCPELGQLNRRQIAKLTGVAPLANDSGKHRGKRFIWGGRADVRAVLYMATISAIRCNPVIKAFAERLKQTGKPAKVVIVACMRKLLTIMNAMIKSNTPWTPKIA

SEQ ID NO: 206960 - protein, 388 aa, unidentified
MPQQRKPNDLGRSLISLAMDTTLIAVVELSLSSWLVAGIVPGVERQPLKKLKTDENALLALLNRWRDEAVRSGHKISRIAVAFEAGRDGFWLARWLKARDIEAHVIHASSIAVSREHRRAKTDRLDTELMKRAFVGWLRGERDHCKTASVPSLWEEDAKRPSRERESLVGEQSRLINRMKATLIRLGIRGFNPKLRHAEQRLETLRTPEGEPIPPNTLAELKRDMQRRRFICDQIQSIEQDRLERLERTPHTEPHAMVRLLARITGIGIETADLLVHELLLRNMRDRRAVARYGGLTGSPDRSGGTNREKGMARSGNARVRRGMIQLAWRFLLFRKNSALAQWYRRRTEHAPKARKTMIVALARKLLIALWRLVREGVVPEGVAMRPA

SEQ ID NO: 206961 - protein, 372 aa, unidentified
MSESSKILYVGLDVHKESIAVAYAPEDRGAEVVSLGAIGTRQSDIDKLIRKLQSKGAVTLVFVYEAGPSGYGLYRYLTGKGFACHVVAPSLIPRKAGDRVKTDRRDAMTLARLMRSGDLSAIYVPGVEDEALRDLSRGRDDAMQDLKRSKRRLKSFLLRQDIRYEGRASWNAAHLRWLAQVVCPTPPQQIVFQEYLRAVTEQQERRERLERELHEAVKGWRLYPMVEAIQALRGVELTGAVILMTELGDITRFDNPRQLMSYLGLTPSEYSSGERRRQGGITKAGNSHARRALVEGAWAYRYPAKVSRHLQLRLEKLPAEVQAISWKAQVRLCKRYRQLTARGKHVNQVVVAIAREMAAFAWAIARLVPQVS

SEQ ID NO: 206962 - protein, 407 aa, unidentified
MNQLVVIAGVDTHKDTHHAAVITATGQHLGAAQFPTTTAGYRALAAFIAGFGTVAKVGVEGTGSYGAGLARYLSSAGVPVLEVLRPSRQIRRMRGKSDEIDAYAAAETALAGTNCSVPKDRDGRVEAIRVVATARRSAVAATTDAVLQIRDILVTAPEPIRARYRALRGKPLIAALAKIRLHDPDDVVAEHTLTALRALARRVQQLRIETDAHEQTLDDLVTRVNPALLQAKGVGVICAADLLIAAGENPDRISSEAAFAALCGACPVPASSGKITRHRLNRGGNRHANRALHRVAVVRLHTDQRTRDYTASRRAAGKTSKEILRCLKRAIAREVYHLLTNPPEPISTTQLRPMRQAAGITIETAAHDLHWSMATVSHIERGHTSNRAAIITYRDYLATQQPPGCAI

SEQ ID NO: 206963 - protein, 315 aa, unidentified
MTSTQVFVGVDISKAQLDLALRPEGQFSVPNNEAGFAQVLEHLNAVHPTLVVLEATGGLELPLTGVLAAAGVPVVVVNPRQVRDFAKATGRLAKTDALDAQMLAHFAEVMRPEPRPLPDEQTQALAAILARRRPLVEMLPAEKNRLGTAGKPVRKSLRTHIAWLERELSHTDRGLAQTIRESPVWREKEALLRSTPGVGPVVTTTLLATLPELGTLTGKQIAALVGVAPLNRDSGTWRGKRTVWGGRAQIRAVLYMAALVAARCNPVIRACYQRLRAAGKAKKVVLTACMRKLLIVLNAMLKHRTPWRAELVQCA

SEQ ID NO: 206964 - protein, 344 aa, unidentified
MEQIIRIGMDTSKSVFQLHGVNTAEQPALRKKLSRREMVKFFEKAPPTTIALEACGGSHYWARLLSSFGHEVKLIAPQLAKPYVKRGKNDAADAEALCEAMSRPTMRFVPVKTADQQAALMLVGVRERLIRNRTQLANAIRGFAMEFGIVAAKGMCRIEPLLERIAADQSLPELARELFAMHGVEYRDLLTETKAVEEKLIALHRSDECSRRLAEIPGVGPVGASLLMMKTPDPKMFKSGRDFAAWIGLTPKDHSTAGKVRLGVITRAGDEMLRSILVVGATALLQHVRLGRSRHTSRWLIELLQRKKPKLVAVALANKIARVAWKLMVSGETYRRTEGQTQAV

SEQ ID NO: 206965 - protein, 482 aa, unidentified
MKSTRQEQSSPSTQASVSVTWQGMNRKQRREMTRKIQSADIGLEVIHADAAGIDIGNEAHYVAVPPTRDSQPVRRFGCTTAELKDLAAWLKRCQIRTVAMQSTGVYWIAVYDILQAAGLEVYLVNARETKNLPGRKSDVQESQWLMKLHAYGLLRNSFRPSPEIRALRTYWRQRHDLVRSAGRHLQRLQKALTQMNIQLANVLSDVSGATGQAIIQAILAGERDPQQLAAWRDARVKASQEEIAQSLEGNWQEDLLFMVKQEQDGYQFCQKQIAECDQRLAQYLQQQTDRSAGAPLAEEKRKWRRKKKKGNNPQFDLRTELFRMIGTDLTRIDSIDVMTATTVISEAGYDMTRWPTEHHFVSWLRLCPDNQVSGDRVIGKKRLPTNNRLTVAFKMAANTLRKSDSYLGAQFRRLRTRLGAPVAIKAMAAKLARLVYRMLRHGLEFVDRGATFYEAKHRQREINSLKRKAANLGFQILETPAA

SEQ ID NO: 206966 - protein, 362 aa, unidentified
MNYVGVDIHKRYSVLCAVDEQGCRLREGRVEGNAADGFARFFSGLRGPSKAVVEASWNWGVIHDELEELEQVEEVVLAHPYKTRLIADAQIKTDRLDAYALSTLLRGNLVARAHVPRRLTRARKNLLRQRLYWARLRTMLRNKIHALLDRQRDLELPQCSDIFGVRGLGFLRRLKLSEPDATLLQEQLALHDLIAQQMKAQEKRIAGEFASEAMHRRLMSVPGIGVTLAAVIACEIDAIERFSNADRLCAYAGVVPTTHSSGGKVAHGRLLPFCNKWLRWALVEASWVAIGCSPYFGTLYKAHRARGKKANHVILIVARRMCRIIWQLLHHQRDFEKRSLSSRVNFPGCSALALTVNPATAP

SEQ ID NO: 206967 - protein, 430 aa, unidentified
MKSNTQNAKIEAITEKTLVLGIDVGSETHYARAFDYRGIEYSKKPFKFSNTEAGFVTFKEWILDLKERHEKDKVVPGMEPTGHYWFNLGKFLQDNEMKPVLVNPHHVKKSKELDDNNPTKNDRKDPKVIAGLVREGRYMIPYLPDGVYADLRTASNIRFQLQAELTRIQNRISRWFNIYFPEYKTVYGKPDAKSGMLILKAAPLPEDILTLGINGVNQIWRDAKLRAVGKARAKTLIEAAKHSVGSKEGAVAARMEIRMLLEDYESQNMRLQEVMVLIEELVRKIPMAEKLLEIKGVGIRTVSGFLAEVGDISRFNNPKELQKLAGLALVENSSGKHKGETTISRRGRKRLRYLLFEVAMSLVAKNPEFRELHNYYTTRRLNPLKKMQSLMAIAAKLIRVFYAMLTKGVDYDPKKMVSDIKRPAVYLQAA

SEQ ID NO: 206968 - protein, 316 aa, unidentified
MAKLTFTAALWFDQERCLKARFDNHSGGFRKLRTWCQTHGAGGTLRVAVESTSTYAEALLEWLHAKGCAVFLLNPEQVSHYARARGQRNHTDPADAVTIAAFIAQHEATPWHPAPPEQKDLRSLTRARAQVVACAKSLALQLQTTTGPARAHLQKLLTAARQELAAIGRAVARHLETHAVLGEKVRRLMTLKGVGLVTAAVVIAELPPITAQTDPRAISAWAGLTPRRWQSGPREWTTRLSRKGNVHLRQALYMPALVAKRYNPLLRAFAERLAARGKSTPAILGALSHKMLRILVGLLRSNTDFNPNWHPQKNCG

SEQ ID NO: 206969 - protein, 347 aa, unidentified
MKLTAVGIDLAKNVFVIHGVDERGKAVLRKQLKRAEVAKFFANLAPCLIGMEACGSAHHWARKLLGFGHTVKLMAPQFVKPYVKTNKNDARDAEAICEAVQRPNMRFVAIKTPEQQAVLALHRARQGLVKARTAQANQMRGLLAEFGCVIPKGIRHLPKCVPEILEDGENGLPGHARQLFAGLLEHLQELDRRVGELEKQIVLWHRSHEHSRKLEKIPGIGPITASALVATIGNARNFKSARQAAAWVGLVPRQHSSGGKDRLLGISKRGDVYLRTLLIHGARAVVSHVQGHADRAPGWLKGLLERRHKNVAAVALANKNVRMAWALLANERDYEPEYARARKAGAA

SEQ ID NO: 206970 - protein, 421 aa, unidentified
MVHVHGVRAQELSSRSVGIALDRLVAVPVDVGKPKAMAMVCDFTGRRLAAPFEFRQDRTGLAELLQRVRAVLPADVALVRVGVEACGHYHRPVVASGMLPDDWQLVELNPAWVTAQRKVNGTARRKTDPIDLIAIADLLLAGRGYEVAAGDEPLVELCAWVAHRRRRVHVRSGLKNQLLGQVDRCFPGLAGAVSDVLGTKVGRLVVAEFADPDRLAKLGVGRFRAYAARRDVRVNVTIAERLVAAARQALPLPEAAVARQVLDADLQLLADFDAQVAAADARISALIPATRYAVLTSGPGWGEVRVGAYGAAVGDPARWASHAKIYRAAGLNPAQYESAGRRRDSGISREGSVELRRALLDLGVGLWHRDPAARDYAAALRERGKPGGIIATALARRANKIAFAMVRDQTLYEPTVWRQED

SEQ ID NO: 206971 - protein, 414 aa, unidentified
MNETGNTRDLQRYIAIDIHKEYVMVGAWNVAQEWVIRPRRVEMTKFRTWAKNNLQAGDAVVIETTTNVWDIYDIVAPLVTRTAVAHAGAVRQIAEARVKTDKEDIKRLLRLLIANIVPEIWVPPVEVRELRGLISYRQRVVKTGAMIRNRLHSLLHRHNLALPAEGLISWEWWEQQELSALEKLQVRQEIALLEEVDKHKAQVDAELGKLSTGKLWGKQATYLMQLPGIGVIVAMTVLGAIGNVRRFEDARSLVGYAGLGAGVHSSGKEHKEKRITKSGRKELRWAMVEAAWRAVRMSPFWKSKFNELKRRMRPTQAIVAIARRLLVAVWHVLSKEETDRNASEEDLAWKMLLLSWSLGKEARLGLSQKQFAKYALLRLGVQSDLTSFMRGKVPRRIASTDEVLARMTELGLSG

SEQ ID NO: 206972 - protein, 414 aa, unidentified
MQVTYERCCGIDVHKETVVACAIVPGTDGKPIKETRTFNTMTGDLRALAEWLKQKQCTHVAMESTGVYWKPVYNLMEGQFEILVVNAEHLKKVAGHKTDVADAEWIADLLRHGLLKGSFIPSAQQRAWRDLTRYRTTLTDDRTREVNRVQKVLEDANIKLASVASNVLGVSGRAMLEQLIEGKTDPATLAELAKGRLREKRELLEKALTGTFKPHHRFMLIQHLSHIDFLDEQIAKLDAELEEQMRPFQAELTRWDQIPGINLRVAQVLVAEIGTDLKQFEDAAHLASWAGMCPGNNESGGKRKSGRTRKGSKWLRRALVEAAHGAARTKDKYFKNQYHRLAGRRGKKRAIVAVGHSLLVTGYYLITRGKDYQDLGANYFDERNKEMVKRQAVKRLEKLGFAVDLKPTVVPEPA

SEQ ID NO: 206973 - protein, 340 aa, unidentified
MGEVTTIGLDLAKHVFQVHGVDAEEATVLRKQLRRAQVLAFFSRLRPCLVGLEACATAHYWARELRALGHEVRLMPAQYVKAYIKRNKHDAADAEAICEAVGRPTMRFVPVKTADQQAAVLLHRGRERLVRQRTGLVNALRGHLAEFGVIAPQGLRNVGKLIAIIRDNGDTRLPDVARQVLQVLANQIEQIEAAVAGLERQLLAWHKTNAVSQRLASIPGIGPIIATALATTVADPNVFHSGREFAAWLGLVPRQNSTGGKTRLGGITKRGNRYLRRLLINGASANLLRSKATNADPWVIGLRRRRPPLVVAVALANKTARIAWAVMLREREYQPRAVAA

SEQ ID NO: 206974 - protein, 339 aa, unidentified
MNQTITYLGIDVSKEDLENAITLNGKKIISTKKVKNNLNGFKALESWVRKHSKKHSCRSIRLCIESTGVYSENVAEYFQEKEDMKVSVVNPAQVKAFGKSLHIRTKTDRVDAGLLANYCAIIQPKVSPKPPKEFKQFKKLTRHRDYLVKRRAQEKTHLESVKEPTIHDSILKLISFYDQQVAEAEVMIKKLLSKCPELTKKLKLLESIPGIGEVTSRILLSELHCEGETGKYNAKSQTAHAGLAPSERQSGNSLRGKSKICKTSNARLRTCLYFPALTATRHNKLIAPFYQRLLEKGKLKKVALTASMRKLLVLAIGVLNSQALFDPDWNEKKLNKLDF

SEQ ID NO: 206975 - protein, 428 aa, unidentified
MDETDRNRLEEFRQLRQEVRHSEEYLIVGIDIAKDRHHAFFGTATGGTLLKRLVFSNDYEGFTKLLDQAEAMRVRHGLKKVVYGMEPTGNYHKPLGEYLIHLGRSVVLVSGVTVKQNRESLDGRWDKHDVKDSANVADLISQGKCLYYEYPSAGLRGLRGLLSLKRRLKKQEHGYRVRIRNHLIAQYFPEMDGDYERLGTEGLSVVRWCFPPSQITALDVDPFIERVTSGRIRVGKRQRLEGIWEKAGETIGCDGVPGVEHESRLMVEGLKQIREMIKETEDKIQELCKPFPEYKYLLTIPGFGPDVSSKVLGAIGDVSRFQNGKQVLKLAGLDLSADRSGKDSDKAIPQISKRGKADLRYALYQAALIASTRNRDFIRYFTNKIRGREKEQGIQRKRLVKLSAKMLLIAWTLMKKKEPFDPAYLNIE

SEQ ID NO: 206976 - protein, 444 aa, unidentified
MKVIYKRVAGLDVHKKTVVATRMRVTGDDRIEWETKTFGTTTPELLELLDWLYGWELTHVAMESTGDYWKPVFNILEDSFEVWLVNAQHVKHVSGRKTDVKDSEWLAELMLHGLLKASFIPPKPQRVLRELTRYRSRLIEERTRVVNRVQKLLEGANIKLASVASDIMGVSARAMLAEIVAGQTDAELMAELARGRMRSKIPELEKALTGIVQPHHRFVLAQQLEHIDFLDEKIEALSIKIGEQLENMSWPDDPSKPDVGEGTEEETPVTDEAELPLTWDAAVALLDTIPGVNRRTAEVMLAEMGLDMSQFPTANHLASWAGLAPGNHQSGGKRYSGRTTKGNKPLASIMVQAAWPAVRTKGTFLKARYHRIAARRGKKRAIVAIAHSMLVSAWHMLTYQQPYQELGGDYFDHRKKETKVNYLVRRLEKLTGGAVSIEIQPAAA

SEQ ID NO: 206977 - protein, 425 aa, unidentified
MNYKQNEKINQVKESTLVVGIDIGSTTQYARAFDWRGIELGKVFTFSNSREGFEAFKAWMQHLQDKYRKSDVIVGIEPTGHYWFDLGAYLEDEGILLVMVNPYAVKQTKELDDNSQSKNDRKDPKVIAKLVTEGRYSAPYTPDGVYADLRIMVANRKRLIREMTQIKNRFARWFAIYFPEYTDVFGDYEAQSSMLLLKKVCTPEAIVELGAEKINQIWRDAKLRAVGMKRATTLCETAKRSIGLKKGSSAARYEMKLLLEDYEYKKAQLDAVMEEIEKLCRKIPESEQMLAIKGIGVITVAGFLAEVGDVRRIESPRQIQKLAGLSLRENSSGKHKGQTTISKRGRSKLRAVLFNAAIPLIAKNPEFKSLHEYYTTRANNPLKKKQSVIAISCKLIRVFYAILANGVTYDAQKMLSDIHRQPQAA

SEQ ID NO: 206978 - protein, 461 aa, unidentified
MSDRSGLSRGDRNRNARLARLRQLLPAGNAIVGIDLADDKQAAVVTDHDSRVIARRRVSARAWELGGLLDWAAGKAAAAGFRSVTVVCEPTGHRWRVLDQLAAERGLALVCVQPLLVYRAREGEDLARDKSDPKDAVIIARLAAGLHCYVPERADAVWARLRHLGARRSQLTTCATAQASQIRDLLECAWPGVLGAAGSPFRSASWRAAVAVVLDRCAGDLGRVRRLGPDWFTAAVRRELSRWGATRPCLRIVRAVFTALADPAGVIAHRPGALERVHLAMSDWQDTRARLADAEARMVAVLDDLGLTELVTTIAGLTPAGAAAILAETGDPARFASPRSLVKHAGLCPRDNASGAFQGKTSISGRGRPRLRVAAWRAVWAALPNNPVMAARFTHLTTREDNRLARQQARTACAAALLRWIHVVVARRVSWDPAIAAGATPLQQAACTQPQQRTDHRPRQP

SEQ ID NO: 206979 - protein, 385 aa, unidentified
MTTATPIRMPEETTDRPALFLAFELGANQWKLGFTTGAAQRPRERNVPARHIEAVREEIRKAKERFGLSADVSVISCYEAGRDGFWLHRWLVTQGVANCVVDSASIEVNRRHRRAKTDRLDVQKLLTMLLRHAAGERKVWRIVRVPSVEEEDRRQLHRALTTAKRDRTRVINRIKGLLASHGLVMPPGGDFSQQLEHLRLWDGTPLPAGLHHRLRQEWEQVVALTQRIAQLEAERRAVLQMAEDAVTQKVQQLLMLKGIGINSAWLFVMEFFGWRAFRNRKEVGALSGLTPTPYASGNTAYEQGIAKAGNAHIRAMAIEIAWGWLRFQPQSALTQWYQQRFGHGSSRLRRIGIVALARKLLIALWRFVETGVVPDGAALKAAGRR

SEQ ID NO: 206980 - protein, 420 aa, unidentified
MQYAPARLPGTPPGGLTAGIDWASADHAVCVVGAAGVVAGRFGVEHPAGGLRALVSRLAGAGVREAAIERGDGPVVDALLEAGVTVVVITPRQVKNLRARYGAAGNKDDRFDAFVLADVLRTDRARLRPLIPDSPATTTLRQACRARQDLVRHRVAVGNQLRAHLLCAFPGMVGLFSRLDSAVSLAFLARFDCQDRAGWLSEKRLAAWLDSAGYSGRTSPAELSRRLRSAPRGATGQHGAASAQVTRALAAVLASLNTQIKALETQIAAQLAAHADGHVFTSLPRSGTVRAARLLAEIGDCRARFPDPQALICLAGAAPSTRQSGKHKAVTFRWAVSKQLRGAVCDFADGSRHASPWAAKIYNDAIARGKDHPHAIRILARAWLYVIWQCWQNGVSYDPARHRALQQLLAPHDTGAGQAA

SEQ ID NO: 206981 - protein, 343 aa, unidentified
MQTTKTVGLDIAKSVFQVHGIDADGNVVVRRQLKRRYVLTIFQKLPPCLVGIEACASSHYWSRELQALGHTVRLMPPAYVKPYVKRHKNDAADAEAICEAVTRPNMRFVPTKTPEQQSCLMLHRTRHLFIRQQTAIINSIRAHLAEFGIVAPVGRRGVEQLLKVVADANDTRLPEIARACVAALGTQLLALKAQILAFDRRILAWHRSNETSKRLDAIPGVGPALATALVASIGDPKAFRSGRDFSAWIGLVPKQNSSGGKDRLGNISKQGDRYLRSLFTAGALAVIRYAKLHGTEHRPWLAALLARRPTKVAAIALANKIARMAWAMMTRGERYKEPVALAA

SEQ ID NO: 206982 - protein, 353 aa, unidentified
MAPLPSPTALLKCVVGIDIAKDSFVACVGHATLSQQLHFGKETTFDNTASGFAALLSWVDKQHQSGSPLWFVVEATGVYYEELAYFLADNQQLLSVLLPNKVKHFARSTELKSKTDQLDARLLCRLGLERALPAWQPPTPALRQLRALARERQMLVRQAAQLKTRTHAYQHSYQPDSRTSARLAAQQQLLVSQLKALDQDLADLLKAEPELARKLGQLTSIPGIGLTTAIVVVAETNGFVLVENERQLTSYAGLDVVQRQSGLSAHATRISRRGNVRLRTALYLPAVSSLRYNPQQIAFYARLRARQPSGKPGVIAVMRKLLVLCYSLWKNDCIYDPHYHPAHLAEKEVAPTT

SEQ ID NO: 206983 - protein, 368 aa, unidentified
MKQALFAGIDLHSNNLMIGIVDQSGRRLKHQKLGCDLKEITSFLEPWKPQLKSVAVESTYNWYWLVDGLRALSYPTKLADPAQIEQYSGIKHADDKNDAFFLADLQRLNILPTGYIYDPALRPVRDLLRRRLGLVHQRTALLLSFKSLYARTTGQAMSLSRLKAMEPNDTKTLYRHPANCLIALLQKEHIDKLCQSIELIEKSVLAQARELPCYQKLLSLPGVGRVLGLTITMEVGEISRFKTPGQFASYCRTVNSQRLSNNKKKGDNNRKCGNKYLAWAFVEAANFAKQHHQHCRRWFDRKAARTSKVIATKALACKLAKAAWYLMSQGSDYDPERMCPEGAMKEEKLKFVRAAASQKIGVGKNPFD

SEQ ID NO: 206984 - protein, 368 aa, unidentified
MNDLIRIGIDTSKSVFVLHGVNAAEQPVLRRKLRRRQMGEFFAKLPPVQIGIEACGAAHYWARELAALGHEVRLLPAQYVKPYVQRGKNDAADASAICEAMSRPRMRFVPVKTAEQQAALMLVGVRDQLVARRTQLSNMIRGYAAEFGVTAAKGLDKIEPLLVRIAREPGVPEKAKALFALLGEEFVALKPKLRKLEAQLQSWHRHNELSRRLVEIPAIGPIGSALLTMKVTNPHAFRCGRDFAAWVGLTPKDHSTAGKQRLGVITRAGDETLRRVLVVGATALIQQARKGRGNPSAWLIGLMRRKPPKLVAVALANKTARIAWKLMVSGERYDRARSGFVPPAGSLAPGARRQGRVAPPAAVACGQP

SEQ ID NO: 206985 - protein, 414 aa, unidentified
MEQAYRVFVGIDWANQVHQVWAADAEGRVLGERGIQHVGIELFEMVAWLIGLAEGDAATVAVAIEVPHGPIVDTLLDRGCHVFAINPKQLDRFRDRFSPAGAKDDRRDAEVLSSAVRTDRRALRALRLGDPLTLQLREASRHDAELQEDLQRLANRLRDLLLRVWPELLRLSPAANEPWFWTLLRLAPTPEAGARLSARRLQIVLAKHRIRRLTAGALVGILRTPSVHLAPGVREGVAPRIVALVRQMQLVLQQRQEAERRLKTALQAIGDDTPTEKVREHRDVEILQSLPGIGTRIAATMLAEAAQPLRERDYHGLRVLGGVAPVTKRSGKSRIVRIRYACNGRVRFALRCWAMGAIQRDPRSRAHYDHLRTIGHNHERALRGVVDRLIPVLIAMLRDGTLYDEARRRGHMAA

SEQ ID NO: 206986 - protein, 386 aa, unidentified
MIYVGIDIAKLNHFASIISSDGEVLIEPFKFSNDSGGFRLLLSKLDQFESDSLVIGLESTAHYGNNLVEFLVSRHFHVCVINPIQTSAMRKNNIRKTKTDRIDTLLIAKTLMVQPHRFYDKQDIDLMHLKNLGRFRQVLMKQRTSAKIKLTSFLDQAFPELQYFFNGIHHKSVYSLLKEAPSPEKIASMHMTHLAHLLETTSHGHFKKDKAQALRILAQKSVGSSDSSISIQITQTIEQVELLDSQIHDVEAQITTIVKSSGSVILTIPGIRCIEAGMILGEIGDIHRFSSPSKLLAFAGLDPSVYQSGNFNASHTRMSKRGSCVLRYALIYAAHNIVRNNDVFRSFYDAKRSQGKNHYNALGHCAGKLVRVIFKMLTDNVAFCLS

SEQ ID NO: 206987 - protein, 449 aa, unidentified
MSKSVSTQSGLPVVHARAAGIDIGSRFHVVAVAPNLTDEPVRTFQAFTADLGRMADWLVALGITTVAMESTGVYWVPAFEVLESRGLDVILANAREARAVPGRKSDVNDAQWLQRLHACGLLRASFHPRRDIAALRVYMRLRERLVDYAAAHIQHMQKALTFMNLQLHHVVSDVTGVTGMKIIRAIVSGERDLEVLATMRDVRCKANTETLRGALTGNYQPEHVFALRQALALYDFYQSRIDECDVQIEQVLAALTADKPNPATPLPQPRHRTKQPSDLSFDLRPVLYQLTGLDLTQIHGIGPHLALRLIAECGTDLGKWPSAKHFASWLTLAPGCKISGGKVLSARTRKTTNRLAAHLRLAAVTVGRTSTALGAFYRRLAARIGKAKAVTATARKIAILFYNAMRFGRDYRDLGADQYERRYRERVIKHLHRRASEFGYTLQQVVRVS

SEQ ID NO: 206988 - protein, 344 aa, unidentified
MGEVITIGLDIAKSVFQAHGVDEAGAVVIRKRVSRAKLLEFFASLQPCLVGIEACPAAHHWGRELQALGHTVKLMPPSYVKAYLKRSKNDANDAAAICEAVTRPSMRFVPIKTKEQQAALMLHRARPLLVRQRTMLSNAIRGHLAELGIVSAKGRKGTGALLEIIADAEDGRVPPAARGILEVLARQYSAIGAEIGSIDRSIVAWHRSCEASRRLEEIPGIGPIVATALVAEIGDWRAFGSGRNLAAWIGLVPKQQSTGGKDKLGRITKQGNRYLRWLLVAGAMAVIRYAQKHGTLKRPWLGRLMERRPTKLAAVALANKMARIAWAIIVHGDRYRETKPLQAA

SEQ ID NO: 206989 - protein, 353 aa, unidentified
MAKSTTGIAGPTYAGLDVSLKETAVCIVDDAGKIVFERMVPTDPKLLAGCLAKHAPGLERFGIESGATSAWLWREFRALGLPVVCLDSRHAHRVLSMKRNKNDRNDARGLADLVRMGWYREARVRSLDAQYIRSMLLSRQQLLQSRRAVENQIRGALKTLGVMTGPTKGRGFMPRVVALRADNDWLGPILDPLIATRTAIAKQLRMVSESVLVAAREDADVRRMMTVPGIGAMTALAFKAAIDDPKRFTSSTKVGPYLGLTPRQYQSGESEWIGGIGKTNDPLLRAYLYEAAGVLMTRVRRDCPLKEWAKRLAKRVGWKRASIAVARKLAVILHAIWRDGTEFSWKAGQPTPA

SEQ ID NO: 206990 - protein, 353 aa, unidentified
MNYTGIDYHKRYSVACTLNAQGRQLKQARIDHNAPEAFAAYFAALDEPSETVIEACWNWATLYDLLEDTPGVAKVVLSNPAKNRIIADAQIKNDKVDAKALATLLRGNFVSTVHVPGKEVRQKKNTVRQRLWLARVRTMVRNRIHTVLDRHPRIERPAHKDPFCNQGKAWMKRVELPAVDRQLLDDDLEMHELLDKHIRAIEDRIETDNAAHADALRLRTLPGVGKVLGPVIALEIDGVSRFKTADKFCAYAGLVPTTHSSGGKTSHGRMLPFCNRWLKWAFIEAAWVAIGCSDYFGSFYKRHRARGKGANEAITITARRMAKIAWKMLTDKRDYSTVPVVAKPLSPAALVSD

SEQ ID NO: 206991 - protein, 351 aa, unidentified
MLIIGCDFHPGFQQVAIFDNRTGEIEERRLPHREEAEQFYRSLSGPVRVGMEACGHDPWFERLLQELGFELWLGDAAEVRASVVRKQKTDRRDAEHLLHLLLENRFPKIWVPSLEVRDGRQLRVHRHKQVQARTRTKNQLQAMALSQGVQKKWKLWTKLGRAELEQLPLLPYAAERRQRLLETLDGLEADLVELNRQVEEEVRKRPEAMRLRTHPGVGPVTALAMVLTLGPAERFASGKEVGSYFGLIPREDSSGGKQRLGKISKQGSSFLRFLLVEAGPTAARYDPQLKRFYRRLAMRKHRGVAKVAVARKLATRLYLMLREQWTYPQLCQAVMQVSPSHSVVEPEKPTA

SEQ ID NO: 206992 - protein, 404 aa, unidentified
MTYFIGLDWSEQKHDLCILSQDGRPLSYLTIEHSPQGLACLGETLNRLGIHPKQCLVALETHHNLIVDSLLAQGFTLYIIPPKAVSRYRDRHRRSRSRSDRTDAFVLANILRTDRHLHTPYYPDGHLTCQIRAQVRLIRWLDKHIKRFGNQLRTLLLRYYPQAVGLFSDSTCPTYLEFLISYPSPRDAQALSFEEFTRFCREHHFTQRRKWSEMYLRLQGQFLEVEPGLMEIYAGQVRTMASLLLPIVKARNEAFKRLRELYERHPDHGIFSSLPGVGLILGASLLAKFGDRRERFTSPEVVQALAGTCPVTSGSGKKKVVRFRRACDKEFRHIMQQMARNSIEKSGWAKAYFEEVYRRCGYKSQAYRCLANRWVGIIWKMWQDRKPYDEAYHLSQIARRGRKR

SEQ ID NO: 206993 - protein, 433 aa, unidentified
MKVLHERVAGIDVHKDMIKVAIRSPGDKPWTRKTEILEYRTFYGVLQQMARGLRKRGVTHVVMEASGVYTEPVYYALCEQDFTEVAVINPAHAKALRGHKTDAGDCARLAELFECGLLHGSYIRAPELKEVRDLTRYRMKTVQARTSEIQRLGKALESAGIKLGSVASSITGASATAMIEALIDGERRGGVLADLAIGRMRTAGKLADLSMALTGRFTEHHALLCRLHQDRIAGFDAAVAGLDERIAGKAARWQREAGLLTSVPGFGDVVAQAWLGEIGPAPHRHFATCEKLACWVTLCPGNNISARKRKHSRTGDAGTYIKPMLVQAAWNAIRVRGRLQARYSRLVRRFGGDKNPGAKKKAIIAIAHTLLKIAYQVLKSGVPYQELGADFYTRRESPEHKQAWLERQLQKLHPGSTITITISPPETALAPGP

SEQ ID NO: 206994 - protein, 391 aa, unidentified
MICVGIDIAKDKHDCCILDSDGTVRADCFTIPNNMDGFKQLLQTIRNCTKKSDKIKVGLEATGHYSYNILGFLLDNGLPTYVINPLHTNLYRKSLSLRKTKTDRVDARTIATMLLSDVDLKSYTDTAYHNEELKSLTRYRFDKVRERAKLKQSVSRLVTILFPELEKLVPSLHIASVYALLSEYPGAKQISEIHLTKLTNLLATASKGRYGKDKAIQIRDAARTSIGSVMPAKFLELKHTIKLIRELTSEIDEIEVSIQKIMDELNPPILSIPGVGIQSAAMILAEIGDFSNFESPDKILAYAGCSPSTYQSGKLTNCYAHMEKRGSRYLRYALYNATKYVCHWNPVFAEYLAKKRAEGKHYNVALSHATKKLVRLIYALQKSGKAYLVAA

SEQ ID NO: 206995 - protein, 400 aa, unidentified
MSGLKGGIDSIVGIDVSKDKFDACGITGEEAKIFQISTSMDRKGFEKLKKQLSSFSVSSVLIGMESTASYHVNLFSFLVAAGYKVILINPLQISNYVKMELRKTKTDKKDAVVIARFLLANGDTLMQKATPSLISDLRDLSRQRESLVDEMTSLKIEIKQLLNITFPELEHMVGIFTKSILKLLQQYPSAVTLREADIDQLSQSLITDSYGHKREEFAKALIKAARFSIGTNSPAKEIIIKQKIRFLLHQEEALQEITDMLMEMARKLMEEDINIITSIKGIGDKTAANFLVEMGGDIHKFDCSGKIIAMAGLDPAVYQSGKHEGRGRITKRGNRHLRRIIWMMTTSVIQYTDIFKTYYQKRRKEGLPYKKAVLATSHKLIRVIYAMLTQRKTFCEQVNS

SEQ ID NO: 206996 - protein, 441 aa, unidentified
MSRSPNELNAVDKHIRASGRVRCGGRKSLAGSKKGALSFSLSAHSTFYKKSGKKKVGSESDCPPVLRVSSRRSGRTPALPYPPPESVHYITEEMNAEKVQNPLYYCGIDLHSDNNVLGVIDSSGNRLSIKRNANDLEAVKKALRPFAANLEGIVVESTYNWYWLVDGLREEGHKVHLANPAANEQYSGLKHGDDETDTWWLAELLRLKLLKEGYVYPRSERAVRDLLRKRAQLVRMRTQNILSIQNLTCRNTGGRLSGNQVKQLTVEAVKECYKEETERALAVTCSVNVIKVLEKQIETIEKKIKSKIKLSQPYQLLNTISGIGDILAMVIMLEAGDISRFPSVGNFSSYCRCVKSVRLSNNKKKGNGNRKNGNKYLAWAFMEAANYAIRWEPIIAKFYQRKSSKKGSVVARKAIAHKLARATYHVLRDQTPFDVERCFGC

SEQ ID NO: 206997 - protein, 375 aa, unidentified
MKEKVRFLGLDVHAETIAVAIAEQDGEVRSLGIIPNRAESVRKLVKKLGPAEQLRACYEAGPTGYVLYWQLAELGVECAVVAPTLVPVKSGDRVKTDRRDAAKLARCHRAGDLTAVWVPDASTEALRDLVRAREAAKQDQLRARHRLSKFLLRTGQRAMPGVKAWTQAYMTWVRQLRCAQAAQEWTRLDLLHEVEHMGERVKRLEEAVREAVKLAPAAMQEAIRGLQALRGIAEISAVTVVAELGQVSRFESARQLMGYSGAVPSEESSGQRQRRGAITKTGNAHLRRIAIEAAWSYRLKPAVGPALRKRQQGVPEEIKEIAWKAQLRLHKRYARLAAAGKDRRKIVTAVGRELLGFIWAIGVKTETAVRPAMAA

SEQ ID NO: 206998 - protein, 426 aa, unidentified
MSVRDYNKQVAKRQRIKSTTLVVGIDVGKAYNAVGFMNKEGKVLGSCSKVYNSREGFEQFVKMVEDLKAHYGLKDVLIGMEPTGHYWRKLAYFAKEHGYEVRFVRTTALKHHRELDESASAKSDPRDALTVTNITREGKYIDTVIEDGVLRQLRTLAKARERLLRYSVSAKNSLHAALDDYFPELHELFWSMGSRSLWAVLDRCPFPEDVRSIKVCTLKGLIVQSSRNRAGSLQKAKALYQAATKSIGLRPIGRADRYRVQICLEEVKRRVLTLKSMDQQIKSMLKEIPAAPYLLSIPGIGALSAAVFLGELGDPAHFHHARQIVKYAGYDPQESDSGSWVSRRFISKKGRWLMRKYLFFMSMRVVVLTNYFKTYYERKLETKNRVGQLPRRKEILCAVAIKLIKVIFALLRDKRNFEDTVAYSVG

SEQ ID NO: 206999 - protein, 352 aa, unidentified
MDKPTYFVGIDIASGTFTSAVGKMGKKWEIAVRSAEFLNNNDGFPQYLKWLQAHGIKPTNSILCMEATGVYNEKLAYFLAAHQYRFAIEPPLKVKRSFPTAGHKSDPVDSCQISEYAYRFFDELTLWSPPEEIIEKIKILLAIREHCVGVKVGYKNGLHALKRKAVQVSLAMRKYEKLILETESEINEIEGEIKQLIALDASFQETVNLLDSVPGVGMLLATHVLVVLESAPTASTAKSLAAYIGICPYENTSGSSHRRSSTSRHYGPPGLRRILNTASTCVRTHNPQFREYFERKRAEGKKEKVIFNNISNKLIKIMMGVLRTRTEYVPEYKSVRPFHQQTLAESSSLIAA

SEQ ID NO: 207000 - protein, 338 aa, unidentified
MNNHTVIGVDLAKTVFQVAVQHGQKITSNKKLNRSKLVEFMTQQLPSVVVMEACYTAHYWARVCEALGHTVRLIPAQHVKPFTRGNKTDANDAIAIIEAAQRPNMIDVPVKTQHQQDIQSLHRIRERLVCNRTGLMNQVRGLLAEYGLISAKGNKGFVALIELALNTDELSPLIKDEVQRSLDELQLLRDRTEAIEATLREYLKSDTHCQIISTIPGIGVINATALVCKFGNGSQFSKARSLAVNLGLTPKLSASGLRSQMQGISKRGDPYLRKQLIHGARALLGVCDKRPDDALCRWASRIKQRRGGKIATVAIANRLARLVWVLLHKQEAYRPMPV

SEQ ID NO: 207001 - protein, 339 aa, unidentified
MMKVTTIGLDIAKQVFQVHGADKAGRTVLRRKLKRSEVAGFFSGQPPCTVGIEASGSAHYWARILGGMGHTVRLMAPQFVKPYVKSQKNDANDAEAICEAVTRPNMRFVPQKSVEQQDLQCLHRVRSRLVACRTQLINQIRGLLAEYGVVLPQHPGQVRSGLPTVLEDVENQLTGFSRALFRSLYEELAQLDEKIADADNRIQIAFQNHPDCRRIAAVEGVGPLIATAIVAAISNGHAFENGRQFSAWLGLVPRQNSSGGKSRLLGITKRGDPYLRPLLIPGARSVVYRAKAKTDKRSLWIIDKQQRLGTTKACVAVANKNARIIWSLIAREQEYRRAA

SEQ ID NO: 207002 - protein, 428 aa, unidentified
MNCNTQNAKIASITEKTLIVGIDVGSETHFARAFDWRNYEYTKKPLEFSNTEAGFMMFKAWVEDIAEKQGKTAVIPGMEPTGHYWFALGKFLQDSGMKPVHVNPHHVKKSKELDDNNPNKNDRKDPKTIAALVNEGRFSYPYIPTGIYAEIRSLSNLRFQTQEELTRIKNRIARWFAIYFPEYKDVYGDLMAVSGRMILKEAPLPEDIRILGVNGVNQIWRNAKLRGTGMKRAKILVSAAEHSVGSKEAPEAARIELKNLLNDMDVYVSRMEELLQTIEEKLKTIPYVDKLMEIKGIGLITVSGFIAEVGDIGRFDNPKQLQKLAGYAIVANDSGKHNGESRISYRGRKRLRYVLYEAAISLVGKNAEFKEIHEYYRTRKENPLKKMQSVVAVACKVLRVFYAILTKGVDYDPMKLMSDIRRPQLQAA

SEQ ID NO: 207003 - protein, 355 aa, unidentified
MDNAKYIGMDVHKETISIAVLDSAGKLVMESVIETKAITIVQFMRGLHGDLHLTLEEGTWAAWLYDLLKPYVDEVLVCDPRKNALLKVGNKSDRVDARKLAELLRGGHLSPVYHGEHGVRALKELSRSYVTISGDAARVMTRLKAVYRSWAIPCAGKQVYAPRYRAEWLGKIREAGVRRRAEFYYQQLDELRSLRQQVRRELLVESAKHQASKLLCQIPSIGPIRAAQLIAILQTPNRFRSKRQLWAYGGLAIETHSSADHRYVDGQLRPSKRPVSLRGLNRNHNHELKNIFKGAAIIAATKAGPFQEFYAGLVAKGIRPEMARLTLARKIAAITLIVWKKGVSFDAQHLKPQTA

SEQ ID NO: 207004 - protein, 345 aa, unidentified
MEQVGRIGIDTSKHVFQLHGVNASDEVVLRRKLRRKEMVAFFEKLAPTVIAIEACGASHHWARLLRSFGHEVKLIAPQLVKPYVKRGKNDAADAEALCEAMSRPTMRFVPVKTAEQQAALMLMGLRDQLVASRTQLSNAIRGYAMEFGLTAAKGKAHLEPLLERIQADESLPVLARELFAIQAEGYRRLQVQIDEVDAKLAAWQKSDECSQRLIKIPGVGPIGAALLKMKTPAPELFKSGRQYAAWIGLTPKDHSTAGKVRLGVITRAGDETLRSVLVVGATAAIQQAQRRGKASPWLAALLKRKPPKLVAVALANKMARIAWKLMVTGQSYAAKSAPAALANAA

SEQ ID NO: 207005 - protein, 321 aa, unidentified
MSVSSVVVGIDVAKAHVDVCVLGAELAIQRCTNDADAHSALAAALQPLGIALVVMEATGGYEAALACALQAAGLPVAVVNPRQARDFAKSMGRLAKTDAIDAQMLAEFASVLVRRKDLACFIRPLADAQQQALAAMVTRRRQLLGMLLSERQRLQLAIPVVQPSIEAMINAIRQQLDDVDTQMVAHVREHYAALDTLLRSASGIGPVASATLIAQLPELGRLNRRQIAALVGVAPMAFDSGATRGRRHIQGGRFEIRRVLYMAALTAARRNPTITAFYQRLISGGKLPKVALVACMRKLLTMLNAMVRSNTPWDNSLHRTW

SEQ ID NO: 207006 - protein, 342 aa, unidentified
MDEYVGLDVSREDTCFCVMDAEGGVLAQGKALSDPGSLFEALREHSLCPERIVLETGTLSSWLARGLRDRGLTVEVIDARQGHAVMKLQHDKTDKNDAHLLADLARTGFYRSVSVGSEAFQLQRILVKARRHLVCQRRDTENAIRGFLCALGLRFPRGSGKLAARVRDALDARPDLKPMIEPLLASVEALKAEIKRLDEEVMAEAKVSPASRLLMTMPGIGPVTAMAYAATIGDATRFARSRDVGAYVGLTSRRFQSGEVDYSGRISKMGDNLLRSLLYEAANSLLTIVRRPHPLKDWARRIKKRSSHKKACVALARKLAVIMHRMLITGEAFRWPQIQAAV

SEQ ID NO: 207007 - protein, 344 aa, unidentified
MNSTTIAVDVAKAVFEVAVSEHAGQVRERHRFSRERFRRYLGEQPPATILMEACGSAHYWGREAQTRGHRVVLLPPHAVRPYVVRNKTDRTDAKGLLEAARNDEVRPVPVKSETQQALTALHRLRSTWLATRTARINTVRGLLREFGVVLPTGARHVVPTLGPVLEDADGGVPSLLRPALAEAAREIREIEGRIRTVEHQLDAVAEQTPVVSRLRSIPGVGLLTATALVAAVGDVQRFPSARHFASYLGLTPRERSTGQRRQLGAISKRGDTYLRMLLIHGARAVLAHAKTKTAPAPDRLRAWALHLERLRGHNKAAVALANKLARIAWAVWKYDIDFAAAPAA

SEQ ID NO: 207008 - protein, 404 aa, unidentified
MFIYMNRNRTVAGLDVHKDSVYLCIMGYNESVIFQKTYGVLTTELRQMRDDMLCHGVTECAMESTAVYWVPVWNELCGSMELKLVNPYFIKQLPGRKSDVKDAQWIAECVLKNLIKGSFVPEPVVQDMRKLNRRIMDLNEDMTYNCNKLDAALQRCGFRLSNYVSSTTSKSYQSVLQAIIGGQTCPEELVKLVHGRTLNKHGRDIVKDAVTASFSKTDLTVFRQLKETIDLVGRQIEECQKELTALCKEHFPKQYERLQTIPGVKERAATAIIAETGIDMKMFATAACLVGWCGLKPRNDVSNGHYKSRKVTHGNRYLRQILIEIAWAASRTRNCFFSNFSYVQTTVKKKSKMKIQVAIARKILVAVWHMLSKEEDFIDVYLKRLEEQRAMEENIRLLESFMAN

SEQ ID NO: 207009 - protein, 412 aa, unidentified
MTAIDQFAAHVGLDWADKKHDVCVQFKNGERIFHVIKHTPEALDIWINELHQQVKGRIAIALELKKGPVVYALQKYPFVTLFPVHALSLARYRQTFWPSGAKDDPQDAELALELMLRYPQKIKAIEPDNADIRLLQQLVEQRRLLVEDKRRFVNRLINTLKQYYPQPLEWFSHRDSSLFCELIIRWPSLQQLKRARSDTIRHFMNAKGGPAVAYTEQRVASIASAIPLTTDKSVIEANALMATALASQIRLVGDLIRTYGQRIELLFDTLPDAELFKSLPGMGPCMGPRMLAALGDNRNRFNSAEEIQNYAGIAPVTERSGQKSWVHWRWQCAKFVRQTFVEWAAKTVNSSYWAKLYYQGLREKGKSHQSAIRALAFKWIRIIYRCWKTRTQYDEAKYLLALEARHSPLLKS

SEQ ID NO: 207010 - protein, 335 aa, unidentified
MKTHYFLGIDVGKNQLHAAITIDGVNFDDQQVENTPTSIKEYFRHLKSKFNFNASQLTVCLEHTGIYCYPLLDYLTHQGIAVCVEPAVRIKQSQGMQRGKNDKMDAVRIAKYLFKNHTELKLWKPKREVVQQLRALLVVRERLVRGRMQFEVPVKESSEFISKSIRQLAVVNCKATITAIKKDIKRVNVEISRVIKKDAELHAQVKLATSVTGVGTIIATNMIIDTNEFQDIDNHKKYACYSGIAPFPNQSGKSLRGKDKVSHLANKRIKTLLHMGAWSAVQYAPDLKAYYNRKLAEGKPSYSVLNAVCNKLISRVFVCIKNQRMYQKDYRPALA

SEQ ID NO: 207011 - protein, 414 aa, unidentified
MEHMYRTGPLSMYTKEAKVVNVGIDLHKTQFTTCARAGGGEIFNVYPTTKEGYQAFLEAAARWQGSGETVRAAVESLGNTRYFKNRLEEGGIGVTVVNPLRMKVISETVKKTDKYDAATIAEFLEKDMLPQSQLCSRESEKLRRLLRVRQELVRGEVSIKNQIHAMLTAEGMEDAKGSLQSKKGRKQVLDALNQCANELEAQTLFDILERQEESVKAVEKQLRVITKGNRTVELLMTIPGCGEICAWTILAYTDDIKRFASAKKYVSFAGLAPWVQNSNEKIRHGKITKRGPKELRTALVQVVMGMRRMKAKTVTWRMMQRYESLKKNKCSGNAIIATARKVAVIIWHMLNGNNVFDVGRVSDPKAAKKAESMSRGETPAKDVLVREPEESAACLIETKGAKKTGVARKKKKVG

SEQ ID NO: 207012 - protein, 461 aa, unidentified
MSTIFLGIDVIKGYGDFAFINESGGILRHCRFDDTEQGHSSLFEVLAELSDEKFVQRFIVGIESSGGLERNWIGFFRKYASTFKIQLNRLNPFAVKRFLDGDLHRGVTDKSSSIGIAQYLRKGLFHAGDFDDEMDGLRTLYRVVRRQIEQSSELRNELQSLLPVVHPELVRYCRFGIRKWTLELLCRYPTVSFLSRIDPSELAGIVFLRAGRAESVVDSARASVASQLDDNTGDTVVFLAGEILRRDKQIKMYKKKICSNLSNDETFRILNSIPGIGIWSAACIRLEIGRIERFHSPEALVAYAGLDPRTRQSGDSMVNCGISRRGRKQIRQILYPVILASLHYNPVISSFYSRLRGSGKKHLVAAVACMNKILHIAYGCMISRQMFDKERYFEVYQRYNEEKMKRRSERRAMVSNLSITAPVSKREAGKRRAAAMPQCGKTAQVRGQAAATVLYNNRGRE

SEQ ID NO: 207013 - protein, 342 aa, unidentified
MGQITTIGLDIAKSVFQVHGVDARGETVLRRRLTRARLMPFFEKLGRCVVGIEACATSHFWARELRKLGHDVRLMPPSYVKPYVKRQKNDSADAEAICEAVTRPTMRFVEVKSPEQQSVMVLHRTRQMLMRQRIQLSNAIRAHMAEFGIAAPVGREGLQKLIDIVHEEGDERLPTEARECLQMMAAQLRLVNQQVLENDRRIRISARATDTGRRLMAIPGVGPLLASAFVASIPDPALFKSGMNLAAWIVLVPRQNSSGGKERLGGITKQGNRYLRQLLVVGAMAVIRYAERHGTRRPWLVQLMARRTTKIAAVALANKTARMVWAMMMRAEAYREPEPRAA

SEQ ID NO: 207014 - protein, 343 aa, unidentified
MRLFVGLDVSLAKTAICVISEHGKIVNEAQVASEPEALVRWAREQKGTVAVIGLEAGPLSQWLHRGLTNAGLDAVLMETRQVKGALKAMPIKTDRRDAEGIARLLHLGWFRPVHCKSVSAQEVRAVLGAGKAIQLGMIALEMSMRGLLRNFGLKVGAISRGRYDQRIRELADGNPMLETATAPMQRARASLRQELAGLERLVRQMAQDDPVCRRLMSMPGVGAVVALTYRSAVDDPSRFTSSKKVGAWVGMTPSRNQSGERDVSGGITKAGDVNLRRALCQAATVMMHRGRSTWLRTWATQVARRRGGKRAMVALARRISVILHRIWIDDADFRSDIAVPHAA

SEQ ID NO: 207015 - protein, 413 aa, unidentified
MDKIYDICCGIDVHKKLIVACLNHKRKKELREFGATTRELMELAEWLQKNECEIVAMESTGSYWKPLYNIMESYDLHAIVVNPAHMKAVPGRKTDVKDAEWIAELLQHGLLQPSYIPSKDQRELRELVQYRKSLVGERTRELNRLQKMLEGANIKLSGTVTNINGKSARKILEYILSGNEIDEKKYDEMYEEKLIAHNLKASKEQILDDLKGFMSPLQRRMLKELLQHLDELNVHIENLNDEIDNFMKPEEKQASQVIQDVTGIGNTSAQTIIAVIGTDMERFPSDRHISSWAGLCPGDNISAKKRKGGKIRKGNALLKSTLVLCAHAAVRHKSSYFHAQFKRISTHRGKKRAYVAVAHSILIAIYHILKDGVKYQDLGAEYYNQFNAERKIHAYLKKLKALGWEPPKEAVPA

SEQ ID NO: 207016 - protein, 372 aa, unidentified
MQQSSTLYVGLDVHKESIAVAYVAQDHGAEVVSLGTIGTRQCDIDKLLRHLQSKGQQLVFVYEAGPCGYWLYRYLMKKGYVCWVVAPSLIPKKPGDRVKTDRRDARQLARLMRSGDLTPVYVPAVDDEAIRDLSRAREDTLRDLKAAKLRLKAFLLRHDIRYTGRANWSPAHLRWLSEVVCPTPAQQIVFQEYVQTVTEQTARLQRLEHELRDQVKTWRFQPVVEALQALRGVQFTVAVTTVAELGDLTRFNNPRQLMNYLGLTPSEYSSGPRRQQGSITKTGNTHARRALVEGAWAYRYPAKVSRHLQLRLEKLPAAIQAISWKAQVRLCKRYRQLMAKGKNANQVVVAIARELSAFMWAIAKQVVVPPKA

SEQ ID NO: 207017 - protein, 348 aa, unidentified
MVLIGSDFHPSWQQVSWLDRETGETGDQKLVHEAGSVEKFYKQFPAGSRIGMEATGNCQWFLELMAKLGHEVLVGDAAKIRASDARQQKHDKRDARLLAQLLAEDRFPRIWVPSREEKDLRQLLIHRYKLVRIRAQVKNGLQHLALNQGLQRKKRLWSEAGQKALCELPLAPWASRRREDLLKMRSELDAKIELLDQAVMEAAEKNEKAKLLMTQPGVGPITSMAFVLTMGDVKRFPRGKQVASYLGLIPREYSSGGKQRLGSISKQGNSFLRMLLVEAAQGAARDDAGMRSEYLHRCHTKPKGVAKVAAARKLAIRLYWMLRSNTKYPEVVHVESSSRVPLVVRHGG

SEQ ID NO: 207018 - protein, 337 aa, unidentified
MSKITLISIDTAKSVFHLVGIDQGNKYVWRRRLSRAKLIPALARIEPCVVVLEACAASHHWARQIAACGHQARLIAPQHVKPYRRGQKNDYRDAEAIISAAVSPGMHFVGVKGVEQQAEQALHRVRSRLLSHRNAAANELRGLLGEYGCAFAKGHKALRQGAVDFIDCGEAETLGLSELIRDLLDELDQVQQRMDRYERQIEQRVRQDQISSSLRDELAGVGPLSASALRIKVADARDFHNGRNFAAYLGLAPGHRGTGGEVTIGKLPRGRDRYVRQLLIHGARSVVSRLDNKTDERSCWLRGIVERRSFNTACVALAHKNARQAWAILAREQALAA

SEQ ID NO: 207019 - protein, 344 aa, unidentified
MSTHVHILGIDLGKNWFHLVGIDTHGKVILRKKLKREKVLPFIADLPACIVSMESCPGSQYLGRRCDAAGHAVRIIPAQFVKPYVKSNKNDFNDAQAIAEAASRATMRYVPLKNPEQLELQAIHRVRQRFITERTATVNQMRALLLENGITIATGRALFARRLPAILEDADNGLSIRLRALLDTLRHRWRTLDSEIQEMTDLLNEHAKHSELCVRASTVPGVGPIVSTALVAAVGNGRAFGRGRDMAAWLGLVPRQYSTGGKSTLGAISKRGNRYLRQLFIQGAQALYIHMKRDQSALGQWLRALEARSHRHVAVVALANKIVRICWKVLTSGQAYQLFPGRSG

SEQ ID NO: 207020 - protein, 357 aa, unidentified
MREIISMTTKRVCGLDLGDKTSALCVCGRGGEIEWEGRVRTTVAGLAKRFKGVEPMRIALETGMHSPWVSRQLRQWGHEVIVANASKVRLIGNSRRKNDRLDARTLADLASVRPRLLSPVEHLSAEAQAHRGVLRSREALVRSRSSLILHARGLVKALGGRLPSCSAESFSKKARGFVPAQLLPALAPILSMVGELTAQIRAYDRQIEELLRTHYPQAQRLRQVRGVGPITALAYVLALGDPQRFAKSRTVGAYFGLVPAQRDSGSLRPQLRISKQGDSYVRKLLVQCAHYILGPHGVDSDLRRLGERLGQAGGKNGKKRAVVAVARKLAVLLHRLLVSGQPYEPLLQADLAQPQAA

SEQ ID NO: 207021 - protein, 348 aa, unidentified
MDHIGIDVHKRESQIYILAEGGEVVEQRIRTESERFAAVLGARPRARMLIEASTDSEWVARCLEALGHEVIVADPNFAPMYATRSRKVKTDRRDARALAEACLLGAYRPAHRLSDPQRHVRGRLGVRDALVHTRTRYISVIRALLRQHGYRVPSGSADRFIDRVRRLPLPGRVRSVIAPLLAVMGPLNQQLAYSDATIERLAIQDPRVPRLRSVPGVGPITAAAFLAAVDDAQRFHHAHQLEAYLGLVPREYSSGETQRRGPITKAGHSRPRWLLIQAARSILRCRPPAAEALWAWALRIATRRGKHVAVVALARRLAGILYALLRDGTVYAPRRPAALPDPIAAQLA

SEQ ID NO: 207022 - protein, 272 aa, unidentified
MKFCGIDLHSNNSVVVVTDETDRVLVSRRCPNELTPILLLLEPHRAELVGVVVESTYNWYWLVDGLKAAGFEVKLAHPVAMKRYDGLKHSDDKDDATFLAHLLRLGILPTGYIHPPQERALRDLARKRIQLVRSRTQHILSVENIMARQFGQRLSCNEVKGLSATSVDRLGLPTDVALAMKANVAIVQALQTQIDFLEERLLHEARLRPEFSLLKTMPGIGEVLATIIMLETGNIERFADAGHFASYARCVKSAHYSTKGTDLFSTIRDRFI

SEQ ID NO: 207023 - protein, 340 aa, unidentified
MSAITIIGVDLAKRVFQLHVAKADGSVAFRKKLSRGRFLSFLAEQPPCVVGMEACSTAHGWGREIEKLGHTVRLIPPIYVKPFVKRQKNDVADAEAIAEAASRPTMRFVAVKSEEQQARAMLFRTRDLLVRQRTQLINAVRGHLAEHGVVAAQGPAHLKRLADAVVDEPSPLPAMVRELGKLFLEQIDVLDTRIGELDKKLRTVAGQAETTRRLQTMPGVGPITAVAVETFAPAMGSFTRGRDFAAWLGLVPRQHSTGGKQRLGKVSKMGQRDIRRLLIIGAMAVVQAASRSGAPKDSWLARMLAKKPRMLVAIALANKMARGLWAMMTKQENYRNPAAV

SEQ ID NO: 207024 - protein, 341 aa, unidentified
MTEVSTIGLDLAKNVFQAHAASASGAILFRKKLRRDQVLAFFAAQPRCLVAMEACASAHYWAREIAKLGHEVRLIAPTYVKPFVKRQKNNAADAEAICEAAQRPTMRFVAVKSEAKQASAVVFRTRDLLVGQRTQIINAIRGHLAEYGLIAPQGPSHVDQLIAQIEDPSSGIPDPARSCLAVLVETLRALQGKIAALDTEIAARAKRDDGARRLMSIPGIGPLIATAIEALAPPVETFRSGRDFAAWVGLTPLQRSTGAQERLGKISRMGERTLRRLLIIGASGVVRWARRKGVPAGSWLARMLARKPPMLVIVALANKMARIAWALIAKGGSYRAPAVAA

SEQ ID NO: 207025 - protein, 416 aa, unidentified
MNSPAKSTSQRFLALDLHKHYLVVGGVNFRQQVVLNPRRISLEKWPAWAKANLLPCDAVVLEATTNAWDIYDQIVSLVARVVVAHPPKVKWIAEARVKTDRLDVLRLAHLLAADLIPEVWVPPVEVRELRALMAHRRRLVQMGTRARNRLHSLLHRHNLKPPAGKIFAQKHREWWQKLDLSPTQLMRIRHDLATLDHVQGQLAEIEQELSRLSTAEPWADQVPFLLQLPGFGLIVSLTVLAAIGDISRFSHPKKLVGYAGLGASIHDSGEKHRTGRITKRGRKELRWVLVEAAWRAADTHPYWKAQYERLERRSGSTKAAVALARKLLVAVWYVLTQRTSDRHADPDKVAFKYIMWSWKLDDVKRNGLNTRQWTRYHLMRLQLGEDLTHILRGGHRYPIAPGEELRALLPELQAAD

SEQ ID NO: 207026 - protein, 324 aa, unidentified
MNLPCLGIDIAKVKFNVCLLQLTGKLKHKVFANNATGFEQLQQWLKQHAAQLVHACLEATGTYGEALSLSLHHDGHTVSVMNPAAIKAFAASRLSRTKTDRVDAELIARFCLAQQPPAWTPPAPEVRELQALVRRLESLMEMRVAEENRLSAGLTVPAVRSSVEEMLTHLKEQIARTEKLIRKHIDKHPGLKQQSELLNSIPGIADTTAAVLLAEVPDIKLYRSARQVAAFAGLVPRERQSGSSVRGRVRLSKIGNARLRKALYFPAITALRCSPFFQQWAEGLRARGKSKMSVIGAVMRKLIHIAYGVLKSARPFDPELAKSA

SEQ ID NO: 207027 - protein, 343 aa, unidentified
MSSANTYIGVDLHKKTCYMTVMDKAGIVSKQTEIKNDSEDISKFFSLYGNKQSKVAVESTMNWIPFYEQVEKMGFEVVLSNPLMTKAVAAARIKNDKVDSKILAELLRTDFLPTAYIQPKAIRDLKELIRQRAVYVEMRTRIKNKIHSVLFKTGDKHEFTNLFGKAGRKFLLELKVAPVYRTELDRYLLTLDNLGLQIEDMEQDIEAKAKSDYDCKLLCTIPGVGPYTALMIKSEIGDIARFRSSGRLCNYAGLIPSTYASGEKIRTGRITKRGSKWLRKALVDAVTSSCRNQNKISVFYKKLKKSKGTGKAKVAAARKLCSVIFAMLTDKQPFKEFVPVKER

SEQ ID NO: 207028 - protein, 412 aa, unidentified
MTRVLRRVGVDWGSGAHQVCRIDGEEEPKQRGFPHTSEGLNALVAFVVEGEMAPEQMAVAIEVNHGAVVEALLAKRLPVYSINPKLLDRLRDRFSPAGAKDDRRDAFVLASCVESDAHAFRRIEPGNEENLRLQAATRLRGDLKSQFGADANRLWSELRDYRPGLLVLCPGADEPWLWALIEKAPSPSQGAKLTRASIGVVLKRHRIRRLTIEDVQTVLRKDVLSLRPVYIESHVARVLVLTAKLKLAQTQIDKIEAEIKTELTERVQSEKQTKRRDLTILLSLPGFGPLTTATALGESGDAFERRDYNALRSLCGAAPITKQSGGSRYVVMRQFCQPRLRVALHISALQAIRTDPKFHDLYVRARARGQTVGRAIRNIVDRLLCLAVQLLRKNELYDITLRQLAPEVAAAS

SEQ ID NO: 207029 - protein, 340 aa, unidentified
MNRIGLDAHSASFTVAVVNDLGKVTRCLSRPTSAENLIRIVGEVPGPKELVVEESAVAQWVKDTLEPYVDKLVVCDPRRNRWIAQEDFNDDRTSAIKLAQLLRGGYLKEVSHLDDRQAQLRRVFCHYADLNEQLVRFKNKLKATYRQALVPANGTGIYSESRHAEWLARLKDAPALRRQAGQLFVLIDTVEAMKEDCLKAMVAQARKNPGYPLLRTIPGVGSVLACGYIALIATPHRFSRKNKLWRYAGLGNALHISDDTVYQDRPSKSGNRLLKWVATQHFMGAVERAEADNLFRRRYERLLREGHSKKVARRQVCRSLLSVVRAVWMKGEAYRETPLS

SEQ ID NO: 207030 - protein, 348 aa, unidentified
MTMVCGLDLHRRQITFDAVEVESGQVWTGRVWQPDRERFRRWLRDDVTERAGGGPVAIAVEGCTGWRYVVEEVVAAGFEAHLAEPADTQAARGRKRHAKTDRTDSRLLRELLADGRLPASWIPPTIVLEWRERVRLYKTLVDQRSTWVQRIHAELYQHGVTLPETSIRWAKTRELLEDDGLEISPAGRQRVLTAYRMIDAITVESHPLKADLQRFGRRQPGCRALVEHQYGIGGLLAVVMWSELGDCQRFARSEQVVRHSGLDVTVDQSDRRRAGGFISRQGPQTLRWALYEAAKNASHHRSPDHDYYSDVKEHLNSKLATISMARKLARRCFHLLRAVDPDVVYATP

SEQ ID NO: 207031 - protein, 370 aa, unidentified
MKEKILYVGLDVHKKSIDVALANGRANGKVRSYGKIDGSLDALDKLIDKLQSNGRILDFVYEAGPCGYPIYRHLKSKGHRCAVVAPSMIPKRSGDRIKTDRRDAINLVRLYRAGELSCIYVPSEEDEAMRDLVRCREDFKRFERKARQRLLAFLLRHGIDYPGKRNWTKTHMNWLAGLKISHRSQQIVLQEYIDAVKDCTQRVERITEQIRQLASDWSRADLVKAYQALRGVSLIVAVTVVAEIGDMSRFKNPKELMAYLGLVPSEHSSGNRLRRGSITKTGNSHVRRVLTEAAWAYRLRARKTTTILKRQQGLPKSICEISWKAQTRLCARYQRLFAKGKSKQTIITAIARELSAFIWAIDREMKTVAC

SEQ ID NO: 207032 - protein, 413 aa, unidentified
MLAVVIADVAVEGEYQFERRKVGTSPSELCRLADWLVAQHVEEVVMESTAQYWRPVWATLEQRWRLQRLQESDGARSGQLHLAQAQSNRGAAGRKKDFPDAERLVKRLVAQELKLSFVPDVEQRLWRTIMRRKHQLTRNRVQFQNRLECLLEEAHIKLSSLVSDLLGKSARYMLQAVAEGETNPETIAALADHRLRATAPQLRDALGACRDLHPVYRQLLKMALEELKLMEEQIDKLEQEMANLLSAQQDVVQRLAEVPGLGVDSAQQIIAEVGPEAAAFPSAKHLASWVGVCPGEEESAGINYSHRSPKGNRQMKGLLNQASNAAVKTKGSIFEFIYRRLVVRLGHAQAIGAIAHRLCRLIWMILHQAIRYEERGPAVSRSTTERRAAKMIRELRRLGYRIEPVECKAEGSV

SEQ ID NO: 207033 - protein, 355 aa, unidentified
MEGTRYIGMDVHKDSISIAVLNSSGKLVMESIIETKAITILEFVHGLRGSLHLTFEEGTWAAWLYDLLKPHVTKLVVCDPRRNGYLKQGSKSDRIDARKLAELLYSNMLRPVYHGEHGVRSLKELARSYLTITKDQARVMTRVKAVYRSWAIPCAGKQVYGQRHRLEWLGKIQEAGVRRRAEFYYVQLDALRSLRLVVRRELLLESRKHGASKLLSQIPSIGPIREALLIALLQTPDRFRTKRQLWAYSGLAIETHDSAENQYVNGQLQRSKKQSSIRGLNSNHNPDLKNLFKSASAVAAVKTGPFQKFYAALIGKGIKPEMARLTLARKIAAITLIVWKREVSFDARYLNPQTA

SEQ ID NO: 207034 - protein, 416 aa, unidentified
MDAIVERCAGLDVHLDTVVACVLYGKLDIKPKKEVKTFSTTTKGLLELFDFINQKECTHVAMESTGIYWKPVWNILESRAFDLIVANAKKIKNVPGRKTDVKDAEWIASLLRCGLIEKSFVPPERIRDLRDLTRLRKELLGEVNRNKNRIHKVLQDANIKISSVLSDVFGETGKSILNQIIGNQCITEEFIYSLYEGRGKSKLKSTPMEMYEALNGKIRGHHVILLGMHNSNIVFLEKQINELEKEIDILLQKERDSLELLETIPGISKISASSIIAEIGTSMDVFKTEKHISSWAGLCPKNNESAGKKKRSGIKSGNNWLRSMLCECAWSATKKKDSRFKNKYWSMVPRMGRKKALIAIANMMLRLIYHLLKTKSTYKELEIQYFIDKDKRREDRIIKELKSKGYLVEKDSLQMA

SEQ ID NO: 207035 - protein, 355 aa, unidentified
MTSTKYIGMDVHKESISIAVRNAAGKVVMECAIETKASMILQFIDGLRGDVQVTFEEGTSAAWLYDLLKPHVTKLVVCDPRKNASMREGQQSDKIDARRLAELLRLNHLHPVYHGEHGLRSLKELVRSYLTITKDLARVMSRVKAIYRSWAIPCSGKQVYASRHRAEWLGKITEPGVRRRAEFYYQQLDALRVLRQQVRQDLLTESKKHKAWKLLCQIPSIGPIRAAGLLGILQTPHRFRTKRQLWTYGGVGIETSSSADHHVVKGQLERKKKHVEIRGLNRNYNHDLKNIFKGAAIVAATKPGPFAEFYAELLAKGMRPEMARLTLARKIATIVLIVWKRGVCFDAQYLTPQTA

SEQ ID NO: 207036 - protein, 343 aa, unidentified
MAIVNRIALDLAKDFIQVLALDESEQEVFNKKLRSNKVLAKLATLKRTDDCEVAVESCGMSHHWRREIEKLGYKTVALPPRFVKAYLQGEKNDANDARAIAEAASRPNRKSVRIKSIEQQDLALMVSQRDSRVQTRTQEANRLRSVLAEYGITMSQRISSILKRVPEILEDADNALTARSRDLVLRQYELLRIMDEEVKAMDKLLSAEANNTNDSRRLMTIPGIGPVTAVSLLALIGDVSDFKRGRNVSEYLGLVPRQNSSGGKDRLGGITKKGNTRLRTLLVHGARSALRMAHKRNDKLSLWAQDVAKRRGNNIAAVALANKHARIIWAMLTHKEDYRMAAA

SEQ ID NO: 207037 - protein, 333 aa, unidentified
MEILYQSCCGCDVHAKTVVVCLIKDGQKSVRTCSTMTDDLLRLSDWLVGEGCTHVAIESTGVYWKPVFNILEGVMEVILVNARHVKAVPGRKTDVRDCEWLADLLRHGLLKASFIPPLEIRELRELTRYRQTLVREQASVANRVQRTIESGNIKLGQVATDVLGVSGRGMLRALAEGESDTEKMAKLARGRLTGKRDELRRALSGRLTAAQRFVLRELLDRYDELEAAISRANEQIDKEVAASIDPFVAEAVKLLQTIPGVGERVAEVIVSEIGVDMSRFPTDAHLASWAGVCPGNNESAGKQKSGKTTKGSIYLRSALTQAAWAATHTKGTY

SEQ ID NO: 207038 - protein, 407 aa, unidentified
MQVYLGIDWSEKKHDVIFMNEAGASIGQLTIPHTPEGFQKLDRAREKFDLQPEQCLVGLETAHNLMIDFLWDRGYNHVFVVPPSVVKGSRSRYRQSGARTDLSDAYVVADILRTDQGRLQPWHPDSLLTRQIRARVSLINHFTRNITRLSNRLRAVILRFYPAALNVFSELTRPITLHFLKAYPTPHAAVALTFDEFQAFARQHRYPRPCNLRHRFARLKAPQPQASQDTVLVYEDEVPLVADLLLGVVQAKKKALKELKILFEQHPDREIFSSLPGAGPFLAPALLGKFGDDRKRFPNPGSVQALAGTCPVTDASGKRKVIRFRYACDREFRTIVQQWARCSLRKSVWANGYYERVRPHCSSSSHAYRCLGNRWLAVAWAIWQKGEPYDEAYHLRQSMLRRTPKHT

SEQ ID NO: 207039 - protein, 363 aa, unidentified
MTVYIGVDFHPYEQSVAYASDEDGEIGYRRFLHSDKQSIRAFYRKCGTDAVIGVEATGCLWWFEKMLAGDGHQLRIGDPRMIRRAALSRHKNDFRDAETILELLMRGAFPSIVPRSEESREVLDLLHYRQTLVQKRTSIANQLQAFARGKGLARFRMPAVKGRRKLIDAPVTEIETLLVRSRLVLFDEITAQMKALESRLEKLAAEDERARLLMTHPGIGVINALALVHTLGEVRRFRRKEEVVAFVGLDPLEKSSGQTKRIGQISKHGSRLVRHLLGQAAQACRDHRIRKFYLEVSRRRGRPKAKVAAARKLLINCYVMLRDGIGYEEFQRRGEVGLCEGSGEVRAKASVSGGLMARPAISI

SEQ ID NO: 207040 - protein, 338 aa, unidentified
MRYVGVDLHKQSISLCVVELENRARKVIERRRFHCDQVFRMEEYFASLGEYQLVVEATASYEWFVRLVEPTADRVVLAHPAHLRVIAQSKRKTDKLDAQTLAEFLALDQIPEAWRPTPRVREHRVLVRHRNYVVRRITSVKNKLRRVLSHYNADLKNLFTEAGREYLAMIKLSEADRFVTDQLCEELDQHSARLKGVDKQLRAFAKTASVAEQEARAVLASMPCVGPVTIDVVLAEAGDVRRFGSQRKATAYAGLAPGIRESAGKSRQLGITKEGSRLLRAILVETAWRLVNRTRRWASVYVKLRARCGAKKAIVAVARRIWCVMVSMLQSGRKYQPA

SEQ ID NO: 207041 - protein, 397 aa, unidentified
MKKRYESVAYGGMDVHRKFSSVTLRDAEGRVVARERLDHEDRRKMRQHLRRWPAGTPLVMEASFGWPWVSDEVEAAGHTPRLSNCYKLEQMRRARGQVKTNAKDADLVSLLPAEPTRWWEVWRAPPEVRDLREWMRHRADLVILQTEVKNRVHALLARHGVFHPFSDLFGGQGRIFLHRLCQDGRYADGVLPPGALEAIRSDVRVLWTLRAELATITWRLRGRLKQDPLTRRLKTIPGIGLILAHVLASEVGVIDRFRSHRALASYACLAPRSDDTGEPDPRRTPLGRHLGDRGNRTLKWALVQAAHGAVRHGGRWRALFDRSTDGGTRNRGRGYVKVARELVKVLFVVWSRDVDYTETPPPRPGSRPTRRRRRTSRPGTGQPRVAMVEAQRPPTSL

SEQ ID NO: 207042 - protein, 411 aa, unidentified
MEVVYRRCAGIDVHKGSISVCVLLMEGEGWKKQVRRFGTMTGDLLELSQWLQQLGVTHVAMESTGVYWKPVWNLLEGQFELLLVNAQHIKQVPGRKTDIRDCEWIADLLQHGLLRGSYVPKPEQRDLRDLTRYRVRLCEDKVRLANRIQKVLEDANVKLACVATDVLGVSGRAMLQAIAAGEHDPQKLAHLARKGLRKKLPQLQMALQGRIRDHHRFLLGQLLEELTFIEEKINKLEQRIQEGMRPYQHVITLWTSMPGIREVTAWSLVAEIGTNPEQFPQASNLASWAGMCPGNNESAGKRKSGKTRKGNRWLRRALNQAAWGAARTKNTYFAARFHRLAAKRGSKRAIVAIGHKILVLAHYLLKHNCLFRELGGDYYQRLRAPSLSQSLVRRLQRLGYQVTLTPAQQAV

SEQ ID NO: 207043 - protein, 341 aa, unidentified
MSEAFIIGIDLAKRVFQIHGADAAGKVLYRRKLSRPQFNKFLNEHPSCIFAMEACASAHHWGREALAAGHEVRLVPARYVKPFVKRHKSDVVDAEAIAEAAMRPSMRFVPVKAPEQQAQAMLFRTRELFVRQRTQLINSLRGYLAEFGIVLRLRIRNADILKREVEEQAHKLPDEAKGLAERLLAQIETISAEVEGLDHSIKMHAKTSEETRLMQTMPGVGPMSAIAISAFCPPAKNFRTGRDFAAWLGLVPRQHSTGGKERLGRITKMGQKDVRRLLIIGAMSVINSIERWKRCAEPWLARMLETRPRMVVAVALANRMARRLWAMLMTGQIYRIRGAVA

SEQ ID NO: 207044 - protein, 478 aa, unidentified
MEQEDGQGVPRRLVGIDLGIASRHSVRVLEADGRVVGRSSCVPTVESLSAVEQVALAGAVDGTQLAVVFEPTGPAWMPIAVFFARRGHAVYRVSSAKAADLRRFLRRHAKTNGIDAETLARMPLADPRGLQRLELPGSDAAALDRRVRACGRLTEAASKHKVRIKDLVRQLMPMTPLAGDLGKADLAVLERFADPRVLLGAGAAELTRLITVVSGRQQGSQRAAQWRAAAAAAVELYGDHPAVAYGELAAEVLTEIRLLRAIQAELALHAAAREQHYRHVDPGQLARSLPGFAEISAPVLVAAMGRPGRFRDGTRFKSYVGLTPRASETGETDRKGQPMSKAGPSQLRSAFVRAADTARRQDPQLAKIYYLQMTERGATHLKACCVVAGHLAERAWTVLNRGTPYVICDNNGNPVTATEAKKIIADKWTVPEDVRKRRRSRKLAGKAPQTAATGPDRRGDPPRPRSSRPRSKTVKPAT

SEQ ID NO: 207045 - protein, 446 aa, unidentified
MEINTELADILGGEVTVGDLVDRPHNFFGVCVMVRGVRRGSLSLWLPSCAVAVWHMCGPVGRVGTVRRDLIGAWSIPNRRMSTERSLRLTNPREPGGTLMMMTIGGDSHKRTHTFVAVDDRGRRVAEKTVPATTDGHLDAVAWGAQWPKRRWALEDCRQVTRRLEGDLLRAGETVIRVPTKLMADLRRGAREPGKSDPIDALAVARAALREPDLPVARLDGEERRLKLLVDHREDLISERTRMQSRLRWHLHELMPEHIVELRTLRRFHVLDDLARRFGAIDGLVAAIASELIARIRELTIRINELEREITGIVTDLAPTLLGLEGCGALSAAKIVAETAGVDRFRSRAAFARWNGTAPIPVWTGNERFRLNRGGNRQVNAAIHRIAITQWRGHGRGHDYVQGRIERGDTKRSAIRALKRRLSDEVFRRLHTDAATTQTRPLDQVA

SEQ ID NO: 207046 - protein, 333 aa, unidentified
MIGESGKRQGSHVVETNGQALVEQLKTITGKRHVVFEEGTQSRWLYEILSPHAEEIVVAMVSESRGQKSDERDAFRLAEQLRTGAFKTRVFKEVGEYKTLGELGRTHAMIVQDVVRVQNRIKALLRSRGVAVAGKSVYSEQGRGEFLEKLPNASRAAATMLYAQYDAVEAVRRRAEKGLVAEAHRHPMSRVLESCPGLGPIRVAQMMPIVVSPARFRTKRQFWSYCGLGIVMRSTSDWIQNKEGGWRRAEVQKTRGLNLNHNRTLKNVFKGAATTVITQLPNEPLQQDYQRLIDAGTKPNLAKLTIARKIAAIALSMWKSKEKYDLTKHRKQG

SEQ ID NO: 207047 - protein, 421 aa, unidentified
MAQTVEIVYPVCCGMDVHKNFLVACIAVTDERSNTQHHIKRFSTFTGDLRRLSEWLVSYNCRDVCMESCGKYWIPVFNALEKAGINVCLTHPKYVKAIKGKKTDKKDAKWISELFKCDLVRSSFVPPSDIRQMRDLCRYYVKLTGFASGEKNRAQNCLTMCNFKLDDVFSDVFGKSATRVLNALLEHGNGDFDLDGLISGKCKSSSEKIRAALDGELDPTQVEKLSLIRQHINDIDTLKAALKTLIYKIAAKYQPQIDLLMTVPGISTPLTAIRILAEIGADMSVFETAKKLVSWAGLTPQNQESAGKKKTTRIGRAGAYLKPLLVQIALNCGKSDKCPELKNKYLALKKRRGGKKAVIAIARKLLTVTWHILSKNEAYNAELYRKEDKPPVTREFTTAQAVAFLRNRGFVIVDEETGEIS

SEQ ID NO: 207048 - protein, 454 aa, unidentified
MKKQDSYDYYVGIDCAQNKHDFVMKNNQDKFLIKRGHFSNTLQGYEKFLNTVLSKCLNKDKILFGMEVTGIYGTNLYERLKSDGYHVVMISPDSVKNYRDYKRLNKTDKIDSACIAELLLNGDAQIVHVEKNGYTDLKAYIRRRNALKVTCTQETNRFLAKVCLYFPDLLKVFPSGRATLKAIFSIYPTPHSIIEADFDELVSVLQKASKNKFGVDKANELIHAARNSIVVRKSISDGELYNIHSLIDSIDSLESEIRNLEKIIDSKAEEFPAYHVLLTLTGCGKITAATIVAEIGDISRFHKASQIVSLAGLYGDNSKSGSSVNKRGKITKKGSRYLRHAIYMVAEFARRNNPIFKAYFTKKKNGDRTKHILAVNAVANKLCKVIYSLMKNQSTYIIQYRDLAKLSESTQNEFFQNAETDFSAKTRRKKYLYEDEYGELHEFVFKSLKTALIE

SEQ ID NO: 207049 - protein, 400 aa, unidentified
MNAVGIDVSKGKSTVAIMRPFGEVIAEPFEVSHTDTELRKLACFLKKLPGETRIVMEYTGSYWQPIAKVLHDAGFFVSAVNALLIYKYGNHSIRKGKTDKLDAVKIANYCLDRWTDLERYSPTDQIRQTLKTCRRQYDQYIRLKVNLKNNLIALLDGTFPGVNTLLKSAPRDTDGHEKWVDFAGKFWHRQCVCGNSEKAFANQYRKWCAKAGYRFNAEKAVAIYSHAGSQVDTLPMSSAIQSLITHAVAQLNMIIETISAIQHEMLTLASQLPEYPIVMRMFGVGPVLGPQLMAGIGDVRRFHCKQSLVAFAGVDAPPCQSGTFESKNRHISKRGSPRLRKTLFQVMSTIIQHAPADDPVYQFLDRKRREGKHYYVYMTAAANKFLRIYYGTVMAYFEKP

SEQ ID NO: 207050 - protein, 348 aa, unidentified
MEHICRIGMDTSKHFFQLHGVNAAEEPVVRKKLRRKDMVAFFEKLAPTVVAIEACGGSHHWARLLSSFGHQVKLIAPQLVKPYVKRGKNDAADAEALCEAMSRPTMRFVPVKTAEQQAAVMLVGVRDRLIRNRTQLANSIRGYASEYGLTAAKGMAHLDPLIERIQADESLPVLARELFAAQAKEYQQLQAQIDEVDVKLKAWYHADECGRRLAQIPGVGPIGAALLMMKTPAPEMFRSGRQFAAWIGLTPKDHSTGGKVRLGVITRAGDEALRSILVVGATALLRFVANGKSKSALSPWLGQLLKRKPAKLVAVALANKLARIAWKLMVTGQSYVRKSTPTTVAGAA

SEQ ID NO: 207051 - protein, 346 aa, unidentified
MILIGCDFHPSWQQVSWLDEATGETAEQKLVHASGEAERFYKQLSTPALIGMESTGNCQWFVDLLTAAGHEVWIGDAAKIRASDVRQQKHDKRDAALLLQLLVEGRFPRIWTPSSQQKDQRQLLIHRYKLVRLRAQVKNGLQHLALNQGVQKKRRLWSAAGQQLLRELPLWPWASRRREDLLQLLRTLDEQIALLDQAVAEAAAQNERARLLMSQPGVGPVTSLAFVLTMGDVSRFPRGKQVASYLGLIPREYSSGGKQRLGSISKQGNRFMRMLLVEAAQIAVRYDPQFRSEYLHRCHTKPKGVAKVAAARKLAIRLYWMLRTQKPYPEIVRSESSSRVPLVGAS

SEQ ID NO: 207052 - protein, 350 aa, unidentified
MNTMTAEPGSVTGGVDTHLDVHVAAAVDHLGGVLATESFPTNAAGYRRLLTWLRAFGPLHKVGVEGTGSYGSALARYLTEQDVTVLEVGRPNRQVRRRHGKTDVIDAIAAARAVLSGEASATPKSHDGPVECLRVLKVVQRSANKNRTQSLNQLRNLIATAPDGLRSKLRALKTAELISTCASFRIGSDDDSLLAITRLALRELAQRIELLQAQLERVVVRLARITKATAPELIAAHGVGPDTASTLLVSAGANPHRLSNESAWAALLGSNPIPASSGKTNRHRLNLGGDRQANAALWRIAFVRMRSDPNTRAYIDKKIKECKSKPEAIRCLKRYIARELYAKLPREALA

SEQ ID NO: 207053 - protein, 338 aa, unidentified
MEQITTIGLDLAKNVFQVHGVDVAGKVLVRKQLRRAEVLRFFAALPPCLVGMEACGSAHHWARELTKLGHTVRLMPPAYVKPYVKRGKTDAADAAAIAEAATRPTMRFVAVKTVDQQSVLMLHKVRELLVRQRTMLINALRGHLAEFGIVAARGPGGVTAVITALHEAQGGLPDLARQVLHGLIDQMRVICAEITKAEKRIMAWHRASEASQRLATIPGIGPITASAIAAAVPDATLFRSGRQFAAWLGLTPRAHSSGGKQRLGGISKQGDGYIRRLLVIGATAVIRFARQDNASKTWAARLLERKSARLVSVALANKTARIAWAVLARNQSYTATAI

SEQ ID NO: 207054 - protein, 349 aa, unidentified
MAEQRISYTGERIDVGIDVHKETYTVICQCQRQIVKTATVPADPARLAESLPRWFPEARLFSAYEAGFSGFVLHRALTTAGITNIVVNPASVAVAANDKVKTDRRDAKKLARDLADGRLRGIYVPTEAEELARLLPRTRAQLVAHRATITRQIKAKLHQFGLITPASRRLMSSRYLREMAAWELPTELRVSLTLLADQWRFATRQLLEVRRLLREQAKAQVALETVYRSVPGVGEVVARTLATELGDMTRFANERALFSYTGLTPSEYSSGTSIRRGHISRQGVSRLRHVLVETAWRALPRDPILQAMFDRIAATRGKQRAIVAIARRLIGRIRACFRHGTTYAVGTAG

SEQ ID NO: 207055 - protein, 415 aa, unidentified
MALKIVYKICCGIDVHKTFVVACIASTNDKGVTSYESHRFSTYTSGLKTLLQWLLDRDCKDVCMESTGKYWIPVYNILESDCSIILAHPKYVKAIRGKKTDKKDAKWIADLFKHDLVAGSFMPPADIRQLRDLMRYRFKLTCFKSSEKNRLQNCLTVSNIQLGNVVSDTFGKSAQAILDKILENPADTSFDLEPLVFKSLKKKLPELRDAIDGYITTEQAGKLKVIKAHYENLESRKAELEELILALAAPYQQELAILQTAPGISSDFTAIGIISEIGTNMEAFPSAKHLCSWAGLTPTNNESAGKKKSVRVSKAGCYIKPLLVQCANAVVASKKHPEIRNRYLRLKKRRGHKKAIIAIARMLLTALYHMLKSGENYNAELYRKSDLPPVNREITVEQALMIARNQGYKIKSATA

SEQ ID NO: 207056 - protein, 348 aa, unidentified
MDKIIRIGVDTSKSAFVLHGVNAAEEPVLRNKLRRRQVVEFFSKLEPTRIGLEACGAAHHWARELTALGHQVVLLPPQYVKPYVQRGKNDAADAGAICEAMSRPRMRFVPVKTAEQQAALMMVGVRDQLVARRTQLSNMIRGYAAEFGCTAAKGLDKIEPLLARLATEPGVPALAKELFVGLGEEYAELKPKLCAVEARLRTWHRQNEQSRRLAQVPAIGPIGAALLTMKVADPHAFRSGRDFAAWLGATPKDHSTAGHQRLGLITRAGDETLRRVLVAGATAVIQQARKGRGHHSPWLMALIKRKPPKLAAVALANKTARIAWKLMVSGEHYNRNHAVAVQTATIAT

SEQ ID NO: 207057 - protein, 312 aa, unidentified
MDAVIVGIDVAKDKLDIGVRPSGERFVVSRAEAGLDELKNRLRELGPAIVGLEATGGYETVVAASLSAAGLPVVVVNPAQVRAFANALGKRAKTDPIDAAVIAHFMEATKPQVRPLPDEATRQLSDLVGRRSQIQAMITAEQQRKKHRPNKRMLASIERLLAALQRELSDLDGQIGEAVTASPVWREKDELLESVTGVGPAISSRLLAGLPELGSLDRRKISALVGLAPWTRQSGRWKGKSFIGGGRAEVRSALFMGALVAVRHNPVLKAFYERLLAAGKEKMVALIAVARKLLTILNAILRDGKPWREPHA

SEQ ID NO: 207058 - protein, 344 aa, unidentified
MKIAVLGIDLGKNVCCVVGLDASGAVVLRRRVRRDTLIDLVAKLPACIVGMEACCGAHHLGRLFATQGHNIRLMSPEYVRPYVKAQKNDDRDAEGIAEAATRPTMRFVEVKTEAQLDMQTLHRSRERLVGERTALINQLRAVLLERGIVVPQGKRKFEQYLVAMMDEHDGEGLSARMRMLVADTRAQWRELDRRIAAFDAEFARWAKENEDARRLATIPGVGVTISTALIAAIGKAETFEHARDLAAWLGLVPRQATTGGKPRLMGISKRGNKYLRTLLIHGARAALPHLAEKGTTLGRWAKNLLSRVHQNVAVVALANKLARICWAVLRSGQKFAAKEAPLAA

SEQ ID NO: 207059 - protein, 343 aa, unidentified
MQTVTTIGFDIAKSVFQVHGVDAAGQVVIRRQLKRRHVLAFFEKLPRCLVGIEACASSHHWSRELQALGHTVRLMPPAYVKPYVKRQKNDMADAEAICEAVTRANMRFVPTKTPEQQSCLMLHRTRHLFIRQQTAVINSIRAHLAEFGIVAPVGRKGVTELLRVVADPNDGRVPEVARACLAALGAQLLSLKQQILEFDRMIMAWHRSNQTSKRLHCIPGVGPMLATALVASVVDPRTFRSGRNFSAWIGLVPKQHSSGGKDRLGSISKQGDRYLRSLFVAGALAVIRYAKIHGTGHRPWLTALLARRPTKVAAIALANKIARMAWAMMAKGERYKQPVALAA

SEQ ID NO: 207060 - protein, 373 aa, unidentified
MKKHIYIGMDVHKEDNVIAVADGHRSGEVREYGKITNDLRSLKRLVERLKKAHPDAVQHYAYEAGPCGFVIYRQMVKWKLDCIVVPPSNIPKRPGERVKTDRRDAIKLARLHRAGELSEVNVPDAEDESIRDLCRARTDARKAVNAWKQRLKSFLLRNGYRYKGEATWSDKHLAYLRELVMPHPAHKFILEEYLVAIDEGLERMSRMEERIQALTVDWRWMPVVKALMCMRGIAWLGATVLVSELGDLGRFDHPRKLMAYLGLVSSENTTGTRRRQGSITKAGNTHARYFLVESAQHCGLPPKVSKILTARQQGQPLNIRKKAWDAQLRLNKRYWALMTRGVKRNIALVAVAREMVGFIWDIYQMAEPLPKKA

SEQ ID NO: 207061 - protein, 354 aa, unidentified
MIIIGVDFHPAYQEIAAVNTDTGEYQEKRLAQPQEAEEFYGSLAWVGQAVGVGMEASGQAQWFERLLEGLRWELWRGDAAVIRAKRGRKQKTDREDARHILKLLLKDAFPRIWVASWENRDLRQLLWHRHRMVQARTRVMNQLQAVALKEGLHCKKRLWRASGRQQLECLQLAPWSSRRRGELLELLDRLNPTIAELSQAVEREAEKCPEAQRLMTHPGVGALTALAFVLIIGNAERFGCGKQVASYLSLVPLEKSSGNRRRLGHITKPGSSLVRFLLVEAAQVTVCSVPEWRSKYHHLVLRRGRKTAKVAMARKLAVRLYWMWRKGWDYEQWKKFGSYVGQPGNRDGVQSIIE

SEQ ID NO: 207062 - protein, 340 aa, unidentified
MKIIGCDFHPGYQQIAMLDKGTGELIEKRLSHRNEGEEAKKFYAQLTGPVLVGLEASGQSQWFERLLAELGHKLWIGDAAKIRASTDRQQKTDRRDAHLLLDLLEQERFPQIWVPTPGERDVRQLLLHRAKLVRVRTQVKNQLQALALNQCVQRRWKLWTAVGRKQLENLPLLPWASRRRTELLKLLDELDGSITALDGAVCQEANTRPAVRRLMTHPGVGPITALAFTLTLGPAERFRRGKQVASYFGLIPSEHSSGGKQRLGHISKQGSSFVRGLLVEAAQSAVRHEPQLRREYQRLSQRRCRALAKVAIARKLAVRLYWMLREEVDYAQLLQGSYAG

SEQ ID NO: 207063 - protein, 406 aa, unidentified
MEGPIITVDVSKGSCHYQPFIENGHPMRKPKQLSATIDGFQKLGQTIKDLEAKTEREDIPVIFEATGVYHRPLQKYLEDHKIRYYIISPLLSATYRKTDLHSNKTDALDCAHIAKAYYCEKELRQYQAQPQEYKRLYQLSRLYESELVHLRKRKVSLRSMLDIIYPRIDKTFKGNQNLYDPIPMEILKRYPHPSLLLSHREDTIVKTVGHRTGHLKGYTERIVHKIYEKAKECYSGCEINDIEVINLPRLIENVQEQKKKCDSLLKEMIEIARTCPYFASVVSIVGIGENLAARIIAELGDVNRFDNRAAIVAYAGLNPKIQQSGDIDGLHLKISKKGNKHLRCLLYLGAQCNYRLRKEDPLYEFTKKKRQQTQCPLSSKAAYTASAHKLLVIIYSLCKNGTLYHS

SEQ ID NO: 207064 - protein, 331 aa, unidentified
MDHCAIDVGGKKSQICVRDSGGTIQFEGAWETPALGDHLRQLPRCRVILETAAESFRIADQARAAGHEVRVVPATLVRTLGVGARRTKTDKRDARALSEVSTRIDLPSVHIPSARSREWKTMAGVHDALVSCRTKLINNVRGWLRGQARKPRSGVAETFAERVRRLGELPVYITSELKMIDALSEEIAASAKRFASVTNSDPVCKSLMTVPGVGPSTALRFVAALDVVTRFASAHKVEAYLGLSPGEKSSSERQLRLGITKAGSASVRWVLIQAAWILKTCCRAPAARKLQLWAAEVEKRRGKGVATVALARKLAGILFALWRDGTEFKSC

SEQ ID NO: 207065 - protein, 348 aa, unidentified
MRTEYFITMDTHCRTTDACIKTARGKLVRREHLSTGIPQLRELIESIPRPRHLAFEEGSMAGWLYRNLKTCVDELIVCDPRRNAHVAKDGDKDDPIDAEKLNDLYRGGFLRPVHQLQSLEAAAMKQIIGMYHDCVARRVAQSNYLLALGRRWGVMLSAVKLLGSDGGQWLKERLEQSQVPASILSIAQDLRELFVGAVEQEESLYSQVCRIARKDKMMRRVSELPGYGPIRAATLISYLDTPWRFKSKSALWKYVGIGLRREKSGEGLSIISVEQACNHLLRNVVIGAAQNAIDQKENVFAERYTRWMKTGLSSRNARRNVARDQVTAVWGMWKSDKAFDAELIRGRS

SEQ ID NO: 207066 - protein, 394 aa, unidentified
MKLIGIDIGKNKHFFCVMDQQTGEIISQPVSFSNDKEGFDFLVQKIKSYPKDSILIGMEDTGHYHFALLKYLLDLQYTVALINPKTTDFNRKMQGGITKNDKLDTINICDVLDTPERKKQYRITKVNSFDLYEQKQLTRHHHNLKEEENVYKNRLQKCIDIVFSEFNKLFNSKYGIVYMNILKMFGSAENIANTDIRTIRKCFEIEGRGNRISLTPERLKEYARSSIGISSSAEVIQIKHLTAQIELIEEQLTEIDKKIEEFSIQNNSPILSIPGISHFSGTSILAELGDISNYSKPSQIIKFAGVAPLHYESSQFNAQHTAITKKGSKYLRKTLYQIILPVIRHNPVFNKYYQLKISQGKGHRCAQGHCVRKLLRIIYHLLKTNQQFDPQLLR

SEQ ID NO: 207067 - protein, 720 aa, unidentified
MTALFRPVTRAVALMLVLAASGSFLAAPVAAAEKLRVGKAVPEAFSFVPLDIGMRKGIFANNGLEIESIAFAGDARMQQAAAADSIDVLLGSGPAMAFIVKGAPIKGVAGMAGPPLLLAIVVRPDGPKTAADLKGKKVSVSTAGSLTYWLVSETSRRQGWGPKGIEIAPMGAMPGQIAALKRGDIDGVITDIGNAFDLEKRGEGRILVRFTDIKDFHIHVIFATDKLIANRPAALRGFLKGWFDTIAFMRKNKAETVAIAKEVTNKDDEITSRVYEELMPMFSDDGKFNPKALATLAKSYVELQLLPEERGEMLWGRRRGYGTIVVARQPMERPMKRNDLSRSLVAFEQNSTLVAVIELSLKSWLVAGLVPGLGRRPLKKQDPDANALLRLLHRWRDEAIKAGSKIERIAVAFEAGRDGFWLARWLRARGIEADVIHPTSIPVSREHRRAKTDRLDTSLLMRAFLGWLRGEPKHCSMAAIPMLAEEDARRPNREHQHLVKERGRIVCRLQAVMARHGVRNFNVKLRKALERLGELRTPEGAPLPPNTLAELRRDMARLRLIRDQIKEIERTRLERLQRAPQEGAHPMLLLLAKVMGIGVETADMLVHEVLSRNLRDERAVGRYGGLTGAPDESGSKRREKGLARAGNARVRRGMIQLAWRWLMFQKESALAQWYRARTADARGDLRKTMIVALARKLLIALWRYVTTGEVPAGAKLRPAI

SEQ ID NO: 207068 - protein, 341 aa, unidentified
MKKFIRIGVDLAKNYFQIHALASEGAPAVTRKMTRVKMREFFSQIGLCLVGMEACATAHYWARELKAMGHEVLLMPPAYTKPYVKRGKNDAVDADAICEAMSRPGMRFVPIKGADQQATLMLHKTRELLVKQRTMSVNALRGHLSEFGIVAAKGIGRVDELLDLAESDATLPNAARASVKVLAQALEGLDKAIDDLEKEISSAHAQNEMSRLLDKVPGIGKLIASVIAASVPDPSVFKSGRDFAAWLGLTPRQNSSGGKQTLGGITKQGNRYIRKMLVLGATSLLNVVGKRKGALRDWIVGLLAKKPARLVTVALANKLARILWAMMKTGECFRTEMFAKA

SEQ ID NO: 207069 - protein, 371 aa, unidentified
MKKCSRFVGLDDSKNSIDVAVASEGRDGEVRSYGTIENTPEALKKLVRRLGRSKDLHFVYEAGPCGYGVYRELLALGANCMVAAPSKTPRRSGDRVKTDRRDALALARLHRAGELHPVWVPAEETEAMRDLTRAREDAKYVQTKARQRLLSFLLRHGRRFPGRSHWTKTHLKWLADQKFDQPSQQICLDEYVEAVKQASARVQRLEAQVRELVSEWSLGPVVSAMTAHRGVSLVVASTVCAELGDLTRFDRVRELMGFVGLVPSLHATGLTRRAGAITKTGNGHVRRVLVEAAWAYRHSARRTAHMRGKLEGQPEEVQAIAWKTQLRLCGRHRRMIARGKHPNKVTVAIARELLAFLWATARMVKPMSPAA

SEQ ID NO: 207070 - protein, 414 aa, unidentified
MKVVYPVCCGIDVHKSFLVATVISATSGFEPSYSRKRFSTFNSDLKNFATWLKSSNCNDVCMESTGKYWVPVFNILESKNINVTIANPKWVKAVKGNKDDKKDSKWIGDLFRFGLVPGSFIPAKPIRILREFTRYRFKLTSMKSSEKNRFQNAFTVCNIGLDSVVSDMFGKSASLITDYLLSDVPFNPEHCVSLLQRSLKKKADSVLESIKGYQITEQQKFRMSMIRSHLAYIADSINKLDEAIGVMVKPYESALSLMCTIPGLERATAITILSEIGDDVSHFNSSKQLCSWAGLTPSNNESAGKKKSVRITRAGVYLKPALVEVAHAAVKSMKSPYYKIKYEKIAKRRGKKRAIIAVARMILTAIYSMLSTGETWNPIDLFKVDMPTEIQEKQEQKAVKQAIKFLEARGLAVS

SEQ ID NO: 207071 - protein, 355 aa, unidentified
MKLHQSVTQFNCGIDLHAKNMYLCVMDKEGKKLLHKNIETHDRECFLELLAPYRHDLTVACESTFNWYVVSDMCEDAGIPFVLGHAFYMKAIHQSKVKNDRADSETIASLLRGNLLPVGYVCRRQVRSVRDLFRRRAYLVRQRAALEAHLTEMGYLYDFKATSQDFKRRTGRFQAYARQLPDDFGVQMSAAADLRLIEALRVEILSIEKAVKRHAKGFDRELLDLLQTIPGAGAIISMGILYEADDFSRFADCGHFVSYCRLVTPLHESDGKVTGGGHRKSGNPYLKWMFSELNAACRRHSSELNAFAQRLVSRHGPRKASCMLTHKLGRAVFHIATERVPFNLEKFLGGPMKKR

SEQ ID NO: 207072 - protein, 344 aa, unidentified
MGEVITIGLDIAKSVFQVHGVDGLGAVVIRKRVSRARMLEFFAGLPRCLIGIEACPAAHHWARELQAIGHTVRLMPPSYVKAYLKRSKNDANDAAAICEAVTRPSMRFVAVKTKEQQAALMLHRARQLLVRQRTMLSNAIRGHLSELGIVSAKGRNGTDELLEIIGKDADSRIPLAARSVLKVLAAQYSAIGAEIASISKSILAWHRSCEPSRRLEEIPGIGPIVATALVAEISDWKAFSSGRGLAAWIGLVPKQHTTGGKDKLGSITKQGNRYLRWLLVNGAMAVIRYAQKHGTKKHPWLGRLMARRPTKVAAVALANKIARMAWAIMVRGERYREPALLLAA

SEQ ID NO: 207073 - protein, 438 aa, unidentified
MRRRAYGAARVNDVDVAKVVHGPDGLAVVVGVDVGKYKLLAVCRWADGRFERPWRIDNPGEIVELVALLKRLGAGRKLLVAMESSGTYGDAVRQALQDADIEVHRVSTKASHDYAEVFDGVPSQHDGKDAAVVAELAALGKSTPWPYRPTEVWEQELAYWVDWMVGHRQVLNLWQGRLEGLLGRHWPEATRVLKLSSVTLLRVLWHYGSPQAVAADRAAAAQLARWGGRFLDTEKIKQLLAEARVSRGVRPGEWETRRIQDFAQQALQARAQGQRGQRRLRVLARGHTVLEAQGKVVGVPTACVLWVNTGDPRKFYAAAAYRKAIGLNLVERSSGTYQGQLHISKRGSARSRQWLYFAVLRLVQRAGVRSWYQAKKARDPDAAKSVLVAVMRKLALALYHVAVHDKEFDPRRLFARIMGSHTKTAPAFSPEKRVSVEG

SEQ ID NO: 207074 - protein, 390 aa, unidentified
MILVGIDVAKDKHDCCIINSDGKFPEEVFSILNNREGYETLYKRICSLTVDFTKVKVGLESTGHYSSNLLAFLLDKHLTAYVINPLRVNLFRKGQSLRRTKTDKIDSRNIAHLLMADSSLKPYSLSSYHMEELKSLTRYRGTKVRERTKLKTSIARLVTILFPELEQLVSSIHIHSIYAMLEKFPGSAYIAATHLTRLTALLLKASRGRFGRETAIRIRDTARRSIGAVSPAKSMELQHTIAHLRVYDQEIGEIESEIEKIMDDVNSPITSVPGIGMQMGAVILAEIGSFRRFDSPDKILAYAGMSPSMYQSGKLTGSYSRMEKRGSRYLRYALFNVTRYVCHYDPGFTAYLSKKRKEGKHYYVAISHAVKRLVRVLYAMEISGNRYQTA

SEQ ID NO: 207075 - protein, 398 aa, unidentified
MLSIGIDVSKGKSTVCGMKPRGEIVYTPFEVQHTREGMSELVSLLRGSGEEVRVVLESTGSYHCPVVAALLENGIFVSVVNSLRMKRFCSQSIRRVKTDQIDAMQIALYGLAYWQELQPTRLPENTYRELQLLARQYYQMTSMLIKAKVDFNALCDQVLPGMQELMSDHAGRHKLSDFVLQYCHTTHILEMGETRFRKDYCKWAEKKGYRNHERMAALIFATAQNGIPVLPNAPSTQIVITEAIRVLHTVEASRDAILTQMQALAKTLPEYSLVREMPCIGDTLAPRLIAEIGDVRRFHSKRALIAYAGIDAPPYQSGKFSANNRHISKRGNRYLRKTGYEVMQSYVMHKPANDPIFTFIEKKRSEGKSGKLAMVAGLNKFLRVYYGKVTELYRSLPQ

SEQ ID NO: 207076 - protein, 413 aa, unidentified
MNEVYRRSCGMDVHKDTVVVCVLPSAGGEGKAVRKTYGTFRNDLIRLRVWLKQLKVTEIAMESTGVYWRPLWNVLEEQGFRLLLVNPAQVKALAGRKSDGRDAQRIAEYLQDGRLDGSFVPPAEIRELRMLLRHRVSLLEQRNQVHNQIRDLFETANLKLSSVVSDLMGVTGRRIVEAMIAGEDSPEILSWKVKGKLRDKEKLVKESLKGYFNEFHRLMLESYYKQYQFLTGEVAVFEQRIAQRMEPYARQVELLVSIPGVERMVAWHMIAELGTDLGVFCDADHCASWAGLVPGENESAGRKKSIRCRKGNKTLRHVLAQAAWAASHCTRGYLRAYFYRIKSRNGWAKAVIATAHKILIIAFHMLQSDKPYKDLGDDYFDRLNPARTTRKLVARLEALGHQVHLSKAELSNA

SEQ ID NO: 207077 - protein, 429 aa, unidentified
MKIIYPRVCGIDVHKKFIVAVICISESVEPIYLKKRFSTFHNDLIRFRDWLIQNDCQNVCMESTGKYYIPVYNVLESHISNIVVANPKWVCAVKGEKDDDKDAKWIADLFKFGIVRSSFIPQKDFRILRELTRYKYKLVNMRSSEKNRYQNALTSGNCKLDMVFTDVFGKSASNIIDLILSDNPYTDEDILSKVHKNCKASPDMILNSINGTDLTSVQKSRIELVNDHIKQLSSNIQRLDKLIDLMIEPYEDYISFLCQIPGVSRNSAIIILSEIGVDMNQFTSSRRITSWAGLTPSSNQSAGKKKSVRISRAGVYLKPCLVEVAHAAVKDKNHPYYANKFNKISKRRGKKRAYIAIARKILVAAYHMLLTGEIWNPADLAEVETPVEQRIKYVKNNLKSDIKQLLDIGLTVEELTLMIQQNANTMTAQ

SEQ ID NO: 207078 - protein, 481 aa, unidentified
MGHRGKRKLAPVDKSAPEVIPDAEHELVLERVAAVDVAKAAGKVCVRLPANSGRRISRVWDVPARTGAIIELGEQLTELGVQKVTVESTSDYWRIWYYLLEAAGLDAQLVNARDVKNVPGRPKTDKLDAVWLAKLTEKGLLRPSFVPPAEIRRLRDYTRLREDLTHERTRYWQRLEKLLEDALIKVSAVASRLDTMSTRDMIEALIAGERDPRRLAELARGKMRTKRSELITALDGRFDDHHGELARMLLAQIDALSAQINTLTGRIADLIAELPEAAAADHGIGEDTDTDAPGAGDRSDAGPQPTRRVDSATEAECARLSAIERLDEITGLGEHNAQVIIAEIGLDMTRFPTPAHLVAWAKLCPRTIQSGPVTRGGRTGKGNPYLKGALGQAAAAAARTDTFLGQRYRRIVKRRGKLKALVAVARSILVIVWHLLADPLARFHDLGPDYHITRINIERRMRNHIAQLTALGFRVTLEPAA

SEQ ID NO: 207079 - protein, 437 aa, unidentified
MIISSVSNPRVRLSSSTNTQGSPLHRLGSEIMKSLPEFEFAALVGIDWSDTKHDICLQAGHSEEREFAVLAHHPAAIEAWAGALRQRFGGQPVAVCLELAKGPLVYALQKYDFLVLFPVHPATLAKYREAFVPSHAKADPTDAQLALELLLRYRAKLKALAPQSGPMRMLLRLVEQRRRLVADQSRISNRLTDALKQYFPDVLAWFADKDTILFCDFLTRWPTLKQLKRARRTTLLSFFHDHHVRSQARIDERLRAINSATALTEDLAVILPNQLLVLALVEQLRVTLQAIERFDAQIATVSETLPDYALFRALPGAGASLAPRLLVAFGEQRERYQSAAEVQRYTGIAPVTESSGKKHWVHWTIPRSFWAAAYYRQQRAKGCSHHAAVRALAFKWIRILYRCWQTRTPYDESTYLNALKRRGSPLLASMMETAKNI

SEQ ID NO: 207080 - protein, 429 aa, unidentified
MKIVHPICAGLDVHKKEIVATVAITDSQGITTHKQRKFPTFTSDLNLLADWLLSHDCRHVCMESTGKYFIPVYRVLEFRGLKPCVAHPKFLRAIPGKKTDSKDSKWIADLFKHGLVPMSFIPPLEIFELRDLTRYHAKLTYIRCGEKNRIQNSLTVSNIMLSSVVSDTFGKAASAILKYVLDHPEEKSIDYSQFLQGRVSNRMKATAADISKAMDGAFTPEQANKTKIAFKHLDYVNDCLEQLNLAISLLAKRFTPQIELLTSIPGVTTRSATRIIAEIGNDMSVFPDSKHLCSWAGLTPQNNESAGKKKSTRISRAGVWLKPLLIQCSLAAVKDKSCPYFAYKYQALSKRRGKKKAIIAIARMILTSVYHMLSKNVAFDANLYQSYYHKQTKRFNNLSIPKLVSFLATQGLSVMNSNGEILTTLASTG

SEQ ID NO: 207081 - protein, 318 aa, unidentified
MPESELTKVSVGIDVSKNTLDIAVHETGETWSSNNDSSGGAALATKLKQLKATSIVLEATGGFETLVTAILSAADLPVIVINPRQVRDFAKATGQLAKTDRIDARVLAHFAAAINPPLRPTKSDEAQHLEALLARRRQIVEMLVSEKNRLANNRDRAVVKDLKTHIAWLERRLKSSDDELQRVLRASPVWRERDDLLRSTPGVGPVLSLTLLAQLPELGQLNRRQIAKLVGVAPFNWDSGKWRGSRHIWGGRAAVRSPLFMATLCAIRINPTIRFFYQRLIKAGKAPKVAITACMRKLLTILNLMIKTQTPWRTARSS

SEQ ID NO: 207082 - protein, 443 aa, unidentified
MRKKAPSPRLRVVSVQSPQSMEVSMKQDERRLAPDDIFVGIDLATRQHQVVVLDLEGRRKTSFKIPHSRDGLRELVQRCNSPGLRQGVGRAHFGFEATGHIWEAVAAYLEARKIDYQVINPFATFRVREARQMGRDKRDLTDAEEIAHLLRTGVVTQCQLLPPKYMQLRRAWGEYYRLRHERARLKTLLAHQLYGVFPEIVGEWKEVAAPGCLAVLRTGLAPREIAKLTQPEFIRIVHEHRRGRRVWRFKIEQVWEKACRTVALPHGQEASMREVTRIVHRMDFVSDQLEQVAMELRAQLETFHETKYLSTLPGIGWTTVAALIAEIGPFDRYRHGRQLVKLAGLQPSRRESGESAGRTPITKRGRAQLRAIVYMATLSSIQHNPRIKAHYERLQQRPVRPLCKMHAFGACMTKLLHYAFAVVKNREAFDIDHIWKEEQQIAA

SEQ ID NO: 207083 - protein, 351 aa, unidentified
MNSICLSTDSLPVLGLDVAKKSVQAELRRAGGKTVRFGFENNAKGFAQLARVLKEHNVPKVWAGLEATGPYSHALALWLHGAGHRVSLLNPRRVKQYARSAGKRNKTDLLDAAIIADFVCAHRPAPWQPPTLEVAQLRALVRRREELSLMLQAEKNRLEGVAPNVSCSLRRIIATLSAERARLEKLITQQIRSHQQLSCDHQLLCSIKGIGSLTAAILLAEMARPGQVERARQAAAHAGLVPRREESGTSVRRNRGLGKEGNRYLRKALYMPALVAIKYNAPLRHFASRLRAAGKPKMSIVCAVMRKLVHIAFGVLKHQKLIFLRKRGQGFLLFNQLLGLVKLLSNSSGDR

SEQ ID NO: 207084 - protein, 344 aa, unidentified
MHIASIGIDLGKTTFHLVALGERNKVLVRKKFSRAQLLAYTANLPSSLIGLEACAGAHFMGAALREQGHEVRLIPAQFVKPYRKSNKNDFIDAESIAEAVTKENMRFVQIKTQEQLDVQAMHRVRDRLVQRRTALINEIRGFLLERGITFAAQPIYLRKNLPTVIEDAEQNLSPRLRWLLQRMWQEWKQVEIDIKAMTDEIERISNENALCRRLRQIPGFGPLVSTATVAAIGNGAAFRRGRDFAAWVGVVPRQYSTGGKQKLFGISKRGNVYLRRMLIHGARAVLLRVKYDTEGFGQWVHRLAQRAPRNKVVVAIANKLARIAWAVLSSGKDYQHQPLQITAA

SEQ ID NO: 207085 - protein, 332 aa, unidentified
MKDFTTIAIDTAKNTFYVVGFDEAGKIVGRRKFTRSGLKNWIVKQQILMIYMEACGGSHEWGRLFSQWGHEVKLIAPQFVIPFRQGEKNDWNDAIAIGIAGHQPTMRFVGIKTQEQQSVQALHRVRSRVQRDRVSLSNQLRGFLYEFGFIAPKSISSLKNKAYELLDEKELPVLMTDLVRDLLSELLTLEKRLKKYDLKIQQMVRSDPMASRLMEMPGIGPITASALVSDIADARVFRNGRQLSAYLGLVPRQFSTGGKQRLGGITKRGDRYLRQLLIHGARSVIRCLGDKQDRTSRWLRQLIERRGVNKATVALANKQARWVWAKMVAAQA

SEQ ID NO: 207086 - protein, 320 aa, unidentified
MLSFCGIDVSKDRLDVMVLPDEYSSSVPNDPAGWAILVEQLRGFSITAIGIEASGGYERGAVRSLQAAGMPVRQVNPFKLRQFAKASGVLAKNDPLDARMIASFVGIMPTRPAQRTTPAAEQLVEMLAVRRQLSAEKTAAENASRLLEDLMLQRLSRRRIARLAADIELLDKRLVESVATDATLAHRYRLLTSMPGVGPVLACTLIALLPELGGMSRKQVAALVGVAPYAFESGTLKGRRCIWGGRANVRQVLYMAAMSASNWNPVLKLFHDRLKGAGKLPKVVIVAVMRKMITTLNAMVRDDIAWADRLSGRHSVTTAR

SEQ ID NO: 207087 - protein, 302 aa, unidentified
MTLITTIGLDTAKQVFQLHGVDNEGNAILRRQLRRSEVLKFFSKVPSCVVGLEACGGAHYWAREIKALGHEVRLIPPAYVKPYVKRGKNDAADAEAICEAVGRPSMRFVPLKTVGQQATAMLLKARDLLVRQRTQTINALRGHLTELGITISRGVGKVDDLAAIVRDEDDARLPPLARIALLPLTHQIEAYTSEIVRLEKHMVRETRQDATLSRLTSIPGVGPITASSIAAFVPDPQAFKSGRHFAAWIGLQNQIPQVGKLDWEESQKWETRSYDLFWLWGRPPLSSTHVEAQRSQPGCLSR

SEQ ID NO: 207088 - protein, 338 aa, unidentified
MTLYGGIDLHSNNNVVALTDETDRIVFRKRLANDTQTVLEALEPYREAITGLVVESTYNWYWLVDALMAAGYQLHLANTAAIVQYSGLKYSDDDTDAAWLAKLLRLGLLPEGFIYPKAQRAVRDLLRRRSSLVQQRTANVLAVQNLFSRNRGRSISANDIRRLTPERVAELVADVNLALAIQSTLLAMQGQQAAIDLLEHEAWRQTKTTQVWQPLLTVSGIGRILGMTIVLETGPIERFAHVGNYASYCRCVGSQHLSNGKQKGKGNTKNGNKYLAWAYVEAANFAVRYNPQIKRYYQRKRAKTKGVVAIKAVAHKLARACYHILRDGSDFDVNRAFA

SEQ ID NO: 207089 - protein, 314 aa, unidentified
MNHTVSPLGRFVGIDVSQRTLHVADHRHQEVRTVPNNEPGHQQLVVDLAEATLVVFEATGSYHRRLANVLARAAIPYCVLNPRQARDFAKATGQLAKTDRVDARILALFAQRMQPRPTEPVSDARAALSELVTRRHQLIQMRTAETNRRHQQRFGASVLEHIEWLDDQIQRIEAQIKALVRTEPQWRQDLERWQSVPGVGPVLSYVLLASLPELGQLNRQQISALAGVAPLCCDSGTYRGQRRIWGGRASLRRCLYMAALVATRFNPELKAFYERLVSRGKPKKVALTACMRKLLVCLNAMQRDTAPYRPPALA

SEQ ID NO: 207090 - protein, 351 aa, unidentified
MMIIGVDYHPSFQTIAFLVEETGEYGEQELNHRDGEAEKFYQKLKQGGVSVRVGMEATGYARWFERLLAELGFELWIGDPAEIKTKRVRKKKTDREDARLMLTLLLENRFPRIWVPSPENRDLRQLLWHRHRLVQIRTRIMNQLQAVAMNEGYRWKKKLFSEKGRALLEKLSLAPWASRRRKELLELLDQLDPKIAELTAAVEQEAKKRPEVVQLMTHPGVGPITGLAYVLVIGTPGRFPCGKQIGSYTGLIPCEDSTAGKQRLGHISKQGNTLLRFLLVEASQAAARCNPDWRRRYAHLMMRREKRIAKVAMARKLAVRLYWMWRNNWQYSQLVEFGSNAGKLGTVHGMK

SEQ ID NO: 207091 - protein, 413 aa, unidentified
MRVVHERCAGLDVHKKSVTACRIVPDGDGWQREVRTVGTKTADLLELSDWLKKASITHVAMESTGVYWKPVFNILEGDFKVLVVNAKHIKHVPGRKTDVRDAEWIAELLQHGLLEASFIPDEPQRDLRELVRYRGHLIQERTREVNRVHKALEDANIKLSSVATDLMGVSGREMLRAIIAGKEDPAALADLAKGRLRNKIEELEKALTGHVRASHRLLLRMHLEHIDELNQRISELDEEIDRLMRPFDQDNLIERLDGITGVSQQTIEVVISEIGIDMNRFPSHRHLASWAGLAPGKNESGGRNRSSRTPKGNKYLRTALVEAAHAAGRSQDTYLGEQYRRLARRRGKKRAAVAVAHSILVIMYHMIKNGTEYQERGSTYFDQLNPQRTQKWLTKRLEKLGYKVILEPLEDAA

SEQ ID NO: 207092 - protein, 341 aa, unidentified
MNDINRVAVDLAKNVFQVCALNSHNKVLFNKKLSRKKFIEFMVQLSPSSVFIEACYSSHYWGRTLTEMGHKVHLIPAQHVTPFVRGNKSDNNDALAIAEAANRPNIRFVPIKTIQQQEIMAIHRVRARLIKSRTQVTNQTRGLLSDFGIIFAKGFKPFRENMIELQENKSLSVSFRETMSDLYNEFNQISERLNNLEKHLKDYIKKNNNCTIISSAPGIGFVNASALVASIDRGQAFKNPREFGVWLGLPPRQYGSGDTFKSAGISKREDRYLRTQLIHAARAAKKWAKHRDDQLSLWIKQLEYWQAQGHCCHCPQAGKNHLGSFEETGMLCTAVPAKDNE

SEQ ID NO: 207093 - protein, 340 aa, unidentified
MNINTIGLDIAKTIFHLVGLDKNGKQIQKKKLRRGQVLAYFANLPPSTIAIEGCGSAFYWQRELTKQGHRVKLLPAQYVKAHLRGNKNDYNDALAIAEASRVPELREVTPKTIEQQGIQALHRLRERTVNDRTSLSNQIRGLLAEFGIIFNQGISSIKKGLPAVLEDAENGLPHAFRDALGLKYTQFCQLDDLVKDFDKLINQASEEHEEIEFLQSIPGFGGIVSSSYYSVIGDGKAFAKSRDASASIGVVPRQHSTGGKTVLQGISKRGDKYLRKMLINGARSVVNHAHKKDDALSVWVTRLVEKRGRNKATVALANKLARIAWAVTVSRKPYQTNYAH

SEQ ID NO: 207094 - protein, 409 aa, unidentified
MEAAVITAVGIDVSKSKSTVAVRRPGGEIALRPFEVHHTNSDLKKLASTLKKLGGDIRIVMEHTSTYWRPIALTLKEAGFFVSVVNAMLIHDFSDNTIRKLKTDRADALKIANYALTFWDTLPPFNNEEETRLLLKMQSRANERITATALRNGLIALADQTFPGVNIAFDPNTKNANGHEKWVDFFLRYWHKDCVCQYSMEAFTESYRGWCKRKNYKFRTDTAHKIYLLAQEGVATLPKCESTKMLITQACKSLNAVCEAKQSTQLEMQRLATMLPEYEVVMQMEGAGPITGPALMAEIGDVRRFKNKKALVAFAGIDAPPFQSGAFESKSRHVSKRGSPHLRRTIFIVSNIILTRSNPENAVYCFMDKKRSEGKHYYVYTVAGSAKFLRVYYARVTEFLRSQPSPDAC

SEQ ID NO: 207095 - protein, 405 aa, unidentified
MGGDAMSGLKGSFDGFVGIDVSKDKFDACGITGGEVKLFQFSATMDRKGFEKLKRHLAAASISSILIGMESTASYHVNLFSYLVCEGYKVLLINPLLISNYVKMQLRKTKTDKKDAIVIAEFLLTNGDTLIQRATPSLISDLRDLSRQRESLVDEMTALKIEIKRLLNITFPELEHMVGIFTKSILKLLQQYPSAFALRDADLGQLSRMLIADSYGRKREAFAAELIKAAHSSISSKSPAKEMILKQKIALLLHLEDALQEITSMLIETSRKLMEEDINIMTSIRGIGDKTAANFLVEMGGDINQFERSGKIIAMAGLDPAVYQSGKHEGRGRITKRGNRHLRRVIWMMTTRVIHYSDIFKAYYLKRRKEGLPYKMAVLATAHKLIRVVYAMLKQRTTFCPVVNS

SEQ ID NO: 207096 - protein, 348 aa, unidentified
MSHFAFFVGLDVSPKRTAICIVDTANSIVAEAYVPTNPEAIARFVRDRVPHVERVGLEAGQMSEWLTVGLNTAGLPTICVEARHAQGFIQSQINKSDRNDARGLARMMMCGVYKPVHVKSLESMQLRALLGARKIVLEKMIDIELHIRGTLKTFGHQLGSCGRAQFAFRVDELAEDNESLQLAIRPLLRARDGLNEQYERLHYHVLGIVRDDPVCRLLMTAPGVGPVTALTFKTAVDDPERLQGSKSVGALFGMTPRRHQSGDTDRMGSISKWGGQEVRSALVEAGMRILTTVKQPSLLRTQALELEARIGRNKAAVALGRRLGSILRRMWLDQRAFDPNQHDDPGAA

SEQ ID NO: 207097 - protein, 350 aa, unidentified
MVVVGADVHKRTHTFVAVDSVGKKLAEKVVRATSSGHHQALRWARERFGAEVVWAIEDCRHLSARLERDLLTAGQQVVRVPSKLMAQTRASARTRGKSDPIDALAVARALLREPDLPVASHDEVSRELKLLVDRREDLVAQRTSTINRLLWRVHELDPERAPKPRSLDLAKHRRLLSTWLSEQPGLVAELARDELADITRLTETIDALAKRIGDRVRSAAPALLALPGCAELTAAKLVGEAAGIIRFKSEAAFARHAGVAPIPVWSGNTAGRVRMTRSGNRQLNAALHRIAVTQIRLDGLGQTYYRKRINLGDSNTEALRCLKRRLARVVFQHLHTDHQNRNQPCQPVAA

SEQ ID NO: 207098 - protein, 430 aa, unidentified
MMEEVDDAELVVERIAALDLGKAGLEACVRVPSPHRPGRRMQELRGYGTTTAQLLEMVAWLRHWGVQRAVMESTSTYWKGVYYLLEAEGFECWLVNAREVKNVPGRAKTDRADAIWLAKVAERGMCRPSLVHPAEIRRLRDLTRYRRALVQDRTREQQRIEKLLEDAQIKISSVLSELHGVTARAMMDALIAGQRDPRALAQLAKGRARKKTAQLEEALRGFFTDHHAAILRMMLDNTDRISAQIAALDARIEKEIGPFSHQAARLAEIPGVDAVAAAELIAEIGVDMTRFPSDAHLVSWAKFCPQTHESAGKSKSKGRGRGNPWLAGTLGRIAFANSRADTFLGARYRRLARRRGKQKAIVATGNSVLTVIYYLLSDPEATYCDLGPGYYESRINVHRRARDLATQLQALTGQHIMIRDGKAVITDAAA

SEQ ID NO: 207099 - protein, 343 aa, unidentified
MPIVGGLDIHRKQLTFDYVDTDTGEPRRGQLAPADRTHLAAWLRRFDGLDDTTFAVEACTGWRYVVEELRRAGVAVQLAEPADTAAARGRKKRAKTDRADSKLLRGLVCDGRVPQCWIPPFAVLENRALLECYHDLRREHTAWIQRIHATCFHQGTAALGAICTDDDLQRLRRTAATELSPAGQIQVAVGLAMLETLDTHLDAMRRRLLDVARHLHGAKILTERLYGVGPITALAMCCWLGGTGRFSSSRQAVRFTGLDITVYSSDGKRSPGHLSRQGPPVLRWCVYEAGKTHARSSAPDHDYYATVKDRVDGKRAAISEARKLVRRAYHILDELGDAAFATA

SEQ ID NO: 207100 - protein, 421 aa, unidentified
MKKSQRVVGFDCAEDEHIAVLLDTGGEFSRRSSVVNRRHDVEELLAELILSIGPETQLVVVVESKRSHGRIVADVAAELGCGVRQVNTVALNHFRDLEGQPRKDDEWDAYLAARMAYMKMRGAREVIETTEDERALSRLTRTHSRLVEDRTQQVARLRAVLLELAPEMLHRSWKGPKPNSKALLYVLERWPGFQGLQRAQLRSIESILRRCRYGSRAPEAAKLIKNVARGIAIVGEERSALTLELDLLVRQIRFCNESLAEVDAKIVRRVERDPVGKKLLEMHGNGPVVTGVLISELLPVARISTEAQCATYSGVTPLARKSGKSLNNDKLIQGSNKRVLAALYTSSVAAVKSSAINRAYYQKKLRDYAGHPKPHVAAFLALARQRHKLIYKLMTTDARYDKEILVASHLDRLEQDRVAAA

SEQ ID NO: 207101 - protein, 416 aa, unidentified
MNAVGIDVSSRKSTVAVLRPLGEVVCLPFDVTHDIAGLASLVEKLKALDGETRVVMEHTGRYYEAVAKALHEAGLFVCAVNPLLIKEYGANSLRRVKTDKADAVKIARYALDNWADLRDFTPMDAIRYDLKTLNRQFQLASKQRTASANNLIALLEQSFPGIRKCFDSPVRSDGTQKWVDFAHSFWHVDCVRKQPFPAFCERYRKWCKRHAYLFKLSNAEEVYALAKRAVVLTPKSKVVKVLVQEAANQLSSISRSVEVYRAEMDRLAAMLPEYPVVMAMYGVGKSYGPQLMAEIGDVRRFERKQALVAFAGIDPMPNQSGDKNVRSNKSSKRGSPYLRKTLFNVIRTYLQCAPQDEPVFQFLNRKRAEGKPFYVYMLAAANKFLRRYYAKLRDYFASLDTLQPVAPIPTILKATL

SEQ ID NO: 207102 - protein, 428 aa, unidentified
MSNQELIRRKQYCQIVKEITGSDQYLVVGIDVGKDKHHAFMGSATGKSLFRKLIFENNMDGFSRLLKTAEAIKSQNSLSKSVYGMEPTGNYHKPLAGHLIRCDCNVVLVSGVAVKRNRELLDGRWDKHDTKCAANIADLVSRRRCLYYDSPSLGIIELRSLLSLRRRLKREEHGLRMRIKIQPMAQYFPELDRFYSACESESLAIVRWCLNPDTIAAMEFGEFFHLVTKSRRGIAQTLRLSKIHSLATDSVGCPMGPAAEYEADLLVEKLKQVRNQVQKTADLIEDFCLEFSEYGYLLTIPGFGPYVSARVLASIGDPFRFENQKQLIKLAGYDLCAHRSGKTSDKAVPVISKKGNGDLRYALYQAANVAAAKVDLFRTYFTRLLRGRERERGIKTKMRVKLAVKMLVIAWTLMKKREVFDPAHLNID

SEQ ID NO: 207103 - protein, 405 aa, unidentified
MNAVGIDVSKGKSTVTIRRPGDVVLMPPCDIPHTQSAINALIEQIKSLDGETKACMEHTGRYYEPVANWLSDAGIFVSAVNPILIRDFGDDSLRTPKTDKADSKKIARYALDRWAKLKQYGSMDKTRNQLKTMNRQFGFYMDQKTAMKNNLISLLDQTYPGANGFFDSPARSDGSQKWVDFVYTYWHVDCVRSKSLQAFTEHYRKWCKRNGYNFSASKAEKIYQSSSDLIAVFPKDDSTKTLIRQAVTMLNTASQTVEALRIKMDQTAATLPEYPVVMAINGVGPSLGPQLMAEIGDVTRFTHREALTAFAGVDPGKNDSGKHSQKSVRTSKKGSPSLRKTLFQIMDGLIKRSPVDDPVYTFMDKKRSEGKPYYVYMTAGANKFLRIYYGRVREYLASLEEAKES

SEQ ID NO: 207104 - protein, 449 aa, unidentified
MESQARMIKSSDGNKLAIVNPNAAGIDIADAEMQVCVPEDRDGDNNRRFGSFTKDLNTIVEWLIGCNITTVAMEATGIYYLSLFLKLQDAGIEVLLANPADVKNMSGKKTDAADAEWLMVLHRYGLLRPCYQPGNAARQIRNLTRQRSNLIRMADKEVLYMQKAMEQMNIKLSTVLSDITGLSGRRIITAILQGQRNIYELAALAEPNCKASQEDIALSLEGTWDVDLLFMLKQSLAAYDFFLSQVGECDMEIERLLSLYGAQIEAGSAELIRCKRKNKRSKNAPRMDIENFAYQLWGVNVFEIPGLKDTAVMHLIGELGHDFVDKFGSAEKFSSWCNLTPNNKISGGKILSSKIMKRKNPVGQIFRTAVAPLARDKGEMGNYYRRIKSKSGALQANVATAHKMAKIFYTMVKTKTSYNASKVGLGERELAERKIAKLECLLMKLKNVS

SEQ ID NO: 207105 - protein, 351 aa, unidentified
MIIIGCDFHTRYQQIAMADDETGELLLERRLDHESGEAQAFYRGLQGPVRVGIEATGPIHWFERLLAELGHQLWIGDSAKIRASEVRKQKTDERDARLILDLLLAKRFPKIWVPTPAERDLRQLLWHRHKLVCLRTMLGNQLHFLAMSQGLCRKRKLFTKKGRTELIGLALGPWTRRRREELLKLLDQLDPAIAELDGAVLEEAQHRDDAVLLMTHPGIGPVTSLAFVLAIGPVTRFCCSRKLVSYLGLNPSEDSSGQRRRLGAISKQGNTMVRWLLIEAVYPAVRKDLALRQDYQRLKFRRGHAVAKVAIARKLAVRMYWMLRSGADYAQLVRRQGSPGATLVDASPSLG

SEQ ID NO: 207106 - protein, 452 aa, unidentified
MSKTREKKQGKGTVSMPLVNPNAAGIDIGDTLLSVAIPEGRATESVKNFSAFTCDLRSISHWLQGHGIETVAMESTGIYWKNLYSVLVQDGFEVYLVNAKHTKNVTGRKTDESDAQWIQRLHSCGLLNSSFLPDDQTETLRTLVRFRKSLTQDSTRYILRMQKSLESMNIKISTVISDLVGKTGTAIVKAIIDGERNPVNFLPFVDGRIKASREVILKSLEGNWRKEHLITLKQSFELYNFIQQQIIDCEKEIERTLQNYMASKNDGVIESVEEVKKKSKKKTKNHPLFNTRSYLKGIHKVDVIEIFGISETSALEILAETGTDLSKWATEDHFVSWLNLCPNNKISGGKLISSSRLKKKPNTASQAFRAAANSVQRSDNWLGDYFRRMKAKGGNKYAIVATARKIAIIYYKMVRYKEAFKPVVLEEYKEKYRLQKIKYLERKLELLKTKAA

SEQ ID NO: 207107 - protein, 304 aa, unidentified
MTASNIVGVDPHRKTFTATVLDTRGGELGHAHFPNTRQGHDAGLAWAAGLGSADRWGVEGASGLGRHLAEFLVAAGCDVRDVPPHKTAVHQRGRHEGKTDRLDAHRVAVETQTNPRLARAFKHAVSAAPDAVRDRIALWHNARASLTKVRVQLLVELDALVHDLPEDLRTQLRPAKTVSARANSLRRLDTTGVTDPTVALLRRFTEAGFARFNGTAPIPASSGEGENAPIRHRLSRGGNRRLNAAIYRIAMIQLRYEARARQIHDQARARGHTRREAMRVLKRHLSDAIYRTMLRDARRDANLT

SEQ ID NO: 207108 - protein, 330 aa, unidentified
MNSQGGASGGFERPNCGVDVSKAHLDVRLVDEDQHLANDSAGWGQLVAKLKKAHADLVVVEATGGYERGLVCALQEAGIAVARVNPRQARDFAKSMGVLAKTDQVDARVLRDFADVLARHQDRSKFVTPMIEPERQALLELVTRRRQLIEMRVAESNRLDHASKLTKRGILSVIKLLDKQIKAIDDEIDDNLERHFKSQKELLDSVKGVGPATIMSLVAALPELGRLNRRSISKLVGVAPLANDSGQRRGKRSTWGGRASVRSVIYMAALVATQHNTVIGAFYTRLLAAGKPKKVALVACMRKLLTILNAMLRDGKAWDAAKALNYAPAA

SEQ ID NO: 207109 - protein, 468 aa, unidentified
MTAEKKLWRNRKERKQWARRLQSEDPGLEVIHPHAAGIDVGNSAHYVAVRPERDPQPVRRFECFTADLRRLADWLQGCGVKTVAMQSTGVYWIPLYEILEERGFEVYLVNARHTKNLPGRKSDVQESQWLLKLHTYGLLNNSFQPPAEIRALRTYWRQRGEHVAGAATCIQRIQKALTQMNLQLANVISDISGLTGQAIVRAIIAGERDPRKLAQFRDPRIQASEEEIAKSLEGNWRPELLFVLQQELEMYDTYQRRMAECDSQLQKHLASMTDSVPPRSPQVEPEPKKEKRAKPAKNAPRFDLSRELQRVTGVDLTRIDGIDVMIAQTLLSEVGVDMSQWKTEAHFASWLGLCPDNRVSGDKVLRRGTRHVVNRAANALRQAANALIRSRSYLGAQYRRLRTKLGAPKAITAMAHRLARLVYRMLKYGQRYVDKGTEYYEQRYRNQQVQLLRKNATKLGFQITEARA

SEQ ID NO: 207110 - protein, 353 aa, unidentified
MTHVGIDLHSNNMVNVAINSNGKVVKEAKLPTASRSLEDFFGDFEGPVKAVVECTSNWYWLSDWCRANGVDLTLAHAKMVKAISYAKVKTDTVDAKTLAELLQADLIPEAYQIKHDRRELRELTRGRLRMIQWRGKLQSALWGQAIKYNVQISGSQWRYLDKLGNWLQPQLPPAANLQAQLLIQQIGQLQEHIHRIEDEIDRQVPFEEAAQRLMDVPGLGKVGAWTIMAEIGDITRFPSAKQFVSYCRLVPGAKDSGGSRRHKSGNKDGNKYLRAAFGQAAVSAYTHYKVVKKFYRKIKRRSGRSVARAVVGKELAKGVWHMLTKNQEYKGFKGQPVRAASQTCWPQPINPHA

SEQ ID NO: 207111 - protein, 415 aa, unidentified
MTKTDSTPGSATLVAVDVAKSHNEVLIEPALSARRRHFRVANTLADYERMAEYLRGLGPRTVVGFEATGNYHRPLAHFLYRQGFELRLIPTLALARTREAMHNSWDKNDPKDAQVILHLLKTGLTQTWHDPLVSGTHDAQELSKTHHQVALARTRVWHSLRNHYFQLYFPEIEHFIRSDSNDWLIRLLLQFPTPGAITALPGEEFVAQGSKLVGRKVHKTELLANIYAAAQSSIALPVASDRPAIAMYRLVLEEYLALGRLRESIATQAETALANHPDRRRLMTVPGVGPITALTILAEAGDLRRFGHYRQFLKFCGMNLSTQQSGRFRGVSRLSKYGNARLRTAFWMAAQSAVRMRENSLRRKFDRYVHSNPLSADLRRKAYSAVAAKLARIVYGLIKNGCDYRPFFEDVIPGG

SEQ ID NO: 207112 - protein, 346 aa, unidentified
MMLIGCDFHPSWQQVSWLDVETGETGEQKLVHAGGEAKQFYEQLAAPVLIGMEATGNSQWFIELVEDLGHEIWIGDAAQIRASYVRKQKTDKRDAAHILKLLVEGRFPRLWTPDREQRDLRQLVLHRHKLVLIRSRVKNELQHLSLNKGMQRKRRLWSQAGQQLLRELPLKKWAACRREDLLGLLTMLDEQIGKLDGAVEHAAEENPQSKLLMTQPGVGPNTALAFVLTIGDVGRFPRGKQVASYLGLIPREESSGGRQKLGAITKQGNRMLRSLLVEAAQVAVVHDPGLRKQYRHRCHQKPKAVAKVAVARKLAVRLYWMLRTNVAYPEIVRIESSSGLPLVGAS

SEQ ID NO: 207113 - protein, 413 aa, unidentified
MIRVECLVERCAGLDIGKADLKACVRVPGPRGGRRAQTKTFATTTGALLELRGWLAEQRVTVVAMEATGDYWKPVYYLLEDEFEVQLLNAAHMRNVPGRKTDVSDAAWIAQLVEHGLVRPSFVPPPRIRRLRDLTRYRSALIGERTREKQRLEKVLEDAGIKLSVFISDVFGVSGRAMLAALIAGQRDPRVLAEYARARMRRKIPALVEALTGRFDQHHGFLCRTMLAHIDSLTAAVAELTGQIETEIKPFQAVADRLDTIPGVNQRVAQTIIAEIGVEMDRFPTAAHLASWAGVCPGNNESAGKHHSGRCRKGDSWLRAALGEAAAAGIGTRNSYLQAQYRRLAGRRGKKRALLAVGHTILVAAWHMINNEVDYQDLGPAHFVTRIDPVRQTRRLVQQLNQLGFQVQLNPAG

SEQ ID NO: 207114 - protein, 430 aa, unidentified
MEKIHKNAAGIDIGSAKVFVGTEDAQVRSFETFTSDFKVLAGYLKSKNVNTVAMEATGVYWIVLYDILAEEGFDVWLVDGRQTKQVPGRKTDVKDCVWIQQLHSHGLLSRCFVAEGSIKELRSYQRLREDHLRSCSMHINHMQKALIEMNIRLPEVLNQVHGKSGMALIEAILSGERDRTVLFSLCHESIQKNKKEEIFKALEGHYTEAGLFALRQAYHAYHFYKKQINECDAQIEQVLQRINKDQELNKSSKRKPIRHNRPDVENLGGHLLKIFGSKDPIILPGITDYTWLQLYTEVGNDLSRWVTEKHFTSWLGLSPGQNHSGKKKKNARKGRPQAGQIFRKIAQSLLMSKKIALGAFGRRIRSRKGPAIAIKATARKLAVQYWRLMVKGSDYVERGVIFYQEQLVAQKKRLLTKLALELDMEVLQKP

SEQ ID NO: 207115 - protein, 315 aa, unidentified
MDAVIVGIDVAKDKLDVAVRPSGERLIVSRDEAGLAELRERLRKLQVAIVGLEATGGYETVVAASLSAAGLPVVVVNPAQVRAFAKALGKRAKTDPIDAAVIAHFIEATKPKVRPLPDEATRQLSGLVARRSQILAMIVAEQQRKKHRPNPRMLASIERLLAALQKELSDLDGQIREAIQTSPLWREKDRLMESVPGVGPAIAGRLLAEMPELGSLDRRQVASLAGLAPWTRQSGQWKGKSFIGGGRAGVRSALFMGALVAVQHNRTLKAFYERLIAAGKEKMVALIAVARKLLTILNAMLRDGEPWKEELEAHA

SEQ ID NO: 207116 - protein, 344 aa, unidentified
MSEVTTIGLDIAKTVFHAHGADASGQVTFSRRITRGKLLEFFRRQPRCTVALEACGGAHHWARELRAMGHEVRLIPPAYVKPFVKRHKNDAVDAEAICEAAQRPTMRFVAVKSEEQQAAALVFRTRDLLVKQRTQLGNAIRGHLMEYGWVAPKGPSHLAMLADMLDDGEMAATLPEAARPMFAMMVDMLAELDKRVATLDKEIARRAREDEVARRLMTIPGIGPITATAIAAIAPPAETFAKGRDFAAWLGLVPKQASTGGKQKLGAISRMGERTLRRLLIIGSSAVVLQASKRGAPKGSWLEGMLARKPRMLVTVALANKTARIVWAVLIKQEDYRAPVAVAA

SEQ ID NO: 207117 - protein, 345 aa, unidentified
MELHTIGIDLGKTVFHLVGLNLRGEVVVRKKFSRTQLLRFTANVRVGLIGMEACGGAHFLGRALREQRHEVRLIPAQYVKPYVKTNKSDYIDAEAIAEAVARPTMRFVPIKTDDQLDLQSLHRVRERWVMRRTAVINQIRSLVLERGITLRKGRRYVDAALPLILEDADAKLSGAARMLLAQLKLDLDQLAVRIEEADAVIGKTAHENEACQRLVAIPGIGPVTATALIATIGNGGAFHKGREFAAWLGIVPREHSTGGQQKLLGISKRGNSYLRRLFVQGARAVMQQRTKQSFGLSAWLAQLTARTHRNVAAVALANKLARIAWAVLAKNEQYRPQVLADVAAA

SEQ ID NO: 207118 - protein, 424 aa, unidentified
MNFKMQDKQNQLIERISDTHLIVGVDIAQQLHVARAVNFRGIVVGDPLTFQNNEEGFIKLLNWIQDLKRLKNLDAAIVGMEPTGHYWLNLSKWLYNQNIEVVTVNPHLVKRNKENRDNTQSKSDKKDALVIADMVKNGYYSFIRPTSESFEKLRVLMSNRDVIVKRLVMSINQINRWVDIVFPELRQVFNDVSCKGAIATLRLFPTPYEISSTRSIDIMEGWKSLMKRQPGPKKANLLIDLAKSSIGTGQALDAYKFHLEQLLEEYDLAVKQLERVEQQVKEVLNQIPYAKKLLMIKGISEISLAGILGEAGDLSGFSHGNSLLRHAGLHLAEASSGKWKGQIVISKRGRSRLRRFLYLVTMSLVMNNHEFKAIHSHNVKDKKIKKMKSIMKLIGKLARIFVGIARRNESYNPNKIQAPIPIAA

SEQ ID NO: 207119 - protein, 341 aa, unidentified
MSTATLVGIDLGKHSFHLHGQDKAGREVFRKKTTRQQMMRLLGNLPSCTVVMEACAGSHFPARQLMAFGHEVKLISPQFVRPFVKGNKNDFIDAEAICEAASRPTMRFVTPKTEAQQTLSVLHRMREPLVRDRTKTANQAHGFLLEFGISLPKGLSLVRRLPCTLGEHELPPRLATLLKRLHEHFCYLDEQIRALDEEMDNQLAADDLGSRLLSIPCVGPITASLLCAEMGDGKQYGGSRDFAASVGLVPRQYSTGGRANLLGISKRGDKNLRRLLVQCARVYLQRLAFQQGALADWVRSLRERRHSNVVVCALANKFARIAWAIAANHSEFEAGPSALAA

SEQ ID NO: 207120 - protein, 469 aa, unidentified
MVSMTLGIDVACRAEHQATFAVNGRPVWRGRKFFTRPAELERLWADLDLDDPAELTVVLEPTRNAWIVLAQWFRRRGARVVMVPTTQSADLRAYFSKHTKNDRLDSEVLARLPLLHPEGLREFTGNGSADPLRRLTKQRSTMVKRRTAVYSRIDAQLELLGPGWYAVLGSDYGKAALAFLARYADPHAVLRLGQARLARFLQARSRGQYGPEPARALVAAAKETLLLWGPDGMDFAELAADIAAEAEQAIFLNGQIKEIEERIANLYAEADPEGIIASAPGVGPVTSAVIAGRVGDPHRFTSLAAIRAYSGLVPKTSQSGTRDPNLGLTKAGDPLLREALFMAADHARLVDPQLAAKYVRLMSGDRHRDSAVCHLAANLLTRIAACWRTGQPYVIRDVDGREITEAEGKAIVKARYKIDQKKRVAAAGRRMKQRRIQAADRESQKSLSAPTSRPATTTVDTTQITVEVA

SEQ ID NO: 207121 - protein, 415 aa, unidentified
MALKIVYKICCGIDVHKTFVVACVASTSDKGITSYESHRFSTYTSGLKTLLQWLIDRNCKDVCMESTGKYWIPVYNILEKGCSIVLAHPKYVKAIRGKKTDKKDAKWIADLFKHDLVAGSFMPPSDIRQLRDLMRYRFKLTCFKSSEKNRLQNCLTVSNIQLGNVVSDTFGKSAQAILDKILENPADTSFDLEPLVFKSLKKKLPELRDAINGYITPEQAGKLKVIKTHYEDLESRKAELEELILALAAPYQQELAILQTAPGISSDFTAIGIIFEIGTNMEAFPSAKHLCSWAGLTPTNNESAGKKKSVRVSKAGCYIKPLLVQCANAVVKSTKHPEMRNRYLRLKKRRGHKKAIIAIARMLLTALYHMLKNGENYNAELYQKSDLLPVDREITVEQALMIARNQGYKIKSATA

SEQ ID NO: 207122 - protein, 371 aa, unidentified
MEYLSKTLYVGLDVHKESIAVAYAPEERGTEVVSLGAIGTRQCDIDKLIRTLQAKGAPLVFVYEAGPCGYWLYRYLTRKGLSCHVVAPSLIPRKPGDRVKTDRRDAVMLARLMRSGDLTAIYVPTVADEAIRDLSRGREDAMRDLKATKYRLKAFLLRQDIRYEGRANWNAAHLRWLSAVVCPTPAQQIVFQEYVRAVTEQHERVQRLETELRDQVTRWRLYPVVEAIQALRGVELTGAVILVAELGDLTRFDTPRQLMSYLGLTPSEYSSGERRRQGGITKAGNTHARRALVEGAWAYRYPAKVSRHLQLRLEKLPAEVQAIGWKAQVRLCKRYRQLIARGKHANQVVVAIAREMAAFAWAIARIVPLAP

SEQ ID NO: 207123 - protein, 344 aa, unidentified
MTYYAGIDVSLRSVNICVVDDDGELVAETKLSSDVQEIVAYLDELEYSVDIVGLEAGTLAQYLTYGLQSAGFDVACMEAQQVKAALSAMRNKTDKHDARGIAQLLRSGWYSQVHVKSMESHHIRMLLSSRKAVLDKCIDLENEIRGLFKIFGIKLPPKLGHGSFDKAVRAIIETDEKLSHALLPLLDARLVLYQTFRVLDNRTRHLAWGDDVCELLMTAPGVGYVTALTFKAGVDDPSRFKQSRTVAAHFGLTPRRSQSGEIDIEGRISKSGDAQVRSALYVAANSILTRSSRWSSLKAWGMKLKKNRGHKKAVVAVARKLAVILHRLWIEETQFRWGTEGVRS

SEQ ID NO: 207124 - protein, 412 aa, unidentified
MQDILTCAMGLDVHRDVIVACLAKGELGTDPEIEIRSFSTLIPEMRKLRDWVIETGCHHIAMESTGIYWQPIYETLEPCFDGQINILVVNARHMKNVPGRKTDMRDAQWIATLLRAGLLKGSFIPDKTFRELRHLTRYRKSIVHDITAQKNRIDKFLQSSGFRFTAFLSDAFGASGRNIIRHLMEYGDISREALNKCLKTQTRKRIDEILVALNGSLSEHQRSFLRIIFEHLESLERHRHTVEDAISEEIVKHEAALNLLCSIPGIDVTAAASIIAEIGTDMSAFPDSQHICSWAGLSPGNNESAGKRKSTHINKGNPYLKSMLCEVGWVIAGKRTLYLSGWYWRIKQRKGAKRATIALARKLLALIYTMLKTGTPYNEECFEIRRKQSERKRASRMVNELQKLGYFVVVPD

SEQ ID NO: 207125 - protein, 461 aa, unidentified
MSKYKKPKKQDLEMNLLSQINPNAAGIDIGADRHWVSVPAGRDEENIRSFACFTADLYAMAEWLKQCGVDTVAMESTGVYWIPVFQILESRGFDVKLVNAHYVKTVPGRKTDVLDCQWLQQLHTYGLLSGSFRPEDQICKLRSYIRQRDNLIKSACVHVQRMQKALTQMNIQLHRVISDITGTTGLSIIRAIVSGEQNPIKLATLKDGRIKASLEEIAASLTGDYRPELVFILEQELQLYEFYQTQIQKCDTQIEQCLASFTDKVDVEKKPLAKPKRRGKKQPGNAPQFDLRTHLYRISGVDFTAVDGLGALTVLVLLSEVGLDPTRFPTVKHFTSWLGLCPGSRVTGGKVKSSKTRPVASRAATAFRMAAQTLCRSHSALGAYYRRMQSRMGAPKAITATAHKLARIFYRLWTSGEHYTDPGIDVYEQQYRDRILKNLKIKAQAFGLELIPISTPTECVS

SEQ ID NO: 207126 - protein, 317 aa, unidentified
MEQRQTNTKIAGIDVGKSKLDGAVHGLEDTTQVGNAPAGFSELIAWLKAREVGRVGLEATGGYERGVRAALEAAGFEVVVHQPIEVRRFAQMKRRRAKTDRLDAQLIAAATAQVDAVRAAQDPRLQALAERLTAYEQIADQAAQLKTFLEHVTLTDVAKAIRAQIRAMATLKARLAAEILRQIKAHDDLLARYRLLVSLPGFGPIVAATHVIRMPELGQMRRGQAAALIGVAPFARDSGQYKGQRFISGGRSRPRRMLYLAALAAKRWDPHYKTFADQLIARGKPAKLAIVAVMRKLIEAANLVLSRGQPWLRRTAT

SEQ ID NO: 207127 - protein, 380 aa, unidentified
MEDDWMLQDRAGEVVTSYYGIDLHKDQFTWHCIHKTGSGETVRENGKISTDRILEELVPMLTVNDSYLIVEASGSSFFFYSLVEAHCKKAFVVNPVAFRELYMTGKKTDRIDAKKLAERLKYHIECGDAESEFPEVYVPDGDIVKIRKMVTAYELVVKQGTQIKNQAKAVFRSKLMSVAVDILDKGLEEALKDKRIDDADRSILIMLKRIYDTLMEEKEEIKKQILLLGSFRFRDEVKLLMSIPGISMMGATVFMADICTVARFSSEKKMTSYLASVGTVDSSGSITRNGGVSRRGRRTSYRYILQGLEHIMNGNRGFQRFKERHALTRSNKVRAAIVRKTFVLMYFMLKNKEPYRYLNEAIYTRKIKDLKKYGIDFKCA

SEQ ID NO: 207128 - protein, 341 aa, unidentified
MEFKFILGIDISKGWFNYCLMSTTFEIIEEGKTDNHPDAIFQFISKLLEKQIITGIEDILLVMEHTGIYVQHLAKGWLSKSGLLSIVPAVKVSDYLGGQLGWEEKTDELDARRLAEYGVRFSDKIELWQAKSYTLELLQRLHRQRSRFIDVINILKVPLKESHEFDSIAVSENMRENQATSMDALKSDLKKLEKQIQELIENDPLLKQLFQLITSVEGVGPVTAREIIIATCAFTKFTPEQAKSFARYAGVVTRKKSSGKMRKRDRVPSRANKKIKTVLTMGATSMIGTTSDLGKFYERKIEEGKAHFSVINAMRNKLILRIFAVVRNQVMYDKNLNLNID

SEQ ID NO: 207129 - protein, 374 aa, unidentified
MGNVIEAFVAFDTSKLRNAVAIAEAGRAGEVRFLGEIENTAVAVAKLVRKLAGKYGRLTFCYEAGPTGYGLYRQIEGLGYECLVAAPSLILKKPGERVKTNRRDAVSLVKQLRAGDLTAVWVPDPHHEAMRELTRARETAVEDLRRKRQQVSAFLLRQGLHYPGERAWTKTHRDWLASQKLEYAEHRTAFEEMLLAMRQAQERIERLEQAIRVAVSDWSLAEVVTAVMALRGIDFISATAFLAEIGDLSRFRTPRELMAYLGLVPSEASTGDTVKRGAITKAGNRRARRILVESSWSYQHPPRVGKEKQEKLAAAPPAVREIAWKAQCRLSARYRALTRKGKLKTVAVTAVARELSAFIWAINRQIANSRAAAR

SEQ ID NO: 207130 - protein, 411 aa, unidentified
MKNNIKTTKMQLAKKHAVKPQINDAQTKKVSIEREQVSERLKHSLRNRGRRARAVKQVSCYVGMDLGDKNSNYCFIDAKGNIFAEGTLATAQAELNELFSSIPKCRIAIEVGTHSPWICALLKSHGHEVIVANPRKVEAIHKNKRKNDKIDARTLARLVRVDPELLYPIQHRGDPARQDLVLLRAREGLISARTKLINCVRGQVKSLGGRLPNCSAESFHYTVVEKIPDSVKESLLPLVHQIGEMSQTIRTFDAQVIRMSEQKYPETERLRQVRGVGPITSLTYVLTLEKPERFEKSRDVGCYLGLVPRQDESGEISKQLRITKTGDSMLRQLLVSCGQYILGPFGEDCDLQRFGLKLAERGGKNAKKRAVVAVARKLAVLLHRLWLSGEKYEPLYNSQLQTKTLAIAANG

SEQ ID NO: 207131 - protein, 349 aa, unidentified
MDYRVYCGVDFHARQQTICCLTTEDGVMSTHELKHHNQAELRAFYAQFSGPVLVGLEASGYSPWFEQMLEELGHEVWLGDATEIRRRARRRQKNDRRDAELILDLLIHDEFPRIHRPTPTSREILRMLRYRHKLVQMRTIIKNSLQALAIQSGLSLRAKLFTQAGLAQLQSVTMSPMMQYQRDQWLAALEPLNQRIVATAAWLEQQAAADERIERLRTHPGIGLLTALGVVHTLAPVTRFGNQRKVAAYVGFDPKERSSGEKKRYLGISKAGPRVLRFLLVEAAQTASQRDPELKRFYLRLLHRHGKPKAKVAVARKLLIRSYILLRDGIDYAEFTRRAVAARLAREGA

SEQ ID NO: 207132 - protein, 355 aa, unidentified
MSIVGGLDIHRKQITFDYVEVETGRLERGQICPADREHLAGWLSRFDGVSGVAFAMEGCTGWRYVVEEMRNAGIEPHLAEPADTSALRGPKRRAKTDKADAKLQRELLAAGRLPECYIPPSQVLEWRAALELYHDLRAAHTGWAQRVHAVCFHQGATALGEAGVVRGSRERLQSIVEDQLSPVGRLQVNTALAIMDTLALHLDRLRRSLVAAARRVNGARALMAAIFGVGPMTSLALCAWLGGADRFSSSRKAVRFTGLDITVHSSDSKRSPGRLSRQGPEVLRWLLFEAAKNSARSCAPGHSYYTDVKERYDANRASLSQARRIVRQAMHILTGLGDDAFTIIAEPAAPTMVAR

SEQ ID NO: 207133 - protein, 393 aa, unidentified
MLYLAIDQHKSQLTVNVRNERGDVVQKGQVSTNRNDIDEFFATLVKKARKHRGYMAIVEVCGFNDWLLEKLKKTHCSEIVVIQPDNSAVHKTDKRDANALGELLWNNRNRLRGGQRPNGIRRIFPADPQDAQVRQLANFRQHLVTQRTRIINKIKGILNKHNMAQDAPSKLYHTKKFRQWIATVQLPVVDRIEIDMSIESWKLYDKQIIDVEVALVKRSEVKAKDVFRLKAISGISAMGAIILLSRIGDIKRFKNPDSLANYFGLTPGCHNTAGKHRVGGITKRGNAVARQVLNFAVIHIVRKDPAMKAWHKKIKNRRGAKTAKVAVMRRLATIIWHMLRWEKPYQFRYDPPQTTRKKDDRWSSEEGFRRHGQQESFSKKERPPLKNRSKTRA

SEQ ID NO: 207134 - protein, 338 aa, unidentified
MQIYGIDLASEKFDVSFIGEDGKPRHIVVRNTVSQIEKFLDRLPGDARIVAEHTGVYGDRLLKLATLHGVAVSYVSGYAIRHSMGLVRGKSDPIDAARIREYGERNADRLPETEPPSDSLYALRELYATRRMLVQQRKQLQTVLKSDTHRVVSCRKAQEVKNDMVSYLSARIEEIEREMRDIIERDQELSLTSAIVQSVPGIGPVTAMELIIKTGNFRRVPTAKKCATLAGISPWPNATGKTDRGAHVSYMGDKELKSLLFLCARSSAGCLEKMRVYRMKKEQTERKHYFLVMNNIANRLLKIIYALVKKREFYNPDFVPRDPRLKNRLTNFNNKEAS

SEQ ID NO: 207135 - protein, 338 aa, unidentified
MKLNTVAIDLAKNSFYVVGFGANNKPLWRKKFNRKGFARFAVKHERSKMVMEACAGAHYWGRRFSEHGHEVELLPPQHVKAYLRGQKNDYNDAQAIGEASIHGVIRPVAVKTVEQQDEQAFHRIRQQLKSEQTALINQLRGLLNEYGIVIPKGIAKAQQAIPEILEDADNGLTTSLRELLHRQYRRYQSLREEVDWYDRQLQQRAREDEVLQRLLEVPGLGPVNGSQLKAWLGDGKQFGCGRDASAAVGLVPRQHSTGGRERLYGITKRGDASLRTAIIHGARAVVRRAKDKDDRLSRWVNQLVERRGFNKAVVALANKMVRIAWVLVHRQETYRQMV

SEQ ID NO: 207136 - protein, 398 aa, unidentified
MLSIGIDVSKGKSTVCGMKPGGEIVYAPFEVQHTREGMSELVSLLRSSGEEVRAVLESTGSYHCPVVSALLENGIFVSVINSLRMKRFCSQSIRKVKTDRIDAMQIALYGLAYWQELQPARLPEDTYRELQLLARQYYQMTSMLIKAKVDFNAICDQVLPGMQELMSDHAGRHKLSDFVLRYHHTTHILEMGETRFRKDYCKWAEKKGYRNCERMAALIFATAQNGIPVLPNAPSTQIVITEAIRVLHTVEASRDAILTQMQALAKTLPEYSLVREMPCIGDTLAPRLIAEIGDVRRFHSKRALIAYAGIDAPPYQSGKFCANNRHISKRGNRYLRKTGYEVMQSYVMHKPANDPIFTFIEKKRSEGKSGKLAMVAGLNKFLRVYYGKVTELYRSLPQ

SEQ ID NO: 207137 - protein, 360 aa, unidentified
MSDGKASVALDAACAALQGAIVAGFDVHRRQITFDAIDTESGEVLRGKLDSTPAAVEQWIARFPGRVVHVAVEACTGWLFVARALDRAGAVTHLAEPIETSALRGRKRRAKTDRADARWLRQLLFEGRLPESWMPPEHVRQWRSRARLRNTLAGERTSWVQRIRAVLYHHGIAGAPDDLRTLAGRQFLATLELPVDASERIAVALEIIDLLEIQIATIERELRALARRQTGCRALMDKLYGIGELSSLVTLCELGDVSRLHASRQAVRLAGIDIGVHRSDRTARLGKLTRQGSAELRWALYEAAQSACRPTSPDYQDYHALKDRGLSHTRASLTIARKLARRSYHVLRELGPAALEPITD

SEQ ID NO: 207138 - protein, 461 aa, unidentified
MGSKKPAGKQKESVRRKADWKAVEIVHPDAAGIDVGGSEHWVAVSPDRDPEPVRRFGCFTADLREMGRWLVEKGVRSVAMQSTGVYWMPVFEILEQHGLEVYLVNAQHTKNVPGRKSDVQECQWLLKLHAFGMLNNSFQPTDEIRIARTLWRQRGNLVAEAGSAIQRMQKVLTEMNVQLSNVLSDISGVSGMKIIGAILDGEHDPWELAALVDPKVKATTEDIAKSLEGNWREELLFVLRQQVELYRIYQEKISDCDLQLRKHLESLGSKLDLQTQPIGPRPKGKNNSKNAPAFDLRTELYRITGIDWAQINGIDVLTAQTVIAEAGADLSSFPSEKQFASWLGLCPTNEQSGGKVLNRRTRKVVNRATVAFRNAAATLLRSQSYLGAQYRRLRTRLGAPKAITAMARKLACLFYRLIKHGQQYVDKGTEYYEAKYREQQIRSLTKRAQKLGLQVVIPQTA

SEQ ID NO: 207139 - protein, 318 aa, unidentified
MAQEKRVVGLDVAKRKVEGCVRALGERRSVASTAAGRAELVGWLRANGIERAVMEASGGYERSWADALREAGLEVRVVDPKRVRHFAKAAGRLAKNDALDAEAIAWFAETFADDSARPHDRAREELAKLVAARTGFKKIEAQIGNVGEHRQPGIVAKAQAAMVRAVRAQIAKLDRAIAAKIKAKPAFAQRATIIASVPGLGAQTVAGLIAWLPELGQVSNQAAAALVGLAPYDDDSGERSGGRHIRGGRRKLRNLLYMPVMGAATRHNPVLAAHYRRLRAKGKEAKVALVACMRKLIVILNAMLARNQTWNPPAAALP

SEQ ID NO: 207140 - protein, 345 aa, unidentified
MPIVGGLDIHRKQITFDYLDTVTGEVRRGQIAPADRQHLRAWLARFADCDDVAFAVEGCAGWRYVAGELAAAGIAAHLGEPADTAALRGRKRHAKTDKTDARHLRALLAEGRLPECWIPPEQILEYRALLETYHDLRRAHTAWVQRIHAVFFHQGAPPLGEGVLRTEQGLAALRAAAAAHLSPAGQQQVATALDMIAAAETQLGPLRQQLRDAARHLLGAKVLAARLYGAGPLTCLALTCWLAGADRFSSSRKAVRFTGLDITVRSSGRKGPPGRLSRQGPPVLRWAVYQAGKTHARAAAPGHGYYAAVKDRKNSKRAALPEARKIVRQACHILTELGDDALTAT

SEQ ID NO: 207141 - protein, 340 aa, unidentified
MSNISTIGLDIAKSVFQVHGVDTAGEVVVRRKLTRGRVLAFFESLPRCLVGIEACSSSHYWARELIALGHDVRLLPAQYVKAYLKRQKNDAADAEAICEAVTRPTMRFVPVKSPEQQSVMMLHRVRLMLNRQRTQISNALRSHLSEFGVVAPIGRNGIEQLLMVVNDENDSRIPVDARLCLRMLEAQLKVVKEQILENDRRVRASARETELGRRLMEIPGVGPLLASAFVATVADPHVFKSGRCLAAWIGLVPKQNSSGGKERLGSISKAGNRYLRQLLVVGSMAVIRYAERNGTRRPWLVQLMTRRTTKVAAVALANKTARMVWALMTNGERYREPIIA

SEQ ID NO: 207142 - protein, 435 aa, unidentified
MEILTKCACGLDVHQATVVACLLTLRDHGKVEKQMRSLGTKTRELVELRQWLEAEGCTHVAMESTGVYWKPVYAILEEGPFELTVANAQHIKHVPGRKTDVKDAEWIADLQLHSLLKPSFVPPKLIRQLRDLTRYRRKLVESRSAERNRLLKVLETANIKLSSVASDVFGVSGMLMLGKLAEGKATPAGMAQLAKGRLREKIAELEPALEGRMEEHHRYLLQLQLRRLRDLDQDLKELDARIQAKLQPYQQEMDLLMGIPGVDWGGAAVIMAELGPDLKAFPSASQVSCWAGLAPGNHQSAGKRRNARVTKGNVHLKTALVEAAHAAARQGDLSAGQILSRQRPARRQASGGHGRSQNSGGGLPYAFQKGPLQGSGRCVSGYAQQAPTHAKLDPALRTPRLLRHRTITSCLIRRCNRQERHFHSRDTEVTEKRRR

SEQ ID NO: 207143 - protein, 383 aa, unidentified
MNDLIRIGVDTSKSVFQLHGVNAAEQPVLRKKLRRRQVIEFFQKLPATRVGIEACGASHHWGRELSALGHEVVLLPPHRVKPYVERNKNDAADAEAICEAMSRPRMSFVPVKTAEQQAALMLVGVRDQLVGRRTQLSNAIRGYAAEFGLVAAKGTDKIEPLLGRIASDENLPPLAKDLFATLGNEYVRLKPELRKIEGKLMAWHRGNELSRRLAEIPSVGPIGATLSVMKVGNPHAFRSGRDFSAWLGMTPKDHSTAGKVRLGAITKAGDEALRSVLVAGATSVIQQVRKGRGRPSPWLVALVKRKPPKLAAVALANKTARIIWKLMVSGERYNPQRAPQRFVPPTDSLAPGTRRQGQAACGGDLRSALTACALRAPSAPPSA

SEQ ID NO: 207144 - protein, 337 aa, unidentified
MEYFAGLDVSMEETHVCVLDRDGVITHQAKVASTPADIAQELKKAPACRRVVFETGRMAPMLFHGLAEHGVPVVCVESRQAYQALKSLTTHKTDRNDARGLAHLARTGFFKSVHVKLLPAHAVRSLIIARKKLVGQRVTLENQIRGLAVVFGVRLPRALSPAFIEQALRSSEGITGLSAAMRGLIGARAAVLAAVIAIDADIKRMVRASEACRRLMTITGVGQLTALAFTAAIDDPERFKRSRDVGPYLGLVPRRYQSGEVDYTGSISKCGDRRVRTLLYEAANVMLTRCRQPLKLKAWALAIAKRSTMRKARIALARRLAIIMHAMLRQGTEFKPA

SEQ ID NO: 207145 - protein, 399 aa, unidentified
MNRNRTVAGLDVHKDSIYLCIMGHDEAIIFEKTYGVLTPELRQMCTDMVERGVTEAAMESTATYWVPVWNELCESMELKLVNPYFIKQLPGRKSDVKDAQWIAECLLKNLIKGSFVPEPTVQDMRKLNRRIFDLQEDVTYYSNKLDAALHRCGFRLSNYVAKITGKSYRKAVELIASGVTDPNELIKCVHGRIINKHGKETLLAAMTGSFSTTDITVIRQYWELLAIYIRQTEECQSMLTVLCETHFPTEYRRLQTIPGVKERAATAIIAETGVDMKMFATAAALVGWCGLKPRNDVSNGRYKSRRITHGNKYLRQILIEIAWTASRKRVCFFSNFSYIQVTQKHKSKMKIQVAIARKILVAVWHMLSKHEDFIDIYLKRLEEQRLMEEKIKQLESKMA

SEQ ID NO: 207146 - protein, 476 aa, unidentified
MGDSTTGRQKRKQRGNKRRETGRQGAGGLASMPLLYPDLAGIDIGSRVHYVSVPADRSPDPVRTFGCTTPDLVEMARWLKDCGITHAAMESTGVYWVPVATVLEAEGLQVALVDARESHRLSARKTDVHDCQWIRQLYACGLLRGAFRPASEILPLRSYWRQRQEVVSLCATALHHMHKALELMNLQLHKVVSDIAGATGMRIIRAIVEGRRDPESFLPMVHRACKSAPEEFVKALTGHYAAEHLFALRQALDRYDMYQRQIAELDGELHRATREFASARPQECGAQEQGQGKPRGGRRKNQCHFDLAGEALRMAGVDLTRIEGIDALTAFTIITEQGVDMSPFPTEKHFASHLGLCPDNQITGGRVRKKSTRRVASRAARALRVAAQSLARSKTALGAFYRRIKGRCGAAKAIVATAHKLAKIIYRMLKHGEQYVARGQEEYERQYQERLLKNLARQASRMGCQLVVENSGEVLS

SEQ ID NO: 207147 - protein, 355 aa, unidentified
MKSSKYIGMDVHTATISVAVRDAAGKLIMESVIETKASTILQFIRGLRGDLHVTFEEGTWAAWLYDLLKPYVTNVVVCNPRRNALLKEGSRCDRIDARKLAELLRTNLLRPVYHGEKGLRTLKELARAYLTISKDLARVMNRVKAIYRGWGIPCGGKSVYHPRHREEWLSKITQASVRRRAELFYKQLDALVLLRKQARQELLAEGKKHQAWKWLRSIPSLGPIRVAVLMAIVQTPHRFRSKRPLWKYSGFGVVTHSSADHRYVQGQLERSKKPVSVRGLDPDHNHDLKDLFKGAATHASTRKGPFLEFYEALVAKGMRPEMARLTLARKIAVITLTVWKKGVAFDAKYLKPQTA

SEQ ID NO: 207148 - protein, 333 aa, unidentified
MKKYKMIIGIDVSKSKLDVCILIDGQNKKQFIIENSPKGYAEILKTIKLFSFANEDCFFCLEHTGVYAMPICYWFEQNEMNYCLVPALEIKRSIGIKRGKSDKADALAIARFAYYKQGELACFRLPEKDLQLLKVLMSEREKIVRAIKMFARTNEMKEFLPKSITKQAIGMNSKTVKFLQKQQKEVESRITGIIENTPLFKNTVELAKSVPGVGDQTAITLMITTRCFTSITDWRKMACHAGVAPFEYTSGTSVHAKTKVNQMANKKLKTLLNFAALNAKKYDIELRLYYERKVSEGKNGMSVMNAIRCKVLSRIYATVKRGTPYVPIARYAA

SEQ ID NO: 207149 - protein, 316 aa, unidentified
MKKVSTIGLDLAKNVFQAHGADASGAVIFRKKPRRAQVLEFFATQPACAVAMEACGGSHFWGREIGNYGHRVRLIPPAYVKPFVKRQKNDAADAEAICEAAQRPTMRFVAVKSEAAQGAAVVFRTRDMLVRQRTQIINALRGHLAEFGLIVAQGPAHVAKLIMAVQDPKQPLPEAARPILCVLVDMLGLLDQRIKLLDIAIARRAKEDEVARRLMSIPGVGPVIATAVAALAPPAETFKRGRDFAAWLGLTPLQHSTGGKQRLGATSKMGERTLRRLLIIGASSVALGRAKRSACGLVACEHDRTQASDAGESCIG

SEQ ID NO: 207150 - protein, 520 aa, unidentified
MLPIFWTDTISKVIQPAARRAYGSSPQPTVNNFGAKKNLPPVIKSAGCNATSRSRSFWTHAVSVKIGTPVGSCQLAQRSERTLPHEGHRIGLTKRSQAVRQRNTPMKTFAELTHFVGLDWAKDHHDIVIVDRQGQIVAELTFLHTAAGWQQWQQCIQAFPALGVALETSSGPAVERLLESGVTVFPLHPKSAKAYRERKAPSGTKTDRLDAWSFADGLRTDGHAWRALAPLDPLVQELRLLCRDEVELITQRTALVNQLQQALNEYYAAALDAFDDWTAPYAWAFVEAFPTPEALARAGQRRWVNFLHAHKLYRPQTAPQRLAQFAKAREFCASPAITRAKSRLAVSLAKTLLTLEKQLEQYRAAIEQLFAEHPDHDLFGSLPGAGNKLAPRLLSEVGQDRHFFDGLPGLQCVAGTAPVSFHSGQVRRTRIRWHCNKHLRYAVHLWADCSRKYCLWAQTYYKAHRDKGHTHASALRRLGNRWLKILWTMWQEGKTYDSERHARHQQQHGSWLLQLAPAKS

SEQ ID NO: 207151 - protein, 358 aa, unidentified
MYKFMKKFFIGVDVSKDTVDVSFFDDDRMKSPEYLAQYSNSPKGFREMVKDLRMCCHGVSSGQWLFCCETTGRYDHPLCHWLVDHGMVVWRESALQIKWSSGIQRGKNDRVDSLRIAEYAWRHQDKMQKFVKPSESLSNLKAAFTHRRRLVEKRTATRCQLKSMSSEKGLSASLARMIVRDLSREIERLSASITTMDESIQKIIRSDSELDRNYRHIISVKGVGPITAVALIVCSGNFKAITSAKKMACYCGVASFRSQSGTSINRKASVSNLSNRQIKSLLSMAARSASRSNPVFAEYFNRTLSRGKPVALVYNNLRNKIITVIYKLIERDCDFDVDYMRMHSTGQRANESAIREAV

SEQ ID NO: 207152 - protein, 327 aa, unidentified
MDREGKILKKKTIPCQRLELIDFLSTWENKITVGVESTYNWYWLIDALKENEIPCCLGHALYIKRKMSTKHKNDPFDSRGIADLLRTNQFPPAYAYPSETRTVRDLLRRRHFFVRRRAATFTHFQNSLHQDGCIEPLRNKLQYKSTRWSLVKLTKSIDLQKILTTDLEYIAALDKLIDDLDKTILEKARCHNRKHLEALQTMPGCGVATSLTVLYETHTMQRFRTPQCFSSYSRVVRAENESAGKNLGRSSNDKIGIPYLKWAFAEIGQSMIKNYPDICLWHQKQAAFHGKAGAHARLRHKIAVAVYFMLKHDKVFDIKRFLSTKKA

SEQ ID NO: 207153 - protein, 312 aa, unidentified
MELFAGIDVAKDTLVVAMSSGQEWACANDAVGITLLVERLTAARPVLVVLEATGGYEVELLAALLAAGVEARRVNPREVHHFARATGQLAKTDRIDARMLARFAERIRPPARVLPDPEREHLKALVGRRGQLLQMITAEHNRRARVPRWLAKSLERTIRALERELKVIDREIAERLSQSVILKPLCDLITSLPGAGPVLGATLIARVPELGRLSRRQIAALIGVAPFTRQSGQWRGRDMIFGGRASVRATLYMAALSAIHYNPQLRGFYRRLRERGKPAKVALTAVMRKLLTILNAMLKNHTSWNAPCPNPA

SEQ ID NO: 207154 - protein, 427 aa, unidentified
MTDQLKHKAYHSWVAIDIAKDYNVVMVELTDGKNRRFRMANSGKDHDRLIEVIRELPQPCHIGFEATGNYHRPLAYRLLTEGFDVSLISSLASARYREAIFNSWDKNDPKDAGILLELLKRGIVQTYIDPIRSGYHDIQELSKTYSNITLSRTRLQHSILTHYLPLYFPEMAKFWCSTRNAWWINYLLHFPTPASVVQYSEQAFCQIASPIIGRKMNKQAKLLELYEAAQHSIGLPIASDSLACQTFQLQLQRYQKLTNQRQQLEQQAETTLSMNPDYCLLKTVPGIGPIVAMTILAEGGDLRRFNHHRQFLKYCGLDLAKNQSGNFRGQDKLSKRGNARLRLALYMASLHAIRQTENSFRNKFHRYTQATPKDADCKRKAMTAVMAKMARVIHALIKSGTPYQGYFEVSPSGSIPLCRAVGATRTP

SEQ ID NO: 207155 - protein, 380 aa, unidentified
MEYCTTIGADVSDRTTKICVMTKAEGGERRIVVETTCATTKAGFEEAFAKFDRSWPVVFETGTHCRWMDRLFRGMGFKAIVANPGKIPSITKSNTKNDRNDARELARLAIADPAMLHPVFLRGEVYQQMLRFHHARNVLVSQRTQTINQIRGFAKSMGYRIECSSTEKFHELGKAGWPKELEECAWPLMGSLKAINLKIKAYDKLIARLAERPEFKSMVERARAVYGVGIVGSTVFIAAIGGRPDRFDHTRDIGAYLGMIPKQNQSGDKDKQLHITRAGADIVRTALVECAGVAMMSNAKDTDLKLKGLRIAMHGGRIARKKAKVAVARGLAVTMLALLQHPEREYVPLSDEGKKGFERYRAEMEYLAMQKASRMDRKVA

SEQ ID NO: 207156 - protein, 365 aa, unidentified
MKKIAYVGIDYHKNTLTIAVRLQGKKDIHETVRIKNEDKIIRRYLKKLSEKFTIRACYEASCSGYHFQRKMRSWGYHCEVVAPSSLPKKRGDRRKNDFRDARDLARNYANGTLSIVHLPTEEEESVRSLVRCRMAFKEIEKRAKHQINSLLLAQGLSWPRSKWTVQHLKWLWELKMPNEYLQQVLDEHLSHLDYIQTRIKYLDRQITQIADSELYAPAVKKLRAFKGISTLSAMLLITEIIDFRRFPNPRALMAFLGLIPSENSSGDKQRGGHITKTGNPRCRTQLIECIQHYVKKPQISYLMKADLDQVDPQSAAIAVKCLKRLHKRYWALIMKGKIRPVALTAIAREFVGFIWAMMQPQAVNA

SEQ ID NO: 207157 - protein, 358 aa, unidentified
MKYVGIDVHKKMCQAAILDEDGALLDEQRFPNDSEGIEEFAGKLASFNDEVRAVVESTGNLWIQIHDRLEEHGFDVALSNPSKTRLIAEAKVKTDKVDARTLAALLRADMIPICYVPGEELRSRRELLRHRLNLVKNRTMVKNRIHGLLDKHGLHMPEATPFSKGNVAWLRGLSLGFMDDAILRSDLALLETVCEQVDAIEEKIAVIAAEERQARLLMTMTGVGYFTAMLILTEVGDVSRFRSEKAFASWMGLAPSVHQSGERTRIGGVSGPGNKRLRWAMVECAQAAVRYDSRFGGLHERVSRRRGAGCAVVAVAHEMARIMYFMLVRGEPYRGENRGLTERKLKNMGKRAFNGLRN

SEQ ID NO: 207158 - protein, 469 aa, unidentified
MNKNNTSNQIFRKPKNGLNHRNKLGYIDPSIAGIDIGANLIHVAIPNSEGKTDVLEFGTTTPDLKNIAEKLKYAGVITAVMEATGVYWVPLYEILEDLGFIPILVDAKSVKNVPGRKSDVRDAQWIQTLYSNGLLRAAFRPPRERLSLRAFVRQRQNIIKTRQRTLLHMEKALQLMNIKLSGAVSDIGGLSGMDIIRAIIAGEKDPLKLASLRNKKCKKPEEKFIAALTGNFQKEHIFSLKQAVDHYDFTEKQLMECDQLVKEELEILPDVTNKPIPKRDKDIKANGKLKTTRSKTKNSLFFNVRELLWRKSGFDATTLDGIEENSALLLFAELGGTDVSSWDREKEFTSWLKLCPGNNISGGKRRKSKKQPCANYMSQCFRMASVAAKKSDSALGAKIRGICGRTDKPKGIKAGAHHLAILYYNMCKHGWEYHRKGAAYYERMNNERRLEIIKRNARSLGYDLVPKAA

SEQ ID NO: 207159 - protein, 338 aa, unidentified
MALYAGIDLHSNNSVIVIQDEQDNVVGRKHLPNDLKRVSSWLEPYRQDLVGIVVEATYNWYWLVDGLMDQGYSVHLANTVAIQQYNGLKYRDDDSDARWLATLLRLGLLPEAYVYPRTERAIRDLLRKRSRFVRQATMNMLSIENLFARNQGQRPSANRVRQLTPEAVDAAFEDANVALAVKSSLRVLDCLVEQICVLNEAVHDQVRLRQSYKKLLTVPGIGEILAFTIMLETGDIDRFDDVGNYVSYARLVGSSHWTNGKRKGSGNTKNGNAFLCWAFMEAANFAIRYNPKIRAYYQRKQAKTKRVIALKAVAHKLARACYHMIKEDVAFDITRAFG

SEQ ID NO: 207160 - protein, 403 aa, unidentified
MDRCAGIDWAKDVHRVCVLDGDGDPIVERGIAHDERGVGGLCELLAELGVERVAIERPDGLLVERLLEAGFAVLPIHPNRLKAARPRFRAAGGKSDSFDAFCLAELARTDHHRFRVLAPDSDETKALRALTRTREDLVRIRVSLTNCLHAELEAFWPGADRVFCKIASPIALAFLERYPSPTDARGLGEKRLAGFLARHGYCGGKPAAELLARLRSAPEGRVDRAEEEARRTAVLSLVAVLKPLVEQIRTLDSRISDAVRAHPDGGIFLSLFRNPDSTLTAAKLLSEIGDRRERYPTAEALAADAGMCPVAKESGKRKVATFRRACDKRLRDTLATLADSSRQHNPWAKDVYLRARQRGCDHPHAIRILGRAWVRVIWRMWRDGAPYDPHKHGGLQRLNLTEG

SEQ ID NO: 207161 - protein, 358 aa, unidentified
MQTQNYKLNFAGQNIFVGFDSHKKDWTVTIMHENIMCKTFTQPPNPKLLSSYLKKNYPGANYFSAYEASFCGFWIHKELIELGIKNIVVNPADIPTSDKERKQKEDRRDSRKIAKELSNGNLHGIYVPSNENLEDRSLVRAREKLMKDLTRNKNRIKSMLFFYGIEYPQEFIKNSHWSNKFVQWIDSIRLESESGNNTKDILLRQVIHLRKEVLLLTKEIRKLSKTEKYKKNVDLLISIPGISTLSAMILLTEIDRIDRFPNFDNFCSFVGLIPSTASTGEKEITRGITPRRSRMLRSIIVENSWVAIRHEPVLSLYYTETAKRMKSNRAIIRVARKYLSRIYCVLRKEQKYEYGILK

SEQ ID NO: 207162 - protein, 342 aa, unidentified
MYYIGLDVHKKSISYCVKDASGHVHQEGKVGTTRWELDAWMEALPQPWTVAMEATVFTGWIYDHVRPHAKEVKVAHPLMLRAIAAAKKKNDQVDASKIADCLRCDFLPECYMASTEIRDRRRTLRYRHLLVRQMVQMKNRVSGLLMETGVSHNKRQLHRVGYFRDLMASNENIEDSIRPLLQLSRDSITRLQKTESALVRSLQRDPLLTARVQRLKTVPGVGPITALTWALEMGDISRFRSIRQAISYCGLCGDEKRSAEKVMRTPLSRQRNKHIQSCLVEAAKLAPRYDHDLAHVYATEKEKGNANRATLAVARKMVAYLMAVDREQRDFVPAEQCSGAAA

SEQ ID NO: 207163 - protein, 440 aa, unidentified
MKEKKTKAFPIIYPNAAGIDISSKEHYVAVNPESTEKPIRAFGAFTEDLHALVVFLKECKVDTVAMEATGIYWVSLFLVLEDAGFDVVLVTAKHVKNVRGKKTDVSDADWIRQLHSCGLLSASFQPDKFTRKLRAYMRHRKNLIEMSATHIRMMHKALEQMNIKIQHVIADITGKSGQEIIKSIIAGERNAEILASCCDSRIRAHKKEGIIKSLTGVWKEEHVFELEQSYSIYQFYHAKLKECDAKIEEHLRKKSGVDTFVEPQKKEKSNKNNLNFNGKEMLYELTGTDLAEIFGITETNAIEIISEVGLDMSKWPTVKHFTSWLNLAPNNKISGGKVLSSRIPKKKNHAGQIFRMAAFAIQRSKNWLAMFYNRIKAKNGAPKAIVATARKIAAIFYKMIKERVKFNPIPIEKYMDGFKENQIKKLKRQAKNLGLQIVEM

SEQ ID NO: 207164 - protein, 386 aa, unidentified
MHDSTDLPVPERTGIRGDSATLFVSLELSRSTWVATSLAPGSKKMSKHTLVGGDGRKLLDLLARLKTRAEQRIAAPVKVVAIHEVGLDGFWIHRLLEANGVESHVVDPASIAVPRRHRRAKTDAIDGETLLRTLMAWQRGEPRVCAMTVPPSPSEEDCRRVSRERATLLRERIQHTNRIRGLLFGQGITNYNPLHKNRRECLEELRTGDGRSLPTHVKAEILREIDRLELVLRQISEVEAERDEMLRPAEASSPAALLMRLKGIGAEFATVLYLEGLFRHFENRRQLAAYAGLAPSPWKSGSIDHEQGISKAGNPRLRTTMVELAWMWVRYQPDSALSGWFRQRVGSERGRTRRISIVALARKLLIALSRYVTHGEIPAGAVMKPV

SEQ ID NO: 207165 - protein, 341 aa, unidentified
MDAVTLVGINLGKHSFHLHGQDAKGKAVFRKKVSRKQLIEFFATFHACTVVMEACAGSHHMARKLAEFGHAVRLISPQFVRPFVKSNKNDFVDAEAICEAASRPAMRFVTPKTESQQTLSVLHRVRESMVRERTRTVNQMHGFLLEFGISLPVGNATVTRLPAVLAMQELPPRLIAILERLHGHFKYLEEQIGEIDQELARRLAEDEVGQRLMSIPGVGPVTASALAAKMGDAKQYGCSRDFAASVGLVPRQYSTGGKTNLLGISRRGDKNVRRLLVLCARAYMRGLEKRTGRLADWVRAMLAQRHSNVVACALANKLARTAWAIVARQTTFDAGFSSHPL

SEQ ID NO: 207166 - protein, 399 aa, unidentified
MIGIGIDISKNKSTVSAIDDTGEIIMKPQEFKHSQNELNKLIQWIKDQEDTVFVVMESTGHYHYPVLKKLYEEGIYVSVVNAYLMKKYGDIEIRKAKTDRKDAIRIAKYAIEKRFSLKKYEGEDEKYNDLKFLSRQYNQIVSIRVKAKIQFNNLLDEIMPGINKILTRTTGNSSKILYDFVEKYEHFDNIKRKGEQKFIKEYSAWSKKKGYRNGAIKALKIYELAQNSITTRSANNSTYIALRNCIKILRETEESSNSILTQMQTIAYTLPEYKIVRELKGVGDKLAPRLIAEIGDVRKFTSAKALNAYAGNDAPPHQSGQFEGTKRHISKRGSSSLRKVGYEIMMALKVTKPTEDNAVYEFMIKKESEGKAKNVAKMAALNKFLRIYYTRVMNLYKTL

SEQ ID NO: 207167 - protein, 343 aa, unidentified
MDYFAGLDVSVKDTSVCIVDDTGRIRREVKVASEPDALLTVLRNPAYRFKRIGLEAGPLSQWLFSALAEADLPVICVETRHMRAVLKAQINKTDRNDARGIAQMMRVGLYRPVHVKTLRSQTLRMLLTHRKLLQAKAIAVENDLRATLRNFGLKVGAVGTVKFEARIKELIDNFPDLVALVEPLLVVRRVLREQISILHRRVLAAVRNDEVCRRLMTVPGVGPVVALTYRATVDVPARFRKSKSVGAVFGLTPARDQSGESDRPGAISRCGDEMMRTTLYEAAQVMLLRSAKWSWLKAWAMKIARHRGMKKAIVALARRLAVIMHRIWTDGTEFRWTREAAAA

SEQ ID NO: 207168 - protein, 340 aa, unidentified
MSYYAGIDVSLEASHVCVIDGSGKIVREARVASEPEALIACLGSVALELTRIGLEAGPLSQWLYAAMRDAGLAVELLETRHVRNAFKIMPVKTDRKDAQGIAELMRLGWFRPVHCKSIEAQETRAMLTARKLVQKALHEVEMSLRGVLRGFGLKIGKVAPTQFEARIRELVEGHPSLEVIATAMLAVRATLRREFNGFEKRLRAMARCDMRARLLMSVPGVGTIVALTYAAAIDDPARFTSSKTVGAHFGLTPTRYQSGETDRVGRISKIGDASVRATLYESPHIIITRPIKGCTALKSWAMRIAKRAGMNKAKVALARKLAVIMHRMLVDGTTFTTQPA

SEQ ID NO: 207169 - protein, 333 aa, unidentified
MEKKCFIGIDISKKTLDVVLNSPLKKHSDEETYLKVSNDSEGFKEIFSWLKKKRISSRELVVGMENTGIYGFALRLYLESKHVDYCVFMPLDLKLSLGLIRGKNDKVDAERIAYYTWLHRDELHYSRLSGSSILHLQELAVERKRFVKQLAEYEGLLTEGKNRSKTASYTRAEKAKVFLEEEIKAVEAEMQEVIEHDSYLLKNYALLLSIKGIGSVNAISAIVHTNNFKGFETARQYACYLGIAPFGRTSGTSIKGKPKVSHIGAKLLKADLSQAAKSAVVWDREMKMYYERKIKEGKAYGVVLNAVKFKLVCRMFAVVRRGTPFVDLQTYKN

SEQ ID NO: 207170 - protein, 424 aa, unidentified
MTTRQLTPTTGVLVAIDIAKARNEVLVEVPGQRRRRLTVLNTRPEHDRLITLLSGLGQPVTCAFEATGNYHRPLAWRLLEAGFAVRLVSSLALARAREALHNGWDKSDPKDAQVILHMLRIGATQRYQDPLAAGIHDVQELSKTHEAVSRAKTEVLHRILTHYLPLYFPEVERFRHNSRSDWFFAFLDRFPTPASITALSKEAFVAAAWDVVGRKIAKATLLGDVYETARTSIGLPVPPDAPAVRMFRLVIAEARSLIRQRDAIERDADALLSGSADYQLLRRIPGVGPITALTILAEAGDLRRFGHHRQFLKFCGLDLATQRSGAFRGQTKLSKYGNARLRRALWLAGQVAIRQRENSFRDKFERYVARDRHNADLRRKALTAIAAKMARVVHAVVKRGDDYRPFVEGPVPGGRTPLSGAVRA

SEQ ID NO: 207171 - protein, 340 aa, unidentified
MQITTIGLDLAKSVFQVHGVDAEGKVAVRRKLRRAQIRQFFAGLAPCLIGMEACGTAHFWARELMAMGHQVKIMPPSYVKAYVRRGKNDAADAAAICEAVMRPHMRFVPVKTEEQQAALMLHKARELLVRQQTMLINAIRGHMAELGMSAPQGSAKIKDLIAVIQDSEDQSIPALARAALQPLVRQLHTLDEQVETLDREIKAWHTRNETSRRLATIPGIGVLTASAIAATVPDPSFFSSGREFAAWLGLTPRQNSSGGKERLGRISKKGNTYIRRLLVTGATSMLRFARAKTAAGADWVNGLLQRRPARLVTVAMANKTARIAWVVMVRGKTFEFRSGP

SEQ ID NO: 207172 - protein, 398 aa, unidentified
MLSIGIDVSKGKSTVCGMKPGGEIVYTPFEVQHTREGMSELVSLLRGSGEEVRVVLESTGSYHCPVVAALLENGIFVSVVNSLRMKRFCSQSIRRVKTDQIDAMQIALYGLAYWQELQPTRLPENTYRELQLLARQYYQMTSLLIKAKVDFNALCDQVLPGMQELMSDHAGRHKLSDFVLRYHHTAHILEMGETRFRKDYCKWAEKKGYRNHERMAALIFATAQNGIPVLPDAPSTQIVITEAIRVLHTVEASRDAILTQMQALAKTLPEYSLVREMPCIGDTLAPRLIAEIGDVRRFHSKRALIAYAGIDAPPYQSGKFSANNRHISKRGNRYLRKTGYEVMQSYVMHKPANDPIFTFIEKKRSEGKSGKLAMVAGLNKFLRVYYGKVTELYRSLPQ

SEQ ID NO: 207173 - protein, 347 aa, unidentified
MNFYTRQHKHYCGIDLHARAMYVCILDQHGTKLVHKNLPTTPDAFLRVIAPYREDVVVGVECMFTWYWVADLCAKEGIAFVLGHALYMKAIHGGKAKNDKIDAHKIAVLLRGGMMPQAYGYPAEMRATRDVLRRRCHLARKRAELLAHIHNTNSQYNLPEIGKRLANKANREDVAEHFPDPSVRKAIEVDVSLIDHYDHLLGEVELYLTRSAKTDDVQTFARLQSVPGIGQILALVILYEIQDIARFPRVQDFVSYCRLVKCAKESNGKRLGTSGKKIGNVHLRWAFAEAAVLFIRQSQPGKDYFAKLEHKHGKAKALTVLAHKLGRAVYYMLTREQAFDLQRFVSA

SEQ ID NO: 207174 - protein, 389 aa, unidentified
MIFVGIDVAKNKHDCCIFNSDGLILEEGFTFSNNSNGFNKFKAALAKHSPNLDNIKVGLESTGHYSNNIVNFIKKNSLELKIFNPLAVNLYRKALTLRKTKTDKIDAQFIAQMLFSDDSEPYLPIDYHINEIKSLARHRYRLVGHRGKLKISLTRILDIAFPELSSIVYTIHQKSCYALLLKFPTAEEISKCHLTKLTNILSKASKGQYNREKAKQIKELAKISIGTPYLSIGFELQQTIRLIQNIQCEIDLLDKKIKEIVEETHTPLLTIPGISYVLASIILSETGNIKNFSNSGKLLAFAGLEPSTHQSGNYTATMAKMVKRGSKYLRWALLQAARTVSARVPVFEEYLSLKKSQGKHHLVAMSHTAKKLLRVIFHLLNTEEIFISS

SEQ ID NO: 207175 - protein, 374 aa, unidentified
MADYNEVFVGIDTSKLGNAVAIAEGGRNGEVRYHGEIANTEAATSKLVKKLAAQHRRLTFCYEAGPTGYGLHRLIKALGHECVVVAPSLIPKKPGDRVKTNRRDALNLAKLLRAGELTAVWVPDERHEAMRDLVRAREAAVDDLKSKRQQVLSLLLRLGRHFTGKRTWTRAHMNWLVSQKLAHREQRIAFEEMLLAVRQADERVIRLERAIAAAVPDWSLAKVVTALMAVRGLDLISATVFLAEIGDLSRFATPRQLMAYLGLVPGEESTGDRVWRGGITKAGNHRARRILVECSWSYRHPPRVGKKKLAKVGAAPPAVQEIAWKAQARLTARYRALARRGKRPTLVVTAIARELSGFIWAVSRAVGAPAAPAM

SEQ ID NO: 207176 - protein, 347 aa, unidentified
MNKVVAGMDLHSNNVVIGVMDLAGQRVATGKVPCELPAVEKFLAPFKTRLEQVAVESTYNWYWLVDGLQAHKYPVVLANPAAMDQYSGLKHADDTNDAFFLAELLRLKILPTGHIYDAQLRPVRDLLRRRLMLVHQRTALMLSFKSLYTRTTGGELTLSELKALAVKEAQALYEHPANQLIAGMQIQHMEQLNASIAKLEKAVLGCARELPYYATLATLPGVGRILGMTITMEVGDIHRFAGPGNFASYCRTVAAERISNRKQKGENNAKCGNKYLAWAFVEAANFARRYDEQCRKWYDRKASKTSKVIATKALACKLAKAAWHLMAEGVDYDPKRVFGPGAAPLKT

SEQ ID NO: 207177 - protein, 462 aa, unidentified
MACEEMACGEMVAVMEPQEIEDEEHEQILERVAAVDVAKASGMVCTRVPHQARPGRRRTRVWPVDATTNAILELADHLVAERIEKVTLESTSDYWRIWFYLLESGGLDVQLVRAADVKQAPGRPKTDKLDAVWLAKLTERGMLRPSFVPPVEIRQLRDYTRLRTDLTRERTRHYSRLEKLLEDALIKVSAVASKLDTLSVRDMLEALIAGERDPQVLAGLARGKMKAKRAALIEALTGRFDDHHAELARMLLDQIDALTTQIAKLTTRIEELIAAIPAAQGVDADGTTGPMAGLGKDAPVLPAVDRLDEVTGIGREAAQVIIAEIGLHMSAFPTPAHLVSWAKISPRTIQSGARSRAGHTGKGNPYLKGILGEAAAAAGKTDTFLGERYRRIVRRRGKLKALVAIARSILVIVWHLLAGRTTRYHDLGAGYYTSRIDKNRKMRNHVRQLEALGYTVTLAQVA

SEQ ID NO: 207178 - protein, 367 aa, unidentified
MPTMTQPSTGEQTCTLVTGGVDTHQDTHTAVALDQTGRLLGHRQFPATAPGYASLLAWLRGFGLLVAAGIEGTGAYGAGLAAVLQAAGIELVEVDRPDRRTRRRQGKSDPVDAEAAARAAQARRATTGTPKTRGRRVDALRALRVARRSAVAARAQAQTQMKSLIVTAPEPLRATVRALGDRELIAHCTTRRPDRTRVEDPTVAAMLALRSLARRHQELCAEITELDTLITPLVAALNPALLALTGVGPDVAGQLLVTAGDNPERLRSEAAFAMLCGAAPLPASSGRTVRHRLNRGGDRQANAALYRIVLCRLRWDPRTRAYAARRTAEGMTRKEIIRCLKRYVAREVYTALLNPHPSSVPDSPCVA

SEQ ID NO: 207179 - protein, 452 aa, unidentified
MKHKRAGRGGAVPSLECIEPNAAGIDVGAREIYVAVPANRDPKPVRCFSTFTQDLQALAAWLLACRIRTVAMESTGVYWIPLFQILEAAGIEVCLVNSRHVKHVPGRKSDVLDCQWLQYLHSVGLLRASFRPEDVICQIRCLLRHRDGLVEMAAQHVQHMQKALSQMNLQLHHVLSDLTGQSGLAMLDAILAGQRDPRVLAELRDGRVKASAETIVQALVGDYRREHLFTLNQSLEAYRYYHQLLAACDQEIEAYLRELDSKIDVEQNPLAPEPKPHRPRKNEFGFDLRSELYRILGVDLTAVPGLNALSVHTLLGEIGRDVSRFPSAAAFASWLGLCPQADKSGGKVLSAKTRRTKNRLNRSLRLAAQALHRSQSYLGNYYRRMRSRLGAPKAITATAHKLARIVFHLLRTGEAYNESIFAVEEQRCRVRTEHHLRRQARQLGYDLVPLTA

SEQ ID NO: 207180 - protein, 395 aa, unidentified
MKANELQVAVDVGARTHRVAVGDASGRLIEEFDLEHTAAGLSSFFNRLERLAGSRKTPVAVAMEGFNDWARPLDRQVLEHGWRLYNVNNLKLARYKEIFPAPAKTDAIDARRILELFRLRGDLAVARGVLQEIVATTQEAERLKRLTRRRRQLVNEKARVLNRMQSDLQAVCPGLLAITAEADNLWFLSLLSAREDIRKLVGLRQSSLLALEGVGRAYCAKIQAWQREALFSHEAEWAGPMIVADARRVLALKREIAALDQLIEPLTDDCESARRLRTIPGFGPTCSGELAGEIGAIERFATEASLALYLGMAVLDHSSGTHTGTRRPRQVNPRAKAAMMVAVARHMERVPSSRAYYDKKRAQGKTHNQAVRALGRQLVRVIWSMLKHQRDYELR

SEQ ID NO: 207181 - protein, 341 aa, unidentified
MACIMDSNGSILEETKYNNTLDQAKSFASYIKKKHGGSGKSTITAVCESTGNLWLKTYQAFEKYNIDVKLANPLKTKAIAEARIKTDKLDARTLAHLLRSDLVAECYIAPREIRDERSLLRLRTNLVQDRTRVINRTHSLLDKYDMNFGYSKIFGIKGLQWLRDLRVIGNDQILLQEYISQIDFLTTEIKNIESKIRIEASKNESVKILMSMTGIDYFSAMMISSEIGDINRFDSPQKLVSWAGLCPSVHQSGNSLYMGRMKDGNKKVKWILIEAANTASRTDDRLRKFYLRIARRHGYHTAITHVANKICTIIWHMLKYKKLYNERKPNLYKTKLKRIQN

SEQ ID NO: 207182 - protein, 331 aa, unidentified
MIIIGMDYHPSVQQIAWVDTETGECDERQLTHSDGEAEKFYRGLQLRGVSVRVGMEATGHAGWFERLLSELGFELWIGDPAQIRAKRVRKQKTDRQDAQLLLTLLVENRFSRAWVPSLENRDLRQLLWHRHRLVQMRTRIMNQLQAVAMNEGVRRRKKLWSVAGRAQLESFVLSPWAARRRQDLLELLDQFNPSIDQLSAAIEQEAEKRSEVLHLMTHPGVGPLTVLAFMLTIGTPERFHCGKQIGSYLGLIPCEDSSAGRQRLGHMSKQGSSLLRFLLVEAAQVAVRCDPEWTRQFVPLAMRRQRAIALVAMARKLAVRLYWMWRKEWDQ

SEQ ID NO: 207183 - protein, 356 aa, unidentified
MLYSGVDLHRRSIVICTVNESGSIVARKSMKTQPDLVTAYFQQWPDQHRAVVECTTGWYWFSDLLRSLGVDVVLAHAKYLKAISYAKVKTDAVDALTLAQLLRMGYIPEAHQLPPEYRAMRDLLRQRMVMEHKRTNIIQRVTSILAQFNITDLPLSPYQPGFADFLNQCPIPEEYRMTLMMYHHQCLQTTEHRKQLEKHFKAQLRPTAPVQLLMSIPGIGDITGSIVAMETGDIHRFADDKHYCSYCRLVPGAKDSGGKHSHRSGSKDGNQYLKYAFIESAIKAMRFYPEIKHFASRLERRATKAIARTVVAKELAKISYYVLSRQQEFKSFKGIEIKKLRNWPRARKPVRLTGGV

SEQ ID NO: 207184 - protein, 404 aa, unidentified
MFKFGIDWSEQHHNLCIRNSKGAIVSRVEFKHTLEGFQRFDDERRKLGVPPSECLVAIETAYNLLVDFLLDRGYLVYLIPPQATKGYRNRQRSTDAHTDDTDAALLSSILHTDLDSHRRLQPNSALTQQILAQVRLIDLLRRSIQRQANQLRAVLFRVYPQALGLFGKLTAQINLHFLMAYPTAQEAQALTQPAFEAFCREHRYGRANLISRRYAHLMEPAPEANPIAVTAYRDQVRILAELLLPQVLRRTEARSSLAQLFSQHPDSFIFESLPGAGELLAPGLLVKFGDHRDRFPTPGSVQALAGTCPVTKQSGKRKVVIFRRGCDREFRRITQQFAKASVRQSGWALAYWRDVRPRCRSDSDAYRRLANRWLAIIWRMWQDGKAYDESYHIQQRAQRRRSRF

SEQ ID NO: 207185 - protein, 400 aa, unidentified
MKKHVSHELRVSVDIGCRSHHVAIGLSSGELLDEFSISHEPGGFREFFSRIEKQERRFGCPVAVAMEGFNGYARPLDTLVRARQYRLFNINNLKLARFKEIFPCAAKTDDIDARKGLELFQLRDHLPMAKDVLQEVHTTPQGNEILKRLSRRRRRLVDERVRVLNNLQADLQAICPGLLEITGEADNQWFLNFLTSTDDLRKLARMRESTIRKIPGIGAKYASVILKWQRRAEFSHDVEWVGEMIQEDATRVQELHGKIKALEAKMEDVAQGSDISKTLSTIPGFGAICTAELAGELGTIERFGSEASLALYVGMATLDNSSGKQKGSKAPRQVNTRAKAAMMVAVDRHRKQVPQSQRYYEKKRAEGKKHNQAVRALGRHLCRVIFKMLKDKRRYTLPHE

SEQ ID NO: 207186 - protein, 373 aa, unidentified
MKEFSKYVGLDVHKETIAVSIADAGRSKARYYGTIKHTSAAVSAVLKKINPDGELLELCYEAGPSGYGLYRQLMASGHECQVVAPTLIPTRASDNVKTDRRDSLRLAELLRAGELTSVWVPDVEQEAIRDLVRTRDDFKTIQRQVRQRLTGFLLRHSLRWTGGKKNWTKGFWSWLEALELSNAHQQFALKEYIDAVRACDGRIQAIEKQMLVAKTGWSLESIVDALMAMRGINLVTAMGVVAELGDLSRFTKPTQLMAYLGLVPSEHSSGNSRQQGGITKSGNGHVRRLLIESAWCYRFSARRSRDIEQRAQRTSPEVQAIAWKAQRRLCARYRALSERGMSSCKVVTAVARELCGFIWAVVQQARHQQASAA

SEQ ID NO: 207187 - protein, 412 aa, unidentified
MTKVLRRVGIDWGSGAHQVCRIDGEEEPKQRSFPHTSEGLNALVAFVVEGEIAPEQVLIAIEVNHGAVVEALLAKALPVCSINPKLLDRLRDRFSPAGAKDDRRDAFVLASCVESDAHAFRRIEPGNEENLRLQAATRLRGDLKSAFGADANRLWSELRDYRPGLLVLCPGADEPWLWALIEKAPSPSQGAKLTRASIGAVLKRHRIRRLTIEDLQTVLHKDVLSLRPVYIESHVARVLVLTAKLKLAQSQIDKIEKEIKTELAERVESEEKTKRRDLTILLSLPGFGPLTTATALGESGDAFERRDYNALRSICGAAPITKQSGGSRFVVMRQFCQPRLRVALHISALQAIRIDPKFHDLYVRARARGHTVGRAIRNIVDRLLFLAVQLLRKNELYDITLRQMAPEVAAAS

SEQ ID NO: 207188 - protein, 318 aa, unidentified
MKTHTNQNINVGVDTGKFQLDIYIRPLDIYFTVPNDEIGIKEAVKTIKKHSPERIIIEATGRLEMPFIMACAKANLPFVIANPIHIKRFAGAIGQRAKTDKLDAQLIAHYGEAIKPKLSTLKPDTMQAMSDLVARRNQLMVMQTMEKNRLQILPKSLAMTIKPVLTLFKHQIKKIEDKLFQLIESCPDYQAKNTILQSMKGIGKIAAVSIISNLPELGYITSKQASSLVGVAPMNRESGLYKGTRKIQGGRHQVRTVLYMAMMSAIQSNPVFKAHYNKLVAAGKPKKVAIIACVRKMVVILNSMLRDGVLWEAPKVLN

SEQ ID NO: 207189 - protein, 344 aa, unidentified
MDHFAGLDVSVKETSVCIVDDTGRIVKEVKVASEPQSLLKVLGSPAYRFKRIGLEAGPLSQWLFSALAEAALPVICVETRHMQAVLKAQINKTDRNDARGIAQMVRAGLYRPVHVKTLRSQKLRMLLTHRKLLQSKAIAIENDLRGTLRNFGLKVGMVGKVRFEARIQELVENQPDLAVLVEPLLIVRRVLREQIVILHRRLLATVRDDEVCRRLMTTPGVGPVVALTYRATVDVPARFRKSKSVGAVFGLTCSRYQSGEIDWSGKISRCGDEMMRTMLYEAAQSMMHSKKWSWLKAWAMQIARRRGMKKAIVALARRLAVIMHRIWVDGTEFRWTREQATAAA

SEQ ID NO: 207190 - protein, 344 aa, unidentified
MKYFAGLDVSLDETAVCIVDEDGIVVREGKVPSEPDDLVRWLTALELTLVRLGLEAGPLSPWLHAELTAAGLPAICIETRRMKGATAAMAIKTDRNDARAIAQAMRVGWFTAVHVKTAESQELRLLLSNRRVLLQKRVAIDNEIRGTLKAFGLKIGAVGVVGFEARVIELLVDRPRLFAMVRPMLNAREALRQQGAVLHKLLLKNVRASKVCRRLLSVPGVGPVVALTYVTGIDDPARFARSRDLGPHFGLIPRKYASGEIDRNGSITKAGDSAVRGALVQAALTLLTRDRRWCALKVWGLAVAKRRGLHRAIVAVARKLAIVLHRIWIDETTFIWSHKEAASV

SEQ ID NO: 207191 - protein, 342 aa, unidentified
MSEYVGFDVSKEETSFCVMDKAGVILTQGKALSDPGSLFSALREHTLCPERIVLETGTMSGWLARGLHEYGLPVDVIDARQAHAVMKLQHNKTDANDAKLLAEIARTGFCRPVAVGSEASQEQRILIKARRHLVSQRNATRNAIRGFLGSLGLRFAKGSGKLGERVRAALVARPDLSPLIEPLLSSTENLTREIARFDREIKARAGEMAACRLLMTVPGVAENAALAFVATIDDPSRFSDSRAVGAYLGLTSRRYQSGEMDYTGRISKNGDGLLRSLLYEAANCLLTIVRKAHPLKDWARRIRNRSSHKKACVALARKLAVIMHRMLITGEAFRWPEKEAAA

SEQ ID NO: 207192 - protein, 358 aa, unidentified
MLAEVVDAVVGVDTHRDTHEVEIASPNAVPIAVCSIRNDSTGYAQLLAWIVDHAPGPRLVVSIEGSRSYGVGLSRALTAAGLQVLESEQPASKARRGKGKSDAIDAHLAVLAALRLDADRLPLPRVDGDREALRILLGARHDLTVACTAQTNRLRALLLGSDDDADRDLARGVLSDVVLAELARRQPRDDADREQAVRYGEIRRLAAAVRDGGRALKDNRAQLQVVVADMAPGLTERRGVGPVTAAQVIVSFSHPGRCRSDAAFAALSGTSPLEASSGRTVRHRLNRGGDRALNCALHTIAMTRMRCCPRTKAYVARRTAEGKTTREIRRCLKRYIARELHRALTATMTPTTPLASPA

SEQ ID NO: 207193 - protein, 406 aa, unidentified
MEPSPSPPLRFIGLDIHKDYAVACGVNAAQEPVLGPQRVGNAQLAQWAAKHLSHQDAIVIEMTTNTWEVYDLLRPLVHSVTVVHPPHVALIVRAQVKTDRKAALALAQLHAAGLLVGIWVPPPEVRDLRMLISQRRKMVCLATTAKNRLHAALHRHHLAAPPSSLPFSPKHEAFWLSLPVSPSECAIIHCDWQTVTFADQQKKALEEAIAQAIADDPRAPLLVQLPGIGLISAATLLAAIGDIDRFPDAKHLVGYAGLGARVHDSGHTHRGGRITKAGRKDIRWTMVEAARHAARSHAYWKGQFARLEPRLGKSKTYVAIARRLLVAVWHVLSKETADRFADAQQVACAFFAHAYKIGVRNLPDGLSALAYTRQELDRLGLGAHLTSIPWGSKRFKLPPSSLVPRT

SEQ ID NO: 207194 - protein, 429 aa, unidentified
MSYWIAGIDVHKKMLAVVICDVEIESEYTFERSKFSSSPEQLRCLAAWLLEQEAEEVVMESTAQYWKPVWAALERYWKPLCEKREGARRKSGTLHLAQALSNRGRQGRKRDFPDAERLVKRLVAGELSLSFVPDAEQRLWRTVTRKKHQLRCDRVRLQNQLESLLEEAHLKLSSFVSDLLGLSAQRMLKAIAEGETNPAALAALADERLRATTEQLCDALGACTELNPVYRRLLNMTLDQLRVIDEQISRLDQEMANLLKAYQEAVERLADVPGLGVDSAQQIIAEVGPTAAAFPSGKCLSSWVGVCPGSDESAGVNYSHRSPKGNRHMRRLLNQAANAGAKAKGSIFQIVYRRMVPRLGHNQTIGAIAHRQCRLIWLILHEGARYEERGSGLSERSKQLRTRKMIRQLRNLGYRIEPPISQPSQAPME

SEQ ID NO: 207195 - protein, 336 aa, unidentified
MTIIRVGLDTSKHVFQVHGVDENEQPVLRRQTRRGAVEKFFAKLPSTRIGIEACGASHHWARLLRGLGHEVLLMPPQYIKAYVKRSKNDKIDAEAICEAMSRPTMRFVPVKTAEQQAALTMLGVRDLLVKQRTMLINAIRGHAAEFGVTAAKGPKQITELLARLASDEHVPGLAREMIGVLASQLNGLDIKLKALEARLMTWHRQDQTSQCLATIPGIGPIGGVSFALKVPDAKAFRSGRRFAAWVGITPREDSTAGRQKLGRISRAGDEDLRRLLVIGATAVIRAAKPGRTAPWLMGLLARKPKKVAAVALANKMARIVWAMMVSGETYRRPAQA

SEQ ID NO: 207196 - protein, 342 aa, unidentified
MYYIGLDVHKKTISYCVKDASGQVHQEGKVGATRWELDDWMKTLPQPWTVAMEATIFTGWIYDHLLPHAQQVKVAHPLMLRAIAAAKKKNDRIDAGKIADCLRCDFLPECHMASTAIRDRRRTLRYRHLLVRQMVQMKNRISGLLMETGVSHNKQRLHKVGYFRELLASNEEVNESIRPLLRVSRDSIVRLQKTEYALVSSLQRDPLLAERIKRLRTVPGVGPITALTWALEMGEVSRFSSIRQAISYCGLCGDESSSADKVTRTPLSKQRNKHIQRVLVEAAKLAPRQDHNLALVYEREKQKGNANRATLAVARKMVAYLLAVDRGQRDFVPFADSQSAAA

SEQ ID NO: 207197 - protein, 365 aa, unidentified
MKKISTTTTKAFRRMEKLTIGLDLGDRSSWYCVLDERGEIVLEQKVSTTPKAMEEVFGGMPRSRIALETGTHSPWVSRLLSKLGHEVIVAHARNVRLIGESRRKDDRLDAKTLARLARIDPQLLCPVKHRSAKAQAHLTVIRARAGLVRARTALINVARGLTKSYGERLRGCSPRNLNSKKAEGLSVELQTALGPLLEEIESLGGRIREYNQQIESIAQEHYPETTLLKQVKGVGTLVALTYMLTLEDPHRFSKSRDAGCYAGLQPGRRNSGQSQPQMRISKEGDAYLRGLLVQSAHHILGPFGADSDLRRWGLKLAERGGKNGKKRAIVATARKLAVLLHRLWVNGEVYEPFHSSSRRVLVAAA

SEQ ID NO: 207198 - protein, 314 aa, unidentified
MKKVSTAAAKATKNFSQPKVTIGLDLGDRSSWYCLLDEVGEVLQEQKLGTTPKAMKEAFGGMPRSRIALETGTHSPWVSRQLSEMGHEVIVAHARNVRLIGESSRKDDRLDARTLARLARIDPGLLGPVRHRSAKAQINLTVIRARAAMVGTRTALVNAARGLTKSYGERLNKCGTEQMNRESSKGLSQELREALDPLLREIESLNERIKEYDQRIEQIAKEVHPEVAQLKQVKGVGTLIALTYVLTLDDPHRFRRSRDAGCFLGLRPGRRNSGQSEPQLHISKEGDRYLRTLMVSGEVYEPLRNNRKAERAVA

SEQ ID NO: 207199 - protein, 315 aa, unidentified
MIPAESKEINIGIDVSKASFDVAIHEQSEIWSESNTAGGCAALVARLIKLKPTRIVIEATGGYETLIAASLSAAELPVIVVNPRQVRDFAKATGQLAKTDRLDARVLAHFAAAIAPPLRPTKSDEAQHLEALLARRRQIVEMLVAEKNRLAAHRDRAVVKDLKTHIAWLERRLKQSDDELQRVLKASPVWRERDDLLRSTPGVGSVLSLTLLAQLPELGTLNRKQIAKLVGVAPFNWDSGQWRGSRHIWGGRAAVRAPLFMATLSAIRCNPIIRSFYRRLIAAHKAPKVAITACMRKLLTILNVMVKTKTSWRTA

SEQ ID NO: 207200 - protein, 368 aa, unidentified
MKKNSTTQTSSSGVAQANEKLTIGLDLGDRSSRYCILNEQGEVIQEGSVTTTKKGLERVFGVLTRCRIALEVGTHSPWVSRYLTRLGYEVIVANARRVRLIAESTRKDDKLDAKTLARLARIDPELLSPIRHRSEQAQADLMTVRARAVLVQTRTALINAARGLTKSFGERLPSCGTKQMGRDMAESLSLSLRAALDPLLAEVETITEHIQEYDRQLEKLSKERYPEVERLKQVHGVGTLIAVAYVLTVEDPHRFRRSRAVGCYVGLRPKRRESGQSRPELGISKEGDAYLRTLLVQGAHHVLGPFGQDSDLRRWGLQLAARGGKNAKKRAVVAVARKLAVLLHRLWVSGEQYEPLREANRKPPAVAA

SEQ ID NO: 207201 - protein, 359 aa, unidentified
MTKTASPSLPTTYVGIDVSKDHLDACRKSGDQDPGDQNLGNQSPKEQRDARRFPNTPAGHRRLLGWLATSSSGKVQAVVESTGRYSLDLTLALYEADDTEVMVANPKALRGFAKAQMRRTKTDAVDAAVIADYARRMSFSPWEPPPEATRELRAIARRIQALTVERTREKNRLQSLTDSRSASSVVENDIEVNIRHLKRRINELLRQAMACVNSSEPLTKAYGHLTSVRGIAEKSAVLLLGELAMLPNDMSVREWVAHAGLDPKKWESGTSVNAPERISKIGNARIRRALYMPAHSAIRYEPRVGAFYDKLLRRGKAKMVAVVAVMRKLLHAIYGMLKHGQDFDGEKFYATPETAPSTP

SEQ ID NO: 207202 - protein, 378 aa, unidentified
MSDVKFFNVYLKFKRMRTNQMFIKQSVGIDVSKDTLDVSICCLNNHIEICNIAQATFENSKKGVIGLENWIRNHSIKDLDYTVVVEATGIYHETLAYHLYEKNIKIAIVLPSKISAYFKSTNKRSINDKISACLIAEFGLMRKLDTWTPPSPCLRKLKVLVRERLRLIEMRTMVKNNEHVYKYAANTTGTAQERICELKNMLNKQIKEIEEEIRVILSENPELYEKVKRICTIKGVSLITVVTIVAETNGFSLIRNARQLVCYAGYDIVKKESGTSVRKGGNISHRGNKNIRRALYFPAITAQQNNTFFSNFYDRLYNRHSIKMKAYVAVQRKLLILIYTLWKNNEEYNPEKHKTYKFLEQPNQAALIELDHCPLFVD

SEQ ID NO: 207203 - protein, 492 aa, unidentified
MTSMTLDPPLTNPLPPGSELVAGVDTHKNTHHVAILDLVGRPVADREFRADGRGYAQIVAFLHAHGDVVRIGVEGTGSYGAGLARALTTAGLTVIEVARQDRQARRRRGKSDPLDAHQAAVAVLAGTDTAIPKSGDGAVESMRILLAERRSAAKARAQVMNQIHALLITAPELVRQAFRALSGQRLVNTLAKTRPGTITSPDPAVVARQTLRRFAVRHLTMQAEIDLIEQQLEMLVRQVNPTLLSLSGVGPVTAATLLVAAGDNPERLGTRASFAALAGVAPIPASSGQRTRHRLSRGGNRHANAALHRIVLLRMRHREPRTMAYFERRRSEQLTDRDIMRCLKRHVANEVYAALLNPATLKKFLVEKMKTLGTAACPPYHIAFCIGGTSAETCLKTVKLASAKYLDNLPTSGNELGRSFRDLELEKELLEKQNSFVWQNLAVWVKCSHSSHSLFAPKHSARTIHPTQWTDTGHAAHLGFAPYLLSLVYSYI

SEQ ID NO: 207204 - protein, 346 aa, unidentified
MDQIIRIGMDTSKHIFQLHGVNAAEEPVLRKKLRRQDMVAFFTKLAPTVIGLEACGGSHHWARLLRSLGHEVKMLPPQYVKPYVKRGKNDAADAEAICEAMSRPTMRFVPIKTADQQAALMLVGLRDRLIRQRTQLANAIRGYAAEFGLIAAKGLVRIEPLLERIRADDTLPPLARELFDIHAKDYTQLQARLEEVDDKLMAWHRADECSRRLAKIPGVGPIGASMLVMKAPAPEAFRSARHFAAWLGLTPKDHSTAGKVRLGVITRAGDEALRSVLVVGATALLQQVRRGRGSASPWLEALLKRKPPKLAAVALANKIARIAWKLMVTGEVYQPQSAPPARAHAV

SEQ ID NO: 207205 - protein, 342 aa, unidentified
MNTVTIIGIDLAKRVFHAHGAYADGSVAFRKRMGRSQVLPFLARQPTCVVAMEACASAHEWGRAIRDQGHEVRLIPPSYVKPYVKRQKNDTADAEAIAEAGSRPTMRFVAVKTEEQQARSMVFRTRDLLVRQRTQLINALRGHLAEHGVIAPQGPAHLKTLAASINAAEPAMPQLVLDVGRVYLEHVDRLSCEIAELEKILRREAQCGEDTRRLQTMPGIGPITAMAVEAFAPPMSTFKRGRDFAAWLGLVPVQHSTGGKQRLGRTSKMGQRDIRRLLIIGAMSVIQWASRRGARPDSWLARMLDRKPLMLVAMALANKMARSVWAMLTKKEDYRDLGSAAA

SEQ ID NO: 207206 - protein, 390 aa, unidentified
MTATRLTDSIQITSASLYLAFELGWNEWKLAFTTGLGQAPRMRSVPARDRQAVLDEIARAKERFGLPPDAPVHSCYEAGRDGFWLHRWLLAEGIDNLICDSASIEVNRRQRRAKNDRLDAAKLVTMLCRYHGGDTKVWSVVTAPTAPAEDLRQLHRELLSLKEERTAHVNRIKGLLASQGLAVVVIDADFPEVLPGLRLWDGSPLGPDLTARLVREFERWQFVDRQIRDLESDRRRRIRCDETPQVDKVRLLLGLRGVGLAGAWMLVMELFGTRANLNRKQLGALVGMTPTPYQSGATAREQGISKAGNRRLRTLMVELAWCWVRHQPDSDLTRWFHRRFGVGKRSRKVGIVALARKLLVAFGRYLDRGEVPKGAKLCSWRTKINGRTAA

SEQ ID NO: 207207 - protein, 403 aa, unidentified
MNNVVGIDVSKGKSMVSVLRPFGEVVAKPFSVGHTGSELKELADYLKSLDGETRVVMEHTGRYYEPVARFLHDEGVFVSAVNPKLIKDYGNNTLRKVKTDKADSRKIARYGIDNWAELRQHTPMDTIRMQLKTLNRQQSLYAKTKTMMKNNLIALLDQTYPGVNALFDSPVREDGSQKWVDFATTFWHVDCVRNMSLTAFAERYRKWCKRHGYNFSQSKAVEVHAGAQDLIAMLPRDALTKTMVRQAIDALNAVSASLERLKAEMRTLAAQLPEYPVVMAMHGVGDSLGPQLMAELGDVTRFTHRNAITAFAGVDPGADQSGTHEAKSTRVSKSGPPELRRALFLVMDCLLKTQPQDDPVYRFMDKKRAEGKPYLVYMTAGANKFLRIYYGRVKEYLASLEGN

SEQ ID NO: 207208 - protein, 352 aa, unidentified
MSSEEIFPNVTVGLDLGDKVSRVCEIDFAGKIVKTAAVATTPGAIERYFGGRARCRVVLEASTHSPWVSRQLKELGHEAVVANTSEVYAKRPRKRRNDRTDAEFLARQGRADVELLHPIKHRSAAAQQDLALLRARDQLVGARSKLISHVRGAVKALGARINKCSAEVFAKRAAAQMPEALRPSLSPLLEVIEDLTRRIGAMDEQVERMIEEHPAAVRLQQPRGVGPLTALAFVLAVEDPARFKHSRQVGAYFGLVPKLDDSSDSSPQLHITKAGDALVRKYLVSAARYILGPFAGDCDLRRYGEAIAARGGKNAKKRAAIAVARKLAVMLHRLWVAEADYDPDWLQRQRAA

SEQ ID NO: 207209 - protein, 349 aa, unidentified
MVVIGTDSHKRTHTVVAVDETGRKLAEKTAAATSAGHLELVRWAARFADRRWALEDCRHLSRRLSNDLLVAGEAVVRVPPRLMAGARRSSREPGKSDPIDALAVARAALREPDLPVATLDGPEREVRLLVDHRDDLVAERTRAQNRLRWHLHELEPGHEPVARSLDRRVVLDALGRDLAAAPGTVGRIARELVAHIRTLTATINDLEREIGRLVVDLAPSLLALVGCGSLTAAKLVGETAGVGRFRSAAAFARHNGTAPLPVWSGNTERHRLSRSGNRQLNLALHRIAITQMQREGPGRVYVEHRRREGDTKTEAIRALRRRISDEVFRRMRHDEAAGAARPTGLAAAA

SEQ ID NO: 207210 - protein, 413 aa, unidentified
MADETFRWFAGVDWGSAKHQVCLLDGAGTVVGERAFAHGGAGLAALCDWLVSAAGDPGSVAVAIEVPHGPVVDALLDRGFAVYAINPKQLDRLRDRISIAGAKDDRRDARVAAAGLRTDRHLFRRVLAGDPSVIELREWSRLAEELQQERVRLSNRISQQLWRYYPQLLELSDDMTAEWVLALWTLAPTPAQAARLREATLARLLRQPRIRKLDAPAVLAILRQPAIPVAPGVTEAAVLHLRSLVARLRLANQEFHQAARKLEELCTALSETDSAAQDSGPGDAAILRSLPGVGPVTLATLLTEAAGPLARRDYAALRTLSGVAPVTKRSGKTCVVVMRYAAQVRLRQAVFHWARIAVQIDRTCRGRYEALRARGHSYGRALRGVADRLLGVACVLLQRQTLFDPDHGASVEP

SEQ ID NO: 207211 - protein, 410 aa, unidentified
MLFIGDDWAEAHHDIEIEDESGRVLARRRLPEGLAGITTLHELVAEHLDPTAEPDQVQLGIETERGPWVQALLAAGYGVFAINPLQVARYRERHSPSGAKSDTADAHLLAEIVRLDRAHHRRIAGDSEIAEHVKIAARAHQTMIWSRVRQVNTLRSLLREYYPAALAAFGTDLASRDALAVLTVAPSPELGRRLSQARIETLLRRAGRQRNLSTTAVKIRAALRSEQLAARPGVIGAYTASASALLAVLTAMAAQTEVLAGQVEQGFGQHPDAEIYRSQPGLGDILGARVLAEFGDDPGRYVDAKARKNYSGMSPITKASGTKRVVLARYARNRRLGDALFLQAFAALNNSPGARAFYDRQRARGATHYQALRALANRLVGILHGCLRSHTLYDEHLAWHTEPDKLSPAA

SEQ ID NO: 207212 - protein, 402 aa, unidentified
MGSNYAGVDWASEKHDVIVQNETGEELLAASFAHDEDGVRSLCRTLVRLNVGLVAIERPDGLLVERLLDAGLRMLPLHPNQVAATRSRFRAAGGKSDRFDAFVLCELARTDHHRFRVLEPDSDQTKALRALTRAREDLVQARVALTNQLRAELERFWPGPIGLFQDLGSQISLAFLQQYPSPRDARTLGEKRLQAFLARQRYSGHKPAGEVLAKLRSAPEGRAGETEMTARRQIMLGLVAALTPLVQQIKALERRIAASVREHPDGAIFLSLFKSPASTITAATMLAEIGDCRARYPNRDALAGDAGQAAVAIESGKRKAACFRWACNKRLRYAVTTLADTTRHWHPWAADHYAVRPSPRPRPPTRHPHPRPRLVPCHLAVLASPHPSATQPATALCNSTSR

SEQ ID NO: 207213 - protein, 363 aa, unidentified
MQYLINTELSSHEETRFEFNRSTGAIKLGIDVHQDFSVVVEQVEGGNPKPPQRFDEQAFLHWASKLKQRGAEVHAVYEACGFGFSLQRNLTALGIKCHVVCPQKLDERNKRVKTDGLDAKALCLKLDRFVQGNRDALALVRVPTEEEERSRAIHRQREQLVGARKRLEAQGRSLMVNHGVDPVQNWWKPRTFATLPVPHWMRELLLNSQPILLALQEKIAVLTLQLQNAAAPNQARGLGKMTSVVIDREIGDWHRFNNRRQIASYTGLCPGEYSSGNTRLQSCVTKHGNPRLRAALVELAWRLVRFQPNYKPIVKWRQILAKGALATGAARKKAIVAVARQLAVDLWRIKTGRLRAQELGLIN

SEQ ID NO: 207214 - protein, 353 aa, unidentified
MTTHYIGLDVHCQFTEFAVVTSSGRLTKRGQCPTTIPALVAAIESVKRPRYVAFEEGPMAEWLYRNLLASADGVTACEPRRNRWIAQEGEKDDPLDAAKVAQLHRGGYLKAVHHPESEERSILKGHVGVYHDRVRQRVRTANRIIAQFRSHGVVIQEADFATPGQRQGLLRRLPADPLLQKDLDVLWESYDLTAFHAGELERSLRQLVRNYEILRRFQAVPGIGPVWATTFYVYVDTPWRFRSKEALWKYLGIGLERRHSGNGPVQVRVSKSANRRLKWMILSAAESAIRSLDSPFAAHYARGRNAGLPHHSARRNVARSLAATLWGMWKSGDKYHPEWVGRGATVGAGSGSR

SEQ ID NO: 207215 - protein, 427 aa, unidentified
MRSIALDVHRDFCEVAIKDESGLRLAGRVKSSVCELELFAQSLAPDDEVALEATGGALQIARILEAHVARVLIANTRKLSAIAESKVKTDKLDAKTLCELLAAGFLPAVFSPDEFTRALRRRLQRRSKLVRSRTRAKNECHAVLARNLKGRPPMSDVFGKAGRRWLAALELPADESETVACCLREVDFLDGEVGLIERELARQAMSSQEIRRLMSVPGVSFVSAAAFVAAAGEIHRFSTPKKLVSYVGLDPRVRQSGEGPARHGHISKQGSSEARHMLCEAAWVAVRTPGPLHAFYERVRARRGAQIALVATARKLSVLFWHLLTREEDYAFGRPSLTRRKLRALELKTEQGWRRGRYSGPRVHEAKKEREQEREFSDQVETAYRRLVQDWQPKPAKSGAGATRGRASSKPTSGKQRGRASVPNSAL

SEQ ID NO: 207216 - protein, 370 aa, unidentified
MEEGIKFFVGLDVHKDTIAVAAAEAGREPARWVGTIAHDVGKLLKRLARYGEPAQVQVVYEAGPTGYGLQRELTRRGYGCQVIAPSLIPKRAGDRIKTDGRDSVRLAELSRAGELRAIWIPDPADEAIRDLARAREDAVNARTQVRQQLKGFLLRHDVRYAGKTSWSKTFYRWLATLNFGLSGAQTAFTEYWQAVAAADERVARLTQALAGSIAGWRFESVVMALQALRGIDQISAIGLVAEIGDIGRFAHPRQLMAYLGLVPAEHSSGERVARGSITKTGNAHARRLLTEAAWNYRFQPRIGYRAQRRAEDLPQELRDLAWKAQLRLTGRFARLRARGVQINKVCVAVARELAGFVWAIAQARAKLPQS

SEQ ID NO: 207217 - protein, 416 aa, unidentified
MKIVRPICCGMDVHKNIIVATIGITNKKTRITKYIQETFSTLNSDLLNLKQWLINHKCFDACMESTGKYWIPIFNILEDEINIYLTHPKYVKAIKGKKTDKKDSKWICDLFKHDLIKFSFIPPKEIRALREISRYRYKLVGMRSSERNRYQNCMTVSNIGIGSVFSDPFGKSAQAIMKEVLESDIIEDEKILKCIHRSCKNKDKILDSIKHCNIETDQRFKMNESMTHMEELKVHIDNCEIEMMKRAAPMFDQFMHITQLPGISTLSAILIISEIGVDMKQFESDKQLTCWAGLAPANNESANKKKSVRISKAGQYLKPLLVQCALGAIKDKEGYFGIKYSRIKKRRGHKKAIIAIARMMLVSIYHMILTGEKFNPSDYESFRNPKPPIKQQDLTEESAIEFLKKSGFDVSKLTKP

SEQ ID NO: 207218 - protein, 357 aa, unidentified
MNTIGVDFHKRTSTFQVLNEQGEPVKRRKIENNTQTLREFIGSVPGPKRLAMEATRSWGLFYETTNDLVDQFCLGHPKKMVALTTAEIKNDNNDAMMIARLAHMGLLPKAYVSSLPMRELKGSLRLRGFLVNQRRGIRNQIQGLIDRNVWPSDRPASFKSPFCKKGLLWLSSLKLSEKERFILDESLNIFKELNDNIDNIDRFLQSQSVDVPGLAYLRSVPGFKSGGINAYRVLIEISDIARFNNSRGLLFYAGLIPREHSSGDKQRKGRLVKNANLNLRTALIESTFAAIRQDKALKSFYKTAKERSGSGAAIIATARKLACAIYYALKEHKKYDPTYLVPSATACHSSQPRLSGD

SEQ ID NO: 207219 - protein, 429 aa, unidentified
MEEIDDTDLVVERVAALDLGKAGLDACVRVPHTHHPGRRMQELRSYGTTTAQLLELAAWLRHWHVQRVVMESTSTYWKGVYYLLEAEGFDCWLVNAREVKNVPGRAKTDRADAVWLAKVAERGMCRPSLVHPPEIRRLRDLTRYRRALVQDRTRERQRVEKLLEDAQIKISSVLSDLHGVTGRAMMDALINGQRDPHTLARLAKGSARKKTARLEEALRGFFTDHHAMILQMMLANSDRLSSQIAELDGRIEEAVSPFCAQSARLADIPGVDVMAAAELIAEVGVDMTRFPSAAHLVSWAKFCPQTHQSAGKSKSQGRGKGNPWLAGTLGRVVFANSRSETFLGARYRRLARRRGKQKAIVATGNSLLTVVYHLLLNSDARFCDLGPGYYESRINKHRRARDLATQLQALTGQHIVIRDGKAVITDTAA

SEQ ID NO: 207220 - protein, 341 aa, unidentified
MQVYGIDLSKDKFDVNFFDATGKINTRTVKNGLAGISDFLSGIPSEAILCAENTGSYGDLLVFLCGQYGVQIALVPGYTVKHSLGLVRGKSDPIDAGRLREYGERFFDKLSFKTYQSETMSELRQLYSLRSQLVKARKELRTGAHARQTMPMQSIRTNQILKNTLGSLDAQILEVEKEIELIVKSDSELRENYTFSISVKGVGPVIATDIIIKTGNFKVIDTARKAASYAGVCPFPNASGKMVGKARTSHFADKELKCLLYMGAKSAVKHNKEYNLYYQKKKPEGKPHYLIINNIMNKLLRTIYSVVKNKNAYTPEYMCIDPREKNVNSSDKKSGKKIVFN

SEQ ID NO: 207221 - protein, 306 aa, unidentified
MNESVGIDVCRQWLDVHVHGLQQARRFANQATGLRQLRDWLAPLTLYQVVVEATGGAEQLALDTLHAAGLPMVRINPRQARDFAKATGQLAKTDRLDARALAHMAAVLPLTRYQPLEDWRRQLRAYQQRRMQVVTVVQQQRQQLSTLTDAWLKRQAHSAVRQLQQQVAQLDARIAQQLAARAELQVLRQVKGVGPVLLASLAAQLPELGQLSGKAIAKLVGVAPLARDSGAMRGVRRIWGGRAGIGQVLYMATLVAVRFNPPLRDFYQRLRDKGKAGKVALVAAIRKLLVILNAKMRDQLAAAAAS

SEQ ID NO: 207222 - protein, 371 aa, unidentified
MKSIIYIGMDVHKKTYSLCALLKETGEIIGETKIPADVSLIIKFIENAKKSVDSDDVQIKTGYEAGCLGYSLYWQLAAKGIECDILAPSTMHRSAKNKVVKNDRRDAKNIAANLANGTYKSVYVPTDEDVEIKEYIRMMHDFKIELKKVKQHINAFLLRFGHHYPGKSKWVPAHIKWLKELELSDMHREILDEYLSQLEILSEKIERFKHRLEELSQKETYNEKIGQLRCIKGIDTTAAMTMHAETSDFDRFPTANAFASYCGLTPGEDSSGESYHRLGITKQGNSMIRTTMVEAAQVLVRGTIGKKGKKVKSKQKDQDVKVIDYADKAVVRLQKKYHRMIFRGVKRNIAITAVARELACFVWGIETGHIS

SEQ ID NO: 207223 - protein, 374 aa, unidentified
MSDSIAYVAMDTHKKQHSVALYYPGQEEIVRFSIKNTAREITKMTRKIIKQTPGEVKFCYEAGVCGFVLKRRIEAHGCKCAVIAPSLIPRKPGDRVKTDRRDALKLLMMFKAGLLTEVHAPDKQQEAARELTRCRQAAQENLKRVRHQLLKFLTRHGYIYSDGSHWTIKHLSWLRSLEFEEALLHDVFDNYFTEMQHCIQRLDSLDNAVEKLAKSEPYKQVVGLLRCFRGIDTLSAITIITEIFDFGRFSSPGELMSYLGLTCSEFSSGEKQKRGSITKAGNKRVRRILVEAAWHYRHPCNVSKALSDRRNGQPQWAIDIADRSGQRLRKRYRHLTNRGKMPCKVTVAIARELAGFIWSVFKEYETRRIVKQVA

SEQ ID NO: 207224 - protein, 333 aa, unidentified
MTKLIAARDRWAKVSGSPPSIVLCYEAGYDAFWLARFLKGHGIECLVLDPGSLEVNRRSRRVKTDRIDLKKLLRTLTAWCRGERHVCSVVRIPTIDEEDLRRSHRERSRLICERTAHINRIKGLLFAQGIRVGNISSKTLTLDKLVTGDGHRLPPRLAAEVEREIERLALVQKQIDKVECERDTAPAACKETEKKRHLLLQLKSIGPTNAALLSREVYYRHFDNQRQLGSFIGLTPSPFKSGDEEHCQGISRTGSGHVRAAMIEAAWLWVQHQPKSALTRWFNQRTAGQSKRVRKIMIVALARKLAIALWRFVELGLVPEGAILSPRVIAKAR

SEQ ID NO: 207225 - protein, 521 aa, unidentified
MPRPRTSRPRKVRKAFVLQKPCGQLTPRVQAVGAEHFGIVAVDCAKARSRYFLADLYGRTLLEPATVAHNRGDFQAAIDRVRQAMRQHQLADLVVAIERTGEYHRPVQHAFRQADFETRLVHPFTSKQYRQPADPGNKTDDTDLAAIWRATTHGFGLLEPTWPDNYLTIQLLRRHRRDLVDKNTILQCQIREVLHAAMPGYAELFCHFWDDSPAPLVFARHTTSADAVRQQGIAGLQQIANQAGLRCRTETLHKILAWAEQAAPASGNVLDRCRILIGLDDDRLAKTRQILELERDLAHRVVHTPYLLLMVIPGINVVTVADLAGELGPISLYVNANAITGRAGLMPSRYQSDQVDCANGPLRRRGNRRLRAVLMQTADNLVQCNHYFHARADQWTRAGKDARWVRVKVAKIFSRLAFAMVAGEQLFPHPCCQKRHYIIGKLLSFHSGHGTELQAMRHDLEVAAAQLPAKQRALEAEPLQKQLDDLANRRGPQPLAEIIPLVLARLAGRVVQSTPSESAGP

SEQ ID NO: 207226 - protein, 349 aa, unidentified
MKKIVKQVAAIDVAQKELVVCLGRMYDDWSPQLYAHKTFANTVKGFEVLLLWLKKMTDETIAVRFVMEATGIYHESLAYFLDEKGYEISVVLPNKISNYFRTLDVKTITDKTASEAIVLFGLERKLDCWQKPKAIFKKLKQLTRERDQIVEERTMVKNQLHAEQTEAEPNKKSVQRIKERIKMLNSQESEIKAEVDALIKQDEQLTQHVNVICSLTGVGLLTAAIVLGETNGFELIRNKRQLASYAGFDIKEKQSGTSVKGKPRISKKGNKHLRKAMHMPALCAIRYDERFKAVFARLVSRHGIKMKAAVAIQRKMLEMIYTLYKTGNRYNKNYLKKNDSLIEQHENVL

SEQ ID NO: 207227 - protein, 367 aa, unidentified
MHERTHVGLDVHALTVVACAIDGLTGEISRARMTPDHGEILAWIQALPAPVKVVYEAGPTGFPLARALRAAGIDCLVAAPSKLQRPSGDRVKTDRNDALHLARLLKLDQITEVVVPEPAQEAARDLVRAREDIRGDLMRARHRVSKLLLRQGVRYTGGNTWTQEHLTWLHRQRFDSSALQLTYNLALESVAEALDRRARADKAIRAIAYDSEYTPVVRALECLRGVSTLTAFGLAVEIGDWTRFTGSTIGAYLGLVPSESSSGQHRAQGAITKTGNTHARRLLVEAAWHHRRPYNPSPTLRACWAAATPAAKARAQAGNRRLHERWLSYQERRKRPVIANVAIARELAGWCWSLANEAQLTAHQHNP

SEQ ID NO: 207228 - protein, 337 aa, unidentified
MPKHVKPHVPPPAAPDPYTVVCGVDLAKRTLHACVLGADERCALVDRGLPHDAGGVAALLDLCRARGVTLVVMEATGGLERRLRDALAAAGIPAVVANPRQVRDFARAEGRLAKTDPLDARVIARYGRRMRPPLRALPTAAQAALAELSARRRQLVEARTAELNRLQQATLASVRKDIGQLVRLLDRQLARLDRRVGELVDADAALARTAAVVETATGVGRATACALAAELPELGRLNRREVASLAGLAPRNRDSGAWRGRRCTGGGRASVRACLYMPTLSAVRFNPVIRRFYQRLVAAGKTGMVAVTACMRKLLVILNSMVKHDRPWDPALAATAG

SEQ ID NO: 207229 - protein, 326 aa, unidentified
MSKQVLYVGIDVGCEELWVSVPRMKPKKFEHSKRGIKSLYNWTDKTAGDDQLHFCMEATGVYSISVASQLVSEYQARVSIVNPARITAYGRVQMKRSKTDQVDAEVIRAYAESQKPVVWKPAPKSLQQLSALVTQADAVKDCLGQWHNRHHAQKFIPNLPDEVKKTQRSIERSLTTQLKKIETAMANLCAQESTLAQQVALLCTIPGVANQSAVKLLAYGQNWLTERSAKALTAHAGLAPHHYQSGTSVRGKSRIDKRGNPKLRKTLYMPALVAVHCNPILMKFYKRLLKNGKPKKLALVAAMRKLLLISRAMLIEKKPFNPQIQH

SEQ ID NO: 207230 - protein, 329 aa, unidentified
MDHFVGLDVSVKETSVCIVDETGKIMREVKVASEPDALLEVLANPAYCLKRIGLEAGPLSQWLFSALAEGGLPMICVETRHMRAALNAQINKTDRNDARGIAQMMRVGLYRPVHVKTQRSQKLRMLLTHRKLLQSKAIAIENDLRATLRNFGLKVGMVGAVKFEARIKELVENLPDLAVLVEPLLIVRRTLREQFGILHRRLLAVVRDDEVSRRLMTVPGVGPVVALTYRATIDVPARFRNSKAVGAVFGLTPAKYQSGELDRTGANITMRRRDDAGDALRSRPDHAAGHNKVVLAQGLGDADRQAPRDEEGNRGVGTPARRDHAPHMG

SEQ ID NO: 207231 - protein, 428 aa, unidentified
MLKINPLSTLYVGIDVSSKSNYVCALDFYKNKYINSSFANNQPGAEELAQKLLECLKKHPDLNTVVAALESTSVYSIHIANYLSSCEELMPFKPYVFVLNPKCTANYKKSYIGLGKSDPIDAFVIADYARAGNIETEPWRGSQFLALKRLTRHRLHLVECITREKTYLVSNLYLKFSELQMLDKDDQPFCDIYGATSSSVLTEYLSPEEIIEASEEDLVSFLANKSRNRIKDISKTAELLKKAARDSYRLDKALYEPLNVSIANSFNCIETFKKEIKAIDAAIEREIKGLNPNAFIILQSINGIGPVFAGGIVAEIGDISAFTSSDALAKYAGLCWRSNQSGDFDGEDTPMIKAGNRYLRYYLGEAANSMRKHNVEYGAYYRKKFNEVPKHQHKRALALTSRKFVRLVYGLLARNQLYSGVSLDTSNE

SEQ ID NO: 207232 - protein, 387 aa, unidentified
MNYVGIDIAKQTHYASIMNSEGEILVEPFPFSNNHAGFQKLLKHLSAFSQKDVLIGMESTAHYAENLTSFLFTRGFNICIINPIQISSLRKSNIRKTKTDSVDTYLIMKALSFNHYRLFTERDYDSLQLKNLCRFRQKLMKARTKVKIQLVTYVDLLFPELQYFFKSGIHGKACYELLKTQPNPDRIAKMHLTRLTNLLSKSSKGHFKQSHAVQLKELASHSVGIKNNTLSLQILQSIQQIEMYSKQLAEVDASIHEIMDKMDSVIKTIPGIGYLNGAMIIGEIGDIFRFEKPCQLLAYAGLDPSVYQSGNFNAARTRMSKRGSKLLRYSLINAAWQTTLVNKTFKDYYNLKISQGRRHYNALGHVAHKLVRVIHKMMTDNVEFNLT

SEQ ID NO: 207233 - protein, 351 aa, unidentified
MVYIGVDLHRKKSQVAAIDHDGKLVLNRKVRTGPGELQQLFDELRPQPIEVAFEATFGWGWFADLLAELGIPAHMAHPLATKAISSARVKNDAVDAKTLAHLLRTNLLPEGWIAPPDVRESRRLVRMRAALVHMRAKLKAQIHALLGEHGIQPDVGDLFSNRGRKLLGQLQLPAISQSRLQACLRLIEEVSLEIVIAEREIYQTIKEDERVKRLLPVPGIGPIIAATILSEIGDIARFSSPDKLCAWAGLTPSEHSSADNVRRGHISKQGSRWLRWVMVEAAVHAFRDVELRQLFLRIARRRGPKIARVAVARRLLTLVYYALRSETGCRRYPISSNPKVEARSMAVMASH

SEQ ID NO: 207234 - protein, 389 aa, unidentified
MKIYVGIDIAKLNHFAAAISSDGEIIIEPFKFTNDADGFQLLVSKLESFDKNSLIIGLESTAHYGDNLVRYLVTELYQVCVLNPIKTCQMRKNNVRKTKTDKVDTFVIAKTLMMQDDLRFITFFDLDMMDLKALGRFRQKTIKQRTRLKIQLTTYVDQVFPEIQYFFKSGLHQHAVYALLKEAPSPKEIASMHMTHLANLLKVNSHGHFTKELAKELRVLAQKSVGANDSAISIQITQTIQQIELLDSQLEKIEAEMTDIMKFNDSVIMTIPGIGYINGGMILGEIGDIHRFSNPNKLLAFAGLDPSVYQSGNFQAKTTRMSKRGSRVLRYALVNAAWNVVRNNATFKAYYDAKRAEGRSHYNALGHCSGKLVRVIWKMLTDEVAFNLE

SEQ ID NO: 207235 - protein, 413 aa, unidentified
MEGLQPIYRRVAGIDVHRMLHVVTVVIEHPDGSIEQISKEFGGFKRDCRALAAWLVEWNVELVVMESTGIYWKSIYAHIERAGIQAWVVNAHFIKHVPGRKTDMNDSQWLAVLARFGLVRGSFIPPQDLRELRLLSRYRRKLNAMRASEVNRLHKILDDGGIKLGGVVSDINGVSARAMVAGLINGAGIEQLLDMARGALKGKREDLQAALDGDLTLRHMFVLKHLHEHIDTLQRELAELDAYILGAMTPYQWAHRLLQTIPGIDQIASALILIEIGDDMTRFGCADRLAAWAALCPGNNESAGKRKSGRTRKGNGVIRYILCECANAARMTKSSLAAKYKSLMVRKTHKKSIVSIAHKMIRLIYVLLSRKEAYLDPQVDYNAMSARKNAPRWIKQLKLIGKWPDNKSAPASA

SEQ ID NO: 207236 - protein, 397 aa, unidentified
MIEVCSFKSINALTGAKRRLALKKNTKTTRPRKNAAQKTATRMSPRRTVGIDLGDQTSHYCILNEQGDVVSEGTVRTTESGLEEQFRRMARARIVLETGTHSPWVSRYLERLGHEVLVANARQVRIIYDNDRKTDKVDARTLARLARVDKSLLHPIRHRSAEAQADLAVLRARDQLVSVRSTLINCIRGMVKSVGGRLPSASGAYFSTKVRDQLPGCISGALLPLLEEIENLTIRIRVYDKQIEELAKTKYPKTELMRQIPGVGVVSSLAFALTIDDPNRFHKSRDVGSYLGLRPKQSDSGSSKPQLSISKAGDHLVRRLLVNCAQYVLGHWGPDCDLRRWGLSLMAHGGKNAKKRAVVAVARKLAVLMHKLWVRGEVYEPLRQASKATQTQAVPAA

SEQ ID NO: 207237 - protein, 327 aa, unidentified
MFCLGIDVSKHKLDLCLFPGNGKKKTKSIKNQVGVERDICDWLQKQKCPPEQVMVVMEATSVYHENVAYGLHGNTPVTVCIGNPQRVREFARGMGILTKNDAVDAWVLARYGELKQPDAWVPPPPEVRKLKDLLRLRDAIVEDVQRATNRLEKANSTQTAGEVTDSLERTKKSHEKELKRINALIDDHMDKNDGLKDDLKLLESIKGIGGVVGTTMLSVLRTCQFRNAGQVAAWLGVVPVEKTSGSSVRGLARMSKTGPADVRAKLYMAAIVAARWNPPVRALYERLMAKGKPAKVALGAVMRKLVHLCFGVLKTREPWKENYVATA

SEQ ID NO: 207238 - protein, 416 aa, unidentified
MDAIVERCAGLDVHLDTVVACVLYGKLDIKPKKEVKTFSTTTKGLLELLDFINQKECTHVAMESTGIYWKPVWNILESGAFNLIIANAKKGKNVPGRKTDVKDAEWIASLLRCGLIEKSFVPPERIRDLRDLTRLRKELLDEVNRNKNRIHKVLQDANIKISSVLSDVFGETGKSILNQIIDNQCITEEFIYSLYEGRGKSKLKSTPMEMYEALNGKIRGHHVILLGMHNSNIVFLEKQINELEKEIDILLQKERDSLELLETIPGISKISASSIIAEIGTSMDVFKTEKHISSWAGLCPKNNESAGKKKRSGIKSWNNWLRSMLCECAWSATKKKDSRFKNKYWSMVPRMGRKKALIAIANMMLRLIYHLLKTKSTYKELEIQYFIDKDKRREDRIIKELKSKGYLVEKDSLQMA

SEQ ID NO: 207239 - protein, 340 aa, unidentified
MRLYCGIDLHGNNSVISIIDEMDRVILEKKMPNNLAEILALIEPYRCNLVGIVVESTFNWYWLVDGLMDSEYKVHLANPAAIQQYDGLKFSDDKSDAKWLAHMLRLGILPEGYIYPKAERAVRDLLRKRGQLVRYRTSNLLSVNNLVARNNGGSISVQRIQQMQKDGAGELLRNKENILAVNANLAVLRCLDEQIKLIEKEIRKRAKLRPEFSLLHTVIGIGDILALTIALETGDISRFPTVGDFSSYCRTVKSERITNGKKKGKGNAKCGNKYLAWAFIEAANFATRYNEQARKFVQKKSAKSKPVVARKALANKLARACYYIMRDKVPFDNERLFTTK

SEQ ID NO: 207240 - protein, 403 aa, unidentified
MNMNAVGIDVSKGKSMVAILRPYGEIVSSPFEIRHTSSSILSLIEQIKSIEGESRIVMEHTGRYYEPLARELSLAGLFVTAVNPKLIKDFGDNSLRKVKSDKADAVKIARYTLDSWTELKQYSLMDEIRNQLKTMNRQFGFYMKHKTAMKNNLIGILDQTYPGVNTYFDSPAREDGSQKWVDFATTYWHADCVRNMSLNAFVDHYQKWCKRRKYNFSKDKAEEIYGAAKELVPVLPKDDLTKLIVKQAIEQLNTASKTVEELRTLMNETAAKLPEYPIVMGMKGVGPSLGPQLMAEIGDVTRFTHKGAITAFAGVDPGVNESGTYEQKSVPTSKRGSSFLRKTLFQVMDCLVKTKPQDDPVYAFIDKKRAQGKPYYVYMTAGANKFLRIYYGRVKEYLMSLPE

SEQ ID NO: 207241 - protein, 364 aa, unidentified
MDTHKKEHKVALHYPGQEEILNLTVRNSSYEISKMVRKILKKAPGEVRFCYEAGVCGFDLKRKIESSGCKCAVIAPSLIPVKPGERIKTDRRDALKLLSMFMAGLLTEVHAPDSQQEAARELTRLHQTARENLMRIHHQLLKFLTRHGYIYTEGDNWTGKHLRWLRDLEFEEPLLREVFDSYFTEMQHCMERLASLAKQVDQLAESEPYKDIVGLLKCFHGIKTLTAISIITEVFDFGRFSKPRDLMSYLGLTPSESSSGEKQKKGPITKSGNKRVRRLLVEVSWHYRHPYCISKTLKKRRNNQPQWVIDIADRTGHRLRKRYWYLINRGKMPCKAMTAVARELAGFIWSVFREYQARNMEKVA

SEQ ID NO: 207242 - protein, 387 aa, unidentified
MSLDVHDDMTQFAVMPAGESQVQHEDTCHTAENEILGRIRRLRKKWPLVVLYEAGRTGYWLYRKLRGKRIPCIVIDPGSIPDRRRRGNKTDRLDARKNAEMARSNLLRAVGVPDEETQGLRDLLRLHKALSSQITAIKNRITAQLARYNQKCPTCKTPFCGRWRAWLVNQVRLPTADAQAVLEAHYRHLLAAEAELGPADDRLEEATDRPRWRQACRFLQAIHGVGPMVALAILTSMQTPRRFAGARQFMSFVGLVPDVERSAGKGKGHPRITRHGDELTRWVLIQAAWQYVRCLHPSPAHEQQLAELPAWLAERIRQMETRLRKRYYYLTCRKCMIPGKAVVAIAREMAGWLWAICQELQEHGELEFAGPEQMPSFGPAAAAMKVA

SEQ ID NO: 207243 - protein, 338 aa, unidentified
MDLYCGMDLHGDNVYCTVMDQKYRPVFEKRLPNDMKLILNEMAPYQDRMASVAVESTYNWYWLVDGLQAKEYPVKLANPARMQENIGLKNANDKTDSRFIAKQLAMGVLPEGFIYPKEDRSVRDLLRRRMRLVHMRTSEWLSLEGLVARHSGKDLGITALNGLEAGELNALLGNDPLVLASAQICFRHIEFLAGEIRQIEKAVEGRVKLAANYERLLTVPGIGRILTMTIMLETGPIQRFPGPGNYASYCRVVKAVHTSNDRKKGAGNSKCGNKYLAWAYVEAANFAVRHSPELRAWYQRKAAKTKRVIALKALANKLSKACFFIMRDGVQFDVKKLV

SEQ ID NO: 207244 - protein, 309 aa, unidentified
MNNVVVYIGVDVAKASLDVAWAEHSRRFANNKSGLGALTKWVKQSPLAVHLICEASGGYERGLLDAAQQNGIKVSLVQANRVRQYARAAGILAKTDKVDARVLCAFGSTMQPEPRAPLSAQQKQLRELETQRRHLSRMLVAEQNRLAQLNDKELQRLTRSLLATLKRQMAAIDARIAGLIAQDQSLKEKAQKLTAIAGVGPRTAVLLLAQIPELGTLNRAQAAALAGLAPFNRDSGTLRGKRTIFGGRRALRCGLYMAALVATRHNLILRNFYQRLRSNGKPHKVALTAVMRKLLLALNHTLKPAASFA

SEQ ID NO: 207245 - protein, 416 aa, unidentified
MYYVGIDWADENHQVFITDDSAQRLSAFSIKNSRSGVEELFERIRYFVKDQKQALFALETSKGLLIDSILDAGYTVYPINPKSVDRYRDRYKVSGHKSDDFDAMVLANILRTDRHNYRPILPDSPITRELKILTRECCSLIRLKTMLSNQLTSCLKDYYPVALELFCKLDQPITLLFLKNFPTYQQAKQVSLPQWGKFLSKHHYRVGVKKKANEIYLKLQEPQFNVEPFVDNAKARYTLALVEQLQLLLAQIKSFENKIEQLLKQHTDSEIFLSLPGAGITLAARMVSEFGDNRERYKKVSSVQAEAGTAPITESSGNWKFVHFRSACRKSFRNTMHQFAFCSIKESPWAKQRYQQYVASGKKHTQSIRCLANAWLEIIFPMWKNYMPYSEQRHLLKYVKEQKPVNYSRNLNYLSV

SEQ ID NO: 207246 - protein, 482 aa, unidentified
MAQRKKSSFERLRSGALNRQDRRELKRRLSAEDPDLEVVHRDAAGIDIGNASHFVSIPPDRDEQPVREFGCWTAALQEMALWLKERGIRTVAMQSTGVYWIAVLEVLEQAGLEVYLVNARGTKNLPGRKSDVQECQWLRKLHTYGLLRNSFRPPEEICAVRTIWRVRDRWVQDCGRAVQQMQKALTTMNVQLANTISDLGGVTGQAIVRAILAGERDPWKLAKLRDGRIAATEAEIAHSLQGHWREDVLFELRQVVSAYDFFQQQMRDCDQELVRYTAAVASRVAPAKSELADDSVALPAKKLRRRPKKAKKNQPGFDLAAELERTMGVDLTRIDGIDVMTAQVIFSEIGPDFSAFPGEHHFASWLTLAPQRDLSGGKVIRHVKSAGRQRVANALRMAAQSLAHSDSYLGARYRRLRARLEGPRAVKAMARYLACLVYRLVTKGQAYVDRGAAHFEQRQQDRELLALQKRATALGLQLVAAT

SEQ ID NO: 207247 - protein, 381 aa, unidentified
MQTLSKTVAAKDTVQQPKLFVALELGQATWVVALHSPIADKISIHHIDGGDTDKLMALIEKKRVQAAKQLGRAVQVVSCYEAGRDGFWLHRFLIRRGIDNRVLDSASILVDRRARRAKTDRLDARALLRVLMALVRGEEQVCRVVRVPSIAQEDERRLSRERERLLHERNSHIARIKGLLILHGVRDYRLIERDWRERLDAVRTAEGQALPARAKMEIERECRRLWLAKQMLAEVEREIEQMIAHDGAVAGKLIRVRGIGPTFASVLTHEVYYRSFDNRRQVGSYLGLVSIPWQSGRVRRDQGITRSGNARARRCAIELAWLWLRHQPGSALSCWYRTRVGTMTGRMRRIALVALARKLIVALWRYLQNGIVPEGAALKTA

SEQ ID NO: 207248 - protein, 408 aa, unidentified
MEILHPRCAGLDVHKDSVVACVRCVTAPIHREVRSFPTTTSGLFALAEWLAAHGCTHVAMEATGVYWKPVWHLLEGRFELVLANAQHIRNVPGRKTDVNDATWIADLLAHGLIRSSFVPPARIQALRDLTRTRKQLVREIAQHTLRIQKVLEDANIKLGSDLTNVLGKSGRAMLAAIIAGEADPERLAALAVGTARRKHPALVEALRGRATGHHRALLQLHLDLIAALETALAKVDAAVGEALAPIHAHADTLTTMPGVSAVVAHVIVAEIGVDMARFPTAGHLVSWAGLCPRNDESAGKRRSTRVRKGANWLKTTLVTAAWAAVHKHDSYLRAQFLRIKGRRGAKKAILAVAASMLTAAYYMLRDGVAYRDLGGQHFDRRDKTKTIHRLVRRLAELGCQVEVRAHAT

SEQ ID NO: 207249 - protein, 404 aa, unidentified
MNNVAGVDISKGKSMVSVLRPFGEVVAKPFSVRHTGSELKDLANYLKSLDGETRVVMEHTGRYYEPVARFLHEEGIFVSAVNPKLIKDYGNNTLRKVKTDKADARKIARYGLDNWVELRQHTPMDTIRMQLKTLNRQQSLYSKTKTMMKNNLIALLDQTYPGVNVLFESPVRENGSQKWVDFATTFWHVDCVRSMNLTAFTERYHKWCKRHGYNFSQSRAVEIHTDAQDLIAMLPKDALTKTMVRQAIDALNAVSASLERLKAEMRTLAAQLPEYPVVMAMRGVGDSLGPQLMAELGDVTRFTHRNAITAFAGVDPGADQSGTHEAKSNRTSKSGPPELRRALFLVMNCLLKTRPEDNSVYRFMDKKRAEGKPYLVYMTAGANKFLRIYYGRVKEYLASLESAD

SEQ ID NO: 207250 - protein, 342 aa, unidentified
MSYESTYSTIDFQEYSMIFAMDWSFSTESAIARKRRGSNKIYQTKVASDIKSLLNYFSQFKGKKLLVLEETTGAQWLYVNLLKVIDRIIICDPYRNSLMKEGSKTDKIDALKLMHLLLSNSLKEVYHSNTDLYELRSFMSSYFDLDKAIVRLKNQIAAFKRSKGVRKNNKDFKPKSKLELFVYENQLSLLKEYEKKKAEYEVQMRRLIRRYPIANYLMTIGGVGIVISLTIYSTVIEPARFEDKYKYYSYCGLALLLKESGKSIKGKRRGHYNPLMKWAYKSAALAAISGKNDIHDYYMYLLGKGYPESVARNEVARYICRVSLAMMKNGTKYQPYSWRHAM

SEQ ID NO: 207251 - protein, 417 aa, unidentified
MNPHPKSIPIQRYIGIDIHKHYLMIGGQNRHQEWTLRPRKVQVSRFRDWAEKNFQPGDAVVIETTGSVWDIYDIVAPLVTRTLVAHARKVRQIAEARVKTDKEDIKRLITLLIADIVPEVWVPPMHVRELRSLISFRWRLTKQITMSKNRLHSVVQRFNLDPPEGGLLTDKNKSWWDRQEFSDLTGFQVDRDLEIVEHLEEQKAAIDQKLGELSNTEPWASDMVYLMQIPGFGLIFSMVVLSAIGDISRFSDPRKLVGYSGLGAGVHDSGKKHQSKSITKEGRKELRWALVEAAWRAVGSDPYWKAQLKRLEKRMHRNKAIVAIARRLLVSIWHILTKREPYHHFDEETIAYKMLIWSWAMDEKSRDGMTPQQFAKYGLLRLGIGQDLERIVRGGAPRRIASTEEILALKPELAPPR

SEQ ID NO: 207252 - protein, 349 aa, unidentified
MSCTLNTDIAVVGIDIGKNSFHVVGLDDRGAIVLRQRWSRGQVEARFANMPPCLVGMEACVGAHHLSRKLHGLGHDARLMPAKYVRPYSKGQKNDFRDAEAIAEAVQRPTMKFVATKTADQLDLQALHRVRERLVSQRTGIINQIRAFLLERGIAVRQGQRFLRAELPRILAAPTNVLSPRMVQVIEDLTGDWRWLDERIEGLSGEIEAIARQDSGCERLMSVPGVGPIISSAMVAAIGAGDAFSKGRDFAAWLGLVPRQMSTGDRTILGKISKRGNRYLRVLFVQAAWVVLIKPKSWERHGLKPWLEAAKKRLHHNVLAIALANKLARIAWSVLARGREFEASKLQVA

SEQ ID NO: 207253 - protein, 373 aa, unidentified
MNYNTVYVGMDVHKETFTLRYFTFDMTQPSAPVEVNADYKQILKYLDSVRRILGKDCQFLCGYEAGSLGYTLYRQLREHHVDCVILAPTTIPETRGKKKLKNDKRDSGNIAKALAYRTYSPVHIPSPQDEEVKEYIRMRSDHKIALKKVKQQILSFCLRHGYRYTATRHYWTQEHIKWLRSLPAEGVYKDILEEYMGTFTYLSDKIKRLDQKIEEFAQKEEYQEPVKKLCCFIGIKTLTALTTIVEVGDFKRFPAAWNFSSYLGLMPGEDSSGPKEKRLGITKAGNAQVRKLLIEAAQSYSRGSVGNKSRALKQRQEGNPPGVISYADRANERLRRKYYHMVLGNGKKANVAKTAVARELSCFIWGMMTDSTA

SEQ ID NO: 207254 - protein, 333 aa, unidentified
MQHFIGIDVSKANLDLALLDEAGNLLATERIINERRAIRALFKRWCKELGVEPGDALACLEPTGHYGYLLLEELLGMSMPTWLAHPLDIKHSIGATRGKNDQVDARRIADYARRYQDKARLVGPGSLKINKLKQLLTCRRRLVADKRRHQVLLKDLNRHMDKSLRALFDRFSRERIVQIDKQLGQLEKQILEHIRSDRQLEHQYQLLLSVEGVGPVLAAYLLATTEGFTRFANARRLACQAGVAPYEHSSGSSVHGRTRVSPQADRVLKTLLHMSALGVIHRPGELRDYYQRKLAEGKPPMAVINAVRCKIIHRLFAVIKRGTPYIKTPLQMS

SEQ ID NO: 207255 - protein, 449 aa, unidentified
MSRPQVIDDAEHERVHERVAAIDVAKDSGVVCTRTPHPSRPGSRRAAVWTVKARMNAIRVLGRQLRKDGIEIVTLESTSDYWRIWFFVLEGCGLAVQLVQASQAKNLPGRPKTDKLDAMWLARLTEMGLLRAGFVPPKAIRDLRDYTRARARLVRERTRCWQRMEKLLEGALVKVSAVASKLTTVSAQDMIKAMIAGERDPRTLAALARGKMKAKHDDLVEALDGMFDDHHGELARLLLDQIASLDAMIAQLSARAAELTAAMPAAWGVDPDGTTGPGAGTGPDAPLLNAVARLAEIPGISPDTARSIIAETGLDMSRFPTAGHLVSWAGLCPSARQSGTRTRAGKKGQGDTWLRGSLGQAAIGAARTATFLGERYARIARRRGKAKAQVAVARSILVIIWHLLSNPEARFTDLGYDYYQARTDTSRKLRNHIRQIQALGFDVTITQAA

SEQ ID NO: 207256 - protein, 369 aa, unidentified
MKKNSKNNKEKARQRALQAKSRKMKLTVGIDLGDEWSHCCFLGEDGEIVEECRVKTTREAVKSRFGELKLAVIALEVGTHSRWVSQMLSEFGHEVIVANARELRAISGSDRKSDRVDAEKLARYARVDRRILRPIKHRGEEAQVDLVVLRARAVLVKTRTQMVNSVRGMVKSFGYRMPKCSTERFVKLNNEVPEKLREHLAGLMEVLEHVQKQIEEYDQRVEKLAKEKYPETTVLRQIWGVGEITSVSYVLTIEDKGRFEKSRDVGPYLGLRPRRSQSSESDPELRITKAGDCFLRSLLVECAQRILSKKGPDTALKQFGLRIEARGKKKAKKRAIVAVARKLAVLLHKLWVTGEVYEPFPEATVRKAA

SEQ ID NO: 207257 - protein, 347 aa, unidentified
MKNYNTIGVDLAKNVIQVSVVSPSNKQLKNKALTRKKFAEFLAKQSSSLVAFEACATAHYWARVAKRHGHEIKIIPAKAITAFRQGHKTDENDALAVAEAAKRPNIKVAPYKEIAQQSMQAIQRSREHLVQERTALSNHTRGLLMEFGVFIPQGFAALTKAIPEILEDGDNELADIYRPTLHRLYQRFILLQNDIRFMDNEIKELIKHHDGCQRLTQMEGVGPISAVLLYASLGTGEAFKNGREFSAYIGLTPKQFSSGGKTNIIGISKYVANRRLRAVLITGARAYVHKMKEPKTAKDRWLWSLIQRAGYGRAAVALANKNVRTAWALLTQGTEYDKQHQAMLHAA

SEQ ID NO: 207258 - protein, 315 aa, unidentified
MEASGRFVGIDLGKRTYDMCLVEPKGKITRTNGKTDFKGIDKLCEQLGADDLVAIEACNLAMRIERRIRQTVGCKVYILNPGKLAVIYMSTRKTDKEDALKLAKLLKNHDEDELPIVTPPTDEEWERRKLLNEYKSLKGARTREVNKLHAIFEHAGYTQFKRKDMCCEKNRNNILPLLKGYEKEEAERLIERLSLLEKQIEQLLQKINAEVEKDDKVQLAMTVPGIGPITALAYVAYMGDLSRFENPHQVSNFLGFVPKIDHSCTIKRNGHTTKKGNALLRSLLVQAAWGTVRSKDGGALRDKYKNVYKVSWKKI

SEQ ID NO: 207259 - protein, 343 aa, unidentified
MNATTYAVDTAKNVMQLHWVELQTGEIRRRKLSRAKFLEFFAQRQPARVVMEACGGAHHWARALSALGWQAELLPAGQVRAFVRSNKDDAADARAIWLAAQHGDVRRVPIKSVEQQAVLSLHRLRAHWISVRTASINALRGLLYEFGVALPKGKGAALKALAERRCELQAQLPATMMRLLELQLRALDDVHSHVTALDVEIAEVARANAAAQRLDRIAGVGVLGATALAASLGDGRGWKSGRVFAASLGLAPCHSGTGGKVRIGGISKRGDSYLRYLLINGARSIVSQAHPPQWVAELLERRPFNVVVVALAHKIARQAWALVAHGREFDPKWVSVAPIRQPA

SEQ ID NO: 207260 - protein, 329 aa, unidentified
MKKEWFVGIDVSKKWLDVAIFVENSDLKGFIHTQVDNDKQGYRELLRWLKVHDVDAFTCTYGMEHTGFYSDGLQHFLDKKGCKYTMLEPAVIKHYPIQPREKNDRIDAAKIADYLFRFKDTIKMGRVPDNTMEELRNLHRERKFYVEDRVCYMNRKQVVGKEEAKRLDKMIAMLDKQIYSIEEKIREIIRNDESLMENYLYLTSITGIAFVNAVNAIVITQNFTAFKTARDYASYLGVAPHTKTSGTTVRWKPKPRKHCDLTAKADISQAAKIAVVHDVELKQFYERKCNGKEDADTIRKAMNAVKFKLVLRMFAVVKQKHSYRQFTTI

SEQ ID NO: 207261 - protein, 342 aa, unidentified
MAHYVGLDVSLEETSICVIDGDGQKVWQGKSSSEPGAIAKKVKLHAPEMTRVGFESGPLSTWHWHELHGLGLPVVCLDARQAKAALSLQLNKTDANDAHGLAQIVRTGWYRKIEVKSIESHLVRTLLTSRSKLVEVRTRLSNQLRGILKTFGLIVGKISGGAFEKRVRELTAGHIGLESIIESLLSVWRCTCDQIQGLDRQILAHARADEVCRRLMTAPGVGPVTALAYRAVIDDPGRFKKSSSVGAYLGLTPRRYQSGEVDRSGRISRCGDGLMRGYLYEAATVILGRMRKWSSLKAWGAKLATRVGAKKARVAIARKLAVILHRMWIDQTDFRWSASQKV

SEQ ID NO: 207262 - protein, 353 aa, unidentified
MKTYYVGMDVHRASIVIVVLNGAGKVVMQSVIETGAERVRGYLKQLRGKVYVTFEEGTQANWLHEVVRPLVTEVVVCDPRHNKLLTSGNKSDRVDAQKLAELLRLGSLKAVYHGDHGMRALKELVRTYDCLVSDTTRVMNRLKAIYRGRAIGCAGHDIYRQDRREQWLEKLTERGAKQRASFLYQQLAALKPLRHEAKRMMVKEARRQSAYPCLMSVPQFGSVSVAQLLAIVSTPHRFRSKRQFWTYIGLAVVTRTTADHEVVNGVLRRSQRPVSTRGLNRNHNHLLKRVFKNAAQGACHNGPFKAAYDLRVAQGMAPSLARLTVARQLAAITLAVWKRGEQFNPERMKQQAA

SEQ ID NO: 207263 - protein, 627 aa, unidentified
MDQSRAAPVHVGVGIDTARYGHHVAFLGEDRQEVSKDFSFLESGQGYTELEAALRKISQRYGGAVHFDVRIDAAGQYATNLEAFLRRLDLAMTLSVGEPKRNRDYKNVHYPKRKSDAVDSRACARFAIVERPKTSAEIPQAMGQLREVNRVLNAHSKQTTRLLNQLHNLLARVFPELATLIDRLSAQWVLELLAKYPSAKRIAAARSLSAIAHIDEQRAKEIQDLARTTTASLHGAVAEALVVAGVEAVRHSQQTERKIEKLLEQAYDALGEGGHQQLITITGIGKKTAAALAAKIISIDRFETPAQLVSYFGVFPEENTSGVDKHGKPVPKGTMQMSKKGNDLVRGLLWMACQSGIQSNPALRALYRRHRAASKRGDVALGHCMRKMLHLVFAVWKTNEPFNPTHYRWETPAHKDQDANSAEPVDSAAGCTPSACAANELAIATNELATRNTSDSAATHHGRSSGQQKKTAGRKEAMPPGKAVTAATNELATRKLSAASGPSKPAQLAAGAVLQPGGAIWVDFAHLRAQITMEQVLSKLGVLDRLRGQGPQRRGPCPIHGGEGNAGRPFSVHLSKNIFRCLHPACSTQGNTLDLWAAARHLPLREAAIDLARTFQLQLAPAKSATH

SEQ ID NO: 207264 - protein, 339 aa, unidentified
MDHVAIDLGSKKSQICVRDSEGEILEEKRWETWDLKRYLAGRPKSRVIVETCAEAFGVAALAKELGHETRIVPATLVRTLGVGARRTKTDQRDARALSEVSCRVDLPSVHIPKAESRERKTFCGMRDSLVGARTKVINTVRGWLRGQGRRLGKGSRATFTERVRAACGADLPGYVERQLRVVEALTAEIDETDRELEAQAEQDEICARLMTVPGVGPLTALRYVAAIDDVSRFPNAHQVESYLGMVPGESSSSERQQRLSITKAGPPALRWVLVQAAWALRTRCRQSTAVPLQLWAHRIELRRGKRIATVALARKLAGILYAIWRDGTEYDGARGAKMI

SEQ ID NO: 207265 - protein, 248 aa, unidentified
MITIGIDPHKRSLTAAALDPHSRVLSHLRLSATSQVGRQLLAWAQQWPERCWAVEGAGGLGRGIAQFLVAASEPVVDVPAKLAARARLLGTSSARKTDLADAASVAAAALHHRRLRPVALEDHTVVFRLLSDRRDDLVAKLLGHAGDITRFPDRDHFASYTGTAPVEASSGDLRRHRLNRGGNRQLNTALHLIAVCQIRDPSPGQAYYQRKLTQAKTPEEARRSLKRHLANVVYSHLVTDHRHRTRAC

SEQ ID NO: 207266 - protein, 341 aa, unidentified
MKTYIGIDLHKRTQTWVALAENGKDTLFKREFPVTPAGVEAGIKLSKSCGDNIVVAIEPTCGWLWVVPLLRECGIEVHISNPRKVKAIADSLQKTDENDATTLAQLVRTGIMHESREVTPEMQALRALIRERVFLVRLRASMKCRLESVVTRNGRHRILGSLSSKKGKTALIESGEAEWKRSLEVIADMGKYITQLDKEIATYSKQPIPTLLMTIPGVGIVTAVSMWAEVGDYARFASPEKLCAFAGLVPTERSSGGVQKLGRITKAGSTILRYILVEAAMRIRDADGSATLYQFYKTIRTTRGAMRARVALARKILTISWYMVKKNEPYQQRFTVEKKTA

SEQ ID NO: 207267 - protein, 349 aa, unidentified
MKKCSTVSFEGQVIFIGIDVHKESWVVNLRHCHRELDKFSMNPSPEMLAKYLRRNYPGAEYRSVYEAGFSGFWAHRRLCELGIQNIVINPADVPTSGKERDRKNDAVDSRKLARELENRTLEGIYVPPEDNLELRNLVRRETKLTGNITRVKNRIKGHVNFMGLKFGGWSGRSLKIMYADAEKRHDYALQSMLRELRFLREEKLHAIRDERQCLKRLKRDKIQGHLQSIPGVGFHTAVMLQAELWDLQRFEDKDALSSYVGFAPRLVGSGAHEVLKSAGNRKKKQLHAILIQAAWRSVLHNLEMRARYGALLHKGANPQRAISIIAKKLLYALRAVWLQERDYVVSANE

SEQ ID NO: 207268 - protein, 372 aa, unidentified
MNYNTVYVGMDVHKESFTLCAYTIDAEKGSHFQRTEADYKNVLKYLEFLRTVYGNDANFICGYEAGCLGYTLYHQLTEHDVNCVILAPTTMLEQRSKRRIKTDRRDAEIIGKCLAQHNDSPVHIPTATDEETKEFLRMRDDHKLALKKVKQQILAFCLRHNYRFDGNSHWTAAHIKWLKSLNPEALYKEILDEYLLTYTTLSDKVERLDKRIEELASKDEYRESVKKLCCFIGIKTHTALSVLVEVGDFQRFASAQNFASYLGLVPGEDSSGDGQTRLGITKAGNRHVRMLLTEASQCYARGQIGFKSKELKSRQAGNSPQVIAYADKANERLRRRYYKMVLGKSKKHNVAKTAIARELACFMWGMMTEHIA

SEQ ID NO: 207269 - protein, 411 aa, unidentified
MGDRITYVGLDVHKDGIVVALAEDGLRGEVRDYGRIANTPAALQRLVRKLGQEGVELRFCYEAGPCGYGIQRQLSASGHDCVVVAPSLIPKRAGDRVKTDRRDAGGLAKLHRAGELTAVWVPDPGHEAMRDLVRARLDAVRALRRARQQLSGFLLRQGCHYRRPAWTKLHRRWLAGLKFEQAVHHIVLEDYIATVEAAEARRDRLTAQIEAMLPDWTLAPVVAALQTMRGMALVNAATLIAELGDLSRFANPRQLMAYLGLVPSEHSSGASVRRGGLTKAGNSAARRLLIEAAWTYRFPARLSRELLLRQEAQPKPIREIAWKAQLRLCARYRKLARTGKPANVVTAAIARELAGFVWAIARRRAAPGARSRSGEPSQPLSAGSPIRCRLLDRGSSATHQRSCGSDPRIRV

SEQ ID NO: 207270 - protein, 410 aa, unidentified
MEVLYPHCAGLDVHKQTVVVCARHMVNGTVTREVRTFRTTTKDLLALSEWLAGQGCTHVAMEATGVYWKPVWHILSDGDFTLVLANAGHVKNVPGRKTDVNDATWLADLMAHGLIRGSFVPDIQTQELRGLLRTRKQFVRERSSHVQRLQKTLEDANIKLDGVISDIVGLSGRRMIEALIAGESDPEALAALAHRQIKASPAALREALRGRVTNHHRFLLQLHVQHIDALDAALNAIDREVDIHVESFREAVLLLTTIPGVSDLSAQVIRAEIGGDMSRFPTVGHLISWAGLCPRNDESAGKRRSNRMRKGAPWLKTTLIQCAWAAARKNGSYLQAQFHRLRARRGAKKAIGALAASILTAAYHMLKDGTLYHDLGPDHFDRRAKTVQTRRLLTRLQRLGYAVQITPLAA

SEQ ID NO: 207271 - protein, 319 aa, unidentified
MTQGDLVVVGIDVAKDKVDACIRTLTERKTCPTTVSGQRSLIAWLRKHQVGKAVMEASGGYERVWAKALRQAGIEVRIVDPKRVRRFAESAGRLAKNDKIDAEMIAWFAETFSEAPSQVDDPAHEEMKALVNGRKSLTDLRARLEMQKEHEAPALVRKAHARLLKKLADELATIDAAIVATIKATPAFAERAEIIRSVPGFAEATAVTLLAGLPELGQVSDAVAAALVGVAPYDDDSGKRHGQRCIKGGRRWVRNALYMPCVGAATLNNPVFKAFYERLIAKGKAPKVALVACMRKLIVILNTMIARGEKWDPKRYQVV

SEQ ID NO: 207272 - protein, 432 aa, unidentified
MPSKRNNSSVVSVVHEVCCGLDVHKKSITACLVYTNASEGERSEVLEFDTFTDDLIRLRDWLLDSECPVVAMESTGPYWTPIHNILEGYFQVILVNARHMKNVPGRKTDISDSRWLAGLLRYGLVKGAFIPPKYQRQWRDLTRMRKNYIASLGDFKRRVHKLFQEANIKIDSVLSDLFSLTGRNLMSLLISKESSPTFSEVQDCLRGSCKDKANEVYRSVKGFFEEHHRCLLVILLETIEKLQKQIEDLQVRISQGQRASKELIERLKEIPGVSEISAHSLLAELGSSLETFPTAAALSSWCGLCPGNNQSGGKRFNGKIRVKKHHLKTIMVEVAWSAIKTKGSYYKAKYYALKSRLGPKKAIIAISHRILKAIYYMIKNGVCFKDLGEAYLLERNRASRIRYLSKQATLLGLKLTPISQVATTPTMEMSSI

SEQ ID NO: 207273 - protein, 413 aa, unidentified
MQVVYQRCCGIDVHKETAVACVLTTQTDGTVQREVRTLRTMTGALEVLSQWLREHAVEQVAMESTGVFWQPVFNILEEGGHAVLLVNPQHMRAVPGRKTDVADSVWLADLLRHGLLRASFIPPAPIRHLRALTRYRATLVQERAQEINRLQKVLESANIKLAAVATNILGVSGQLMLHALAEGTEQDPAVLAELAKGKLRKKLTLLRQALEGRVKPHHRLLIARFLDHIAGLSEAVEQIEGEIAQSVLPFAQEMALLQTIVGIKQTAAAAILAEIGADMSRFPDAKHLASWAGVCPGNRTSAGKSKGSATTNGDVWLRGILGEVAWAAIRTKGTSFQAQYQRLVRRLGKLKALVAVMHSLLTVIYCVLRNRVAYHELGPDYLGPQEAERRTRQHIRRLEELGYTVTLAPKEVA

SEQ ID NO: 207274 - protein, 323 aa, unidentified
MNKDIKYFGIDISHLVFDVTDSDGNYHQFKNKLSGFKKFAKLLNSNSHCVKEATGYNHYQLAYYLLENGINVSVENPLSVKRFIQMRLSKIKTDKSDSKLICAYAEQVELKLRKGNSKNEIECLQIVRTLSVYTKQSTMLKNKIHGEAVLGNPSKIVVTSLKRSLRQLTKEIKTLEEMLLVLVKQSHQDLFTRLKTIPGIGPKTAIMLVFLTGGFDRFTSASELCSYAGLTPVISQSGSSVKGRPRISKIGNQKLRNLLFMCSFNACKYNKACRDLYERIVAKGKSKKLALIAVCNKLLKQAFAIAKSGLIYDAEYKSTLVKN

SEQ ID NO: 207275 - protein, 392 aa, unidentified
MDSPPPRHHSATVAFIEANGSEGETMKKHSSKHDPLSSTDVELCTTLCVDLAKQVFQLAGEDATGRVIYEDRIKSRQSFHDFLIKLPVTVTVLMECGPGAQAWARLLQAKGNPVRILPAQRVAEHRSGAKNDRNDTHAILRAGRDTSIASIPIKSITALAIQALHRVRRGNIKRHTALGNQIRGLLLEHGVSMPQGDAAINTHVPRALEDASLPLPGLLRELLDELLTDWLTLGERIATLSRRLEATAQEDEVAQRLITIRGVGPIIATAIVAKQTEPSRFASGRMYSAFFGIVPDQHSSGNKIRLGRMSKRGDGYIRSLMIQGAHAVLSQLRPDSDQPDDHRLLRWLSRLGRKEAAIRLANRNLRIIWALLQSDQVYQRKPNSNSEAAMSL

SEQ ID NO: 207276 - protein, 414 aa, unidentified
MLKIVYRVCCGMDVHKSFVVACIASTNEQGVTSYKSKRFSTFTGDLRRCAVWLSENNCKDVCMESTGKYWIPIYNILESTCNIVLAHPKYVKAIRGKKTDKRDAKWIADIFKHDLVAGSFIPPADIRQLRDLFRYRWKLTSFTTGEKNRAQNCLTVSNFKLDDVFSDVFGKAASAITVRILDNPAKKITDVSGFRTKHMKATDEEILAAVDGVMCEEQAEKLRIIRSHMDSLELCKLNLESLILATAEKYLPQLNLVMTAPGIQSFAAIGIISEIGVDMSVFPTSKHLCSWAGLTPQNNESAGKKKTTRISRAGAYIKPLLVQCALCAIRAKQFPEVRNRYLALKKRRGHKKAIIAIARMLLTVIYNMLKKNEPYNPELYRKDDRPPAHREVSVEEAIFILQRQGYLVTAPSTT

SEQ ID NO: 207277 - protein, 433 aa, unidentified
MVCFVDEGEGVVLEEDPQVEEIVARVAALDIGKAEVVCCIRVPHEDKPGRRLQEVVTHSTMTRSLLAMADHLRCLGVNRVVMEATSDYWKPVFYLLEAQGLDPWLVNAKDVKHLPGRPKTDKLDAVWLCKVAERQMIRPSFVPPPQIRRLRDVTRYRIDLVGVRTAEKQRVEKLLEDAQIKLSVVASDIFGVSGREMLAALVGGQTNPKVLAQLARGRLRGKLGVLEEAFTGHFTDHHGFLLGTMLARIDALDADIAALESKIEEIIAPFALAVNKLDEIPGIGATGACVILAEIGVEMSRFPTAAHLASWARFAPGVKQSAGRNKGNGTTGHGNRYLARALGEAAVAASKTDTFLGERYRRIAKRRGKKRAIVAVGRSILVIIWHLLSDPETRFTDLGSDFYDNRTGPERKKRNHIRQLEALGYKVTLQPTA

SEQ ID NO: 207278 - protein, 340 aa, unidentified
MKKVSTIGLDLAKNVFQAHGADASGAVIFRKKLRRAQVLEFFATQPACAVAMEACGGSHFWGREIGNYGHRVRLIPPAYVKPFVKRQKNDAADAEAICEAAQRPTMRFVAVKSEAAQGAAVVFRTRDMLVRQRMQIINALRGHLAEFGLIVAQGPAHVAKLIMAVQDPKQPLPEAARPILCVLVDMLGLLDQRIKLLDIAIARRAKEDEVARRLMSIPGVGPVIATAVAALAPPAETFKRGRDFAAWLGLTPLQHSTGGKQRLGATSKMGERTLRRLLIIGASSVVRWAARKGAPAGSWLASMIARKPAMLVRVALANKMARVIWALMAKGGTYRAPVVA

SEQ ID NO: 207279 - protein, 405 aa, unidentified
MKQASITKLFAGLDWASKTHAVCIVDHDGAIRARFEIANTGKTFAGLVKRLIKLGVAGVAIERCDGPLVEALLDAGLRVVVITPRQVKGLRTRYTGSGAKSDAGDAYLLADVLRTDGHRLTALTQDGDATQVLRALSRTRKQLVESRVGLTNQLRELLLRVFPGAVGLFARLDSDVAIAFLRRYPTQHAATRLTQARFAAFLRRIAYCGRKPVDELFARVHDAPPAGLTATEADGHAVCVLALLRAIETTRREERELEAEIIERLDAHADAHIFTSLPRAGHGVRAAALLAEIGDVRSRFPDEESLAALAGVAPVTRASGKMTSVGFRWAADKKLRNALIDFADDSRRASPWAKHIYDQAIARGKRHPHAVRILARAWTRVIWRCWQDGVAYNPHQHGGAIRLAA

SEQ ID NO: 207280 - protein, 351 aa, unidentified
MKEYIAFDSHKHYTLMEREDRQTARTVQLRVAHQPGAIRACLRNCESGTDVAVEATGNWYWIVSEIEQAGLKPQLVHPRKAKLMMGLINKTDKLDVHGLNRLQRNGTLPTVWIPPTELRDQRELTRTRLVLVAQRTRLKNRLQSTLAKYGLAVRDCSDAFGTVARSQWPELLAQLPEQTQWVSQQLLKQLDLLEEQIGQCEKRLNPLLKITPQIERLKSLPGVGLILGASIALEIGEVSRFASAEHLASYAGTTPRVHSSGDKLRFGRLRPDINRYLRWAFVEAANVVALHHQQRPERHVSYLYWRLKQRKGHAKAIGAVARHLAEATFHILSRQEDYVDPALRKGRSKPV

SEQ ID NO: 207281 - protein, 344 aa, unidentified
MIWIGLDVHKSYSRMGMFDPGSGAIQDLGTVRNEPSTLEEKLSELPSPQTVVLEAGRSSYHMAGLLEAMAEQVWIVDPGEVRKLQRRVAKTDRRDAAALAWWAAKGVIRPQWRPEAELLDLRELTRGKTVLTRLSTQVRTRMRGLLARHGYECPHRDLVGERGQLWLDEVELEGNAGRMLAALREILVLVQAKADDSERLVEQASATHPAAQRLRTIPGIGPFLSLALAAEIGDISRFPSPPHLRGYSGLVPAVYQSGDRDARGPLTKIGNAWLRYAAVLATQRMAQMRHPDPRLKRIFLSVAFRHGRNPGKVAAARRLLDLVYHLLKEEEDYQAPIARAASSA

SEQ ID NO: 207282 - protein, 312 aa, unidentified
MKNTVVHIGVDVSKSTLDIFSPSRKNWQEANTPTGHRALLKKLKLMDASPHLVCEASGGYEKSFAAALHAADVAVSILNPRQVRDFARSQGRLAKTDRIDAGVLADFGAKMLPTRTLPPTAAQQELAELMHRRSQLVASRQIETNRLEKITLPVLRRQSQTLLRCLQRQIAQVEEWIGKLVKSAEELERKVNRLTQVQGVGKITALAVLAHLPELGTLTDQSAAALAGVAPFNRDSGQWRGQRHISGGRPALRRALYMSALVAAFKNPILSPFYRRLIAKGKPPKVALTALMRKLILLFNRLLKNPNLLLAN

SEQ ID NO: 207283 - protein, 418 aa, unidentified
MIDDVQWFVGIDWATQSHRVCLLDVEGRHVSERDFAHGGAGLTELRDWLLEKTKAAPGQIAVAIETPHGPVVEMLLDHAFQVFAINPKQLDRFRDRFTVAGAKDDSRDARVLGSALRTDRHAFRRLAVDDPVVVELREWARMADELQQERTRLANRVRQQLWRYYPQAAELTDDVADDWFLALWQQVPTPATAAKVSEKTITAILKDHRIRRLDAATVLQTLRKTPLFVAPGTTEAACAHIRNLAARLHLVNQQIKEAHRALDGLCARLEAAPENPSGQIREQHDVTILRSWPGIGRIVLATLLTEATEPLRRRDYHALRALAGTAPVTRRSGKQCFVIRRLACNKRLQNAVHHWSRVAIQHDSAARRRYDALRRRGHGHARALRTVGDRLLYALCTTLQRQTLYNPDCQTAQTTASL

SEQ ID NO: 207284 - protein, 421 aa, unidentified
MEEITEEAVGLVERVAGLDIAKASLVCCVRVPHDSRPGRRRQQVRTFATTTGQLLELRDWLAAEGVTRCVMEATSAYWKPPFYLLEDAIAECWVVNAREVKNVPGRPKTDKLDAVWLARLAEQGMVRASFIPPPWQRELRDLCRYRRTLTQERTREKQRAEKLLEDTQIKLSSVISDIFGVSGRAMLEALIAGQRDPRALAQLARGSMRGKISTLVEALTGHFRDHHGYLLAMMLGRIDDLTAQIEQLTTRIGQAIAPFACQVAQLDEIPGIGTTGAQEIIAEIGVDMARFPTPGHLVSWAKFAPAARQSAGKSKPGSTGKGNPWLGGALGEAVIGAARTKTFLGARYHRLARRRGKRRALVAVGNSILTIAHRLLSDPAAHFSDLGPDWHDRIAPLHRKRQLIAELERLSGRKVLLQEAA

SEQ ID NO: 207285 - protein, 353 aa, unidentified
MANQRGGVVGGVDSHADEDHVAVVDLQGRLLDATAFPTTAAGYAQLISWLQSHGEVERVGVESTGAYAAGLVRALRTGDIRVVEVNQPHRHARQRLGKSDPIDAELAARAALSRTATAVPKQTSGIVEAIRQLQVVRTSALKARHAALQQLNDLIVTAPEQLRSELRRGRSMKAKAALCRTLRPDTQHIHDPTQAAKLALKSLARRIGELDREILGLDRQLELLVRAAAPRTTQLSGVGTQGASQLLITAGQNIDRFRSEAAFAKICGAAPIQASSGRTTRHRLDPGGDRQANRALHMIAVCRLRHCQQTKAYANKRTADGLNKREILRCLKRYIARETFHALRADLEALNGT

SEQ ID NO: 207286 - protein, 337 aa, unidentified
MKRYLGVDLHRTQFVVCTRWENGELEIRQWRIGELPKFVEQLRNEDQIAVEAMGTTARFYDAVAGRVTRVVVVNPHQFKVISESVKKTDRKDAQALALYLEKDLLPEVRMKPKQNRELMHLAETRDLLVKQRSALKGKINNLLAMQGIELKREALSSKIALARVLALPVSGMVQLELRILVEQVRALSESIAELDERLEEEGQQLPGYENLTSIKGIGALSATVLLTVIGKISDFADENKLAAYLGLVPKIANSNESERSGRITKQGNKLARTALVQCGLVAKRYSPYLSRFYERIKHRRGGGKAKIALARKLVKIVYDTLKNQWVFEDFPSFTLAA

SEQ ID NO: 207287 - protein, 345 aa, unidentified
MIIGCDFHPSWQQVSWLDTETGETGEQKLVHAEGQAQQFYQALSGAALIGMEATGNSQWFVELIEDLGHAIWIGDAAQIRASYVRKQKTDKRDAAHILKLLVEGRFPRLWAPDREQRDLRQLVLHRHKLVLIRSRVKNELQHLSLNKGMQKKRRLWSPAGLELLRQLPLKPWAGCRREDLLGLLTMLNQQISKLDRAVQQAAEENPQSKLLMTQPGVGPNTALAFVLTIGDVGRFRRGKQVASYLGLIPREASSGGRQKLGAISKQGNRMLRSLLVEAAQVAVVHDPGLRKQYHHRCHQKPKAVAKVAVARKLAVRLYWMLRTQTKYPEIVRIESSSGLPLVGAS

SEQ ID NO: 207288 - protein, 384 aa, unidentified
MSADSGPEQSAIRTDLGAIFVSLELSRATWLITSLSPGRQKMSKHQVRGGDTAGLLARLAELQSRAHARTGQLFPLIVIQEAGLDGFWIHRVLQSEGIESHIVDPASIATSRRRRRAKTDKIDGEALIRALLAYKRGEPRVCAMVKAPTPREEDERRIGRERKVLTAERVAHVNRIKGLLFAQGISDYEPMHRHRRARLDDLTTGDGRPLPQHLKAQVSRELDRFELLLEQLKAVEAERDALLAAAESPDKPALAALLLDLKGIGPEFASVLWSEGLYRSYANRRQVAAYAGLAPTPWQSGTVDREQGVSKAGNPRLRTTMIQLAWLWLRHQPGSALSRWFHERVARRGGLRKTMIVALARKLLVALWRYVTAGVVIQGATMKR

SEQ ID NO: 207289 - protein, 398 aa, unidentified
MAGKPKVVGGVDTHADTLHVAVLTMLGRKLADKEFHTDARGYWDAIRFMTGHGRVQSVGVEGTSSYGAGLTKALITAGLEVIEVNRPDRAARRRRGKSDPLDAELAARAVLSGNATSAPKDPTIEAIRALFNARRSAVKARAAAMNQITSLLVTAPDPLRAKYRPLKENPLVNALASCRPGGEDPIAAAVLTALKTLAKRHQFLTSQADELEAQVDVLVTAANPALRAAFGVGPNTAAQLLITAGGNPERLRSEASFAALCGAAPVQASSGKTSKHRLSRGGDRGGNCALHRIALVRMSSHPQTREYVARQRKKNKSTKAILRMLKRAIAREMLRLLTHQIPIDDYSDLRPARQTKNITVTAVAEIFDVWPTIISRLERGLYRNDVMAEQYREWLTAA

SEQ ID NO: 207290 - protein, 321 aa, unidentified
MQEWYLGIDVAKKKLDCALRLPNSKYKHKTFDNAPKGFEELRVWIFSFDVTQLHVCMEATGVYWEAVAEYLANHQYVVSIINPVQIKAFGASRLVRTKTDKVDAKLIADFCKENRPEPWKAPSLEEQALRAMVLRLDALQEIRTQESNRLDVARESVKDGIVSHIAWLDEEIKNLSKKIRDHIDSDPDLKDRKALLESIPGVGERTIALLLAFSLAPGRFTNARQVTAYAGLDPRHHESGSSVQHKTRISRVGHNLIRKGLYMPAMVTLYRTSWGKHFLARLSSAGKKPMVIIVAMMRKLLHVAFGVLKSGQKFNPDLHAA

SEQ ID NO: 207291 - protein, 411 aa, unidentified
MQVVYNRCAGLDVHKKTVVACVITPKSPSGWHKEIRAFTTMTQDLLKLSDWLTSHDCTHVAMESTGEYWRPVFNILEGNFEVMLVNARHIKAVPGRKTDIKDSQWIAELLQHGLLRASFIPPVEQRDLRDLTRHRSNFIRERVNLVNRVQKVLEAANIKLASVASDVMGVSGRAMLAAIVEGSASPELMADLAKGTMRKKHDLLIQALEGRVRPHQRFILAQLLCQIDSIDETIKCFDQQIEEYCRPFEQAVELIDTIPGIARRTAEIIVSEIGMDMSRFPSAEHLAAWAGVAPGNYESAGKTLSTSTRKGNRSLRTILVQAAHALAHTKTYLAAQFRRISGRRGKKRAAVAVAHSILTIAYHLISRQEPYKDLGADYFDKQRPESVKKRLVKRLEKLGYQVNLEPVPVAS

SEQ ID NO: 207292 - protein, 351 aa, unidentified
MQIVGALDVHRRQITFKTLEPASGESWRGRVSPAAREPLRQWLERFEGFEGEFVLEGTTGWRFVVEEIERAGHGVRLADPAETAARRGRKRRAKTDNSDCDLMLGLLLAGELPEAWIPPVQILELRTRVRLRKTLIDQRTAWLQRLQAQLFHQGVPPGLKPRTASGRQELASVELSPAGREAVELYLRMLDQLDRELAPIDRALQAFARRQAGCRALIGQLYGVGAVTATAILAELGDARRFRSSDDAVRHCGLDVTVWQSDRKRAAGHLSHQGPSVLRWALFEAAQCAARHSSPDHAYYLEVAKRIDHNRACLSVARKLCRRAHHILRELGDDALAPPDPARATLVDAAA

SEQ ID NO: 207293 - protein, 395 aa, unidentified
MEFLKYGLGIDMAMEKFDACISIIDKLQHVMIRAQCSFNNNKKGFETFILWVSKNTKLAIPAVYLMEATGIYYEQLAWFLHNKNCSVSVVLPNKAKKYKEALGLKSKNDRIDAKGLAQMACEQSNTSWKPLTSNIYLLRLITRQIQSISEQSTVFKNQLHALQYGMYRDKAIEKMHVRQLDLLQKNKKSLQLRVEQIVEKDEILKRKFKHIGKIKGLGLQNLAVIVAETNGFTAFENVAQLVSYAGYDVVENQSGKRSGKTKISKKGNSHIRRCLHFPAFNMITYEVAPFKNLYERVYEKSKIKMKAYTAVQKKLLEFIYILWKKDEAFDPNYQDKTSGDVEPAPSFASVPQEPSLTCGDQEEKTKPVKQKITPAITRVTQDKHPSKYRRMPSFA

SEQ ID NO: 207294 - protein, 345 aa, unidentified
MYNMLTGVDLAKKEIQVCVAKSNKIVRNMPMTPTAFSNWLATQKPMTVVFEACATSNYWYQCAREYGHDARLISAKLVSNIRQNQKTDKNDAEAVLQASQLSNVNFISGKSKEQQELQSLVRMHQLSVKHKVAYGNQLCSLLLEFNIKLSPTDTGLNSAIQSILEDAENGFSAIFREALHTAWHQYLKSIELVKHYEKSVARASRASEACKNLMKIEGVGPTNAVNLYLALGCCELGVFKKARDAAACIGLTPIQHSSGGKVRLGSIGKNIRNSSLRANLVAGAMSAVNQAVKRDSRTKKDEWIKGLVERRGKRCAAVALANKTVRTAFSLRRNGTDYKAELLSA

SEQ ID NO: 207295 - protein, 418 aa, unidentified
MEAIIEKCCGLDVHQATVVACLLTGRADQRPRREVRTFRTVTQDLRVMSEWLRSEGCTHVAMESTGVYWKPVYAILEGGFELVVGNAHHIKNVPGRKTDVKDSEWLADLLRHGLIRKSFVPPPPLRELRDLLRYRRKLVESGTSERNRLLSVLETANIKLATVASDVFGVSGRRMLEALIEGTSTPAQMAMLAKGRLRAKLVELQLALEGSVGEHHRFLLSMQLRRVKGVETELALLDERINEKLEPYRQQHMLLMSIPGVNWQVAAVLIAEIGTDMSVWGNVYRLAAWAGVCPGNNESAGKHKAGKARRGNVHLKAALVGAGTSASQKKGSYLRDKYFRLKGRRGALRAAVAVAHKILVAAFHMLSKSVPYNELGETYLDKLDETRATSNLVRRLERLGYVVDLKPKESLENANVFS

SEQ ID NO: 207296 - protein, 329 aa, unidentified
MNLSSPLPVIGIDVSKASLAVCYQVDQHLKHVEVPNTKAGFQQLVQACGTQCVFVLEATGSYYLALAYYLHEQGGQVAVLNPLVIKRFIQMHLGKGKSDRKDAQWLLRYGQQQVVKPWQPEETVLVECRQLEQVSEQLLKQKTMVSNSLEALQQQPVVSQLALKRLQQTWNQLDQQLHDIEAELLRLLEQRYPHEMNLLCSIPGIGRKTAGLLLLFAGGFTCFDNYRQLIAKAGLSPREHSSGTSIRGKVRITKMGGGLIRSKLFMCSFAAKKRNTACQALYDRLVAKGKNGKVALIAVCNKLLKQAFAIIKSGIPYQADFISKLALNP

SEQ ID NO: 207297 - protein, 351 aa, unidentified
MDVIGVDCHKEMHAAVLVDAHGHEQGRWQGENSLSGWHALVDWGYSHTTSVVWGIEGTGQYGRGLAQLLVASGQTVYEVNPRLTAAQRRVSRTRGKSDATDALAIARVVQQEPSLPVVQSVDATAVLAVQVAARAALVGDCTALRNRLHQHLAHLRVYRATPWPKLTSRTGVTALTDLQLPDADALAQAHAQQVRLLTQQMLLVMAQIDELTRSIETLSTGWTAPLQAVIGVGRLSAGMLAAHLGGKTFQTDAALAMYAGVAPLDASSGRQVRHRLNRSGNRFLNAVFHRIALSQAAHSPRARAYLAKHRANGKTAKEALRCLKRMLARLILTAWRQCQPPPLAHISLPLT

SEQ ID NO: 207298 - protein, 398 aa, unidentified
MISVGIDVSKEKSTVCILKPYGEIVRSPYEITHTESQIAELVSMIKCLDDEVRVVMEATGNYHLPVLSFLKEHGIFMAVINPLIMKKYASIILRKGKTDKLDSIKIANYGLDNWFHLINHESSEEIYVQLRLLGRQYGHYIKLRIESKLSLTTMLDYTMPGIKTMLKSRSDKPEKDKLNDFIEEYWHYDNITKKSENQFISNYKNWAKKKGYQQSEAKAIKIYDLAQQGIPTLSSNAPSTKMLVLEAVRVLREIDKTLALILSQMQELAKSLKEYTVVREMAGVGDIIAPRLMAEIGDIRRFHSGKALIAYAGIDAPPYQSGQFTGTRRRISKRGSATLRKTGFEIMKCLKSNKPESDTVYLFVLKKEAEGKASKVAKIAGLNKFLRIYYARVKEVYK

SEQ ID NO: 207299 - protein, 344 aa, unidentified
MVEYVGLDVSKEETAFCVKDKDGKVLASGKVATDPDALFAVLGKHCPCPARVVMETGTLSGWLARELRKRGLAVDVIDARQAHAVMRLQHNKTDANDADLLAEIARTGFCRPVAVKSEAAQEGRILLKARAHLVRRRRDTENTIRGLLASLGIRFPKGAGKLAGRVRAALAERPELKPAIEPLLSTVAALKGEIERLDKAVMARAKDDPACRLLMTAPGIGPVTALAYVATIGDAARFAKSRAVGAYVGLTSRRWQSGEMDYSGRISKHGDAMLRALLFEAANSLLTVVRRAHPLKDWARRVRKRTSHKKACVALARKLAVILHRMLITGELFRWPEKQAATTA

SEQ ID NO: 207300 - protein, 342 aa, unidentified
MQVTTIGLDIAKNVFQVHGIDAAERVVVRKQLRRRQVLEFFKALPPCLVGMEACATAHYWARELTKLGHQVRLMPAKDVKAYVKRNKNDAADAEAICEAVRRPTMRFVQIKSTEQQGRLMLHRARDLLMRQRTQVINAMRAHLAELGIVAAQGRDGIKELLKIIASEADARLPVDAHTSLVVLAAELQAMQTLIGSIEKRIMVQHRLSEASKRLKSIPGIGLIGATAIAATVPDPKVFGSGRDFAAWIGLVPREDSTGGKQKLGPISKRGDRYLRRILVVGACAVLRYARHKPEKYPWLTKLLERKPFKVVAVALANKMARIAWALLAKGDTYRVPALAAAT

SEQ ID NO: 207301 - protein, 321 aa, unidentified
MTYIGIDVSKATFVVSYSSARTGRTKTFKNTVKGVHEFIQTISAAEHHCVLEATGNYSALLVYLLSEAGITVSLENPLKIKNFARAMLTVTKTDEIDARLIALYGERMQPVPYKLRSDSILVLKQKRTVLRQLKKQLVATRNLKGSLEVLPSFDPECKKTIEKTIAFLEKQIKAMEEKITSLARGEYKKQMDLLTSIKGIGVTLAAALIVATGGFTYFDNAKQLTRYLGLSPTYQQSGTSVNVKGHINRNGDSNLRSQLYVAAFSSLRCNTECKECFDRLRSNGKPGKVAVVAVANKLVRQAFAVVKQGIPYVDGFKSERP

SEQ ID NO: 207302 - protein, 399 aa, unidentified
MRWSWVRLWFWKETQSRATSGKEPIMKKVRFLGLDVHAETIAVAIAEPEGEVRSLGTIANRAESIRKLVKKLGSPEQLRACYEAGPTGYVLYWQLAELGVACDVIAPTLVPMKAGDRVKTDRRDAERLARSFRAGDLTAVWVPDEGSEALRDLVRAREAAKQDQLRARHRLSKFLLRSGQRPAPGVKAWTQPYLVWVRQLRFKQVAQESTRLDYLHEVEHMGERVKRLEQAIAEAVKLASPALQEVVKDLQALRGIAQISAVTIASELGEISRFASPRQLMGYSGAVPRENSSGQRIQRGSITKTGNAHLRRIAIEAAWSYRLRPGVGPALRKRQEGVPEEIKEIAWKAQHRLHKRYMRLAAAGKDQRKIITAVGRELLGFIWAIGTKAEAATRQRMAA

SEQ ID NO: 207303 - protein, 350 aa, unidentified
MIIIGVDFHPEFQQIALLNTTTGEVEEKRLAHPDEAEKFYRALASANETVRIGMEASGHARWFERLMAELQFELWIGDAAEIRTRRVRKQKTDRQDAQLILRLMLKDDFPRIWVPSWENRDLRQLLWHRHRMVQARTRVMNQLQAVALNEGLHCKKKLWRERGRQQLESFALAPWASRRRRDLLELLDRLNPAIAELTQAIEREVENCPAAQRLRTHPGVGVLTALAFVLILGDAERFHCGKQVASYLGLVPLEESSGNRRRLGHITKQGSSILRFLLVEAAQVTVRSLPEWRSKYFHLVLRRGRKIAKVAMARRLAVQLFWMMRKQWDYEQLKKFGSHAGQPGNRHGVQ

SEQ ID NO: 207304 - protein, 430 aa, unidentified
MTKLYSTPPDAVLVAIDMSKHRQEVLLERPEGGRRRRMTVMATKADYDRLADDLTTIGRPVIVGFEATGNYHRTLAHRLLSAGCELRLISSVALARTREALHNGWDKNDSKDAQVILHMLKIGATQRYVDPLAAGINDLQEMSKTHEAISKAKTQTWHRILTHYLPLYFPEIERFAGNSRSDWFLALIERFPTPGSITSIGREAFTEQAWPLIGRKVSKARVVNDIYETACASIALPIDEDSTAVAMFRMVIAQARTLIQQRNEIERIADDALATNSDYQLLRMIPGIGPINALTILAEAGDLRRFSHHRQFLKFCGLDLATYQSGIFRGRTKLSKYGNARLRRTFWMATQVAIRQPNNSFRDKLSRYVDGHADDPDRRRKAMTALTAKMARVVHAVIKTGTEYRPFVERADTRWKDPSLLCREGATATL

SEQ ID NO: 207305 - protein, 426 aa, unidentified
MSERDYSKQVARRQRIGNRTLVVGVDIGSAFNAVGFMNKEGKVLGSYPKMANPREGFEEFVKITEGLKAKHGLSDVMIGLEPTGHYWRKFAYFVKAKGYEVRFVRTTALKHHRELDESSSAKSDKQDALTLTNITREGKYIDTVIEDGRRRQLRILVKLRERIQKRNVSAKNSLHAALDDYFPELKEIFWSMHARGLWALLERCPFPADVVPLRVSTLKELIGQASRRRAEASRKAMAVSQAAKESIGLKQIGSADRYRLRMCLEEVKRTELMIKDMEREIKRMLKDIPQAEYLLSIPGIGPISAAVFLGELGNPSYFPGARQVVKYAGYDPQESDSGYRVSRRFISKKGRWLLRKHLFLMSMRVVVLSRYFQEYYQRKLQTKNRFGQLPRKKEILCAVAIKLIKVIFALLRDQRNFEDTVACSVE

SEQ ID NO: 207306 - protein, 357 aa, unidentified
MHYVGLDVHARRSSLCILDSCGKVVKRLEVKGSWPKLMERVAAEVPRPFSVCFEASCGYGHLHERLSALAERVAVAHPGKLRLIFRAKRKNDRVDAEKQAKLLYLGQVPLVHVPGADVRAWRGLIELRRKLVGRRTAVKSQLRALLRGAGCCDAPAGKALWSKRGLKWLAAAALGEADALRRDLLLEELAQADERVGRVTRELDRRADAHPGVALLRTIPGVGPRTAEAFVAYVDDVRRFARTRQVGCYLGLVPCQDSSAGRDRLGHITGDGPATARMLLCEAAWQAVRRSPSVKAFFERVMHGEPGRKKIALVAVAHKLARSMAAMLRAGEAWREEVQEQGRGQGQDRGQGQEPGA

SEQ ID NO: 207307 - protein, 377 aa, unidentified
MGDYSEAFVGFDTSKLRNAIAIADAGRGGEVRFLGEIENTPAATAKLVRKLSARYERLTFCYEAGPTGYGLHRQIKGLGFECVVVAPSLIPKRPGDKVKTNRRDALSLAKLLRADELTAVWVPDGRHEAMRDLTRARETAMLDLRTKRQHVSAFLLRLGRPYPESRKTWTKAHANWIASQKLEHPQQRLVLEEMMLAVRQAQERLQRLEQALAAAVPEWSLASVVVALMAMRGMDMVSATTLLAEIGDLSRFRTPTELMAYLGLVPSEDSTGDTIKRGPITKAGNRRARRMLVECSWSYQHPPRVGQAKQPKVDAAPPAVREIAWKAQCRLYRRYRTLIRKGKLKTVAIVAVARELAGFIWAIARAVTAAPVAAASA

SEQ ID NO: 207308 - protein, 347 aa, unidentified
MNFYNSTHQHYCGIDLHARSLYVCIINQQGETRLHKEISANPDALIELISPYLDDLVLGVECMHCWYWVADFCDDHDIEFILGHALYMKAIHGGKTKNDRVDSFKIAALMRGGNFPLAYVYPRNMRATRDLLRRRTNLVRHGADLKAHVANTTSQYNLPPNKVNLKNVGAREQLNTTFHDPVVQRNINLDMAVLECYHRELSQVEWFLEKQAIKHQPAYFYLLKTIPGIGRILALTILYEIGDIQRFESVQKFASYARLIKCKAESAGKTYGTQGNKIGNAHLKWAFSEAAVLYLRGNSGAQQLLQRFQKRMSKAKALSALAHKLGRAVYFMLKNEKIFDEQRFLTS

SEQ ID NO: 207309 - protein, 415 aa, unidentified
MNNTISDIDIDLTAVCEAEDDAAQAEAQPAQNESDETYAQAVQEKLALARSRANCRYIGIDLHSNNIWLSVIVNEQRPSGSVGKVIFSRSIGTQRVDGTLPEDLIKPVLERFCKDQPHIACVEATYNWYWLADLFEKNGWNLVLADPSTVSEAKTKAADDRKDAEYLADRLRYNALRYTVIMPKQLREIRDLVRTRGTAVEQRAREKIIVINKLTNLIGRKITGKELKELIKEHAEFGTQAPMLLNWGLTEEVRCILNYHLAMATNIDQEIQKLEEHINAVGKNLRYTKELQKMPGCGPVISSILASEIGSIRRFATAANFVSYCRLASTSKLSNGKSKGLGNAKNGNAYLSWAFTELATLMVRYSEAAKRHFEKLMRKYGQLRVKAIRVLAAKLARSVYQCLSKNEPFDVLRCF

SEQ ID NO: 207310 - protein, 374 aa, unidentified
MLLPRQRFMLAKGTKDKEHAMSQTLKSAIAVIGIDIGKNSFHVAGHDERGAIVLRQKWSRGQVEARFANMPPCLVGMEACVGAHHLSHKLNSLGHDARLMPAKYVRPYSKGQKNDFRDAEAIAEAVQRPTMKFVATKTADQLDLQALHRVRERLVSQRTGIINQIRAFLLERGVAVRQGLRFLRIELPRILATPPDVLSPRMLRIIEDLAGDWRRLDERVEGLSKEIEAIARQDAGCERLMSVPGIGPIISSAMVAAIGAGDVFTKGRDFAAWLGLVPKQISTGDRTILGKISKRGNRYLRVLFVQAAWVVLIKPQSWERHGLKSWIEAAKKRLHRNVLAIGLANKLARIAWSVLAHGRSFEASKLAAAVTQPD

SEQ ID NO: 207311 - protein, 366 aa, unidentified
MSTIAREAERDQPRLIKVAAGVDTHQDTHTVAVIDTAGRLLEHHTFAATGRGYADLLAWVRSFGLLLVIGIEGTGAYGAGLARHLQAAGVSLVEVDRTDRKTRRFAGKSDPLDAEAAARAALAGVRTGLPKVRDGHVEALRNLRVARRSAIDQRADCMRQIKTLIITANDLLREQLRSLPDRDLLATCVGMRPDRTRAGDPVQAAKVALRTLARRHQQLTEEIADLDKLITPLVTAINPALLELNGVGADVAGQLLVTAGQNHQRLRSEAAFAMLCGVAPIPASSGKTHRHRLNRGGDRQANAALYRIVLCRLRWDPRTQAYMRRRTEEGLSKKDIIRCLKRLIAREVYYVLTATNLPSQQTPKAA

SEQ ID NO: 207312 - protein, 365 aa, unidentified
MQKISTMRTSGKNIFQGQLTMGVDLGDRSSAYCVLSEAGAIVLEHKLATTPETMKQVFGSMPRCRIAMETGTHSPWVSRLLTALGHEVIVGHAQKVRLITKSRRKDDRLDARTLARLARIDPELLSPVKHRSAQAQLHLTEIRARAGLVSARTALVNAARGLVKSYGERLRKCGTQQFTREITSGLSAGLREALQPLLREVESLNEGIQEYDRRIAKMAKQTYPETALLKQVKGVGDVIATAYVLTVEDPHRFRKSRDAGCFVGLQPGRRNSGDSEPQMHISKEGNEYLRTLLVQGAHYILGPFGEDSDLRRWGQKLAARGGKNGKKRAVVAVARKLAVLLHRLWVSGEAYEPLRNSQKAMSAAA

SEQ ID NO: 207313 - protein, 352 aa, unidentified
MRRSPAILPRPVPASTPVRGTAVAPPAAPIPPAAGAPTAVVVGIDVSQARLDVAVRPAHPSVPAQVTNAPEGIAQLVAALTGLAVRQVVVEATGRLELPVIVALSGAGIPVARVNPRSARAFARSIGQLAKTDALDAAVLAHMGTALDLPVRPLPAAEQQDLAALVGRRQEVVAMRVAERNRRRIAPARLHEQLDDHITWLTKQIAALDTDIDTVLAASPVWSEQRDLLRSVPGVGPVVSATVLAVLPELGTLSRKHIAALAGLAPLNRDSGRMRGQRHIWGGRAAVRTALYMAARVAVRFNAAIAAFGQRLAAAGKPDKVVIVACMRKLLTIMNAVVRDHRPWQPPATPSP

SEQ ID NO: 207314 - protein, 340 aa, unidentified
MCVYTGLDLSRKRLDWYACRVDGTVVDAGAVTPDLDGLAWLVHRLGDGDVLAVIETMNGARFVHDRLELAGWDVRIADAQRARALAPLACKTDRIDAQVLAELARRDLVPEVWLPDPRVRGERERARFRLHLVKHRTMLKNRINQTLVAHGLGRPTRHLFGPKGRAVFERLPLPEPWQGTLRASLVLIDSLDEQIDELERELRALGADHPYVPLLRTAPGIAWILAYTIASEIGDINRFPTPRKLIGYTGLCPRVYQSGETDRRGALAKNGPNYLRWALIEAAHTAGRTSHYRPIIERMRDRHGRRRGSAIASVEIARRLSEAIWWMLTRNQPFAPAGAL

SEQ ID NO: 207315 - protein, 388 aa, unidentified
MIYVGIDIAKLNHFASAISSDGEELIKPFKFTNDNDGFQLLISKLDPLDKDSLIIGLESTAHYGDNLVRYLVAKNYKVCVLNPIKTSTMRKNNIRKTKTDKVDTYIICKTLMMQESLRFVTFYDLDLMDLKALGRFRQKTIKQRTRLKIQLTSYVDEIFPELQYFFKSGLHQKSVYALLKEAPTPEAIASMHMTHLAHLLKVNSHGRFNKEMAQQLRVLAQKSVGASDSSLSIQVTHTIQQIELLDSQLERVEAEMTEIMKFNDSVIMTIPGIGYINGGMILGEIGDIHRFSSPNKLLAYAGLDPSVYQSGNFQAKKTRMSKRGSKVLRYALVNAALNVVKNNATFKAYYEAKMAEGRTHYNALGHCAGKLVRIIWKMMTDNVKFNLG

SEQ ID NO: 207316 - protein, 339 aa, unidentified
MDLGDKISDFCVLDAEGRILEEARVASSPEAFARDLARFSGARLFLEVGTHARWAVETLESQGIATTAINPRQLKLIAESRTKTDRKDARILAELGQSIPQYLGPVSFRSREAQGDYRLLQSRDQLVAQRTAIVLMIKGQAKAAGVRLTGATPVFHKDLLPKIPPHLAASCVPLVKVLATLTKQIREIEKELKRLSRERYPVTQLLQQICGVGLITSLAFVLVVRDPKRFTNRRRLASYIGLAPAQRSSGDSNPQLGITKHGNPYLRRILVQAAHYILGPFGKDCDLRRWGLALCERGGKNAKKRAVIAVARKLATVMLALWKNGEDYDPFYKERKLVA

SEQ ID NO: 207317 - protein, 343 aa, unidentified
MKKVIKQVLGIDVAQLELVVCLGRMYDTSQKELYGYKTFANTAKGFESLLGWTRKLTQKDVDVLYVMEATGVYHERFAYFLKDHDQLVSIVVPNKISNYAKSLTIKTVTDKTASEAITQFGLDRMLDQWEKPLPVYKKMKQLTRERDQIMTECTLVKNQLHAEKSEAEPNKNSISRIKKRIELMDKQQSAIMLEIKELVKSNQQVTEMIGIACSIPGVGLLTAATILAETNGFDLINSRRQLTSFAGLDVKEKQSGTSIKGKPRISKSGNRYLRKAMHMPSLSIIRHDENSKNVFSRILVRHGIKMKALVAIQRKTLELVYTLCKNKTKYDKEYIKSLETANV

SEQ ID NO: 207318 - protein, 355 aa, unidentified
MNSSKYVAMDVHTATISVAVRDAAGKLIMESVIETKSSTILQFIQGLRGDLYVTFEEGTWAAWLYDLLRPHVTNIVVCDPRRNALLNEGSKSDRIDARKLSELLRANLLRSVYHGENGLRTVKELSRAYLTIGKDLTRVMNRVKAIYRGWGIPCAGKSVYHPHHREEWLRKITQASVRRRAELYYEQLDVLVVLRKQARQELLAESKKHKAWKLLRSIPALGPIRVAVLMAIVQTPHRFRAKRPLWKYSGFGVVTHTSADHRYVNGQLERSKRPVSVRGLDPGHNHQLKYLFKSAAIQASTAKGPFQEFYEALVAKGMRPEMARLTLARKIAVITLTVWKKGAAFDAKYLKSQTA

SEQ ID NO: 207319 - protein, 309 aa, unidentified
MAIIDESGKRIFKEKLPNEIATITDRLSLYSGTLEGVVVESTYNWYWLVDGLMAEGFAVHLANPSAIQKYSGLKHADDKHDAFWLAEMLRLDILPTGYIYPKDERPLRDLLRKRSHLVSLRSSLLISLQNIISRNCGMKMKTNDIKRLRENRVHPLLADNEDLALAGQVSKDSIDFLTRQIRSIETFIEKKIELKDGYKNLVTICGIGKILGLIIMLESGPMERFEKVGNYASYCRVVSSQWTSNGKSKGKGNKKNGNKYLSWAFSEAAEFARRFDDRARTYYNRKLRKTNFMVAHAALIEQGVSGLHL

SEQ ID NO: 207320 - protein, 443 aa, unidentified
MRTIGLDVHREFAEVAIIDEDGVARAAGQVETTPEALRLFAASLAATDEVAIEATVNTFAIAALLEQHVARVVISNPLRTRAIAEAKVKTDKVDARVLAELLRAGYLPGIWCPDEKLQALRRLVARRSGIVRERTRLKNQVQAILHRNLLPRCPAADLFGKKGRGWLAEQPLPVDEEIAVASALRRLDVAGEELALVDRELAQVGLRSEEVKRLLTIPGVDRTVALSLVAAVGDIARFPDSRRLVSYLGLDPRLRQSGREPARHGRISKQGRAQARGMLVEAAWACSKTPGPLRAFFLRVRARRGEQVAAVATARKLAVLCWHLLSRGEDYAYARPSLVAQKLRALELAAGAPSRRGQRGSTYAYNLKHVRARERALSEQAELAYEKLTARWQKRRPEQGAGAATGERLSRPPSGNPARRGLHPLAPLFGPGSPAPTPKPNAR

SEQ ID NO: 207321 - protein, 350 aa, unidentified
MMIGVDYHPSFQQIAFLMEETGEYSERRLNHSDGEAEKFYRDLLLRGVHVRVGMEATGYSRWFERLLAELGFEVWIGDPAEIKAKRVKKQKTDRKDAQLLLKLMMEDRFPRIWVPSPENRDVRQLLWHRHRLVQMRTRIMNQLQALAMNEGRRWKSKLWSEQGRAELEKLTLAPWASRRRHELLELLDRMNPTIEELTAAAEQEARKRPEALRLMTHPGVGPLTALAYVLIIGTPSRFHRGKQIGNYVGMIPSEDSSGGKQRLGHISKQGNSLLRFLLVEAAQAAARNNPDWRRRYIHLAMRRHKSIAKVAMGRRLGVRLYWMWRNGCEYSPSMEFGSYAGQLGTGHGVK

SEQ ID NO: 207322 - protein, 348 aa, unidentified
MTAYHVGIDLHKSVAQVCVLDAKGELHEERRFDLPDLAAGAELVAWLATWSAKSCFAVEAVGCNRWFVRSCREAGLDVLVAHPAELALKQNGRKTDRRDAREIARRLYLGDLQRHARSYFPTEEEYGRRKLLRAKHKLVSMRTSLQAQIRGLLNAHLLRPPGYDLHGRKQIAWLQAQDLGEANQTLVLHTLAEALAGIQASVAKLQREIEREARSDADALWIQQLSQAGPQTALALKAELGDATRLRGARQAASYAGLAPRVNNSADRSHHGRITKRGNTELRWIVSQWAVRLLAFNERVKRWARPMLKRMHRNKVRMALARRLLIGVWVTFSRGEVFDMERCLGQHA

SEQ ID NO: 207323 - protein, 307 aa, unidentified
MNIHPGFVGIDVSKHFLDVFDNGRVERISNTTEAIAALVARWHESFVLFEATGRYDARLRKALEAEGVSFTRVNPARARDFARATGRLAKTDAIDARMLAAMAQSLSFARERESDSEREALARAHKRRDQLVHMRKQERTRFSECDDLELRADIEAHMHWLDAQIVRWDAEIDRLLKCSTALAQRARQLRSIPGIGPVAAATLLALMPELGTLSAKTVAALAGLAPFNVDSGKYRGARKIQGGRKRVRDALYMAAVAASRCNARLKILYQRLRSAGKPAKLALIAVARKLAITANAILRDKSSFRPA

SEQ ID NO: 207324 - protein, 355 aa, unidentified
MIIIGCDYHPAFQQIAFVDTDTGELQERRLQHREEAEKFYRELAIQGMKVRVGMEASGHARWFERLLAELNFELWIGDAAEIRAKRVRKQKTDRQDAQLILQLLLEGRFPQIWVQSWENRDLRQLLWHRHRMVQARIRIMNQLQGVALNEGLRCKKRLWRESGREQLEAFRLARWASRRRHDLLELLDRLTPTIAELTQAIEQEVEKCSATQRLRTHPGVGPLTALAFVLIIGKADRFQCGKQIASYLGLVPLEKSSGNQRRLGHITKQGSSLLRFLLVEAAQVTARSLPEWRSKYYHLSMRRGRKIAKVAMARKLAVRLYWMMRKQWDYGQLTKFDSQGRKLSSHNVVTTGSTR

SEQ ID NO: 207325 - protein, 460 aa, unidentified
MIMNKKNQKTFIIEEGFDMINPDAAGIDIGSKIHYVCVPEGRDNERIRSFGCFTEDINKMASWLKKCKVKSVAMESTGVYWIPVFQILEQAGFEVNLINAQYIKGVPGRKKTDVEDCSWLQKLHSYGLLKASFRPNDQICVLRSYIRHRARLTENASTHVLRMQKALTEMNIQLHNVITDIMGITGTAIITAILEGQRDPLELAKLRNERIKSSEDVIAKSLQGNYREEHLFILRQEFESYQFYQNQIQALDKVIEACYQTFDQQGNREPLKTKKKPKSKHTPPFDLRERLYVLTGVDFTAIPGLNELTVQTILSEVGTDMSKWETEKHFTSWLGLSPTNKISGAKVLSSRTRKVKNSAATAFRIAACCAGKTQTAIGAFMRRIKSKAGSPKAITATARKIACLFYRLLKYGSDYVEQGLEYYEKKYEENLVEKVKKAAKRLGYELVKNLEKPAMEANVS

SEQ ID NO: 207326 - protein, 317 aa, unidentified
MAQNGRVVVGVDVAKDKVDACIRSLSQRQTFPNTAPGHRKLAAWLAKHQVNKAAMEASGGYEREWAKVLRQASMEVRIVDPKRVRSFALSAGQLAKNDTIDAEMIAWFAETFSEAPGRPHDAARQELAALVKARKRLIDLKTRLQVQDEHAASGPVQKAHARVLKSLTSEIAKLEGAISVKVKSTPEFAARAEIIESVPGLAGTAAATLIAGVPELGQVSDAIAAALIGLAPYDDDSGKRRGERHIKGGRRWVRNAIYMPCLGAATLNNPVLKAYYQRLIAKGKEPKVALVACMRKLIVILNTMIARGEKWDSSRYA

SEQ ID NO: 207327 - protein, 356 aa, unidentified
MNKIIRVGIDLAKHVIQVHAVDAAGKVVTNRALKREKFLLWCADLPVGCLIAMEACSGAHHWCRKLTERGFDARMIPASSVVPYRIQGRTGKNDANDAAAVCEAASRPHINFVPPKTLAQQGMLCVHRLREGFKEERTSCINRIRGLLAEFGVVLPQSPDVLRHHLSDVIEDASNDIASIARLVLQRAQDHWRELDAHIKWCDQRIADHQKTDAQVQRAAELMGVGSITASAVVATVGDFRQFKNGAQFAAWLGLTPKQNSSGGKSSLGSITKRGSIYLRTLLIQGAKAIALTRQYDNPIFLWVQKLRERAGWQKAVVALANKNARILWAVMTREKRYDAHHISSYPAPVPIMTPA

SEQ ID NO: 207328 - protein, 424 aa, unidentified
MRVVGLDIHRVFAEAVMLDGEDIVRLGRVGMTREHLVAFARTLTHDDHIVIEATGNAAAVAAALAPHVGQVIVANPRQVRLIAEARVKTDVIDATVLARLYASGFLPEVWVPDAPTQALRRQVTRRMQVVRQRARLKTIMQSILHAHLVPPCPHADLLGPKGRNWLLVQTLPPDEADAVQRNLREHERLTDDLHVIEREIARDALANPDAQRLMTVPGIDMVVAVGLLAAIGPVTRFEAPDKLGSYLGLNPTVHQSGEGRPRHGRISKQGRTHARTMLVEAAWQAVRGPGPLRAFYERVARRRGVHIAAVAVARKLAVIVWHLLRRGEDYAWVRPALHAKKLRDLELRSGQPARRGQRGAADDYNLMRTRDGNEEIELSFGGLNLGDVDVEEPDRIGLEFLFDRGLPLHLGRTGDPVTLQTAMQ

SEQ ID NO: 207329 - protein, 322 aa, unidentified
MNRKTFVGIDVSKDTFDVAILSDDRIVAKANFLNSKKGYTQLSKWQKKYDLNPHICMEATGHYSEPIAEYLLAAGFKVSVENPYKVKQFSRMRLTRNKNDQLDAEIIARYAQQMLPADFKPRSKVQKEIRELSQLIDTLKETLVRLRQQLASAQTAIAKTSFKQMMTQIKRQIEKVQIKLDDIIETHDEFKEKVDLLKTIKGFGRDSAITLLAYLPDISLFPSAKSLAAFIGLSPRQNQSGRYVGKTHLCKFGSPRLRRIFYMPALSAKRFNEALQPFVRRLEEKGLAPKAIVGAVMRKLVHIIYGILKHQRPFDPSLACAA

SEQ ID NO: 207330 - protein, 448 aa, unidentified
MKKSKTENESVKRITQLPVINFTAAGIDVSGSEMMVAYPINSEEIVVKSFGTFTSDLHLIAKSLKSAGVTSVAMESTGIYWVSLFLLLQEYGFEVSLVNATHVKNVTGRKEDESDAVWIQKLHSCGLLNASFQPDAMTRSLRSIVRHRKNLVRTSASYINRMKKALELMNIKVQTVISDISGKTGIQIIEAIIAGERNPEVLADMRDYRIRASREVLIKSMEAYWTEGHLFELKQCYQMYTIHRQMIGDCDREIEKLLIEQIASMKEGLIPEKLEDKRKIVGNQKIPFNLTAYLTEILGVDVTQISGISEINALTIMAEVGADMSRWKTEHHFTSWLGLAPNTKISGGKIISSKIMKKRHHAGQAFRISANSLNRVKNPLGDFYRRIRYKAGAAKAVVATARKLAIIYYKMVSTKESYNPNALLEYQQRYKEKKINHLKKKIAALEAA

SEQ ID NO: 207331 - protein, 370 aa, unidentified
MRRQEAALARRDTLAAVMKNKIPTITIGLDLGDKKHAICVLNKAGEIVEERSITNHRESLRRLSQKYPKSRIAMEVGQHSPWTSRFFESLGHEVIVANPRKLRAIYTSTRKSDQSDAYMIARLARVDPTLLHPIQHSTEEAQRDLLQVKLRDNLVRQRVDIISSVRFTLKSMGVMVASPNTNCFAKRCRKTLAAVDPKLLAMCEASLRVVDELTKSIRELERKIEELCVESYPETEYLQQIAGVGPITALSFVLTIGDPARFESMRDVAPYLGLVPRRDQSGETDKQLGISKAGDAYLRRLLVSAAQYILGPFGPDCDLKRHGLQLAARGGRCAKKKAVVAIARKLSVLMLTLWYNEDIYEPLRNDTLAA

SEQ ID NO: 207332 - protein, 316 aa, unidentified
MDGANQVSVGIDVAKATLDLHLLPSGQAHTLPNVKAGFQQLKQLLPNPARCLIVLEATGGFEREVVAELIDAGYRVAVINPKRARDFAKALGLVAKTDRIDARVLALFAEKVQPAPSEKTPEKQAEIEQLVARRRQLIELKTQESNRWDVTYVKAAKNSIQAVINTLEAEIRGIEKIIEALVESDDEWRNKAQLIQSVPGLGSVTAATVMADVPEIGKLNRQQISALIGLAPYNRDSGAMKGKRSISGGRKSVRCVLYMAAIAARRCNPVIKAFADRLAQHGKPFKVIITACMRKLLVILNSIVKSGRPWIAQTTS

SEQ ID NO: 207333 - protein, 419 aa, unidentified
MLKIVHPVCCGVDIHKKFIVATIASTNFSNITTYQTKKFNTFTRDLLSFNNWLVENQCPVVCMEFTGKYWIPVFNILEHYCSITLANPRFAKNIPGKKTDKRDSVWLADLNKHGLVPGSFIPCKAIRELRDLFRYRDKLTNFSSSEKNRVQNSLTVSNIMLSSVVSDTFGKSSLDIIKHLISYPGDTSFDYTSMLRKKLKDKAVEVGKAIEGRISQEQALKLAVCFNHPTNIQECIGVIDNAIHNLIQPYKELIEVLATIPGITEKSAAIIIAEISTDMSVFHSSKHLCSQAGVTPQSNESAGKKKSVHISHAGVYIKPLFVQCANAAIRDKNCPVFKYRYEDIKKRRGLKRAIIAIARMMLTCIYNMLLKKESFNASLYEVSSPASKESKIDSIQQAILFLQRNGYNVDTLQLAVKAN

SEQ ID NO: 207334 - protein, 449 aa, unidentified
MEQSLKGISLDCIELNAAGIDVGATEVYVAVPPGRDREPVRRFKTFTEDLRQMAAWLVQCGVTTVAMESTGVYWIPPHEILEEAGIRVCLVNSKHVKHVPGRKSDVSDCQWLQYLHSVGLLKASFRPDSQICAIRSLSRHRAGLVESAAVHVQHMQKALTQMNLQIHHVLSDITGLSGMAIVAAIVDGERDPVRLAALCQRGVRSDQQTVIKSLVGNYRPEHLFTLKQSLVAYRHYQQLMAECDREIEQLMQRLDSRIDPQQNGPTPPANKGKRKRRKNQFYFEMAPELHRIFGVDLTAIPGISALTAHTLLAEIGPELNRFPNAAAFASWLALCPANNKSGGKVISSKTRQTNSRASRALRLAAQTLARCRSHLGNFYRRMRARLGAPQAITAAAHKLARIIYHLLSTGQTYDETIFLNEDRKQAQRHEKRLRKQANALGFQLIPIAA

SEQ ID NO: 207335 - protein, 337 aa, unidentified
MTPVEFRPATKLGIDISKLYFDVALIKLPVKGHESASEHAQFDNTPDGFKQLTAWLKARRVKQVHAGMEATGRYGDALALWLHTHGHVVSVINPAYIHDYAGSRGRRNKTDALDADLIARYCVKESPAVWSPPTPDLQDLQALLKCLADLKTMRQQESNRLKSIIPCAQAAAVVQRHIDFLDQQIKSLEADTKTFTKSVPTFWSQFKLLITIPGIGPLTAMRLVAFELLRFDDADAAVAMAGLNPSESRSGSSCQRKTRLSKHGHAHIRMALFMPALTALTHNPCVRDLAARLEARSKHPMVILCAAMRKLLRLAFGVLKSNRPFDPAYSSRSPQIA

SEQ ID NO: 207336 - protein, 338 aa, unidentified
MNQCFVGIDVSKKQIHVCVLGEKPHPYPNCLTGFRKMMKSLREKKPHGEETLFLIGMEATGVYHLKLATFLKDEPDVAVYVLNPAQVKSFFKASFHRTKTDAIDACGIASCTEFLVNRDKVRAFETPDNEVERLRQLCRRRDEILSMAQMEKNRIEALKEVPSHSGEVESSLLEHLEYLEQRLKDIEEKIKGHIRNSPGLKEQVDLLKSIPGISDTAAAGLISEIRSAERFDNVKELVAFAGLAPAERTSGTSVKGKTSICKTGSSRLRKHLYMPALVGIRYNPLLKEFYERLTNRNKPKKAALIACMRKLLHIIYGVLKNRTAFDPLWAKNRFAMAC

SEQ ID NO: 207337 - protein, 334 aa, unidentified
MLNKLERLIRGLRKKHGRNVQLHLCFEASYLGYWLCRWLRAIGVEVYVIAPNSIERQRKSRIAKTDRLDARKLVRKLRQYLESDKRAFSVVYEPTRDEEAIRFRQRERERLLKEIHRVRNQLKSLVESEGLPVDKKPNWSVDWLALIELLPQLKTFDGYAVSTAVIAGMKRMAALLELLEQQQKEVEKAIAEYHASLPETAPAVKLVLLRGIGVRSAQQLCAELMNFERFTGRKKIGKFAGLTSTPNESCGRGNGLGIGKDGNSYIRRVAIQLAWFWRKHQPDCALVKKYHDRLEQGGRVRRIAIVALARELLTALWRYVVHGVEMEGVVYKDS

SEQ ID NO: 207338 - protein, 336 aa, unidentified
MQYKRIAIDISKHVFTLHGVDDQEQPVLRRNLKRSELEAFFSKVPATEVVLEACGGAHHWGRVLGAMGHRVRLLPAQYVKPFVKRSKNDRTDAAAICEAASRPGMSSVPVKSAQQQADAMILRHRELLVGQRTAAINALRGHAAEFGVIAAKGTAQVKPLADRLAADEAIPAVARALFVRMKEHIEQLDQQINELEAELLALHKASQTSRLLAGMPGVGPAIAITFALTVSPQHFASGRHFAAWLGLTPKEHSTGGKQRLGRISKAGNERLRQLLVVGATAVIRHARPGSKTASPWLLKLLERKPRKLVAVALANKMARILWAMMRTGEAYRPATA

SEQ ID NO: 207339 - protein, 371 aa, unidentified
MKSIIYLGMDVHTTNYTLCCYTLEDDRMCHLQQIAPDYRLILKYMDQVRRLYNNDVEFLCGYEAGCLGYSLYHQLTAHQVRCVILAPTTMGAVLGVRKVKTDKRDAMLIAKCLAFHTYHPVHIPTPEEEQVKEFIRMRDDHKLALKRIKQQISAFCLRHGFHYTATKSKWTQAHWKWLKSLKPDGLHQETLNEYLLTCSSLCDKLERLDRRIEELAAQEPFQERVRQLTCLVGVKTHTALSIIVEVGDFNRFPTAGKFASFLGLTPGEASSSDKQNRFGITKAGNTHVRRLLVEAAQSYARGQTGRKSKDLKARQAGNKEQVIAYADKGSERLRRRFRQLLYKGKQHNVIKTAIARELSCFIWGMMTDRIA

SEQ ID NO: 207340 - protein, 379 aa, unidentified
MATTKQALLNDTSVTLMLYMALELSGAKWKVAVADGKRAASQHPLVAGDVGGLLLLIDKAKKRCGLQGKVRVMSCYEAGRDGFWLHRWLLEQGIDNVVVDSSSIEVNRRKRRAKNDALDAAKLYEMLVRYVAGEKRVWRVVRVPSVQQEDERRLHRELERLKGERNAHVNRIRSLAVLHNVRLQRVGGRDWSERLEQLKGQLPAGMVAEIERQSARAKLVGEQIAQLEKSRQEQLQTMIEQQQDGPLLALLKLRAIGVQTAWVLVRELFSWRRFSNRRELAGCVGLNPSPYDSGASQREQGISKAGNRRVRALLVEIAWYWLRYQPHSALSAWFNRRFGGAGKRMRRVGIVALARRLLIALWRYVEQGVIPEGAQLKRP

SEQ ID NO: 207341 - protein, 325 aa, unidentified
MEVLVDRCAGLDVHQKTEMACIRTPAPDGGRAQQVREFRTFTDDLLRLRDWLAAEGVTQVAMEATGVYWRPVWHVLEGADGFELLLVNAQHVKAVPGRKTDVADAAWLAQLLECGLLRGSFVPPPVIARLRDLTRYRKKLVEDRAKETQRIQKLLEDAGVKLDSVVSDVLGKSARQMLEALIDGTRDPKVLADMARTRMRPKIPELRRALRGRFSEHHAFLLRVHLDHIDHLSSAVERLDAEVDTAIAPFDEQARRLCTIPGVGRRTAEVMIAEIGVDMGRFPTAHHLASWAGMCPGNHESAGKRRSGRARKGDAALRVALCEAA

SEQ ID NO: 207342 - protein, 355 aa, unidentified
MNGTKYVGMDVHTATISVAVLNYEGKLIMESVIEAKGSTIIQFIQGLRGELFLTFEEGTWSAWLYDLLTPYVTRIVVCDPRRNALLREGSESDRIDARKLAELLRADLLRSVYHGENGLRTLKELVRAYLTIGKDLTRVMNRVKAIYRSWGIPCAGKSVYAPRHREEWLRRITQASVRRRAELFYEQLDALVLLRKQARQELLADGKKHPAWKLLRSIPALGPIRVAVLIAVVQTPHRFRTKRVLWKYSGFGVVTQSSADHRYVNGQLQRSKKPAFVRGLDPSHNHALKDLFKSAAIQASTAKGPFREFYEALVAKGMRPEMARLTLARKIVTISWMVWKKGAAFEAKYLKPQTA

SEQ ID NO: 207343 - protein, 426 aa, unidentified
MKNHEVLSTLFVGIDVDSRFNVVCAIDFGEESYLRDSFSNNHPGSVSLAEKLASIMNEHPEFSRLVIALEATSCYSTHVATFLSSTEILMPHKPYVYCLNPKTIANYRKSYISVGKTDPICAFMIADFARVGHIKTEPWRGSQFLALQRLTRHRLHLAEAITREKTYMLTNIFLKFSELTASAKENRPFSNNYGVTAAAVLTEFLSPEEIASMPSSELVEFICEKSKNSFDDPAKVAELLKKAAADSYRLDKCLYEPLTVSIASSFNCIKAFEGEVKKLNTAIGKAIKGFNTNEYQSLVSIPGIGPVYAGGILAEIGSVKAFRSHDAIAKYAGLVWNPNQSGSFEAEDTYMSKAGNRYLRYYLIEAANSVKNHAPTFNDFYHKKFHEVKNHQHKRALALTSRKLIRLIFGLLDKNQLYSNSVEQKI

SEQ ID NO: 207344 - protein, 345 aa, unidentified
MEQISRIGMDTSKHIFQLHGVNTAEEPVLRRKLRRKEMLAFLEQLAPTVIAIEACGASHHCARLLQSYGHSVKLIAPQLVKPYLKRGKNDAADAEALCEAMSRPTMRFVPVKTAEQQAALMLVGVRDRLIRNRTQLTNAIRGHAGEFGLTAAKGKAHLDPLLERIQANESLPALARELFAAQAEEYAQLQAQIDKVDARLMAWHRADECSRRLTKIPGVGPIGAVLLTMKTPEPELFRSGRQFAAWIGLTPKDHSTAGKVRLGGITRAGDQGLRSVLVVGATTVIQHAQRGGRPSPWLSELLKRKTPKLAAVALANKTARIAWKLMVTGENYAAPAAPAALTDAA

SEQ ID NO: 207345 - protein, 318 aa, unidentified
MPPAASVFVGIDVAKAELVMAIRPSGERWTATNDDVGIQSLLTRLREAAPTLVVLEATGGYERAAVAALATARLPLVVANPRQVRDFARATGQLAKTDRIDADTLALFAERVRPDPRALPDDSAQALDALLTRRRQILGMVGAERNRLEHAGPTVRRGILQHIRWLERQLHDVDDDLDRTIQASPVWRAKENLLRSVPGVGPVVSRTLIGDLPELGTLPRKQIAALVGVAPLARDSGTLRGKRLVWGGRAPVRAALYMAALVATRRNPVIRAFYQRLLTAGKPKKVALTACMRKLLTILNAMLRANTVWRHTVQPAIA

SEQ ID NO: 207346 - protein, 407 aa, unidentified
MKTNHQYLLTIDLGKETSIAILGRKDGTILRGPWKFSHCFDDYQNLIKGLNPKEVLVGFEATGHYWLSLYEFLAQKGFEQVLLNPLEVKSFRDSGIRGSKTDKLDAKLIFKILLYSDRPLILERYPEKIIELRNLCRLRHKLSQQKTTSTNKLISILDMVFPEYQRILSPKRLASLNLLKRCSSPEKIATLSLPKLTKILSQGSKGKGRPEDWAKKLKKEAGQSIGIKIGLNTFSLEMKIIIQRINQTVKQIKLLDKEIKKIFSELPEKKYLCSIPGINEILGAMILAEIGNISKFIAKDGADKLVALAGLDGRIKESGKSAGKVKISKRGSPDLRWALWQAATVAARSDSIFKEIYLKHRRKNKHHYVCISYVAKKLARVVYSVLANKKPYQPALSPNHQVLTDSI

SEQ ID NO: 207347 - protein, 343 aa, unidentified
MKHYAGLDVSLEETSVCILDETGKICREIKVASHPEDLLRILQDPAWRFERIGLEAGLLSQWLFNGLAQAGLPVVCIETRHTKAFLNAQVNKSDRSDARGIAQMMRVNLFRPVHVKTLTSQKRRVLLTARKLLQEKAIAFENEIRGLLANFGLKVGVVGAAKFEERIRELIGDMPDLAEIMEPLLDARRRLREHFSTLHRKLLDLTRRDEVCRRLMSIPGVGPVVSLAFVATIDTPARFRTSKAVGPALGLTPVRSQSGHTERIGRISLCGDALMRTLLFEAAQVMLRRTTKWSWLKAWAMKVAQRRGSGKAIIALARRLAVIMHRMWRDGTEFRWTREVQAA

SEQ ID NO: 207348 - protein, 370 aa, unidentified
MIVIGADTHKSTHTAGAVDARTAELRGDSTVPARQAGHEELLHWARALDSERVWAIEDCRHVSGALERFLLASGERVVRVAPKHMAGARRSVRERGKSDAIDALAIARAALREGVETLPTAWLDPEAMEIKLLSDHRDQLIGERTRTQNRLRWHLHALWPCLEIPSGGLDRLKWLDRIARRLARAEPSARVRVCREQVRRLRELARRDRELERELRALVGAKDPRLLELGGCGTLTAAKLIAETAGAERFASDAKFARLAGVAPIPASSGGSDRHRLDRGGNRQLNCALHRIAVTQGRDHTPARDYLARKQAEGKSRREALRCLKRQLARTVLRLLRAPSQERESLSLSNEAEKPQTAIVGGDLGAVGLT

SEQ ID NO: 207349 - protein, 329 aa, unidentified
MSKISKVIGIDISKRTFDLAFIQSGKKWHFHKVKNSREGFKKLEKWLDKDNLIVMEASGPYYFQLAIYLFEKGYQVSVQNPLVIRRFSQMFLHRAKTDKIDARIITQFGQLMHEKLRLWRPPEKAIRQLRQMQTLIDGYNKELTMIRNRKKAFLSTGIKNPDVIESLERSIEHLKQEIALMEKKMKKMSDEHYKENMALLQSIPGIGLKTALALIILTNNFEKFEHYKQLIAYVGMSPRIYESGESVKGKGHIAKMGNSYMRKLLYMASWSAKRWNKTAVEMYERLNAKGKPERVIKVAIANKLIKQAFAVVKSGKPFDQNYEPVYSFK

SEQ ID NO: 207350 - protein, 343 aa, unidentified
MDYYAGIDVSLEASSVCLVDSAGKIIRETKVASDPEALIEHLVSLGFELKRIGLEAGPLSQWLYEGLTNAGFDVVLLETRHVKAALSAMIIKTDRKDARGIAQLLRMGWYRAVHSKSPGSQDVRALLTGRKLLQAKLRDVELSIRGILRGYGLKVGEVSRGRFEARILELVEGQPVLKTVIGAMLQARHALWTEFTKMHREMLKIVRQDRVCQRLMTTPGVGALVAMTYRSAVDDPGRFAKSQTVGAYFGLTPKKYQSGETDLDGGISRVGDTMVRTALYEAAHIMLTRATRFSALKRWAVDVAKRRGMKRAKVALARKLATILHRMWMDESEFRWGKETSAA

SEQ ID NO: 207351 - protein, 362 aa, unidentified
MKSTTVAVDLAKSVFQLAVADASWKVIETHRLTRSQFERWFHNRDVSLVVMESCGSAHHWARHLSGLGIEVKLLPAKYVRAYVKRNKTDAADAAALLEALRASDIDPVRIKSVEQQALQGLHRTRSLWMSTRTSRINALRGFCREFGLAIPQGARTGVEAIARILADPASSIPDLIRGSMKLLVEEIRLLEQRVAQLEKELTALAQQSPACKELLSVPGIGLLTATAMVAATSGEVGHYRDARHFASWFGLTPKEYSSGSTRRLGCISKRGDRYLRMLLTHGARAVLRSAVVAKQAGRQVDGLKNWALRVQGRTNHNKAACALANKLARICYAVLRDHEPYGKLSVREENKKTNRTAYAVAV

SEQ ID NO: 207352 - protein, 415 aa, unidentified
MLILGCDIGSETHYVRAIDIRGRELSKSAFGFSNTAEGFESMLDWSTKLAAANDKKQIVLGLEPTGHYWFCLTTWLVAKGISVVQVNPYAVKQTKEVEDNSQLKDDKKDPKLIANLVKDGNFGMPYLPEKLYADIRRLSMFQDQLNEDRIRNLNRLHREMKIYFPEYKDTFGKIDGAFSLELLKAAPFPDELAALGTEGMKQIWHEAKLRGRGYANASSILEYARKSVGIKDGADAGRQAVKWFVSRIIELDGQLSDIENKLNERCMEIPHAKNILAISGIGENILSGILAEMGDISRFDDVKEIQKLSGLGLVACSSGKHTGETKISHRGRKRLRYWLFQAAKSAVAHSGEFKELHVYYTTRKQNPLKKMQSLIVIACKILRVIFTILTKGTTYDPKKLLGDIIRPNQAIPQAA

SEQ ID NO: 207353 - protein, 328 aa, unidentified
MAAISIGMDVSKASVVVAVHPPAETWTSDLTPGAIDALVKRLAVWGPRIVVVEATGGYERALVAQCAAAGLPVTIVNPRQVRAFAQALGRTAKTDTIDAALLAEFGARVEPPIRPMADAETQGLAALVTRRRQLLEMIGMEQSRLEHAPPTGRITRELRSHIRWLARHVDDVDDEIGTAIQASPIWRVQEDLLRSVPGIGPTTARTLLAELPELGRLDRRAIAALVGVAPFNCDSGQHRGQRHIWGGRASVRRALYMAALVASRYNPVLAHFYQRLRAAGKPAKVALVATMRKLLTIANALLKHHTRWDPQVASTPASRARPARAATV

SEQ ID NO: 207354 - protein, 343 aa, unidentified
MEELKVIGLDLAKNVFQVHGINSRGRKLCGCKLKRSEVLAYFANLPPVLVGMEACGGAHDWARRIGALGHTIKLMAPQHVKPFVQGHKTDARDAAAIAEAAQRESVPSVTVRSLDSQQMQALHRVRELWMKQRIALGNQIRGLLGEFGEAMPLGLKGLKQAVAQWQAQAGNELAVLKQLIEQLMTALREQESRLSEIEGRIREQHRHNAASRLLETIPGIGLLGSTAVVASFGQCETFSSSRKFANCLGLTPREHSSGGKQVLLGISKRGNGYVRKLLIHGARAVLKCRLNRPEHADDWEVKLAKRRGYNIAAVALAAKNARRAWAMLRSGEVFRQDQAPASA

SEQ ID NO: 207355 - protein, 356 aa, unidentified
MQSKAISFKGQKVFIGIDVHKKTWSVTTLLEVGMPKTHSQKASAKELFDFLNRHYPEAEYHAVYEAGFSGFSTYYALKEYGIECTVVNAADVPTTQYESVMKSDPIDSDKMARALRAGMIKGIYIREKDNLDDRGLVRLRKSIQQDLTRYKNRVKHILHANGVEIPELFDRSPNWSKAFINWLRDDVVLLSSTRASLDMLIEQVESLRQNLLTVTKKVRNLRLKDEYAEKYDALTSIPGIGPICAITLLTEIYDIKRFRNERQFASYLGLVPTCHSSGEKASFGEMTFRGNKHLGPLLIEASWVAIHWDDALSVAFTNYRRKGLMPQESIIRVARKLSNIIFSMLKTGNHYVPANA

SEQ ID NO: 207356 - protein, 356 aa, unidentified
MTQASPTDIIIGVDTHKHTHAAVAITGLGARVAELTIKVGRHGYRQLETWAKALGTVHAFGIEGTGSYGAGLARALRDGGYTVHEVSRPDRRLRRQHGKTDHLDAEGAARAVLGGQATGLPKASTGRVEMIRHLKIARDTAVKARTQAMLALKAVIIAVPATLREKLDAIAGTMALVRHLAAPRPGAMTSPTASAKASLRALARRWLDLDAEIKAHDAHLEALVEHCAPTLVKAYGIKAGTAAEMLILVGDNPDRIHSEGALAKLCGACPIPASSGKVTRYRLNRGGNRQANAALHRVVVVRMRGHQPTIDYVRRRTAEGKSKPEIIRCLKRFVVREIFGHLCRPTKPAPSDQNAG

SEQ ID NO: 207357 - protein, 402 aa, unidentified
MNAVGIDVSKGKSMVAIMRPFGEIVSAPFEIKHTASGINSLVELINSVEGESRIVMEHTGRYYEVLAHQLSEANLFVSAINPKLIKDFDNDSLRKVKSDKADAVKIARYALDKWQNLKQYNVMDELRNQLKTMNRQFGFYMKHKTAMKNNLIGILDQTYPGVNTYFDSPARSDGSQKWVDFASTYWHVDCVRKMSLNAFIDHYQNWCKRKKYNFSQSKAEEIYGKAKELVPVLPKDAITKLIIKQAVDQLNSASTTVESLRTLMNETASKLPEYPVVMAMKGVGTSLGPQLIAEIGDVSRFTHKSAITAFAGVDPGVNESGSYEQKSVPTSKRGSSDLRKTLFQVMDVLIKTHPQDDPVYQFLDKKRAQGKPYYVYMTAGANKFLRIYYGRVKEYLASLPES

SEQ ID NO: 207358 - protein, 334 aa, unidentified
MENIALIGIDLGKNSFHIHCQDRRGKAVYRKKFTRPKLIEFLATCPATTIAMEACGGSHFMARKLEELGHSPKLISPQFVRPFVKSNKNYFVDAEAICEAASRPSMRFVQPRTESQQAMRALHRVRESLVQDKVKTTNQMHAFLLEFGISVPRGAAVISRLSTILEDNSLPLYLSQLLLKLQQHYHYLVEQIKDLESQLKRKLDEDEVGQRLLSIPCVGTLTASTISTEIGDGKQYASSRDFAAATGLVPRQYSTGGRTTLLGISKRGNKKIRTLLVQCARVFIQKLEHQSGKLADWVRDLLCRKSNFVVTCALANKLARIAWALTARQQTYVA

SEQ ID NO: 207359 - protein, 425 aa, unidentified
MTRQQLTPPAGVLVAIDVAKARNEVLIEVPGSGRRRRLSVLNTRAEHDRLIALLSDLGQPVTCGFEATGNYHRPIAWRLLQAGFAVRLISSVGLARTREALHNGWDKNDPKDAQVMLHMIRIGASQVYHDPLAAGINDVQELSKTHDAVSKAKTEVLHRILTHYLPLYFPEVDRFRHNSRSDWFFAFLDRFPTPACITTLSKEAFIAAAWDVVGRKVAKAQLLGDIYETARSSIGLPVPPDAPAVSMFRLVIGEARGLIQQRDAIEATADALLTDSSDYKLLRRIPGIGPINALTILAEAGDLRRFGHHRQFLKFCGLDLATQQSGTFRGQTKLSKYGNARLRRTLWLAGQVAIRQRENGFRDKFERYIARDRHNADLRRKALTAITAKMARVVHAVIKTGADYRPFVEGPVPGGRTPLSRAVRA

SEQ ID NO: 207360 - protein, 346 aa, unidentified
MEHYVGLDVSLKQTAICIVDGTGKVQREGIVSSDPEAIAAFIKSHAPNVVRIGLESGPTATWLWTELRKLGLPIICIDARHANAVLKMQPNKSDRNDAVGIARIMQCGWYKEVRVKDLDSHAIKAVLVSRALLVKIKRDIENQVRGLLKNLGLIIGQAKMNLFAARAAELTKDRPELAVAVVPLLKAREAVGQQIADLDRQVMRLARDGAQVRRFMTIPGVGPITALCFLATIDDPTRFKKSRSVGAYVGLTARRYASGEVDWTGRISKCGDKMLRSYLYEAANVLLTRVAKWSALKAWGVRLAKRSGLRKAKVAVARKLAVILHRMWIEGSEFNWSSKQAASQPA

SEQ ID NO: 207361 - protein, 331 aa, unidentified
MHFNYYLGVDVSKETLDAAIYPCKDRKADFLHISNDTKGLNEMVKWLRSRKIKTVELLICAEHTGVYTNNLISFTDKKSIAFCLESPLAIKKSLGIARGKNDIVDAFRIAEYAYTYREKLKLYQKPSETIVQLQHLLTERRQYVKQRTSLLAIKSELGKYDIAKTKARRDTAIRRLQKIIEEIESQMKSIIAEDADVKHNYDLVSSVMGIGLINAVSTIVYTKNFHSFDTPRQYACYIGVAPFDNTSGTSIKGQTRVSPLCRSQQKSELSMAARSAIMNDPWIRKYYQRKMKEKGGARNMHGIVLNAVKFKLIMRMFAVVKSGEQYKVLNY

SEQ ID NO: 207362 - protein, 351 aa, unidentified
MNIKHYIGFDVHKKSISYCVKTADGQIVEEGKLRATHQVLREWAQKRTEPWHGAMEATLFSGWIYDALKPFAAELQMGNPSMMKAIGAAKKKSDQLDARKIADLVRCNLLPVCYVASAEMRDLRRLLRYRNLVVGQAVQMKNRMSGMLMEVGAEYSKQRLHGKQYFSELLEQLEEVPASVKDLLRLSRSALDVFETTQRQLLDRLQKEPLLVKRVKLLRSIAGVGEVTALTWALEVCDPRRFPSIGDAVSYCGLCSALVSSADKAKRGPISKQRNAHLQTVLIEASKLAPRWNKQLAEVYDRELKRGDRNQATLAVARKLVAYLLAVDKSGKRFEVRTLPPAAPEEVAKVA

SEQ ID NO: 207363 - protein, 414 aa, unidentified
MEVVHERCAGMDVSKRDVKVCVRSPGKRRGSYAKAVTTFGSVTAEILRLREHLITAGVTLVVMEATGDYWKPFYYLLEDGPFQVMLVNPAHARNLPGRKTDVSDAQWLAELAAHGLVRGSFVPPPPIRILRDLTRARVILTQDRVREINRLDKVLEDAGIKLSSVASDIMGVSGKAMLHALVDGERDPKVLAGLARMSLRNKTDQLAAALTGRFTDHHAFMVGLHLRLIEQLTVGIADLTNRIETLIDPYRPVLKLLTSIPGVSDKAAIVIVAETGADMTRFPSAAHLASWAGVCPGHHESAGKKKSAAPRPGNSYLKGALGNAAMGASHTNGCYFQARYRRLAARTSPLKALVAVEHSILTAVWNMITNNQSYNDLGGDYYSRRDPTASMRRITRQANSLGLTVRFEPIEQRS

SEQ ID NO: 207364 - protein, 445 aa, unidentified
MHYKRLLTLIDSVSSYLSVGLDVGADFTWMSIALPNGSFIGKPFKIVHSDPRSRDLAVAKIKEAQETYSLKSRCFLESTGIYHIPLLCFLRDKGFDCSVINPIITKNSTNINIRKLHNDKFDSKKAALVGLNVSLKTSIIPDDSVVDLRNLVRDYYYFKDLQSAVALKLTAELKVSFPAYAKVFSKITTQSSLKLLSAYPLAKDMLAASKDDIVEIIRSTARFGEAYALRKYNAIIAAAQDAAVFGRALPSNAVRIRLYIDTYQEYQKHLDALLKALHETVDRLQDTLVYDQICLLQSLRGIGFLSAVVLIAEMGDFKLFSSPKKLYAYFGLDPAVKQSGKLNGDKVHMSKRGSSLARRVLHMAALNNVKVDKRSGTPVNPVVYDYYARKCSGKKKPVAMGAVMHKICNIIFAMLRDNKPFEVITPEEHCRRFAAEHPDKIRKAA

SEQ ID NO: 207365 - protein, 310 aa, unidentified
MEYFFGIDVSKANLDLFIVPTNKALKTSNDEKGIEEIVRMAKELKPLSIVVESTGVYQNSLVSRLIKEDLPVVVMNPRRIRDFAKAKNRLAKTDKIDSEIIALFAKEIKPEYRNFKDETLQELTALITRRDQLLSMITAEKNRFEVSHKSVKNDILKNIRSLEKHLRRIDENIDNFLKKEGPLNHKSDILNSVPGVGKILSATLLAFMPELGFLNRKQCASLIGVAPFNKESGKYRGKQSIWGGRPFIRKIIYMAVLSGIRFNETLSAFYNRLILKGKPKKVAIVACMRKLITILNSMIKNDRIWDAAAF

SEQ ID NO: 207366 - protein, 350 aa, unidentified
MLHAGLDLSRKRLDVCLLSEHGELVDEFSAPPDADGLRGLVRHVGQHGVPVRGVIESMTGARFVHDTLEQLGWEVLIADAQKVKGLAPLACKTDKIDARVLAVLSERDLVPAIWLPDPRIRSEREQARFRLHLVKHKSMLKHRIHSTMLSFGHPCPVTDLFGVEGRELLNRLEIPDPWRQSVDASLDLIDYLERQIDQINRDLKASGAEHPYVPLLLTVPGIGWVLAFTIASEIGEISRFASAKKLCGYTGLCPRVNQSGESDRRGPLTKQGPKYLRWAMLESTMHALRHPAYAERYQRNKKRLGRQRGARVAQVDIARKLTEAIWHMLTNNQPFAPTPASGGAARRLAA

SEQ ID NO: 207367 - protein, 359 aa, unidentified
MGDISSSVEAKLVCGLDLGDKDSHLCVCTAGGEIVERSKVATSTPSLSRRFQKCAPMRIVLETGTHSPWVSRLLSQWGHEVIVANPRKVRLIGNSRRKNDRLDAQSLADLASVRPRLLFPIEHISAQAQQDRAVLRARDALVRARASLISHVRGLVKAMGSRLPNCSSEAFAKKAQAALPASLSTAVQPLLEQIAGMSTTIRAYDKQVKELLRTNYPQAAVLHQIRGVGPITALAFVLCLGDPQRFAKSRQVGAYLGLVPAQRDSGQSTPQLGISKEGNPFVRRLLVQCAQYILGRFGEDSDLRRFGQRIAASGGKNAKKRAIVAVARKLSVVLHRLLVTQQAYQPLRGEHGPELSAAA

SEQ ID NO: 207368 - protein, 359 aa, unidentified
MVIMVAIDMHAKSLVCELGCGRDEPRRGTYSNNSVGHQRLIDDVTAMKQDLGGGEVVVAYEASGLGYVLYDRIREAGYRCAVLAPTEMLRSKSGYKKKTDRKDCSYIYEAIRAHVLAGNRLPEIWVPNEQLREDREMVRARFDAGQKVTRVKVQIHTLLKKFGIQKHEDLNNWTKAFHRWLVEVLESKGAGFRIGMETLLRQLAFLEAEQKQLERAILALSREERYRDQSTELQKVPGVGLITAMTFLTEIGNMMRFENRKQVGSYLGLVPSTFESGKADDRKGRITRDGPYRVRSVLNQALWAHLRCNGQEKAVYDRIAEKNPKRKKKAVVACMRRLGIRLWHIAKDVEFSKGLRLAA

SEQ ID NO: 207369 - protein, 346 aa, unidentified
MENRTVVAVDLAKTVFQIAVSETPGEVARCRRLNRAGFQAFIEKLTPATVVMEACGSAHHWGRRLQALGHSVQLLPAHLVRPYVPRNKTDRADALGILEAWRNKDIHPVPVKTVDQQALGGIHRFRSGWIGSRTAQVNTIRGLLREFGILIPMGVEKVVPQVRLLIEDADSQVPNAIRSSLAAACDEVELLDRRIKEAEKELESLCEQDPVASLLRSTPGIGLITGTALVARVGNVDRFRSSRHFASYLGITPREHSSGLKQRFGRISKRGDAYLRMLLIHGARSVICHARRVKSHDRLRDWALKLQSRTRHNKATVALANKIARIVWAVWKHGRAYTPTQATSMA

SEQ ID NO: 207370 - protein, 316 aa, unidentified
MLAQQSVRASARGYAQAVRFVEQYTEGRRVWAVEGAGHYGAGLARHLSSHGETVLEIGRGRREEQRLRGKEDSLDAIRAARTALASQTLTLPRAGERREAPRLLLLARRSAVEVRREALVQLRSVIVTCPDRLRGQLRGLPGQRLIVRCVRLRRSSPCTPDELASKLVPRSLARRVEAATKEAAELEREILTHVLALAPGLLEEAGVGAIVAAQLIVTWSHPGRVRSEAAFARLAGVAPIPASSGQTIRHRLSRGGDRQLNCALHTVILHRRQHDPATENLVGSAARSRSSALAAIARLPAAPIASTTAAAPASDR

SEQ ID NO: 207371 - protein, 341 aa, unidentified
MNHYAGIDVSLKSSSVCVVDANGKLVREGTVASEPEALIAWFSELGLEVARIGLEAGPQSQWLYAAVRQAGLAVELLETRHVRDAFKAMPVKTDRKDARGIAQLMRLGWFRPVHCKSIEAQETRAILGARKLVQSKLHDIEMSLRGTLRGFGLKVGKTTPNRFGARINELVEGHPTLQIIATSLLAAHAVLLREFKVFEKRVRVMARQDERTRLLMTTPGVGALVALTYVSGIDDPGRFTTSKRAGAHFGMTPKKYQSGETDITGRISKIGDKGVRTALYEAAHIILTKPVKGSALKSWAARLAKRAGMNKAKVALARKLAVIMHRMLVDKTPFNPAAAAA

SEQ ID NO: 207372 - protein, 322 aa, unidentified
MAQGEVMVGVDVSQARLDVALWPGGESFSLSNDPTGVEQLLKRMLELRPQAVVIEASGGPEDLLVGELCAAGVPVAVVNPRQVREFARSLGQLAKTDRLDALVLAQFGHSAQNHGRLTLSQLPAVAEAELKALVRRRRQLIGMLVAETNRRQRASKVVKRSIVATVRALKRSLVELEQQVRETIKNSPAHQQKIAILQQVPGIGPQLARTLIAEVPELGQIGRRQIASLIGVAPHAHESGKFKGRRMIWGGRAGVRSTLYMAMLSATRHNPLVAPFYRRLLERGKSKKLAYIACARKLLVIINAMFRDRTPWSPGLDSQHSR

SEQ ID NO: 207373 - protein, 359 aa, unidentified
MREQRNKISFRGQKIYVGIDVHLKSWSVTVLSETSVLKKFSQHPSPEALYGFLTRSYPGAEYHSVYEAGFCGFWIHERLTALGIDNIVVNPADVPTKSSEKLRKTDTVDSGKLARSLRANELKGIYTPDSVSLEMRSLIRLKNSITKDTTRQKNRLKSQLRYLGIEIPQEFLTPFSNWSKRFFAWLKEIETLTPSGRQALDIPIRHLEELRRQKLEMTRALRTLAKTDRFREPLRLIMSVPGFGQATGMAFLSEICDITRFRNAEQLAAYIGMIPMCHSSGEKDGTGDITIRKHAVMRCNLIEAAWVAVRQDPAMNLFYTEQCKRMPKSKAIVKVARKLVNRLFFVLKHQTEYVNSIVS

SEQ ID NO: 207374 - protein, 416 aa, unidentified
MKIVRPICCGMDVHKNIIVATIGITNKKTRITEYIQETFSTLNPDLLNLKQWLINHKCFDACMESTGKYWIPIFNILEDEINIYLTHPKYVKAIKGKKTDKKDSKWICDLFKHDLIKFSFIPPKEIRALREVSRYRYKLVGMRSSERNRYQNCMTVSNIGIGSVFSDPFGKSAQAIMKEVLESDIIEDEKILKCIHGSCKNKDKILDSIKHCNIETDQRFKMNESMTHMEELQVHINNCEIEMMKRAAPMFDRFMHITQLPGISTLSAILIISEIGVDMKQFESDKQLTCWAGLAPANNESANKKKSVRISKAGQYLKPLLVQCALGAIKDKEGYFGIKYSRIKKRRGHKKAIIAIARMMLVSIYHMILTGETFNPSDYESFRNPNPPIKQQVLTEESAIEFLKKSGFDVSKLTKP

SEQ ID NO: 207375 - protein, 322 aa, unidentified
MSQPGSLYVDIDVSKAILDIAASSAIEQFSVGNDSDGFDAIIAELRMYAIALVLMKATGGLETAIVCALQAEGFELAVVNPRQARDFARAMGYLAKTDSIDARVLSQMAEVLNRHPERERFIRALPDTECQVLTAMVVRRRQLITMLVAERNRLHPAHPLNRKSINIIIKALEDELARLDADMNSHIHSHFKELAKRLSSIKGVGTMTAAALLAEVPEQGNLSRREISVLVGMVPVNRDSGTMRGRRTIFGGRAGVRTALYMAALVATRFNPVIKVFYMRLLAAGKPKKVALVTCIRKLLTILNAMLRKNEEWNESYHHVAP

SEQ ID NO: 207376 - protein, 417 aa, unidentified
MKKNSKSPTKKEQTSKRTRSQRPVQRETKEVLAELVERLRGKLELKAMPASPGQVGQQPELRPNLDRLTVGVDLGDQWSHYCILGLEGETLSEGQLRTTQADVAEFFQAITPARVVIEVGTHSAWVQEIIAGCGHEVLVANPRLMEWSKRRKRKNDRIDANKLARLGRVDPQSLHPMQHRSREVRQDLVLLRAREALVAARTELINTTRGLVKSLGTRLPKCSSRSFGHKAWEAIPEQVREALLPLVQLAEGLSACIEGYDRRIEELASEKYGHTKLLRQVKGVGPITALAYVLTLEEPERFAKSRDVGPYLGLVPKQEDSGESQPQLGISKAGDTMLRKLLVGSAQYILGPFGPDTDLRRYGLRLCERGGKNAKKRAAVAVARKLAVLLHRLWVSGEVYEPLGYRVSGTIVQQAAA

SEQ ID NO: 207377 - protein, 367 aa, unidentified
MEKSSKVFVGMDVHKESIDITLAEQGGEVRRLGQIGGDRGSLLKMVRKQQSKGGERVFIYEAGPCGFWIYRELAALGEHCMVVSPALVPKRAGDHVKTDRRDSERLASLARAGELKAIHVPDIRDEAIRDLVRGRDDAVIAQRRVRQQLKALLLRNDIRYAGKTSWTGAHRRWLSELKLPEPAQQIVFEEYVDAIAVATGRIERLTRAIETEVLTWRFAPVVAALQAMRGIQFVHAVTLIAELGDLTRFGSARSLMGYLGLVPRESSSGEQRRQGSITKAGNSYARRALIEAAWAYRHPARVTRIIATRQAGIPKAVCDIAWRAQLRLSAKYRRLNARHLHHNKIVVALARELSGFVWAIGQSVKPQ

SEQ ID NO: 207378 - protein, 355 aa, unidentified
MNSTKYIGMDVHTATISVAVRDAAGKLIMESVLETKASTILQFIHGLRGELYVTFEEGTWAAWLYDLLKPYVTNVVVCDSRRNALLQEGSKSDRIDGRKLSELLRANLLRPVYHGENGLRPLKELVRAYLTISKDLTRVMNRVKAIYRGWGIPCAGQSVYHPRHRDEWLGKITQASVRRRAQLYYLQLDMLVLLRKQARQELLVEGKKHQAWKFLRSIPALGPIRAAVLMAIVQTPHRFRSKRPLWKYGGFGVVTHSSADHRYVEGQLQRSKKPVSVRGLDSSHNHHLKDLFKGAAIQASTREGPFREFYEALVAKGMRPEMARLTLARKIATIALTVWKKGVAFDAKYLKPQTA

SEQ ID NO: 207379 - protein, 377 aa, unidentified
MKRIKFVGLDVHAETIAVAVAEQDGDVRSLGVIPNREESIRKLVKKLGPVEQLRFCYEAGPTGYVVYWQLTALGAKCEVVAPTLVPVKSGERVKTDRRDALKLARNYRAGELTPVWVPDAAHEALRDLVRAREAAKKDQLRAKHRLGKFLLRHGRRPPTGVKPWTLNYLSWVKHEVHFEQMAQEATLLDYLNEVEHAELRIARLNLAIEEAVKLTPPKMRAVIQALQALRGIAQVAAVAIVAEVGEVSRFTRARQLMGYGGITASEHSSGEGSWRGGITKTGNAHLRRVVVEAAWAYRHRPSLGVALRKRQEVVSEEISEIAWKAQHRLHTRYRKLTARGKDKGKVVTAIGRELLGFIWAIGVKVEAAQKLTDRQAA

SEQ ID NO: 207380 - protein, 352 aa, unidentified
MEQFIGCDAHKKFSVFVAVNEKGHAGEALRVAHDRQLYREFLARLPAHSAIAVEASGSYSWLVDEMERLGHRPKLCNPHEAKRRMGLTNKTDKLDARGLAILLRNGTLPEVWIPPSELRDQRELLRLRIFLVRLRTRVKNRIHGTLSRHNVQVPGADLFGVAARMHLGTRLPELPLHSREAVEQELATLDFLETQIESAERRLEAIMKVSVEADLLKTLPCVGKILSMVLMLEIGKVDRFPSAAHLASYAGLVPRVHSSGGHTRMGQVCGNVNRNLKWAFVEIGNLIVINQRRLAGTHVVRLYQRIKRAKNHQKAVVAVARHLAEAAWWVLTKQEVYREPQNSRLALSSTHG

SEQ ID NO: 207381 - protein, 414 aa, unidentified
MEIIHTHCAGLDVHKKTVVAKLIAPAAAGGLYQELQTFGTMTADLLTLSDWLQTHGVTHVAMESTGEYWKPVFNILEANFEVLLVNAQHIKAVPGRKTDVKDAAWIAELLRHGLLKASFVPPVGQRELRELTRYRSTFIKERATLVNRVQKVLESANLKLASVATDIMGVSGRAILQALVEGVATPEEMAELAKGRLREKRDQLAQALEGRVKAHHRFVLTELLCQIDGLDESLERFDAQIEAYCRPFEEVVVLLDTIPGVARRTAEIIVAEIGTDMSRFPSAAHLASWAGVAPGNNESAGKRRSGKTPKGNHALGVALNQAANAASHTKHTYLAAQYRRLAARRGKKRALVALEHAILVMAYHMIKRREPYHELGSDYFDKRRPEATAQRLVKRLEKLGFQVSLQQMPAVIGT

SEQ ID NO: 207382 - protein, 389 aa, unidentified
MPLKNDLSRSLAAFEQDRTLVVVLEISLSTWLVGGLVPGVVRQPAKKLGADEHELLKLIHRWRAEASRAGREIDRICVAFEAGRDGFWLARWLAAKGLEAYVIHSASVAVSREHRRAKTDRLDTELLKRAFLGWLRGEPGHCGMAAIPTVEEEDARRPSREREKLVGDRTRIINRMKAALVRFGIRGFKPALRKAAERLDGVRTAEGNPLPANTRAELRRDMARLRVVVDQIKEIEDDRLRKLGATSEIEPGPPAMVRLIARIVGIGVETADMLVREVLSRDLRDRQAIARYAGLTGSPDESGSRRREKGLARAGNARVRRGMIQLAWRFLQFQPESRLAQWYRERTADRRGSTRKTMIVALARKLLIDLWRLVTIGQVPEGVLLRQGA

SEQ ID NO: 207383 - protein, 410 aa, unidentified
MSLKRTTAGPRDLIAPVQEAPITVLSAVQPSRAAPVLRSGRGTAITSITSTSPTGVVAPSLVTGGVDTHGRTHHAAVLDALGRQLGDREFATTPAGYASLRRWLVSHGDLNRVGVEGTGSYGAALTRYLAGQGVDVVEVDRPDRKDRRNRGKSDPLDAYSAARAVLSGAATGEPKARDGRVESIRALRVARAGAMKARTQAMNQLKSLLTTAPAELREQLRALAGTSLVRAAVRLRPGSDLDDPLQATKTALRRIARRHEHLSLEISEADDELRALTADAAPRLLELHGVGPEVAAQLLITAGDNPSRLRSESAFAHLCGVAPVPASSGRIHRHRLNRAGDRQANKALYTVVVVRLRWDERTREYARRRTAEGLSKPEIIRCLKRYVAREVFTALKPQRPEAVLTTVDSP

SEQ ID NO: 207384 - protein, 338 aa, unidentified
MLIIGCDFHTRFQQIAMLDRETGEVIERRLEHEGGEAQAFYAGLSRARVGMEATGYARWFERMLWEQGHELWVGDAAAIRAAMVRKQKTDTRDALHILDLLLTNRFPKIWIPTAVEQDVKQLLRHRYKLVCFRTSVRNQLHAQAMGEGIRRKRKLWTPKGRQELEGLALGEWSSRRRQELLEFLDRLDGSIEELDRAVMEEAQSRPLAVRLMKHPGVGPVTALAFVLIVGEIGRFRRSKQLVSYVGLNPRESSSGGKQRLGSISKQGNSMLRFLLVEAAQTASRFDPELQRDYQRLKFRRGPGVAKVAIARKLAVRLYWKLQEAAPSSAVGSHAGQPG

SEQ ID NO: 207385 - protein, 409 aa, unidentified
MERQLERCCGLDVHKETVAACVRVGGRIGKAEQHVQTFGTTVGDLLVLRDWLAAHGVTHVAMESTGVYWKPVFYALESDFTCLLVNAAHIKQVPGRKTDVKDCVWIAQLLEHGLLRGSFVPPAPIRDLRDLTRYRKALIHDRTRVANRLHKALEEAGMKLASVASDILGVSGRAMLAALVQGTTDPAVLADLARGRLRGKLPALRQALASRFRPHHAFVLGQLLAHLDYLEDAITTLSTEIERVMAPWAEPLRRLDTIPGINQRTAEVILAEVGGDMSVFPSARHLASWAALCPGHHESGGKHKSGKTRKGNRWLRTALIEAAAGASRAKHSALQARFRRVLRRRGPKKAVVAVAHALLRMVYHVLADGTVYHEAGADSYDRHHSQRVTRRALQTLERQGYRVTLEPAA

SEQ ID NO: 207386 - protein, 347 aa, unidentified
MEYHAGIDVSLEACSVCVVDASGKIIREAKVLSEPENLIGWFRDLGLEMTRIGLEAGPLSQWLYAAMKEEGLAVELLETRHVHDAFKAMPVKSDRNDARGIAQLMRLGWFRPVHCKSMPAQEVRALLTARKLVQSKLFDIEMSLRGILRGFGLKIGRTTPNRFGLRVEELVAGHPTLEIIGKALLAAHEVLLREFNGFEKRVRQQARQDKRVRLVMSAPGVGPIVGLTYVAAIDDPARFKSSKQVGPHFGLTPKRYQSGETDYSGRVSKIGDASVRTALYEAANVILTKPLKGATALKSWGMKLAKRAGMAKAKVALARKLGVILHRMWVDGRKFADKGISPMPVTA

SEQ ID NO: 207387 - protein, 330 aa, unidentified
MKNYEEVVGIDVSKKTIDVKCHLVGKHHVFSNEYKGYLSMFKWVKRVTQGARVFYCFENTGNYSLKLATYLSLKEVPYVEESPITIKRSSGLVREKSDKIDAGMIARYAWLYREELEPSKLKNITFQEMGRLIGLRDQLVRNRAGFIGTLKETRQLLNSPSTDLGCILLKRSIDYLSKQIKAIEVQLLKLIQEHESLFKNYNLLLSMKGIGFVLACQLIYHTHNFKRFKTWRQFSSYCGLAPFEYSSGTSIHRRKKCHYLGDRKMKSLLSMASISAIQHDQELRLYYESKLAEGKPKMIALNNVRNKLLSRAFAVVKRGTPYVLLNQYAA

SEQ ID NO: 207388 - protein, 310 aa, unidentified
MGTVNAAIEVGKHKLDVALGSDGELFSEPNQPRAITRLAKRFAQVGCERVLIEGGSYQNVLVGALRAAELPVVIINPRRVREFAKSIGQLAKTDHIDARVLARYGERIQPPVRELSDEQNHALRGLWVRREQLIEMLVMEENRLEHAPKALHRSLRAHIAYLRKQIKQADHDLDRAVRNSVLWDQYELLSSVPGVGPVLSVALLSDLPELGRLNRREIAALAGVAPFNCDSGTLRGQRKIQGGRKRLRRVLYSATVASVRCNPALRPFYQRLRATGKPAKVALVAAMHKLLLILNAMLKTKTVWRPPCPV

SEQ ID NO: 207389 - protein, 381 aa, unidentified
MTTTVTHNGHDTTPARVLFVAFELSEKTWKLGFTTGHGQKPRERSFAAGHQARLLQEMAQAKRRFGLPETAPVVSCYEAGREGFWLHRFLEAQGITNSVVDSSSIEVNRRKRRAKSDGLDVRKLLSMLMRFHQGERDVWRVVHVPSGEAEDQRHLHRDLETLKQERASTTARIKGLLSSQGLRLTTLNKLPEQLDVLRLWDGAPIPSGLRHRLLRVYAHHQFLSEQIAALEAERRALLETAHEASLEKIRQLMQLKGIGINGAWLLVMEFFGWRDFKNRREVGGLAGVTPTPYQSGESAREQGITKAGNRHVRWMTTELAWSWLRYQPESALSGWFRERFGSGGKRLRRIGIVAVARKLLIALWRFLKSGVLPEGAVLKEA

SEQ ID NO: 207390 - protein, 369 aa, unidentified
MGEYSEAFVAFDVSKTKHAVAIADGGRGSEVRFLGEVANTPAAVERLVRKLASRYGKLHFCYEAGPTGYGLYRQIEALGHACLVVAPALIPKRPGERVKTNRRDAVTLARLHRAGELTGVWVPDATHEAVRDLVRAREAAADDRRRKRQQLLSFLLRHGRVFSGAGHWTLAHRRWLAKQSFEHPAQQIVFQEAIDAIADADQRLRRLEQQLAAIAPSWSMAPVVAAYQAMRGASFVVAVTFAAEIGDVRRFDNPRQLMSFLGLVPAESSTGETVRRKGLTLAGNRRARRVLVEAAWTYRYPARIGEALRARLEGLPKIVRDIAWKGQVRLCARYRRLSAIGKKLPVVVAAIAREMAAFLWAIGRQVAPA

SEQ ID NO: 207391 - protein, 345 aa, unidentified
MEEYDGRQYVGIDLHKRRSVIVRMTRDGERIGSPVRIDSEPFVLAAQIASWGEAPEVVLEATYGWYWAADVLAEHGARVHLAHRLGVKGFAYRRVKNDERDASDLADLLRMGRLPEAWIAPPAVRAMRETVRHRAKLVALRSGLKAQVHAVLARQGARVEVSDLFSPAGRKLIAELRLDPPFHARVLSLLRLIDAYDFEIDAVTKRITAELKHHPGYQAIQAIPGVGPILAAIFVAEIGDIARFRRPEQLCSWAGMTPRHRESDTKVHRGRITKQGNNLVRWAAVEAIQRVHYGPIASVKARLTARRGTNIAKVAAARELLTLVFYGLRDGHIRALAKAAQAQAA

SEQ ID NO: 207392 - protein, 360 aa, unidentified
MTTTAVSTAAGPILAIDLGKYKCVACAYHATTEHAFHTIDTSRTEVARLIQRTRPAVVVIEACSLSGWVHDLCLELKVPCRVANTAAEAWKFKHSKRKTDRDDALRLAQLFALGQLPEVVVPARATREWRALIAHRQALVTQRVAAQNRIRSILVGQGLPAPRGAKAWSAIGLAGIGQFARPLAECGPEELWRGLLELALTTYRQAEERVAVAQAKLDAIGKADARVRLLDSMPGLGPRTAEAVVAHLDDPRRFRSGKQVAAYGGLVPRQFQSGEDDRRGRITKRGPAVLRKLLVQCAWAMIRYNPWAQAVYVRLSRGQARKKQAVVALARKILVRCWAMLRDGVPWRPDAATTIVVAAT

SEQ ID NO: 207393 - protein, 482 aa, unidentified
MKKKNIYTNQSQELLTLFEEAGNGVKVMCVPIDYAKKDHVAMLCNGNGHILRKPFSVKNSPEGIEYLIEQVTRSCSHRQMDLKHVFFGGEDVGSYAENFVNTLRSGGWIVAGVNAHDAKEQRANMQASTDRLDLMGIASMLLNRRGNCSPAQSGIYRNLRTVVRHRKKLVAMSTEVKNRMHTVVDRLFPGFLDEKKSGILSFSKSSLYLMEDRFSPRQIRRRKRKKLIEILKRYGTAKPESTTAKLQEYAARVLNTPNEYVDTLQLSLAQHVKHFKCLQDSIDQLEHEIAVWLAQTQGAFLTTIRGIGIVLAAGVSAEIGNPQEQKPLNNLVSYSGIIPRVKQTGGSEGKTHTGKVAKRCNHILKDYVVQSGNHMGLHGPEELMADYKRREAADQHADFGIGRRYLRMAMCLMRTSQIYMPEQLRNTEVKPEERAGYYLTIWPYLRRKWKKAGALEAAFEKDRPLGQWRCMVQELYGIKLKL

SEQ ID NO: 207394 - protein, 356 aa, unidentified
MTSNIKYVGMDVHKESISIAVRNAAGKIVMECVIETKANTVLQFFDGLRGDVQVTFEEGTWAAWLHDLLKPHVMKLVVCDPRRNALLQDGNQNDRVDARKLSDLLYMNKLKPVYHGDHGLRTLKELVRSYLTITKDLGRVMTRVKAIYRSWAIPCSGKQVYSSRHRAEWLGKINEPGVRQRAEFYYQQLDALRSLRQTVRRELLAESKKHKAWKRLCQIPSIGPIRAAVLLGILQTPHRFRTKRQLWTYSGLGIEVHSSADHETVKGQLQRKKKHVEIRGLNENCNHDLKNLFKGAAVVASTKPGPFESFYVTLVAKGIRPEMARLTLARKIATIVLMVWKKGVCFDANHLKPQTA

SEQ ID NO: 207395 - protein, 408 aa, unidentified
METLHRRCAGLDVHQKEIVACRRIVSGRKVRSELARFATTTQGLLALSAWLAETKITHVAMEATGVYWKPVWHVLCHDFSLVLANASHIRNVPGRKSDANDATWIADLLAHGLIRASFVPPQPIQDLRDLTRTRRGLTREIVRHTQRIQATLEEANIKLASVISDILGWSGRRILKAIVSGQSDPRRLAELGHPQLACTREELAAALEGRLRDHHRFLIGQHLKTIEQIEATIAEFDARLEAALAPFCGAAERLNDLPGVSDNVAQTVIAEIGVDMKAFPTAGHLLSWAGMCPRLDESAGRKRSRRLRKGAPWLKPVLVQAALAATKVKNSSLRARYFSLRPRLGHKKAIIAVAAAMLRIIYHMLKDGTFYQDLGPDYRRPRNPERAARSLANRIRSLGFDVEIKKAA

SEQ ID NO: 207396 - protein, 341 aa, unidentified
MDTVSLVGIDLGKHCFHLHAQDASGRMVFRKKLTRSQMFALLGNFPSCTVVMEACAGAHWIARRLQALGHEAKLISPHFVKPFRQGNKNDFADAQAICEAASRPSMRFVSPRNEAQQVVSALHRVREALVRERTGTINQIHAFLLEFGISLPRGMAVIRRLPAVLETQALPPRLVAVLERLQAHFKYLDEQIGQLEHELLTQLHEDERSERLLEIPGIGPITASVLMSELGDAHQYGSARQFAASIGLVPRQYSTGGKPTLLGISKRGDKELRRLLVQCARVIMLRIERRTDSLGTWVRSLMARRHSNVVACALANKLARIAWAILAKGTHYRSAPAALAA

SEQ ID NO: 207397 - protein, 364 aa, unidentified
METVFYAGMDVHKDSIQIAVLKDGAPGCETETRIPYDFAKVRKFFCSLQKKGTVFAAYEAGSMGFELERFLREMTIQCVVAVPSKIAKKPGDRVKTDRRDAMQIARLLRNSDLDAVHVPTPEDEAVRDFLRARADVKLDHTRTKHRLAKFLLRHGHLYHETQWTDRHLQWIKGLSFSLPALQETLDGYLETLLTQKEKLRALDARIEELAISARYADAVSKLRCLKGIDYLTALSLVCEVGDFRRFDKAEQFMSFLGIVPGEHSSGSTRRQGGITKAGNVHLRKLLVESSWHYRYHASASASLIRRRTGQPPEVVAYADRALRRLQNKFSRLVNGKSKATQVAVTAVARELAGFVWGLMVGKTA

SEQ ID NO: 207398 - protein, 501 aa, unidentified
MSNANARRLSRGDRQRNERLTRLRSVITRESAVLAFDLAADKQVCALCDQDSQVIARRTITAKAWQLSAAVAWGLARAAEAGFASVVVACEPTGHRWRVLDQLAEAAGVRLVCVQPLLVGRAREAEDFTRNKNDDSDAVIIARLVAELRCYLPERAEPAWARLRHLGARRARLVVEAGAAGAQIRDLLECAWPAVWTAAVEPLESASWRAAVTVVLDRVADTGDLGRFRRSGWSRFAATVRRELPRHGTVRWHSPIVRAVFAATTDPDQAGLGVLEQRGGALERVRFALDDLAHARAELAVVEARMVAVLDDLGLTELVTSIPGLSAVGAAAILAESGDPRRFTTARALVKHAGLCPRDNASGGYQGKTAISGRGRPRLRMAAWRAIFPALHHNPVLAARYVHLVGRPDRRLTDAQARVAVAGSLLRQLHAVTTTGTPWDESIAAGNPPTGTGGRLRRLSAPADHGRGQPACATGFHPARDPGQPRPSPPSPDEGCRDQPA

SEQ ID NO: 207399 - protein, 412 aa, unidentified
MVELLVARCAGLDVAKDEVVACVRVPDGGGGRAQEVRTFLTFTSGLEALAGWLAAEGVTQVVMEATGQYWKPVWYLLEEAGFELLLVNARHVKILPGRKTDVCDAAWLAELLEHGLLRGSFVPPAPIRELRDLTRYRKRLIQAHASEGQRVQKTLEDAGIKLDSVAADVLGVSGRAMLTALVAGERDPQVLAELAKGRLRAKLPQLRQALRGRFGDHHALLVRLALAHLEHLEGAIATLDTEVDRVLAPFARARDQLATITGVGKRAAETIIAEIGVDMTVFPTAGHLASWAGRCPGNNRTGGKRRSGKPTKGNRWLGEVLIECAWAAARSRDTYLSAQYWRLARRIGKKKAAVAVGHSILVIAWHLLTDDCDYADLGGDYFVRRDTDRQRQRAVAQLQALGYRVVLEPVTV

SEQ ID NO: 207400 - protein, 409 aa, unidentified
MDVVYERCCGLDIHKSMIVACVMKGREKEIKTFGTFTDDLLQMSEWLKANQVEMVAMESTGSYWKPIFNILEVEDVPAILVNAQDVKNVPGRKTDVKDAEWLADLLKHGLLKASFVPKREMRELRELVRYRRSIIDERAREYNRIDKVLQGANIKLSSVASSNKTKSGLDMVRAIAKGEFNAEVLASMAKGTMRSKIDQLKLAMNGLIQPHQQILLSSMLNHIDLLSKSIEALDAEVDKRLSDVSDIVEMLDEITGVGRTTAEVIVAEIGTDMSQFPSAAHLASWACMCPVKNSSAGRKKKEKTRKNKGILKSSLVQAGRSASNSKDSYFHSQYVRIAARRGANRAAMAVGHSILVICYHMIKNRTTFKDLGKDYFVEKDKEKIAGRHLKRLADLGYTVLIVEEIEESA

SEQ ID NO: 207401 - protein, 428 aa, unidentified
MTYKVAGIDIHKKVLMVVVATAAAEVKDAAGEALEFECRRFGAGAAERAELVRWLQERGVSEVVMESTAQYWKPVWLDLEPHFGKLHLAQAQSNRAPKGRKNDFRDAKRLTRRLLAGELMLSYVPGPEQRSWRTLTRGKCHLVRDRVHLQNQLEALLEEMRIKLSSVISDLLGVSGRKILEALSKGETDPGKLADLGSGKLKCSRKELIDALNWSSSPIQLTLLKQHLDRLKMLDTQIKELDESVAEAMRQHQAAVIRVAEIPGFGADSAQQIIAEIGVEAEAFPSADEFSSWVGVCPGSNISAEKNGSSHSPKGNPFVRRLLDQAAQAAVKKKGSRFQSLFRRFLPKLGYAGAIWAVAHALAKVVWLILHKGVKYIEQGTEPSLKAKKRRAQKLAQALRKLGYSVILTPVDVKPVTPITEDPAWDPA

SEQ ID NO: 207402 - protein, 351 aa, unidentified
MKEFIALDAHKRYSWMEREEVKSRKVRHARIEHAPGAIREGLEGREKGTPVAVEATGNWYWIVDEIEEAGLEPKLVHPRKAKLMMGLINKTDKLDAHGMNQLQRNGTLPTVWIPPRELRDLREITRARMVLTRHRSRLKNRIQATLSKYGWAGGEASDPFGKKARTELSKAIGGLPPQTAQITEMLLQQLDFVQEQIEAMEQKIRELVKDTVEMNRLRSLPGVGWILSAVIALEVGYMDRFASGERYASYSGTTPRVHASGDKIRYGRLRPDVNRYLRWAYVEAAHSVCLHRKTYPGRHVSQLYERIRERKGHGKAIGAVARHLAEATYHVWIREEPYQDPVLRKGQSREV

SEQ ID NO: 207403 - protein, 375 aa, unidentified
MKEKVRFLGLDVHAETIAVAVAEPDGEVRSLGTIPNRAESIRKMIRKLGPAEQLRACYEAGPTGYVVYWQLAELGVKCEVVAPTLVPVKAGDRVKTDRRDAEKLARCYRSGDLTAVWVPDEGSEALRDLVRAREAAKQDQMRARHRLSKFLLRSGQRPPTGVRPWTRPYLIWVAQLRFTQSAQESTRQDYLHEVEHMRARVARLEQAIMEAVKLASPALQQVINDLQALRGIADISAVTIAAELGQVSRFGSARELMGYCGAVPSEDSSGKRIRRGGITKTGNAHLRRIVGEAAWSYRRPPCIWYGLRRRQESISEEAKEIAWKAQHRLHKRYMKLGAAGKPQGKIITAVARELLGFIWAIGIRAETIAGQQAAA

SEQ ID NO: 207404 - protein, 368 aa, unidentified
MKMNAIKAALAASTIALKNEKSAKAKRILIGTDVHLRGYQAARKVDNGVIGVVENFRSEEALLLHVEKQCKRAEQVVVVYEAGPLGYTLYRKLTARGVLCYVCAPDSSEQKRKRRKNNKIDARNLTSKLFNYLNGDEGALQLARVPTEAQEQLRLASREHDQMVEERKRLGAKGNALLLSQGFGSWSNWWRPKAWAQLSSLVPEWLLERLKIWVDVLKMLDEKICLAKVALARACSGPRPKGVGALSQIQLQSEVLDWSLYTNRRKIACLAGMVPSEWSTGDTERRGSITKVGVPAIRRIIVEMVWRIVLFQPQYKPVQKWQKVLQGTNPALKKKAVVAIGRQLIVDLWRLQTGRVTVQELNLVMVGA

SEQ ID NO: 207405 - protein, 421 aa, unidentified
MTEQGRHWFVGVDWGREAHQVCVLDAAGAIVGERAFAHGGGGLAELCDWVVASTGGDPAAVAVAIEVPHGPVVETLLERGFRVCAVNPKQLDRFRDRFCVAGAKDDRRDAHVLGDSLRTDRHCFRGLAVSDPVVVELREWSRMSEELQQERTRLVNRVREQLWRYYPQALDVAGGDVAAKWFLDLWTLAPTPAKAARVRESSVDRVLKTHRVCRLDGAEALERLRQKPLTVAAGTTEAAVAHIGTVVQRLKLVNRQIKQAHRRLDALCDKLAEGGDDETPKPSDEPSDVAILTSLPGVGRIILSALLAEAWEPVRRRDYGALRMLSGVAPVTRRSGKRCVVVMRHACHLRLRNAVYHWARVAIQHDAVSRDRYAALRKRGHSHGRALRSVADRLLAVACAMLTDRRLFDPNHATREVTEAA

SEQ ID NO: 207406 - protein, 451 aa, unidentified
MSKQRNKVVSLPVIEPNAAGIDIGATEIFVAVPADRDPEPIRCFPTFTVDLERLADWLQQCRIRTVAMESTGVYWIPLFQILEKRKIDVRLVNAHHVKNVPGRKTDVSDCQWIQHLHSVGLLRGSFRPDDEICAIRSLWRHRDNLIQLATLHLQHMQKALDQMNLQIHHVISDLDGTTGLAIMDAILAGERDPLKLAQLRHPRIRASEETIMKSLVGDYREEHLFTLRQSLKAYRYYQELIQEVDAQVKQMMQRLPSKVAEGEEPPQGSKRRARKTPWRNEPSQLREDLYRAFGVDLTEIPGVNSLTAQMLLTEIGPNLDRFPTAAAFCSWLRLCPDPKISGGQVLSSRTRPTKNRAALALRVATQALHRSDCFLGDYFRRMKARMGTPKAMTATAHKLARIIFHLITTQQPYDTTIFQKQEERRQHQKSARLHAQARELGFQLIPINVVP

SEQ ID NO: 207407 - protein, 334 aa, unidentified
MEKSERMVGVDVSARTLEVSRGAADEAVATRQFANTGAGCRELARWVTQGKRPARVVLEATGLYSLDVALVLQRTPGVAVMVLNPRVSKDFAGACGLRARTDATAAGLLREYAARMPFCAWTPPSAAALGMRALMRRVVVLTELRVQERNRLHAVEATGALPPVLRRHLQQQIAGLGRQIVQLEHEARALVEPVPALRAGLARLRSIKGVGVRSALLILAELAVWPVALSARQWVAQAGLDPRPIQSGTSVHPPVRISKRGNSYLRRALFMPALVAVRHNPAVGRLATELAARGKAPLQVLVAVMRKLLHAIHGMLRTNTDFDGEKFRRSLPTT

SEQ ID NO: 207408 - protein, 331 aa, unidentified
MDTDTGEFQEKRLVHPEEAENFYRALAGKKVRVGMEASGHARWFERLLSELQFEQWIGDAAVIHSKRVRKQKTDRQDAQLILQLLLEDRFPQIWVPSWENRDVRQLLWHRHRMVQARTRIMNQLQAVALNEGLRCKKRLWRERGRQQLESFRLAPWASRRRQDLLELLDRLNPTIAELTQAIEQEAEKCPAAQQLRTHPGVGALTALAFVLIIGEADRFHCGKQVASYLGLVPLEDSSGKRRRLGHITKQGSSILRFLLVEAAQVTVRRLPEWRSKYFHLALRRGRKIAKVAMARRLAIALYWMWRKRWDYEQVKKFGSHAGQPENRHGVK

SEQ ID NO: 207409 - protein, 338 aa, unidentified
MTVVTVGIDLAKNVFAVHGVNAAGKAVLVKPLVRRAKLLELIATLPACLIGIEACTGAHYWAREFQKMGHTVRIMAPQLVSPYRMGGRHGKNDAADAAAICEAVTRPNMRFVPIKSVEQQGQLFVHRAHQGYVSERTALINRIRGLLSELGIVLPRAFKAFLSGVAQVLEDLPGYCNQVIGDLLNELYHIEEKIKNSEKLIQQLARDNSAAQLLMQFRGIGPMTATAIVASIGNGHDFKNGRQFSAWLGLTPRQQSSGGKARLGRITKAGDSYLRTLLVLGARSVLLGAAKNDDPVSRWALQLKERRGYGRALVAIAAKNARMCWAMLHLRDEFRFPA

SEQ ID NO: 207410 - protein, 343 aa, unidentified
MQHIAIDLGGKESQICVRSLEGQIVHEGKAATRDLGRFLKRQPESRVILETCTEAFSVADAALSLGHEVRVVPATLVRSLGVGARGIKTDVRDARALSEVSCRIDLPSVHVPTELARQRRSMCGMREELVASRTSLVNCVRGWARTQLLGIRTGHPETLPRRFRAAALARADGLPEYVERTLVVIETLNEQIALADKELEQLARRDPLCERLMSVPGVGPVTSLRFAAAVDDVSRFPNAHSVEAYLGLTPGENSSSQRQHRTGITKAGPAAVRRTLVQAAWSLRRFRPADPITQWAAEVERRRGKQIATVAVARKLAGVLYALWRDGTRYEANHARAKKPAAA

SEQ ID NO: 207411 - protein, 342 aa, unidentified
MPVVGGIDIHRAQLTFDYVDLDSGEVVRGRIAPADRERLRHWLQRFAGRDQVAFALEGCTGWRYVAEELARAGIGAHVAEPAETAARRGPKRRAKTDRSDAQLLRELLLEGRIPESWIPPAPVLEARALVRLYKDLLDERTGWLQRVHASLFHLGAPDLDVGAMSPAGRERLAAAELSPATRTAVDVALRQVDRLTADMTRVRELICVIGRRQPACRALQAAHYGVGPLTSVVIWAEMGDTRRFSSSDDAVRHAGLDVTVYSSDGRRSAGHLARQGPPMLRWALYEAAVYAGRPSSPDHAYFQQVKARLGGQLALLSMARKLARRCHHTLRNLDDQVLAPAA

SEQ ID NO: 207412 - protein, 317 aa, unidentified
MVVPAPVVGIDVAKDHLDVAIGLDTPPSRFDNTPKGHRSLARVLVKASPKRIVLEATGGYERQVLRHLVERQLPAIRVNPRQVRDFARATGILAKTDALDARVLVRFAAAVEPPTRPLPSKEQEKLAFLSSRRVQLIEWRTAEKNRKQQCPAGMSTRTMDEMIESIDRELKKLKAEAAEVIAAHERLERTFKILKSVPGVGDVTAAVLLGQMPELGTLSRQAAAALAGLAPYNQDSGSRTGQRHIRGGRAGVRTALYMATLTATERNAVIKEDFDRLIAAGKPGKVAMTACMRKLLTILNALVRDDKLWGEKNSKEA

SEQ ID NO: 207413 - protein, 339 aa, unidentified
MTEVTTIGVDLAKNVFQIHGVDASSQPVIRRQLKRSQVLSFFKKQPPCLVGMEACASGHHWAREVSKLGHEVRLMPARYVKRNKNDAADAEAICEAVTRPTMRFVPIKTREQQSGLMQHRTRKLFVRQRTALINAMRAHLAEFGIVAGVGRNGVEKLVRLIDKGDDERVPSAARECLLALRDQLEAVKFRIHELDLRILAWHRSSELSLRLGEIPGVGPLIATALIASIPDPHAFRSGRDVSAWIGLVPKQNSTGGKERLGHISKAGDRYLRSLLMIGAFSLIKRAKQAGSTPRPWLAALLARRPTKVAAIALANKIARIAWAMMVRGTRYSEPAAQAA

SEQ ID NO: 207414 - protein, 340 aa, unidentified
MNIVFLGIDLAKNVFQLCGLNQAGKPVYSKRTGRKELLQTVANIPACLIGVEASTGAFYWQREFEKLGHKVKVISPQYVKPFVRGQKNDGNDAQAIAVALMQPTMQFVPPKSPEQQDIQALHRARQRIVNHRTATVCQIRGLLLDRGIPIGSAVSRARRAIHLILEDAENGLSARMRRTIAELYDLFNDLERRVHFFDKEIETVFRQSEACQRIAKVKGIGPKTATAVVAAIGKGTEFKNGRHFAAWLGLVPRQHSSGDRQVLMNMTKKGDKYLRTLFIHGARAVVRVAMNNNNGYMNQWVNQLKERRGFNKTTVAVANKNARIIWSMLRNDTEYQAVGS

SEQ ID NO: 207415 - protein, 373 aa, unidentified
MAGSREAFVGIDAAKLRNAVAVADEGRDGEIRYLGEFDAAPESMRRLVARLAAKYDRLHFCYEAGPTGYGLYRLIVSLGHSCTVVAPSLIPRKPSDRVKTNRRDATTLARLLRAGELTAVWVPDPAHEAMRNLVRARTAAVETVRVHKQQVGAFLLRHGRISPLKKSWGARYRRWLQEQAFEHPADQIVLQEYVEAVRLAEERLGRIERAIAEFLPGWSLAPVVEALMALRGVDLVVAASSAVEIGDVRRFESPRQLMGYLGLVPEERSTGETVRRGSITKMGNARLRQLLVESAWTYRHPPRVGKGKLAKIERVPPKVREIAWKAQSRLTARFRAFAARGKKLTVTCTAVARELAGFMWAVAWEVQPASSVA

SEQ ID NO: 207416 - protein, 338 aa, unidentified
MELYGAIDLHSNNNVTVLIDEQDRVVYQKRMPNDLPLMIQQLSAYRESLQGIVVESTYNWYWLVDGLMDQGHRIHLANTAAIQQYEGLKYTDDPSDAHWLAHLLRLGVLPEGHIYPKQQRPVRDLLRKRGQMVRQRTANLLSIQNLFSRNSGSSMSANRIKTLDSQEVDDLVPNGDLALAIKANLAMLRCADEQIDILEKTVIERVKLKPQFKLLKTVPGIGHILALTIMLETGEITRFPTVGDYASYCRCVGSKKISNGKKKGSGNTKNGNKHLSWAFVEAANFAVRYSVKINSFYQRKKFKTNGIVAIKAVAHKLCRACYYIIKDQVAFDVSKAFA

SEQ ID NO: 207417 - protein, 418 aa, unidentified
MNQLTDTEYTAYVGIDWAAAKHDICVQAADGGRREFFCISSQPEGIDAWAQALYRRFGGPIAVALELSKGPIVSALQKYDFFVLYPINPSTLAKYREAFTPSGAKDDPTDAELAVDLITRHPERFSPLKPQSVGMRKLIGLVEQRDKFLGDRGRLVNRLGHALKQYYPQVLEWFSEHHTVVFCDFVSQWPTLNQAKRARKASLERFFRSHHVNSAELIERRITAIKAAMALTADAAVIDPHRLQVEVLIQQLRITIKALKRFDDEIAATAHKLPDYDLLFSPLPGAAKVLAPRLLAAFGEDRQRYDALQKYSGIAPVTKRSGKTTWVHWRWQCPTFVRQTFIDWSAQTINKSAWAGAYYRQQRAKGCSYQVAVRALAFKWIRILHRCWQDRTPYDESKYLEALRRKGSPLLKYLAQAA

SEQ ID NO: 207418 - protein, 346 aa, unidentified
MTSLADRITGGVDTHLGIHVAAALNHLGVLLDTRSFPATAAGYRQLLGWLRAFGVVELVVVEGTGSYGAGLTRHLQTKGVTVVEVDRPNRQNRRRRGKSDVVDAIAAARSAQSGDASGRAKTRDGNVEAMRVLRLVKLSARRSKTVALNQMRSIVACGPEELRADMRDLSAKQLIGRAAALRPAGRTDILGATKTSLRLLARRAQAFDADIAEINALLEPLVGETAPDLLTADGVGTDVASALLVAVGDNPERLRSEASFAHLCGVAPLDASSGKQERHRLSRAGNRQANSALWRVVMTRIVYDPRTKHYIERRMKEGLSKREAMRCLKRYVARELFFLLPLPRAA

SEQ ID NO: 207419 - protein, 311 aa, unidentified
MQDTIGIDVSKDKLDAFHLATLEHRQFANDRRGLQSLRRWSGKSGCSLIVFEASGVYHRQLENCLSAACVPYSKVNPRQARRFAEATGKIAKTDKVDAAVLARMGAVLQLEAQAPKAEYLNVLREMMTARRGLIKDRVTVKTRMQTTTQTLLKRHLKERLAQVEKHLEQVDQTIMGLLAKDEHLIARFEILTSIPGISKVTAFSMLIEMPELGTMSGKQAACLAGLAPISRQSGRWQGKERIRGGRAFFRRAMYMPALCTIRHDLSSKRKYDQLVLAGKPPKVALTAIMRKLVVVANALLRDGRNWSENRT

SEQ ID NO: 207420 - protein, 321 aa, unidentified
MQSQNTVVYAGVDVAKATLQLHLQGQQSEFSNTPKGLHQLCAQLQKVPSVQVVCEATGGYERALVKALHQEQIPVSVTNPARVRAAAQAQGQRAKTDRIDARGLTDYGQRYQPKATPPVSATQEQLVNLTQWLKQLIHGRALAKTQAEHHQDPFVRRQHAKLMTHLDSQIEVVEKQIKALIEQDAALQQRVNCLDEIQGVGPRTAWMVLAHMPELGRLNRHEVAALAGLAPWTRESGTMKGMRCIGGGRPEVRLALYMAALSAARCNPVLRTLYKRLRAKGKLPKVALTAVMRRLLTYMNHRIKALPSETATAQTKGLQKA

SEQ ID NO: 207421 - protein, 348 aa, unidentified
MVHFVGLDVSVKETSVCVVDDTGKVICEQKVPTEPAAIIALLSSLGATFGRIGIEAGPLSQWLVNALTAAELPVICVETRHMKALLTAQQINKTDRHDARGIAQMMRVGLFKPVHVKTLAAQEQRMLLTSRKLLQRKLLDVESDLRGTLRNFGLKVGVVSRSRYEVRIRELVESFPRLAAIVGPLLAVRRVMRQQLAVLHKMLLDTVRGDPVCRRLMTAPGVGAVVALTYRATVDQPQRFVHSRAVGAHVGLTPKRYQSGEIDYDGGVSKCGDALLRTMLYEAAHSLLTHSGKWSWLKAWGIRVAQRRGMRRAIVAVARRLAVVLHRMWVDGSEFRWKKDSAAAPAVT

SEQ ID NO: 207422 - protein, 327 aa, unidentified
MHYVGIDVSKRSLDVCLLAEGSKGSRKTKTLSNGQDSAQNLAKWLILQKCELSQTHVIMEATGIYHEYLACGLHQMGILTSVINPCRSREFAKAMGIFTKTDAVDAYVLAFYGCLKQPEAWTPPEEEVRKLRALLQHRDSLLNDKLRIDNRLNTLKSTEAVQEVMDSLSLVNQYLKSEVARIERLISSHIAQHPGLKRDLKLLMSIDGIGKQIGWNMLAVLRGNNFKSAEQLAAYLGVVPVERRSGTSVHGRARLSKIGSSNIRAKLYMGALTAISKNSHIKALYERLLAKGKMKMSALGAAMRKLVHLCYGVLHTQQPYMKNIKQK

SEQ ID NO: 207423 - protein, 401 aa, unidentified
MNAVGIDVSKGKSTVSILRPFGEIVYSPFDVNHSSSDINALIQLINSVEGESRIVMEYTGRYYEVLAHQLSEANLFVSVVNPKLIKDFDNDSLRKVKSDNADSIKIARYALDKWHKLHQYGDMEELRNQLKTMNRQFGFYMKHKTAMKNNLIGILDQTYPGVNTYFDSPARSDGSQKWVDFASTYWHVDCVRKMSLNAFIEHYQKWCKRRKYNFSKTKAEEIYEKAKELVPVLPKDDITKMIIKQAIDQLNNTSATVEKLRSLMDETASKLPEYPVVMQMKGVGPSLGPQLIAEIGDITRFHKKSALTAFAGIDPGVNESGSYEQKSVPTTKRGSADLRKTLFQIMDVLIKTAPIDDPVYQFLDKKRSQGKPYYVYMTAGANKFLRVYYGRVTEYLSTLSN

SEQ ID NO: 207424 - protein, 343 aa, unidentified
MQIAVLGIDLGKNSCSLVGLDGRGAVVKRRRMRPASVVGLTKALPPCIIAMEACCGAHHLGRLLEAQGHDVRLMSPEYVRPYVKAQKNDDRDAEAIAEAATRPTMRFVELKSEEQLDMQTLHRARDRLVGERTALINQLRAILLERGIVIAQGRRNFERELDAMLCEEQGLAVSPRLRMLIEDMWEEWRVLDRRIAAFDDEFAARAKNDEAARRLATIPGIGVLNATALAAAIGEGQTFARGRDLAAWLGLVPRQITTGGKPRLAGISKRGNCYLRKLLIHGARAVLPTLSKSETPLGGWLRALLARVHKNAAVVALANKLARIAWAVLRRKETFNPSAIALA

SEQ ID NO: 207425 - protein, 421 aa, unidentified
MNQLSGEPYTAYIGIDWASTKHDICLQLAGGEERVFERIKHTPEAIEEWAQALYQRHGGPIAVALELSEGPIVSALEKYDFLVLFPIDPKRLARYREAFVPSGAKDDPTDAEFAMDYLMRHPEKLKVLKPESAPMRKLRYLVEARDRIRGDQSRYVNRLIQALKQYYPQAVDWFNDHNTLVFCDFVQQWPTLTKVRRARKTRLERFFKEHNVRFAHIIEERIQAIKAATPLTHDAAVIEAHRLQVEVLVEQLRLTIKAMKCFDEQIAAIAAQFPDYEHLYTPLPGAGKVIAPRLLAAFGEDRDRYHCAAQLQKRSGIAPITKRSGDSTWVHWRFQCPKFLRQTFIDFAAQTINKSAWAGAYYRQQRDKGASHHMAVRALAYKWIRVLYRCWQQRTPYDESKYLETLRRRGSPLLKQLAEAA

SEQ ID NO: 207426 - protein, 341 aa, unidentified
MKNLFIGVDFSKEKVDVAIIFADGLTETAARMFNEFKTTVSGYKQLVKWVEQNSYGIDSSLWLFCGENTGDYSKGLCNFLYGKGYDMWLENAKSIKDASGLRRLKSDRADASMIAEYAMRNYDRAIMYEPLSESLAQLRELFLYRQMVIRHRCSFQVRRGEKKLTMEKSPVKTMISQSGRHIVSELNKEVEKIDKRIAELIKSDEELTEVFTIVTSVPGIGTQNAVCLMVYTDNFRRFNYDSRKIACYYGIAPFGKDSGTSVHSDPHVHYMANRQIKAMLTQAALAAVNFNSIMARYYMRLVERGKKKQVALNNVKNKLVHLITAMVRNRQLFSPEYKISA

SEQ ID NO: 207427 - protein, 413 aa, unidentified
MNYEPITAVGIDVSKGKSTVAVRRPGGEVVLTPFSVEHDAVGLSSLVKTLRSIGGDIRIVMEHTGMYWRPIALALKEAGFFVSVVNAMLIHDFSDNSLRKVKTDKADSMKIANYALSFWAELRDYSPEDETRQMLKMQNRLYLRTQKSSVVLRNGLISLLDQAFPGVNTLFDTQPRRSNGHFKWVDFVKRFWHRDCVAGISLAAFSDAYRKWCAKSGYRFSQSDAEKLHTAARNTVATFPKNDSTKLLIAQAVDSLNAVYDALYILRGEMLRLASLLPEFDIVMAMQGAGEVTGPQLMAEIGDVRRFTHKGALVAFAGMDAPPFQSGTFDSKSRRISKRGSPNLRKTLFMVASTILQHSDPANPIFQFMDKKRAEGKHFYVYMVAGAAKFLRIYYARVKAHLLALDAEASTAA

SEQ ID NO: 207428 - protein, 348 aa, unidentified
MLIIGCDYHPGFQQIAFVDTETGEVGERRLTHREEAEQFYGTLKERSVRVGMEASGHARWFERLLTDLQFELWIGDAAEIRTKRVRKQKTDRQDAQLLLRLMMEDRFPRIWVADAANRDLRQLLWHRHRLVQMRTRIMNQLHVVALNEGVRRKKALWRPAGRRELESLLLAPWAKRRRQDLLDLLDQFTPKIQQLTRALEEEVEKRPVTRRLMTHPGVGPLTALAFELVIGTPERFHCGKQIASYVGLVPSEESSGDRRRLGHISKQGNVLLRFLLVEAAQVTVRSQAQWRSKFFHLALRRGRKIAKVAMARKLAVHLYWMWRQGWDYGQFEKLGSHAGEPGNRHGVQ

SEQ ID NO: 207429 - protein, 352 aa, unidentified
MELEEVPMTIVGGLDIHRKQITFDYVDTVTGRVRRGRIAPADREHLAGWLAQRFPGRTDVEFALEGCTGWRYVAEELAAAGVGAHVAEPADTAALRGGRRHAKTDRTDSRHLRELLADDRLPQCWIPPAQVLECRALLELYRDLRVEHTAWVQRIHAVLFHQGAGALTVPALRSQAGLVELSEQAADLSSAGKMQVVTALEMLAVLDEQLVQVRRQLLAAARHLRGARVLTARLYGVGPITALALCCWLAGAGRFSSARKAVRFAGLDVTVHSSDGKRSPGHLSRQGPSVLRWCLYEAGKTHARGSAPDHAYYAQVKDRIDGKRAALSEGRKIVRQACHLLSELGDDALTQV

SEQ ID NO: 207430 - protein, 354 aa, unidentified
MEIKYIGMDVHKEAISIAVMNGDGKLVMESIIETKAITILQFIQGLRGALHVTFEEGTWAAWLYDLLKPHVTKLVVCDPRKNALLKEGNKSDKIDARKLADLLRGGYLRSVYHGENGLRTLKELSRSYLTISKDLTRIMNRLKAIYRGWAIPCEGQQVYDPRHRAEWLDKIREAGVRRRAEFFYQQLDALQALRQEVRRDLLAESQKHDATKRLRQIPCIGPIRAAQLVALMQTPHRFRTKRQIWTYSGLGLETHDSAQYRYVEGQLQRSKKPQQLRGLNENHNHDLKNIFKGAATRASSCPGPFHDFYEALRAKGMKPTMARLTVARKMAAITLIIWKKGVSFDAKHLKQQAA

SEQ ID NO: 207431 - protein, 339 aa, unidentified
MDKYIGLDAHSSTCSFCVMDGNGKVHDNVKIVTNGRLLREYVRNIPGSKKLTFEECELSSWLYEMFKNEDCELLVCNPVENRNYKKAKTDKLDARQLADLLRGNFLTPVYHDGSEREKFRDLMSGYQDLIEDAVRMKNRYKSLFRKEGKRESGQKVYNDERLLQGLGREDFKFVGKHIHHLLKEMEKIRQEYIPEIRKYSKKFKEIRVLKTLPGIKDIQASKIVAQVIDPRRFKNKHKYFSYCGLVRHRQTSGDRTYGDKKIWGNRTLKCVYKMAANSALKGDNVFREYYDNLRNNGTSHKNARNAVSRKIAAISLILWKNNVKFKPEMVANGIIKKAA

SEQ ID NO: 207432 - protein, 403 aa, unidentified
MERCAGIDWASEEHALCVVDAAGKQLAGELFAHDEDGIRRLIARMRTLGVGRVAIERPDGLLVDRLLEASFTVLPVHPNKLKATRPRYEASGGKSDGFDAFVLAELARTDSHRLRALRPDSDETKALRALTRTREDLVGARVRLANELRAQLDGFWPGAARIFGDIDSPIALAFLERYPAPADARGLGEKRLAGFLARHGYCGRRSAAELLVRLRSAPEGRAGAMEAEARRGAVLGLVAGLRPIVSQIRELTSQIAGAVRAHPDGQVFLPLFKDPKSVVTAARLVAEIGDDRSRYPTRESLAADAGMAPVARESGKRRVAAFRWACDKRLRDAVACLANSTRHTHPWARSVYLDARARGLEHAHAIRVLGRAWLRVLWRCWQDEVPYDPTKHGNLRRLEPAGG

SEQ ID NO: 207433 - protein, 449 aa, unidentified
MREPEEIQDEEYEQVLARVCAIDVAKASGKVCTRVPHESRPGRRRTRVWDVDATTNAVLELGEHLVGEGIEKVTLESTSDYWRIWFYLLEAAGLNVQLVNARDIKNAPGRPKTDKLDSVWQAKMTERGMLRPSFVPPMDIRQLRDYTRLRVDLTHERTRYWQRLEKLLEDALIKVSAVASTLDTKSTRDMLEALIAGERDPQVLAGLARGRMRSKNAALVQALTGRFDAHHAELTRMLLDQIDTLTRQIDTLTGRIDQLLAAIPAAQGADADGTTGPGAGHEPGAAALPAVDRLDQITGIGRSGAQAIIAEVGLDMNRFPTSGHLVSWAKLSPRTIQSGPVTRSGRTGKGNPYLKGALGEAAASAARTDTFLGERYRRIVKRRGKLKALVAVARSILVIVWQLLSDPLARYHDLGSGYYAARTDQARKARNHIRQLEALGYTVTLTAAA

SEQ ID NO: 207434 - protein, 458 aa, unidentified
MKIRLGIDVACRAAHQVSCADGTGAFLWVGHRFRTDSDELDALWARLPDGDIEVTVIMEPTRNAWVPLAAWFRRHGAKVVMVPPEQSADLRGYYSKHAKSDRLDSKVLARLPLLHPEGVTVEAGIGPGDPLKRAVKIRSGLVHRRTTSMQRLDALLELMGPAWVTAIGSDMTKTAFRLLARYANPYALRRLGKRRLTEFLHRSSRGAWADERATEILAAAATTIMLWGDEFDFDELAADLATEARIALNLCAEIEAMDKRIKALYATADPDGIVRSAPGVGVIGAPQILGRLGDAKRFRNLAAVRSFSGLVPRQDDSGHTAIAGGPTKAGDACLREALFISADHARKIDPTLAQRYHRLMTTEGKHHNSALCHIATVLLTRIAACLRNGQCYQLVDLDGTPITEVQGRAIVAAKFTVPKATRAARRTTTTTSRQPRRNERAKTGVAERSKAPPVPTPA

SEQ ID NO: 207435 - protein, 329 aa, unidentified
MENYKSGDCSTREEAEKFYRDLAAQEMKVRVGMEASGQARWFERRLGELQFELWIGDAAEIRTRRVRKQKTDRQDAQLILKLMLKDDFPRIWVPSWENRDLRQLLWHRHRIVQMRTRVMNQLQAVALNEGVRRKKALWRPAGRIQLESLGLAPWASRRRHDLLELLDRLNPSIAQLTKAVEQEAEKCSEAQRLMTHPGVGPLTALAFVLVIGTAERFRCGKQIASYLGLVPSEDSSGDRRRLGHISKQGNSLLRFLLVEAAQVTVRSNQEWRSKFFHLAMRRGRKIAKVAMARRLAIRLYWMWRKGWNYEQLTQFGSHAGQPGNPHGVQ

SEQ ID NO: 207436 - protein, 367 aa, unidentified
MKEQENKRNKITIGLDLGDRRHRFCVLGEKGEVLEEGSVGNNRAALSELGGRYPEALVVMEAGCHSPWVSRHLEQAGCEVVVSNPRKTRAIYQHERKSDRRDALMLARIARMEPALLYPVRHGSEEAQQDLLRIKLRDSLVRARVALINSLRFTLKSLGYSIANPSTERFHKVIQSALPQSVAQVIAPSVQALEELTLRIKLLQREISDQARSKYPDTAWLEQIPGVGPITALYFVLKIEDPARFKRARDVGAFLGLCPRRDQSGENDPQLRISKRGDAYLRRLLVSSAQYILGPFAPPSALRQYGLALASGATARAKKRAVVAVARKLAVLLLTLWKNKSSYQAFPQRSSREKMTTNDLERLRCIA

SEQ ID NO: 207437 - protein, 483 aa, unidentified
MDKETTLKSLAGRVVGLDSHPDTFTAALLTGRTPAEAVVEKTFHKIPMSQLQSWANKHTTAADCIVLEASGNSFQVVRSLRAIGRQALVLESVQMGRLKEAHANDDKISAVRIGKAYLAGTAKEVWVPDLISQERRDWMHTHRKAVKRTTQLHNRIESYLSDSGVRRQTRLSADGLERLREAKAWSARQWSVLEGMFLELGHAEQQRTHWVSLMAQEVLQDPQLLSLTRLCGIRDITAFALGAIIGDIHRFSEPKKLVKYVGLDPAFDDSGENQWSGGIGGHGRADLRALLIESAQAILRTDHALAQWGKQLLARKGEIKLAVAAVARKLLVAVWYLMMGKWTALEEIDRRMVVKVSKMISHVGSKGLKTLNKTRSELRNQVYQSLKEGRVYVLDPNKKMPSAQPQPKPAQTLNCPHCAKVSTNRPNGKLVAAGPPKSSRPVGRVSCSDELLSAEAARHSAAQNSLLAQPGKKRPPHLPSERL

SEQ ID NO: 207438 - protein, 408 aa, unidentified
MDVQIERCAGLDVHQATVVATVRYPGARGRASVTETFGTMAADLAALRDWLQAYGVTHVALESTGVYWKPVYYMLEDGFTLLLINMQMLKHVPGRKTDVQDSEWLAQLLECGLLKASFVPPPVIRELRDLTRYRLHQVRERAREVNRLCKVLEDSNLKLTSVLTDVMGVSGRAMLTALVQGTTDPAVLAELARGRLRKKLPDLRRALAGRFRRHHAFLVEQILAKIDYLDEALARLNAEIDERLIPFEPVLARLDTIPGVNRTVATSVIAETGGDMTRFPTAGHLCSWAALCPGQNESAGKRRSGKTRDGNQYLRGQLIQGALGAIHSKGTALQARYHRVKRHRGHKKAVVAVAHQILEIAYYVMHNEVTYRELGADYFDRRHAERATRRHVRQLEALGYRVTIEKAA

SEQ ID NO: 207439 - protein, 356 aa, unidentified
MQNENKNLDFNNQTFFIGIDVYQKSWNVTIISSERTFKTISMNPSPKELYKYMTHNFPGGKYNSVYEAGFSGFWAHRELESLGFNNIVVSPTEIPTSGKEKLTKSDVIDSRKLARELSNGSLKGIYIPDQLIQELRSLVRARAQVVKNLVRIKLQIKSYLNFYGNKFPANYEITNWSGKFIKQLRSLRFNYDIGKEQLDIYLDLFEEQRSILLKIVKSIKKYCTDYGFYDRILLLCSVPGIGFINAVVLITEIVDMKRFTNFDSLASYVGLVPSKRSSSEKEYTLGLKVQCKRKLREILVEASWVAIRQDPALIASYGRYVRRMSKQEAIIRVAKKLLSRIRYIWYTQQKYEFSLK

SEQ ID NO: 207440 - protein, 322 aa, unidentified
MATFSFGGIDVAKDRLDVMVLPEQHRLSVSNNPAGWAELIEQLRGFSIAAIGLEASGGYERGVVRVLLAAGLSVRQINPFRVRQFANASGVLAKNDRVDARMVASFVANIPTREVERPAPVLERLAEILRARRQLSNEKVSAENASKLLEDAMLQRLLRRRIARLAADIDTLDGHLVKIVGIDTALAHRYRLLTSMPGVGPVLACTLIAQLPELGQLSRKQIAALVGVAPYDFDSGKLKGRRCIWGGRSPVRHVLYMAALSASNWNPVLKAFHRRLTADGKLPKVVIVAVMRKMITMLNAMVRDNVVWAARVGERHTVPIAR

SEQ ID NO: 207441 - protein, 432 aa, unidentified
MDNRLQVGIDFSQKRADCCLLFPDGRPLESYIAFDNSYLGYSLAKQLLLDALDSYPFDGVDISGEATGYLWLPFFLQLAADPDLEPHDLNLYLLNPRWVKWFKKCFSQDDKTDEKDSFYIAERTRTRRPDAAWLADPSILALRFYTRLRFHLVQNLAREKCYFSAFLFLKASSYRRLKPFSDVFGVTSRLVLTQQPSLDELAELPVEDLAMQLHEMSGHHLPDPFENARKLKRVSQESFPLDECLALPVQRILDLTLEHIRFLEAQVAQADQWVTSELQAHPQISQLATIPGVGPVFSSGNGAEIGKTQRFLQAPKWDKKRKRYRARNLRDVEDAVAKIAGLWWPRSDSGDFEAEDRRMAKTGNRYLRYYLIEAANKMRQHIPEYAKFYARKYQEASKHRHKRALVLTARKSVGLVVGLLHRNEPYRSKEHR

SEQ ID NO: 207442 - protein, 346 aa, unidentified
MNTTSSNTSSPTLIWSGLDLAKRTFAAAIWGHQPLPSRQVQSFPRTAEGAQALLGWLMENAAPDTRLGLMMEATGVFATELAAWLLELDPTLHIAIVNPRRTCGYISSLGLRNKTDAVDARALAGFGHERRPEAWERQTPEHRELRDLIRTRASLVEQRVALQLSLRDHDRTSKLAGEVLNRLIHALEKEIGVVEKGIAAHVKVHPTYAHWVKHLTSIKGVGLITAVTTLAELGDLRRFPRSRQISAFAGVSPKRKESGTSVKGKTHLCHQGSRLLRSTLYMAAQAAARFNPDLAAFYAVQAAAGKHHRSILGMIMRKLLILMRAVVIAEADWVPQAEWRRAKQQA

SEQ ID NO: 207443 - protein, 399 aa, unidentified
MNSVGIDVSKGKSTVAIMRPFGEIVASPFEINHTEEDFEKLVSQIKSLKGESRIVMEYTGRYYEPLANYLYNSGLYISVVNAILIHDYDNSSIRRVKTDKKDAIKIANYGLNRWLDLPEYMPEEELRQSLKIYNRQFTQYTKLKVALINNLIALSDQTFPGIDGLFGKTPRKDGHQKWIDFIKDYWHKDCITTKTIKSLERSYQKWCTKNGYHYQSNKVNDIYQLANQTVASMPANANTKLIITETAKELISLIDALEKIRQEMNRIASQLPEYPAVMSLPGVGTTLGPQLIAEIGDIKRFHSRKALIAYAGIDSSPYQSGTIDIKSRGISKRGSSALRKTLFTVMDCILRHQQIDDPVYQFLDKKRAEGKHYYVYMIAGCNKFLRIYYARISAYLNSI

SEQ ID NO: 207444 - protein, 518 aa, unidentified
MIAIPVISERCAAIDVGKRGLAVAVALGPADKEAEIKTRASGTTVPALLDLWLVEQGCTTVALESTGSYWIPVKNILEDGFQITLVCARKHHPKKGDKTDFRDAIDMVIHHRHGLLTGSYLPERGIVELRDLTRRRKKLLGNLRAEKNRIQKVLETANVKMGNVVSDVFGVSGQEILQALLEDKPLTAEELADKAKKRLRDKIPQLTEALEAHQMNHHHRWLIDQSVEHAKFLDRQIEELEKKIDQHLPPYRRQHELLMTIPGIKEAAAANILAEIGADMNQFPDGDHLSSWAGICPGNNQSAGKRKGSRIKKANKFLLAALVEASWAAVRKKDSALQRKFHRWLRAKGEKKTNVAISHSLLKVIWSVLKHDRPYVEPDVLVLKTLEREKQIRHHAQRLRQLGADEQTIATLIKNLLEAPKPDSTDHHPPVATHPYPSDSACASRPKCSPQKQGSPPPRRRPLARGVLGFRIRTAEKKQYSAVQDLPDSPSTTTPPEKNTPPKPSATNNKKGQSTTRH

SEQ ID NO: 207445 - protein, 392 aa, unidentified
MIYVGIDIAKDKHDCFITNSDSEVLFKSFTISNNRDGFETLFQKIQSVSDDLTKVKVGLEATGHYSYNLLGYLLDKGLPTYVINPLHTNLYRKSLSLRKTKTDKVDARTIASMIMSDVNLKSYSDTSYHNEELKSLTRYRFDKVKERAKLKTSVSRLICILFPELEKLVPTLHMASVYALLSEFPSAHAVASAHLTRLINLLSQSSKNRYGNDTAVMFREAARNSIGSNMPTKSLELKHTIKLIQELTSEIDEIEAAIKQIMDEEIQSPILTIPGISYRMGAMIIAEIGDFCRFDSADKILAYAGMSPSTYQSGQLDNCYSHMEKRGSRYLRYALYNATKYVCHWDKSFGEYLAKKRSEGKHYNVAISHAAKKLVRLIFAMEKSGKAYLPTA

SEQ ID NO: 207446 - protein, 328 aa, unidentified
MDPMMTTARLFAGVDVSKDRLDVCLRWSEPERHYEEEEAFVVDYDDSGIDALVSRLLEERTVLVILEATGGFERTVVGALAAEGLPLVVVNPRQVRDFARATGRLAKTDRIDAAILARFAEAVRPAPKPLPDREIRALQAIVARRRQLLGMLAAENNRLAAAPKPVAKRIEAHVRWLEKELSRTERDLEAAIESSPVLGENEALLRSVPGVGPVLARTLLAGVPELGTLTHKRLAALVGVAPLNRDSGTLRGHRSVWGGRAEVRAALYMGALVATRHNAVIGEFYERLLAAGKPKKVALVACMRKLLSILNAVLKHRTPWRVPHHPSP

SEQ ID NO: 207447 - protein, 375 aa, unidentified
MSEITRALIARVGVDLAKRVIQVHAVDAAGRRVVSRAFKREQFIAWCVQLPAGCLVAMEACSSAHHWARKLRALGLQARLIPANFVSPYRMQGKSGKNDANDAAAICEAASRPNMRFVPIKSCEQQGVMSLHRVREGLKEERTGCINRIRGVLAEFGLIFGQGPKLLRAELPDVIEDASNELSAMARRVLQRAFDHWRELDEHMRWCDRQVGQHVRTSAAAQRAAKITGIGELGASALTAGVGDFNQFKGGHQFGAWLGIVPSQNSSGGKTSLGRITKRGDDYLRTLLIQGAKAAVMSAGKRDDPISRWLVQLVARVGWQKACVAMANKNARILWAVMTREEGFDPRHVSEKPQAKKPANERIAAVAPPLAGCLA

SEQ ID NO: 207448 - protein, 422 aa, unidentified
MNYKQNEKINQVKESTLVVGIDIGSTTQYARAFDWRGIELGKVFPFSNSREGFESFKAWMQHLQDKYKKLDAIVGIEPTGHYWFDLGAYLEDEGILLVMVNPYAVKQTKELDDNSQSKNDRKDPKVIAKLVTEGRYSAPYTPDGVYADLRIMVANRKRLIREMTQIKNRFARWFAIYFPEYTDVFGDYEAQSSMLLLKKVCTPEAIVELGAEKINQIWRDAKLRAVGMKRATTLCETAKRSIGLKKGSSAARYEMKLLLEDYEYKKAQLDAVMEEIEKLCRKILESRQMLAIKGIGVITVAGFLAEVGDVRRFESPRQIQKLAGLSLRENSSGKHKGQTTISKRGRSKLRAVLFNAAIPLIAKNPEFKSLHEYYTTRANNPLKKKQSVIAISCKLIRVFYAILANGVTYDAQKMLSDIHRQP

SEQ ID NO: 207449 - protein, 437 aa, unidentified
MSSPCRNLKYLRDEVLLLAGVVDIVYPVCCGMDVHKNFLVACIATTDERSHTTHQIRRFSTFTGDLRRLADWLVSNNCKDVCMESSGKYWIPVFNALEKTCNVCLTHPKYVKAIKGKKTDKRDAKWISELFKCDLVRSSFIPPPDIRQLRDLCRYYVKLTYMCSSEKNRGQNCLTVCNFKLDAVFADVFGLSASRIIEKLIEYGNADFDFASLIHGRCKASVEDVRAALDGELNPMQSEKLTLIRRHMESIQNLQAALEKLIYGLAVKFQPQVDLLMTVPGISSKLTAIRILAEIGADMSVFETAKQLTSWAGLTPQNQESAGKKKTSRIGRAGAYLKPLLVQIALACGKSDKCPELKNKYLALKKRRGGKKAVIAIARKLLTAIWNMLSKNEVFNDELYKKADKPPVTRELTTAQAVALLRSKGFLIVDKDTGEIA

SEQ ID NO: 207450 - protein, 482 aa, unidentified
MKKKNIYTNQSQELLTLFEEAGNGSKVMCVPIDYAKKDHVAMLCNGNGHILRKPFSVKNSPEGIEYLTEQITRSCKHRQIDLKHVFFGGEDVGSYAENFVNTLRSGGWLVAGVNAHDAKEQRTNMQASTDRLDLMGIASMLLNRRGNCSPAQSGIYRNLRTCVRHRKKLVAMSTEVKNRMHTVVDRLFPGFLNEKKSGILSFSESSLYLMEDRFSPHQIRRRKRQKLIEILKRYGTAKPESTAAKLQKYAAHVLNTPNEYITTLQLSLTQHVKHFRCLQDSINQLEHEVAVWLAQTQGAFLTTFRGIGIVLAAGVSAEIGNPHEQAPLNNLVSYSGIIPRVKQTGGAEGKTYTGKVAKRCNHILKDYVVQSGNHMGLHGPEELMADYKRREAAGQHADFGIGRRYLRTAMCLMKTSQIYMPEQLRNTKVKPEERAGYYLTIWPYLRKKWKKAGALDAAFEKDRPLGQWRCMVQELYGIKLKL

SEQ ID NO: 207451 - protein, 373 aa, unidentified
MIPDSMPAVSIAVGIDTHADVHVAAVIDQVGRELGHASFDTTPAGHRRLEAWVRSLGVMDVVGIEGTGVYGVGICAHLRESGVRVVEVDRPDRKARRFAGKSDPIDAYAAARAALSGRATGQPKSRDGNVEMIRVLRVARTSAIRARAIALTQLKAVIKTAPEPLRSQLRGLDGATLVTRCRALRANRGPAPTPSPFAKRPPRAGRLCDPTAATKATLARLANRIADLDIELRDIDDDLDELTAETAPTLVALFGVGTDVAGQLLATAGDNPHRIATSAAFAMLCGVAPIPATSGKTTNRHRLNRGGDRHANAALYRIAMCRLRYDERTRTYRNQICTRGKTKKEAMRIIKRAIAREVYQAIITDLGTDPNGT

SEQ ID NO: 207452 - protein, 431 aa, unidentified
MNSSDTSTNEPFAAFIGLDWADEKHAVVLLATDSQIKEHATLEHTPEALSDWVAQLRQRFAGGKIAIILEQSRGSLLYALLPHAHLVLYPINPQMAAKFRKAFYPSGAKDDPLDADLLLEILCQHRDRLTAWQPDEPVTRQLQLLVEARRRFVADRVRLSNRLEHALKSYFPQALQLVGESLTTPMACAFLQRWPTLAAVQKAGAQRLRKFYYGQHCRAEELIQQRLQLLAQAKPLTTDAAVVAAQSLLVKSVAHELAALPAILAEYDQQIAALFAAHADFKIWDSFPGAGAALAPRLAAAWGTQRERFESSDAMAAYSGIAPVKQASGRSVWIHMRWACPKFLRQTFHEVARTSLSFCVWAQCYYQMQLQRGKGRHAAFRALAFKWQRIMWRCWRDRTPYDDAKYLASLKRDNHELYTRILASQSAPAGA

SEQ ID NO: 207453 - protein, 337 aa, unidentified
MGLYCGIDLHSNNHVMTVIDEGDRRLYERRLPNDLAITKAALEPFRAQLVAVAVESTFNWYWLVDGLMDAGYEVRLVHTGAVVQYAGLKHTDDEHDAFWLAHLMRLGILPTGYIYPKGKRGLRDLARQRMRLVQHRASHITSVQSQVWRSTAVRLSGHTIKGEGKQPWPELRDADLALSIETGRAAIDALTVQIERLEEVLLKRVGLSPQFQVLKTVTGIGPILALTIALEVGDIKRFPGVGEFASYCRCVDSQRLSNAKKKGEANRKNGNPYLAWAFMEAAHFAIRYLPAARRFYERKCRQRNALLAVKALAHKLARACFYILRDQVPFAPERLFV

SEQ ID NO: 207454 - protein, 479 aa, unidentified
MDCRRLVGIDLGIASAHTVRVLDESGQTILKRKAWPTVESLTEVESAALAGCADSMCLEVVVEPTGPAWLPVAVFFANRGHIVHRVSSAKAADLRRFLARHTKTNGIDADTLARLPLFDPAGLRPLRLPGAERAALDRRVRACDRLTRAAAEHKVRIKDLVRQLLPVTPLIGDLGVADLAVLERWADPNALLEAGAKRVRTLIVKASNNHQGAERASEWIAAAEASVALYAGHSAVAFADLAAEVATEVRLLRAIQGELAGHATERETCYRRVDPATLARSLPGVAQVGGPALVAAMGDPARFARGKQFRAFTGLTPRAAETGDTDRKGQPMSKAGSSLLRTTLVRAADTARKLDPQLARIYHVQMVERGKDHLGAVCVVAANLGERCWAVMHRQMPYVICDTDGRPVTPDQAKTIIAEHWTVPAEVRARRRSKKMGKAPQQVLTAQAKPSARGAGKRGDLPQPASSPATNDHVNRRTA

SEQ ID NO: 207455 - protein, 426 aa, unidentified
MTRVQKKLLVYGEVVIVGIDVAKRKHYARIYDQKELDVVKPFQIHNTREGFYRLVSKIKEAEEKAKAKTAVIGMEPTGHYWKPLAWFLQEQGYTVVIVNPYHVKRRKEEEDNTPRKTDRKDAGIIAKLVKDGKYLSCLLPKGIYADLRNLTVTRRQLKQKQNSTLNRLQAILDEYFPEFKRVFKNVTGKAALWVLRHCPFPGIILSTYTVEELAEKLKEASSNRVGLKRAKKLYETARESIAVTEGLKGAKIKLETYLDEIEFYKTQIEKTEKAIAETLKQIDIAENLLSIPGIGLVTVASFLGEIGNINKYNHWKQIQTLGGLNFTEESSGDHKGQTKISKRGRPELRNLLYQASLTLVAKNKEFKALYHYFLTRPQNPLKKKQALVAISLKLLRVMFGLAKKKENYDSQKVLGEYRITQLKQVA

SEQ ID NO: 207456 - protein, 344 aa, unidentified
MIIIGIDPHKSSITAAAIDPSGCQLAVRRFVVNAGTARQLLAWAAQWPERTFAIEGANGLGRGTAQVLVAHGEVVVDVPSTLAMKVRVLSTGGGRKSDPADAFAVALTGLRQENLRVVAAEDQTTILRLLAERREDLGHERARLLNRLHRLLRELLPGGVEPGLSADKTAAALRTIRPATATDAVRRELTKELLADLRRIDSSIKSNETQTRTALDASKTSLQEIPGIGVVLAAKLLGHVGDITRFPSASHFASYTGTAPLEASSGNHNRHRLNTGGNRQLNSVLHTMAVCQSRDPGPGRDYYLKKITEGKTPREARRALKRRLSNVLYRQILHDHRQAEKNAA

SEQ ID NO: 207457 - protein, 416 aa, unidentified
MKKNSNPVKKCEPSTKRMKVRASERRDAREVMAELVAQLTKQLDAESSLVAEPEKGMRGAECPNLDRLTVGVDLGDQWSNYCILGLAGETLAEGQFRTRRQETSEFFQDLAVSRVVVEVGTHSAWVREVIAGFGHEVLVANPRLMEGSKRRRRKNDRIDANKLARLGRTDPKSLHSIQHRSTEVREDLLVLRARDALIASRTELINTVRALVKTMGARLSSCSSDAFAKKAEMDIPNELRETLQPLLRLIATLNDEIKSYDQRIGQLASEKYMHTQLLRQVTGVGPITALAYVLTLEAPLRFARSRDVGPYLGLVPKQEDSGDTQPQLGISKAGDRMLRKLLVGSAQYILGPFGPDTDLRRFGMRLCERGGKNAKKRAAVAVARKLAVLLHRLWVSGEVYEPLGHGVPESPARSAA

SEQ ID NO: 207458 - protein, 349 aa, unidentified
MQFTEQLPVIGLDIAKNVMQLHLVDPETGEIQRRQLKRPKMSEFFANREPSLVAMEACGGAHHWARTLLKMGHRVKLLPAKHVKAFLLRDKTDALDAQAIWVAAQQPHLREVSVKSEQQQACLALHSMRQQLMKMRIMQTNALRGLLYEFGIVLPVGHCKLLSMVHGELVKAQLEGSLPDILVVSVQEQLRRIDALQDDIDELNRRLAAMLKQNRQMQAVQAIPGVGPLTATALVATMGDVSTFKSGRQFASWLGLTPRQVGTGGKTQQLGISKRGDNYLRTLLIAGARAVVSRSKHNRWIEQLQQRRHFNVVVAAVANKMARTVWAILAKGVAFDQVKWNPAEPTSAG

SEQ ID NO: 207459 - protein, 376 aa, unidentified
MREKLRFLGLDVHAETITAAIVEPDGEVRSLGTIANREDSIRKFIRKLGLVEQLRACYEAGPTGFVLYWQLAQLGVQCVVVAPSLVPKKPGDRVKTDRRDPIKLARSHRSGDLTAVWVPDENCEALRDLVRQREAAKQDQLRARHRLTRFLLRTGRRPPLGLKAWTERYLAWLQQVGYTQPAQQATLVDCLNEVQHMSARVKRLEEAILEVVKLAPQPMQEVVRGLQALRGVAHISAVTIAAELGNISSRFESARKLMGYGGVIPSEDSSGKRRRQGGITKSSNAHLRRIVVESAWSYRHRPCVGAKLRKRQQGVREEITEIAWKAQNRLHKRYMKLTMAGKDHRKIMTAIARELLGFIWAISIKAEQACTPQLAV

SEQ ID NO: 207460 - protein, 391 aa, unidentified
MIFVGIDVAKDKHDCFILNSEGTVLADVFTIANNRIGFETLLSRIQSCSQGESKIKVGLEATGHYSYNLLGFLLDSGLTTYVINPLHTNLYRKSLSLRRTKTDRIDARTIAMMLMSDVDLKSYSNTAYHNEELKSLTRYRFDKVKERAKLKSSVARLVNILFPELEKLVSSLHIAVVYALLSNYPGASYIANANTEELAEILCTASKGRYTKSKTAEIQVAAGVSIGSKMPAKSMELKHTIALIRELDKEISEVESAIDKITSQMDSPIFTIPGIGRHMSAMILAEVGDFSNFASADKLLAYAGLSPSTYQSGQLQNCYAHMEKRGSRYLRYALFNAAKYVCLWCPTFSAYLEKKRSEGKHYNVAISHAAKKLVRLIFAMQRSGKAFLADY

SEQ ID NO: 207461 - protein, 392 aa, unidentified
MRISVGVDVAKAVHWACAVDDECKVVLNCAIENTPVGIDAFVANLRAIEGDPLIGLDVVGSFASFLEATLLAEGFRLVHAPGIAVNRAGQGFAGGERKSDPRDARTIAELVRTRDLRPISPDGETVVALRLKIGRRRDLVEEQTRRLARLRMLLCRIHPQLERTVDVTCKGPLVLISRYVTPAEIRRTGKRRIMAHMAKERYLKGAEALVDGAIESARAQSMAIPGEAAVAELIRELAAEALDTRSKLARIEADIRRLLDDHPDSALIRSMPGMGVALTAELIACIGNIERFPSADALASAAGLAPVIRQSGYKKGWRRTFGGDKQLKRVFYQSAFCAVSTGDPISRAFYDRKRREGKYHTQALIALARRRVTVLWTMLQRREAFDPVRKAA

SEQ ID NO: 207462 - protein, 347 aa, unidentified
METIVRIGLDTSKSVFQLHGVDGTEQPVLRRKLRRGQVLAFFSRLPPALVALEACGASHYWARELRSLGHEVAMIPPQYVKPYVQRGKSDAADAEAICEAASRPKLRKNFVPIKSPEQQGAQMLTRVRVQFIGRRTQLANSIRGYAAEFGFTAPRGLSRLQQLLIDIRADATVPDLAMELIEGLAAELARVDDQIAALDKKLMQLHRGNEMSRRLATIPGVGPIGATLLSIKVVDARGFKSARNFAAWLGLTPKNHSTAGKNRLGVITRAGDGMLRTVLVAGATAVIADMRRRGTRPWLWLKDMIARKPPKLVAIALANKLARIAWKLMVSGERYRPASAVPMPMPT

SEQ ID NO: 207463 - protein, 352 aa, unidentified
MKKHNKVVTAVEAHETIGIDVGDKLSRYAVVDEAGVVVEEGTFRNQAASIGKHFGGRARARVALEVGAQSAWISRELKQLGHEVIVANARELKWITASDQKSDRVDAEKLARLARADRALLAPIEHRSAEQQAQLAVIRARDAMVRSRTLLVNTARGIAKGFGHRLPRTVTVTFGTRALTELPAPLRPALAGLLEQIAALSRAIVGYEETIAALAAQHPEVERLTTVPGVGALTALTFVLTLGDAERFAHSRDVGSYLGLRPRRQQSGARDPQLGISKCGDPYLRKLLVQCAHHLLGRFGPDSALRQWGLAKAQGSKNATKRAIVAVARKLGVLLHRLWASGVVFQPFPLRG

SEQ ID NO: 207464 - protein, 336 aa, unidentified
MKRQYVGIDLHRRSSTIYRMSSDGETLGCVRVPSQPLELAEALAEAGEAPEVVIESSYGWYWAADVLEELGARVHLAHPLGNDWGNRRVKSDERDAKDLAAMLRLGRLAESWIAPPEVREMRELVRYRAKLVQLRSGLKSQVHSVMAKHGVLPKRADMFGPGGCAQLDSLSLPRPYMARIESLRDLIELYDREVMVLEREIHKVLKDDPGYRALQQIPGIGRVYAAIFVAEIGDVSRFSSAEKLCSWAGLTPKHHQSDTKLVRGRITKQGSTLLRWAAIEATAKCRSGTKLQADYHRIAERRGKAKAHVAVARRLLTLVYYGLRDGEIRALAPKAA

SEQ ID NO: 207465 - protein, 364 aa, unidentified
MLIIGCDFHPSGQQVFGVNPETGEVIADRWLSHGGDEVDRFYASLAPGAEVGVESSGNMLWFERRLAKYGHQLRIGDAAKIRAKETRRQKHDRRDAELIARLMLEKNFPELGWVPSLRQRDQRQLLMHRHKLVRMRTQIQNQLQHIALNQGQQKKRQLWTKAGRELLEKLELEPWTARRRDDLLQLLDTMEQHCAGLDLAVQQAAEAEADARLLMTHPGVGPVISLAFVLTLGQVERFARSRQVVSYLGLNPMEDSSGERRRLGGISKQGSSFLRLLLIQGAQSAVKGDADLGRQYRRLAGKKNKAMAKVMIARKLAVRMFWMLKTQKRYPEVVRMQGSSSHSVVNTTAALSERPASHNGRADC

SEQ ID NO: 207466 - protein, 319 aa, unidentified
MNEKQTEAYVGIDVSKTKLDVAIGQEGEYWQANNDAVGIRKSVERLLAIQPTLIVVESTGGLEMALITELYAAGLPFALVHPARVRDFARSIGLLAKTDKLDARLLARFGEAIKPPLSRLPGEAEQYLNALMLRRRQLLDILVDEKNHLASTRLSLHSMVEEHITWLQDEVAELDQQIDDQIRQIPHFKEKEAILRSAKGVGPVLCAKLLSGLPELGQLNRKKIAALVGVAPFNDDSGYRRGKRRTKGGREDVREVLYMATVAAARSNPLIKPFYQHLLKQGKLKKVALVACMRKFLTILNAMIRDMRPFLAPINPIQP

SEQ ID NO: 207467 - protein, 344 aa, unidentified
MKPTTVAVDLAKSIFQVAISHRPGKTAETHRLRRQQLSAFFEQRPTSTVVMEACGSAHYWGRKFAAMGHQVVLLPPSQVHPYVRRNKTDSADAKALLEAVRNDVIRPVPLKTIEQQILAALHRVRAGWMAERTARINTLRGVLRELGMVIPVGAARVVPAVALLVEDADSEVPDGLRHTLWEVCCEIRELERRIRDVGHQLEALAKQFPDYERLLSIPGVGPLTATALLAFVGDVRRFPTGRHFASYLGLTPTEHSSGLTRHLGRISKRGDSYLRMLLIHGARSVLFASRRRTEPERLRAWAMTIEKRSGFNKAAVALANKLARIIWAVWRQPEAVYIARPKAA

SEQ ID NO: 207468 - protein, 405 aa, unidentified
MFVGIDWASTEHAVCVLDQTGKTVRAFRIPHSAAGFDDLVARLRRLGAPAGLPVALERPDGRLVDRLLEAGHPVVPVRSNAIKAWREGEVVSGAKSDTGDAKVIAEYLRLRHHQLRTLTPFSDATRALRAVVRARDELVRQRVAAINQLTATLDAFWPGAKAVFPDVERQIALAFLERYPTPESAAGLGEQRMAAFLTRHRYCGRTPAAELLARLRAAPAGLAGGAEATARCDAVLAFVGVLRALNQAIRNLDRSVIARLGEHPDSKVFASLPRSGQINAAQMLACWGDCRDAYNDPEAVAALAGIVPVTRQSGKHAAGSFRWACNKRFRNAMTTFAHNSRLASPWAAKIYADAIARGHDHPHATRVLARAWVRVIWRCWINQVPYDPVKHGAAQRLAEEAATAA

SEQ ID NO: 207469 - protein, 333 aa, unidentified
MHYVGIDVSKRSLDVCLLAEGSKGSRKTKTLSNGQDSAQNLAKWLILQKCELSQTHVIMEATGIYHEYLACGLHQMGILTSVINPCRSREFAKAMGIFTKTDAVDAYVLAFYGCLKQPEAWTPPEEEVRKLRALLQHRDSLLNDKLRIDNRLNTLKSTEAVQEVMDSLSLVNQYLKSEVARIERLISSHIAQHPGLKRDLKLLMSVDGIGKQIGWNMLAVLRGNNFKSAEQLAAYLGVVPVERRSGTSVHGRARLSKIGSSNIRAKLYMGALTAISKNSHIKALYERLLAKGKMKMSALGAAMRKLVHLCYGVLHTQQPYDEKYKAKIINFSS

SEQ ID NO: 207470 - protein, 365 aa, unidentified
MPSFTHPDAVYLGMDVHKDSISVGILNPGHERPDVEKIFHDEESVRRLIDRFSDRSLVRSCYEAGPTGYDLARLLKSLGVHCEVIAPSMIPKAAGDKVKTDTRDCRRLARLHRAGELVAIRIPTPLEEAVRDLCRARGDMVEDLTRARNRLTKFLLRHSRVWRGGSNWTVKHEAWLTVQRFDEPALQTTFDHYRAVVLTRDAALAAVEADLRCWFDKEPFADPVRRLAAYRGVTTMGALSLQAEVCDWRRFARAPSFMGFVGLVPSEYSSGGSTRRGGITKAGNVHLRSQLVESAWSYQHRPYVGREIATRHEGLPPEVVARAWGAQLRLCGRFRHLAARKNTKSVVAAAVARELAGFLWAEMVA

SEQ ID NO: 207471 - protein, 314 aa, unidentified
MMKLSQILAIDISKDHLDTDARPTPWRQRLANDAAGVARIVARARQMQAFVVFEATSVYDRPLMAALEAAGLAFHRANPRKAREFARAAGFLAKTDRIDAAMIARYAQVKRVQPTQPPSAAQQRLKALVARLSQVTGDLTIQKQRRKAAAASAETIASLDEVIALLKRQERSLEGEIASLIDDDPLWAHLDKAFRSLKGVASRTVARLMAEVPEIGTLSNKAIAKLVGLAPIANDSGRRIGRRPVRGGRAGPRSILFVIARLVAKYDPHLGAFHQRLKAAGKEKMVIRIALARKLLVILNAKARDARIEFANAT

SEQ ID NO: 207472 - protein, 342 aa, unidentified
MGSVKRAGRSCHFMSAFVCGLDVHKDSTYATILNSEGKIVNQTRMSNEKVLPYLSHFNVGKVGMESSNQIAPLYRQLSSRGYNVVVSHPKKTRYIAEAKIKSDRVDSKAIAELVRLDALPLAYFPDGEIAKLREKVRRRAFLVRERVKLRVKVKSVLTYEGLTWPTDHGLFTKKGLEWLHSLNLAPIESYMRIIESLDEEIKLLSKELVGIAEEDEEVRLLMTIPGIGYYSAVLMKSEIGNIDRFPFAERLCSYAGLVPSTHASGKTVWHGGITKEGSRWLRWVMVEAAQTHVHKYDTSITRAYNRIAEKRGKKIAVVAAARRLLMCSYSVLKNKKPYYDQA

SEQ ID NO: 207473 - protein, 384 aa, unidentified
MKADRTDAPTMEDYATVHVVFELSKSKWKLGVMIPGSAKMSVFTITGGDLPALSARLAAARHKAARSGRRVRIVSCYEAGFDGHWLHRWLTDQGVTNYVIDASSIAVDRRARRVKTDRIDLELIMRTLLAYLRGEPRVCSMIHVPTVEEEDRKRRNRERDRLLKERTAHTNRIKGLLHTHGIRDAMPLKPDFIKVLDRTRTGDGRELSPRLKDEIMREHERLCVLSRQIAAIEAESRAEQRAAAAGTTEAKIVQLAQLKGIGLVGGQGLVNEVFYRAFDNRRQVGSYIGLAGTPFNSGDRERDQGISKAGNHRARRLAIELAWLWIRHQPDSELSRWFRERVGDTKGRVRRITIVAVARKLMVALWRYLQTGVIPTGAVLRPSL

SEQ ID NO: 207474 - protein, 444 aa, unidentified
MLLLFLFIFLLKGGDTMNNTLTATLFVGIDVSSKTNYVYAMDFFGNKLLSFEAANNLPGAQEIVNKLVSTLKVKNLSHLTIAMESTSFYSWHIANFLSTNEVLIWFKPKVYCLNPRVINAYKKTFTDMDKTDPLDALAIADFARVGKITTQPWKGAQYIALQRLTRCRLHIIENISREKSYILSNIFLKFSELAVLDKKDHPFSNTFGASSLATLTDFLSTEDIANLSIEELVNFLVDKGKNRFSNPQATADLLKKAARDSYRLDKTMYNPLNATIAASLNCIKALEREVKNLDKAIEKAVKALNTHEFECALSIKGIGPVFAAGIVAEIGDITKFVNQASLAKYAGLTWRKKQSGNFTACETFLTKTGNKYLRYYLLEATNSVLRFNDEYHAFYRKKYDEALLHKHKRALALTSRKFVRLIFALLRNNQLYTTKIVADKEEIS

SEQ ID NO: 207475 - protein, 379 aa, unidentified
MNHSITASPVDPIIFGALELSKNSWLLGLQFPDRPQPSLYPIRGGDTEELMAKLTAARERCAKLTGRTPSIVLCYEAGYDAFWLARFLKARGIECLVVDSASMQVNRRARRAKTDRIDVGMLLRALIAWLRGDRHVWSVVRIPSVDEEDLRRSHRERDRLIHERTAHINRIKGLLFAQGIRGINVKSKYKTLQPDRLITGDGRPLPPRLAREITREIARLALLQEQIAALERERDEAPTPCKETEKKRAQLMSLTGIGPTIAAVMTREVYYRRFDNRRQVAGFLGLATSPHDSGDVERSQGISRAGRGQVRGTMIQTAWLWLKHQPKSVITRWFAQRATGQSGRIRRVLIIAVARKLAIALWRFLEQGLVPQGAMLANR

SEQ ID NO: 207476 - protein, 319 aa, unidentified
MAQNDLVVAGIDVAKDKVDVCVRSLSLKRTFASTAEGRRELTSWLRRRKVGKAVMEASGGYERDWAKALRAAKIEVRIVDPKRVRSFAQSAGRLAKNDTIDAEMIAWFAETFGEARGQAYDATREQLHQMVNARQAMKDMQSKLASQGEHAVPAAVQRIHARISKTIAVELVKIEAEITALIQATPHFAELAEIIESVPGLARTTSAALIAAMPELGQANNKIVASLLGVAPYDDDSGRRRGERHIKGGRRRTRNIFYMACLGAATQHNPVLKAFYDRLVAKGKEKKVALVACMRKLISILNIMIERRQKWDANRYAVS

SEQ ID NO: 207477 - protein, 367 aa, unidentified
MFIERTSVGLDVHARSVRAAVIDTATGEVIERRLSPEPAAVLGYVTEVAGVHGPVAVTYEAGPTGYGLARALLAAGYRCQVAAPSKLLRPGGDRVKTDAKDAMLLARLARNDDIVAVTIPTVAQESARDLVRARDDARTTLMAARHRLSKLLLRHGLVYDGEAWTGRHDAWLRRVRKEHLLGSGTGMVAAFDDGYDATVHALARRDRLDAVIHAMAADSEFTPVTRRVCCLRGISTTTGFALAVEIGDWDRLTGASIGAYLGLVPSEHSSGQSRSQGGITKTGNSHARRLLIEAAWHHKPLYRPGKTIQDRWALAPAAAAARGDAGNRRLHHRWAVLAAHRKRHTVANTAIARELAGWCWSLAVMDQ

SEQ ID NO: 207478 - protein, 351 aa, unidentified
MANLAIGIDSSKQTFDASLVFNLNDTKNAPHCSFRNSKEGYEDLIKWVSANTTVKRSEWLFCGEQTGSYSYGLAKYLSQKHLNVWLDDPCQILHSSGVRLDKTDALDSLAIAEYAIRFQDRAKLFVPDSKTMREIEALQSYRQIMVNETVTYQNHLTELKYKHEHDSVFSGIAKDIERQIKNLKVKIKKVEKQIEGLMKTDDSMHENYELITSIKGVGSCTATAIILATRNFQKCNNPRQFARYAGVAPVKHESGTSIKRGDHTCKRCNKAIKVLLTQCAQSAAQYDPEMKEYMNRMKARGKEHNLIINNIRYKLIRRIFSVVRNRRTFIVGKKNFEMMKAMDERANCSLI

SEQ ID NO: 207479 - protein, 391 aa, unidentified
MVCVGIDVAKDKHDCCILDSDGTIRADCITIPNNMDGFKQLLQTIRDCTKRSDKIKVGLEATGHYSYNILGFLLDNDLAVYVMNPLHTNLYRKSLSLRKTKTDRVDARTIATMLLSDVDLKSYTDTAYHNEELKSLTRYRFDKVRERAKLKQSVSRLVTILFPELEKLVPSLHIASVYALLSEYPGAKQISEIHLTKLTNLLVTASKGRYGKDKAIQIRDAARTSIGSVMPAKFLELKHTIKLIRELTSEIDEIEVSIQKIMDELNPPILSIPGVGIQSAAMILAEIGDFSNFESPDKILAYAGCSPSTYQSGKLTNCYAHMEKRGSRYLRYALYNATKYVCYWNPVFAEYLAKKRAEGKHYNVALSHATKKLVRLIYALQKSGKAYLTAA

SEQ ID NO: 207480 - protein, 367 aa, unidentified
MKNHSSFDQSLSSTDLSACTTLAVDLAKQVFQVAGENILGQLLYEQRIKSREAFYEFLRQLPPHVVVLMETGPGAQAWARQLQDQGNPVRILPAGLVATHRSGPKNDRNDALAILRAGRDEKICAVPVKSVAALAMQALHRARQGYVRRRTALSNQMRGLLLEHGVALAQGDVAISQKIPRVLEDATQPVPGLLRELIDELLAEWRHLGERISVLTGRLEVAANADMTAKRLMTVRGIGPVTATALVAKETKPERFPNARKFAAYFGMVPDQHSTGETVRLGDMTKRGDAYLRSLMIQGAHAVLQQLRPDSQQPDDRRLLHWMSRLGRKEAAIRLANRNLRIVWVLLQNDQTYRRHAGDGQPATMGH

SEQ ID NO: 207481 - protein, 340 aa, unidentified
MDITTLGIDLAKSVFQLHGIDAHGAIVLQKKLRRGAVLKFLSKLEPCLIGMEACATSHYWAREIAALGHDVKMIPPAYVKPYVKRQKNDAADAEAICEAVTRPNMRFVPVKTEEQQAVLVLHRSRDLLMRQRTMILNAIRSYCAEFGIIAAQGARKVSELVTKLRNDDTLGVPEVGVSAILSLASQLDCLEQEVRKIEHQLLAWHRQNAASQRLETIPGIGLITATALAASVPDPVAFKSGRQFAAYLGLVPRQNSSGGKDRLGRISKMGNGYLRRLLVVGATSVTRRAPTTDTRTGTWVRSLLERKPTRVVTVAIANKTARTAWALLSKGESYKAVPAI

SEQ ID NO: 207482 - protein, 349 aa, unidentified
MNATIVAVDLAKNVFELAVADADWHIAQRQRLTRAKFFGFFVQLAPCQVVMEACGSAHYWARRIAGLGHTVRLLPAHYVKAYVRRNKTDQADAAALIEAARCAEIREVPVKTVEAQQIQSLHRLRSQWMSTRQRYVNTLRGILREFGFAIPLGVNVAKEQIGVALAAFDSEVPQALRATLTDMLQEVRSLEGKILGVEHQLNALTRADVRVQQLRQIPGIGALTSTALRAIVGDIQRFPSGRHFASWLGLTPNERSSAEKRRLGKISKQGDVYLRTLLVHGARSALLAAHRAERSGHALDHLRRWALDCERQRGHNKATVALANRLARIVWATWSHERPFDGNWSTQAA

SEQ ID NO: 207483 - protein, 425 aa, unidentified
MNKDVLSTLFVGIDVSSASNYFCAINFEGKHILDFSITNNLPSSEIAVERIFNALQENDLKYVTIVLESTNVFSFHIANFLASNNSLFNFNSKVFVINPKESSNFRKTYSDMDKTDPQDAFVLADMARCGRINQQPYKASQLFALQRLTRQRFHLVKTIMREKAYMMSNIYLKFSSLYIAKKEDEPFSNLFGNTSKSIIADFTPDDIVNMSDEDMINFIMEKGKSRFSNPQENVKLLKKIARDSYRLDKVAYDPINVAISSSFNTINALEDNLKVIDKAIEKNVKGLCDNEFTILKSIPGIGDVYAAGIISEIGSIDFFKDNNALAKYAGLTWRKNQSGYFEAETTRMTKTGNKYLRYYLIEAVSSVKNHSKEFNDFYTRKYNEVSRGAHKRALALSARKLVRLIFGLLHHNQLYSATKLDNRSN

SEQ ID NO: 207484 - protein, 424 aa, unidentified
MDVIYDRVAGLDVHKETVVATVRVMVGRKAERECRTFETTTAGLSALLAWLTETRCSHVAMEATGVYWKPVWNILSDGAFELIVANAAHIKNVPGRKTDVNDATWIADLLACGLIRGSFVPSEKFQELRALQRTRKQLTREQTRHVQRLQKTLEEANIKLDSVISDIMGLSGRRMIEAIIAGVRTPRKLADLADRRIKATPKELYDALHGRVTDHHRFRLRLHLGQYDALAEAIAALDREIDAAIGRIDEERESAGQAPFRAASRVVCEIPGINLLAANMILAEIGLDMQRFPTEAHIVGWSGLCPGQNESAGKRKSSKLRKGAPWLKTTLVQCAVSATNKRGSYFRAQFQRLKSRRGAPKAYCAVAASLLTTIYHMLKNRTKFRDLGHEHFDKRPTKAKVNRLLAQLAKLGYHADVRPLANAA

SEQ ID NO: 207485 - protein, 335 aa, unidentified
MHYLYYVGLDVSKETFDASLVAFEDANEMAHRKFANSRKGICSCLHWVEKRHGILLDDVIFCAEDMGSYISEMAVCASDRTLTFNFSLISPLVIKYSMGIARGKTDRVDARRIAEYAITHYRKIALYLPAEKELCQLRTWLILRAHLAKQRVAKLVLLEKLDYKEKFADVSIQRSMLQEEIAYAETHMKTIEREMKELIAADSNICRNYKLLTSIKGVGPITAIVMLCSTLNFTKITDHRKFACYCGLAPFEHSSGTSVRGGCHTSSMANRDIKVQLNRSALIAIRCDPQLKAYYERKVAEGKHKFSVLNAVRAKIAARCFAVVRRGTPYVALQI

SEQ ID NO: 207486 - protein, 410 aa, unidentified
MVERFVGIDVALREHRIAVLDRDGEAVGPSFTIAASTDGVATLLRTLRARGATAAQTLIGLEASGHLWENLEAALVGAGYRVIVLNPLQTRRYRDVVRRKAKTDDIDAHVIAGLLRSGAAQASYVPDEQIQSLRELARLRARLMADRQDYLRQLVAQLDVVLPEHRTVLGDLLTARARGILAQFPTAPHLANANPRAIRRAAENAGARGFSLDDATGVRDRARRSLYSGKAAAARAHVVRTLVSQLERLTSAIDEVDRAATTLLPPSEPGTGLSDAELLQTIPGIGPQTAATLLGELGAFTRFIDARALVAYVGFYPVINQSGDRVATPRLSRVGSRIARHSLYLAAVNAVRRSGEWRTIYLRKKAQGKTAKQALVVVAVKLLHAVYAMLKHRQPYNPSRLLVAPATIGS

SEQ ID NO: 207487 - protein, 346 aa, unidentified
MKVLIGVDPHKASVAVAAIDEAAGELVEHASFRQNSAGLRSLERWAKRFPERRWAVENAGGLGRHLAGRLAGSGESVVDVPPQLSARVRVLCSGNARKNDGLDALATALAASRNGRLAPVDPEIGSEVLRLLSERREDLVAERTRALNRLHGLLRDLLPGGVAGTLSAHRAARILRDIRPRGASARLRRRLASEILRDVRTLDRKMADLNERIEAEVEVSGTTLTEIFGIGPILAAKIIGTAGDVARFPTKAHFASYSGTAPVEASSGEVVRHRLSLAGNRHLNNALHMVAICQARSDARGGAYYRKKIAEGKSHKEALRCLKRRITDAVFRSLMADSRTPSRDAA

SEQ ID NO: 207488 - protein, 322 aa, unidentified
MYSLLVGIDVSKDFFATAGIDSEGKEPFSRSYSMDSNGFDDFLKTMTSHCKDLSKVMVAMESTAYYHINLYPFLTSQGIRTMVVNPLLIANFAKLSLRKTKTDKKDAMTIARFLMDHHEEVSHLSLSQDHQDLRDLSRERESLCHLMAATKVEIKRVLRTSFPELESIGNLYTGVMLRFLQQYPSACLVRAAKSKAIVKALKGPYVRGKLTFTAQDIIKAARSSVAVVSPAKEIILQGKIATLLHLQERLDEMTKLLTELCKATRIDDLKTLRSINGVGSKTAAPFLAEMGEVQNYASHKKLIAFRGIDPSSHESGKLYRDE

SEQ ID NO: 207489 - protein, 392 aa, unidentified
MQQCTAGLDLASEEHRLVVVDGKGRRLEERRVSHSEDGIDALIRMLADLQVLRVAIEQPNGLVADRLLDSGIAVVAVHPNQLAAARDRYRTGGGKSDGFDGYVLAELARTDMHRLRLLEPDSDETKALRTLTRTREDLVEQKVALANQLRAQLDAFWPGARQIFFDVDSLTDARGLGEKRLASFLARNGYSGRRSAAELLVRLRSAPQGRTGEAELEARRAVVLALVAALKPLVEQIRLLTSQIAGAVRAHDDGHIFLSLFRDPKSVVTAAELLAEIGDNRNRHPTSASLEAIAGQAPVAVQSGKKKVACFRWACNKNLRAAVSVLADSSRKHNPWAQKIYADAIARGHDHPHAIRILGRAWLRIIWRLWQDQNTYDTQRHGSLNRLLAAQG

SEQ ID NO: 207490 - protein, 400 aa, unidentified
MEAIIERCAGLDVHQATACVLIGQAGRKPHKEIRTFSTMTRDLEGLRDWLKELGVTHVGMESTGIYWKPIHTILEGHFELIVANAHHIKTVPGRKTDVKDAEWTADLVRHGLIKPSFVPPPPIRELRDLVRLRRSLSEALTTEQNRTLKLLEHQVGQRGQRGVRRLRPGDAEGADREHRHAAGDGGPGEAEFAPQAGALALDGRLTEHHRYLLAFHLRRVEAIEADLRALDERIEEKARPYQAQRRLLRQIPGVDDRIAVAIIAEIGIDMTVFGNARRLAACPGNHESAGKKKSTAARKGNIHLKTTLVQAAVCAARTKGSYYKDKYHRLKARRGSLRAAMAIAHKILVAVFHMLAKTVPFKELGEAFLDQQACKRTTTNLVRRLNNLGYDVLLRPKVAA

SEQ ID NO: 207491 - protein, 365 aa, unidentified
MKKVSTAAAKQSRNVSEQELTIGLDLGDRSSWYCVFDETGSVLLEQRVSTTPKAMREVFGGMPRSRIALETGMHSPWVSRALSELGHEVIVAHARNVRLIGESRKKDDRRDARTLARLARIDPQLLCPVKHRSAKAQADLTVIRARAGLVRARTALINTARGLAKSYGERLRGCNPRNLNPEKAQGLSPELQAALEPLLAAVESLSDRIREYNERIEQLAQQSYPQVALLKQVKGVGTLIALTFLLTLEDAHRFRKSRDVGCYLGLQPGRRNSGRSEPQMHISKEGDPYLRTLLVQGAQHILGPFGADSDLRRWGLKLAERGGRNGKKRAIIATARKLAVLLHRLWVSGEAYEPLRNSSQVPAAA

SEQ ID NO: 207492 - protein, 374 aa, unidentified
MSANAITWVGMDAHKNSIKVAACLPGAAELVEWTEDTTVEAVRRLARRLQRLSPGAEVRCCYEAGPTGYALQRQLRAAGVGCTVIAPSLTPVKPGERIKTDRRDARKLVEYFRHGQLTEVQPPSETDEALRDLCRCRDDVRVDLLRARHRLTKFLLRRHVIYRQSKHHWGTRHHQWLEELRFDDAMSQATFDSYFLAVQQLEERQHQLDLQLAEFGAQEPYRGKVAALRCFKGIDTVTAVCLVAELHDFRRFHSPRQLAAYVGLVPSERSSGERDQRGPITKSGNRHVRRLLVEASWHHRHRPALSRPLRARREGQPARVLAIADRAQERLAARYRRMSEAGKVHPKTIVAMARELCGYLWAVLHPAAPATRTH

SEQ ID NO: 207493 - protein, 344 aa, unidentified
MDHFAGLDVSVKETSVCILDDTGKILKEVKVASEPQALLKVLGNPAYRFKRIGLEAGPLSQWLFSALAEAGLPVICVETRHMQAVLKAQINKTDRNDARGIAQMMRVGVYRPVHVKTLRSQKLRMLLTHRKLLQSKAIAIENDLRGTLRNFGLKVGMVGTVRFEARIQELVETIPDLVVLVEPMLVVRRALREQIVILHRRLLAIVRDDEVCRRLMTTPGIGPVVALTYRATVDVPARFRKSKSVGAVFGLTSSRYQSGEIDWSGRISRCGDEMMRTMLYEAAQSMLHSKKWSWLKAWAMQIARRRGMKRAIVALARRLAVIMHRIWIDGTEFRWTREPATAAA

SEQ ID NO: 207494 - protein, 313 aa, unidentified
MDACFVGLDIAKDHIDVSVRPRDERYRVEQTEAGRAELVGRVVARAPALVVVEATGGYETAIVTALAVGQIPVVVVNPRQVRDFAKAIGRLAKTDAIDADVLALFAERVRPDVRPLPDDAHQELVAVVTRRRQLIDMLTAERNRLATARRSVRASVQQHIRWLERRVQQADADLTSTIQQSPLWRAKEHLLRSVPGIGPVTSRLLIALLPELGELSRREIASLVGVAPLNNDSGHQRGRRQVWGGRASVRAPLYMATVVATRCNPVIRAFYQRLRAAGKPGLVALVAAMRKLLTILNAMVKHQQSWQPANVEN

SEQ ID NO: 207495 - protein, 416 aa, unidentified
MNAVGIDVSSRKSTVAVLRPLGEVVCLPFDVTHDIAGLASLAEKLKALDGETRVVMEHTGRYYEAVAKALHEAGLFVCAVNPLLIKEYGANSLRRVKTDKADAVKIARYALDNWADLRDFTPMDAIRYDLKTLNRQFQLASKQRTASANNLIALLEQSFPGIRKCFDSPVRSDGTQKWVDFAHSFWHVDCVRKQPFPAFCERYRKWCKRHAYLFKLSNAEEVYALAKRAVVLTPKSKVVKVLVQEAANQLISISRSVEVYRAEMDRLAAMLPEYPVVMAMYGVGKSYGPQLMAEIGDVRRFERKQALVAFAGIDSMPNQSGDKNVRSNKSSKRGSPYLRKTLFNVIRTYLQCAPQDEPVFQFLNRKQAEGKPFYVYMLAAANKFLRRYYAKLRDYFASLDTLQPVAPIPTILKATL

SEQ ID NO: 207496 - protein, 432 aa, unidentified
MSTVAPNRVWRVEKLGEKASTFSPSEIVNDGVIRMSKGPDTAALTGASHTTIYVSVEISLKSWIVGVHCPEGSGGSVSIHTLAAADTAGLLDLVSSVRERMTRELDARPRVMLTYEAGYEGFWLARDIERRDAEIDVFMNDPASLRVNRRAKKKKTDRIDARRMVRALKAWDQGDSEAMSWVRVPDVDREDARRLLRERDTLVSERTRLNNRIKGLLQLHGIFDLAPRKPDFLERLATARTGYGAPLPPRARAEIERAVAMLRLVEGHIDMIEAEKRALLKAGRKAQDASDLDGTAMIAALTRIHGIGLNDATLLAGEVLYRDFRNRREVGSWAGLTSVPWASGDVDHDLGISKAGPSHVRKHMIQMAWRWLKLQPESTITKWFHAYVARDAGGGKDRRARKRAIVGVARKLLIALWRYATQGLVPEGAIVS

SEQ ID NO: 207497 - protein, 415 aa, unidentified
MRVHRNCCGLDVHKKMIAACLIREDAEGNSVTEKRLFGSMTRELHALAKWICAAQATAVAMEATGVYWMPVWNVLEQYGLQLLLINPEHYKAVRGKKTDLKDGTRIAELLQDGRLEGSYVPPVAIRVLRDLTRYRVKLVQYQSAIANRIQRLLEQCNIKLASVASDALGVSAMAMLRALAEGETNAVRMADMAKKQLRKKIPQLQLALEGCLLPHHRLLLSEMLEDLDHVGAKITRIEEIIEQQMRPFQNAVNTWLTVPGIKHRLAWTLVAEVGPTVEAFPTAGDLVSWAGICPGNNKTAGKRKSGTTRAGNPWLRRALCEAAWAASKSKGTYLQAQFRRLAALRGPKRALIAVANSILTAGYYMLQRATTYQELGPDYFDKRNAVRATRRLVKRLEALGHTVILEPRFIAAPSS

SEQ ID NO: 207498 - protein, 458 aa, unidentified
MQQPVEVQVDEHEQIMPRVAAVDVAKASGMVCLRTPHETVPGRRVTKVWPVQATTAALVELGDHLRCERVQRVVLESTSDYWRPFYYLLEAAGLTVWLVNAAQTKNVPGRPKTDKIDAVWLAKLAERSMVTPSLVPTEPMRQVRDLARARFDLVEDRTRVKQRIEKLLEDALIKISSVLTDVLGVSGRAMIAALIAGQRNPKVLAELAKGRARRNRTALERALHGRFTEHHARLARLLLGQLDELTVRIEEVTGLLDTAMRALPTSTSTTPTATTGAGGATNAESSTALPAPAGYDGAIARLCAVPGGGPDSVRAVLGEIGLDMSVFGTAGRLCSWARVAPHTRQSGRHNARARTGKGNPYLKSALAQIATGAAKTDTFLGQRYRRLIKRMPKAKALVALQRSILVIFFHLLADPTAEFTDLGSDFYAKRIDRARRTTHLLRQLHALGYEVRLAELSA

SEQ ID NO: 207499 - protein, 366 aa, unidentified
MSTTKVSGCSIRPLEYDVFIGLDVDKHSIAATMVDYHGHKKSIKMPNDSTALLNYTRKHFGNKRIAFAYEAGPTGYGLYDNLRAAGHTCLVVASSMVPIQRGSRVKTNRLDSDHLSQSMRGGQLNGIRVPTTIYRELRHLTQLRNMYVRQLSGTKCRIKAMFLMEGLSFPDAPPNSHWSMRVVNELAQLSCSTVIRFKLDRLLETLTFHQQQALMTQRKIRQLCSDDQDLADSIQYLTSLPGIGWIVASNVLAHVGDWRQLHDVHELGAFFGLVPSEHSTGDRISKGSITQAGDPRLRSMIIEAAWSAIRQDQELAEFYHRVYQRHPRDRAARKAIVAVARKLTERMYCVLKERREYIKHPVQGTK

SEQ ID NO: 207500 - protein, 341 aa, unidentified
MQIAVLGIDLGKNSCSLVGLDQNGAVVMRRRMRPGSIVGFTRSLSACIVAMEACCGAHHLGRQLVAQGHTVRLMSPEYVRPYVKAQKNDDRDAEAIAEAATRPTMRFVTLKSEAQLDLQILHRARERLVGERTALINQLRAILLERGITVPQGRRKLEQYLAALPEPEDDTSVSPRVRRLIEDMRTEWQALDQRINALDAEFTTRAREDADARRLTSIPGIGVLNATALTAAIGTGETFTRGRDFAAWVGLVPRQVTTGGKPRLLGISKRGNKYLRKLLIHGARAALPALASSGTPLGHWLRALMQRVHKNVAVVALANKLARIAWAVLRRGVAFDAAAAA

SEQ ID NO: 207501 - protein, 349 aa, unidentified
MIRNKPRGATVYGIDLGKNIFHVVGTDSAGNVVQRVKFRRDTLRAFFERAERAVVGMEACPGSQWLARKLQAMGHTVRIIPAQFVKPYVKSHKNDTIDAAAIAEAVTRPTMRFVQVKQPEQVDLQSLHRIRDQMVGSRTRLICQMRAFCLEYGVAIRQGAGLFKSDLPRVIADECNDLTPTMRRLLNELFEDLMRLEKRIAQVTREIEALAARDEKARRLMTIPGIGPLGATALLAAAGNGQQFKKARDLAAWLGLVPQQYSTGGKTQMFGISKRGNRYLRRLLIHGARSCVMHLDRSRDRLGAWLRQLHSRMHVNKVTVALAAKIARIAWVVLNRPGAIYERRDPALA

SEQ ID NO: 207502 - protein, 330 aa, unidentified
MKTFFVGIDVSKSWLDLVVCDEDQNQVEQPMNITNDLKEIKEFCEGLSSRFPDVKLWFCLEHTGNYGLLLSQVLEELKLTYSIVPPLEIKQSIGMTRGKNDQVDARRIAEYASRHAKKLVPTSLPNEKLLKIKSHLTYRDQLIKVRQQFKNSRKSHLVSNKSYDIKAIISDLDAKIEGLNQDIKAIDTTIEEFIKSCSKLNKNYKKIQAVKGVGPVIAVYVILYTNNFTSFNNPRKFNCFAGLAPFQYSSGSSVRGKTKTSQLRNRIMKKLLFNGANTAAMHDPELKAYYRRKMAEGKHHLSVTNAIACKLVYRMFAVVKREEPFVNLVR

SEQ ID NO: 207503 - protein, 402 aa, unidentified
MNAVGIDVSKGVSTVAVVRPYGEIVKKPFEVVHTVKGLDELVKFILSLDGESRVVLENTGKYSQPVVSALTKAGIFVCPVNAKLVHDHGGDTIRRVKTDKTDSLKIAGYCLDKWFKLKRHIPDDERRILLKTYNRQLGEYTKLAAMLKNNLVSLLDQVFPGANGFFTSPARDSDGHVKWIDFIAQFWHCECVSAQSKQSFTANYEKWCRKNGYQFSSAKADEIYNRASDSYSVLAKDDFTKTLVSQAVAQLNNLCETVAKLKTEMNKIAAELPEYETVLAMHGVGKTLAPQLIAEIGDILRYPKRSSLACFAGIEPPENQSGSYNQQSRRISKQGSPPLRKALFQVMCCVLQNSNFAEPTFRFLDRKRSEGKPYKVYMIAGANKFLRIYYARVKEHLNKTAV

SEQ ID NO: 207504 - protein, 348 aa, unidentified
MRFYTQQHKHYCGIDLHAKAMYVCILDQHGTKLVHKNLPTTPEAFLRILAPYREDMVVGVECIFTWYWLADLCQKEGIAFVLGHALYRKAIHGGKAKNDKIDAHKIAVLLRGGMFPLAYVYPAEMRATRDLLRRRCHLVRKRAELLAHSHNTNSQDNLPEISQKLAYKANREGVEEHFPDPSVRKTVELAVSLIDHYDKLLGEVELSLTRTAKGHDGPTFPRRQSVPGIGPILALVILYEIQDIARFPRVQDFVSYCRLVKCAKESNGERLGTSGKKIGNVHLRRAFAEAALLFLRQHQLGKAYFTKPEHKHGKAKALTVLAHKLARAVYSMLAREQAFDLQRFVPAS

SEQ ID NO: 207505 - protein, 424 aa, unidentified
MEVMHERVAGLDVHKETVVACVRIVAGGKVSRECRTFETTTAGLEALLAWLMQSGCTHVAMEATGVYWKPVWNILSDGKFELILANAAHIKNVPGHKTDVNDATWIADLAAFGLIAASFVPGEKIQELRSLMRTRKQLLREQTRHVQRIQKTLEEANIKLGSVISNIVGVSGRRIIEAIIAGVRNPQKLAQLADRRIKASPKALYEALHGRLTGHHRFMLQLHLGQYDALASSIEQIDAQVETAIRTKIDDEAASGQPPFHSLTGLLCTIPGIASLAATSILSEIGSDMSRFATDGHLVSWAGLCPGQNESAGKRKSSRLRKGAPWLKTLLVQCAWAAVKKKDSYYKAQFNRLKSRGGPKKAICAVAASMLTAVYHMLKNGVEHRDLGAGYFDRRPAAQKAKGLVAQLAKLGFKAELHPLAEAA

SEQ ID NO: 207506 - protein, 392 aa, unidentified
MRFAGIDIAAEKHFVAVLDDQRDVVVKPTAFTEDAAGHAKLLELLGPPGELLVAMEATGHYLRNVYASLAAAGHTVALLNPLRTSRFAGEDLQRTKTDAIDAVGIARFAAEKRPVPTRFPDSATQELRELVRLRDRLMQDLGDRVRQLHRAVDLGFPEFTRYLRTLDSELATAILHEYPTAEAFLGLPWKRLAKLCYDGRHKVGEEIAKGLVEAAKVSVGHHHGPAYRVQVRFACEDIDLLRRRLRELDADIERTLGDHEVGSLLTTIDGIGPTTAARLVAEFGDITAFPDAATLAAYVGCVPGLRQSGKRLATRAGLTPHGSARLRTKLWMPTLTAVRKNAWLRAYYDGLRARGKLPKVALVASMRKLLVAVHYVARNRKPFVPILAGVRA

SEQ ID NO: 207507 - protein, 450 aa, unidentified
MRKKKMDLEIVNPSAAGIDVGSRSHFVAKGQQTDDVREFGVCASDHEELISWLKKYGVKTIAMESTGSYWQNLFSALQVAGFDVLLANGKFTKNIKGKKTDVQDCQWSQKLHSLGLLSGSFLPEETTEHLRTLCRHRSNLMDMAASTSKKMQKYMRLMNLRLDIVVKDICGLTGLQIIEAICQGESDSKVLASFRHGNCRKTESEISKALQSNGRKDYLFALQQEYQIYNELQAKIIQCEHKIKEQLESTLKDQRQTEKLKTTDKIHKRINKNAPKSIDLNQVAFKYFGGVDLMDIEGISHSTILTMMSEVGPGGLLKFPTGKHFASWLRLAPNNKISGGKILSSRIPKGSNRIKTALRLAANCIGNMKGANLHNFFIRICIRKGRTAAITATARKLAIIIWNMVVKKIPYNPPNQYEFLDQKRKRKILEMRKLILKLDIKPTEIGFVTS

SEQ ID NO: 207508 - protein, 477 aa, unidentified
MTPYKDAFPEPCPPPPTVPEPTVRTLPLQLYNPHAAGIDIGEAEHWVAVPPDRSPQPVRRFGTFTADLDALADWLLDCDITTVAMESTGVYWIPLFELLEARGVQVFLIDPRQAKRAPGRPKTDRLDCQWLQRLHAYGLLAAAFRPADQICVLRSSLRHRQMLLTYGAHHMQHMHKALQQMHLKLSQVVSELTGATGMAILKAIIAGERDPLTLAKLRNPHGHHSEDEIAKARQGTWRAEHLFALQQAVELYQFSHQQLTLCDQHIQTHLATFADKSAGQPLPPKARRHKKANEPRFDARTPLYRLAGVDLTTIEGIEEGTALVILSEIGTDMSRWPSVKHFCSWLGLSPPHKISGGKGLSRRVRPGAQRVAVALRLAARTVHHARTALGAFFRRLRSRLGAPKAITATAHKLARLVYSLFKHGSAYVQQGLEAYESQYHERQVKGMARQARALGYTLVALGTPEGQSLDAVAAPTS

SEQ ID NO: 207509 - protein, 318 aa, unidentified
MAKTTLAIRTTWQDAGVTVENTPSAIRHYLRGLPGRVALAVEATGHYHQALIQQAQALGHTVYVIDGYRLSRYRDSVGVRAKTDACDAALILRYLTHEHTQLRPWTPPPAAYTDLQHLLHHRALLILQRTQLSQSLEALGDGVGERALRTAYKALMAHFDRVLKHLLATLQARLQQAGWADDVKRCRQIEGLGPLSAGMLVTHFHRGPFRNADAFIAFLGMDVRVRDSGTFRGRRKLTQKGDPEARRLLYLAAMAARRSQAWKRFYDRTLARGLSRIQALVCLARKLARVAYALLRDQSQYQPKMIQPKIIQEACTGT

SEQ ID NO: 207510 - protein, 368 aa, unidentified
MFTERTGVGLDVHARSVAAAAIDTVTGEVIERRLDGDYGSVIDLAHRLEAGHGPLRITYEAGPTGFGLARELAAAGLTVQVAAPSRLLRPAGQRVKTDRTDAMLLARLTINDDIVAVRVPTLSQESARDLVRARDDARADLMRARHRLSKMMLRRGWVYPGRTTWGPAHDAWLRRIRTNDVPALGSGAAAAFDDAYDAVAHALARRDRLDEAITALAADCEFTDTTTRLSCLRGISTLTGFALAVEIGDWNRFTGATIASYLGLVPCEHSSGQTRSQGGITKTGNTHARRLLIESAWQHKPAYRPGPTLRAAWAKAPAVVAERADRGNRRLHRRWTALAARHKRHAVANTAIARELAGWCWSLATMDA

SEQ ID NO: 207511 - protein, 344 aa, unidentified
MQEITTVGLDLAKNLFHLIGCNEHGKEVKRKMLKRGQVIAYFANLPPCLIGMEACASAHYWARELEKLGHEVRLIPPQHVKAYVRGNKNDYNDARAIAEAARRPDIRFVQVKTVEQQDVQALHRLREARVGERTALCNQVRGLLAEYGVVLPQGVGAVRKRLPELLEDAENGLSDFFRPLLADCYEQLQQIDAHIDFYTQALKEHGRDNEAVQRLQTIPGFGPIVASVFHAFVGNGQAFGKGRDVSAALGLVPKQHSSGGKSVLLGISKRGDRYLRSLLVHGARSVVRLAGSKDDKLSRWINKLKATRGANKAAVALANKMARIGWAILRHNSLYRAPLAEAAG

SEQ ID NO: 207512 - protein, 422 aa, unidentified
MLAESHDEEQIIARVAALDIGKAELVCCVRLPAPRGRRKRLQEVSTHSTMTRSLTELANRLVELRVQRVVMEATSDYWKPVFYLLEAHGLDPWLVNARDVKHLPGRPKSDVIDAVWLCKLAERQMLRPSFVPPVPIRRLRDLTRYRVDLVAARTAEKNRVEKLLEDAGIKLSVVASDIFGVSGRAMMAALIAGERDPQVLAQLARARMRAKIARLEDAFDGHFDDHHRFLLARMLDRIDSTNADIAALDEQIQAHLAPFAAAAERLDEIPGIGAVAAAVIIAEVGVDMSRFPTAAHLCSWAKFSPGLHSSAGKTKGNASTGHGNRYLASILGEAALVAGGTNTFLGQRYRRIARRRGKKRALVAVGRSILVIVWHLLADDDARFTDLGADHFTKHINPDTKRRSHIRQLEALGYTVTLTPAA

SEQ ID NO: 207513 - protein, 352 aa, unidentified
MKVHNAERPISVVGIDLAKRSFHLYGVDAHGQQVLSKKLSRIRLSAVVANLPPCLVAMEACGSAHHWARQFRSYGHEVRLIAPQFVKPFVKSNKNDAADAEAICEAAQRPNMRFVAIKTLEQQDIQAIHRMRSLAVDRRTAQINQIRGLLLEYGIEVAKGRPAIQRRLPEILEDGDNGLSVRFRTELHGLAEELRHLNERVAHYDAQIDAIAQSDPQARELMTIPGIGTKGATALLAAVGEDARVFNNGRALAAWIGLVPRQHSTGGRDRLLGISKRGDVYLRNLLIHGARAVLRWAERKEDRHSRWATALKARRHTNVATVAMANKIARVAYAVMTTGKPYDPAIGAMANG

SEQ ID NO: 207514 - protein, 347 aa, unidentified
MRFYNRQHRHYCGIDLHVKSMYVCMLDGTGQVLVHRNVTSTPEALIEILGSYRDDLVVAVECMFTWYWVADLCAAEGITFVLGHALAMKAIHGGKAKNDKIDSHKIAGLLRGGLLPQAYVYPAGMRSTRDLLRRRLHLVRKRGQLLAHIQNTRAQYNLPEFGRRLAYPGNRDGVVDHFPDPSVRKSIEVDITLIDQYDALVNDLELTIVREAKRHDGDGFHRLRSVPGIGKVLALTILYEIHDITRFDRVQEFASYARLVKCQKQSGGRTLGTSGAKMGNVHLKWAFSEAAVLFLRHTKDGKKLLAVIEKKHGKGKALSSLAHKIGRAVYYMLSRGTVFSMEKFLAA

SEQ ID NO: 207515 - protein, 373 aa, unidentified
MKYSTVYVGMDVHKDSFSLCCYTNEKERSEYPQRVDAHYSKVINYIEAMRFHYGDDAAFICGYEAGCLGFTLYHQLTEHNLKCVIMAPTTLLMPSGRKKVKTDKRDAALLARCLAHHDYCPVHIPTDRDEQVKEYIRMRCDHKLALKKVKQQILAFCLRHGFRFSETSQHWTQAHLRWLRALKPEGLYREILEEYLITFDCLTSKIERLDQRIEELAAGQEYKEDVKKLTCFLGIRTLTALSVLVEVGDFKRFANAQSFASYLGLTPGESSSGPDRVRLGITKAGNRYIRMLLMEAAQCYSHGRIGYRSRILKKRQEGNPPAVIAYADKANERLRRRYYYLTLHKNKRCNVAKTAVARELACFIWGMMAVDAA

SEQ ID NO: 207516 - protein, 408 aa, unidentified
MNTLYVGIDVSSKSNVVYLMLPNGDKHSNFSVANSHEGSTLLVKKIYSALTSHSLDTVLIGLEATSVYGDNLVYFLREDATLAPFNRKIHVLNPKQVKKFHDTYNDLPKNDYVDSFVIADCLRFGRINKEVYMGDYRYKALQNLTRARFFAVQNLVKEKQRFMNVLFKKYSTMTQEKVFSDAFSTTALAVYDEFESAEALANMDLHELTDFIIEKGKNRFPDPDAVAKAIQKAARSSYRLPKTVNDSVNQVLSISITSMKALESQIKEFDKAIKALMELLPNVLISIPGIGPVYSAGIMAEIGDINRFDNQASLAKYAGLAWKQHQSGGFEAEVTRLIPSGNRFLKYYLCEAAFSLVRCDKEYSDFYHLKYKEVNRCQHKRALALTARKFVRLVFRLLKDNRLYCPAK

SEQ ID NO: 207517 - protein, 365 aa, unidentified
MPSVAHLGPTHLGLDVHKDTISVAVLAPDRDGPDVERIPHDEASVRRLVGRFPDPRWLRACYEAGPTGYELARLLHRMGVRCEVIAPSLIPKAPGDKVKTDRRDCRRLARLHRAGELVAIRVPTIQEEAVRDLCRARADMVEDRTRARHRLSKFLLRHGRPWRGGNAWTLTHERWLLAQRFDQPALAATYAHYRAVLQGRDAQLEAIEADLTVWYDAPPFADAVHRLAAYRGVTRLGALTLASEVCDWRRFPRAAAFAGFCGLVPSEYSSGTSTWRGHITKCGNAHLRAQLVESAWAYQHRPAVGVDLHSRQQGLDPQVVARAWAAQLRLCGRFRRLAARKDSKNVVATAIARELAGFLWAEMAA

SEQ ID NO: 207518 - protein, 346 aa, unidentified
MTILDCTRPVTGGVDTHLDLNVAAALDSIGGLLGVAEFRTTRIGHGLLVDWLGGFGPVARVGVEGTGSYGAGLARFLRGAAIEVVEVDRPNRQARRRTGKSDPADAIEAARAALSGRAQGAGKTRDGNVEAIRALVVAKRSARSSKIKALNQIRHLGFTASDELRERLSGISRQHLGAAAARLRPRAGSDAITFATKTALSTLGRRVLALDEEKERLNVLLAELVAKTAPSLLELHGVGVDTAATLLVAAGDNPGRLRCEAAWAHLCGVAPIQASSGKVTRYRLNRGGDRQANSALWGIVITRLRSDPRTQMYMERRLKEGRSKPEIIRVLKRYVAREVYPHLPRG

SEQ ID NO: 207519 - protein, 410 aa, unidentified
MSEDYEWFVGIDWGSREHQVTVVGPDRTVRQERKVPHTGSDIAALAHWLMSLAGRTGATVAGALEVPRGALVDALLAQGLHVYALNPKQLDRFRDRYTVAGAKDDRRDARVLADSLVTDRGAFRRLDPEDGRVVQLREVTRLEADVDAELRRLSNRLREQLYRLAPGLLTLCAGADEPWLWALLERAPTPAAGARLTRGTVAHLLAEHRIKRFSAAEVLTVLRAPALTVAAGVLEAAQEHLALLLPRLRLGHEQQRRCAARSEQLLDDLAHTQEHRDVAILRSLPGVGRKVSATMLAEASRLLAARDYHALRCHIGCAPVTKESGRRRLVAMRHACNPRLRNTLHYWAQTAVQHDLVGAALYARLRARGCSHGRALRGVGDRLLAVLVAMLRSQTLYDPTRRRAPREIAA

SEQ ID NO: 207520 - protein, 338 aa, unidentified
MDKFSGIDLHSNNSVVVVSDDADRVLYQRRLPNDPIQIRAALAPHREDLVGVVIEATYNWYWLVDELMGDGYRVHLANPAAIQQYEGLKYSGDFSDAAHLAQLLRLGLLPEGYIYPAEERPMRDLSRKRIQLVQCRTAQILAIENLFSRHTGAQMQGERVKHLDEVQVNGFGFAPDVTLAMQANLAVMQTLQEEITIIEKRLLERVKLRPDYALLNSVPGIGPVLATTIMLEAGTISRFTEVGNFSSYCRCVDSRRESNSRKKGQGNTKNGNKYLAWAFVEAANFAIRSCPEARRFYERKKRARNRIVAIKALAHKLARACYHMLREHKPFEINRCFG

SEQ ID NO: 207521 - protein, 470 aa, unidentified
MIRHRSDSVLLGPLASVRKPVSQPVIAAVRFMQVELPLHVRLIPQEIESAMRNAGIHANSLLEVRRMYNAVGIDVSKGKSTVAVLQPGGTVIRKPFDVSHTSQNLIELADYLGSLEGPTKIVMECTGRYHEPMLKALYKAGLFVSVVNPHLIKNFGNNSLRKVKSDPADARKIARYTLDNWAELRQYSGMDNTRTQLKTLNSQFSFFMKQKVAAKANLIALLDNTYPGVNKLFDSPPREDGSEKWVDYAYSFWHVDCVRRIGLKTFTERYKAFCKKHHYIFQQDKPEKLFNASKELVAVFPKEKTYKLLIQQSIQQLNLASGHVERLRQEMNALASTLPEYSTVMGIYGVGKTYGPQLIAEIGDVSRFTHREALTAFAGVDPGVDESGQHKSKSNRASKVGSARLRKTLFQIMTTLLQNAPEDDPVYRFLDKKRAQGKPYYVYMTAGANKFLRIYYGKVKECLRNLEQAE

SEQ ID NO: 207522 - protein, 316 aa, unidentified
MSEPVYVGIDVAKASFEVAASGEEQTLSLGNDEAGHAELCQVLVPLAPRLILLEATGGHERLLALALAAAGLRVSVINPRQARDFARCTGKLAKTDRIDAQVLRGFAALLDAQGHEPRALLDEQQRELTALVTRRRQLVAMLVAERQRLALAHPKAKASILAIMDAIAAQLHDVDGQLREHVQAHHADLAKLLTSVKGVGPTTASTLLAQLPELGHLNRKQITSLVGLAPMNRDSGTLRGQRHIFGGRADVRRVLYVAALVGTRFNPVLKAFYAKLLAAGKPKKVALVACMHKLLIILNAIARSKSPWSQEIAGIA

SEQ ID NO: 207523 - protein, 421 aa, unidentified
MLGVGIDWAEEFHLVALGRPGEGVFDIARVEHRPGDVDALVARIAAIEPDPAEVRVVLETSHGMLVERLIDAGYVVVPVNPDLVARRRGPAKKKDDAEDARIACMIALDRFERLRVLVPHGEEAGELRAIARDDERAARDERRLLNRLRADLIATFPAALAVAGDDMGAPTFLRLVERWPTAEALAAASPAEVAAFARAGRHGWPDRFAAEVATALATSHFEPRAYLVRAKEGTIRLLATQLLALGAQRRAWERRMGELLLGAARTGRKKQPKEGERGPTVPGGEIYLSFPGLGDRLAARVAAEIGDISNFDTPNGLQCYAGKAPVTRRSGKHELVVSNRLACNGYLRDAVQHWSFCSLTRSGWAREFYDGQRARGKGHHGALRALGNRWLEVLWHCLTNDVAYDEAVHVANRNRALARAA

SEQ ID NO: 207524 - protein, 416 aa, unidentified
MADEDKVASIDIHKKVLMVVVGSREGEAIGRQSELERRRFGTMTGDLRRLSAWLRERKVKEVVMESTAQYWKPVWMELEPYMRLHLAQAFSNRAPKGRKCDFRDAERLLRRFLAGELILSFVPDPEQRGWRTMTRMKTRLARHRVRLYSHVEDLLEEMRIKLSCVLSDLFGASGLRILHALAKGETDPKKLAALGDDRLKCTDEQLVDALTGNPQATHLEMLGLYLDQLQLVDKQMAKLSAMISQALRPHQEAVARLAEVPGFGPDSAQQVIAEVGVRASSFPSARSLASWVGTCPGENASAEENHSSRSPKGNRSMRRILAEAAQAAVKAKGSHFQAVFRRFLPRLDYNGAIWAVAHRLCRLVWKILHDGVRYVEQGAFRDPKARKRRAQALAQALRRLGYNVQITPIEPTAAPA

SEQ ID NO: 207525 - protein, 367 aa, unidentified
MDEVSTIGIDIAKHVFQLHGVDGAGEVVLCRRLRRGQVMRFFAALPPCIVGIEACGTAYFWAREIARCGHDVRLMPPSYVKPYVKRNKHDAADAEAVCEAVRRPSMRFVPIRTAEQQAALVAHTVRDLLVRQRTMLVNALRGHLAEFGIVAPRGLHKADELAAVVADENDGRIPASARKALRILVAEFAALDLRITRLETEIVAQAKTDAVARRLATIPGIGPIIASRLSAMVPDPAIFRSGRDFAAWIGLVPRQSSTGGKPRLGGISKRGNGSLRRLLVGGAMAAMFRAKALQNDPWLCQLRARKPVMVAAVALANKIARTIWAVMRRNAVWRPAALRSSSRPHQSGAVLAAVKTMPPAAVAFGQS

SEQ ID NO: 207526 - protein, 378 aa, unidentified
MLADEVDYVIGVDTHRDQHVLAVVVAARGAVVAEHSVRADRSGYQAALRFARRYAADARVWAIEGAGHYGAGLTRFLADHGETAFEVGRGGRGERRLQGKDDPLDALRAARSALATRTPTLPRRGERQEALRVLLLARRSAVDVRRLALVQLRSVIVSAPERIRAELRQLPAGQLIRRCSRFRRSNSRTPDELAIVVALRSLARRIEAATEEANELEREIVGHVRALVPDLLNEPGVGPIVAAQLIVSWSHRDRVRSEAAFARLAGVAPLPASSGQNDPASPQPQRRPPTQPRAAHRHPAPPPTRPHNTRLHRPPRRPRQEQPRRDTHPQALPRPPPLPRHAEREPSDDLTVIGESFLRTGARCCRLAASGVGDARWT

SEQ ID NO: 207527 - protein, 360 aa, unidentified
MTTVAEKPRGIEQVPPLWDAFVGGDTHRDTHQLEMLSAIGMVISTITIENDADGYEQAIAWITERTPGPRVLIGLEGTRSYGVGLSRALQVAGLTVVEVEQPSKTDRRGRGKSDPIDAHHAATQVLRLPLDRKALPRSDGDREAMRILLIARGEISTTRTGQINRLRALLLLGDDQDRQWCRCTMSKANLETISRRRGRQHETTEQAVRRAEARRLAISIRAADIELTDNLKQLGKLVTAFAPGLLDRKGVGPFSAAQAIVSFSHVGRCRSDAAFASLAGVSPLQASSGQIKRHRLNRGGDRQLNRAIHTIMLTRWRDCPRTREYIERRRKQNKTDREIRRCLKRYIARELFRELTAASS

SEQ ID NO: 207528 - protein, 346 aa, unidentified
MVLIGCDFHPSWQQVSWLDGETGETGDQKLVHEAGAAEKFYRQFPAGSRIGMEATGNCQWFLELMAKLGHEVFVGDAAKIRASDARQQKHDKRDARLLVQLLAEERFPRIWVPSREEKDLRQLLIHRYKLVRIRAQVKNALQHLALNQGLQRKKRLWSEAGQKALRELPLAPWASRRREDLLKMMSELDAKIELLDQAVMEAAEKNEKAKLLMTQPGVGPITSMAFVLTMGDVNRFPRGKQVASYLGLIPREYSSGGKQRLGSISKQGNSFLRMLLVEAAQGATRYDVGMRNEYLHRCHTKAKGVAKVAAARKLAIRLYWMLRTMTTYPEIVRIESSSRVPLVSAS

SEQ ID NO: 207529 - protein, 355 aa, unidentified
MSQTQNAAIAVVGIDIGKNSFHIVGHDERGAIVLRQKWSRGQVEARFANMPPCLVGMEACVGAHHLSRKLNSLGHNARLMPAKYVRPYSRGQKNDFRDAEAIAEAVQRPTMKFVATKTAEQLDLQALHRVRERLVSQRTGIINQIRAFMLERGIAVRQGIGFLRTELPTILATRTDALSPRMLRVIEELAGDWRRLDQRIDGLSGEIEALARQDQACSRLMTVPGIGPIISSAMVAAIGTGDVFSKGRDFGAWLGLVPKQISTGDRTILGKISRRGNRYLRVLFVQAAWVVLVRIKNWERYGLRSWIEAAKRRLHHNVLAIALANKLARIAWAVLAKGRAFELTRTDDAGVVRPA

SEQ ID NO: 207530 - protein, 401 aa, unidentified
MNAVGIDVSKGKSMVCVMRPFGEVVLEPFEVLHTAQNLHDLAEKLKALDGETRVVLEATGNYHKPVAFVLHDAGLFVSVVNPVLIHDYDNNSLRRVKTDKKDAVKIANYTLDKWTRLRQYLPEDDTRLALKNCYRQYQQAVAIRTMLKNNLISSLDLTFPDANKLFSSPVKNNGCEKWVDFIGDFWHSECVSSLSANAFAKKYLKWCQKHGYVFTRSKSDEIYACAVNSVSLPKSPTSKLLIQQQVAQLKAVSQSVAAFRQEMLRLSQQLPEFDTVMEMYGVGPSLGPQLMAEIGDVRRFSSKKSLIAFAGIEPQPNDSGKVVGNDKGISKVGSAVLRRTLFLIMTVILQTQPQDEPVFQFMNKKRSEGKPYKVYMMASANKFLRIYYAKVKAVMDPERSQ

SEQ ID NO: 207531 - protein, 363 aa, unidentified
MQYSTNNELSSLEETRCQFNGGKAVIKLGIDVHQDFYVVVEQLGGSNPKPPQRFKKEAFVLWAAKLKKQGNQVHAVYEACGFGFGLQRQLSALGIDCHVVCPQKLDEQNRRVKTDGLDAKALCLKLDRFVQGNDDALALVRVPSEKEERLRAIHRQREQLVKARKRLEAQGRSLMVNYGMEPIQRWWKGRAFARLRVPTWMQELLATSQPILLALEQKIKTLTLQLQNAAQPNQPRGFGALTSVVIDREIGNWQRFNNRRQIGSYTGLCPGEHSSGNTRLQSCVTKHGNPRLRAALVELAWRLVRFQPKYKPIVKWRATLAKGALATGAARKKAIVAVARQLAVDLWRIKTGRLRAEELGLIN

SEQ ID NO: 207532 - protein, 410 aa, unidentified
MNAFCGIDWAEDHHDIAVVDRDGGLLARARISDDAAGLARLLELLAGHGDSAGDPIPVAIETPRGLLVACLRAGRDVYPVNPMAVARYRDRHSVAGRKSDHGDAVVLANILRTDLHAHRPLPADSELAQAIAVLARAQQDAVWDRVAAHNKLRSHLREYYPGFLAAFAAAKGGITRPEARAILAAAPAPGDAAKLTPAQLRALLRKAGRSRGIDAEAQRLREAFRAGQMRQPPLVEQAMGRQALALLRQLGAACASADDLEAAAIESFNQHPDAGIITSFPGLGPLTGARVLAEIGDDRSRFTDAKGLKAYAGAAPITRASGKTRSVTRRHVKNNRLAQAGYIWAFSALTASPGARAHYDRRRDAGDRHAAAERNLFGRLLGCLHHCLATGHHYDETVVFPARAATPAAA

SEQ ID NO: 207533 - protein, 372 aa, unidentified
MKKRSSSRQNPKPAANAKRAQQSVTIGMDLGDRNSRYCILSSEGEILREGQVATTKAEMIKTFSRLGRARIAIEVGTHSPWVTRLLQSLGHEVIVANPRQVKLITESSRKDDRLDAQTLARLARIDPQLLRPIQHRSEKAQMALMVIRVRAALLSARTSLVNAARGLAKSLGERLPKCDADQMGVPQSEALPSTVQGVLEPLLKEVESLTEKIKDSDQKIEQIAREDYPETALLQQVSGVGPLIALTFVLTVEDKGRFQKSRDIGCYLGLRPRRSDSGQSQPQLRITKEGDPYLRTMLVQGAHYIISRRGPDTDLKRWGLRLAERGGKRGKKKAVVAVARKLGILLHRLWVTGEVYEPLRNQNLRKERKQAA

SEQ ID NO: 207534 - protein, 355 aa, unidentified
MNDAKYIGLDVHQATISVAVRDSDGKLIMEAILETKAETILQFVRGLRGSLHVTFEEGTCAAWLYALLKPHVTQVLVCDPRKNALLKVGNKNDRIDSRKLAELLRANLLSSVFHEDTGLRAVKELARSYLTMTKDLTRVMVRLKALYRSWAIPCATKQVYAPRHRAEWLAKIREASVHRRAELYYQQLDALRSLQQQVKKELLIEGRKHSATKLLRQIPSIGPIRAVLLLALIQTPHRFRTKRQLWGYCGLALETRTSAEYRVVHGQLQRSKKPVAIRGLNKNHNHDLKNLFKGAALRAAAVEKPFQEFYAALVGKGIKPEMARLTLARKIAAITLIVWKKGARFDAEQLKQQAA

SEQ ID NO: 207535 - protein, 316 aa, unidentified
MAEESYVGIDVSKAELVVAVRPSGERMTLANDRAGIKRLVGRLAELKPQLVVVEATGGLQRQVVAALWMAEIAVAAVNPSWVRNFAKGRGVMAKTDRKDAELLALFAQRERPEPRPPADAETQALQDLVMRREQLLEMLVAEKQRLHRASGPMRKELRHHIAYLEGRIKELEQDIDKTVRRSDGWRRKSEIVRSVPGFGPRFSAIALAKMPELGTLNRRQIGALAGVAPMPDDSGRRHGRRIIAGGRFEVRNKLYMCALVAARSNPVLKQFYERLVARGKPKKLALAAVMRKLIVILNAMLKTNSLWRPPCPDPSV

SEQ ID NO: 207536 - protein, 395 aa, unidentified
MNYLVGIDIGKNKHFFCVMDKDTGELLVDPVSFSNNKEGFEFLINKLKPFSKNSILTGMEDTGHYHFALLKFLLSNAFTVALINPKTTDFTRKMQGGITKNDKLDTLTICDVLDTPERKKQYRITKVNSFDFYEQKQLTRHHHNLKEELNVYTNRLQKCIDIVFPEFNRLFKSKYGTVYMNLLKTFGSAEDIANTDIRTIRKCFDINGRGKRIALTPEQLKECAKSSIGISSTAEIIQIKHLVNQIELINEQIAETDKKIEEFSVKNNSPILSIPGISHFSGTSILAELGDISNYKKPSQIIKFAGVAPLHYESSQFTAQHTSITKKGSKYLRKTLYQIILPVINHNPIFKQYYELKISQGKGHRCAQGHCVRKLLRIIYHLLSTSQKFDPVLLR

SEQ ID NO: 207537 - protein, 412 aa, unidentified
MNAVGIDVSKGKSTVTIRQPGDVVLMPPRDIPHTQSDINALIEYIRGLDGETKVCMEHTGRYYEPVATWLSDAGVFVSAVNPMLIKDFGDDSLRSPKTDKADSKKIARYTLDRWAKLKQYGSMDKTRNQLKTMNRQFGFYMAQKTSMKNNLIALLDQTFPGANDFFDSPARSNGSQKWVDFVHTYWHVDCVRSKSPDAFTEHYRNWCKRKGYNFSPQKARDIYQSSSGLIAVFPKDANTKMLIRQAVAMLDTASQTVESLRLEMDNTASSLPEYPVVMAMNGVGPTLGPQLMAEIGDVARFTHRGALTAFAGVDPGKDDSGQRVRKSVPTTKKGSPYLRKTLFQIMDGLIKRSPADDPVYAFMDKKRAQGKPYYVYMTAGANKFLRVYYGRVKEYLATLAQASDGEAGNDGI

SEQ ID NO: 207538 - protein, 370 aa, unidentified
MLDTTTFVGLDVHARSIKAVSLDVMTGEVRCATFGYDAGAVAEWVRSVDPKARCVYESGVTGFDLQKRLSGLGVDCVVGAVSKMIKPSADRRRKNDRNDAEFLARMLSVGNVVEVWVPDDECEAARDLTRALEDARDDLSRSKQRLSKFLLRHGLAFDERTPTGRRKGNWTRAHWSWIESIRFAEGADNEALAYYVDAVRRAAEDKARLEGLVEAETRKPRWRRRVDSLRCLKGVDTASAADLVFEAGEFSRFRNARSFAAWVGLTPSEHSSGESDRRGAITKAGNKHLRKALVEAAWHYLTCSGRPKDLAKGQAPDRGARRHAAKGVRRLVERREALLARGVHGNKANVATARELACWVWAVGLMAEEA

SEQ ID NO: 207539 - protein, 313 aa, unidentified
MSEEIFVGIDVAKDHVDVHVIPGGQAFSCPNDGKGVDSVVKRLKKKSPELIVIEATGGYERDLLVALKAKQLPAVLVNPRRVRDFARSIGKTAKTDSIDAFVLAVFAQKVRPQVRPIASDQERVLKELSCRRRQLIRMRTAEKNRLPLAGYQGVHGSIKSMIQALDKQIGDIEKDLDDIIKGDSDLCEKDQLLQTVPGVGSNTAKALLSQLPELGTIANKELASLVGVAPMNRDSGKMRGHRMITGGRAHVRSALYMATLVATRCNERIHEFYKRLVDGGKPKKVALVACMRKLLSILNSIVRKRMSYQEVFA

SEQ ID NO: 207540 - protein, 471 aa, unidentified
MGSPKSKQPKTRQSKKRAARNNKKQQDRPVIEANAAGIDVGAREMYVAVPPDRDPEPVRIFPTFTADLEALADWLVERGITTVAMESTGVYWIPLYQILEDHGIRPCLVNARHMKNVPGRRTDWYECQWLQYLHSCGLLRAAFRPEQEVCAIRALLRHRHELVQMASQHVQHMQKALTQMNLQIQHVISDITGVTGTAIVDAILAGERNPAVLAKLRHERVAADKETIRKSLEGDWRQEHLFTLRQSRKLYDSYVKMIEDCDKEIAPRLSQMEAKLDVSQNPLPQLSGPSRKRRKKRTGDFRFDVRKEAYSLYGVDVTRIPGLDGLVIPLFSEVGRDLKSRFGTSDRFSSWLGLCTDNDKSGGKVLWQGVRKVKNRAGDIFRMAAAALHHSRSPVGDFLRRMKAKLGPAAGITATAHKIAIIFFTLVTKQIEYDGSVWAARDKERHQRFEQKVKRQARQLGYELVPIQVPA

SEQ ID NO: 207541 - protein, 397 aa, unidentified
MYIVGIDIAKRKHEAAVIDGEGTVIIKPFSFTNNCSGYNRLLAMLAKAKLPLDEVSFAMEATGHYWLALFTRLQKEGFRVQVINPVQTNSIRSFYIRQAKTDPRDALLIAEVIRFGHFSESTLHPENIYELRELCRGRHAIVSMQADVKRKVVALLDQVFPEYETAFTNMFSDTSMAILQTCPTPKELSEMPFEELCHLIEVSSHKRFRMAKAQELQELARNSFGFAMAGDVFSTMIRLYAKHLDFLKQQVREMDRKIAEIMETLDTPITTITGIGPTLGAYILSEIGDISRFSSAAKLAAYAGIDPTMRQSGEYNGVRNRMSKRGSPYLRHAIWLAASSAVLHDPALKLYFQKKRDEGKPYMASVGHACRKMVSIIYAVMRDNKAYTPYIPNEISA

SEQ ID NO: 207542 - protein, 402 aa, unidentified
MAVCGGLDWGGGEHGVCVVDRASGQVLARFTAEHDAAGLADLVKRLARLAPPAELPVAIERPSGLVVETLLAAGHAVVPIHPNVVTASRPRYRAAGGKSDLGDAYLLADLLRTDGHRFRPLTPCSDEIKALRALVRGRDDLVAQRLALANQLRALLESFWPGAAAVFADIDSPIALAFVQRYPTPDSAARLGDKRMKAFMAQHRYCGRRGAEALLDRLRTAPFGLAGEAEAEAKGEMVRALAGVLAAIVARVAELTARIEHDIAELPDGRIVMSFPRAGRICAAQILAELGDVRERFQTEDQLAAEAGVCPVTHESGKSRGVVFRWACNHRLRQAITCFADNSRHSSAWAASVYKRAKDRGCDHPHATRILARAWIRVLWCAWTDRTQYDPAIHRGALAAAA

SEQ ID NO: 207543 - protein, 435 aa, unidentified
MNNSDPPMNPSTNEPFAALVGLDWADEKHAVVLLAAGSQIKEHATLEHTPEALSDWVAQLHHRFAGGKIAVILEQSRGSLLYALLPHAHLVLYPINPQMAAKFRKAFYPSGAKDDPLDADLLLEILCQHRDRLKAWQPDEPVTRQLQLLVEARRRFVADRVRLSNRLEHALKSYFPQGLQLVGESLTTPMACAFLQKWPTLAVAQKAGAQRLRKFYYGQHCRAENLIQQRLRLLAQAQPLTTDAAVVAAQSLLVKGVAHELAALPAILAEYDQQIAALFAAHADYKIWDSFPGAGAALAPRLAAAWGTQRERFESGEAMASYSGIAPVKQASGRSVWIHMRWACPKFLRQTFHEVARTSLSFCVWAQCYYQMQLQRGKGRHAAFRALAFKWQRIMWRCWQDRVPYDDAKYVESLKRDNNQLYARIVAFRSAPTSA

SEQ ID NO: 207544 - protein, 334 aa, unidentified
MNFTHFIGIDISKNTFDLALIKENSSATIITEKFTNTHKGIVALEQFIRKQELVKQQILFCIEHTGLYCRVLSNYLVENQYAVWLEMPVQILKSLGIQRGKNDQLDAKRIATYAFTFRDKARLWQPPREEVQKIHDLLALRDRLIESRKSILTPIQELEATGLSEVADTLRKHCKKSIESLDQEIKQIEKELDEIIDKDTNLKNKYKLARSVPGIGKITAMTLLYYTNEFTLFRSAKQLACYCGVAPFARESGTSIRGKTRVSNFANKVLKKLLHMASMAAISSDKQLKAFYERKVAEGKNKMLVLNAIRNKLLHRLLAVIKRNTPFQSEYELV

SEQ ID NO: 207545 - protein, 349 aa, unidentified
MIIVGMDVHVRNSFLQVVDEKGRVLRRGRCANRLSDLAKFLAPFGAEPMRVSLESTTNSRAVHRMLMDHARESGTSVTAQVLDARKLRIIAESVTKCDRLDAAVLAELTRSDFKLPVCYLPDDEEFALREHLRARHDLVVLRTRVKNRIHSVFHRRGILTPARMSLFTGTGRKWLDEMVLDEAGRSIVCHYLEIVDRLEATIDASTRQLRELARRPRWCKSAALLQTMPGIGPITALTILAELGDRHRFRSRAAVANYVGLVPILRSSNDKNSTGHITKRGSKHLRAVLVEAAWTSVGRVPAYSAMFERVARRRGRTIAIVAVARRMLEDAWTMLKRDEAFRFSPSVAG

SEQ ID NO: 207546 - protein, 344 aa, unidentified
MDATTVGVDLAKNVFEIALADERGHIFDRQRLNRTRFDRFFVNRPPCRVVMEACGSAHHHARRLRDLGHEVCLLPAQYARAYVRRNKTDAADAAALIEAARCPDIRPVPIKSPDQQALQQLHRLRSQWMRARTSRISFLRGCLREFGVSIPLGPKCAIEAVRAAVAEPSSPVPALLHSSLLDLLEEIGVLEQRYQHLDRELKRLHRHDPVIQRLLKIPGVGDLTATALRASVVDIQRFPTGRHFASYLGLTSREHSSGERRRLGRISKQGDPYLRTLLIHGARSVLLAARSAQRRGLALDRLRTWALELQERRGHNKAAVALANKLARIVWATWRHERDFANRL

SEQ ID NO: 207547 - protein, 351 aa, unidentified
MSHKTAATVAHTIGIDTGKNTLHLIGLDDQGAIVLREKIARGRIAARLANVPRCLIGIEAGMATHYVARELGALGHDVKQVPAAYSKPFRQGHKNDFRDAHAIAEAVQRPSTRFVPVKTDDQLDLQALHRVRSRLVGQRTAVINQIRGFLLEHGIAVRQGLRFLRQQLPDILAKRSDVLSPRMIRIMEDLSGDWRRLDERIEHITKEIEVLAGTDVNCGQLMTVPGIGPIVASAMVAAIGNGAAFARGRDFAAWLGLVPKQMSTGDRTILGRITKRGNRYLRMLFVQGARAILLRPKSWVKHSFGPWLTTAARRLHRNILTIALANKLARIALSVLIQGRSYETRIVPAAA

SEQ ID NO: 207548 - protein, 349 aa, unidentified
MGQVSTIGVDIAKSVFQIHGVDAEGTVVVRKRIGRAKVLEFFTDLPPCLIGMEACATAHQWARELKKLGHDTRLMPPTYVKAYVKRGKNDANDAAAICEAVTRPSMRFVPIKSVEQQSALMLHRTLDLLIRQRTQLINALRAHLAELGLVAAKGHEGLQQLVTAVTKSSDEQLPSNARFACQSIVAQLHAVQTQINGLDKRIVQAHRANTDSKRLEAIPGFGVILSTAVIATMTDPKAFRTGREFAAWIGLVPRQNSSGGKERLGSISKQGDRYLRRLLVLGAISIVGTARVRPDKYPWVTELLARRPAKVVAVALANKMARTAWAVLARGESYRAPTRSSGAAIAAAV

SEQ ID NO: 207549 - protein, 428 aa, unidentified
MNYNQNTKLAQITFQTLIIGVDIAKYKHVARAQDFRGIEFSVPYYFENAKSSFKSFLEWIKKLMDQNKMDKVIVGMEPTGHYWLNLAHFLKEENIKFVVVNPMHVKKSKELDDNSPTKNDVKDARVIAQLVKDGRYAEPNIPQGVYAELRVARKIRDLLAVDLQAVQGQIHNWIDRYFPEFLTVFKDWEGKAAIQLLKLNLLPHELVNLSEQDILQHLRKAVKRAVGLSKIKELKQVAVDSIGIREGSDMAKLELSTLIDKYELIKEKFEELESNIDKLLEQIPGVEQMLAIKGIGKDTIAGFYSEVGDLGNYTHPRQIIKLAGLSLKENTSGKHKGQTKITKRGRKTLRALLFRVVMPLVAKNTAFKALHEYFTKRPNNPLKKMQSLIAICNKLIRILFTIGTKQCDFSEERMLRDIPHMAVLQVAV

SEQ ID NO: 207550 - protein, 367 aa, unidentified
MKQSSKIFVGMDVHKDSIDITLAEQGGEVRRFGEVGGDRAALLKAVRKLTSRGGELVFVYEAGPCGFWIQREITALGHACWVVSPSLIPQRPGNHVKTDRRDSENLARLARAGELTPVHVPDVRDEAIRDLVRARDDAVIAQRRARQQLKALLLRNDIRYVGKTSWTSAHLRWLSELKLPQPAQQIAFQEYVDAITVATGRIERFEQAMRNEVPTWRFAPVVAALQAMRGIQFVHAMTLVAELGDLTRFASPRQLMAYLGLVPSEDSSGPRRRQGSITKAGNAYARRALVEAAWAYRHPARVTRIIALRQDALPKQACDIAWKAQLRLCAKYRRLRARRVLETKIIVALARELSGFVWAIGQHVKPQ

SEQ ID NO: 207551 - protein, 281 aa, unidentified
MRYIGIDVSKATFVVAYSSDKGGEIRTFNNTTTGIKQFIGALPKDGSIHCVMEATGNYSAMLLYLLNVAGIAVSMENPLKIKNFARAMLSTVKTDKIDARLIALYGEKMNPQPFKIQGEAILRLRQKRTVIRQLTKQITAMSNLRGSLACLPVPDKGATHTVDETIEFLEKRRDRLQSELTDLVEVEFSRQLALLTTIKGIGITLATALIITTGGFTYFQNAKQVSRYLGICPTYEQSGTSVNIRGHINRNGDVYTRGLLYVAAWTASRFNTKCGKPIRRA

SEQ ID NO: 207552 - protein, 374 aa, unidentified
MKEFTKFVGLDVHMEMVAVSVADAGGGEVRYVGAIVNTPEAIAKLVKQLKKDGARLSFCYEAGPCGYVIYRQLQALKQDCQVVAPSLIPKKAGDRVKTDRRDSISLARLHHAGELTSVWIPDGFQETLRDLTRAREDMKHLLRQVKQRLLAFLLRHGKRYTGGKCNWTQAHFRWFETVKFEQPAQQIVMQEYIDTVTSCSKRVLGLGQQIERTVQESTLWPIIEALMALRGVNLLTATTVVAEIGDLKRFTKASQLMAYLGLVPSEYSSGAKTRRGGITKTGNSHVRRVLVEAAWSYRHAARKTADLQRRAERAPEPIQEIAWGAQKRLCRRYKALEERGKLKVQVCTAVARELVGFIWAIGQAMPQPTGTARV

SEQ ID NO: 207553 - protein, 415 aa, unidentified
MESVDRCIAGIDVHKKMLAVVIRKPAGQVVEYIKRKFGTTKNEIFHLVGWLQHHQVSEVVMESTANYWRPVWYGLEQHFKQLHLTHPLKTRAPRGRKRDHRDAQRLADRWHSGDLEESFVPGAEQRAWRWLTRSRVQLKRKLSVIRGQVEGILEEGGIKISAVITDIFGVSGWAMLEKLAQGEADIDELMGEARGRLKKKRAQLKEALVGWLQPVYRMLLTQHMEQVRLLWKQVEEINHWLSEAMKDHVPALVRLTKIPGVDLYAAQELLAEIGVRALAFPSGDQFASWVGVCPGSQESAGINYSHRSAKGNRYLRRLLCQIAWAAVHTKNTFFGALFARFKPRLEAKRANWAVAHRISHVIWLVLHEEVEYQERGATPLDPKTLKKKLQRLLRTFAKQGLDAKSILEQEFAAVV

SEQ ID NO: 207554 - protein, 422 aa, unidentified
MNYNQNEKIAQITSETLIIGVDIAKYKHVARAQDFRGLEFGAPCHFENTKPHFDLFLSWIKHLMEQHGMHKVIIGMEPTGHYWLNLAHFLKEEEIKFVVVNPMHVKKSKELDDNSPTKNDVKDARVIAQLVKDGRYAEPNIPQGVYAELRVARKIRDLLFVDLQAVQGQIHNWLDRYFPEFLTVFKDWEGKAALQILKLNVLPHELKIVEEQEILIHLRKAVKRAVGLKRVAKDSIGIREGSRMAKLELRTLLDKYELINEKFEELESDIDGLLERIPGVQQMLAITGIGKDTVAGFFSEVGNLSYYSHPRQIIKLAGLSLKENTSGKHKGQTKITKRGRKTLRALLFRVAMPLVAKNTAFKALHEYFTTRKNNPLKKMQSLIAICNKLIRILYTIGTKQCEFSEDRMLKDIPHMAPLLKAA

SEQ ID NO: 207555 - protein, 472 aa, unidentified
MIRSVGIDLHQGRHRARCLDERAQPCDSFSFPTTPEGLAALEERVFRDGANPIIVLEPAGLPWLIVAVYLRSRHPDCHLVKAKTQKVAALRRYLRGPVKSDRLDALTLAKMPFIDPEKLDDIYLPPAKIHALQRLTRQRKRIESDVSGRKIRISAIIDGYLPGVRQAFDNAWSSPFRAFLRSRLSPFAVIRDGEDALHAYLSKASNRSRWSRAQTREAFLACQSMATVCELSKSAGTVDEEFFTDLQDEIARELRMLEADEVESEALAQSIAGLYRKLHPSDNLCTIPGVGEHTAPIFLATVGDPARFRNQSAFANWEGVVPGARQSSDAQAKGLRMTKAGPSIMRMALYQAGDISRRWDPQLAAVYHREMVYHGKNHRQAMGAVMSHLGARVLRVLKEDSPYEMRDIEGKLISKNEARRLVLSKYHVSEDIRRERRRRNRKVGKDRETATYRTNEADKAPQPVQVQAVSQQ

SEQ ID NO: 207556 - protein, 341 aa, unidentified
MNTVTLIGIDLGKRSFHLHGQDAAGRMVFRKQCTRSQLFKLLGNTPCSTVVMEACAGAHWMARRIKALGHEAKLISPQFVRPFVQGNKNDFADAQAICEAASRPSMRFVSPRNEAQQTVSALHRVRESLVRERTGVINQIHAFLLEFGISLPKGLAIVRRLPAVLAQHELPLRLVALLERLQAHFKYLDRQVGDIEHELTAQLREDERSQRLLDIPGIGPITASALMTALGDARQFDSARQFAASVGLAPRQYSTGGKPTLLGISKRGDKNLRRLLVQGARAIMQRIERRTDTLGTWVKGLLARRHSNVVACALANKLARIAWAILARGTNYRSEQAMLAA

SEQ ID NO: 207557 - protein, 409 aa, unidentified
MEVLYPRCAGLDVHKDTVTACVLTSGEGAETRKQIRQFKTTTTELRRLAQWLREEQVTHAAMESTGVYWKPVFNILESSCELILVNARHIKQVPGRKTDKADSAWLASLLRHGLLEASFVPPIEVRELRDLCRMRATLVRECVQVGNRLRKVLEDANVKLDSVASDTLGVSGRLMIEALIAGEDDPVTLASLAKGRMRSKREELIAALEGQVRPHHRFLLKQWTGLLTTLEQHITEVEEEIRRHMGPFEWAAALLVAMPGVNRTAACTVIAEIGVDMSRFASARHLASWAGLCPGNNTSAGKSRSGKSYRGNRWIKAVMTEISWAAARTKHSYPSAQYRRLAVHRGKKRALVAVANSLIQVIWHLLTHRKTYSDLGSNYFEQLNKQRLTQSLVRRLEKLGHTVALQPAV

SEQ ID NO: 207558 - protein, 330 aa, unidentified
MTMTIGIDISKDWLDVDRFPDAPGGVGKARFANSASGHAALVAWLEEFGDAPGDAAPARLVFEATGAYHRALALALERAGRGLCKVNPRRARRFAQAAGKLAKTDRVAQDARFQRDAAMLARMGHVLALEPERPQGEKQGDLNALTSARQALVKDRNALLARRSTTGHALVLSQLDRRRAGIEADIAEIDVALAELVGADPDLSAREAILVSIPGLAATSATTILAEMPELGAMGGKQAAAMAGVAPITRSSGQWRGRAFIGGGRANLRRALYMPALVAVRFNPDMRATYERLVAAGKPKKLALVAVMRKLIVLANALLRDGRKWAPHAA

SEQ ID NO: 207559 - protein, 417 aa, unidentified
MSVTEMGPLARPAAPTGGVDWAKDEHAVSIVGPDGEQIERFSVEHTAAGLRTLVRRLLRAGVDDVAIERPDGPVVEALRQGGLSVYVIAPNQLKNLRSRYGSAGNKDDRFDAYVLADTLRTDRRRLRPLVPDTDQTVTLRMTCRARKDLVGHRIALANQLRAHLQLVFPGTVGLFHDLDSAISLRFLALFPSQDKADWLSPKRFDAWLRGAGYCGRKTGAELHAHLGAAPRGASGPDSEARAHITLALLAALRAVSDQIDALVAQISEQLDLHPDAPIFQSLPRSGTVRAARLLAEIGDARGRFPTPESLTCLAGVAPSTRASGKVRSVTFRWAADKQLRDAVTDFAGDTRHANPWAADLYARAIARGHDHPHATRILARAWLHIIWKCWQTNTPYDPSRHGALQTLLTQQHHADAA

SEQ ID NO: 207560 - protein, 323 aa, unidentified
METPQVSFKQVVSRGCGLDVHKKVVVATIDGEGLKKQTREFGTVTSSLKELRDWLLENGITHVAMESTGVFWKPVYNILEPAGITVWVVNAAHVKYVPGHKTDKKDSAWLCKLLLAGLLKPSYIPAKEQRELRDLTRYRTKLIQSNASNKNRIIRILEDANIKLSSVLSSTNGAVGTKLIDKICDGQEITMQDVDEVYHKKLAATKEEIFEACQGFITGHHVYMLQIIRQEIAGTQQTIESLTQRIKEVLSPYENALELLKKVPGISSKSVEDLVAEIGLDMGVFPTEKHLASWAGMSPGNNESAGKKKADGQPGETNKLKLC

SEQ ID NO: 207561 - protein, 399 aa, unidentified
MTRFLERRSFLMTNLFCGIDVAKFEHVASIYDPSTGEIILDSLHFSNNDKGFKALLEILKKNKNHEILIGFESTGHYHQTLFHFLTAHHFKCYLINPYMTNKFRSISLRDTKNDNIDSRAIAHFLSFEYKELFDEEYQVNELKELTKERNFLITDSSKMKIKLKSYLDRVFPELENIVDVNTKAIRAILKEYPTARDIANTRIDRLKNIASNASKSRYNPSKIKILKETAKSSIGIYSFAIALNIQNCIETLELKERQIDAIEKAICSHPIVKDSPLHQLPGINDIEIGYIMSAITSIDHFSSPRKLVAYAGLDPKVKQSGTWSAKTTRMSKRGNKLLRYALIWASFNMTHKEGVMKDYYNLKLNQGKSHYNALGHCAAKLCRYIYWILNHPDEEFKYQ

SEQ ID NO: 207562 - protein, 438 aa, unidentified
MSNKVIFNLDELFISVGIDVGADFSWMSIALPNQQFVGKPYKILHNSIDSLTTAVSKIKEAEELYSLESRIFLESTGIYHYPLFCYLRDKGFNCSVINPIITKNSTNINIRKVHNDRFDSKKAALVGLKPDLKVSLMPSDLALNCRNLCREYYDLMDNRSAYVNKLQGELRIAFPQYLGIFSKVTINTSLTLLETYTSPSAFLKADKQEIIDIIKSTARFGLTYAQNKYNAIIQAATDANQFGYIIDSNIKRIRLYISFIRKYDEEINSILESLHELVDANEDSDFVKQIHLIETFKGAGFLSAVSIMGEIGDFSAFSKPKQLFAYFGLDPAVKQSGKFEGTKVQMSKRGSAIARRVIHTLTLQSISISRNGEAKNSVLREYYIKKCDSKPKLVAMGAVSHKVCNMIFAILRDNKPFKIIAPQEHIKQYNAAKCDIAA

SEQ ID NO: 207563 - protein, 358 aa, unidentified
MAGPQPIVADVYTYVVGVDTHAATHHYAIIEARTGGLIDHAEFPTHTAGLLRAADWIARRTAEATAGEVDRVLVSVEGTRSYGAQLTAVLSQTGYRVVDAPTPKRERGSGKNDQIDAVVAARGSLHKHLDQLADARSGQTSATLQVLLSARNSITGERTRAINALTALLRVHDLGVDARRKPTRQTIRSIAAWRTRRGDTPTQAVARREAIRLATRILALDIEATSNDKQLHDIVAATAPTLLDLPGVGPVNAATVLTAWSHPGRVRDEASFAKIAGVCPLEVSSGRRHEHRLNRTGDRQLNRALHSIASNRMKYHPATRDYVARRTTESLTTPRIRRCLKRYIAREIYRHLAALDTL

SEQ ID NO: 207564 - protein, 314 aa, unidentified
MTEEKVYVGIDVSKTWLDIAVIPTEEDWRIENTENGIAKLIKILQALPLGRIVVEATGGYEAKLVEQLAKAGLPICRVNPGRVRRFAQGMNWLAKTDKIDARVLAQFGEKAQPRLLVLPTEAEKRLSALVKRRKQVVDMLIAEQNRTELAEKEVFESIANTIQFLQKQLADLDTQIQELIDQTPDLKQKWDLLISVPGVGKVLSATLVSQMPELGSCDRKEIAALGGLAPFNHDSGRMRGRRMIRGGRPSIRKVLYMATISAIRFNPVIKSMYERLLATGKLKKVAIVACMRKLLTILNAILRTKTSWQPLFSY

SEQ ID NO: 207565 - protein, 370 aa, unidentified
MWKSTKTVALEQHMDTITVAVALPGRQPAELYGTIPSTPEAARKLVTRLDDGNVALRFCYEAGPCGYGLYRQLTMMGYDCSVVAPSLSPRRPGERIKTDRRDALSLARQHRSGDLVAVWVPDEEQEAIRDLVRCREDFKHAERRVRQRLNSFLLRHGRVYSGGGRWTQAHFRWLETQCFGHPAQQIVFQEYVDGVRHAGRLVDALEADMLQALETWSLAPVVRSLRALRGVNLVVAMTVMAELGDVTRFDSPTQLMAYVGQVPSEHSTGRSRRQGSITKTGNGHVRRVLTQAAWCYRFQARKTAHLQRRAEQTSDEVQAIAWKAQKRLCGRFQHLTARGKPSGKVITAVARELLGFIWAIAWQSMPRKAA

SEQ ID NO: 207566 - protein, 339 aa, unidentified
MVAPVFSFGLNGYLGLGPVRQDKVRKRQMNDTIGIDISKDALDAFWMSGKKHRQFSNNKSGLRSLICWVERTGTPLIVFEATGVYHRLLESSLAERNIPFAQVNPRQARRFAEGVGILAKTDRVDASMLAKMGSLLDLDPSKPKSETLHDLKELLTGKRALIKDRTAAEARLATATQQVLKQQISRRLRQISKDLEQIDDALETMIAADPKLGERVEILTSIPGIGKATAFALVIEMPELGTLNGKQAAALAGLAPMSRQSGKWKGHERIQGGRASLRKAIYMPAIVATRFNPDMKAKYEQLISNGKCKKQAFTAIMRKLVVLANALLRDGRKWNEIAA

SEQ ID NO: 207567 - protein, 385 aa, unidentified
MSYTVAGIDVHKRLLVVVVADVSQPEWRFECRRFGTGAAELLNLALWLRERRVVEAVMESTAQYWKPVWLELEPHMKLHLAQAQSNRAPQGRKSDSGDAKRLLRRFVTGELFLSFVPEPEQRAWRTVTRGRLQLVCERVQVLSQIESLLEEGRIKLSSVISDLLGTSGRRILWALAQGQTDPEQLARLGDERLRCGREVLADALSGPMSEIHQKLLRQHLERIEVLDRQIEELRSLSAQQMQPYQQAVERLIELPGVGVEAAQQILAEIGPTAAAFPSARQLASWVGVCPGSNESAHENHSGRCAKGNRFMRRVPNSSNMARPSIRKRYAVPSSAISKPYAGSATKSRTSPLLLRLLLGCDFRRSGFAAASPSKYVLVMSYSRRS

SEQ ID NO: 207568 - protein, 368 aa, unidentified
MSTRDTQTDATQKTLSRWCGCDVAKPTFDAALLLPVEEERPFTMKDMPVRTFQRTREGVREFLAWADELLEPYMDSLCPMRVVMEATGKYSAELAIWMTAERPSLSPAIINPQTAHAFTESLSLRNKTDKTDARALAIYGVERRPVAYEPPSRELSQLRSLSRHRQSVIEMRVAEENRIKETNDSPLVRQMLKRHIAQLRRDEGRLEKEMKKVLETMPELKRDAQATDQIDGVGFITAVTVLAEVGDLRRFEKARQLSAFSGISPRQNRSGQSVHHKTRMSKKGSSRIRKALYMPAMAAIRGNNDLADCYHRLLAQGKPKKAALGAVMRKLLLLMRAILISGEEYQKHYRRPCGKLLKKGLKTELILT

SEQ ID NO: 207569 - protein, 439 aa, unidentified
MILIREVADAPVIMGISKPAGLKSPCGEVKIMNPLFVGIDVSSRNNVAYLMKPDGSKHSSFSVQNNLGGAKILSERIVSALESVPLSDLVIGLEATSIYGDSLVYALREDGSLGRFQRKIHVLNPKQVRKFKEAYPDLPKNDWVDAFVIADHLRFGRIAKEVYMDDYRYQALRTLTRSRFDIIQNLTREKQRFANYLFLKCSGIAQAKDIQNTSATTIALMERFETVDDLANADLDELTAFIAETGRGRFADPDAAAKAMQAAARGSYRLPKTVNDTVNQAMAVSIASMRALKEQVKVLDKAIEQQFEIIPNTLTSIPGIGKVYSAGIIAEIGDIHRFDSQASVAKFAGLVWHRNQSGDFEAEHSQMIKSGNRYLRYYLLEAANSVRRCDSEFRRYYDLKFKEVNKYQHKRALALTARKLVRLVFRLLKDNRLYIPPED

SEQ ID NO: 207570 - protein, 421 aa, unidentified
MEVHGGVFMDVLHARCCGLDVHKSSISACILLREAGRVQKHQRRFGAMTQDLRELAEWLQQFGVTQVAMESSGVYWKPVWNILERQFTVVLANAQHIKNVPGRKTDQKDAEWIAQLLQYGLLRPSYVPCEIIRDLRDLTRMRASLSQEASRISSRIQKVLEDANVKLASVATNVLGKSGRAMLEDIISGEDDPEHLASLALGHLRVKIPQLRLALEGKIRSHHRFLLRRLLDQIEFLEHEIALLDERLEDIGRQRPELSQAVARWDTIPGIDQVAAWALLAEIGDNMAQFPTAEHLASWAALCPGNHESAGKRLRGTTRQGSPWLCRMACQCAWAAARTKNTYLSSQFRRLAARRGKKRAIIAVAHTLIVIGYHLQKNQSNYDELGGNYFDRLHSDGLKRYLVKRLQQLGHKVTLEPIEAA

SEQ ID NO: 207571 - protein, 422 aa, unidentified
MEAQVARCAGLDVHKDEIVACARITTVPGGPVEVLLHTFGATTRELLGLRDWLVSLGVTRVGMESTGIYWKPVYHILEDVIGECWLLNARHMHNVPGRKTDAADAQWIAELVEYGLVRPSFVPPQPVRELRDLTRYHKAQIEERTREVQRLDKFLQDAGIKLSSVSSSILTVSGRAILESMIEGTTDPEVLSELARGRLRAKIPALREALNGFFTGHHGLIIGEILAKLDYLDEAIDRLSTEIDRVIAPFEAKVALLDTIPGVDRRTAQCLLAEIGPDMSVFPTAGHLASWAGRCPGQHESAGRSKGGKTRKGSKWLRLHLHEAARAASRTRGTYLSAQYKRIKANRGAAKARVAVEHSILVAAWHMLSRGEPYQDLGAGYFTRRQDPDRHAQRLAAQMNSLGYDVVFTKRPTPPTDTPKAA

SEQ ID NO: 207572 - protein, 335 aa, unidentified
MEFKHYIGVDISKDTLDFAVCCQGQIILTLVAENTKKGISQAMKQLRKVPGFAMTTSLFCMEHTGVYNYHLQQYLHSCKSHVWLETALRIKQSQGMLRGKNDQVDAGRIAQYAYLFREQARLWKPLEGVIKQLKLLIVMRDRLTTILTQLNVPLKENSLFMDKEMAKMEKKGFKNTLSALKKDLKGVEQEIDKLINQDPELKRLFRLVTSVDGVGPITAINIIAVTNRFDDFSDPKKFACYSGVVPFQHQSGTSIRGRTRVSHLANKKIKTLLNLAAMAAIQMKGEMKEYYQRKIAEGKNKMSVLNAIRNKILLRIFAVVKRATPYQKNYSLALV

SEQ ID NO: 207573 - protein, 342 aa, unidentified
MNITTIGIDLAKNVIQVHGVERSGKAVLKKAFKRDQLLGYFAKLPPSLIGMEACGSAHYWARKLQALGHTVRLMAPQFVKPYVKTNKNDAADAEAICEAVSRPSMRFVPIKYPEQQALLAIHRARQGFVKARTAQANQIRGLLAEYGIIIPQGISHIATRLPEILEDGENELPGVFRQLIDRLGSHLKELDRQVNELEAQIQVWHQANPDSKKLAQIPGIGPITASALVASIGNVQNFTDGRQLAAWLGLVPRQHSSGGKQTLLGISKRGDSYLRTLLIHGARAVVRVAESKLNHAHSWLGGVMKLRNKNVAAVALANKNVRIVWALLANDRNYQSDYGLVA

SEQ ID NO: 207574 - protein, 325 aa, unidentified
MRQPQSQVKPQTQVGLDVSSQTLDAHIRVDGKAFSVPNTDAGFDQLCEILSAYSVSMILMEATGGYEDNVACYLQLQGFDVVVINPRFARRFAQSMGRLAKTDRIDAAILSQMAFMIDSGPDRDRYIKPVTDEQRKQLSRLSSRRRQVVDLITIEKQRLTHADDYARESINGIISLLNVELKRIESDILRYVKKNFSELANRLLSIPGVGEQAMIVLIADLAELGHVNRRRISALLGVAPFNHDSGKFKGQRRIRDGRQTVRNVLYMGVISATRFNPVIKAFYDSLLLRGKPRKVAIIACMHKLIRIINAMMRTGKPFDTSLHGV

SEQ ID NO: 207575 - protein, 311 aa, unidentified
MDATVVGIDVSKNQLDVHIRGQNESFVVPRDAEGLAALIERLRPLEPLTIGLEATGGFETFVAAGLASAGLPVVVVNPAQVRAFANALGKRAKTDPIDAAVIAHFVEATAPEMRPLRDEETRLLADLVARRRQIVAMIVAERQREMHAPARVKKSIVRLLKALRRELDSLDGDIDESVKGSPIWREKEDLLASVPGIGTTIARTLLAELPELGTLDRRKIVALVGLAPWTRQSGQWRGKSFIGGGRASVRAALFMGAMVAARYNPALKAFRDKLVAAGKPKLVAIIATARKLLVILNAIVRDKKPWADQTA

SEQ ID NO: 207576 - protein, 369 aa, unidentified
MLVSVGIRSGKDQVVIAVDPHKASWTAAAVDASLQPLATVRVPVSRDGYRALRRFARRWRHAGWAIEGAGGLGAPLTARLKADGIEVLDVPAKLAARVRLLSSGHGRKNDDADAVSVGVAALTSRTLNAAQIDAETTALRAVVDHRDDLVKTRTQTVNRLHVVLTKLVPAGAGRHLSADHAAELLRGVRPRDVAGKTLRGLAMDLVGEVRQLDRRITKAANDIETAVTASGTTLTDLHGLGAVTAGKILGRVGDVGRFRSAAAFASHTGTAPIEVSSGDVVRHRLSRAGDRQLNFCLHVMAIAQVRQDTPGKAYYLRKRSKGKSHNEAMRCLKRRLSDIVYRQLIGDAAKRKAGPGGHSGAALSSRAAG

SEQ ID NO: 207577 - protein, 375 aa, unidentified
MEHHSEAFVALDTAKLRNAVAIADAGRAGEVRYLGEIDNTEAETRKLVAKLASKHARLTFCYEAGPTGYGLYRLIKSIGHDCIVVAPSLIPSKPGDRVKTNRRDAVNLVKLLRAGELTAVWVPDERHEAMRDLVRARDAAVKDYRIKRQNVSSLLLRLGRHYPGKKTWGRAHINWLTGLKLEHREQRIAFEEMLLAVRQVRERIERLEQAMREAVADWTLAPVIEAVQAMRGIDMVGAIAFLAELGDLSRFENPRQLMAYLGLTPSERSTGESVKRGGITKAGNTRARRLLIEAARSYRFPPRVSKDMQARIGAAPRTAREIAWKAQMRLCGRFRALTRKGKRPTIVVTAIARELSAFIWAINREVVGSHAAANQ

SEQ ID NO: 207578 - protein, 344 aa, unidentified
MTKHSNSTLIQIVHPVCCGLDVHKDKISACLITVDEAGAEQHEIREFSTFTQDLKKMKEWLLENNCPVVAMESTGVYWHPVYNTIEETMVVVLVNARHIKNVPGRKTDISDSKWLAGLLRHGLVKGSFIPPENVREWRELSRLRKTYTESLADYKRRVHKLFITANIKIDSVASDLFGLTGTNLIDLLCTDSELTLEKVKKLSKGRLKKKATVLYQSLHGYFKDHHRFQLIGMMESINLFKKQIDRINDRLESLTLEHKDLLERLDEIPGIDKKSAQSIIGEVGITLVEFKSMSAFVSWAGLCPGNNESAGKRKSGRNAVRNHPFKTVLVQVASDIEQTYVGEI

SEQ ID NO: 207579 - protein, 357 aa, unidentified
MGYTTAAMKHKSSVITIGIDLGDRKHAVCVLDAKGEILKQETITNSRASLTALSRRYPGAVMVMEVGMHSPWTSRFFKELGHRVLVANPRKVRAIYQNIRKSDRRDAEMLARIARTDEKLLYPVEHVSEDMQRDLLQIKLRDNLVRQRVDIISSVRFTFKSLGIALATKNSETFARHTRNMLRREHPDMLALIEPSLCVLDTMTEQIRQLEKSIATMAAEKYPESEFLSQVGGVGPLTALTFILTIGDPTRFGRKRDVAAFLGLVPRRDQSGETDKQLRISKAGNSYLRKLLVGSAQFILGPFGKDTALRRKGLKLAERGGPRAKRKAVVAVARNLAVLLLTLWHDEALYETDRHAA

SEQ ID NO: 207580 - protein, 429 aa, unidentified
MRTESTPGARGPVFCGVDTHADSHWLCVLDWRGRKVLSRQFPADAAGYEALAGAIAAAGEPACVAMEGTSSYGAGLTRHLASLGMPVREALSPARTQRRRPGQGKCDESDAERAARAAMSGSRLGTPKSQDGWVDGVRCMLAARSGAVKARTSAINTARSLLTTAPEGLRSRFRGMGGPRLMEELPSVRAEGALGAALGALADLWAAARDAALDMERAIEASLEENCPALLAMYGCGPVSAAKLAVAAGDNPGRLRSEASFAAICGACPIPASSGKTVRHRLNRGGDRQANSALHEIARQRVMRDPETAEYAERARGRGKSDREVMRCLKRYVAREAYRALMHPHEIRRPEDASELVAARRAAKVSQVRAASILGTSEKYISMLERGQRELKPIRRAYEAWVEAGLPLDWDRQAFEAERKMDSKKHLAK

SEQ ID NO: 207581 - protein, 456 aa, unidentified
MSRKKTRLQWVTEAPQVRTGVAGIDISPEVIYVAVDPQKDGRPVRSFGTFTGELYRIANWLQACGTRTVAMESTGVYWIPLFQVLEERGLEVFLVNARHYQNVPGRKTDVCDSAWLQYLHAVGLLQGSFRPAQEVCAFRTLLRHRSGLVQAASEQIQHMQKSLDQMNVQIHRVLSDLTGVSGLAILDAILAGERDAHQLAALRDGRVRASEETILASLAGDYRAEHLFTLRQSLESYRHDQKLIGECDRQIREMLNQFEDRADGQEPPAARKKMRTQADEELRQEFHRVLGVDLTAIPGVNVGTVQVLVGEVGPDLSRFRSAGAFASWLGLCPDNRITGGRVLSSKTRKIENRLAGALRMAAESLCRDQSYLGQHYRRMKSALQGGAPEAITAAAHKLARIAYTLITRKQEYDEGRFQAAEKRNAERQRQRIIKQARKWGLVLVPEAPAPVVSTAG

SEQ ID NO: 207582 - protein, 375 aa, unidentified
MKNNNLSVSGIGESQASIEQKNSRLLKLGLDMHYRQVTVAIQEEDGRIKAVGKMGHEAFVSWLEKKRKEGWEIYSCYEAGASGYWLHRLLVEMGVKNLVVVPKAMDQAGQKQKTDRRDAGELCDALDRYLRGNGKALSAVAVPTVEQEEQRALIRYHRQIMADRSRYEARGKGLLCAQGIEVQGKWWQAKRWKELNSDPRLKGWMKEQLEGWRSKLLGAEQQQQKLRRRIEALAPAMRPKGVGAYSVVVLEYEMKGLGRFKNPRAVSSYTGLCPGIHSSDGRGKEGSINRCGNAVVRWNLVEMVWRLLKWQPHYEPVRQLAAGLVRSKRAKKRLVVKAARQLAIDLWRLRTGQTTPQKLSLVMQCNPMKSERASR

SEQ ID NO: 207583 - protein, 340 aa, unidentified
MNKLIKKKHFFGVDISKDTLDLALLEEATYGSFKDEKIENSLIGFDKIIEWFENGGIKPEDCLFCMEHTGTYGILFFAWLSQMEIDYCVEPGIQIKRSQGMTRGKNDKVDARRIADYAYTNRAKLKTFSMPSTLIIQVKQLLTYREQTIRIRTSLKNSLKSHLQYQKVSGLKKITEQINNQIEQQDKLVDDIEKQIKEIIRSDSQMKKNFEMATSVKGIGLVIGAFMLVTTNNFTSFENGRKYACYAGIAPFENTSGTSIKGRTKISHFGNKTIKTLLSNGANSASSWDPELRAYYQRKKAEGKDHKIIINSIRCKLVNRVFAAVKRQTPYVMIYKHNFA

SEQ ID NO: 207584 - protein, 330 aa, unidentified
MKNYKEVVGIDVSKKTMNAYCYRAQSHKVFTNDIGGYKSLIKWVFKVVKTTEVFYCFENTGYYSLKLALYLSSQNIIYVEESPLKIKRSSGIVKEKTDVLDACLIARYAWLYREELNPSTVKSSSHLELGRLLALRDQLVRNNAGLKGTLKEMKVLLTSPTTDAGCISLKRSIDYLEKQVKSIEARIKAILSEDSSMGKNYELLTSLRGVGLVVACQLIYHTGNFTRFDSWRAFSSYCGIAPFEHRSGTSIHRRKQCHYLGDRKMKSLLSMASVSAIQHDGELRIYYKKKLAEGKDKMIAVNNVRNKLISRAFAVVKRGTPYVVLQQHAA

SEQ ID NO: 207585 - protein, 418 aa, unidentified
MIDDVQWFVGIDWATQSHRVCLLDIEGRHVNERDFAHGGAGLTELRDWLLEKTKAAPGQIAVAIETPHGPVVEMLLDHAFLVFAINPKQLDRFRDRFTVAGAKDDSRDARVLGGSLRTDRQAFRRLVVDDPLMIELREWSRIADELQQERTRLANRVRQQLWRYYPQAIELTDDVADDWFLALWQQVPTPATAAKASGKTITRILKDHRIRRLDAAGVLQTLRQTPLFVAPGTTEAACAHIRNLAARLHLVNQQIKQAHRTLDSLCAKLDVPAENPSGQNREQHDVTILRSWPGIGRIVLATLLTEATEPLRTRDYHALRALAGTAPVTRRSGKQCFVIRRLACNKRLQNAVHHWSRVAIQHDTAARRRYDALRRRGHGHARALRSVGDRLLYALCTTLKRQTTYDPNCQTAQITASL

SEQ ID NO: 207586 - protein, 420 aa, unidentified
MNKEVRAWIGIDWADEKHDVSLYEVATGRQERLEVKQSPEALAEWIGQLRTRYGNAGQVAVVLEQGRGALLNVLMGCEFLVLYVINPKSLSCYREAFYGSGAKSDPVDAELMREMVRQNPERFRAWHPDDVLTRSLRLMTEGRRDLVNQATAVTNQLTALLKGYYPQALRWIGALDTHWACDFLDQWPTLQALQSSSRRQILRFYEKHPRHHLDLEQQIQQFHQTLPLTGDEAVLEYSTLMVQALIPQLRALLDSIDEFDRKIAEVFRKHPDRPIFESFPGAGAALAPRLTAAFGADRDRYAAASEMQQFSGIAPVTEKSGKQHWVHWRMACPKFIRQTFHEFADHSRRWSAWAKAYYQLQIERGKKHNAAIRALAYKWIRILFRCWKQRVPYNEQLYLASLLKHQSALLSKSAPAVEKL

SEQ ID NO: 207587 - protein, 275 aa, unidentified
MTITTSGLDLAESVFQAHGIDEDGNAVLVKKLYRKQMLPFFSKLPPCLIGVEACGTAHYWARTLAAMGHEVRLIPPSYVKAYVKRGKSDTLDAEAICEAVQRPTMRFVPVKSVEQRGILMTHRARSLLVRQRTMLANALRAHMAELGFVANPGLGTITATAIAATVTDAEQFSSGRQFAAWLGLTPQQHSTGGKTRLGDISKQGDRYLRRLLVVGATAVMRHVKDKPTPMADWIRKLSEKKPFLLVSVALANKLARIAWVVLTRKEAYHPYAHLT

SEQ ID NO: 207588 - protein, 478 aa, unidentified
MSKQHTTISRGKKAGASGAPVATGAAKGAGGKKAGPETLELVTRNAAGIDVGSASHFVAVPQDRDDQPVREFAAFTVDLYRMADWLKACNIETVAMESTGVYWIPVFQVLEERGFTVRLVDARKLKRAPGRKTDVTDSQWLQRLHSYALLDAAFRPDDEVCVLRSYMRQRAMLTDYAGQHVQHMQKALVQMNVQLQHVLSDITGTTGMRIIRAILAGERDPHRLAALRDGRAKNSVDTIAKALQGNWREEHLFSLQQAVELVDAYQAKIAVCDQRIQAQLQEFDDRSHGQPLPEGGPPRRDRHNLGFDARAELFRITGVDLVAVDGLEAQTALKVISETGLDMSRWATSGHFASWLGLAPNNRVSGGRVLSRHTMKNANRAATALRLAAQALHRSKSALGAFLRRKAAQHGMPKAITATAHKLARIIYSMLTHGTAFEQRDQDYYEGKYRERVLKRLTRTAAELGYTLVKKGEAVPAA

SEQ ID NO: 207589 - protein, 325 aa, unidentified
MEDRITYVGLEVHKDGIAVAVAEGGRRGEVREYGRIANTPAALQRLVRKLGQQGAKLRFCYEAGPCGYGIQRQLSANGHDCVVVAPSLIPKRAGERVKTDRRDAASLAKLHRRWLAGLKFEQAVHHIVLEDYIAAVEAAEARRDRLTAQIKAMLPDWTLAPVVAALQTMRGMALVNAATLVAELGDLSRFANPRQLMAYLGLVPSEHSSGGSTRRGGLTKAGNGAARRLLIEAAWTYRFPARVSRELQLRQEEQPKPIPRSPGTRSCGCAPAIASSPAAANRPISSRRRSPVSWRAAAAQGWGRGRGQENPRNHHPPGRRSDAGS

SEQ ID NO: 207590 - protein, 440 aa, unidentified
MQGKKKRSAKQILQDLREEVKSSQNMLLVGIDIGKTRHCACFMTSSGKVLRRKLFFGNTIDGFNKLLRQTKFYQKNKNLSKVLFGMEPSGYYWVHLYEFLDLRGKRAVTVSPLAVRRNRETIDVSKDKSDPKDAYNIADLIYQGKFYLPIYRDKEIRQLKRLMQIYHKLIQQKASLRCRLRGVVGYIFPELETYFKDITAKSMILILQNFPFPQKIQKMRKDEFTSFLVKRNPYLSWKRAEKIYDLAANSVGITGEEEATSLEIRLLLDELKRINESIALINTEVNSIVGKREDYELLLTIPGVGPVTAAQVIAEIGDIANFSSGRQLIKLAGLDLCGAQSGTSINTLRHISKRGRKTLRTVLYQVVINCIRCNSHLRICYLRILTNQQGKKKVKPKAIVAIACKLLRIIYRMLTEKKAFDPNYDKILRKRFSLKLAKVA

SEQ ID NO: 207591 - protein, 311 aa, unidentified
MADVSHVGIDVASDRLDVMVLPQAQRFWVANNSRGWLELVEHLRAFCVAAIGLEASGGYERGVMRTMLAAGISVRLINPLKLRQFAQASGVLAKNDRLDARMIALFVSTMPTRPAQRNEVASRLAEIVTVRRQLSDEKVAAENASRLLEDPGLRRLYRNRIRRLVAEIVLLDKRLAEIVSADLGLAGRYRLLTSMPGVGPVLAFTLLALLPELKQMNNKQVAAILGVAPYDFDSGKFKGIRRIWGGRAPIRRVLYMAALSACRYNPVLKIFYQRLATAGKKSKVIIVAVMRKMITTLNAIVRNNVAWNASI

SEQ ID NO: 207592 - protein, 348 aa, unidentified
MERYIGLDAHATSCTFAVLSERGRRLDSAVVETNGRALVKFLRSVPGDKHLCLEEGTQSAWLYEVLQGHVRELVVTHAYERKRGPKDDQRDAFHLAESLRLGAVSPVYKDRGQLSELRAHADVYAKLVTDVVRAQNRLKALFRSRGVQVVGGAVYTQRDRQAYLDELARPYRGSALILYSELDALRAIKKEAEKQLIAQSHQHCISAVLQTCPGMGPIRVAETIPIIVSPYRFRTARQLWAYSGLAIVMRSSSDWVQTPHGWERAERLRTRGLNRNYNRRLKNIFKGAATTVITQRLEPMVGDYQRGLEQGTKPPMAKLTLARRISATVLAMWKNKEAYHPERYRPTP

SEQ ID NO: 207593 - protein, 388 aa, unidentified
MPAAETPVAYLGIDVGKSSHSACALDAGGDVAFRAELANRPDDIDRLLERAGSGALVVVDQKRNIGALVLARAHAHGNPCAYLPGYAEKQARGMFPGTAKTDAIDAEVIARTALGVPRALRPAPEEPEGAASLRILSSQREFASSARTRAKNRLRATLLEADPALEGAVDPSSRWQVSMLAEFGGAAGCSAAGWRRFSNVARRAGAPAAGARRLWEALLASSRSGRRLPAGEDVAVRMLAREIASLDADIEELDSLVADSLAGDEVYECLLTVPGIGPKTAAALVTSIDISAFRGHDELASYCGVAPSDRRSGSSIRSTSPQHGGNRQLKNLLIFSCNSLIGTDNRFGRYYGECRARGMRHSKALKAVARKRLKVIYAIMRDAVPYAS

SEQ ID NO: 207594 - protein, 408 aa, unidentified
MQVAHPVCCGIDVHKDTLTACLRRVDANGQVSKERREFATTYTSLLTLSDWLVEQHCPIVAMESTGVYWKPVYHVLVGTVEVYIGNAHELRSRPGKKTDKRDAAWLAELFAHGLIQPSFVPPPEICALRDVTRTRVALVQTRSQSKNRVHKLLEDTNLKLGSVVSDLFGVTGRRMLAALVAGARDPQVLASLALGALKHKHPQVELALTGQFTAHHGTLLGLLLELIELLDRQIATLDQPIGELMMPLHAQLAQLDSIPGVDIIAARDILAEIGTDMSRFGDAARLASWAGVCPGNHESAGKRYRGKTRKGNRYLRRVLGPCAWGARKTPTFLGRTFRRLEVRIGKKKAALAIAHKILVIVYHLLATGSCYEEARYDHYHPKQEARERQRAIKALERLGYTVTVERAA

SEQ ID NO: 207595 - protein, 345 aa, unidentified
MNYIGIDLHKRFSQFTVLNEKGETIDRKKVDNREEEILSHLNNFDLPSKAVIEATFAYGWLADLLSSNRIEVMLAHPQKVKAIASSKIKTDKVDSEILAKLLRADLIPQAYYFSKEEREIKELLRCRGSLVGLKTQIKNKIHSLLHKVNVRDDEKYTDLFGKEGRRFLDNLSLGEKSTFALKEYLSILDFLEEKIKETSKEIKEVFEKDNQAKFLEQLPGLGYYTSLILSKEIGNIKRFRREKNLVSYAGLAPSTFQSGEHQRHGRIKQGNKYIRWVLIEAVPKVIKKDKILRAFYLKILNKKGHNKAKIATARKMLAQIWYLLTYRKIFTDPETGSPVFFSGHS

SEQ ID NO: 207596 - protein, 407 aa, unidentified
MNLNVGIDVSKLKLDYCGMDSNKQVCFQGEVTNTPKGAGHIRDEILKRSQQADQIIIGMEATSVYNFHPTLFFEQDDRLNQLNVTVVTLNPKVTHRYSKLFDDDKTDTVDAFHIADFLRIGRYQVPVTRDEKHIALQRLTRERYHLVHQINDCKNHFLNNLYYKVNTIDTVLPTSVFGSTMLSILSDEKYSLDDLVQIPLSALTDELNHLSHGRFGDAKSVAKALKKAIRSSYRLSKTVADSVDQVLAMYANQLRMLNQQLKLLNKSISDLCSVISGADPLQSIPGIGPVYAAGLLAEIGQIDRFPNDASLAGYAGLSWQRSQSGNHERQLTPRTKSGNQYLRYYLVEAANSVRRYDPTYARYYQKKFREVPKYQHRRACVLTARKLVRLIINLLTEHKLYTPPKLV

SEQ ID NO: 207597 - protein, 343 aa, unidentified
MQAVTTIGLDIAKSVFQIHGVGAAGNVIVRRQLKRRYVLPFFQKLPPCLVGIEACASSHHWSRELQALGHKVRLMPPAYVKPYVKRHKNDAADAEAICEAVTRANMRFVATKTPEQQSCLMLHRTRHLFIRQQTAVINAIRAHLAEFGIVAPVGRNGVEDLLNIVADCGDKRLPDVARACIAALGAQLRMLKARILEFDRLIVAWHRSNEASKRLDDIPGVGPALATALVASVADPKAFRSGRDFSAWIGLVPKQHSSGGKDKLGSISKQGDRYLRSLFTAGALAVIRYAKIHGTKHRPWLTALLARRPTKVAAIALANKIARMAWAMMARGDRYKEPVALAA

SEQ ID NO: 207598 - protein, 335 aa, unidentified
MSLELLAIDLGKRSFHCHGIDSDGIVLSRKVSRSRLFDTIKELAPKAVAMEACASAHFWGRRLLADGRRVLLINPWFVKPFVKGSKNDAADAEAIYEAALRPTMRFVPVKSTEQQDLQSLHRARERVVCARTALINHMRGLLGEYGVILPQGAWRFLKQAQDAIAVADLSDLARGLFADLFDELQALDLRLDKLDQRLLSLCRTNEACRRLSKLPGVGPVIATALVAAVADGRHFRSGRELAAWIGLVPRQYTTGGKPRLGGIGRRANHYLRRQMIHGARAVMFRLTKHEDRRSQWLKGLAARRGFNRAIVALANKTARIAWVVLTRKEDYLAAA

SEQ ID NO: 207599 - protein, 355 aa, unidentified
MKFYVKQHKYYCGIDLHARTMYVCIIDKEGTIVKQKNIDSGPDAFLQIIEPYREDIVVAAECMFAWYWLSDLCSRENIPFVLGHALYMKAIHGGKAKNDRIDSHKIAALLRGGLIPMAYVYPPEMRATRDLLRRRNHLMRKRADLLAHIQNTNHQYNLPAFHKSICYKGNREGVAERFSDECVRKSIEVNLSLINHYDQLLRKLEYYINQKAKAHDPEALFRLLSFPGIGQTLSLIILYEIHDIHRFPRVQDFVSYSRLVKSAKESAGKRYGSSGAKIGNAHLKWAFSEAAVLSLKQSPEIKKYKAKLVKKHGKAKALTILAHKIGRAVYYMLKRKEVFNIDKFLNKQLIQTGRA

SEQ ID NO: 207600 - protein, 361 aa, unidentified
MKKPAQHLIAEVPRRQAKVEITIGIDLGDVWSHYCTLNQDGEVVDRGRFRTTPKAIEKWFTDVAPARVAMEAGTHSIWISAQLQELGHEVIVANVRELRAISHSDRKSDQVDAEKLARYARLDPNILRPIAHRTVQQQEALTLVRARALLVRLRTAAVNAVRGLTKSCGYRMPASATTCFAQRSLAVMPPGLAQALGPVLQQIAEITVKIKQYDRQIQQLGQTEYPETQALLKVHGVGHLTALTFVLTLGSKERFGRSRDVGCYLGLRPRRSQSGDHDPQLGITHAGNAYLRSLLIECSNHILRPHGRDSALRQWGLHLAARGGKQAKSKAVVAVARKLAVLLHHLWSTQEPYMPFYEQAA

SEQ ID NO: 207601 - protein, 454 aa, unidentified
MEQEVISMEVVNPHAAGVDVGSRSHWVAVGQSEQDVREYGVFNQDLFAMSDWLKEKAIKTVAMESTGTYWQNLYAVLISRGFEVILCNGKFTKNIKGKKTDIKDCQWIQKLHTLGLLTGSFLPEGKTEELRTYCRHRANLLHSAASATKKMQKYLRLLNLRLDVVVRDICGLTGLLIIRAICDGETDPQKLAALRHGNCRKSEEEIAKALQSNGRKDYLFALRQELETYDQTQEKITQCDIEIEKMLNEIIQSDDNKRQHHLEPKIHKRVNKNTPKDIDLNLKAYQLFEGTDLLAIEGMSFSTILSLMSEVGPEGIKKFKTAKHFASWLRLAPNNKVSGGKLLSSKVPKGSNRLKIALRNAANAIGNLKESTPLRDFFHRISFRKGRVSAISATARKLAVIIWNMVVKGIPYINPEGYLFLDQKRKLGLVKRIKKQIDKFGLTEDDLGLKTAEI

SEQ ID NO: 207602 - protein, 305 aa, unidentified
MMENMFGVDVAKNWVDVVGPDGHERVRNDDLPAFAKCVSIQGGRVACEASGGYETPLRMALAEARVPAIRINPRRARAFATSLGRLAKTDRVDAGVIREMAIRLDLPECPPEPKEVSQLKALQLRRRQLVEDAKREKIRLSQTSDKGMCASLRRVLRLLQREVAQIEATIAKLIASSKNLRDRAALLRTAPGVGPVSATALLAEMPELGTLTPRQVAALAGLAPIARDSGVRTGKRRIGGGRKGLRDVLYLAGLSAARNDPSLRAFSNRLRENGKAPKQAIIAVTRKLLIILNAMIREKRPYAPD

SEQ ID NO: 207603 - protein, 310 aa, unidentified
MMDAPYVGIDVSKNRLDVHVQPSGESFFVARDGEGLTALIARLQPLAPRLIAVEATGGFEIIVAASIGGAGLPLVVVNPAQVRHYAQALGKRAKTDAVDAEVIARFAEATKPQPRPLPDEATQLLADLIARRRQIIVMMVAERQRATRLPKRLKKSCERVIRVLEKELTELDREIDTTVRGSPAWREKEDLLASVPGVGSITARTLIAELPELGQLDRRKITSLVGLAPFTRQSGKWRGKSFISGGRGSVRSALFIAALSAVRHNPTIRVFYKRLIAAGKPKMVAIIASMRKLLTILNAIARDQKPWQSA

SEQ ID NO: 207604 - protein, 400 aa, unidentified
MLLFFEVITMIFVGIDVAKDTHYAAVSDDSGAVLVKPFAFQNNAEGFCLLLKKLSEFDRSKLLIGLESTGIYSENLICFLYESGFRLAVINPIQTATLRKTAIRKTKTDKVDTMLIIKSLMVNSYRLYSQRDADSLKLRTLCRFRQNLKKSKARLKIQLAGYVNLVFPEFGKFFKSGIHIAASYALLKKYSSPKEIAALRTSTLYTLLSKASHGRFGKDTAEALKSLALSSVGVKNPYISIQIAQTIAQIELLEQQIKDLNSAIEEAMESINSVLMTVPGIGAVNAACILGEIGDIKRFSKPCKLLAYAGLDPTVRQSGLFTAKSTRMSKRGSALLRFALINSAWQLTLNDTTFKAYYDLKRSQGLNHYGALGHVAHKLTRVIFKLLTSDTPFNPAKLVA

SEQ ID NO: 207605 - protein, 480 aa, unidentified
MSQTLTRKDVLLSKGSGVSRTDRRRNARKARLRSLVPRGGVVLGIDLGDVKQALALADHDGLVLWRKSPRVKAHELGTWIDLAVSAARAKGLGPVTAACEPTGPRWMQVQRLCRERGLPLVCIQPLVSHASRRQQDLTGHKRDESDAVMIARLAAELHCYVPEELDEAWALLRDLGRRRAQLAAAETASVLRIRDFLSVAWPSATSAAAVPFRSATWLAAVGAVTGRGPEALAALGEEELTALVREAVPGWGARRPDMRIVRNVRACAGDPDAVAWARRGKFRRIAAELEDLQRCRALLAGTEDEMEALARELGLARLGEIPGLTLQGAAVILAEAGDPRRYDTSKSLVKHAGLSPADNASGASEGGSRISRRGRPGLRLAAWRAVLPLLRYNPVTAAKYRSLTAAADEAARTAKDRAKPGSAQAAQAARNARAARAKARVACAAALLRWIYFMTVHGAGWDPAAASGGRLAPAIFQEAA

SEQ ID NO: 207606 - protein, 482 aa, unidentified
MKKKNIYSNQSQELLTLFEEAGNGAKVMCVPIDYAKKDHVAMLCNGNGHILRKPFSVKNSPEGIVYLTEQVTRSCKHRQIDLKHVFFGGEDVGSYAENFVNTLRSGGWIVAGVNAHDAKEQRANMQASTDRLDLMGIASMLLNRRGNCSPAQSGIYRNLRTVVRHRKKLVAMSTEVKNRMHTVVDRLFPGFLDEKKSGILSFSESSLYLMEDRFSPRQIRRRKQPKLIEILHRYGTKKAEDTAKKLKGYADCVLGTPNEYISTFQLSLTQHVNHFRCLRGSIEQLEHEIAVWLAQTEGAFLTSIRGIGIVLAAGTAGEIGNPHEQEPLNNLVSYSGIIPRVKQTGGSEGKTYTGKVAKRCNRILKDYVVQSGNHMGLHGPEELMADYKRREAAGQHADFGIGRRYLRTAMCLMRTSQIYMPEQLRNTKVQPEERAGYYLSIWPYLRKKWKKAGALDAAFEKDRPLGQWRCMVQELYEIKLKL

SEQ ID NO: 207607 - protein, 353 aa, unidentified
MIIGCDFHTRYQQIAMAREETGELLVERRLDHESGEADAFYRSLQSSQEPVRVGIEATGPIHWFERLLAELGHELWIGDSARIRASEVRKQKTDERDARLILDLLLAKRFPRIWVPTPAERDLRQLLWHRHKLVSLRTMLGNQLHFLAMSQGLCRKKKLFTKKGRGELAGLALGPWARRRREELLKLLDQLEPPIAELDRAVLEEAQRRDDAVLLMTHPGIGPVTSLAFVLAIGPVTRFPRSKKIASYLGLNPSEESSGGRRRLGAISKQGNTMVRWLLIEAVYPAVRKDLALRQDYQRLKFRRGHAVAKVAIARKLAVRMYWMLRSGAAYAQLVRRQGSPAATLLDASPSLG

SEQ ID NO: 207608 - protein, 342 aa, unidentified
MSEVTMIGIDLAKRVFQLHGSCANGTVIFRKKLTRVQLLAFMSQQPTCLVAMEACATAHCWGREIEKLGHRVRLIAPNYVKPFVKRQKNDVADAEAIVEAASRPTMRFVVLKSEAQQARAMLFRTRQMFIGQRTQTINALRGHLAEHGVVAPKGAIHVKRLADAVADETIGLPEGVRELAQVYFAQIEGLNVQITALDQRMKGAAKEAEAARRAQTMPGVGPITALAIETFAPDLNCFHRGRDFAAWLGLVPKQNSTGGKPRLGKTSKMGQRDIRRLLVSGAMAGLQAVERFGTPHNSWLVSMLERKPRMLVAIALANKMARGLWAMVTKQEDYRTPAATMA

SEQ ID NO: 207609 - protein, 347 aa, unidentified
MLHAGLDLSRRKLDVCLLSESGEQLDQLAAPPDADALRTLARRIDEAYREPVAAVIESMTGARLVHDTLEQEGWDVEIADAQKVKGLAPLACKTDKIDSRVLAVLSHRDLVPAIWLPDPRIREERELARFRLHLVKHKSALKNRVHSTLINFGKPCPVTDLFGVEGRALLARLQVPQPWRGNITASVELIDDLEGQIAEINRKLRERHADHPYIPLLMSAPGIGWVLAFTIAAEIGEIERFPSPEKLAGYTGLCPRVNQSGDKDRRGPLTKHGPTYLRWALLEATMHALKHPAYAQRYQRNKRRLGKQRGAKVAQVDIARRLAHAIWHMLSRNQQFAPRGAAVRLAA

SEQ ID NO: 207610 - protein, 343 aa, unidentified
MSIQHAVVVGVDTHADTLAAAAIDAAGAVVWQATVANTTEGVLGLIQAAGNGARRWGIEGTGTFGRLLCDELLTTGARVLEVPTRLTARLRRRSGYAKTDPIDAAAIARAVLADTLGPVRHHPVVEALRVLVRQRETLVTAQVQATNRIRSRLRELDPATARELPRLRSRATLNRLTELVTDNPNPHHQALAFTIRLEAAETLERIKHIKQLETRIRHTLPHPGHQLMTITGIGLVGAATIIANTGDINRFPTDGHYATYCGTAPLDASSGRQQRHRLNRWGNRTLNRVIHTAIITQLQRRAEAHHHITRRLSQGSTKPEAIRTAKRHLTRRIYRLLKHHPLT

SEQ ID NO: 207611 - protein, 401 aa, unidentified
MKYGVGIDISKGKSTVAILSVEGEIIEEPFEITHNIEGLNLLEEKMKIFPKENIRIVMEETGTYHLPVLGYLLDKDYFVTTENAFKIKKYLDRGLRKAKTDKKDAYKLAEYACENWYKLNKVRENDEIYDNLKFLSRQYLSTIAVQVKQKVNFSNLCDLLFPGYYQLLDDNTFMLGLEIFKKYFHPEIVKNKKENSFIDEVDKLARKLGHKGAGISLATKIYALAQTTISPRPNNQYTQLSATSCVDALIITIKTSNTIITEMDKLARELPEYDVINEIPGCGKKLTSRVIAEVGDIRRFKNAGSIIAYAGLDAPPYQSGQFEATNRHISKRGNKYLRKTGYEIMKSIKGSCKEDNELKAYIIKKENEGKLKKVAKIAGLNKFIRMYYGKVKKKYRELNIW

SEQ ID NO: 207612 - protein, 387 aa, unidentified
MLLIGIDVAKDKHDCFICDSEGNVIKDVFTFSNDREGFNLLLSFMPTSSENVKVGLEATGHYSLNLINFLIDNGYSPVVFNPLQINLFRKAHTLRKTKTDKIDAKLIALMLSSSDAKPHLDLSYHVTELKSLTRYRSRLKDQLARLKISLARIIEIVFPELEDCVYSINQKSTMALLYEFPSKELIANAHLTRLTNLLKDNSKGRYSKDKALEIRNVASNSIGTSSDASSFELVQTIDMINFYSSKIDELDAKIKDIMIELNSPILSIPGISYNLGSIILAEIVDINRFDTPAQLQAFAGLDPATHQSGKFIATGVSMVKRGSPYLRWAILNASRLIAMRDPYFKDYYQRKRKEGKHHFVALTHVAKKLIRVIFKLLKTNTQFVPQA

SEQ ID NO: 207613 - protein, 415 aa, unidentified
MEVLYPCCCGLDVHKRTVVACLIRTGSDGRRRKESRTFETMTDSLLALADWLHTVGCTHVAMESTGVYWKPVYNILEDQLTVLVVNAAHIKAVPGRKTDVHDAEWIADLLQHGLLRPSFIPDRAQRELRDLTRTRTSLIDERSAAVNRLQKVLEDANLKIAGVATDVMGVSGRAMIAAILQGTTDPTLLAELAKGRLRRKRGELARALSGRVSAHHRFLLTTHLAHVDFLDEEIDHLSAEIATRLQPCEEELRRLDTIPGVDRRTAEVLVAEIGTAMEQFPSAAHLASWAGMCPGNHESAGKRTSGKTRRGSKWLRRALIEAAHGAARTKQVGRTGLAGHYRRLVTRRGKQKAIVAVGHRILIIAYYVLRDEETYCEPMLPHLDERRQQRARDRAINQLHQLGFEVTLIPKQPAA

SEQ ID NO: 207614 - protein, 412 aa, unidentified
MDVYCGIDWAEDHHDIALVDRAGQLLARRRISDDAAGLAALLGLLAEHGDNPGDLIPVAIETPRGLLTACLRATGRKVYPINPMSVARYRDRHSVAGRKSDHGDSFVLANVLRTDMHAHRPLPADTELAQAIAVLARAQQDAVWDRTTAHNKLRSCLREYFPGFLAAFADARGGITRPEARIILAAAPTPADAATLTLTQLRGLLKKAGRIRGLDTEATRLRDAFRVPQMRQLPLVEDAMGRQALALLGQLDAACAAADGLEQAATQSFNLHPDAGIITSFPGLGALTGARVLAEIGDDRSRFADAKGLKAYAGAAPITRASGKTKSVTHRRVKNNRLNAAGYSWAFSALTASPGARAHYDRRKDAGDRHAAAQRNLFGRLLGCLHHCLTTGQRYGETIAFPAIGKELPQAA

SEQ ID NO: 207615 - protein, 425 aa, unidentified
MTEKTAVGFAALVGIDWADRKHDICLQVPAEAKREFLVLEHRPEAIDEWANGLRVRFDNRPIAVCLEQRKGALITALRKYEHLVLFPVNPKLLAGLRRAFHPSGAKDDPRDAEIAVEILLHHRDKLTAWRPDDPRTRQLQALVEARRRLVGQRVRVTNRLSANLKGYFPQALECCESLDSTMACDFLTRWPSLGEARRAREERLRAFFHRHNVRGRELVEERVALLKSALSLTSDAGVILPSLVATATLVAELRVLIDGIEQYDDAIATLFKRHPDAFIFASLPGAGPTFAPRLLAALGSDRDRFDSPEALLEYLGIAPVTERSGKSTWVHWRWACPKFLRQSIVEWAGLSIRYSCWANAFYRQQREKGKNHHAAIRALSFKWLRILYRCWKDRRPYDEAKYLFALQQRKSPLLQYIAEPIATAA

SEQ ID NO: 207616 - protein, 346 aa, unidentified
MSHKTAATVAHTIGIDTGKNTLHLIGLDDQGAIVLREKIARGRIAARLANVPRCLIGIEAGMATHYVARELSALGHDVKQVPPAYSKPFRQGHKNDFRDAYAVAEAVQRPSTRCVPVKTDDQLDLQALHRVRSRLVGQRTAVINQIRSFLLEHGIAVRQGLRFLRQQLPDILAKRSDVLSLRMIRIMEDLSGDWRRLEERIEHVTKEIEVLAHGSESCRQLMTVPGIGPLIASAMVAAIGNGAAFVKGRDFAAWLGLVPKQMSTGDRTILGRISKRGNRYLRTLLMQGARVILLRPANWAKHSFGPWLTAAANRLHHNVLATALANKLARIAWTVLMQARSYEARV

SEQ ID NO: 207617 - protein, 407 aa, unidentified
MEILYSHCAGLDVHAGSVTACARIAVGGQVTYHHHTVPTTTAGLLELSEWLTAHGCTHVGMEATGVYWKPVWHVLEGDFTLILANAMHIRNVPGRKSDMNDATWIANLLAHGLIQSSFVPPAPIQQLRDLTRTRKQLMRELTRHTQRIQKTLEDANLKVTHVMSNIVGVSGRAILDALVTGETDPERLADLTRGRLKATRTELVHALHGRVTDHHRFMIKLHLTQIDALDAAVQDIDARVGDALGPFRAAVSLLTTMPGLSDTAARVLVAEIGTDMRRFPTAGHLVSWAGLCPRLDESAGKRRSTRTRQTTPWLKTTLVTAAWAATRKKDGYLRAQFLRIQSRRGAKKAVLAVASSMLTAAYYMLRDGVEYHDLGGQYFVHRDKEQMANRLIERLRNLGVVVEVKAA

SEQ ID NO: 207618 - protein, 362 aa, unidentified
MEFFTGLDVGMDETAICVVDDQGKAALEVTVVTDPQVIKAALKPYLGRLRRLGHEAGALSPWLHPELLKLGLPAICLETKHVRAAMSAQRNKTDKADALGLAHLMRTGWFRQAHIKSEACYRLRLLLTHRRNLKRKFLDLENAIRHSLKAFGIRLHRTGRGGFAKAVREAVAGDAWVTELIDAMLCARAALWKEYGRLHDLVVKFVAGHELCRRFMQIPGVGPVAALSFVTAIDDPSRFKRSRDVAAYFGLTSRRWQSGSSIDVQGRISKAGDSDVRRALYEAASALLTRFKRKDKVKSWGLAIAKRSSHRKATVAVARKLAVIMHAMWVDGTFYCGDPAATPAEVRAHAAEKERKLLRTSA

SEQ ID NO: 207619 - protein, 339 aa, unidentified
MEVLIGVDPHKRSHHAVAIDRDETALAELSVRSAKDQTETLLAWATRFPERRWAIESAGGLGYLLSQQLVGAGEEVLDVPATLAARVRVLGSGRSQKNDPNDALSTAIAALRHRGLREVRPDDHRAILRMLATRHHDLRGLRTQTACRLHAALAALIPGGYSGRLSAKKAASLLRGVRPIDGVAAERKAQAQELLADLRRLDTAIASVRKRIIVAIEAAKTSVTDVYGVGPVIAAIIVGHTGDVRRFATRHHYASYNGTAPIEASSGPKKRHRLNPRGNRQLNHAIHIAAVTQIRNDTAGRVYFERKIAEGKTKKEALRALKRRISDAVYRALLADVER

SEQ ID NO: 207620 - protein, 406 aa, unidentified
MKQIVSVGIDVSKGKSTVCAMIHPNTIIKESFEVLHTVEEMSMLADYIGSLDGEIRIVMESTGHYHLPVAQFLYQKGFFVCVENAYIIRQFSRIMLHGAKTDPLDAKKLAKYGLAYWSELKPYKFHPSCYTELSLLSKQYQTYIKLLIAAKQNVIHLMDEMLPGFKEALDTANSVQFSKVKYVDFAKEFYHVDMIKSMGKEIFRENYKQWCKEKGYRFQSEKADELFHLAEDGIPTLPTEFPSTRLCMEVATEQVSQLGYALEQILSQMQNLAKTLPEYQTIRQMGGMGEKLCVRFIADIGDVRRFHNGKALVAYAGIDAPPYQSGQYTGTKRRISKRGNSALRKTGYEVMKSLKSHPPKTDTRVYDFIIKKENEGKSKKQAKIAGLNKFLQIYYARVMEIYKNIA

SEQ ID NO: 207621 - protein, 363 aa, unidentified
MVINIGVDLHKTQFTVYARTGDGMYGKYRTTAEGYEQFIRQLNWWRDAGHQIRLAVESTGNTRYFKRQVSQAGYPVTVINPLKFKVINESVKKTDRHDAATIAEFLEKDMLPEAWLCGEQSEELRRLLKVRQSLVRTMVSVKNQIHGLLVSLGVEDRAASLQSKKGRQEILDTLNRAHNGLVVHTLFETIDLLEQQVKKIEKELTDLVAEDEMVKLLRSIPGCGLITASTIRAYTDDIRRFRSYKQYASYAGLAPWVQCSNETERYGRITKRGPEPLRTAFVQLVLGMVRSKKKTVSYRIMQRYRGMKTEKGSGKAIIATARKLSKVVWFMLTTGREFDPRLMIDPKLEEKAELMRISIAKTA

SEQ ID NO: 207622 - protein, 367 aa, unidentified
MQKVRFVGLDVHKESIAIAVADGDGGAPANVATVPNDTAALVKRLKRLAAGGELKCCYEAGPTGYGLQRALSKAGIECVVVAPSLVPRKPGDRVKTDRRDAEKLARFLRSGDLTEVHVPDGATEAMRDLERCREDAKRAERTARHQLSKFLLRQGRIYDGKTAWTGTHLDWVRRQVFELEAHNRVLIDCVQAVENATARVERLTRDIVDLIETWSLRPLVKAFQALRGVQVISAVILAAELGDFTRFASAPALMAYLGLVPSEHSSGDVQKRGRITRTGNGHVRRILVESAWSYRHRPTMSHAIRKRNEGVSPQVQAIAWKAQHRLHRRYQKLLGRGKNRQQAVIAVARELAGFVWSIGRQPQLLAS

SEQ ID NO: 207623 - protein, 346 aa, unidentified
MEHYAGIDVSLELSSVCVVDTQGKIVKEAKVASEPEALVAFFKALSFAVKQIGFEAGPLSQWLHAGLRQAGFETVLLETRHVKAALSAMMVKTDRKDARGLAQLIRLGWFRSVHAKSIGSQEVRALLVARKQLLGRLIDVELSIRGILRGFGLKVGQVTRKTFEARIRELVTGQPTLERIAGAMLSARASLKVEYEKLHKAVLAIVREDAVCRRLMTVPGVGPLVAVTFKSAVDDPTRIAKSKSVGALFGLTPRKYQSGEKDITGGITRVGDEMVRTALYEAANVLLSRITRFSKLKRWGMDVAKRRGSKRAKVALARKIGVILHRMWVDGTTYRWAAAEPIAAQA

SEQ ID NO: 207624 - protein, 404 aa, unidentified
MWEVNARAFSWRNYEYSKKPFAFSNDEDGFASFKAWMDDIAEKHEMEKVIPGMEPTGHYWLNLGAYLQGQGMRPVHVNPHHVRKSKELDDNNPNKNDRKDPKTIAGLVNEGRFSYPYIPTGIYAEIRNLSNLRIQTQEEITRIKNRIARWFSIYFPEIKDVYRNPDAVSGLMVIKQAPLPCDIKGLGVDGVNKIWRDARLKGAGIKRAKTLVTAAEHSIGNTEAPRSARKEIRNLLNDYEIYKSRMDELMEEIEELLSEIPYIDKLMGICGIGIKTVSCFIAEVGDIERFDNPKQVQKLAGYAIVADSSGKHNGESRISHRGRKRLRYALYEAAISVIGKNKEFKEIHHYYRTREKNPLKKMQSVIAVSCKLIRIFYTILTKGIDYDGQKMLRDIVRPGMQSAA

SEQ ID NO: 207625 - protein, 389 aa, unidentified
MENFKSVPQDLNREASGMGLSLIYERANRGSPNLEVHMAKYNIGVDYHKKFSYLVVKDEMGKVLRSGQVMNKKADVNKFLKPFTNDSAAVLESCRNWQVMHEWLEEMIDHVVLANPYKVKAIAEAKIKTDKIDATVLADLLRVNMIPECYVAPREVRDLRTLLRQRIFFVQTRTKVKNRIVTIVDRYPEEVQKWKAVTDQFGKKGRKQIEELCFSPMDRALIEREMSFIDMINLYIKEIEDVIGENFKESKNAQLLKTIPGIGQFFSMLIDSEIGEIERFKTVKKLSSYAGLIPATYSSGGKTTQGRITKSGNHLLRWALVEAVIPAIASDEELRAEYDFLRKRMNYNKAKVAIARKILAICFRVLKDERAYKKKNKIELEYKRLSRAA

SEQ ID NO: 207626 - protein, 350 aa, unidentified
MTVTIVDAARPVTGGVDTHLDVNVAAALDAIGGLLAVAEFPTTSAGHRELLGWLSGFGPVARVGVEGTGSYGAGLARFLRSAGVAVVEAGRPNRQARRRSGKSDPLDAVEAARAALSGRACGVAKSRDGNVEAIRALVVAKRSARSAKIQTLNQIRHLGFTAPEQLRQRLAGVSRHHLAARAAALRPSQQEGADPVVAATKTALRILGRRVLALDEEKARIDALLSTLVAQTAPQLLGVFGVGVDTAAALLVTAGDNPGRLRSEAAWAHLCGTAPIPASSGKVTRYRLNRGGDRQANCALWGIVITRLRNDPRTKAYMDRRLAEGRSKPEVIRILKRYVAREVYHRLPRP

SEQ ID NO: 207627 - protein, 322 aa, unidentified
MDTLGIDISKRDFHAALLNNERTAKKSFPNSTKGFEQLSAWLRNRKVDKVTACMEATGSYWYALAKYLFNDGHAVAVINPRRIKAFAESELLRTKTDAVDAGLIARFAATQQFQLWKPLAPEIEELQGLYRHLEFLKENRTQHVTREQTPGLPERVRQSTQALIVQLDIQIDDLERAIRDHIDRHPGLKIKHDLLTSIPGIGDTSATAILSEMPAIEEFRSAQAVAAYAGLSPLIRQSGSSVRGKPRLCKTGNARLRKALYFPAIVGERYNPTLQAFGRRLRAAGKATMVVIGAMMRKLLVIAYGVLKSGKPFNPIFVAQKT

SEQ ID NO: 207628 - protein, 324 aa, unidentified
MTAVLGIDVAKATYQATLLVEGHSYKRSFGNRESAFPELLKWLHKHYTGQLLVGMEATGRYWEALAYYLHEQGHVVSVINPSRISYFARSKLVRNKTDAIDATLIAEYCLSQQPDPWTPPPAEVRELQALVRHLEALQGLRTQQSNRLQAAPPSCDVRASLESLLSHLHDQIRAIESKIREHIDQHPTLKQQSALLQSIPGIGQITAARLLGENIQQFDSTRALTAYAGLTPRHKISGTSVHGRPHLCKTGNEHLRRDLYFPAIVAMRYNPAVNSFSQRLSERGKPKMAVVGAAMRKLLAIALGVLKSNTPFDPCYSERNLVLN

SEQ ID NO: 207629 - protein, 374 aa, unidentified
MKNSITYVAMDTHKRDHKVALHYPGDEQIVQFVVKNTTGDIRKMVKKIKKQAPGEVEFCYEAGVCGFDLKRRIEILDCHCAVIAPSLTPIKPGNRIKTDRRDAIRLLAMFKAGLLTEVHAPDRKQEAARELTRCRQTAQENLKRIRHQLLKFLSRHGYVYIDGSHWTLKHLRWLRSLEFGLPCLRDVCDSYFTEMQHCLQRLDSLDKDVEKLAQSDPYKEVVGFLCCFHGISTLTAITVITEIFEFGRFSTPGQLMSYLGLTCSENSSGQKERKGSITKAGNKRVRRLLVEASWHYRHPYSVKSKALRERRKDQPQWAIDIADKAGQRLRKRYWYLVNHGKIPCVATVAIARELVGFIWSVFNEYETRNNKHTA

SEQ ID NO: 207630 - protein, 332 aa, unidentified
MVGGGRFGTDIVGYRSMLGVVRRWPDRVWAIEGCSGIGRHVALRLLADGQEVVDVPPKLSARARVFSTGQGRKTDATDAHSVALVGTRMAGLRPVVDDQQLTVLQILVDRRRSLGEDHTRMIAQLHHLLLELIPGGAKKDLSAAQAKALLAKVRPRDAAGKTRRRVAAELIGDLERIYQRRKAADKELKQLVAATGTTLMELTGIGPSGAARLLVEVSDITRFPDRDHFASWNGTAPIDVSSGDQVRHRLSRAGNRQINRTLHIMATVQLRNPTEGRLLRPTQGRGQDLNGSHARPETTAIEHRLQDHARRRDHSRDSRFEDGPGRANGTRL

SEQ ID NO: 207631 - protein, 355 aa, unidentified
MNDIKYIGMDVHQTSTSIVVLNAAGRRVTSALVETQAQALVGFLKGQRGTLHLTFEEGTWAAWLHDLLAPYVSRLVVCDPRRNALLQDGSRNDPIDAGKLADLLRLNALRPVYHGPNSLGTLKELCRSYLALVQDSTRVMNRLKALYRSRAILCAGTKVYSPSERASWIGQLKAAGVCQRAELLYRQLDLLSLLRRQAKCSLLAESRKHAVSRLLRPVPGLGPVRIAVLLAMVQTPFRFRSKRLFWAYVGLGLVTRISAQFVLVNGQLQRSNKTPSLRGLNPNHQRELKEIFKSAASAAVSRPGPWQQFYQARVAAGRKPELVRLTVARKLAALTLHLWKKGERYDVKHLTPTTV

SEQ ID NO: 207632 - protein, 307 aa, unidentified
MPQNVIGVDIAKHWIDTYNLESGKASRIEMTVKSLKVFAAGCSDTLVVFEASGGYERPLAEALAAAGMAYARVNPRQAREFARATGRLAKTDQVDACVLAVMGRALELSPTPPPDPARTRLAALVARREDLVDQAAREANRLKQASDAFVRADIASLIRVLKGRITKVDAEIAAQIASDEALAATEQRLRSAPGIGPVTAASLLARLPELGRVSRGAIANLAGLAPHACDSGQMRGQRHIWGGRKQVRKTLYQAAFIATRFDPALKALRQRLEAAGKPFKVAIIAVARILLTHLNAIVREQRNYVPG

SEQ ID NO: 207633 - protein, 344 aa, unidentified
MRIRKLAGQEPKSNTLAQETYDYTIGLDWSESTMAIAQMTASETVPKVWEGKTDIVRLQRFLKSLKGRIILTFEESTAAQWLFTQLLPFVDRLIVCDPTYNRLLCRGPKNDVIDATKLCLLLRQDSLKEVYHSTSRLYQVRLLVSAYDDNIQAGVAAQNRLKARLRGRLSEQPEGMIVIQQLQKSIELYRSTKHELEQEFHRWAKRTPLIRALAKLPGIGIRSSVKIVGTVIDGRRFPTRQHYDSYCGLAWHEKRSGGKFYGRRRPQYSRRLKSVYKTAALAAIKGKNEVAQYYHRLLQRGLAPHNARHAAARYLAHVSYGILKSGIPYDPNYRNRRTSQHNNS

SEQ ID NO: 207634 - protein, 443 aa, unidentified
MARNQSRQRFELVYPHCAGIDIGSREHWVAVDRDHEQPVRSFSTFTDDLIKLADWLETLKIEVVAMEATGVYWIPLFELLDARGFKVYLVNSRATRQISGRKSDVLDCQWIWQLMSHGLLRGAFRPDDAICSMRALIRQRASKVRNQAQTLNRMQKALSQMNIQLANVISDISGVTGMKILRAIIAGERDPAVLAELTDRRIKASKETIARSLHGNWRLEHLHALGQEVECYDFFEQQIGACDKAITDALSQLPEREEAPQPSRKILRSPHRCAADQAALHQSLWRVMGVDLTAIPTIGVDTALIIAGEIGPDLSRFPTMEHFCSWLGVAPPTRISGGRQLSGKSQKTLNNAAQALKQAASNARNDKSFIGASHRARLARMDTSCAIKATAHQLARLIYAMLTKGQPYVEQGIEAFEERSKEKQYRALLRKARKLGLDLVKAS

SEQ ID NO: 207635 - protein, 403 aa, unidentified
MNSVGIDISKGRSTVAVMRPFGEVVISPFEVRHTDSELSELARQLKSLDGETRVVMEATGNYHAPVAKLLHDAGLYVSVVNAKLVHGYGNNDLRRVKTDRKDAIKLANYGLDRWLTLPRYVPEEDTRLLLKNCYRQYRQYSKVQTVLKNNLISLLDTVFPNVNRLFSSPIREDGSEKWVDFVAEFWHCRCVSEKSQKAFTNKYQRWCRKHGYNFSEEKAHTIHAEASGHIGIMPKSETTKLLVEQAVAQLRATSAALTALKHEMQSLASMLPEYPVVMDMFGVGPTLGPQLIAEIGDVRRFYSKKALVAYAGLDAPPNDSGDVTGKHKSMSKIGASSLRRTLFLVMSVYLQNAPLDEPVYQFMDRKRAEGKPYRVYMMASANKFLRIYYATVKTYLESLEHTA

SEQ ID NO: 207636 - protein, 322 aa, unidentified
MKMADNTIITAGIDTSKDKLDIAIHGQASGLIVQNQTAGWKKLAVWLKQSGVTRVGIEATGGYERGALRYLQKAGLLVILLQPLQVKAFAKLTLRRAKSDRLDAALIAQCTHMINAHNKMAPDQRFDALGDHLTYIEQIEEDIVRFKTRREHIGDARLRRTADSDIKRLKQRRLAELMCLREAIRKHDDLAARYTLVLSIPTIGARTALSIVVRLPELGQLSREQAASLVGLAPFVHESGKFKGETHIGGGRARLRRSLYIAALPGAFRWNPELKALYERLVARGKSPKCALVACARKLLIFANTVVARGTPWEKTRPVAAG

SEQ ID NO: 207637 - protein, 467 aa, unidentified
MSHRRLVGIDLGIATAHTVRVLDGEGCVVAKRRAWPTVESLSAVEAAALAGCPEGTRLEVVIEPTGPAWLPIAVFFCARGHQVFRVSSQKAADLRRFLSRHAKSNGIDADTLARLPLFDPAGLRPLQLPGAERAALDRRVRAADRLTQAGADHKRRIKDLVRQLLPASPLTGELGMADLAVLERYADPHALIRLGMTRLTALITKASHHQQGAERALQWQQAAQASLALYDSHPAIDFAGLAAEVATEVRLLRATCAELAAHAAEREARYQAVDPAGLARSLPGIAEVGGPALAACMGDPARFATGKKFRSFTGLTPKASETGQTDRKGQPMSKAGSSLLRTTLVRAADTARKQDPQLARIYYLQMTERGKDHLGALCVVAAALAERAWTVMRRGTPYVICDTGGQPVTPQQASTIIARDWTVPPEVRARRRSKKTGKAPRKSSKDSANGAASPAAPLHLVTGGPSS

SEQ ID NO: 207638 - protein, 324 aa, unidentified
MSTVKIWVGIDVAKDSLEVHIRPTDQAFAVPNTPEGVDALIEVLAPIRPELIVLEATGKLEILVMGALADSKLPVARVNPRLAREFARATGRIAKTDSIDASTLAHYAEAIQPGPSKLPEPEARELSDLMARRRQVVEMITAEKNRLKRMHPSLHAHIQAHISWLKNEKTSIEHKVEELIKASDIWRELDLVCRSNTGVGKVVSHTLLAGLPELGKVNNKQIAALVGLAPFNRDSGLMRGRRSIVGGRAHVRTALYMAAVTAVRHNHTIKAFYDRLIAAGKPVKVALTACARKLLIILNAMVRDHLLSKAAKNGSLTLDNQHSR

SEQ ID NO: 207639 - protein, 352 aa, unidentified
MQHFIGCDVHTRNQVVAWIEEETGEIKKRRLEHASQEVQEFYAQFPRGTVVGIEATFPVYWFERLMGELGHELWVGDAARIRASEVRYQKTDSRDAELLLDLLRTGRFPHIWIPTLEERDLRQLLVHRMKQVRARTQVKNQLHALAIGQGVCRKGKLWSAQGRKELESLALLPWAARRRKELLESLDRLDKQVRELDRAVEEAGGEREEVALLRTHPGVGMVVGLAFVLTVGPVERFSNSRKLVSYWGLNPRENSSGGRQRLGSISKQVNTMMRWLLVEAAQTAARLDPQLRRIYQRLKKQKTSGVAKVAVARRLAVRLFWMLRTRNNYAQLVHMSGSPSSAVVPPPAGSKV

SEQ ID NO: 207640 - protein, 324 aa, unidentified
MTRPGPAGRTLDPVSLPENPVNEAIGVDVSKAVLDVVVHGSTGQMSFANDARGRRKLVATLLPLKPRQVVIESTGRYDLAATDAMHDAGLPVVRINPRQGRDFARATGQLAKTDRLDACVLARMGQVLDLPRYEPKTAWQRRLGEWTQRRTQVIDMLSAERQRSEVLTDPVLKRLARVHIDALERTRRELDRQIAEQVRAQPALAQLRSLKGVGPVLQAVLACELPELGRLSGKAIAKLAGVAPLARDSGTMRGKRRIWGGRAQIRSSLYMAAMSASRFEPRLKAFYEGLRARGKAGKVAVVAVMRKMLVILNARMRDQLALAS

SEQ ID NO: 207641 - protein, 340 aa, unidentified
MDTLELLGLDIGKSTFHLIGHNGKGHEVLRKKFNRNRLLEFAAKLKPCTIVMESCGGSHWLARKLISFGHQVKLIAPQHVKPYVTGNKNDYIDAAAICEAASRPRTRYVAIKTVEQQVLSTQHRLREALVGHRTQTINRIHGFLLEFGIALPATKAAMNQIHQILDDPAAELPQQLKCDIEYLLEEIKRLTGEIKAIDRSIKEQVAADDAGTRLMSIPGIGPIIASALLADIGDASNFHSARDFAASLGLVPRQYSTGDQTVLLNISKRGDKYLRKLLVQGSRAVLVRIDKRNDALGRWCRDLLARKHPNKVACALANKLARIVWAVLARGGSYNAQLVT

SEQ ID NO: 207642 - protein, 343 aa, unidentified
MKIIRVGVDLAKNVFQVHGVDRCEKVVWRKKLSRAEWLSALLEKIEPGCEIGMEACGGAHHWARQLQKRGFTVKLIAPQFVKPYVKSNKNDANDAEAICEAMSRPSMRYVAVKSVEQQDLQAIHRIRAELVSQRSAKGNQIRGLCSEYGLVAPREMIQLRAAIPLWLEDLENGLTQRFRRMLRGLWLDLLNLELRVKELDQEIEIAASTDPVASRLQQLRGVGPIIATAIVANVGDAKQFSSGRAMAASLGLTPRQNSSGGKERLLGITKRGDAQLRTLLIHGARSVLRTAASKNDRLSRWVTHIAETRHHNIAAVALANKTARIAWAMITKGTDYQPGLVVI

SEQ ID NO: 207643 - protein, 388 aa, unidentified
MIYVGIDIAKLNHFASAISSDGEELIKPFKFTNDNDGFQLLLSKLDPLDKDSLIIGLESTAHYGDNLVRYLVAKNYKVCVLNPIKTSTMRKNNIRKTKTDKVDTFIICKTLMMQEPLRFVTFYDLDLMDLKAFGRFRQKIIKQRTRLKIQLTSYVDEIFPELQYFFKSGLHQKSVYALLKEAPTPEAIASMHMTHLAHLLKVNSHGRFNKEMAQQLRVLAQKSVGASDSSLSIQVTHTIQQIELLDSQLERVEAEMTEIMKFNDSVIMTIPGIGYINGGMILGEIGDIHRFSSPNKLLAYAGLDPSVYQSGNFQAKKTRMSKRGSKVLRYALVNAAYNVVKNNATFKAYYQAKMAEGRTHYNALGHCAGKLVRIIWKMMTDNVEFNLD

SEQ ID NO: 207644 - protein, 359 aa, unidentified
MRNAGIHANSLLEVRRMYNAVGIDVSKGKSTVAVLQPGGTVIRKTFDVSHTSQNLNELADYLSSLDGTTKIVMEYTGRYHEPMVKALSEAGLFISIVNPHLIKNFGNNSLRKVKSDPADARKIARYTLDNWTELRQYSGMDNTRTQLKTLNSQFSFFMKQKVAAKANLIALLDNTYPGVNKLFDSPTREDGSEKWVDYAYSFWHADCVRKIGLKAFTERYMSFCKKHHYIFQQDRPEKLFNASKELVAVFPKEKTYKLLIQQSIQQLNLASEHVERFRREINELASTLPEYSTVMGIYGVGKTYGPQLIAEIGDVSRFTHREALTAFAGVGPGVDESGQHKSKSNRASKVGSARHCFRS

SEQ ID NO: 207645 - protein, 351 aa, unidentified
MSEYIAFDSHKRYTWVDRQDHSGEKSSGHRLEHAPGAVRNYLSGCEPGTAVAVEATGNWYWIVEEIEQAGLQPRLVHPRKAKLMMGLTNKTDKLDAQGLNRLQRNGTLPTVWIPPGPLRDLRELTRTRLVLVAQRTRLKNRLSATLAKYGTPASAYSDPYGKRGRAELEKHLEGLPEQTRWVSGQLLAQLDFVSGQVRELEQRLEQLVEVTEPMQWLLTMPGVGVILAATIALEIGEIERFPSAMHLASYSGTTPRVHASGGKVRYGPLRADVNRYLKWAFAEAANSVAVNHRRFPERHVSQLYRRLRQHKGHPKAIGAVARHLAEAAFHVLRGKQIYRDPSLGRGRTSQV

SEQ ID NO: 207646 - protein, 343 aa, unidentified
MHIASIGIDLGKTTFHLVAVGEQSKVVVKKKFSRKQLLAYTANLQSSLIGIEACSGAHFIGATLRRQGHDVRLIPAQFVKPYLKSNKNDFLDAEAIAEAVARQNMRFVPIKTEDQLDLQALHRVRDRLVHHRTAIINQIRGFLLERGITFAKGPANLRSQMPAMLEDAELKISPRMRTLLARVWQEWKQLEIDIADASDEIERISSEDAGCKRLRQIPGIGPLVSTATVAAIGNGAAFRKGRDFAAWLGLVPRQHSTGGKAKLYGISKRGNIYLRRMFIHGARAVLLRVKYDTGGFGQWVHQLEARAPRNKIVVAIANKLARIAWAVLFREEDYRHMAVCAQA

SEQ ID NO: 207647 - protein, 414 aa, unidentified
MGLKIVYPICCGIDVHKTFVVACIASTNKGVTTYKRHRFSTYTKGLKELSQWLCENNCKDVCMESTGKYWIPVFNVLEDSCNITLAHPKYVKAIRGKKTDKKDAKWIADLFKHDLVAGSFMPPLAIRQLRDLMRYRFKLTNFMSSEKNRLQNCLTVSNIQLGNVVSDTFGKSSMNIIDKILGNPLDTTFDIEPLIHGSMKKKLSDLELAIDGYITPEQADKLKVIKQHYEDLQSRKADLEKIILSLAESYTEEINLILTVPSFKNIFSAIAVVSEIGVNMDVFPTAKHLCSWAGLTPTNNESAGKKKSVRISRAGCYIKPLLVQCATAVVKSEKHPEIRNRYLKLKKRRGHKRAIIAIARMLLTAIYNILKKKEPYNPELYKKSDVLPVNREITVEQAILLAKSQGFRVTAVTT

SEQ ID NO: 207648 - protein, 521 aa, unidentified
MAGSTMALTCPFRSLVPRFSADPLVKLRRLCRACGVILFERLQFFMPLLGRSHKQHMKSKSPKAKKKKQKSDLSQCWELINPNAAGIDIGSREHWACVPAGRTAKPVRPFGTFTADLEALADWFKECNVTSVAMEATGVYWIPVFQILERRGFQVILANARQTKNVAGHKTDVMDCQWIQRLHTYGLLQGSFRPKDEYCVVRAYLRYRDELVSARSAQCQHMQKALQQMNVQLHHVLSDVTGVSGLAIIQAILGGQRDPVKLAALVDRRVRASQGTIQKALAGDYRTEHLFVLQSAFELYHTYEEKMNACDEQIVRELAQLPDPVDLAAKPLPARKKGRPARADQMAGQDLRAALYPKLGVDLTAIEGIGSLTALVVLTEVGPDLSRFRSEKHFASWLGLCPDNRISGGKVLGSRTRRVTNRVSDALRMAAMTLERSQSALGAFHRRMKARLGAAEAITATAHKLARLIYRLLKHGEAYVRQGMADYEKRFQERKLYALQKTANVMGFQLVAKQPTAQSVS

SEQ ID NO: 207649 - protein, 430 aa, unidentified
MTKPHAIPDDVVLVAIDVAKARNEVLIQIRGHARRRRLTVLNTKAEHDRLVTLLVELGRPVACGLEATGNYHRPIAWRLLQAGFDVRLVSSLALARTREALHNGWDKNDPKDAQVILHMLTIGASQRYHDPLAAGINDVQELSKTHEAISRAKTEVLHRILTHYLPLYFPEVDRFRQNSRSDWFFAFLDRFPTPGSITILGKEAFITAAWDIVGRKVAKEVLLGDIYETASCSIGLPIPIDAPAIRMFRLVLAEARSLIRQRDEIERFADELLQKSEDYKRLRRIPGIGPINALTILAEAGDLRRFGHHRQFLKFCGLDLATQKSGTFRGQTKLSKYGNARLRRALWIAGQVAIRQRENSFRDKFERYVARDRHNADLRRKALTAITAKMARVVHAVIKTGVDYRPFVEGPVPGGRTPLSSAVRAQLATL

SEQ ID NO: 207650 - protein, 421 aa, unidentified
MNQLTDAGYTAYVGIDWAAAKHDICIQTADGELREFARISSQPEAIEAWAQDLYRRFGGPIAVALELSKGPIVSALQKYDFMVLYPINPLQLARYRETFTPSGAKDDPTDAELAVDLITRHPERFSPLKPQSVSMRKLIGLVEQRDKFLSDRGRLVNRLGHALQQYYPQVLEWFSEHHTVVFCDFLNQWPTLTQVKRARKASLERFFRSHHVHSAPLIEKRITAIKTAMPLTSDPAVIEPHRLQVEVLIEQLRITIKALKRFDEQIAATADKLPDYDLLFSPLPGAAKVLAPRLLAAFGEDRQRYPHADSLQKYSGIAPVTKRSGKKTWVHWRWQCPTFVRQTFVDWASQTINKSAWAGAYYRQQRAKGCTYQVAVRGLAFKWIRILHRCWQDRTPYDESKYLEALRRRGSPLLKYLAEPV

SEQ ID NO: 207651 - protein, 360 aa, unidentified
MRIIGCDLHARQQTLAMLDTTTGEVVNRTLMHEGHEVREFYSQLPRPVLVGMEAIGPMQWFLNLLEELGIECQVGDPTKIRAAEPRKQKHDRRDAELILKLLVEKRFPAIWMPSKELLDLRALLLHRHHWVRLRTQIQNALQAIALANGLRRGPGLWSYDGQTKIAFLPLPPHASYRRSALQAMYRKIDEEIEKLTEQVADQARQRAGAELLLTHPGVGPVTALATDVFLGDPRRFADGKSLASYVGIIPREYSSGERQRFGRLSKQGSPLLRFLWGEAAAHAARRDPELQRFYRRKLVQKGLGKARVAVARKLGIRLWIMLRDQIDYQEFCRHGQKQSGAICAGMLEVGYGANRHRPVD

SEQ ID NO: 207652 - protein, 366 aa, unidentified
MQKSTTMRRTVSKIFKGRQLTIGMDLGDRWSFYCVVDESGKVILEEKVPTTPEAMKQTFARIPRSRIAMETGTHSPWVSRLVAQLGHEVIVAHAQKVELITKSTRKDDRHDAETLARLARIDPELLGPVQHRSAKAQIHLAVIRARAELVSARTALINGARGLTKSYGERLPKCGSQQIDRGFGAGLSTELRQVLEPLFREIESLSERIKEYDQRIGEMAKESYPATELLKQVKGVGELIALTYVLTIEDPHRFRKSRDAGCFVGLQPGRRNSGDSEPQMHISKQGDEYLRTLLVQGAHYILGPFGEDSDLRRWGQKLAERGGKNAKKRAVVGVARKLAVLLHRLWVSGEVYEPLRNSQKVMRAAA

SEQ ID NO: 207653 - protein, 413 aa, unidentified
MQTLVEHGCGLDVHQSTVVACLLRVRQDGKVQKQLRTFGTTTRELMGLREWLLSEGCTHVAMESTGVYWKPVYAVLEGGELEIVVANAQQVKKVPGRKTDVKDAEWIADLLCHGLLRSSFVPPQPIRELRDLTRYRRKLVESRSAERNRLLKLLESANIKLASVATDVFGLSGRLMLKALVAGQASLPEMAELAKGKLRRKIPQLELALEGKLQEHHRFLLQLQQDRLDAVEKDLATLQQRIQQKLQPYAAQLALLREIPGVDQTLAAVIIAELGVDMSVFQSVSQLASWAGVCPGNNESAGKRKSSRIPKGNLYLKTALVEAANAAARAKGTYLRDKFYRLKAQRGYKRAAVAIAHKILVSIYHMLSQNVSYNDLGDLYLDKLNAHHLTRNLVHRLQRLGYTVTLTPQEKAA

SEQ ID NO: 207654 - protein, 308 aa, unidentified
MRNDVIKACGLDVHQASVTACIMRQGVERQIKTFGATTVELLSLKTWLQQQDITHVALESTGVYWKPVLNVLGEAFTIILANARHIKNVPGRKTDVKDCEWICQLLRAGLLEASFIPPSTIRELRDMMRYQKKLQHQLTAQKNRMHKLLQEANIKITSVLSDIFGATGMRILRSLAQGVSDPEVLSQYLSKNKKLVSKISQAKAALTGCFSNHHQFLLQSHLRYYDFITTEINNLEQQTNFMIEPFKTEYDLLQSIPGVKDKAAKTIIAEIGVDMSVFPTSQHLSSWAGLCPGNNESAGKKKRSHNSW

SEQ ID NO: 207655 - protein, 341 aa, unidentified
MSNNTVISLDLAKSVIQVAKLSRHGEILFNKAQSPDKVRQLIANTPACVVAMEGCGSAQYWARFARQCGHEARIISPRLVKPFIKGQKNDANDALGVAIAAIQPHMTFAPVKSLEQHTIQAINTSRRFLDKSLTALGNHVRALAYEFGCTVPKGKSRLKTRVAEILAPENDYLPEALKTLLETLWEQYLTTEAALKVVTKQLEQFTTQIDACQRLQDIEGIGPKSASLLYAAMGNGNAFKNGRAAAVYAGVTPKQHSSGGKTVLLGITKHGDSSLRATLYQGALSVISQLKPHATTIKERWLIDLVHRVGTKRACIALVNKNIRTAWALLKNNTQYQPVYL

SEQ ID NO: 207656 - protein, 337 aa, unidentified
MRFCGIDLHSDNCVLVVTDEGDRVLVSRRCRNDLGVILGLLEPHRAELAGVVVESTYNWYWLVDGLKAAGYEVKLANTVAMRRYDGLKHGDDESDAAHLAQLLRLGILPEGYVHPPAERALRDLGRKRAMLVRTRTRHVLAVENVLSRQWGHRLRSAEIKGLTVEKVDELKLPESVALAVKADVAVIVAANGQIGALEGELLKAIRKCPKYTLLRSIPGIGEVLSIVILLEAGPIERFAAVGHFASYARCVGSAHYSNGKKKGEGNTKNGNAYLAWAFVEAAHFARRYCEEARRFFDRKRARTNATVATKALAHKLARAAYHVLKDDEPFDVKRCFA

SEQ ID NO: 207657 - protein, 420 aa, unidentified
MYEAQTVAEIRGVGFVGIDWATERHAVCVLDASGVVTGRLVVAHSRDGFGILIGRLAGFGPPGRLPVGIERPDGRLVDALLEAGHPVVAVSPKAIKTWREGEVRSGAKDDPGDAEVIAEYLRLRAAKLTVAIPFSDHTRALRAGTRARDDLVVQRVAARNQLEACLDSFWPGAKGIFAELTSGIALAFLERYPTPAAAQRLGEKRLGGFLAKHHYSGRRSAAELLGRLRAAPGGILTGPEAQARGQAVAGYVRVIRALNGAIAELDHTIVTHLGEHPDGEIFTSLPRAGRISAAQMLAEWGDCRQAYDGPEAVAALAGTTPVTRRSGKHQAVSFRRACNKRFRKAITTFADNSRHASPWAAKVYHDAITRGCDHPHAIRILARAWIRIIWRCWNDHTPYNPHQHGAAARLEEQQTTKQAA

SEQ ID NO: 207658 - protein, 384 aa, unidentified
MAKVVIGVDPHKASNTLVVIDAQERVLAQQRFSNDRDGYRSMKTFARTHRDRVWAVEGARGVGAGLAQRLVTEGEPVLDVPARLSARVRALGGGSGRKTDDADAFAVAVAGLRAKDLQLVRPDDKTEILRMLTTRRQEIVELRIATVNRLHEVLCQLIPGGAKRHLSSSRARSLLSSVRPRDAVGKARKQLALDYTGELERLDARRKDLKKQISDVLVIHPTCLVEVTGLAAVTAAKIVAEVGDVRRFPSRHHFASYTGTAPIDVSSGDNNRHRLNRGGNRRLNHALHIAAVVQYRMSGPGHDYYQRKRDAGKTHLEALRCLKRRLSDVVYRCLLADLAATSPGGQVGASLQSSAADRIPMISTSEQSLPGLSHDPTPAAAAVS

SEQ ID NO: 207659 - protein, 367 aa, unidentified
MNTAIVHYEGVAALTVTGHQHKTQPAAIKLGLDIHQACYVVVAQEAHATPKPARRFKPEEFVPWVESLLTKGHQVFVVYEACGFGFGLCRRLHALGASCYVIAPRKLDEEGKRVKTDALDAGALCQRLSRYVEGNKKELAVIRVPTEEEEQLRHIHRQREALVRARTKLQAQGRGLLVTHGQPALQRWWRQQGWTALEKFLPGWLLARLEVFRPVLIVLDAQIAALTLELEKAAPQELPSGLGKLTQVVVSREVCDWHRFKNRRQVSSYTGLCPGEYSSGAKRMPGAVTKHGNPRLRAALVELAWRMVRFQPQYPPVRKRLAVLAAGSRATGVARKKAIVAVARQLAVDLRRWQTGRCSAEKLGLHR

SEQ ID NO: 207660 - protein, 368 aa, unidentified
MDGSRDEPKTTAGLDLGDKYSYLCLIDQDSGEMIEEGRLRTTPEALKRRFASEQSLRIAIEAGTHSPWVSRVLEACGHEVLVANARKLRLIYANKRKTDEVDAENLARLARLDPKLLYPLKHRGEDSQSHMAIIRSRQALVGARTQLVNHVRGAVKSFGGRLPKCPARSFHKKASEHIPEALWAALGPVLEQIGSLTQRIRDYERQLEAISKERYRQETDLLRQVEGIGPLTALTFVLTLEDPHRFEKSRSVGAYLGLVPASDRSGDRDPQRRISKEGDEMLRRLLVGSAHYILGPFGSDSDLRRHGEKIASRGSKNAKKRAAVAVARKLSVLLHRLWVSGEVYDPLYNTHRREQQQQQQQEEEEEAA

SEQ ID NO: 207661 - protein, 345 aa, unidentified
MEYYAGIDVSLESASLCVVDATGRIVREAKVASEPETLIEWFRGLGIAVTRIGLEAGPLSQWLYAGMRDAGLAVELLETRHVRDAFKAMPVKTDRKDARGIAQLMRLGWFRPVHCKSLPAQEVRALLTARKLLQTKNHDVEMSLRGVLRGFGLKVGPTTPRTFPGRIRELVAGHSTLSTLVEALLAARNTLFEQWQKLEKRLRSLAREDGRVRRLMTAPGVGTIVALTYAAAIDDPGRFRSSKAVGAHFGLTPKKYQSGETDVTGRISKIGDGSVRTALYEAANVILTRPVKGSTLKSWGMRLAARAGMRKAKVALARKLAVVLHRMLADGTNFLAEKAAVGAAR

SEQ ID NO: 207662 - protein, 397 aa, unidentified
MYIIGIDIAKRKHEAAVIDGEGAVIIKPFSFTNNCSGYNRLLAMLTKAKLPLDEVSFAMEATGHYWLALFTRLQKEGFRVQVINPVQTNSIRSFYIRQAKTDPRDALLIAEVIRFGHFSESTLHPENIYELRELCRGRHAIVSMQADVKRKVVALLDQVFPEYETAFTNLFGDTSMAILQTCPTPKELSEMRLEELCHLIEVSSHKRFRMAKAQELQALAHGSFGFAMAGDVFSTMIRLYAKHLDFLKQQVREMDLKIAEIMETLDTPITTITGIGPTLGAYILGEIGDISRFSSAAKLAAYAGIDPTMRQSGEYNGVRNRMSKRGSPYLRHAIWLATSSAVLHDPALKLYFQKKRDEGKPYMASVGHACRKMVSIIYAVMRDNKAYTPHIPNEISA

SEQ ID NO: 207663 - protein, 347 aa, unidentified
MKHYAGLDVSVKETSICIIDETGTVCREKKVVSHPDDIVALLKDSHFSLERVGLEAGPLSQWLYEGLAKAGLPVICIETRHAKSFLKAQQTNKSDRNDARGIAQMMRVNLFKSVHVKTLTSQMRRALLTARDGLQRSALTIENEIRGILRNFGLKVGMIGSVKYEQRIHELLEGMPDLLVESIERLLDSRRNARDNLAKLDRKVRGTAKSDPICRQLMSVPGVGPVIALAYTSTIDVPGRFRHSRAVGAALGLTPVLNQSGESERTGRVSLHGDAMLRGLLYEGAQAMLTRVKRWSWLKAWAMNVAKRHGAKKAIVALARRLAVILHRMWMDGSTFRWTRETTTAVI

SEQ ID NO: 207664 - protein, 354 aa, unidentified
MENKKISFKNIPIYIGIDVHLWCWKVCILTEEFEHKVFNSPTSAKSLSNYLRKNFPEGDYYSVYEAGYSGYWIHEELEQYGIENIIVNPADIPTKDKEKRVKTDSIDCRKLARCLMNGELDPIRIRTKEQQQDRALVRMRHKMIKKQTICKNQIKSLLAFYGIYIDESKVQAYWSRKYIESVENYTRNKGSATKAFNSLLRELKDLRSNILEITKEIRILSRTERYEQNVRLLESIPGISMLSAITILTEIGDIRNFGTLDKLTGYIGLVPGEHSSGERENKSRMLRRGNKILKCIIVESSWIAVRKDPSLMLVYKNLIQRQKKTRAIIKIAKKLINRIRYVLMNGNEYKLLVA

SEQ ID NO: 207665 - protein, 355 aa, unidentified
MCGEANPTPLKGGDEMKLFGAIDLHSTNSVTVLIDEADKVVYRKRLPNDLRLIIEQLAPYQSRMEGIVVESTYNWYWLVDGLMEEGHRVHLANTAAIQQYNGLKYTDDDSDARWLAHLLRLGVLPEGYIYPKQERPVRDLLRKRSQLVRQRTANLLSIQNLIVRNTGSSMNGNRIKGLTAEEVKTILGNGDIALAVNSNLSVMQCLGREIATLEATVKERVKLRAEFEKLRTVSGIGKTLALTMMLESGDMRRFPGVGNFASYCRCVGSEKISNGKKKGSGNTKNGNKYLAWAFVEAANFAVRYQPSIRRFYQRKKAKTNGIVALKAVAHKLCRACYYILRDQVAFDVTKAFGTK

SEQ ID NO: 207666 - protein, 352 aa, unidentified
MKKRNTIGMDMGDRNHTICTLDPSGKVLSRNTVSNTAAALRKCFKNHESALFAIEAGTHSAWVSRVLEEMGHEVLVGNPRKLRVIWDSDIKDDVRDAEMLARIARFDRELLYPIHHRSRDAQLGLISSIARDLLLKTRSMQTTHMRNVVKGFGERITKCSTKSFHKRAREELSSELLEMFEPLLACLEALSAKITEYDKQIEKTCVENYPETKVLRNVQGVGAITALAYVLTLEDPTRFKKSRDVGPFLGLVPKRDQSGKVDKQLSITKAGNSTLRRLLVGSAQYILGAFGPDCELREFGLNLAARGGKNARKRATVAVARKLAVMLHRLWVDEAVYHPFHQQVRKELEQAA

SEQ ID NO: 207667 - protein, 421 aa, unidentified
MRGLRVKRVRTVREGTLIATVDIGITNNTGYCTTLDGRSTKPFSFDNTKEGFEKFWYMTVASKNRFGCDEVLIGYESTGPYAEPFIHYLANRHVKIVQVNPMHTKKIKEVNDNSPLKTDEKDPRVIADIIRLGHALTIVVPKGDAAYLRRLNNARERHVGEQTALLNQLQQLVFLIFPEFKTVLRNMKGKTAQYILKRYGTPERIGTLSKEALGEEIRKRSMGKFGIKDAESLIGLARETVGIKEGIAGIFMDIRHILMQLEAEVRFISEIEAEMGTTLERIPCSARLLSIKGLGIVSVAGLIGEVGDFSKFSTQSEIMKLAGLDLYEISSGKRKGQRRISKRGRSLLRKILFYAAIQMIRKNGIMSEYYARLTGRGMDRMRALIAVSRKLLRIIHAIVRDNRDYVGQYQTSERRVIKMAA

SEQ ID NO: 207668 - protein, 370 aa, unidentified
MSVRRILAKTIDTDLEYEAIGIDLAKNCVSAALLTTDGEVICIDHLDYSELEKSAQTLSPTTFAMEPCTEMNYLVQKLEAWGHRCLIIGGKNVRDYIESHFSGQKTDLNDAQALAFLTQDTQLRTITAKDLEQQKYASLTTLREQYIKQYRQTIVSLKGICQAWGLNISKGISGKARLRELIENHTAFPKELREGLVDMVTHAQTTQKTLNRITKTLEELAKNDQICQLIQTIPGLGPICSCRLRATIGDIKRFKKPKDFPAYYGLVPRSIATGHNEKKGKITHRGDKTMRSLMVQGAGSVINMATKGKLKSRQLTKWVLKKQKEKMPWGKLVCAVAAKLLRIVRAVLNSGRPFNPKIAGVAKCSLPKVL

SEQ ID NO: 207669 - protein, 375 aa, unidentified
MKEKVRFLGLDVHAETIAVAIAEPDGEVRSLGTIANRAESIRKLVKKLGPVEQLKACYEAGPTGYVLYWQMAELGVACEVIAPTLVPMKAGDRVKTDRRDAERLARSYRSGDLTAVWVPDEGSESLRDLVRAREAAKQDQLRARHRLSKFLLRMGQRPAAGIKAWTAPYMAWVLQVHFTQVAREATMLDYLHEVDHVGERVKRLEQAITEAVKLATPAVQEVVKGLQALRGIAEISAVTIMAELGSIARFDTPRQLMGYSGAVPSENSSGNRTQRGGITKTGNAHLRRIVVEAAWSYRLRPAIGPRLRKRQEGVPEPIKEIAWKAQVRLTKRYARLAAAGKDQRKIVTAVGRELLGFIWAIGVKAETAVMQQMAA

SEQ ID NO: 207670 - protein, 391 aa, unidentified
MIYIGIDVAKDKHDCFITNSEGEVLFNAFTIPNNADGFHDLFQKISSLTNDFSNVKVGLEATGHYNYNLLGFLIDKGLPTFVINPLHTNLFRKSLSLRQTKTDKVDAHTIALMMMSGVNLQSYSNTSYHNEELKSLTRYRFDKVQERAKLKTSISRLVNILFPELEKLVPSLHMVSIYALLAEFPSSAQIASCHLTRLTNLLANASKGHYNKEKAIEIRNAAKHSIGSNMPAKSLELKHTIRLIQELTSEIDEIECFIKSIMDEIRSPILSIPGINYRMGAMIIAEIGDFNRFSSPDKILAYAGLSPSTYQSGQLDGCYSHMEKRGSRYLRYALFNATKFVCIWDNQFSAYLAKKRSEGKHYNVAISHAAKKLVRVIYQLDKSGPLYHRAA

SEQ ID NO: 207671 - protein, 346 aa, unidentified
MTMKCMAGIDLHSNNLFCAIVDMAGKRVFERKLPCDLERVLQALKPFQRRLEKIVVESTYNWYWLVDGLQDHGYTVVLANPAAMEQYNGLKHADDKSDGFFLAEMARLNILPTGNICDRTIRPVRDLLRRRMGLVHHRTSLILSLKSLHTRMTGRDLGTGRIKTLEHSDAEKLFEHPADQLITRLDLQLVGQLGRSIQEIETRILAEAKRMPRYQVLQTMPGVGKILGLTIMLETVDPQRFAGPGHYASYCRCVDSRRLSNGKKKGENNSKCGNQYLGWAFVEAAQFARRHDLACRKFHDRKRAQANGIVATKALACKLAKAAWHMMSHHTPYDGGRMFPEVKKNK

SEQ ID NO: 207672 - protein, 339 aa, unidentified
MTEITRIGLDIAKNVFEVHAVNAQEQVVVRRSVRRNQVLSWFAKLPPCLIGMEACGTANHWARELTALGHTVRVIPPAYAKMYVRRNKNDAADAAAICEAVSRPSMRFVPIKTVEQQADALAHKTREILIKQRTMAMNSLRGLMAEFGVVVPQGPQHIGKLLTILADPEDASVPAAARIALNPLGEMLSELAKQIDVLEKDIKRRASANPTARRLDAIPGYGPILSSAMVAIVTDPKQFDSGRDFSASIGIVPRQDGTGGKVKLGPISKRGNGYLRRLLVNGATAVINGKNARNDPWLAKLLDSKPKKLVAVALANKMARIAWAVMTRQEDFRPRAAAA

SEQ ID NO: 207673 - protein, 338 aa, unidentified
MAIVTIGIDLAKNVFAVHGVNEAGKPVLVKPTVARGKLLELIASLPPCTIGMEACSGAHHWARLFMTHGHTVRLMAPKFVAPYRLSGKQGKNDAADAAAICEAVQRPHMRFVPIKTVEQQGQLCIHRVRQGFIEQRTATINRIRGLLSEFGIVLPLKAATIRREAMAHLEDLPGWANTVIGDLLNEVSHLDKHVEQYDQHIEQIAKEDSRTQQLMRLPGVGPTTATAILAMIGNGHEFKCGRQFAAWLGLVPGQYSSGGKARLGHITKAGDSYMRSLLVLGARAVLNSAKNKSDSTSRWAVALAERRGYWRAIVAIAAKNARMAWASLTLGERFAMPA

SEQ ID NO: 207674 - protein, 370 aa, unidentified
MSNATTFVGLDVHARPVKACAFVPETGETIRKSFGYEPGEIASWVSSLPQPARCVYESGVTGFHLCRELNAMGAACVIGAVSKMHKPAADRGRKTDRRDAQFLAVQLALGVVTEVHVPDAECEGARDLARALADARDDAVRAKQRLSKFLLRHGLVYDERNAAGQRRNRWTGDFWAWVGRIDLGDAAAMATLDHYCERVRDADAAKAALEAKVKSLAQQPRWKPTCDALKCLKGIDAVTAASIACEADGFARFATASGFAAWVGLVPSEHSSGESRFRGGITKAGNKHLRKLLVEAAWHYKGASRSPKDLAKGQVVDAATRRHANAGVRRLVDRRRSMDDAGKQSSVANVAVARELACWCWAVGRMAEGA

SEQ ID NO: 207675 - protein, 349 aa, unidentified
MVTVGVDAHKRTHTIVAVDENGAEVGQRTVAATSAGHLEGLRWASQWPERRWAIEDCRHLSRRLTTELLVAGEAVLRVPTKLMAAARRGARTRGKSDPIDALAAARAALREPDLPVAQLDGPARDLRLLVDHREDLVAERTRIENRLRWHLHELQPGEEPPTRSLNRHATLRALEATLAGQPGVVARLARELVVRCRDLTVAINALEREICERVSGMAPRVLALLGCGALSAAKIVGEVGRISRFRSRNAFAMHNGTAPIPVWSGNHERFRLNRGGNRQINCALHRIAITQMQRPGPAQDDLTRRRAAGDTKTEAIRALRRRISDEIYRRLRADEAAANTQLRDFLAAA

SEQ ID NO: 207676 - protein, 411 aa, unidentified
MDVFCGIDWAEDHHDIALVDRDGGLVARLRVSDDAAGLARLLDLLAEKGDSAGDPVPVAIETPRGLLVACLRAAGRKVYPVNPMATARYRDRHSMAGRKSDHGDAVVLANILRTDLHAHRPLPADSELAQAVAVLARAQQDAVWDRVAAHNKLRSHLREYFPGFLAAFAAAKGGIMRPEARAILAAAPTPEAAAKLTLAQLRALLRKAGRSRGIDAEAQRLRDAFRTEQMRQLPLVEQAMGKQSTALLRQLDAACASADELEQAATESFNQHPDAGIITSFPGIGALTGARVLAEIGDDRSRFQDARGLKAYAGSAPVTRASGKSRSVTHRRVKNNRLAAAGYIWAFSAITASPGARDHYDRRRDAGDRHAAAQRNLFSRLLGCLHHCLTTGQHYDEATAFPPRSVTHAAA

SEQ ID NO: 207677 - protein, 354 aa, unidentified
MSSLIRPKKGIFIMKKNLFFIGLDIAKADFAASIYQTPDQPIVTKEAIPNNPEGFDLLLLWLKEHHIDKTNSHICMEATGIYSQAVAYYLLFQGFPVGIKPPLKVKRAFDPVGHKTDPVDSKQIAEYAYRFQDELTSWQPRDEILEKIRQLLSLREQFTKQKVALKNAIQAYSKQRVQVALIKKAQKETLDQLKRQIARIDKELEKLIKQDPEIFQKANNLDSIPGCGMLLAAHLLVITENFTKIQKPKRLAAFIGIVPYQNKSGASVFKRAKIRHFGPGPSRKLLRLAAQSVATHDVTFRHYYLRKLAQGKAKALVLNNISNKLLKIACTIIQNNTRYIKDYRSIHPMYLKSA

SEQ ID NO: 207678 - protein, 338 aa, unidentified
MYYTGIDLHKFTSYLTTVDSSGNIVKQADIKNVAHNFVQYFTGLGSENITTVESTMTWYWLNDLLNSLNIPMVLTHAKYVKAIAYAKVKTDKVDSHTLAQLLRMDYIPAAHKISNDKRLLRDALRARLKIVQRHTSITNSMQLLLAKYNLTSPDDLEEIPRYQYNQLCEVETLLKGQMLNLEKQLYPSLIPNDDIQRLLWIPGIGKMNAFTIMLEIDDINRFADVKNFYSYCRLVPSARNSGGKSKQRSSKDGSKYLKVAFSDAAIHAVHYYPIIRKYHNSLTRKKNKQIAKTIIAKELASIVYYVLKYKTNFNNTFKGKELDHTKSLQWPRVVSPYA

SEQ ID NO: 207679 - protein, 345 aa, unidentified
MEHFAGLDVSVKETSVCIVDETGKIIREVKVASEPDALLPVLTKPAYHFKRIGLEAGPLSQWLFSALVEAGLPAICVETRHMRAALKAQINKTDRNDARGIAQMMRAGLYRPVHVKTLRSQKLRMLLTHRKLLQSKAIAIENDLRATLRNFGLKVGVVGTVKFEARIKQLVENVPDLVVLVEPLLVVRRALREQIGILHRRLLTIVRDDDVCRRLMTVPGVGPVVALTYRATVDVPARFRNSKAVGAVLGLTPSKYQSGEINRTGAISKCGDEMMRAMLYEAAHIMLVRSTKWSWLKAWAMQIARRRGLKKAVVALARRLAVIMHRIWTDGTEFRWTRGQTTAAT

SEQ ID NO: 207680 - protein, 461 aa, unidentified
MKKPKRRATGKVDQGSKLSVIQSDVAGIDIGSREMFVCGPADQEGRREMRVFATTTQQIQQCVRWLKQQKVRSVAMESTGVYWIPVLEIMESSALEVLLVDTRPLSRVPGRKTDVEYCQWLQTLHSHGLLRGAYRPSEQISELRTIVRQKAVLVRQQADWIRRMHKCLDQMNVRVHHAVKDTQGVTGMAMLRAIVGGQRDPRNLAKLRDPGCQKSETEMIELLTGNWRSDHLFNLKQHMTMYDSAARQIAVYEEEIQRRMQEVTPAGRKDIQAPPLANIEKRKTMKKRDQEGKRQALYRMMGVDLTTIDGIGVETVEVIMSEYGTEMSKFPTEGEFVKHVGLAPHRPVSGGKVLKNKPRKQKGTRTAEVLRNAATSLKHSRSALGAYYRRMARRKDSGVAVFATARKLGALIYRMLRYGQQYVDVGQSAYEKQYEEKRIRALRNTANQMGFNLVKQEAVSA

SEQ ID NO: 207681 - protein, 482 aa, unidentified
MNDTIGIDISKETLDTYWLSKRKNKQFTNNKTGLRSLIRWVREAKVSLIVFEATGVYHRLLEIHLAAHDIPFARVNPRQARRFAEGTGTLAKTDRVDAAMLARMGSLPELKADKPKSEMLHNLKGMATARQALIKDRTAARTRLSTATYPLLRQQATLRLRQVERDIAQIDATIETIITADKTLSEKTTILTSIPGIAKITAFAMLIEMPEMGNLSGKQAASLAGLAPISRQSGKWQGKERIQGGRACLRRAIYLPAVVATRFNPDMKTKYHELIAVENARNLRLLRSCASLWSWQTHYCVTVVNGMKIRLDQYGYSVFASKPLPGSGRYQASGVVPGGAAATPIRFGLLPLSAQGECRNDAPVQLYEPDRRGIGMTEAPQILLQHRLKKLRLPTFQGEYAKQAQLCAPFSCGDSEQGFFSNTARNLVGQACISQCRRRPKSRVFLRGKHGRRTGFGTGAAHTWPLVPLRKALGHAAIYPVP

SEQ ID NO: 207682 - protein, 338 aa, unidentified
MSELATVGIDLAKSVFQVHGIDKNGRVLVRRQLRRSQLLAFFERRASCLIGMEACSGSHDWGRKLQEMGHDVRLMPPSYVKPYVKRGKTDAADAAAICEAVTRPSMRFVAIKSEACSSVLVLHRTRDFLVRQRTQIGNAIRGHMAEFGVVVAKGAQNVDRLREQLDRLPTTARMSLDMLFEQLAETNKRIEQLAGEIEDAHEQDETSQRLATIPGVGILSATVIAATTPDVGNFSSARDYAAWLGLTPKPHSTGGKQKVGRISKMGNRYIRRLLYLGAMAQIMLRRRLKREPGSDWLSSMLIRKKTKVVAIALAHRMARTIFAVLRDGTRYGPQASAT

SEQ ID NO: 207683 - protein, 404 aa, unidentified
MIIVGLDWSRYKHDFVIMDMQGKIVERGAIAHNANALEGLADGIDRHVNCAAQVHVGLELNDGALLAWLVVKGYTVFGIQPKSAQRARDIYRPSGSKDDGIDAFVLAEFVRINKGRLKPWRPPSEITLQLRELLRWREELVQQRTAAYQRLRALLAEWSPQLAELCDNLDCIWQLDLLSQFPTQASLCQAHGNRIGSFIRKHRMHSKKSQQIEDTRRSVPMPVPAGRAVVVEKQTSFLVEQIRMFSTEIDHIEQSLRQLTTQHPDVNIFESLPVRGIVTIASLMAIFGDDHEKALSPDVLAAVCGVAPVTIASGKTKKVRQRRACDHTFRQALVHFAFNTAFRDGCWAAKFYQRKRSEGATHYTALRCLAKRWLKIIHRLWKDRITYDEALHQANQKRNQSHAA

SEQ ID NO: 207684 - protein, 338 aa, unidentified
MKLYGGLDLHANNTVVVVLNEQDQVVSQQRVSNELALVLKALAPYQPDIQGLVVESTYNWYWLVDGLMAAGYIVHLANTAAIQSYNGLKHTDDHSDARWLAHLLRLGLLPTGYIYPKADRAVRDLMRKRSQLVRQRTTNLLGMQNLFARNTGIGLNSNRLKQLTPDAVQQLLPDPDLALAVLSNLAVVRCLDEHIAALERVVKARVNLHPAFQPLLSVDGIGLILALTIMLETGEIRRFPTVGDFASYCRCVGSTQLSNGRCKGHGNTKNGNKYLAWAFVEAAHFAIRYNAQIRRFYQRKVAKTHRMVALKAVAHKLARACYHVMRVQVPPDVNRAFA

SEQ ID NO: 207685 - protein, 342 aa, unidentified
MSMVVIGIDPHKSSHTAVAVDQTGRRLGQKTVTADPDGLLRLRSWATQFGTGPRWAVEDGRGVAGRLVRTLIGTGATVVWVPPTLMAACRASARTRGKSDPIDALAIARAALREPDLPTAHLDQTALDLRLLSDRRERLVNRRTASINQLRWHLHDLDPALDQTHPRLTGPRAQHTLTTALSTLPASVRRDLALDLLTEITTLTQQITQLEHQLRTRVQPLAPTLLAITGVSTVLAAKIIGETAGITRFRSPAAYAMHTGTAPIPTWTANKPHYRLNRGGNRQLNTCLHRIAITQLTHHPPARTYRDNWTKHHPHATTKAALRALKRHLANTIYRALTTDLT

SEQ ID NO: 207686 - protein, 406 aa, unidentified
MSHDVKYIGMDVHKEAIVIAVLNESGKQVIESVIETKASSILQFLHGLRGELHVTWEEGAWAAWLYDLLQPQVQHIVVCNPRRNALLKEGCKSDKVDARKLADLLRTGMLRPVYHGENGLRTLRELGRSYQTISKDLTRVMNRLKALYRGWGIPCAGTQVYAARTREEWLSKLPQAGVRRRAELLYQQLDGLQALRREVRPEFLAESRKHKAAKLLRQIPYIGPVRAARLIALMQTPHRFRSKRQLWTYSGLGIETHDSAQYCFVRGQVQRSKKPQQVRGLNRNHNHEIKEIFKSTATRASCGKGPFQDFYAGLLAKGMKPEMARLTLARKIAAITLTLWKKEERFDVEQLKTQAACNVPPAIVVLAVLALFVSAAARQSREIEERQRFELETRDLAQRCKTRPFW

SEQ ID NO: 207687 - protein, 364 aa, unidentified
MNQRNQAIDGEAKAKPKVIKLGLDLHVRQVTECRQLDGSTPKPAQQWDPWKLLAQVKDWVQAGIKVYSSYEAGACGYWYHRELIKAGALNFVVVPRVLENQRTRHQKTDRLDARALLDRLENYLNGNLHAMSIVRVPSLQEEQQRSVVRYREQLMRDRRRAEARGRAIALVQGIEVPVGWWREARWQEFNRQLPEWMSLQVRHWREQAVALDYQERTIRRELQKSLSIELPLGIGALSWITLERELRGWDRFHNRRQIASYTGLCPGIHNSNGRGREGSINRCGNSVVRYTLIEMAWRLLRWQPNYGPLQKLRKAFVSKRAKRRLIVALARRLAIDLWRWATGRATAQELGLQLASVWNKKTKP

SEQ ID NO: 207688 - protein, 531 aa, unidentified
MKNYSNSIGIDISKYYFDAVLYHSGEHARFDNDQKGYAGFIKWLLKHGCNTGNVLICFENTGYFSMQISFFLFENGYDYVQEHPLQIKRSIGFRRGKSDKTDAMDIARYGWLNRESIRLSKPPSRLLLKLQQIKSARELLVRQTVAIKNQIQGFNVVGCKDVSKVACKALKSVLGTLEKQIAKLEAEVEDLISQDEQLSKTFELCRSVKGVGFVLSLELILHTQNFTCFDGWRKFAAYCGTVPYPYQSGTSVKGKSRVHPASDKRMKSLLTMASISALRVDPELKLYYKRRVDEGKPKMSVINNDWFRLTKDYIVELLEPSNYPSYLGMALISQKLKGFVEENYSINKPNFEKVIDHLPANPYFYYRRANAELKQMHYYSAIIDYKIGIKLNPKNPYFLKGLGYVCQVVKDYETAISSYNQSVEIDPEDSTILCNLGYCYMDINDFSNAINLFLRSLQIEPNKMSSIIGATLGFYFQFDKLKSKAYLELAKEQKIHLKDGFAGFEKYKEEHWSNLFVEYNSTLIKMFEEFM

SEQ ID NO: 207689 - protein, 460 aa, unidentified
MGVSWMNRRMGLWARRANYYSATRLLLAFQEGVQIMKALKTHVAGVDVHKEILAITVLIGAPEAEPVAQHFECSTFTEDLMAMGLKLKELGVLDVAMESTGIYWKPVFNVWNPLGICVVVGNATHIKNVPGRKTDMNDSQWIAELHRFGLIRPSFIPDGEFQRMRLLSRHRTNLTEDLSKVKNRVQKVLEDGNIKLGSVVSDVFGVSGVKILDLIAEGVTRADTLTAAVTTKIKRMEDVKKALTNCLTTEHCFVIAELMTQYRDIKARISSVERELYKKVEPYAHLVKALDEIPGIDEILAIGIIAEASTNMSSFRDERSFAAWAGVASGNNESAGKKKRSHCRQGNPGLRKILIQAAQGATHCKGSFYRSKYRKLSFRLGSKNKAKVAIANKLARVVYKILAGDQYKELGYMRGDPREQKIKNLLSQLRAMGVEINNHTHQMIYSKRTVKVESSGIVEN

SEQ ID NO: 207690 - protein, 351 aa, unidentified
MRTSQKTGGTITTIGIDLGKNTFHLVGFDQRGVIILQQKVSRSQLERRLANIPRCLIGMEACSGSHHIGRQLAAVGHDVRLIPAQYVKPFLKGHKNDYRDAEAIAEAVQRPTMHFVAIKTLEQMDLLALHRVRSRLVSQRTGVINQIRGFLIERGVIVRQGVVPLRKALPDILSSQTGPLSPRTIGLITDLAQDWRRLDERIVAVSTEIEALAEQDNGCQRLMTVPGIGPIISSAVVAAIGNGAGFKQGRDFGAWLGLVPKQESTGDRTILGKISKRGNKYLRTLFVQAAHVVLVRRPSAAMRGLWPWIEQASKRLHRNMLAIALANKLARIAWAVLARGRAYQPRITAHA

SEQ ID NO: 207691 - protein, 342 aa, unidentified
MKNTTIAVDIAKSVFEIAVSEQQGRVIERQRLSRGAFVGFFAQRQPVTVLLEACGSAHHWARQLQAQGHRVILLPPHAVRPYVQRNKTDRADARALLEAARNTDIHPVPVKSCSQQALTALHRLRSGWLAARTARINTVRGLLREFGVMIPVGSKHVQKHLRAATEDIGSPVPESLRPILALMGEEIHQIEERIDVAERQLQRLSKQMPVVARLQTIPGIGPISSTALVAFVGDVARFPSARHFASYLGLTPREHSSGQRRRLGTISKRGDTYLRMLLIHGARAVLWSARKKTREERLRLWAQNVERLRGHNKAAVALANKMARFVWAVWKKDRDFKEVLAA

SEQ ID NO: 207692 - protein, 348 aa, unidentified
MGIVGGFDVHRAQITFEYLDAEDGQVRRGQIRPATREDLRAWLAPFRGVPDVSFALEATTGWRFMVEELERVGIAAHLAEPADTRALRGPKRRAKTDRADAHHLRTLLQDGRLPESWIPPPHISELRTRVRLRHSLVQQRTAWLQRIQAVLFHHGQPTVRRLLTAEHRAWLDRVELTPAGREALVVALRMVDHIGEELGPLERDLANFARRQQGCRALMAHYGVGPCIAPVVLAELGDPRRFSSSRHAVRYAGLDITVYASDDHRAAGRLSRQGPPILRWALYEAAKVAAREPSPDHRSYLDAKARLGGNRATLVIARRLLRRCYHTLRDLGDLAVAPAEAEPEQDAA

SEQ ID NO: 207693 - protein, 442 aa, unidentified
MDDHAEVVELAVEVEQVGRVAAIDVAKASGMVCTRLPSETKAQRRVQRVWAVAATTDEITALGDHLVCQGVELVVMEATGVFWRPWFYLLEDRGLRVWLVNARDVKNVPSRPKTDKLDAIWLAKLAERGMLRASFVPPEPVRRLRDLTRLRRTLVEERTRYRQRVADVLQDACLKVADPKQGLTDLFGMSGRAILAALVAGQRDPKALAALAMGRAVVKTAYLEKALAGRFTAHHGFLVGKLLDLHDRLENDIAELNARIEAMIAELDRTPPPDDNHPDRLPLLDRLDEIPGVSREIAADILGETGFDMTVFPTGGHLASWAKLTPRTIQSGARNSHGGTGKGNRWIKGPLGQAAQAAGRTKTFLGARYKRIVKHAPAKKAQVAVARNILEIAWVLINDPDARFTDLGPDWHTRRTDETRKTRQHIRELEHLGYTVTLTKAA

SEQ ID NO: 207694 - protein, 400 aa, unidentified
MRVVFGIDVSKVSSEVTILVNGEKVHGYTMSNDAIGFTRLLGDLKTVHKPEIIFEATGVYSRRLQAFLDEHGYAYTRLNPLEAKKQLDSLRVRKTDQIDAEKLAQSQFALNRKPTYVQEEVYQDLRDLSRFYQNLTEDIVRTKNRLHKVLQVTFPELENILSTPTGEQYWNLVIAFPCKDFVLDLSKDELSESIRQSTSKRISDKRVAYLAEKLIALANQSYCAVKKTSPMLEEVRYYGKELLRLSEQRQSVLDEMVELAQPLPEYDILLSIPGIAETTATSIIGELGDIRRFQSANQINPFIGIDLRHYESGNFLAKEHITKRGNPYARKILFKCIHNIASASHTNPCHIADFYEKRKRQSQTTSTKPHTIASIHRLIRTMYYLITHNKLYDYTSTQNR

SEQ ID NO: 207695 - protein, 373 aa, unidentified
MRQVIMIGCDLHDKTMLLKIAEGRQEPETRSVKNTSAGREAMIRDLKKRAATTSGARVIFAYEASGQGFGLYDELIEAGVECHVLAPTKIARSQRQASQKTDEKDAQQLLELLRAHVLAGNALPDVWIPDATTRDDRELVRTRLDVAEKITRVKSQIQSLLKRNHVRRDAASGQGWTRLFRSWLKHTLCELATSPLGSRSQATLLSLLRQLDFLEEEEKRLDVEVHALAGESRYEAAFEEMTDLCGVGLLTAMVFLTELGDLSRFANRRQLAAYLGLAPRSFESGNANDRKGHITRQGSSRVRKMLCQATWSRVRWDPEEKEAYDRIVAKNPKKKKIAVTASMRRLAVRMWHRGREHQGKPSRSMLLAAGAAG

SEQ ID NO: 207696 - protein, 430 aa, unidentified
MTAASSTTATTWVAIDVAKVMHQVLIETPDGRRRAMRVANTAAAIERLVTLLRAAPAPCVIAFEPTGDYHRALMHRLGLAGFMLQQVSSLAVARTRDAMYNSWDKNDPKDAQVIVHLLKTGTTQRFVDPLVSGHHDLQEMANTYQQISLRKVRVQHAIVTHHLPLYFPEAERYLHSSRADWFTNVLRLTPCPAAVRQDTKPDFIAAARAAVRGHKADKTRWLADFYDTAGESVALPVHPDSAAIRMFRVVLEEYQQLCRRRKALEGDIVTRLAGHPDFERLQTVPGIGPILALLILAEAGDLRRFAHVRQFLKYCGFDLCTEQSGQFRGTTHLSKRGNARLRYACWMAGAVAVRMQQNSFRRKFEDYMRSDPLNRDRRRKAYTAVAAKMARVVTRWSRPATIIVASPKRRDQAVGSLRQEPWRRHRRPRR

SEQ ID NO: 207697 - protein, 420 aa, unidentified
MKAPCITNFSVLIGIDWADKKHDVCEIDLKVKSPRYSVIASKPEAIHDWAMSLKQRFPDKPVAVACELKKGPLIYCLEKYDHIVIFPINPSTVARYRKAFTQSGAKDDPSDALIQAEILERHMDKLSCIEPESSDIRALGLLVEGRRNIVQNRVDLSNKITAILKLYYPQVLDWFDEKDSTIFCDFVAKWPSLSRVKKARKQTLLNFFNQHNSRYSETNERRIKAISNAFALTDDAGIIEPNQLMIEILIAQLKLLVEAVGRMDKEIRNRYKQQSDHNIFDSFPGAGPQLAPRLLVAFGTNRTRYSNASEMQKYAGVAPVIEQSGQKSWTHWRYSCPKFLRQTFVEWAGQSVRFSFWAKAYYDQQIAKGKPHNTVIRSLAFKWIRIVFRCWKTKTPYDESKYLSALKAKKSPLLQYAIEG

SEQ ID NO: 207698 - protein, 331 aa, unidentified
MQYNHFIGIDISKDTFDVFLREKSLHRQFKNDQQGFKSLVSWLQKYIGEDLAHCLVCFEHTGYYSLPLAVYLDKIDTPFAMISPLRIKRSLGISRGKNDQVDAKRIAEYAYLYRESIPRTQLPPKEIVKLQSLLSLRDRLARTRAGYIATRKESLQSIAEYEQVDLLASFDKMIAATSAEIKSLEQGIKAIIASNDELKQTFALITRIKGVGLVVASYLIVYTYNFTRFESWRKFACYAGIAPFDYRSGTSIQGRNKVSPLANHQIKKLLHISAMHAAFTDNEMKAYYNRRLDEGKSKMSTLNIIRNKVLARVFAVALRKTEYIELHKYAS

SEQ ID NO: 207699 - protein, 338 aa, unidentified
MKVHVLGIDLAKNVFQLHGVDRKGRSVLIRRVRRDQLLKVIGELEPCLIGIEASTGAFYWQRQFEKLGPAVKIMAPQYVKPFVRRQKNDTNDAEAICTAVQQRNMRFVPKKTLEQQDIQALHRARQRLVNHRTALISQMRGLLLERGIAIAVSATRARRLIPKILAAPSDELTGLMREIVSSLYAFMLQIDDRIRAFDRKIDAIFKASDACQRIGKIRGIGPKTATAMVAAIGDGSDFKNGRHLAAWLGLVPRQHSSGDRRVMMGISKRGSQHLRTLLVHGARAVVRTAVRKTDSRSMWVNELRQRRGYNRATVAVANKNARVIWAVLTSGEPYRAAA

SEQ ID NO: 207700 - protein, 373 aa, unidentified
MNYNTTYVGMDVHKASIAVAIAEEGHGEPVTLGMIPNNRDSLLKLLKKLQKPGRQLRFCYESGPCGYEIYRYLTARGISCVVAATSLIPTKAGDKVKTDKRDAKKLARLFRSGELTPVWVPDEAQEALRDLVRSREDSVRDLQRKRHQLGKFLLRLGIHPPQGVRNWSAKHLKWLEALKIELSAHQVVLNDYRNAMFQAADRVKHLEREIALHVQGSVYEPVINALKALKGIDLITAVALVAEIGEFGRFKNPDQLMAYAGLVPSEYSSGTRSRRGSITKTGNHHIRWMVVESAWHYRHTPKVSYKLKKRQQGQADIIKQISWRAQNRLNLKYRKLVGKGKQKQVAIVAVARELLGFIWSVAIEAEKEMKKVA

SEQ ID NO: 207701 - protein, 415 aa, unidentified
MDVVYPRCCGIDVHKKMVVACLITPEKKDGDTKTFSTMTDELIEMKEWLLANGCTHVAMESTASYWKPVYNLLELSNIEVMVVNAQHIKTVPGRKTDVKDAEWIASLLKHGLLRGSFIPSREMRELREIIRYRHSLIEERSRELNRIQKVLEGANIKLSSVVSDIQGKTAMVILKALAAGEEDPEVLSEFRHGRMKCTKDDLMRALNGIVGNHQRLMIATQLRHIEYLNEEIENLDQDIDSRMRPFDKILELLDTIPGVGKQIAQQIVSEIGVDMGQFPSAAHLCSWAGLVPGNNESAGKRKSGKTRKGNKKLRSALVEAANAAARKKDNYLASQYHRILARRGKKRAAVAVAHSILTIAYHIILKEQPYIELGPNYYEARKRERIAKQSVKKLEALGYKVIVEDTAAIVEDTVA

SEQ ID NO: 207702 - protein, 402 aa, unidentified
MAYDFVIGMDVGKYFHHACVLDPQGRQVLSKRINQHEGSLRKLFGKFLADGAEVLVVVDQPNNIGRLTVAVAQAMGADVRYLPGLAMRQLSRIHLGNSKTDVRDAYVIAHAGLNLPDALRSVDRVEEVFLQLKVLNGIDEDLARAYTRLINQMRSALVGTYPAFENVLRGQMIHRKWILHLLAKYGGPTKIRRVGKARLAAFARRHKARNPEPVIDAMLAAIHGQTVSIAGAEYAELGVAMSAKDALAKLEHRKEIEAQVLELIQDIPQTEIFLSMPGIGPRSAAQILMTVGDMSDFPDAAHLASYAGLSPRTNQSGTSIMSNSPNRAGNKKLKNALWQSSFASIRFHERSRQFYERKRNEGKRHNAAVVALARRRLNVLFAMMRSGELYRDIPTAQKAAAV

SEQ ID NO: 207703 - protein, 430 aa, unidentified
MAAVSIPIVDWLDKPQSFHFAQGYEDRFLWNTVVANDTRSDAYMIYLGIDVAKNSHVAAAMSSEGEVLLMPFSFANSADGFTLLREKLNNLPKLPLLVGLESTAHYGENLICFLCGNGYHVAMINPLQTAAIRKSAIRKTKTDKVDAFVIAKALMMEGYTELQQSDIQILKLKGLCKTRQNLILMRTRCKIQLGSFVDQLFPELNRFFRSGLHINVSYTLLKAHPRPAEVGALHLTYLSNLLRKASRGKYKKEDAIRLRELARNSIGTDNPALALQIRQAVSQIELFSAQLRQVESEISTIMDSLDSPIMTVPGIGYLNGAMILSCIGNIQRFSSPAKLLAYAGLDPAVVQSGNFSAKSTRMSKRGNSMLRYALINASHNVVRNNETFAQYYNSKIAQGKSHYCALGHTAHKLIRVIFALLTNNIAFDLA

SEQ ID NO: 207704 - protein, 395 aa, unidentified
MFYVGIDIAKIAHEVGILDDDGKEIGKGLSFTNTEKGFGKLLDALGKVGIDAGNCIIGMEATGHYWLALYSHLTELGYKVFVVNPIQTDAFRNVATIRTAKTDSIDAFIIAGLMRFGVFSVTHMADESLIALKQLTRHRRGLVKQRTAVKNQITAIIDMVFPEYPGLFSDIFGAASKKLLSTCPTPAEIARKRTSSIGRMLHDASKGKLGQVEAEQVKETAKTSFGIGFATDALSFEIKQKIELVDFLDRQVEALERQIAKALKETGTYLESIPGIGTVFASTIVSEIGDVNRFSEPSQIIAFAGMDVPANQSGGFTGTKGHMSKRGSPPLRWALIEAADRVRIWDPYFRDYYDRMIARGKHHYVAQAAVARKLVNVIFVILKENRPYEPEPPKR

SEQ ID NO: 207705 - protein, 523 aa, unidentified
MASKRSSNKSRCRAAAFLQKPRGVIHPRVQKVGPEHFAVVCVDCAKARSKWMLTDFYGRVLVPPSEVAHNRVELAGAVAQVRAALTQHDLRDCLVAIERTGRYHHPVKNTFAQAGFETRLVHPYTTKQYRQPANPDNKTDDTDLAAMQRAAVNGFALQEAAPVESWVQLQLCIRQRRDLVGKCSALACQIRHHLDAALPGYAACFDKLWDSNVAFRLVRQFGSAQAMAEQGVTALCHYLNQEKVRFQERTLQTVVVWAKNAAAADIAGDLHRRIALAYEDDRQRKTQEILALERDIAHRLAQTPYVLLMSFPGVNVVTAADFAGEMGPIEHYANPRAITGRAGLFPSRYQSDRVDRADGPLVRRANRALRAVILGIADNLMLCNRHFRMLAGAWKAAGKDPRKSHVKVGMRFCRIAYHMVAGRQVFRHPSLRERGYILDKLLAFHLEHRTPYEQALRDLHLATNQIPVKEHAAEARPLVDRLRTTRAASKQGPQPLNEILAIVLARLGVGMIPSKPSEERDLT

SEQ ID NO: 207706 - protein, 315 aa, unidentified
MTVLGIDVGKEYIDCELLGDKRATKKVTNSVRGFEQVVAWLRNRKIAKVHVCMEATGGWSEELAFFLHEHGHTVSIVNPMQIRAFGQSELSRTKTDKADAGLIARFCATMHPPAWDPPKPAERRLKQLVRRRRALVEMRMQEENRLESPAMDNVRDSILGLINVLEEQIKEINAQIKATIDEDDDLKGKRDLIESIDGIGPITSATILGETPRIENFQTSKALAAFAGLCPHVRQSGMSIRSSRTTKIGNRAIRKALYMAALSALRSNAVIKAFADRLLERGKHRMEVIVATMRKLLVLVFGVLKTRRPFDPQRA

SEQ ID NO: 207707 - protein, 323 aa, unidentified
MITDQEDQQLFQRRLPNQLPVVLESLEPYRPRLKVVVVESTYNWYWLVDGLLDRKYPVVLANPGAIDQYDGIKEADDLTDAAFLARLARLGILPTGYIYPKEDRPVRDLLRRRSLVVRQRTSMILSLQNMALRQTGQNFGWRALRRLSDQERAEVLGDHDCLAFVTTEQLDLIELLSEKIKRFEAKVLEHAQLRPAYECLLTLPGVGVILALTIMLETGDIGRFATVGDYTSYRRCVRATHTSNGKSKGKNNGKNGNAYLAWAFVEAVHHALRTCPPARSFYDTKVAKRNGALATKALAAKWSKAAYYMIKRQEPFDLARVFG

SEQ ID NO: 207708 - protein, 349 aa, unidentified
MRFYTQAHRFYCGIDLHARTLTLCILDAQGAVVLHDTIAASPTAVLDAVAPFRDGLAIACECMFAWYWLADLCHEEGIPFVLGHALYMKAIHGGKAKNDDIDADKIARLFRGGNLPVAYAYPKALRATRDLLRRRTFFVRQRAELLAHLVNTNSQYNLPPLAKKLSYAANRQELDLPARFTDPSVRRAVEADLALVDAYDQQVRALELQLTRAAKVDDPQAYQRLLSIPGVGKVLALVLLYEIHDIRRFPSAGDFLSYCRLVRCAHESAGKKKGSGNNKIGNAHLKWAFSEATCLFLRDSEPARKWLARREKKRGKARALGAFAARLGRAVYHMLRKHEAFDVTRFFAS

SEQ ID NO: 207709 - protein, 341 aa, unidentified
MKNSTTISIDLAKTVFQVALFNKYGALKSNSKMSQAKMVQLIAQHPEATICMEACGTAHYWGRRFQQLGHKVLLVPAHIAAKYRTGNKNDANDALAIYESIKRPKTYFVQVKNLDQQDLASLLKLRQCYVKQRTQTVNRIRGLGLEYGVKIPQGIAKIRKHLPCFLENAENELTTSSRFILRNLLDQLLLLDSQVEGATNRLVARAKEVPVCTRLIALPGVAWIIASALYARLGDGSAYQCGRDASASVGVVPAHSGTGGNNKLLGITKRGDRCLRSLLVHGARAVVSSIKDKQDGLSCWIREQLSKNHLNKTAVAYANKLVRMAWAILKSGEDYRTPLAQ

SEQ ID NO: 207710 - protein, 407 aa, unidentified
MSETKSSPTRFIGLDVHKHYLIAIAVNPAGEQIGGPWRVQLSDLDSWATRHLTRQDAVALEMSTNTWTVYDELRPLVQSLLIVHPPHVALIVRAQVKTDQRAALALAQLYAKGLLPAVWVPPQPVREQRATLAQRTKFTRLSTQAKNRLHAALHRHHLPLPAEGSPFAPAHRAWWLALPVSASERARLQSDLETLAFAERQTAALTSALTADAAQDERLPLLVQLPGFGVINSLTVLAAIGDIQRFETAKHLVGYAGLGARVHDSGQLHRTGRITKSGRRDLRAALVEAAQTAANTHPHWQAELARLEPRLGRNKAIVAIARKLLVSVWHVLTEGAADRFADADRVARKLMNYTYKAGRTNRRVGQSTAEYVREQLDRLSLGAELEHVKWGQREIPLPPSQLKATEA

SEQ ID NO: 207711 - protein, 339 aa, unidentified
MKHYGGIDVSLELSSVCVMDGEGKIVGEARVASEPLALMEWFGSLGFSVERIGLEAGPLSQWLYAAMKDGGFAVELLETRHVRAAFNTMPVKTDRGDARGIAHLVRLGWFRPVYCKTLCAQEVRAELTARKLVQSKLHDVQMSLRGILRGFGFKVGATTTAKFEIRITELVGGHPTLKAIAQSLLSVHAALARELRAFQRRILVMAREDARVRLLMSTPGVGPIVALTYVSAIDDPSRFSSSKMVGPHFGLTPKRYQSGERDVSGRISKIGDKQVRTALYEAANVILTRPVKASALKSWAMKIAKRAGMKKAKVALARKLAVVLHRMWVDGKPFRAQPA

SEQ ID NO: 207712 - protein, 358 aa, unidentified
MSYSVGLDVSLDETAICIVDDAGDIVKEGKAETEPEAIVTWLKSAAVPIERLGLEAGPLSPWLYEGLRAAGMPAICIETRRMKGATAVMAVKTDRNDARAIAVKTDRNDARAIAQAMRVGWYTAVHVKTAASQELRLLLTNRKTLQTSRVRLENETRGTLKAFGLKVGRVSAGAFEARVIELTVDRPRLQAMVRPMLAARQALRVQFDALHVMVLKAVKAHAACHRLLAVPGVGAVTALTFATSIDNPARFARSRDVGAHLGLTPRKYASGEIDRNGAITKSGDRLAREALFVAAHTLLTRVTRWSALKAWGTAIAKRRGLRRATVAVARKLAIILHRIWTDGSEFRWRREEAATVAV

SEQ ID NO: 207713 - protein, 324 aa, unidentified
MVGIDVSKATLAVTWVNGQTHQVEWEASVPNTVDGVRQLLSATPAGLPWVLEPTGRYSLAVARQAQAAQRTVLLAQPKAAKAFLSALRPRAKTDRLDSRGLALYASATPLPPYPFKSALMDELQQLLTARKGFSGALSRLHQQAGELPAAAASLRPALTALRAQRAALDRHLAARMTQSPAWALTQELRRIPGIGPVTAATVALCVQSKAFPHPDAFVAYCGLDVRVRDSGQRRGHRTLTKQGDAELRRLLYLSAQASLRATQSPFKAQYERERAKGLSTTAALCAVARKLARLCWSLARHGTSYDPHRGYRQPTHEKALDTQP

SEQ ID NO: 207714 - protein, 331 aa, unidentified
MFPVGIDVSKNTLDLCMLYDGIKGRIKTRNIQNNRHSVENILHWLRLQHCSPEDVHVVMEATGVYHEQLATELHDAGFRVSLANPHRSREFARGMGIMTKTDKVDAYMLACYAFLKKPHRWEPPAPEIRYLGALLRRRDVLLGDALREENRLEKYLSTDTPADIISSCRRMAQLLREEVSNIERQIKAHIKASPALRRDYTLLTSIKSVGPQLGMHMLIVLRSHNFVSAEQAAAFLGVVPIEKRSGTSVRRRPRMSKIGPPQLRAKLYMSALCGKIYNKRMRNIYDEMCLRGKPKMVAIGALMRKLVHWCYGVLKTGTVFNDEDLKPVLST

SEQ ID NO: 207715 - protein, 317 aa, unidentified
MQTYIGVDISKNDFLACFNEIDKPIKFANSNLGLTKFFNHLKINGYAKEETIIGVESTGAYSLPLAIIGARKKYIVKIINPIVTKSYLGSSIRKVKTDKADARVIRACLIGGAGAEFKDTAEETVFKNLIRQRYFLVKLKTELTLKQQDITLKEECLKMPISNINSELKDIIEKKIIYLEQQLSACLPEQQTLLQSIPGVGKITAMTFATEIGDITKFSSPKKLVGFVGIDSKIRQSGTSLNIRGHISKRGNRIIRKTLYVAALTAIQRPSLFRDFYQKKLSEGKAKNVCIVAVMRKMIHVIYAVLKRQSPFAEKEA

SEQ ID NO: 207716 - protein, 383 aa, unidentified
MTTAIDMRDVCCVALELSKTSWVCAFAVPGESKVAIHKIKAGDTDRLMAVLTGSKARAEQQLGRPLQIVLCYEVGYDGFWLARYLIARAIHTIVFDPASFLMPRRSRVAKTDRLDAEGMTRILRRWLSGDREMARPVQIPSVDQEDAKRIERERKYLVEERISIIGRIKGLLALHGVWLDKKNIGKGLRQRLDAMKTGDGRPLAPFLRSEIERMLTRHDLISRQIADVEADRKAALNNEKGVFPHADKVRRLTTLGAVGETTATVLVAEIYHRTFLTRRQVASFVGLAPSPYKSGEVDRDRGINKAGSKLARHMLVELAWFWLRYQSNSQLSQWWHSRFGNQGMRGRKVGIVALARKLAIALWRFVEDGIVPEGATLKVRHAS

SEQ ID NO: 207717 - protein, 363 aa, unidentified
MNYVGVDVHKRYSVLCALDGWGRKLREARVEGNAPSGFGQFFACLDGPSKAVVEACWNWGLIHDELEELEQVEEVVLAHPHKTRLIADAQIKTDRLDAHALGTLLRGNLVARAHVPSRQTRARKNLLRQRLYWARLRTMLRNRMHALLDRQRRLELPQCSDIFGVRGLSFLRALQLAQPDATLLREQLALHDLIAQQMKAQEKRIALDFAQEAMHRRLKSVPGIGVTLAAVIACEIDNIARFSNAEKLCAYAGVVPTTRSSGGKTMHGSLLYFCNKWLRWALVEASWVAIGCSPYFGTLYKQHRARGKKSNTAILIVARRMCRIIWQLLHEKRDFEKRPLSPKLNSFPGCSVVRLTAVKATSP

SEQ ID NO: 207718 - protein, 308 aa, unidentified
MTIHPCFIGCDIAKHHLDLFDESRGEGFRIDNTQAAIAAWLSSLDIGCAFVAFEATGPYDRRLQHALEQAGCRFARINPGRARDFARATGRLAKTDAIDARMLAAMARMLALAPDAASDPTRNTLVSLHKRRDQLVEMRAAERVRVKESDDPTGSLARLLAWLDEEISALELTIAQALRANAELAAMQALLRSAPGVGPVTATTLIALMPELGQCSPKAIAALAGLAPFNNDSGRQRGKRAIKGGRSRVRRALYMAALAAIRTSHRFKTFYQAVKARSAATKVAIIAVARKLLTVLNAMAKTKTAFQP

SEQ ID NO: 207719 - protein, 316 aa, unidentified
MVPSPLFVGIDVAKATLDIVVRPTAETWSASNNATGIDALVLRLGALAPTLIVLEATGGYQGPLVAALVAAALPVVVVNPRHIRAFAQAVGILAKTDRIDARVIAHFAEAVKPAPRPLPDAETQELRALLVRRRQLVEMVSAERARLDTAPASIQDAIQAHIAWLTTQIAGLDDALTRASQTHPVWQAKDDVLQSIPGVGPVLARTMLGQVPELGTLGPKPLAALIGVAPFNRDSGTLRGRRPVYGGRAEVRAVLYMGALVATRHNPVIKTFYERLLAAGKAKKVALTACMHKLLTIMNAMVRDLKPWQPQEVPSA

SEQ ID NO: 207720 - protein, 480 aa, unidentified
MNVKTRRTKKQVNVENQAINLLSKEELNKKIEVVEKELRSYTWRELETNGKFAKNDKLSFITDDMLIAGCDIGSETHYIRAIDVRGRELSSGAFEFSNTSEGFANAKAWVLALAAKHDKKQIVLGLEPTGHYWFALAAWMISNGISVVQVNPYAVKQSKEIEDNSQLKDDRKDPKLIANLVKDGNYGMPYLPEKVYADMRRLSMFRDQLTEDRIRNINRLHRELKIYFPEYMDAFGKIDGAFTLEVLKISAIPSDITALGAEDIKNIWHNAKLRGRGYNRANEIVSYAEKSVGLTDGTDAGREAVKWYAEQILRLDEQLAEIESALHEKCREIPYAENILAINGVGENILAGILAEMGDISRFDDVKEIQKLSGMGLVACSSGKHKGQTKISHRGRKRLRYWLFQAAKSAVSHADEFKQLHEYYTTRSNNPLKKMQSLVVIACKILRVIYTILKTGTTYNPQKLLKDIKHPAASQAPMAA

SEQ ID NO: 207721 - protein, 344 aa, unidentified
MEITTIGLDLAKSVFQVHGVDATGQVVVRRSLRRAQMLPFFARLPSCLVGMEACGTSHYWARELIKLGHQVRLMPPAYVKPYVKRGKTDAADAEAICEAVTRPTMRFVAVKSPEQQAALSMHRTRDLLVKQRTQLVNMIRGLLAEFGIDIPKGLERALLMARRIVDGEAPDVPMEAARIVSTLSQQALDIHIRLREIDRDLLVWQRGNDVARRLMTIPGIGPIGATALAASITDPRQFRSGRQFAAWLGLTPLQKSSGGKERLGRITKMGDKYLRKLLIVGMTSLVRRAKYNPKTVDPRLADLLARKPVRVATVAMANKTARIVWAVMARGETYRAGHRPALAA

SEQ ID NO: 207722 - protein, 392 aa, unidentified
MIYVGIDVAKDKHDCCIVDSDGVIINDCLRICNSSEGFELLYTSILSALSGQNISNVKIGLESAGHYSTNLQNYLYAKGFRLYILNPLATNLFRKAQTLRKTKTDKTDALVIAKMLFSDDAKSYSPVSYQIQELKSLTRHRYRMIGYRSKLKISITRLIDIIFPELPKHVWSIHQNSSYCLLTELSSPKDIASCHLTKLTNILNKSSQGRYGKAKAIEIKEAASFSIGMSVSSLSFELKQTIRLIQSVQTEIDALDGQIKKVVIETNTPLMTIPGISYTLAAIILSEIGDIDRFTTPAKLLAFAGLEPSTYQSGKYNASHTPMVKRGSAYLRWAMLTASRTVTMRDETFALYLSKKRDEGKHYYVAMSHVAKKLTRTIFYLLKTNTAFVPQM

SEQ ID NO: 207723 - protein, 552 aa, unidentified
MFRQQCPQLAALFASAGRLENVALVAIDYAKRDHRALICNGGGDIIAAAFSVRNDAAGVAFLRDAVSACIKRHGIAPQHVCFGGEDEPAWVVNFLSTLHATGALVLRVNARDAKDQRANNVASTDDLDLLGIAKCLISRKARLISAATMHEDEAARRTHSLRDLMRQRRRLVFTQTAAQNQTHALVDRLCPGFLDDAKSGITAFGAASLELMSERFSAQEISRRRVESIAAVLQRNGMGAEDALVKAGQIQAIAKTALPPALAQVPALQRSLHSSVELVRSLRAVIDDLEAAMADELSYLPAALFTTLSGIGVVFAAALAAELGPRLHEQSFGSQCAYAGIVPRTAQSGGSESAAVQGAPTRRCNRILKDYLVQAASKQQMWGPPEFKNAFKQLKADGQHAEFIIARRLLRTLRVIHRTQAIYLPPELRTIVNASIAGHERSATQTEALRTHYQAVFEKLCTKWTKGPDWQRFLGEDRVLGVSLRAADSLLDLGLKWPQSKAIKAKAKKTAAKKTPKRAEPSKAARTRAKSLSAPLSPTPGTKSATARAGPT

SEQ ID NO: 207724 - protein, 339 aa, unidentified
MNCVGIDVSKGKSMIAVMRPFGEVVVSPFEVLHTDSELSKLAGLLKSLDGETRVVMESTGNYHAPVAWLLHDAGLYVSVVNAMLVHDYGNNSLRRGKTDKKDAVKLANYGLDHWLILPRYVPEEDTRLMLKTCYRQYQQYSKVQTMLKNNLISLLDTAFPDANRLFTSPPRADGSEKWVDFVATFWHCECVCGLSEKAFTAKYQKWCKKHGYNFSKDKALDIYASSCGHFGVMPKTDTAKLLVEQAVSQLRATSAALAALKQEMQSLAASLPEYPVVMEMFGVGPTLGPQLMAEIGDVRRFHSKKALVAFAGIDAPPYQSGQMDVRSRSISYQSPYPYG

SEQ ID NO: 207725 - protein, 339 aa, unidentified
MQISVIGLDIAKQVFQVHAADAAGRPVAQIKLRRAQVLDYFRALPPCLVGLEACATAHYWARELSALGHSVRLMPPAYVKPYVRRNKTDAADAQAIAEALTRPTMRFVPVKSADQQAMLMLHRARQLLVRQRTMLATALRAHLAEFGIIAPQGIHRVEKLAAQLHDPSVPPLARDALNLLVEQLASTWKQIDAIEMQLVAIHRTQAVSRRLASIPGVGPITAMAIASTVPDPAMFRSGREFAAWLGLTPKSHSSGGKDRLGRISKRGDRYIRHLLYVGAGNVIRFAKARAAAGENWIRGLQQRRPPKVVIIALANKMARIAWALMVREQPFRSPAQAAL

SEQ ID NO: 207726 - protein, 425 aa, unidentified
MKNNFLSTLFVGIDVSSKTNVLCALDFQGNKLLNLKALNNQPGAKVILDNILDCLNSNSLKYVVIALESTSFYSTHIANYLSSNDELLFFKPFVYCLNPKTVANYRKSFVDMDKTDPLDAYIIADFARCGRITCKPWRGAQFLALQRLTRHRLHLIECITREKAYMVSNIYLKFSELTVLDKDDKPFSNTYGVTSAAILTESLSLDDIAYSSIDDLVDFIREKGKNRFSDPYKTVKLLQKAARDSYRLDKVLYEPLSVAIASSFNVIKAMEDEIKTVDKAIEKTIKGLNTTEYLSLTSIPGIGPVFASGVLAEIGTITSFDSHDALAKYAGLTWRSKQSGNYSSDDTRMTKTGNKYLRYYLIEAANSVKNRVPEYKEFYYKKYGEVTTHQHKRALALTARKLVRLIFGLLTKSQIYSSDKVGEIK

SEQ ID NO: 207727 - protein, 342 aa, unidentified
MDYFVGLDVGVEDTALCVVDVDGTVLLQTEVPTDPQVIANSLKPYRRTLRRAGHEAGALSPWLQSELLALGLPVICVEARHARAAMSAQRNKTDAADALGLAHIMRTGWFKRAHMKAEGTYRLRLLLTHRRNLKRKFLDIENAIRHSLKAFGIRIKGTGRAGFDKRIRELTDDEPFTRDLIGTMLDARAGLWEQFKKLDTQVVKITRETELTRRFMEIPGVGPVTALSFMAGVDDPARFKRSRDVGAYFGLTTKCWQSGSSIDIKGRISKAGDSDVRRALYTAASAMLSRYKGRLALKNWGLSIEKRRGHKKALVAVARKLAVIMHAMWRDGTFFDDPLMVT

SEQ ID NO: 207728 - protein, 319 aa, unidentified
METAQVSFKQVVSRGCGLDVHKKVVVATIDGEGIKKQTREFDTVTSSLKELRDWLLESGITHVAMESTGVFWKPVYNVLEPAGLTVWIVNAAHVKYVPGHKTDKKDSAWLCKLLLAGLLKPSYIPAKEQRELRDLTPYRTKLVQSNASNKNRIIRILEDANIKLSSVLSSTSGVVGTKLIDKICDGQAITMQDIDEVYHKKLEASKEEIYEACQGFVTAHHVYMLGIIRQEMDNTQQTIESLDQRIKEVLLPYDNALELLKKVPGISFKSAEDLVAEIGLDMNVFPTEKHLASWAGMSPGNNESAGKKKADGQPRGINK

SEQ ID NO: 207729 - protein, 345 aa, unidentified
MTHFVGLDVSVEETAVCVVDEVGKVICERKVPTEPDDLVELLTTVGGGYVRVGIEAGPLSQWLVNGLTEANLPVICVETRHMKALLKAQQINKSDRNDARGIAQMMRVGLFKPVHVKTLAAQEQRMLLTSRKLLQRKLLDIECDMRGTLRNFGLKVGVVSARNYEARIRELVESFPRLAAIVDPLLTVRQVMRQQLAILHKMLLNMVRADPVCRRFMTVPGVGPVVALTYRASVDQPHRFVHSRDVGAHAGLTPKRYQSGEIDYDGGISKCGDAMLRTMLYEAAQSMLTHSRKWSWLKAWAMRVAQRRGMRRATVALARRIAVILHRMWIDGTDFRFTNSAAKAA

SEQ ID NO: 207730 - protein, 395 aa, unidentified
MFIVGIDIAKRSHEAVIIAEDGQVVRKAFSFRNNCTGYNLLLEQVRRLTLVKSQIVFAMESTVHYWLALYARLLKDGYAVMVLNPIQSHSLRELYIRKAKTDARDSLIIADLVRFGRCKASNVPQDKILALRELCRSRAYLVDMAADLKRKLIALLDRIFPEYESLFDSVFSKASIAVLSKYSTPQKVKNANLRKLTDLLMESSNGHFGEWKAHQLKEAACSSFGIDDSGGVYSTLLGMFLEQILSLTAQADSLEKQISIFFQEFNNPLTSIPGVGTVLAATILSEIGDITRFSSADKLLAYAGLDPSVKQSGEFKSNQNRMSKRGSPYLRRAIWLASTVAVHRDPMFQTYYEKKISEGLHYMNVIGHVSRKMTAVIFAVLRDGQPYQPILQSAG

SEQ ID NO: 207731 - protein, 459 aa, unidentified
MGRVRKGRIPAQLVEDEDYQLRYERVAGIDIAKAKADVCTRLPPARGGGRRASRVEEVPAAAREVVALAGRLLADGVEMVVMESTSDYWRIWFYLLEAAGLRVQLVNSRHARQLAGRPKTDRLDAQWIARLAEMGLLRPSFVPPPEIRALRDLTRTRLQLVRDRTREWQRLEKLLEGALVKLSSVVHSLARTKTARDILEAIAAGGSDPKALAALAAAHVRGGRGAVEEALEGMQARDHHRMLIRVHLDHIALLDRSVAAVEDEIEAALDAIPAAWGADATGETGPDAGRGPDAAALPAAERLAEIPGVSLALARAIIAETGLDMSIFPAAAHLASWAGLAPVASQSGPRTRKPGKGHGDAYLKGCCTQAATGAANTDTFLGERIRRLSRRLGGNKAKCAVARSILLIVWHLLSDPGARFADLGSGWHNTSADRDRKIRAHVRQLQALGLNVELSDAAA

SEQ ID NO: 207732 - protein, 342 aa, unidentified
MQTNIGLDIHKKFIYAVVLDSSGDLLLEKKVRNDPYELDRFLKGIDKDSKIALESCSCWEYVYDYLADKGFTNLVLANPSRVRLIATSRKKTDAHDARVLADLLRTNMLPTSYAPSTVIREQRQITRHRASLGRLKGIVKNKIHAILIRNGINQEFSDVFGQEGTRYLMSLDLSVVDRYQMDQYLELIRHYDIQIRKTEARIEEYVEYTPQVKLLMSIPGVSFYSGLSITGEIGDIRRFSSARKLTCFAGLNPSVSQSGDRCYTGHIAKQGDSHLRWMLNQCANIAIMHDSTLAKIYQRIKKRRGHNIAITAVARKMLCFIYTILTHNIKYQALQIHKAKAS

SEQ ID NO: 207733 - protein, 347 aa, unidentified
MRFYTKQHKFYCGIDLHAKKMYVCVLNSAGEIVLHRNINTERETFLAVIEPFRENVVVAVECMFTWYWIADLCAKEALPFVLGHALYMKAIHGGKAKNDKIDSHKIAVLLKGGMIPMAYTYPAKMRASRDLLRRRNHLMRKRAELYAHIQNTRSQYNLADSFGRIAKPQNREGVAERFEDPAVQNMIATDFAVITAYDPIIAKMERDIISMANHHDPVAYALLKSIPGIGRILGLVILYEIENIKRFPTVQDFVSYSRLVKSAKESNGKKYGSSGKKIGNAHLKWAFSEAAVLFLKGNEPAKRYLDRLTNKHGKGKALSILAHKLGRAAYFMLKNKKPFDQNTFLGL

SEQ ID NO: 207734 - protein, 342 aa, unidentified
MYYIGLDVHKKTISYCVKDASGQIYREGKIGASRLELDAWIRTLPQPRVVAMEATIFTGWIYDYLLPHAEQVKVAHPLMLRAIAAAKKKNDRIDAGKIADCLRCDFLPECHMASTQIRDRRRTLRYRHLLVRQMVQMKNRISGLLMETGVSHNKQRLHKVGYFRELLSTNEEINDSLRPLLRVSRDSIVRLQKTEYALVSSLQRDPFLADRIKRLRTVPGVGPITALTWALEMGDVSRFRSIRQAISYCGLCSDEKSSAEKIVRTPLSKQRNKHIQRVLIEAAKLAPKQDHDLALVYERERQKGNSNRATLAVARKMVAYLLAVDRAQRDFVPAVDYRLAVG

SEQ ID NO: 207735 - protein, 361 aa, unidentified
MEKITRVGVDLAKRVYQVHAVDNAELTVLARPMSPQRFLSWVATLPAGTVVAMESCSGAHCLARRLRLMGLDARLIAAHFIAPFRVQGASGKNDANDAAAICEAASRVRTRCVPVKTPEQQGWQGIHRLREGYKEERTACINRIRGLLAEFGQVFPQSPDALRRVLSEVLEDASNELPGMMRLALQRAQAHWRVLDDEIVWCDQQVKQHVRGDQAAARAAQLHGVGDLTASALVAAVGDMRQFKSARQFSAWVGLVPSQNSSGGKNRLGRITKRGDDYLRTLLIQGAKSALLAAPKRSDRISQWLLQLRDRVGWQKALVALANKNARILWAVLTREIDFDPEHVPAVPQCKLPALKEPQPA

SEQ ID NO: 207736 - protein, 503 aa, unidentified
MKTKRCKAKNQAADKSQAAKKEVAEELAILRPDAGGVDCGAEEHYASVPPDRVPAGQAAVRCFSAFTEGLDALVDWFKECRISTVAMESTGVYWIPLYQKLEAAGIEVYLVNARHVRCVPGRKSDVQDPQWLRQLHRFGLLNASFRPEDLVCRIRSLHRDKENRVGSAAAEIQHMQQALQQMNLHLHHVVSDITGQTGLRILDAILAGQRKPEELVKLRDKRCSKSTPKEMQAALVGDYRPEHLWVLKRSLQAYRFYQSQIEECDRQIEPLLQELAQRVEAASAQLQLPNPEPKAGEPGQELAEKQQQHNATEPNTNALRTKKKRKAKANEPKIELAGLLERICGVDLTRVVGLNVASVLLIVSEIGVDMSKWRSAKAFSSWLGLCPANKISGGKVLDSRTRKVVNRVATALRLAAQSAGRTDTCLGIFYRRKKAQLGAPKATTATARKLACLLYHVLKNKEPYQDPDPVLYQHRLQIFAFTKLQRQAAALGYTLLPTAPAPV

SEQ ID NO: 207737 - protein, 338 aa, unidentified
MTIVMGLDQHRAQITAEWIDTSTGELSHKRIAPADRAGVRAFAGRFCGRELEVALEATTGWRFVVEELHAIGAQVHLAEPAETAARRGTKKRAKSDRADARHLRELVMVGRLPESWIPPEHLLDLRARVRLRHTLVDQRREWQQRMQAVLYHHGVPPRSWLLGAESRTWLAGLELPPAAREQISVGLALIDAHDAQLVPLDQELREYAKRQPGCRALMRHYGIGPLTSITILAELGDARRFSSSREAVRYAGLDITVHQSDARRAPGHLARQGPSALRWALFEAAQCARRPASPDHEYYLGAAARLGGNRACLAVARKLLKRSYHTLRELGEEALAPA

SEQ ID NO: 207738 - protein, 345 aa, unidentified
MQESFYVGLDLGSSHCYQTIINSDGALALARSIPTSEHHLRAAFTNLQGKVRVHLEAGELSNWVASIIQPLVSEVVVSHPRSLAWIGKDSQKDDKVDAKKLAELLRIGRVHQVFYQSDNSRQTFKYLVTHYEQLSREQARFKSKIKARLRTLGIIRKDSRLFSMNGQTALLDEINSVSIKQMLTQSFAVLDQMLASFDNAKRAMIEFSKQFQEVKLLQTAPGVGIITACRFVAYLQTPRRFSNKRKLWRYCRLGITRRESNGKRLAHPRLDSAGVGSLKDVSRKVFEAARRTKSDNSFKQFYEQSLLNTKNAVHARLSTQRKILATLRAMWISNQAFHNDLTEIG

SEQ ID NO: 207739 - protein, 342 aa, unidentified
MEHYAGIDVSLECSSVCVVDANGKIVREAKVASEPQALIAWVGSLGFGLERIGLEAGPLSQWLFAGMKGASLAVELLETRHVRKAFEAMPVKSDRNDARGIAQLMRLGWFRPVHCKSMSAQETRSLLTARKLVQSKLHDVENSLRGILRGFGLKVGKTTGQKFAGRIEELVAGHPHLQTIAKALLAVRAVLRAEFAAFEKQTRRMVRSDMQARLLTSVPAVGPIVALTYASAIDDPARFKSSKQAGAHFGLTPKKHQSGETNYTGRISKIGDASVRTALYEAANVMLTKPVKGGSQLKSWAMRIKRRAGTNKAKVALARRLAVIMHRMLADGTPFNAAAAAA

SEQ ID NO: 207740 - protein, 350 aa, unidentified
MEIYTIGIDLGKTVFHMVGLNVRGEAVVRKKFSRTQLLRFTAKLRVELIGMEACGGAHFLGHALREQGHEVRLIPAQYVKPYVKTNKSDYIDAEAIAEAVGRPTMRFVPIKTDDQLDLQSLHRVRERWVMRRTAVINQIRGLLFERGITLRKGRCHLETALPDILEDADSKLSSAVRLLLVQLKMELAQLAMRLEEADALIQKTAQESEVCRRLDAIPGIGPVTATALLAAIGNGGAFRKGREFAAWVGLVPREHSTGGKQKLLGISKRGNGYLRRLFVQGARAVLQFREKQSPGLRAWLAQLTSRTHYNVAGVALANKLARIAWAVLAKGEVYRPPLLVSSASADLACR

SEQ ID NO: 207741 - protein, 338 aa, unidentified
MPLYGGIDLHANNSVVVLLNEQDQVIYQRRLANHLPTILEPLALYQADITGVVVESTYNWYWLVDGLMEAGYRVHLANPAAMQQYSGLKYTNDPSDARWLAHVLRLGILPEGYIYPKAERAVRDLLRKRAHLVRQHTAQVLSVQNLMVRNTGVRFGAKRIDEFTPSELARMLLNAEQVLAVTSSLAVVHCLGQQIKTLEKAVQKRLKHTPAYAQLQTVDGIGPILAQTIVLETGDMGRFPTVGNYASYCRCVGSTKISNGKRKGQGNVKNGNPYLEWAYMEAAQFAIRFSPTVQRFYQRKQVKSHVMVARKAVAHKLARACYYIMRDLVSFDVHKAFG

SEQ ID NO: 207742 - protein, 347 aa, unidentified
MKNTIAGVDLAKDVIQVCICKNNKVHSNTEMAHCEFLAWLFNSKPMTLIFEACGTSNYWKQRAIEAGHDARLISAKLVSSIRQNQKTDKNDALAIAQASQLADIQFVKGKSVEQQQLQSMMRLRELAIKQKTASSNQIKALLLEFNIRVSLKQKQGGLKGVIESLLEDAENGFSSEFRRALNAAWELHREILDSIRVYDRCLETTIGGHDDCKRLLKLEGVGTLNAINLYIALGCADLGVFSKGKDASACIGLTPLQHSSGGVTKLGHIGKGVKNSSIRSQLITGAMAVVNQVMKRTAVTKKEVWVQGLVARRGKKCAAVALANKTVRTAYVMLTQGTEYKAELVAA

SEQ ID NO: 207743 - protein, 314 aa, unidentified
MAATAVGIDVSKDKLDVHVLPQAEYFTVSRNAEGIEELVERLKAFQPVVVAVEATGGFESVVAAGLAAADLPVVVVNPAQVRAFARSLGQRAKTDPIDAAVIARFVEATKPEVRPLPDEETRLLSDLVTRRGQIIQMIVAEKQREKRATNRHLRKSIARLVKALEKEINAVDEEIDGMLRGSPLWREKEDLLKSAPGVGNVVTRTLLAELPELGTLDRRRIASLVGYAPFTRQSGQWRGKSSIAGGRSHVRSILFMAALAAKRRDPGLKAFYERLVAKGKPKMVAVVAVARKLLTILNAILRDKKPFQPVGIPA

SEQ ID NO: 207744 - protein, 347 aa, unidentified
MRFYTQQHQYYCGIDLHARKMYVCILNNSGKIVLHKNIRTDPEIFFELIFPFLPEIIVGVECMFSWYWIADLCHEHRIPFILGHALYMKAIHGGKTKNDKIDSRKIAALIRGGNFPLAYAYPNKMRSTRDLLRRRMHLMRKKSELLAHIQNTNTQYNLPVFDKKISYKTNRDGVAERFEDPSVNKSIQIDLAMIDTYDKLLQDVELYILKHAKAHDANTLYLLQTIPGVGKILALVMLYEIHDIALFPKVQDFSSYSRLIRPEKESNGKRTGKSNKKIGNPHLKWAFSEATILLLRESEQAKKLQQRLIKKHDEGKALGILSNKLGRAVYYMLKNKKAFDMNKFFSN

SEQ ID NO: 207745 - protein, 342 aa, unidentified
MPFLGGDNISLIGVDIHTKYCLGIIEGNNTETTLRFPNTPNGWKDFLKNEEHIDKVIIEAGSVSEKTIRFLEDLKIPIKMAHPKKARLIAEATIKTDKLDAKRLIDLEKVGILPEAWIPSREIRDIRHLCRYRFFLVQTRTRIKNRIHCELDREDINVKTLTYKYLETVKEKTIMIDQLYRLLREVNEKIREVEKEIGKKYSENEYSRIIDTIPGISKYGSLLLSMEIADINRFSNSKKLTSYAGLVPREYQSGAREWKGHITKEGNKWIRWILDECLAIHINICPYSPISIYYRRLLPIKGKGKAKIAAERRLLSVIYVMLKEKITFDQYIKMIEQSEPLV

SEQ ID NO: 207746 - protein, 408 aa, unidentified
MYNAVGIDVSKGKSTVAVLQPGGTVVRKPFDVTHSSRELKSLADYILSLDGETKAVMECTGRYHEPILRALSDAGIFVSAVNPHLIKNFGNNTIRKVKSDPADSKKIARYTLDNWADLREYSSMDTTRAQLKTLNAQMAFFTKQKVAAKTNLISLLDMTYPGVNDLFDTPTRDDGSEKWVDYAASFWHVDCVRKVGLKAFTDRYKAFCKRHGYIFQKSKPEELFNASKELVAVFPKDQEYKAMIQMSIKQLNVISANVERTRQEMDRLASTLPEYSTVMAMRGVGATLGPQLIAEIGDISRFNHREALTAFAGVDPGVNESGKFKSNSNNASKCGPSRLRKTLFLIMSSLLQTKPVDDPVYRFLDKKRSEGKPYHVYMTAGANKFLRIYYGKVKECLRTQTQSETTDN

SEQ ID NO: 207747 - protein, 421 aa, unidentified
MKGLRGIRGKTVREGTLIATVDIGLTTNTGYCTTLDGRDSKSFRFDNTKEGFEKFWCMTMASKNRFRCDEVVVGYESTGPYAEPLVHYLANKQVKIVQVNPMHTKKMKEVNDNSPLKTDDKDPRVIADIIRLGRALTIVVPEGDAAYLRRLTNARERHVGEQTALLNQLQQLVFLIFPEFKTVLKDMKGKTAQYILKRYTIPERIATVSKEVLGEQMRKRSMGKFGIQEAESLIGLARETVGIKEGLGGIFMDIRHILMQLEAEVRFILEIEAEMGATLERIPFSGRLLSIKGLGIVSVAGLIGEVGDFSKFSTQSEIMKLAGLDLYEISSGKRKGQRRISKRGRSLLRKILFYAAIQMIRKNGIMFDYYARLTGRGMERMRALIAVSRKLLRIIHAIVRDNSDYVGQYQAPERRVVNIAA

SEQ ID NO: 207748 - protein, 404 aa, unidentified
MCSRIIPHTCYWLNKEMGKLPHPRKEGLYMIAYVGIDAHTTNYTLSTYLEGSAAPVNTNTYSPAVSNIVNYCKGIRKKFGNDTEIVVGYEAGCLGFKLKRDLEKNGLTTKILAPASITGTEINRRRRKKTDKRDAEAIARSLKNHEYSEVYTPDEEDESVRDYIRMAQDHKKQLRVIKQQIYAFTTRHGYKFTDGRNYWTKKHLKWLKELPLEEINKETMDSYLLSYETVSDRIEQMNKRIEEIAETDKYREAVHKLICFKSVKVLTALAVIVEIGDFTRFVKAKNFAAFLGLVAGELSSSGDQNQTGITKQGNTFLRKLLVECAQSFSRASSGKSEALKKRQEGNTPEVIAYADRANERLRKRYMRLVLHNRKSHNKATVAVARELACFIWGMMTGNIHTVLA

SEQ ID NO: 207749 - protein, 317 aa, unidentified
MTQTIITTAGIDTSKAKLDIAVHGRAERWQVVNALPGWRRLAGDLVKAGVVRVGIEATGGYERGVVRYLREKGFAVLLLQPLQVRAFARAHLRRAKNDALDAALIAACAAQIDQPVREVDERLAELAGHLTFVEQIEEDIARLKTRLEHVDDLRLRSMVVADIARLKARRAAEMLRILKALRVHEDLACRVDLVLSIPGIGERTALALIIRMPELGRVNREQAAALAGLAPYDDDSGTIKGQRHIAGGRGRLRRSLFAAALPAAFRWNKALVALYARLTAAGKAHNAALIACARKLLIYANTVVQRGTPWTEKAATI

SEQ ID NO: 207750 - protein, 348 aa, unidentified
MTASHYIGFDVHKKTISYCVKTAAGEIVEEGCTPAERGALRQWAAARPQPWRGAMEATLFSGWIYDTLKPYGEQLEMAHPAKMKAISAGKKKSDTIDARTIADLVRCNLLPACYVAPPRIRELRRLLRYRSLVVSEAVRMKNKMAGLLMETGALYVKEKLHRKKYFASLLEELEEVPESVIDLLRLSRGALEMFESTQKRLVRELLADPELAERIERLMTIPAVGEVTALTWALEVGDPQRFRSSSDAMSYCGLTAALKSSAGKQQRGPISKQRNHWLQTTLIEAAKLAPRWNPQLAALHARESERGNRNRATLAVARKLVAYLLAVDKSGQAFQVRAPSEEPTPKAS

SEQ ID NO: 207751 - protein, 437 aa, unidentified
MRRKKSKASKKVNLGSLPVIHPDAAGIDVGAKEHVVAVPCDRDERPVRTFQAFTPELHELAAWLKRCGIRSVALESTGIYWISLYEVLEQHGFEIRVVNARHVKNVPGRTKTDVLDCQWIQKLHSFGLLNGSFRPDQQIRKLRTYMRLRDNLVVNSTQAVHHMQKALFEMNVQLSNVISDIIGESGLRIIEAIIAGERDPEQLAALCGTRIKASRQTVAKSLHGNWDEALLFCLKSALETYRFSQLKIQDCDGRIERHLAEFQSRVELPALPKDLQAHLHRICGVDLTKIPGIKEQSAQIIISEVGLDMTKWNTEKQFSSFLGLCPNNSISGGKVLRRATRKVYNRAADTLRLCAQSLTHSKSALGAKYRRLRARLGAPKAIVAMAHHLARLVYRMLRYGDKYIEKGIEHYEQKFRLQRIKWLKKEADSLNLQLIAA

SEQ ID NO: 207752 - protein, 337 aa, unidentified
MIVIGVDVHKRSLTAVAVDEVGRPLAEQTAVDGAGLMEWAGSLPAERLWALEDCRQLTKGIERTLLSAGEQLVRVPPKLMAPQRRAGRERGKSDPIDALAVARAALREPRLDHPRPGEERLRELKLLVDHRDDLVDERRRVQQRLRWHLHDLDPELAVPLGALDRRVWLDRLARRLARGEQSVQLRIARELLGRCRSLTRTILALDRELEQQVLATAPGLLELPGCGAVSAAKLLGEIGPIERFDRDAQLARHAGVAPLEASSGRIRRHRLDRGGNRQLNCALHRIAITQARAYPPARAYLARKQAEGKSRREAVRCLKRQLARTVYTTLKNKPLLT

SEQ ID NO: 207753 - protein, 384 aa, unidentified
MQTVSDRPEAPTAIRTDLGAIFVSLELSRSTWLITSLSPGGGEKMSKHVVRGGDVAGLLERFAQLREKTRARTGKVFSFVVIQEAGLDGFWIDRVLQNEGIESHVVDPASIATSRRRRRAKTDRIDGEALVRALLAYKRGEPRVCAMVKAPTPEEEDRRRLCRERKVLIAERVRHVNRVKGLLFSQGISGYEPLRRDRRERLVTLQTGDGRLLPDHLKAQVRRELDRLELLLEQIKAVEAERDVLLAAQQAPAAMLLDIKGIGPEFAAILWSEGLFRHFDNRRQVASYAGLAPTPWQSGSVDREQGVSKAGNPRLRTTLIQLAWLWLRHQPQSALALWFEERVRRNGDRLKKTAIVALARKLLVALWKYVTAGVVIEGAVMKVA

SEQ ID NO: 207754 - protein, 357 aa, unidentified
MNKSKQLDFKGQDIFIGLDTHLKNWMVSIMVNESPFKTFSQDPRPETLRNYLAKNFPNANYHSAYEASFCGFKIHRDLLNLGIKNIVVNPADIPTTDKERKQKEDSRDSRKIAKQLSQKDLTAIYVPEIEIEGDRSFIRYRKTLTKEIARTKHRIKSQLYYFGIEIPTKFSEKSYWSKNFTSWLQEIDLPTESARMTLNGHLEMAEMLRKKQLSTNKEIKKLSEKKIYKENYNLLISVPGIGSLTAMIILTEIGDINRFKNLDKLCSFIGLVPMTNSTGENEKTGDITVRKNKILRKALVESSWIAIRNDPALILAYQKLIKRMEPQKAIIRIAKKLVNRILYVLKNKKAYVQAVVK

SEQ ID NO: 207755 - protein, 387 aa, unidentified
MYYIGIDISKFKHDCAVIDDAGDVVTPSWSFANDLEGFLQFKALLDSLGTETKIGLESTGHYGMNLKLFLEADGFSFMEFNPLLINRFVKSKSLRKTKTDAIDCEMIARYLMTVEYKPYPPSFYHIEKLKSLTRFRDNLVRQRSRQLVELTNILDKVFPEFKPFFGGKFTVTALHILSEYSSPEKIANMNSRSYEPLRKLSRGRFSTTHFAKLKLLAKNTVGHPTDFLLQEMDIVLELYSQLDSKVDETESLIRECVSEIDPPMLTVPGIGVDSAAVILAEFGDFSKFQNPSQMLSFAGMEPGYFQSGTSESTGKMVKHGYSFLRYALINCTQTVINYEPTFAQYYAKKRAEGKPYRVALTHTAKKLIRVIFTLQTRNITYNSDSVR

SEQ ID NO: 207756 - protein, 429 aa, unidentified
MTRISVGVDVSKNRSTVCIMDQDGKFIMRPFLVWHSTEELDFLADTLKRLNGEVRVIMESTSVYQYPIALQLKERGLFISIVNAYEMKQFANTDFRGGKTDKKDSRTIASYGISYWDKLVEWQIPKDTYFNLDLLNRTYMNAKKHRQIILQELQHYIDCAMPGMDKELHSLNLSTKKDFMLDFVEKFWHRDEIVNMTEAEFTEVFTAWAKKKGYRPVEGKAAKIYAIAKSCIPYYPANPTVKTILQCIVDKLSGVNRTLVTIVTQMIEEAKKLPEYQIVREMPGVGDPLAARFFGSAGDIRRFKNSKALVAYAGIDSPPDESGDFSSTHRHITKKGSKVFRDTGYEIMMALRAQKRTWEKVRKNPEVYDYMLRKEAEEKPRKVAKIAALNKFLRIVYARIKELYDNMALAERAKTKTRSKTRAKTKVTA

SEQ ID NO: 207757 - protein, 384 aa, unidentified
MKKNINRLVEMKATAIEMKVGVANPPGKRISQPPEYHAVVGLDVGDRQTHYCVLDLDGELAVEGAVGTREASLRVQFEGKARMRIALEAGTHSPWISRLLVELGHDVIVANPRKVRLISRSDTKNDPADARTLARLAHVGPELLSPIQTRSEKTQVDLALVRARDVAVQSRTRLINAVRGIVKSTGRRLPKSSTLTFARKAKDACPETLQPALLPLLRVIGELTREIELYEKLVNQKAETEYPETKAIRTIHGVGPVTALAFVLILNNDPSRFQKSRDVGCYIGLRPRQRESGQRAPQLGITKAGDSMLRRFATQCAQYILGPFGKDSALRRWGLSLALRGGKNAKKRAVVAVARKLVILMHRIWITQEVYEPLRGVAVKSTAA

SEQ ID NO: 207758 - protein, 488 aa, unidentified
MKANSKENRKTFRNAKKASHPAIQPSWHQMNRKQRRELARTIQSEEISLDVIHPDAAGIDIGNEMHYVSVPPNRDSEPVRHFGCTTAELKAMADWLKQCGIRTVAMQSTGVYWIAVFDILEQAGLELYLVNARDTKNLPGRKSDVQESQWLMKLHTYGLLRNSFRPAQEIRRLRTYWRQRNDLVQSASRHIQRMQKALTQMNVQLANVLADISGMTGQAIIKAILAGQRDPKKLAAYRDPRVKASEVELAEHLEGNWQHDLLFILKQEQDGYEFCQKQVSECDRQIEQYLAQMEDCSQGAELPEEKRKARLKKKKGNAPRFDLRQELFRMTGEDLTRIDGIDVMTATTILSEVGWDMSKWKTENHFVSWLRLCPDNKISGAKIIGKGRLPTNNRATLALKMAASTLRVSNTYLGAQFRRLKTKLGAPVAIKAMAAKLARLVYRILRFGTEFIDRGADFYDAQMHDLQVRHLKWKAAKLGFQVSEIPAA

SEQ ID NO: 207759 - protein, 416 aa, unidentified
MKTEQSGCWVGVDWGGREHAVCVVGSDGTKRAQWRIRHEAAAVKGLPAQLGAFGPILGVALETPRHVLVDVLTQAGFPVYPVNPKLSKRWRDCASVAGAKDDDRDAWVLADGLRCHHGKLRPFVPAPASMRTLALLCADECRLIGERTALVQQLEAALKQYFPAALEWFTDWTTQTAWDFVGAFPTAAALAAARPSHLVSFLRTHRMALKPQWQERIACRQAALEWPCDPALAAAKAVLAESLVKQLRTLDASLKRYRKEIELLFAHCENKEVFTSLPGAGRKLAPRLACLFGGQSDPMESAEDVQKLAGTAPVTIQSGNTRRVRMRRACRKNARNALHQFAEHSIRRSAWARALYDRARRQGQKHASALRLVANKWLKIIYRMWQTGEPYDESRYLAQLVKKKSPLAYQLGLLKT

SEQ ID NO: 207760 - protein, 370 aa, unidentified
MMGWTPRRRHRCAKVEVLSTTLREASVSEVSIIGLDIAKHVFHAHGADERGRVIFSKRISRGKLLDFFAAQPSCTVALEACGGAHHWARQLTQLGHDVRLIPPAYVKAFVKRQKNDAIDAEAICEAAQRPSMRFVAVKSEEQQAAGLVFRTRDLLVRQRTQLINAIRGHLTEYGWIAPKGPSHVAMLADLIEEDEMANALPEAAHAMFRLMLDLLAGLNGKIADLDKEIARRAREDEVSRRLMTVPGIGPISATAIAALAPPVETFAKGRDFAAWLGLTPLQRSTGGKQKLGATSKMGERTLRRLLIIGSSAVVQQASKRGAPKGSWLEQMLARKPRMLVTVALANKMARIVWALLVKQENYRAPVAAKA

SEQ ID NO: 207761 - protein, 342 aa, unidentified
MNQYAGIDVSLECSSVCVVDANGKILREARVASEPEALIAWFRSSGFGLERIGLEAGPLSQWLFAAMREAGLAVELLETRHVRKAFEAMPVKSDRNDARGIAQLIRLGWFRPVHCKSMSAQETRTLLTARKLVQSKLRDVENSLRGILRGFGLKVGKTTELKFAGRIEELVAGHPHLQVIAKALLAVRAVLRKEFAAFEKQVRKMARSDLRTRLLMSTPAVGPIVALTYASAIDDPSRFKSSKQAGAHFGLTPKKYQSGETDYTGRISKIGDASVRTALYEAANVMLTKPVKGCSQLKSWAMRIARRAGMSKAKVALARRLAVIMHRMLADGTPFNAAAAAA

SEQ ID NO: 207762 - protein, 309 aa, unidentified
MTANQKFSRFIGIDVSKAKLDIYDDATGEFLTVENTAKAIEKYVSALSPNPELLIVVDLTGGYEALCVNTFYNRGFTVHRAEGRRVKAFMRSYGEHAKTDRIDAYALALFGRKLHETLRMYTPLPLNLKPVTERISDLKTMLLQEKNRSTAPSLPPDMKKEIVRHIAYLEKEIERLYQKCLDIIKNDPPLAEAFYKIIAIKGIAEKSAVLLLTTLPELGCANRRQIAAIAGVAPYAKDSGTLSGSRRIRHGRTTAKSALFIVTLVAIRHNAQIKEFYERLLKKGKSKMTAIIACARKLLIIVNATLKTC

SEQ ID NO: 207763 - protein, 369 aa, unidentified
MNHDTTVFVGLDVHKDSITAACIGTHPSEPPVDLGTIGTQQYAIDRLLKKLSGRGTLQFVYEAGPCGFWLERYLRSKGERCLVAAPSLIPRRPGERIKTDRRDARNLALALRAGTLSAVHVPTADQEAFRDVVRAWQQSKRDITGAKQRLKAFLLRNDVRYSGRATWNAAHRRWLSELVLPSASQQIVYQELLGAIDERERRRDRLEQELDTLAPHWDGYPLAQALLAFRGIQKAVAYTVVAEAADLSRFSHPSRFMAWLGLVPGEHSSGATRRQGPITRCGNRWVRSLLVEAAWAYRYNAKVSGIIERRAQNIDPAIRDLAWKAQLRLTRKYRRLISRGKHKNVAVTAVARELAAFIWDAARTLEQRA

SEQ ID NO: 207764 - protein, 347 aa, unidentified
MGYFAGLDVSLEETAICVVDAAGRIVREARVASEPEALVAFFEACGMAMERIGLEACSLSAWLHAGLTQAGLPAICIEARQAKAAMGAMPNKTDRNDARGIAQIMRTGWYRAVHVKSPSCRSWRALLTARRLVLNKRRDVENGVRALLREAGLKLGTPSRKEFSARVRELAGDDPVLAALSESLLSVIEIMTQEVDRLTKRVLDEVKVEPTCRHLMTVPGVGPLTALAFRATIDQPGRFRKSRDVGAHLGLTPRRYQSGETDLQGRISRCGDELARTALYEAAHSLLIRSSKWSALRAWGMNVAKRRGMARARVAVARKLAVILHRMWADGSEFRWGKQATAAAAAA

SEQ ID NO: 207765 - protein, 360 aa, unidentified
MTKQVMAGIDLHSNNLMIGIVDQSGKRLKHQKVDCDLKQVTAVLEPYKARLKSVAVESTYNWYWLVDGLRALSYPVVLANPAGIEQYSGIKCADDKNDAFFLAELQRLEILPTGYIYDAKLRPVRDLLRRRMSLVHQRSALMVSFKSLYTRTTGQAMNLGKLKSMEPSQAAALYEHPANQLIARVQKEHIEGLDKSIARIEKAVLQSARELPYYDQLNTLPGVGKILGMTITMEVGEIKRFKTAGNFASYCRAVDSKRTSNEKSKGRNNRKCGNKYLAWAFVEAANFAKRFDESSRRWFDRKTAKTNTVIATKALACKLAKAAWHVMAQNNDYDRGRMFPQDCGRAAVSQVKGLAKNPGD

SEQ ID NO: 207766 - protein, 338 aa, unidentified
MKLYCGIDLHSNNSVVVILDEVDKVVYQKKLNNDLPSILQQLSVYKSKVTAIAIESTFNWYWLVDGLMEAGYTVKLVNTAAVQIYSGLKHSDDEDDARWLAHLLRLGILPTGFIYPKEERAVRDLLRKRSQLVQQSTTNILSLQNILARNTAHSLSSYRIKKLDDERAEQLIDDPNITLALKSNLNVIRCLQNTINEIETTVLQQSRIRPEFKQLLTVSGIGEILGLTIMLESGDMSRFAKVGNFSSYCRCVKSGRFSNGKKKGEGNRKNGNKYLAWAFIEAANFAIRYNDKVKAFYQKKKSKTNGIIATKAVANKLARACYHILKDQVPFDVNKAFT

SEQ ID NO: 207767 - protein, 343 aa, unidentified
MYYIGIDVSTKESALCILDGNGKIVRETKLPTDPEIIARFIADTGLAIERIGLEAGCTAAWLFAGLQQHGWPVICIDARHAAAALQAGFRNKNDRNDARGIADLMRVNKYRPVWVKSPEAQRQGRLLTARATLQSQLVSLENTIRGLLRQEGIGLTDRRTAFEAAVREVIADDRLLQAAVLPLLETRTAVLHHRATLDRQILRIVRVDPVCRLLMTAPGVGAIVSLAFKVGVDDPRRFSRSRDVGAHFGLTPREYSSGEVSYRGHISKMGDREVRRLLYLAAARILRRDAALWCPLKVWAVRLAQRVGLSKARVALARKLAVVLHAMWSDGQVFQWRRSAASA

SEQ ID NO: 207768 - protein, 463 aa, unidentified
MFSPLSGVGVQGGRRLAPTTAHPSSLAEHPLCRQTPEVGAGCGKPARPDLCGGRPATVVPCTLRLDRRANNISLISKESGEPQASLWSTNLCGRFGPASPSSAVHAERYPGTRHAADPAYKVVRRRGALPYSSTIMVAKMSDAIVGIDVSKKTLDAYCAKDQMQQGRTFANSPDGWKLVRTWLKAMGSKQAHVCMEATGRHSLGVALALHEAGHVVSVVNPAQIRDFARTKLGRNKTDKVDAALIRGYAELFKPEPWTPPSPAMRRLCKLQTMRAGIIRSRAEWKNRIGSGLGDITATKLAAATIDHFTTQLEAIDRVISETVDQDAELHGRRDLLVSVIGVGDTLAALLMAKMPEPGVLRRSGEIVAYAGLNPSHHRSGTSIDRPTRISKIGNAELRSALYMPALSAMRFNPAVAALVARLKSAGRLKPKQIVVAAMRKLLVLCFGVLKTGKRFDSAIAMSA

SEQ ID NO: 207769 - protein, 352 aa, unidentified
MAVAELGRQAGRVIGTLPHDLKRLLKALGKLGKPEQVHVVYEAGPTGYGLQRALVTKGYVCEVIAPSQIPKRAGERIKTDRRDCLRLAECSRAGELRAIWIPDVEDEAIRDLSRAREDAVNSRTQMRHQLKGFLLRHGVRFGGKTSWTRSYYRWLGTLNFGASAAQTAFTEYWQAVQWADERVARLTQASAASIAGWRFAPVVAALQALRGLDEVSAIGLVAEIGDIGRFEHPRQLMGYLGLVPSEHSSGERVARGSITKSGNAHARRLLTEAAWNYRFKARIGYRAQQRQEGLPQAIRDTAWKAQLRLTGRFAKLHGRGVQINKVCVAVARELAGFIWAIAQQAQSSAKPH

SEQ ID NO: 207770 - protein, 483 aa, unidentified
MKRKSIFRNNSQKLDSAFIEAGLPEKVLLVPLDFAKLTHYACFCDGRGRYIRNAFTVKNNRAGIDYLIEQIEKTRKARSIRSKQHVIIGGEDSASYTCNFMDQLFERGYLTVRLSAKEVHQQAESLDSSTDKTALRAIAKTMLNRDARQASGSDPYKELRGLTRQRRRIVHLSTAVKNRIHTHVDRLFPGFLSKDSAVAPFSKASLQLMEKAFSAAAISRKSERVLTRLLSGQGVREPALAAARLKEQADRVICGDDSSTRLSGQLITGELSLYQSLQSTLSDLDLECARILAQLPEAFVLSMRGIGITLCASIFAETGSLARIQHCDQINAYAGIVPKVKQTGGPEAPARVGGKRRSFNRVLKDYTLQAGNHIYLHGPKDLMEDAVRRKLQGKAVDTAMARRFLRIARALTKGRCIYLPKSLRTDQEEPDAEARAQYILQTWPDQLLKWKRLGLHREAFAPETPLGQWREIVQQIYDIELPL

SEQ ID NO: 207771 - protein, 406 aa, unidentified
MEVIYERCCGLDVHKKTVVACLRAPGGSRRQSEVRTFGTTTDELETLAEWLQRGGCTHAAIESTGVYWQPVFNVLEHVCTVVLVNAQHVKAVPGRKTDVRDAEWLAQLLEHGLLRPSFIPPLRIRELRELTRYRLTLKRTRADETNRVQKLLEGANIKLGNVATDVLGASGRAMCRALIAGETDPIRLAELAKGALRRKRPALLAALRGRFTPHHAVLLQMLLDHIDDLTRHIATCDAQIRACRGPFAAEVELLESIPGLSATTVETVIAEIGVDMGRFPTAAHLASWAGLCPGNHESAGRRQTGRIRPGNPWLRAALVQAAWAASRTSSTHLRRFHERIARRRGAKRATIAVAHRLLVAIWHILTRRTPYVDSGPTPKEDRTIAHLRRYYLRRLDHLGAGAAPAT

SEQ ID NO: 207772 - protein, 423 aa, unidentified
MKFTQNEKTNQRIERMTSQHAVVGIDIAKDVHAAQVTDYRGRVLSNRHLSFTNTREGFEKLGLWLQDIRGKYGKSDVIVGMEPTGHYWYNLANWLLEQGIEVVLVNPVTTHRNKENRDNSPSKNDPKDALVIADVVSRGYYTNYAPQSPVFDQIKTITSNREYWVKMSTSLGNRIVRWIDLYFPEFRSVFPVWDTARSLATLRAFPLPEDLKQLNAELVMEGWREQGMRRAGGASGKATATQLLSAANRSIGKPCMDVAAGQDLARLLAAYEQTQAALQEMEQEMEMLLNSLPLAKQLSSAGLGRVTIAVLLGCAGDLSQYAHGKQLLRRAGLNLTERTSGKHKGQIKLSKRGDSTLRKYLFLAVLNLVRHHPDFKYWHKQNQLKGMTKLKSVFKLIGKLARLVIGMVQRGETYQSKLDVTAA

SEQ ID NO: 207773 - protein, 379 aa, unidentified
MDFSTVALPPVSAKPATLFVALELSKATWLVALHSPSADKVSLHRLAGGDTQELLTLIARKRDQAQTALARPVHVMSCYEAGYDGFWLHRLLCASGIDNRVLDAASILVDRRSRRAKTDRLDAAALLRTLMALDRGEPRVCRVVRVPSPEHEDERRRSRERARLVNERGQHASRIKGLLMTQGIRDFVPTRRDWRERLAELRTADGRALAPCLTAEIERECRRLWQVIAMIAEVEAEQHRAAEKSSTGAVQLSRLRGIGLTIASVLADEVFFRSFHNRREIAGYLGLASSPWNSGAVSRDQGLQRSGNPRARRTAIELAWLWLRHQPESDLARWFQERVGAGKGRIRRTMIVALARKLMVALWRYVTQGLVPEGAAIKG

SEQ ID NO: 207774 - protein, 283 aa, unidentified
MNNNTKKGSVTVLGIDLAKQSFQLHGVDEAGQVVIKKKLTRTQLSAFVANLPVCLIGLEGCGGAHHWMRLFTEMGHTVRMMAPQFVKPYVKSNKNDSADAEAICEAVQRPNMRFIPAKSIEQQDLQSLHRIRSQLVARRTAQANQIRGLLMEYGIVIPQDISYIRKSLPDILEDGENRLSVLFREQLSGLYDEMVHLDDRIEALELSLKTLSTQNEDCKRLLTIPGIGLMTATALIAAVGDVNVFKSGRELAAWLRLVPRQHSTGGKPTLLGISKRGDSYLRT

SEQ ID NO: 207775 - protein, 417 aa, unidentified
MTEFAACLGIDWADKKHDLCLFDTTTGKKTKQVLPHTPLAIAEYFTNLRARYPGQQIAVGLEQSRGPLLFALLQYDFLVIYPINPTTLAKYREAFSPSRAKDDPTDADYAAELLMQHSDRLKAWHPDDDQTRTLRYLVEHRRRLIGDRTRISNRMTSLLKCYFPQLLSWFPDLSTVLVCDFLLRWPALERLHGVKRTTLLNFFRAHHSVRSDTLEKRLSAIKDSVPLTTDRAIIDSSVLMISALAAQLKTTIHAVKQFDLEIEKLCAAHPDFPLFQSLPGAGDVYASRLLAVMGTQRDRWTTAQELACLSGIAPVMERSGQSVCIRWRYFCPKFMRQSFHEYAGESVKHSFWARAYYEQQIAKGKSRQAAVRALAYKWIRIIWKCWQTRKPYNEVKYLEGLRKKGSPLLSYAAKNAA

SEQ ID NO: 207776 - protein, 403 aa, unidentified
MSINGAPMMAASVVAVDVGKNTAALSVTDVGRRRLLGPVDFAMTAPALTAVLERVCAVLPPAAVRVGIEAAGHYHRPLLAAGVWPAGWQVLELSPARVAEQRRVQGRRRVKTDAIDLEAITELVLAGHGVPVTARAARLIELTGWAMHRSRRVLTRTATKNQLLAQLDRCFPGVTLALPDVLGTRIGRLVAVEFADPHRLAALGVTRFVRFAASRGLRVRHSAADRLVAAARAALPAPEALVARQVLADDLALLAGLDAQIVAAEAHIARLLPDTPFAPLITVPGWGVVRAGNYGAAVGDPHRWPGARQIYRASGLSPAQYESAGKRRDGSISREGSVALRRALIDLGIGLWHADPAAKSYGQALRARGKKGGVIGCAMAHRANKIAYAMVRDQTGYDPSRWA

SEQ ID NO: 207777 - protein, 328 aa, unidentified
MEQELHFIGIDVSKAKLDVDVLRPDGRHRSKKFANTPKGHNELLSWLHNHGVAPAHICMEATSTYMEDAAACLSDAGFTVSIINPALGKAFAQSEGLRSKTDAVDARMLAEFCRQKRPAAWEAPHPLERALRALVLRHQSLTDMHTQELNRRETAREVQMPSIDAHLLWLEAELKRLEKQIKDLTDDDPDMKHRRKLLDSIPGIGEKTSAVLLAYVGLKDRFGQARQFAAFAGLTPRQHESGSSINRASRMSKAGHVSLRRALYMPAMVALYKTEWGKAFRSRLENNGKGAKLIIGAMMRKLAQVAYGVLKSGRPFDATLHEKNACVA

SEQ ID NO: 207778 - protein, 338 aa, unidentified
MFTIGIDPHKGTHTAAVLDGTEIVIDELRLVADRYQRDRLLAFATRFEPRTWAIEGAGGLGALLAQQLVAAGETVLDVPPTLSARVRLLDSTRSDKTDCHDARAAAIVAMRHGRLRRVAPLDHSAVLRLLADRHHDLTGLRTQAICRLHALLCQLTPGGASGRLSAQRAGQILRGIGPLGPVATERKRIALDLLGDVRRFDSQLVTLNERIAKAVLASGTTLTDVHGVGALGAAIILGHTADITRFPDAGHFARYNATAPIAASSALKDRHRLNPRGNRQLNRAIHVAALTQIAHDTDGRIYFRRKLAEGKTRKEALRALKRQISNAVYRQLIADTRH

SEQ ID NO: 207779 - protein, 341 aa, unidentified
MKLRTIGVDLAKNVFQACGVNEYIKPQFNTKLKRAELLDFMRQQSPTTVIMEACYSAHYWGREISKLGHDVKLIPAQHVSPFVRGNKNDHNDAFAIVEASQRAHIRFVPIKTEYQQEICCLHRIRERLIKNKTALSNQARGLFSEFGIVFSGGHKAFTESLSQVMNDPKYSGNLQNMATDFLGEYELIVSRIKQIERQLKSFVEGCQSGRILMSIPGIGFINASAILAAIDKGQAFNTPKEFAVWLGLTPKQHASGNINKMGGITKRGDRYLRKQLVHGARALISRAAGKEDVLSQWANHLRQRKPFNQVAVAMAHRLARLIWILLTRQERYCEIKAQKAA

SEQ ID NO: 207780 - protein, 315 aa, unidentified
MTKQLSAVNVGVDVGKGQLDVYLLERDRALTVPNEEHAILTLIRVLGRYRIERIVIEATGRLEQPFVRAALAAGLPVIVVSPLKVRRFADAIGQLAKTDAIDARLIAQFAAAVKPIARRPSDANAQAIKDLVVRRRQLTTLRTMEKNRRHVMPQELKSGIDRIIKTLNRELKRLEQLIDYAVDQHAASRHKRELLTSMPGIGNSVATTLIGDLPELGSLNRREIASLTGVAPFNRDSGTLRGKRRIRGGRTHSRTALYLSAMVATRFNPDIKRFYERLLAAGKHKKVALTACIRKIVTALNAMIRDNSPWQPAMT

SEQ ID NO: 207781 - protein, 343 aa, unidentified
MAYFAGLDVSVKETSICIVDDTGKIVREARVASEPEALLQVLTNTIYRFKRIGLEAGPLSQWLYSVLAEAGLPVICVETRHMRAMLKAQINKTDRNDARGIAQMMRVGLYRAVHVKTLRSQKLRVLLTHRKLLQSKTIAIENDLRATLRNFGLKVGMVGTVKFEVRIRELVENLPDLAVLVEPLLIVRRVVREQLGILHRRLLAIVRDDDVCRRLMTIPGVGPVVALTYRVTVDVPARFRNSKAVGAVFGLTPAKYQSGENDRTGAISRCGDEMMRMMLYEAAQSMLVRSAKWSWLKAWAMKVARHRGMKKAIVALARRLAVIMHRVWVDGTAFRWTREVAVA

SEQ ID NO: 207782 - protein, 403 aa, unidentified
MTHVIIGVDPHKLSATIEVVDTHEKMLGSGRFTTDQAGYTAMRAYAKTWPERVWAVEGANGAGRPLAQRLLEAGERVVDVPAKLAARVRLFDTGHNRKTDALDAHSIAIVAVRTEGLRVLKIDGELEAMRMLTDRREALTRRRVQTVNRLQALLAELLPGQAKKDITPLQAKAMLAGVRPRDIAGKTRRRIAAEELAELIVVDAKIKKATAELKTMVLARGSTLMDLHGVGPVVAARILADVGDVTRFADRNRFASWTGTAPLDASSGEQNRHRLSRAGNRRVNHMIHIAAVTQLRLDTEGRVYYRRKRAEGKKPMEAMRCLKRRISDRVYRQLLADAQRAAATPAGAGPGGHCGASQKSSAVDLPPHIDASDQPLPGPADPTLRPASESRKTELPRSLEATG

SEQ ID NO: 207783 - protein, 412 aa, unidentified
MNVRVEKACGIDIHQAFLMATVLDMAGTKDTRRFSTCIEDLLNLREWLLDSKCQRVAIESTGIYWIPTYTLLEGKVETIVANPFHIKNIPGRKNDTLDSEWIAEICLNGQIKPSYVPTKEIREIRELTRSHVKINQAKTSFKNRVHKVLSRAGIRISGVISDIFGKSGMIILNGILNGKTIDQTFKEIKNKQIKIKKTEIKESLKGELSQNDTFVIKECLDSIKFLDQKIKEFDSKINQSLKGMQKEMEILMSIPGVGFTTAAAIMAEIGNIEVFSKPKKLVGWSGLAPSINESAGKSSNGHITKRGNKFLRTILVLAANSIAIGRPNKLRFFYERIKAKKGHKKAIVALARKLAAIIHHLLTFKEIYSEEEGKQKKVKLPKFVPVQDFSIDDMIGILCEAGYSVNKNAVKT

SEQ ID NO: 207784 - protein, 412 aa, unidentified
MEVVYECCCGLDVHAKRVVACLITRGRKEIRTFATMTDELLQLGDWLSSVGCTHVAIESTGVYWKPVFNILEGLLTVILVNARHIKAVPGRKTDVRDCEGLADLLRHGLLKASFIPPPEIRELRELVRYRHTVVTEHTAVANRITKLIESANIKLGQVASEVLGRSGQLMLRALAAGETNAETLAEFAQGKLKNKKAELRRALTGSLTPVQRWVLTELLTRVEELEAARGRVETRINEAVAMCTDPFGAEAVELLESIPGIGQRTAQTIVAEIGVDMSPFPSANHLASWAGVCPGNHESAGKRKSGQPTKGNKSVRTILTEAAWTAARAKETFLHAKYHRLAKRMSKRKALGAIVHRLLVICYHLLKRRVPYAELGTAPLDEQQVAWQRRRLVEQLVGLGVKVTIEEGAAVT

SEQ ID NO: 207785 - protein, 302 aa, unidentified
MHETAAHWTSKHEFTEFPQLLKSLRAIAPTRIILEASGGVENLLVSYLAMAGLPVIVINPRQVRDFARATGQLAKTDRIDAFVLARFGATLEPAVRQLKSAETQELEALVARRAQLVNMLTAERIRLQQAQQQRRQSIVSDLKAHISWLQKRLDKCERDLSQLLGSSPIWRATDERLQSVPGVGPITSLVLIAELPELGQLPDKQIVALCGLAPHARDSGKWHGKRTTRGGRARVRTALYMAALVATKHNLVIKSFYRRLLSAGKQKKVALTACMRKLLVILNAMFRNQTSWQPPRLAQELN

SEQ ID NO: 207786 - protein, 343 aa, unidentified
MNISRVGVDIAKSVFHVHGVDRHEKPQWRGKYTRAKWLEAVCRRVPQGATIGMEACASAHYWARKLQARGYHVKLIAAQFVKPYVKTNKNDRADAEAICEALGRPTMRFVAVKTVDQQDSQATHRIREELISQRTAKANQIRGLIGEYGFIAPTGIQQLRRALPLWLEDATNGLSDRFRRLLADLADDLRYLDERVAQLTSAIETHANTDPVAKRLMTLRGIGPITASALSGVLGDGAIYKRGRDFAASLGLTPRQHSTGGRERLLGISKRGNSYLRKLLVHGARAVLRYAVKKDDGLSQWIKHLAVRKHRNVAIVALANKTARMAWAVTRYEVPYNPELAAA

SEQ ID NO: 207787 - protein, 318 aa, unidentified
MGSMDGNKFSTTIAGIDVGKRQLDVALHGQAEQHRVANDAVGWEALAAWLAERGVRRVGLEATAGYERGVRARLQAAGLEVVVHQPLEVKLFARLKRRRAKTDRLDAALIAAATAQVDTVRAAQDPRLAELAERLTAYEQISDQAAQLKTFMEHVTLIDLVASLREQIQALSLLKARLAREILARIKAWPDLLARWRLLQSLPGVGPLVAASLVVRMPELGALKRGQPASLLGVAPFDRQSGQWKGQSFIGGGRSRPRRMLYLAAIAAKRFDPSFKAFTDRLIAAGKPPKVAIVAVMRKLIEAANLVLARQQPWLRLA

SEQ ID NO: 207788 - protein, 343 aa, unidentified
MDHFAGLDISVKETSVCIVDDTGRIAREVKVASEPDSLLQVLTNPAYHFKRIGLEAGPLSQWLFSTLAEAGLPVICVETRHMRAALKAQVNKTDRNDARGIAQMMRAGLYRPVHVKTLRSQKLRMLLTHRKLLQSKAIAIENDLRATLRNFGLKVGMVGTVKFETRIKELVDNLPELAVLVEPLLIVRRVLREQIGILHRRLLAVVRDDDVCRRLMTVPGVGPAVALTYRATVDVPARFRNSKAVGAVFGLTPSRYQSGESDRTGGISRCGDEMMRAMLYEAAQILLVRSAKWSWLKAWAMKIARHRGLKKAIVALARRLAVIMHRIWVDGTEFRWTREVAAT

SEQ ID NO: 207789 - protein, 355 aa, unidentified
MENNKLDFSSQNFYMGIDVHKKSWSVGIICNNNLLKRFSMNPEPKILSEYMHRNYPGGNYFSVYEAGFSGYWIDRALKEEGIDNIIVNPADIPTKNKERVSKTDKIDARKLARELSNQQLEGIYVPGQLQEELRSLSRLRNQLVRDQTRVKNQIKSMLLYYGKRIPEDFEKKGWSKRFIKYIEAFDFTTIAGADCLKINIERFHRDHDLLKEVLRKIKDNLRDYGFENLVDKLKSIPGISFVTAIALVTEIMDINRFKRLDELCSYVGLVPSMRDSGETEKTMGLCRRQSKYLRNVLIESSWVAMKVDPALTMSFNKLIKRMPKQKVIIKIAKKLLNRIKYVWKNDQAYQKAVVT

SEQ ID NO: 207790 - protein, 345 aa, unidentified
MSHYAGLDVSVRHTSICIVDACGKIVRETRVSSDPAAIVPILTVPGIDCRRVGLEAGPLCQWLFSGLAEAGLPVICVETRHMKAALAAAAQVNKTDRNDARGIAQMMRVGLYRPVHVKTVASQEKRTLLAARKLLQGQNRAIENDLRGLLRSFGLKVGPTSAGSFDARVRQLVDGLPRLTAIIRPLLEARAALRTQFAVLHRLLLDLVRDDPVCRRFMTVPGVGAVVAITFQATVDIPQRFARSKAVGAHFGLTPKAFSSGETDYTGRISRCGDALMRATLYEAAHTLLTHTHRWCSLKAWGVRVAQRRGLQKATVAVARKLAIILHRMWIDETEFRWGAAPAAV

SEQ ID NO: 207791 - protein, 348 aa, unidentified
MIIIGVDFHPEFQQIAWVDTDSGEFREQRLGHRQEAENFYRALAGQKVRVGMEASGHARWFERLLAELQFELWIGDAAEIRTKRVRKQKTDRQDAQLILQLLLEDRFPQIWVPSWENRDLRQLLWHRHRMVQARTRVMNQLQAVALNEGLHCKKRLWREAGREQLESFALAPWASRRRRDLLELLDRLNPTIVELSQAIEQEVEKCPAAQRLQTHPGVGALTALSFVLIIGRADRFQCGKQIASYLGLVPLEDSSGNRRRLGHITKQGNSLLRFLLVEAAQVTVRSDPEWRSKYFHLAMRRGRKIAKVAMARKLAVRMYWMWRQGWDYEQWKKFGSHAGQPGHRDGVQ

SEQ ID NO: 207792 - protein, 343 aa, unidentified
MRLFVGLDVSLAKTAICVVSEHGKIVKEAQVASEPEELVRWAREQDGIIVAIGLEAGPLSQWLHRGLTLAGLDVILMETRQVKGALKAMPIKTDRRDAEGIARLLHLGWFRPVHCKSVSAQEVRALLGARKAIQQGMISLEMSLRGLLRNFGLKVGAISRGKYEYRIRELAGGNSMLEAATEPMLRARASLRQELAVLERHVRQMAQEDPVCRRLMSMPGVGAVVALTYKSAVDDPTRFTSSKNVGPWVGMTPSRNQSGERDVSGGITKAGDVNLRRALCQAATVMLHRGRSTWLRTWAAQVAHRRGGKRAMVALARRIAVILHRMWVDDTDFRSDNAMPHTA

SEQ ID NO: 207793 - protein, 448 aa, unidentified
MDRLASRCGLRKQLTLELRLPTWFQHASDLLGRRKDDMHYKAKHIYIGIDLHKKTHTAVVVNCWHEKLGEVTFENKPSAFPELIAFVKRFRKRGITPIYGLEDVGGYGRSLAVYLLEQKQQVKEVNSALSYAERKSHPSPQKSDSWDAECVAKILLNKLDILPEANPQDVYWTIGQLVTRRNGLIKALTSLKNQLHMQLSYHYPSYKKFFSELDGKCALAFWHKYPSPYLLKGETVETLAHFLRLTSNNACSTRKAEQLLAWIQADGDTTRTYQEQRDFLIRSHVRDIRFNKKEIAHVEGELHSMMQQLDLQLETMPGIDLVTSSALVAEIGDINRFPSADKLARFAGIAPVNFSSGGKGTNQKSRQGNRVLHGLFYNLAVQQVQVSKGSKKPRNPLFYEYFNRKKEEGKTPTQALVCVMRRLVNIIYGMMKHKTAFRLPEQVEKQAS

SEQ ID NO: 207794 - protein, 338 aa, unidentified
MYYTGIDLHKFTSYLTTVDSSGNIVKHADIKNVAHNFVQYFSDLGSDNISTVESTMTWYWLNDLLSSLQIPLVLAHAKFVKAIAYAKVKTDKVDSHTLAQLLRMDYIPVAHKISNEHRLLRDALRARLKIVQRHTSVTNSMHLLLAKYNLDSPDHLEGVARFQFDQLLELEGLLKEQILDLEKQLYPSLIPNDDIQRLLWIPGIGKMNAFTILLEIDDINRFADVKHFFSYCRLTPSARNSGGKSKQRSSKDGNRYLKMAFSDAAIHAVQHYPTIRAIHRSLARRKNKHVAKTIIAKEIATIVFYVLKHKTAFNNSFMGKELSQRKSLQWPRVVSPYA

SEQ ID NO: 207795 - protein, 402 aa, unidentified
MNAVGIDVSKGKSMVTIMRPFGEIVSSPFEIKHTSSDINSLIELINSVEGESRIVMEHTGRYYEVLAHQLSEANLFVSTINPKLIKDFDNDSLRKVKSDKADAVKIARYALDKWQNLKQYSVMDELRNQLKTMNRQFGFYMKHKTAMKNNLIGILDQTYPGVNTYFDSPARSDGSQKWVDFASTYWHVDCVRKMSLNAFIDHYQNWCKRKKYNFSKSKAEEIYGKAKELVPVLSKDAITKLIIKQAVDQLNSASTTVESLRTLMNETAFKLPEYPIVMAMKGVGPSLGPQLMAEIGDVSRFTHKSAITAFAGVDPGVNESGSYEQKSVPTSKRGSSDLRKTLFQVMDALIKTKPQDDPVYQFLDKKRAQGKPYYVYMTAGSNKFLRIYYGRVKEYLAALPES

SEQ ID NO: 207796 - protein, 406 aa, unidentified
MSVVRKRWLVSLHARIEGWPGYAGQSLRYGRRAVEQDTTYVAFDTSKEQLAIAIAEGGRRKEVRFFGTIASRPEAVRKLVDKLAKQHRRLAFCYEAGPTGYGLYRQIRALGYECAVVAPSMVPVRPGGHIKTDRRDATTLAALFRAGELTAIWVPDAAHEAMRDLSRGRQAAMEGLRRARQQLLSFLLRHGRIYPTKSHWTRGHRRWLAEQRFEHAAGQIVFEELIQAIEQAQARRERLEQQMVALLPDWSLREVVAALQALRGVALLSAITLMAEIGDFRRFTNPRELMAWLGLVPREHSSGASISRGAITKAGNGRARRALVEGAWTYRLPARISPEILRRNRLLPEAVREVAWKAQVRLCGRYRRLLRTGKPANVVTVAIARELAAFVWAIAITVMPPIEPRA

SEQ ID NO: 207797 - protein, 350 aa, unidentified
MIIIGVDFHPGLQQIASVDTDTGEFEEKRLAHREEAEKFYRDLASRGAQIRVGVEASGYARWFERLLAELQIELWVGDASEIERKRARKLKNDRQDAQHILQLMLKDDFPKIWVASWENRDLRQLLWHRHRLVQVRTRIMNQLQAVALNEGLQCKKRLWRGSGRQQLESFRLGRWASRRRRDLLELLERLSPTIEELSQAIEQEAERCPEAQRLMTHPGVGPLTALGFVLIIGQAERFQCGKQVASYLGLVPLEKSSGKRRRLGHITKQGSSIVRFLPVEAAQAAVRGDPQWRSQYLRLLMRRGRKTAKVAMARRLAIRLYWMWREKQDYRQSRSFGSHAGQPGNRDGVH

SEQ ID NO: 207798 - protein, 454 aa, unidentified
MSKKKVKNSKLPAELQKINLNAAGIDIGAESHFVCVPDGRSETTVREFKSFTNDLYKLAYWLVECKITTVAIESTGVYLIPLYEILEERGIEVRLVNARHVKNVPGRKSDVLDCQWLQRLHMYGLLEGSFRPTQDVCVLRAYMRQRDMLVKCSATHIQHMQKALMQMNVQLHHVISTITGVTGMNIIRAIVAGERSAKTLAKLRNECCKNSEEVIEQALVGNYREEHIFALRQALDLYDIYQTKLAECDAEAQKALEKFDCKINEKSKPLGEKKKKKRRDNEPYFDTRKYLYQITGVDLTLIDGIEGFSALKIISEIGLDMDRWKSPKQFGSWLGLAPGTKISGGRRLSSKTKPCANRAAAVFRMSANTLYRSDSAVGAFYRRQKARLGAPKAITATAYKLARLFYTMLKHGKDYNDAGANYYEEQFHKRVLSNMQKKARALGYELVKTASEIT

SEQ ID NO: 207799 - protein, 335 aa, unidentified
MDEAKKVIWAGIDVGKKTFVAALDDPAVKERKKVTSLPCRAFKRDQDEVEKFFHWIQEQFPEAEVRIVMETTGYYSEHLAGWIRQIRPDIAVTIENAGSIHAFIQSLNLPHKTDRLDAQAIARYGTERQPKPTKFPSKTVLALRELTRTRAALIKAKVEFKNRQETLSEPFTIEINKQTIALLEEKIKEVDLKIKKCAREDDEVRKEIVLMCSLHGVSFLSACEIIATFGSLKQYSAKELSALSGLAPYIKESGSSVHSSYMSRKSSGRVRQILYLDSIAGIPKIPALQEFQERLLKKGKKKMTVRVACMRKMLLILRSIVVHQRPYDENYQKKF

SEQ ID NO: 207800 - protein, 344 aa, unidentified
MKALKSHVAGIDVHKEMLAITVLIGELDGEPKEYQFESSTFTDDLMALGLKLKEMGVTDVAMESSGIYWKPVFNVFNPLGLKVVVANAAHIKNVPGRKTDMNDSRWIAELHRFGLIRASFIPDGEFQRMRLLSRHRTNLTEDLARVKNRIQKVLEDGNIKLSIVVSDIFGVSGLKVLKQIAGGYTHPNILITEVTTKIKRMEEMKKALTNCLTTEHCFVINVLMKQYEELKNRIEEGENELCKKVEPYAHLVEELDKIPGIDAILAMGIIAEASANMSSFKDERAFAAWSAVASGNNESAGKKKRAKCRKGNPALRKMLIQAAQKATTARNPFIALNTTNSAFA

SEQ ID NO: 207801 - protein, 411 aa, unidentified
MRRVIGIDVHRTFGEVVFWESGRLRHAGRIDMTRTALEGFGKTLLASDEVVLEATGNSMAVSRVLAPFVARVIIANPLQVKAIAQAHVKTDKIDAGTLASLHAAGYLPQIWTPDAETERKRRLVARRYQVVRHRTRLKNEVHSILHAHLIPKCPHADLFNGRGRAWLATQQLPDDERAAIDRHVRELDRLAEDLALLDCEIAQDAIEDSAVNRLMTITGVNLAVAAGIMAAIGDISRFNSPQKLVSYFGLNPRVRQSGLGAAHHGRISKIGRSHAHAMLVEAAWAAAKAPGPLHAFFVRIRARRGHQIAAVAVARKLTVLCWHLLTKGEDYLWARPALVANKTRAMQLQAGHPQQKGSRRGPTYAYNIKVLRDREMSIAAQAEQSYERFVSQWKPRRPRAGARAPQFGKTK

SEQ ID NO: 207802 - protein, 338 aa, unidentified
MTSFVGVDLHRNNFTYCIRENGEEKKIGKCEISELKCFASMLGKNTAMAVEATGNTFMFCRFLKAHVGRLVAVNPSQFKVISMSTKKTDRHDAKVLAEFLEKDMLPEVRMKDDLQAKISSLTQTREKLVQLRTVLKNKVNNLLAANFIVLKREELSTETGLRKALSFHFDPITDTEMFVVVEQIRSLNQSIEKLDKAIEDHGSKMDGFKNLKSIKGIGSKGAATLLSTIGNIHDFRSSKQLAAYIGIVPRVSNSNDTVCHGRITKNGSKIARTTLVQCALVAKRYSPYLHAFHESVKSRRGGAKANIALARKFLDIVYRTLKNNWMFEDFTQFKLVKN

SEQ ID NO: 207803 - protein, 353 aa, unidentified
MTEYVGIDWAYRRAAWCAMSAGGVIGAEGFTPADEDGLAKLVLRLGSEVKACLEMMSGAVWVRDRLRLAGWQVEVADARRVKGVAPLACKTDRVDARVLAELCRRDLVPALWIPSLEERELRERLRRRMHLVRLRTSAMNRICGLGTQWGLRLSAERLRRQGALELLAQRGVPAVWQRSIQEALAVIDLLEARIAPLEAELAPIARADQDVALLVTIPGVGEMLALTLAAEIADVSRFPSPGKLVGYAGMAPGVKQSGQSSRSGLPLSKAGSRTLRWAAVEAAQHAWRESNPWHQLYSDVAKRSGKNAAKSAVARKALIASWHMLSRREPFKPSRPRGGARTVPASSISVLAA

SEQ ID NO: 207804 - protein, 403 aa, unidentified
MNNVVGIDVSKGKSMVSVLRPFGEVVAKPFSVGHTGSELKELADYLKSLDGETRVVMEHTGRYYEPVARFLHDEGVFVSAVNPKLIKDYGNNTLRKVKTDKADSRKIARYGIDNWAELRQHTPMDTIRMQLKTLNRQQSLYTKTKTMMKNNLIALLDQTYPGVNALFDSPVREDGSQKWVDFATTFWHVDCVRNMSLTAFAERYRKWCKRHGYNFSQSKAVEVHAGAQDLIAMLPRDALTKTMVRQAIDALNAISASLERLKAEMQALAAQLPEYPVVMTMHGVGDSLGPQLMAELGDVTRFTHRNAITAFAGVDPGADQSGTHEAKSTRVSKSGAPELRRALFLVMDCLLKTQPQDDPVYRFMDKKRAEGKPYLVYMTAGANKFLRIYYGRVKEYLAQLENS

SEQ ID NO: 207805 - protein, 387 aa, unidentified
MSRNARVPIPVTTLDQDSTLVVVLELSARSWLVGARVPGIGRMSRYALAPSAEALAAWLGTAKARAGAAGRTVVRVVLAYEAGRDGFWLARYLEARGVEVYVIQPSSVLVDRRARRAKTDALDVEMLMRTLLAWLRGEPGVCSMVPIPDVAEEDGRRPVRERQGLIGERLALLNEIDGLLATLGITGYRPLRRDRRAQLAALRTPEGDPLATNAAARIGRILDRLELVMQQIAELEQVRDAVLAKEVASGEAETMIRGLARLKGIGAELATVLVWEAYVRSFPNRKALGAYAGLTGTPFASGSTTREQGISKAGNRRLRSSLVELAWLWLRYQPDSKLAAWFRSRTGSVGSRMRKVMIVALARKLLVALWRFCRDGVLPEGAALKAT

SEQ ID NO: 207806 - protein, 376 aa, unidentified
MREKLRFLGLDVHAETIAVAVAEANGETRSLGTIANREDSIRKFIKRLGSPEQLRACYEAGPTGFVLYWQLTQLGVDCAVVAPSLVPKKPGDRVKTDRRDALKLAHCHRSGDLTAVWVPDEASEALRDLVRQREAAKQDQLRARHRLTKFLLRTGQRPPLGLKPWTERYMRWLAQVRYAQPAQEVTRLDCMNEFEHMSDRVKRLEEAIFEVVKQAPQAMQELIRGLQALRGVAHISAVTIAAELGNISSRFESARKLMGYSGAFPSEDSSGDRIRKGGITKAGNAHLRRIVMESAWCYRHLPRVGEKLRKRHQGVPAEIIEISWKAQNRLYKPYRKLTMAGKDQRKVITAVGRELLGFIWAIAIKAESISTQPIAA

SEQ ID NO: 207807 - protein, 357 aa, unidentified
MPSSDVKYIGLDVHKEAIAIAVLNGAGKLVMESIIETKASTLLDFLHGLHGELHATLEEGTWAAWLYDVLKPHVLEVVVCNPRRNALLKEGSKSDKVDARKLAELLRSGMLRAVYHGENGLRALRELARSYEVVSKDLKRVMNRLKALYRAWGIPCTGTQVYSRRHREQWLKKIREAGVRRRAELFYQQLDGLQVLRRTVRGELLAESRKHQAVKVLRQIPFIGPLRAAQLVALMQTPHRFRSKRQLWTYSGLAVETHDSAQYRYMDGQLQRSKKPQQVRGLNQNHNHAMKEIFKSAALSATGRAGAFQDCYAGLLAKGMKPELARITLARKIAAITLTLWKKGECFDAGYVKRQAA

SEQ ID NO: 207808 - protein, 320 aa, unidentified
MTILNTQVVVGVDVAKAEIVIYRSDLKQIDIVANERSALKKWLKKLPRHSAIGLEATGIYHVETTELAHGMGHDVYIIDGSRVNKYRDSLGIRAKTDASDAQLLARYLANESDSLRIWSPPPEAYTQLKSLLLRRAQLIKWRVAMKQSWKAECGIDAAFDGFLAAVDDFEKEIRKTLKALTEGAGLQEQVERCQAVEGVGVLTGTAMATAFIRGDFVNSDAFVAFLGLDLRVRQSGQRDQQRRLSKRGDPEWRRLLHNSSMAASRSETWKPFYESYLARGFKATQALVILARKLARVMFSLMKNKTDYSPNTWSGGCPQT

SEQ ID NO: 207809 - protein, 366 aa, unidentified
MKKISTVQIFGNEIFKEQKLTIGVDLGDRWSFYCVLDEAGKIILEQKVPTTPEAIKQTFGKMPQSLIALETGTHSPWVSRLLTELRHKVIVAHAQKVQLITKSNRKDDRHDARTLARLVRIDPELLGPVRHRSAKAQIHLTVIRARAELVSARTALVNAARGLVKSFGERLPQCGTYQVSEKLAEGLSAELREVLVPLLREIESLSERIQEYDEWMEKIAQEVYPEVSLLKQVKGVGTQIALTYVLTIEDPYRFAKSREVGCFLGLKPGRRNSGESEPQKHISKEGDRYLRTMMVQGAHYILGPFGEDSDLRRWGRKLAERGGKNAKKRAVVAVARKLAVLLHRLWVSGEVYEPLRNSQKAMRAVA

SEQ ID NO: 207810 - protein, 408 aa, unidentified
MVIFVGVDWAESHNDALVMDGQGTVLGRGRFGVGVAGLAQLHALIADHAEGPEQVMIGIEIDRGLLVDSLVGAGYRVYGVNPLAASRYRDRHRTSGAKSDAGDAKLLADVVRTDHHNHRPVAGDSDQASAIRVLARAHQGLVWTRQRQVSGLRSTLRDYFPAALSAFGTDLASSDALAILGLAPTPRRARTLSRAKIAAALGRAGRQRNLEHRAAEIHEALRAEHPETSDAVADAFGAASAARVAVLVSLNAQITELEVALAERFDRHPDAEILRSLAGLGSVLGARVLGEFGDDPSRYADARGRKAYAGTAPITKASGRSLVVLARVARNRRLADACERWAFCSLTASPGARRHYDALRARGKTHSQATRQLANRWVGILHACLERREAYREEVAWPAAEQVTRFAA

SEQ ID NO: 207811 - protein, 319 aa, unidentified
MKKSAIRTADVHVGIDVSKDMLDVYVNSSNEFSQFENTVAGRKKLIARLQKIHPTLVLFEATGGYEKGILIDLAETDIPFRRINPKLIRDFARSLGVQAKTDMLDAKIIARFAAERKPEAQEKPTKTELELNDLLTWRRQLIDKKTMLKNQANDSRSTLVQEKIIEMMNLFEAQITEVEVAIGKLIESDDEWNRRDEILQSVVGIGPQTSRTLISELPELGKLESAQLIALSGLAPYNHDSGKFRGKRRIRGGRAAVRTALYQACTVARRFNPAIRVFYNRLAAAGKPHKVAMIACARKLLITLNAMIRSNTLWENRFC

SEQ ID NO: 207812 - protein, 353 aa, unidentified
MSRILAIDLGKFMSVTCLLDTTTNKTEFWTMSTDRRYLKVVLKRYKPDLVVIESCTIAGWVHDVCTSQGHKLLICNPNQEAWKWKHIKRKTDRDDALKIAKLAALDQLIPVYMPSERQREYRRLVKYRTVVRARGVRIKNNIRAIFQRRGLAIVAGRNAWALRRLDQIEQHRKPLCECGKDELWRGELDLELNELMRLRRQHDEVEKKLRELSTKDKRVQLLETIPGVGRRTAEVVVACLDDPRRFTNARQVSSYAGLVPRRYQSGLMDRQGRIHKRGPRLLRTALVEAAWIMQRYNPWAKAVYQRISANQKNRKKKAIIAVARKLLVRCWAMLLHETPWNGAAPVVSEAASA

SEQ ID NO: 207813 - protein, 346 aa, unidentified
MEHYVGLDVSLKLTAICIVDRTGKIEREGVVASDPEAIATFIKLHAPHVVRIGLETGATSTWLWTELNKMGLPVICIDARHAKAALKMQINKSDRNDAVGIARIMQCGWYKEVCVKDLDSHATKALLVSRALLVKIKRDIENQIRGLLKNLGLVIGRAKMNMFAVRGAQLAKDRSELLAAVDPLLKAREAVEQQILDLDRKVLRLARNNAQVRRFMTAPGIGPVTALCFLATIDDPARFKRSRSVGAYAGLTTRRYASGEIDWTGRISKCGDKMLRSYLYEAANVLLTRVAKWSALKAWGVKLAKRSGLRKAKVAVARKLAVILHRMWIEGTEFKWSSKEAADQPA

SEQ ID NO: 207814 - protein, 391 aa, unidentified
MDRAWAGIDAGKEMHWVHVLDVSGEKLLSRKVKNDEADLSALIDEVLSLAEEVVWAIDQPGGGATLLLGLLWQREQRVLYVPGLTVDRSRDTYPGESKTDARDAHVIADQSRMRPGLQELTAGQEELAELEILLSRRRDLVTDKSRSVTRLRETLLSAFPALERALDLNRRGALTFISHYQRPAQIRRVGRKRLAAYLRNRSVQGAEDIADKALEAATAQSVTLPAEEVAARIVAELAEEILSLKDRIDTLDEELEQRFFALPEARVLASLPGMGPILGAEFLVAVGVLSAFASADQLAAYAGLVPAAHDSGKRVGNHRRMRGGNKVLKRVFYQSAFASLRSAPESRAFYDRKRREGKKHTQALIALARRRVNVLWAMLRDGTTFEDRSAA

SEQ ID NO: 207815 - protein, 403 aa, unidentified
MNMNAVGIDVSKGKSMVAILRPFGEIVSTPFEVKHTVSGIRSLIEHIKAIDGESRIVMEHTGRYYEPLVRELSQADLFVSAVNPKLIKDFGDNSLRKVKSDKADAVKIARYTLDSWSELRQYSLMDEIRNQLKTMNRQFDFYMKHKTAMKNNLIGVLDQTYPGANTYFDSPAREDGSQKWVDFATTYWHVDCVRKLSLNAFINHYQKWCKRRKYNFSQSKAVEIYEASKEIVSVLPKDDLTELIIKQAVEQLNMASRTVEQLRTMMNDAASKLPEYPVVMAMKGVGKSLGPQLMAEIGDVSRFTHKGAITAFAGVDPGVNESGSYEQKSVPASKRGSGTLRKTLFQVMDALIKTKPQDDPVYLFMDKKRSQGKPYYVYMTAGANKFLRIYYGRVKEYLSSLPK

SEQ ID NO: 207816 - protein, 450 aa, unidentified
MMREVQEIEDEEHEQILERVCAIDVAKASGKVCTRVPHPSRPGARRTRVWDVDATTNAILELGEHLAGEGIEKVTLESTSDYWRIWFYLLEAAGLDVQLVNARDIKNAPGRPKTDKLDSVWQAKLTERGMLRPSFVPPAEIRRLRDYTRLRTDLTRERTRYWQRLEKLLEDSLIKVSTVASSLDTLSVRDMLEALIAGERDPKVLAGLARGRMKAKHAALIEALTGRFDDHHAELARMLLDQVDALNAQIGKLTTRIGELIAAIPSAQGVDADGTTGPTAGTSPGAPVLPAVARLDEVTGIGPDGAQAIIAEISLDMSRFPTAGHLVSWAKLSPRTIQSGTSSRSGRTGKGNPYLKGILGEAAAAAARTDTFLGERYRRIVKRRGKLKALVAVARSILVIIWNLLANPAARYHDLGSGYHASRTDTGKKVRNHIRQLEALGYTVALTQAA

SEQ ID NO: 207817 - protein, 411 aa, unidentified
MRVHHTVCCGIDVHKKSVTACLMWGPADREPQWEIRRFGTMTSQLKVMVEWLKQANCEIAAMESTGAYWKPVWNVLEGKIKLVLANAKHVRSLPGEKTDNKDGKRIASYLRHGLIRPSFVPPRDIRELRDLTRYRQKLLANGAAERNRIQKLLEDANIKLGSVLSDVFGVSGQRMLQALVNQPTTDVEQVAALAHWRLAPKIEQIKHALEGHVTAHHRFMIDLSLGHMQYIEQQILRLDEEIARHIQPYQKQFQLLQTIPGIGGNASAAVLAEIGPDVSPFDDEGKLASWSGMCPGNNESAGKKFSSNTRKGNPHLASTLVESAWASTHTKNCQFKTRYYRLRSRRGPQRAIVGIAHALLRTIYLVLKTGQPYQEPLRPALTEDRRDRKTERLSRELRNLGYDVILRIKTP

SEQ ID NO: 207818 - protein, 347 aa, unidentified
MQFYTKTHEHYCGIDLHTQMMYVCILNSVGEIVLHQNIPTDPAKFLKLIAPYREDVVIGVECMFSWYWLADECEKQGLAFILGHALYMKAIHGGKSKNDTLDSEKIARLIRGGNFPLAYVFPAPLRPYRDLLRRRNFLVRRRSEVLAHVKLTNHQYNLPPFEKHIGKKSNRTDLAERFKDPAVRKNVEVDLAVADHTHAMINELETYIVRHVKQFDPRTYYRLQSVPGIGQVLALVIMYEVGDISRFPTVQSFCSYARLVKCPKESAGKLYGYGGGKIGNAHLKWAFSEAMCLLMRESDRAKAFVAKHEKKHGKGKAMSILTHKLGRAVYFMWKRKDAFDENYFFKS

SEQ ID NO: 207819 - protein, 351 aa, unidentified
MIIIGVDYHPSFQQIAFLDQETGECGERELNHSDGEGERFYRELKQRGVSVRVGMEATGHSRWFERLLAELGFELWIGDPAEIKTKRVRKQKTDREDARLMRKLLLENRFPRIWVPSPENRDLRQLLWHRHRLVQMRTRIMNQLQAVAMNEGYRWKKKLFSEQGRTLLEKLSLAPWASRRRKELLELLDQLDPKITELTAAVEREARKRPEVLLLMTHPGVGPITGLVYVLVIGTPDRFPCGKQIGSYTGLIPCEDSSARRQRLGHISKQGNALLRFLLGEAAQAAARCNADWRRRYVHLMMRREKRIAKVAMARKLAVRLYWMWRNNWQYSQLVEFGSNAGKLGIVHGVK

SEQ ID NO: 207820 - protein, 342 aa, unidentified
MSVYVGIDVHRKRSQVAIIDAKGEVLANRNVPNGAEPILKVIGGLPPGTPAAFEACYGTSWLVELLEDYGFDPHLVHPSRCKAIASARLKNDKVDAAILGQLLRADLLPEAWIAPPPIRQLRALLRHRVALVRLRTRLRNRIHAIVADYGYDRPAGGYWTGPGRAWLAALELSAVSRELVEDYLGLIDAVQERVDRLDWEIRQRARSDPRVKVLTQLPGVGPFTALVILAEAGDISRFASARHLASWAGLTPTVRGSDRVAHYGHISKQGSAWLRWVLCEAAQTAKRSPEFAPAFQRIATRRGKKIATTAIARKLATRAWHLLTDAEHAAAPPPAAPPAAAR

SEQ ID NO: 207821 - protein, 310 aa, unidentified
MGSVIVGIDVSKDRLDVALRPSGEAFTVTRNAAGLEDLVLRLNAVAPHLVALEATGGFETVVAASLAAAKLPLVVVNPAQIRAFAKALGKRAKTDPIDAAVIAHFAEAVGPEPRPLPDEATRLLADLIARRRQIIAMMVAERQRESRATAKRLKKSIARLIRALEKELTSVDTDIDEAVRGSPAWREKEDLLASVPGIGPVIARTLIAELPELGQLTRKQIAALAGLAPWTRQSGKWQGKSFIGGGRPVVRTALFQGALVASRHNRVLKSFFHHLTTAGKPKMVALIAVARKLLTILNAILRDQKPWQTA

SEQ ID NO: 207822 - protein, 335 aa, unidentified
MQIYGIDLSKDKFDVNFVEESGKEIHKEVKQEFSSMVKFLESIHKDAIICAEHTGTYGDKLVFLCNQMNIPISLNPGYNIKHSFGMVKGKSDPVDARRIREYGERFSDKLEFKQYDSEDIMELRTLHALRTELVKAKKQLQTAIHSRNLLPFQSIKVNKFQSNAFNDIEERIKEIDNEIEAIIMANNDLKENYEYAVSVTGIGPVIATELIIKTGNFNDIDTARKASSYAGVCPFPNSSGKMVLKSKTSPFADKRLKSILYMGAKAAVEFDPSFKLYFQRKKLEGKPYYLIMNNVSNKLLRTIYSVVKNKTYYRKDYSCKDPRERNINSSNEKVA

SEQ ID NO: 207823 - protein, 473 aa, unidentified
MRKAQRKVKSRAKAKSKGLRWNKQSSLLEQINFHAAGIDIGSREHWVAVPADRDSQPVRCFGTFTSDLHALADWLLQCGVKSVAMESTGVYWIPVFQILESRGFEVLLVNARQVKNVSGRKSDVSDCQWLQQLHSYGLLAGSFRPAAQVCVLRSYLRHREHLVQQASTQIQLMQKALTQMNVQLHHVLSDVTGVTGMAILDAIVDGERDPLKLAQLKDPRVRSSVETIAKALTGDYRPEHLFVLKQACESYRFLQAQIAECDVEVDTVLSGWDAKVDLQQQPLPPTRKQNRRKSKHKPLSFNLREQLYRVTGVDLTEVDGLDVLSVQALISEIGLNMHRWPSEKHFASWLGLCPDHRISGGQVLHNRTRCVINRAANVLRMAAQSLKDSQSALCAFFRRLKARLGPAKAITATAHKLARIVYQLLKYGQNYVDPGAQYYEQRYRENVVKSLKKRAASLGYTLVENAAVNVHVS

SEQ ID NO: 207824 - protein, 412 aa, unidentified
MSGIIAGIDVHKRVLMVALGAAAGDGKPGRFERRRFGSTSLEIANLSGWLDEHGVTEVVMESTAQYWKPVWLALEGRFRLHLAQAWSNRAPRGRKTDFKDAERLVRRYCAEELTLSFVPDAEQRQMRTLTRRRTQLARDRIRIQNQVESLLEETRIKLSGVVSDLFGVSGLRILEALAGGETDASSLAALADARLQCPAQELTEALTGAVSPVHRILLRQHLDHLQLIDRQIEELSLQTGLLMQTSSTAIARLIDIPGIGVVAAQQIVAEAGPEASAFDSAPQFSSWIGVSPGKDESAEQNHSSRTAKGNHYLRCVLCQAAQAAVRAKQSVFQQKFHRLLPRLGYTKAIWAIARHLSVVIWKILHQGVEYVEYGTVRAPEAAKRRLQRIKKQLRELGYSDELKIIQPQPQTA

SEQ ID NO: 207825 - protein, 343 aa, unidentified
MHVNTIGVDLAKNVFQVHGVDSGGKVVITRQLRRKQVLDFFSKLPACLVGMEACGTGHHWAREISKLGHTVRLMPPSYVKGYVKRSKSDAADAAAICEAVTRPSMRFVPIKSADQQALLMLHRTRDLLVRQRTQLINALRAHLAEFGLVAATGREGLAQLAAIITDESNREFLPSAMKQALQTIVDQLTALELQIGTMDRAIHAHHHANDMSCRLETVPGIGVIGATALASTVTDPSGFKTGRDFAAWIGLVPRQHSTGGKERLGGISKQGDRYIRRLLVIGATAVVRQARQHPQKHPWIMKLLAKKPAKLVAVAVANKMARIAWAIMARGGYYRAPALAAAA

SEQ ID NO: 207826 - protein, 340 aa, unidentified
MNAATQTISAHVGIDVSKRKLDCAILLNGKIKSKVVNNDRPGFAQLNAWLQQRGAVTGSTHLCLEATGPYSEQVALALVDFGWMVSVVNPARIKGFAQSELARNKTDRADAALLARFCAAMLPSVWTPPSPAYRQLRAMVERLQALKDMHQQETNRLEAHHASGETTVLANVESHITWLDERIAELQRKINDHIDGHPELKQDADLIASIPGIGEATVAKVLAYAGDVRRFASAKALAAFIGICPRQRQSGSSVKGRTMISRTGHAGLRKALYMPGLVALRHNPTLKVFGARMKANGLAPKAVVGATMRKLAHLIYGVVKSGKPFDANFATNGVAIQDGI

SEQ ID NO: 207827 - protein, 345 aa, unidentified
MKVMIGIDPHKASHTAVAIGRDEDQIASVKVRATNRQVEQLLTWAEPFEKRTWAIESVGGLGYLLAQQLVAQGEEVLDVPATLASRIRVLATGRSNKNDPNDAHSIAIAALRAPALRSVEPADHGEVLRLLSKRNSDLGRQRSRVVCRLHSLFAELSPGGIAKEMYVSDAEALLAKVRPDSPAQQMRFDLVLELLDDVRRLDDQIKASHRRIRLAVRASGTSVTDVYGVGPIHAAMVIGYSGDVGRFANRDAYASYNGTAPVERSSGGRIVHRLSQRGNRKVNHALHMVGVTQIRNPGTEGRIYFERKVSEGKTKKEALRSLKRQISNAVYRQLLLDVERGPGGH

SEQ ID NO: 207828 - protein, 428 aa, unidentified
MDVEESNRLEEFRQLRKEIRGSEEHLIVGIDIAKDKHHAFFGTATGKTLLRRLIFENNIEGFGRLRTRTEAIKLQHRLSKVVFGLEPTANYHKPLAEYLIKCDHSVVLVSGVAVSKNRELLDGRWDKNDDKDSANVADLISQGKCLYYDYPSMPLRDLRNLLSLKRRLKKQEHGTRVRIRNHLLAQYFPEFDRYFGKGCSESLPIVKWCLNPSMIAGMEYDEFVQLIAPRMKTIGQEKRLKSIWGMAVDSIGCEVGQALDFEAKLMVENLQQMKDSIRAVEDHIEDICLGFPEYSYLLTIPGFGPDVSSKVLGAIGNPFRFDNGKQVLKLSGYDLSANRSGKTSESAVPVISKRGKAYLRYALYQAAFVASTSNRHFIIYYTNKLRGREREKGIKTKMKVKLAAKMLIIAWTLMKKKEPFDPEFLNIE

SEQ ID NO: 207829 - protein, 444 aa, unidentified
MHNKKLLEFMAALPYLSVGLDVGADFTWMSIALPNGSFIGKPFKIIHSDPQSRELAVTKIKEAQETYSLESRCFLESTGIYHIPLLCFLRDKGFDCSVINPIITKNSTNMNIRKLHNDKFDSKKAATVGLNASLKTSILPDDAVVDLRNLVRDYYYYKDLQSAIVLKLTAELKVAFPQYLTVFSKITTQSSLKLLLAYPSAKEMQQAEKEDIIGLIRSTARFGINYASKKYDAILAAAKDAELFGRALPSNAKRIKRYIESFQQYQEVLDDILVDLHDTVNSMEGTVIYDQIQLLQTLPGIAFLSSVVFIAEMGSFNLFDSPKKLYAYFGMDPAVKQSGKFTGDKVHMSKRGSSLARRILHMIALNNLKLTKGTKAPVNPVVYNYYTHKCVGKKKCVAVGAVMHKICNIIFAMLRDNKPFEIISPEEHCKRYAVEHPEAAHRVA

SEQ ID NO: 207830 - protein, 343 aa, unidentified
MKSTIYDHYVAIDWSIENMAIARMTKKSNKIILIDVPSDIVEMKVYLKNLKGSKILVVEETTTSQWLYTELKDCVDRMVVCDPYRNKLLSDGPKTDKIDAGKLAHLLKAELIKEVYHSTDKFLYLRRLVSSYEDLVKAGVRVQNQRYSLLRASGKRGYESPGTKLDSESDQFALACMDRQIDTYHQEKKGYEKEFGRLVKNYPEIRHQNSLPGIGPIGAVKIVARVVTPYRFSDKGRYLSYLGLIKLEKLSGGRSYGRKNSRYCRQLKSVYKTSTWAAIGGNNPINDYYEYLIKKKGYSEHNARHKTCRKLAILSLGTFKSGKKYQPYRQNHVKGKKEVTSVQ

SEQ ID NO: 207831 - protein, 420 aa, unidentified
MSDPMEQSEVILGVDTHLEVHVAVLIDVVGRVIATTTIPTTASGYEQLINWTSSFGRLTRAGVEGTGTYGAALARRMQEYGVQVIEINRPDRSRRRLRGKSDPTDAENAARAVLAGDANAIPKAQSGAVEAMRTLNMARRSAVKAKTQAINQLRALLVTAPATVRSSLWKAKPDQCIAGCVALKSLGETALLKALTRTLRLLAKRWMSLAKELRELDTALEELTRAAGRRVLAQFGVGPQTAATLLVTAGDNPQRLRSEAALAALCGASPLQASSGKTTRHRLNRGGDRAANNALWTISMVRMRSDARTRAYVARRTAEGLSSKEIQRCLKRYIVRELYPLILADLADSAHVTSHRSVNAPMESFFHTLKTELVMHFDYKTRDQARASLFEYMEVFYNRQRRHSTINYVAPMVFEVSTSA

SEQ ID NO: 207832 - protein, 381 aa, unidentified
MAPTRMPEAVIGLDVGKSSHWACVATRDGEVLLSAPVANREGDLDSLFGRFPDALVVVDQSRNIGALALARARAAGMSAAYLPGLAAHGAARLFAGDAKTDERDAMVIAKTALGIPDALLPVGDPGPTIAAARALAAQRNFLTCENTRNKNRLRSILLESCPDFEALVDLSDGPQLRLMASLGGAWSVADAGPRRAAALTRGAARGRIEALVRSTASSTRPDAAEDRAVKLLARRISENSAEIEAITAEISALLEGDDTYRCLLTVPGIGPKTASELAISIDIEDFPSHDRLASYCGLAPRNRQSGTSISSVTASRQGNKRLKNLLIFSCNCLTRTEGRWGDYYTRCRERGMPHGKALKALARKRLKVIYAVMRDRVPYAA

SEQ ID NO: 207833 - protein, 311 aa, unidentified
MDNIIGIDVSKDTLDVHRLTDGRHNNFTNDKTGHTQLLKWISLQPDTLIVFEATGAYHRRLEQFLSAKTIAFVKVNPKQARRFAQACGKLAKTDRVDCEMLAKMGAALQLKPKPVSAESPYDLRVLLSARRALIKDRTAAKARSATATHSIVKQQLARRLRQIESDIAKIDAAMLQSSQQDQQMSERLDILSSIPGIGTTTALMILVDMPEIGTLDSKQVASLARLAPMSQSSGKWQGKAWIQGGRPNLRHAIFMPALVAIRHNADFKVKYEQLVAAGKEKKVAITAVMRKMLVLANALLRDHRKWVEKAA

SEQ ID NO: 207834 - protein, 414 aa, unidentified
MDAAVWVGIDWGHDEHQVCVLDEKRNVVLEDRMRHSPEGLRALVAKVLSFCAPERIAVAIETPRGPVVDAFVDRGVSVYALNPKQLDRFRDRHSVAGAKDDRRDAYVLATSLVTDSACFWEVRVKDARVVELRELVHLHEELRAERIALGNRLRDQLLRYYPQVLELGSVYNDVWIWKILGAAPCPGSARKLSRTRVAQILKKHRIRRLTVDEVLSILRAGALIVAPGVTAAATRYIAALLPRLQIVAEQTEACSNDMERLLDEMQEAPSEGTDMVRVEPRDVQVVRSLPGVGTHVGATLLAEASTALHERDYHALRTLAGAAPVTKATGKRSGPFALVIMRKACNERLRDAVHHWAFATLTRDAKARAHYARLRARGHSHGRALRGLADRLLAMLVAMLRQGELYDPSRRQAA

SEQ ID NO: 207835 - protein, 341 aa, unidentified
MQITTIGLDIAKNVFQVHGIGAAEKVIVRKQLRRGQVMAFFEALAPCLIGMEACATSHHWARELMKLGHQVRLMPAKDVRAYVKRNKNDAADAEAICEAVRRPTMRFVRIKSAEQQGQLMLHRARDLLMRQRTQVINALRAHLAEFGITAAQGREGIKELLAIVVRDEGSRLPVDAYASLTVLAAQLRAVQTMIGSLEKRIVAQHRSNEASKRLETIPGIGVIGATTIAAVVPDPRVFRSGRDFAAWIGIVPRQDSTGGKQKLGPISKQGDQYLRRILIVGAHSVLRRARQQPEKYPWLTQLLARRPFKVVAVALANKMARIAWALLAKGGTYRTPQLVAV

SEQ ID NO: 207836 - protein, 345 aa, unidentified
MGAAGVRFLGEIASSPVRVERLVGKLASRYDKLHFCYEAGPTGYGLYRQIRELGHDCTVVAPSLIPKRPGERIKTNRRDAVTLARLLRAGELTAVWVPDAVHEAVRDLVRARAAAAQDLRGKRQQLLSFLLRHGRIFSGRQHWTLAHRRWLAEQSFAHPAQQVVFQDAVEAIAEALARLQRLEQQLVAIVPSWSMAPVVEAYQAMRGASFLVAVTFAAEIGDVRRFDNPRQLMAFLGLVPGERSTGETIRRAGLTLAGNRHARRVLVEAAWSYRHPGRVSPTLRARLEGLPKPVRDTAWKAQVRLCARYRRLSAAGKKLPVVIAAIAREMAAFLWAIARHVAPAV

SEQ ID NO: 207837 - protein, 354 aa, unidentified
MSNKSTASVATMGIDIGKNSFHVVGLDAHGAIVLRQKWSRGQIEARLAAMSPCLIGMEACVGAHHLSRKLQSQGHDARLMPARYVRPYSKGQKNDFRDAEAIAEAVQRPTMKFVATKTAEQLDLQALHRVRERLVGQRTGVVNQIRAFLLERGVAVRQGLRFLRTELPIILAKRTDVLSPRMMRIIEDLAGDWHRLDERIEALSAEITALARQDVACARLMTVPGIGPIISSAMVAAIGNGGAFSKGRDFGAWLGLVPKQISTGDRTILGKISRQGNRYLRVLFVQAAWVVLVKITDWDRYGLKTWIEAAKKRLHHNVLAIALANKLARIAWAVLNKERNFECVRSAATSSRPA

SEQ ID NO: 207838 - protein, 377 aa, unidentified
MSNCTRYLGLDVHAETITAAIAEGRGRIRSLGKFPNRPEAVRKLMEKLGGGRNLKVCYEAGPTGYALYWQLTKLGVDCEVIAPSLIPKKAGDKVKTDRRDAERLAQSYQSGDLTPVWVPTPEHEALRDLVRQRAAAKSDESRAKHRLVKLLLRHGLREPVESRAWTHPWWRWVQALKFEHEARQVTFADCIAEVLHMGERLARLDQAIERLVKSAPEHMRAVIEALQAFRGVAKLTAVTIVTEVGTFQRFRRPTEMMGYTGLVPCEYSSGERQAKGAITHTGNAHLRSVLVEAAWHARHRPWLNLRLKKLLPTLPAGVAEIAWKAQERLHRKFTKMIYCRKHAGVVATAVARELVGFIWAVGCMVEAQHTNTLARAA

SEQ ID NO: 207839 - protein, 361 aa, unidentified
MSSMPEPKPSDPDEVVLGVDTHKDVHVAAVLTSLGLLLATSSFPTTAKGYRQMLAWARGFGAVNRAGVECTGSYGAALSRHLSSEAVIVIEVNRGDRADRRRRGKTDTLDAESAARAVLSGRATAIAKSGDGHVEMLRMFKLAKASAIKSRGQATNQVKAILVRADPALRESMTGLSNPALFRRCAQLDHLDPTDPASAAAFTLRLLARRILELTSEIDELNAQIAAAVDVRAPQLLKRYGVGPDTAAALMLAAGDNPERLNSEASFAALCGVSPIEASSGKTQRRRLNRGGDRQANSALYTITIARLRWDKRTQDYVRRRVAEGKTRREAIRCLKRYIAREIYRELNWAISTSLTAQSDG

SEQ ID NO: 207840 - protein, 339 aa, unidentified
MPLYSGIDLHSNNLTAAIMDETGKRILKKRLANDREVVLATLEPYRTELAGVVVESTYNWYWLVDALMDHGYQVHLANPSAIQQYSGLKYLDDNHDAFWLANLLRLGTLKEGYIYPKENRPLRDLLRKRFHLVKLRTSLIISLKNILCRNFGLQMGSSRIKNESLDTFISGLPEGDNVILVVRTSKASIDFLTVQIDEVESAVLKQAKNKPFYPKLLELPGVGKILALTIQLETGPVDRFPKVGNYASYCRKVESRWLSNEKTKGRGNAKNGNKYLAWAFSEAAAHARCFHPASRKFYNRKLNQGNAAMAHNALAHKLARAAYYIMRDNVRFEEAKMFV

SEQ ID NO: 207841 - protein, 360 aa, unidentified
MNVIHYIGLDVHKKTISYCIKTADGRIVREGKLQALRSTLRSWAEDLREPWCGAMEATLFSAWIYDTLKPYTERLVMGHPAKMKAITAGKKKSDAIDARTIADLLRCDLLPSCYVLPPEMRDLRRLRYRNMVVQQSVRMQNKVAGLLMESGTPFVKDKLHGKKYFSALMKSLEEVPESVKDLLRMSRGAMEMFESTQKQLVERLLSERTLEQRVERLMGIRGVGPITALTWALEVDDPHRFSSIGNAVSYCGLTAAFRSSAGKEQRGPISKQRNAWLQTVLIEAAKLAPRWNPQLAALHARQLELGHPNRATLQVARKLVAYLLAVDKSGQPFQVLTPPPTVENAAKTKRRKRASIAKAA

SEQ ID NO: 207842 - protein, 370 aa, unidentified
MRIIGCDLHARQQTLAMLDTETGEVVNLTLMHEGNNVREFYSKLPRPVLVGIEATGSIQWFLNLMEELGIECRVGHPAQIRAAEPRKQKHDRRDADLILKLLAQNRFPAIWLPSKELLDLRALLLHRHQWVRMRVRMQNALQAIALANGLRRGPALWSYDGQAKIAFLPLLPHAAYRRSALQAMYKNMQSEIENLTRRVAEQAGNRCGARLLMTHPGVGPVTALATEVFLGDPQRFTDSKRLASYVGIIPREYSSGEHQRLGGVTKQGSPLLRFLWGEAGAHAARRDPELKRFYRRKLVQKGLGKARVAVARKLGIRLWIMLRDEIDYQEFCRRGQIQQKTVRPVVGMPETGNGAKSHRPSDEATRLPES

SEQ ID NO: 207843 - protein, 338 aa, unidentified
MNIVFLGIDLAKNVFQLCGLNQAGKPVYTKRTGRKELLQTLANIPACLIGIEASTGAFYWQREFEKLGHKVKVISPQYVKPFVRGQKNDGNDAQAIAVALMQPTMQFVPPKSPEQQDIQALHRARQRIVNHRTATVCQIRGLLLDRGIPIGSAVSRARRAIPLILEDAENGLSSRMRRTIAELYDLFNDPERRIHFFDKEIETVFRQSEACQRIAKVKGIGPETATAVVAAIGKGTEFKNGRHFAAWPGLVPRQHSSGDRQVLMNMTKKGDKHLRTLFIHGARAVVRVATNNNDGHMNQWVNQLKERRGFNKTTVAVANKNARIIWSMLRNDTGYQVV

SEQ ID NO: 207844 - protein, 423 aa, unidentified
MRGFGLDVHRDFCEVAIAENGEVRSAGRVATRLPALELFAGSLVEGDVVALEATSGTDRIVSVLQEHGIQVVVANTRKLKSITEAKAKTDRLDARTLAKLLVSGLLDEVWTPDERTRALRRLTNRRERIVRARTRAKNEAHGVLARNLCERPPVTDAFGKGGREWLAGLELPVDERLTLDGCLRQVDFLEVEVEVLDREIAKHALAWPEILRLMSVPGVNVQTAATFIASVGDIRRFSSPGKLVSYLGLDPRVRQSGNSPARHGRISKAGASEVRHMLGEVAWKVTMTPGPMRAFFERIRARRGPQIAATATARKLVVLFWHLLTSEQDYAFARPAMTRNKIRKLELLTGAPSQKGRKGIAGGKSKARYEAERELSRQAETAYRRLMSDWKSSGPSKGGAGATPGRASNQPSKGKAARQATSP

SEQ ID NO: 207845 - protein, 374 aa, unidentified
MTGTIRPEFSSVSEPTLYVAFELSQKEWKLAVTTGFGPTPWVRTVAAGDLRGVQEVIGQARARVGVAGARVVSCYEAGRDGFWIHHALTQLGIANRVVDSASIEVSRRARRAKTDRLDALKLVVLLVRVCAGDHRAWREIRVPTRADEAARHVSRERTDLVGEQTRLINQMRSWAALHGTRLPASRKGAWWIGLRDWSGAALPAEVQARFARADARYRVLEGQVAALDAQQQAAATAAPTSALGRLVQLKGVATTSANVLLQEGLVWRGFQNRRQIGGLLGFNPVPHQSGELTRDQGMSHAGNPRLQAISIQLAWSWVRWQPSSALSQWYRSRFGQGKRSRRIGIVAVARRLVIALWRYVTTGVVPTGAIVKVA

SEQ ID NO: 207846 - protein, 385 aa, unidentified
MKKDNIAKLQVTKSQIRRMAAKQRLTVGLDLGDRSSRYCILNEAGGKESEDQLATTKAGLEWLFGKMAACRIALEVGTHSPWVSRHLAGMGHEVIVANPRKVRLITQSVKKNDRMDAEQLARLARVDPQLLAPIRHRGVEAQGDLAVIRARAELVDCRTALINTARGLAKPMGERLKSCDADYVKESLAEGLSEATQNAIRPLLKSVEEISKQIGVYDKKIQEIEKRYAETKVLKQVNGVGTLIALTYILTLEDAERFVHSRDVGPYLGLTRKLRDSGESQPEMGISKAGDVLLRRLLVQAAHCILRDGAPDSDLKVWGLTKVQAGAKTGSGKKGSKRRKKKAVVAVARKLAVLLHKLWVTGEVYDPQYNRKAVEAAQGKEKAAA

SEQ ID NO: 207847 - protein, 422 aa, unidentified
MLGIGIDWAEEFHDVALGTVEKGVVEQFRIAHGPDGVAALVERALRLEPDPAEVRVVIETRHGLLVEALLDAGFTVLPVNPDLVARRRGPARKKDDAEDARICCLLALDRHAVLKTLVPHGPIAGELRAIGRDDERAARDQRRLLNRLRADLQTTYPAALIIAGKDLGAPTVLRLLERWPTQDELAAATRDELEAFARAGRHGWPGRFADRVTAALTVPSLPTRDYLVRAKAAGIRLAALQLLALHEARRGWEQRMGELLLGGRRTRRDHTVEDPDPGKAFPGGDIYLSFPGLGDRLAARVAGEIGEHLGQFDSPNGLQCYAGRAPVTRRSGKSDFVVARRLAHNRYLGDAVHQWAFCSLTRSGWAREFYDGKIAAGKSHHNALRALGNRWLEILWHCLTRGVLYDEAVHVANRNRALGRAA

SEQ ID NO: 207848 - protein, 437 aa, unidentified
MTSPCRFYLSKIQEVILLSFKIFRFNCCGLDVHKTWIYACIGITDSNGRTDYKQARFSSFSKGLKELCDWLAKYNCSEVCMESTGKYWIPVFNVLEKANNSVILAHPKYTKPQKGNKTDRKDAKWICDLFMCEMIKPSFIPPADIRHLRDLVRYRFKLTCMITGEKNRAQNCLTVSNLKLDDVFSDVFGKSSRSITEYMLAHPGEIFDVAPFVDSRCKTPMEEIQAAVDGAISPEQAIKLRQCLNHIDELEKHLEEIEREILRLSDKYQAALDLIRTVPGFDKNPMTSIQILSEIGGDMSVFPSAKHLVSWAGCCPRNDQSNKRIKSTRISRAGYYIKPILVQVANGLLRSEKHPEITGRYKRIKSHRGHKKAIIAICRMLLTAIWHILSDLKPYTAEGFLESRPVNKAKVLTTSQALNLLKQRGYTIKDDIVPAMN

SEQ ID NO: 207849 - protein, 407 aa, unidentified
MNAVGIDVSKGKSMMAALRPMGEIALRPKEYPHTEDGLEQMALAILALGEDTRALMEATGRYHEPVAAALHEYGIRVTVINPLFVKQSGGGSIRKVKTDKADAMKIAKYALDNWVDLREYTPMEAIREQLKLCSRQYNLYMKNVVALQNNLISLTDKTFPGVNELFSSPDRADGSQKWIDFVTTFWHCECINLTSEAAFMERYRKWCKRKGYHFSQRKAAELYMDSMGHITTLPRNSSTKLLITTAAKELASAKATLAVLRTEMTRLAQQLPEYETVRAMYGVGKTTAVQLMAEIGDVRRFPKRSSIVSFAGVDPAVDDSGKHISKSNPTTKRGSPHLRKTLYQIVCTYLRKAPADEPVYQFLDKKRADGKPYFVYMTAAQNKFLRIYYARVKECLIAADTKELSED

SEQ ID NO: 207850 - protein, 343 aa, unidentified
MGLIGIDSHKDILGCAETDENGRLIEYREINNTIEGHAEIKGWAQECDVRLVAIEGSGSYGRPLAKTLLAQDIAVVEVPPQMTAAARKGMRTGTKNDLVDAVLIAQIALRVEDLGAPKPAGPIEDLRNLVQYRRELVQDRNRAVNRLHSDLEQIRVGYHRDLTTSIGSTKSLERCRNMLAKDRTVHAQIARKRITTILALGREIKALTKQIHTAVQVADTPLLGIDGVGPIVAAEILTEVADLTRFATKSKFAMANGTAPLEASSGRVKRHRLNRGGNRQLNKAIHVAAIAQISRPDTEGRRYYEKRLADGKTKREAIRALKRRISDRIWTALQTTQPLVSLT

SEQ ID NO: 207851 - protein, 459 aa, unidentified
MDGFTENNCFPSSIEEHAHACKEPKAKHFNGQSAHRSMFVPLCVPEGQLVRSYGARGKGGNLSAGSPATESAMSMPNDLSRCLTEFDPRTTLIAVVELSLSSWLIAGLLPGIERNPLKKMEPNEAELLRLLEKWRDEAVKVGSTINRIAVAFEAGRDGFWLARWLRARGIDVHVIHSSSVAISREHRRAKTDRLDTALLMRVFAGWLRGERGHCSMVAVPTMEEEDAKRPTRERENLVGERTRIINRMKSALARLGIRGFKPELRKAPQRLESLLTPEGPTLPPNILEEIRRDMDRLKLVREQIDVIEKARLEKLATAPVSGPHAMVRLLSSVLGVGIETADMLVNEVLSRNLRDRRAVARYAGLTGAPDESGKKRREKGLAKAGNARVRRGMIQLAWRFLLFQKESALVLWFRARTEGPAAGRKTKFIVAFARKLLIALWRMVTTGEVPAGVVLRPAT

SEQ ID NO: 207852 - protein, 313 aa, unidentified
MYYIGIDVSKKDLAVFNGKKDLKFINQEGLRPFKKYLKGKYKNFSDLVIIFEPTGIYSFNLKEFCAENSIKAYIVNPKRSHSFARSLGIRPKTDKIDARILYQFHKLIDAKDIKVPKVDQQTKVLSSYLTSYEFAVKQRVAISNHLESLRDEKLVSLLKKELKRARKLEDKIFHDIKEYIRQNQNLREDYERLLTISGVGEKMAIALLTLFKTYQGTNRAQITALVGLDSTKRESGSSVRGRAKISKNGKAIYRKVSYLPAICATVHNQKIKIFYQRLLAHHKPKKLAIIASMRKILLIAHAMYRDKTEYMAV

SEQ ID NO: 207853 - protein, 357 aa, unidentified
MGEGSWVGLDVHARKVVAGVLDGGSGELSTVRVAAGREETVAWLGTLPAPVRVAYEAGPTGYGLARACAAAGIMCTVAAPSKIGRPSGDRVKTDRRDAERLARLLRLGELVAVRVPAPHEESARDLVRARDDVRADLMRARHRLSKLLLRHGLVYDAKAWTLAHDAWLRRQRFVSRPLALAFDECYGAVMQAKARRDALDVAIAELAVEAPFAEVVGRLCCLRGVSTLTALGLTVELGDWTRFRPQSLGPFLGLTPSEDSSGERRRLGGITKTGNTHARRLLVEAAWHQRRPLRSSPALERRRHGQPLVVRARADQSARRLHARWQALEGRGKRRTIVAVAVARELAAHCWALATMD

SEQ ID NO: 207854 - protein, 343 aa, unidentified
MDYFAGLDVSVKDTNVCIVDDTGKIIREVKVASEPDALLQVLRNATYRFKRIGLEAGPLSQWLFSALGEANLPVICVETRHMRAVLQAQINKTDRNDARGIAQMMRVGLYRPVHVKTLRSQKLRMLLTHRKLLQSKAIAIENDLRGTLRNFGLKVGMAGATKFEGRIKELIENLPDLAVLVEPLLVVRRVLREQIGVLHRRLLAVVRDDDVCRRLMTTPGVGPVVALTYRATVDVPARFRKSKSVGAVFGLTCSKYQSGEIDRNGRISRCGDEMMRVMIYEAAQSMLRSKKWSWLKAWAMQIARRRGMKKAIVALARRLAVIMHRIWVDGTEFRWTREATAAA

SEQ ID NO: 207855 - protein, 331 aa, unidentified
MMTIERVEVPVPELWAGVDVGKERHHCVVINAQGERLLSRRVLNDETTLLKLIADVLEISQDVLWAVDLNHGGAALLIALLVNRNQPMTYLTGLAVHRASGTYRGEGKTDAKDAFVIADQARMRNDLGQLRPGDESAVDLRILTTRRADLVADRTRQINRLHAQLLEIFPVLERALDLTNQGPVVLLTGFQTPAAIRRAGAKQIETWLATRKVRNAATLAATGGDLAAFGSADRLAGFAGLAPAPRDSGRVSGNLRRPRRFNRTLLRAFYLSALASLRGCPASRTYYWRKRHEGKNHKQALLSLARRRVNVLWAMIRNGARYQATPVTTAA

SEQ ID NO: 207856 - protein, 334 aa, unidentified
MQNITLIGIDLGKHSFHIHCQDKSGKALLRKKFTRTKLMQFLATCPPSVVVMEACAGAHFMARRISDFGHETKLISPQFVRPFVKSNKNDFVDAEAICEAASRPSMRFVQPRTEPLQAMRALHRVRESLIRDKVKTTNQIHGFLLEFGISLPTGDAVIKRLSLVLAEHEIPEYLSRLLVRLHTHYLYLVEQIAELESELSQSINADDTAQRIMTIPGVGPIPASLLSSQPGDGKQFSCSRDFAASTGLVPRQYSTGGKLTLLGISKRGDKNLRRLLVQCARSFMMRLERQHGKLAEWVREQLNKKHSNVVACALANKLARIAWVITTQQKEYQA

SEQ ID NO: 207857 - protein, 377 aa, unidentified
MKRIKFVGLDVHAETISVAVAEQGGEIRSLGVIPNREESIRKLVKKLGPVEELRFCYEAGPTGYALYWQLIRMGAKCEVVAPTLVPVKAGDRVKTDRRDALKLARNYRAGELTAVWVPDAAHEALRDLVRAREAAKKDELRARHRLSKFLLRHGRRPPMAVKPWTMKYLEWVKRDVYFEQLAQEVTLLDYLHEVEHGAARIARLDGAIEEAVKLAPPQMRAVIEALQALRGIAQVSAVTVVAELGEFSRFARAKQLMGYGGIVPSEDSSGERTRRGHITKAGNAHLRRVIVEAAWAYRHRPAVGTTLRKRQEKVSEEIKEIAWKAQQRLHERYRKLLAKGKNKGVVVTAVGRELLGFIWAIGIQVETAQKESLQRAA

SEQ ID NO: 207858 - protein, 371 aa, unidentified
MKQYSTFVGMDVHKNSIEIAIAQRGRNGEVRNYGKIDGTLEALDKVVRKLVSKGGPLHFVYEAGPCGYEIYRHLTAKGYDCAVVAPSRIPKKSGDRIKNDRRDACMLARLDRAGELTPVYVPFAEDEAIRDLTRAREDAKIDEKRSKQRLLSFLLRSGLRYTGKKNWSKAHMRWLSDIKMPHPSQQIVLQEYIDTITECSLRVHRLTDQIRQLLPQWRMFSVVKALQALRGVSLIVSTTTIAEIGDLKRFKNPTELMSYLGLVPSEHSSGEKTRRGSITKSGNGHVRRVLVEAAWAYRLPAKVSRVLLKRQEGLPKEVCEISWKAQVRLCSRYRRLWAKGKPKQVIVTAIARELCAFMWAIANEIQVSAAT

SEQ ID NO: 207859 - protein, 318 aa, unidentified
MTTWIGIDVSRLHLDAGWIDEQGKKVHRRVLNSEKGFAALLQEVSATAHFVMEATGTYYFNLALFLHQAGRFVSVVNPAQIKGFLKSDLSRSKSDKSDSFSIAKFAGERQPAAWNPHERDVYELRQLMTLDDRLQHQIVELGNLEEAFSAMVYYSPEAILKTRDLIHDLKGNRAQLQAKMEQIADKLCPREVEIISSIPGVGKASAIRVAAVVGDFNRFESSRQVVSFIGLSPMLKQSGTSVKSKGHISRMGGRRIRGALYMCAMNAIRRNPQCRAMWNRMKAKGKHGKVIMVAVMSKLIRQMWAMVTTNQVYNPNFA

SEQ ID NO: 207860 - protein, 343 aa, unidentified
MKDTIYNHYIAIDWSIENMAIARMTKKSNKITAIDVPSDITDIQAYLKNLKGTKMLTIEETTTSQWLYTELKDYVDRILICDPNRNKLLNEGPKTDKIDATKLVQLLKAGLMKEVYHSTDKFLYLRRFVSGYEDLVKAGVRLKNQRYSLLRACGKRGFEGAGTKLDSEGDQFVLDCMDRQIEAHKQEKESYGKEFERLAKDYPEIRHQKSLPGIGPIHAVKIVARLVTPYRFADKGHFLSYTGLIKLEKISGGRSYGRKNSRYCRQLKAVYKTSIWAAIGGNNPINNYYEYLIQEKGYPEHNARHKACRKLAILSLGVFKSGKKYQPYRRDHVKGYQELKSGL

SEQ ID NO: 207861 - protein, 361 aa, unidentified
MQSTTIIAFDQHAATTVAAVLVPGQRTPALHTLTSDSPTILRFVERLRRQGPLRCCYEAGPCGFELQRALTARQVPCDIIAPALIPRRAGDRIKTDRRDAGQLAVLYRAGALTAIHIPSEHEEAARDLLRCREDIRADLLRARHRLSKFLLRHGRRFTATKKAWSKRHDAWLRAQTWPIAALDQTHRAYLRAVDEVLARLRDVEQDLRALLDLDPLHSRVQRLRCFRGIDDLTALTIAAELGDPRRFATAPSTMAFVGLVPSEHSSGAKRAQGGITKTGNAHLRRVLVESAWHYRHHPFVSATLRTRQRGAPADVIARAWTAQQRLHRRYQRLAARGKPQQHIVTAVARELTGFVWAALTR

SEQ ID NO: 207862 - protein, 346 aa, unidentified
MMLIGCDFHPSWQQVSWLDTETGETGEQKLVHATGDAKQFYQQVAAPVLIGMEATGNSQWFIEMVEDLGHQIWIGDAAQIRASYVRKQKTDKRDAGHILKLVVEGRFPKLWAPDREQRDLRQRVLHRHKLVMIRSRVKNELQHLSLNKGMQRKRTLWSQAGQKLLRELPLKPWAACRREDLLGLLTMLDQQIRKLDRAVQHAAEENPQSKLLMTQPGVGPNTALAFVLTIGDVGRFPRGKQVASYLGLIPREESSGGRQKLGAITKQGNRMLRSLLVEAAQAAVQHDPGLRRQYRHRCHQKPKAVAKVAVARKLAVRLYWMLRTQKPYPEIVRIESSSGVALVGAS

SEQ ID NO: 207863 - protein, 363 aa, unidentified
MEEEKRRYVGIDLGKREYTMAVIGRNRKMTIHHGKTCIHGRQALYRLLEPTDKIALEAGNLAFLMAREVMEQIGCEVRVLNSAKLPFIWDAPTKTDKEDAMKLAHLVEERRDEKLPIVPLPSEKEMERRKTISSYGREMNNRTRLINTLHAIFVHQGHTTIVKKNLATAERRRQAIKVLTGHEREEAEWLLKYLELHEQRINELRVRIKEEAKNDEDMKRLQSIPGIGPIVAYAYVAHVGDGSRFSKGAQVSNYIGFVPRLDYSGTIQRHGHITKRGNGYLRGLLVQAAWTMTLSKKGGALSTRYKYYTLCQEVSKKKTIVSIARKLAELMYSVLRNKTIYEVRKWNGPKNNPAVITGQTMCA

SEQ ID NO: 207864 - protein, 478 aa, unidentified
MANPGCRVQKVDNRMQGSGDKTSNTDSEVEVDGLPVVRPNVAGIDLGSEKHWVCAPRVDGAGREVEQFGATTPELERMVAWLKKRKVESVAMESTGVYWIAPHEVLDRYALEVVLVNTRELGRVPGRKKTDRVDCKWIQRLHSCGLLRGSFRPKEQVCMLRTLVRDKGNLVAEAADWLRRMQKSLDQMNVRVHRAVADIEGVTGMAIVRAIVAGERDPRQLAKLRHPGCHKSAEEIAEQLSGHWRADHLFSLQQALRMYDAIQERIADYEQEILRKLAEMEREECRGQEAPKLKNPRKAKTIRNRGQEPMRQALYRISGVDLTGIDAIGVETVQAVLSEYGPDLSRFPTEKQFISHITLAPHQPMSGGKPVKKKKKRGSASSRVAAALRMAAVSLRHSNTALGAYYRKIARRTGADVAVFATARKLATLIYRLLRWGQPYLDEGAEAFEKRHQQVRIQRLTAMAKDLGYQLAPQIAQA

SEQ ID NO: 207865 - protein, 419 aa, unidentified
MSFKILKNNCCGLDVHKTWIFACIGITDSHSRTEYKQARFSSFSKGLQKLCDWLAKYNCTDVCMESTGKYWIPVFNVLEKNNIWVTLSHPKYTKPQKGNKTDRKDARWICDLYMCGMVKPSFIPPADIRGLRDLVRYRFKLTCMITGEKNRVHNCLTVSNLKLDDVFSDILGKSSRSITEQILQHPGETFDVAPFVDRRCKTPIEQIQAAVDGSISAEQAVKLRQCLDHIDELEMHKAEIEREIFRLSDKYKEALTLIRTVPGFDKNPMTAIQVLSEIGGDMSVFPTAKNLVSWAGCCPRNDQSNQKIKSTRIARAGSYFKPVLVQIANALIKSKKHPEITTRYRRIKARRGHKKAIIAICRMLLTAIWHILTDLRPYTPEGFLESRPVNKSKVLTTSQALHLLKQRGYIIKDDVVPVS

SEQ ID NO: 207866 - protein, 338 aa, unidentified
MSLYAAIDLHSSNSVLAVMDGQGQPLLQCRLPNDLPRLLADLAPFRDELVGVAVESTYNWYWLVDGLMDHGYAVRLVNTTAVPQYDGLKHGDDHSDALHPAQLMRLGLLPEGYIYPREQRATRDLLRRRFALVRQAVRLMLSIQSSFSRTTGKQLSSHALRQLTPTQLVELFPDLATRYGVLIQFKLWLTLQDQISALEQWIGKDIAQPDLLARLRSVPGIGPILGMTILLESGDIGRFASVGDYASYCRMVESVRLSNGKRKGHGNRKCGNRYLCWAYVEAANHAIRFDPLIRRWYDRKRARKHRVVAIKAVAHKLARACYHMLREGTPFDPTRAFG

SEQ ID NO: 207867 - protein, 337 aa, unidentified
METRYFLGIDVSKDKLDAALTLDGKNYFETQVENASKAITLWFKSLQKKFSFASDHLVVCLEHTGVYCNPVVMFLHAKGVKVCMESALRIKRSIGLARGKNDRVDARRIACYAFKNQHELTVWRPQRPCIQRVKALLTMRDRLVKAKGQLALPINECENFVDQDIHREMQKHSKKALAAIEQALDQIEKTIHQLIKEDHSLSQQYNIVSSVPGVGLITALTIIVTTDEFTKFKNAKKFACYAGVAPFEHTSGNSVRGKTRVSHLANMTVKKLLHLCSRSAVTHSEEMRHYYERKAEAGKNKMSVLNAVSNKLITRIFACVKHQRLYQKNYKMALFES

SEQ ID NO: 207868 - protein, 331 aa, unidentified
MINKTAQFAGIDVGAEELVLVIRKNATSMKAQKFANTPAERARLVAKLAKLPGLRVCLEATGAYHLELAVALHDAGVRLNVVNPKAAHNFAKALMKHSKTDAIDADTLAQFAERMPFTVWVRPSPQALTVRSFARRINALTRQKAMTKNHLHALSFGPDLPKAVLADAKLAIAQLEKRLASLSREAQTFIGKHEDLKRVFALLLGIKGIAATSAIALMGELLLLPKGLTHKQWVKYAGLDPRVFDSGKSVHKAPRLSKAGNRHIRQALYMPALSAKQHDPYVKAFFQHLIEKGKKPLQALCAVMRKLLHAIHGMLRDNQPFDNTRFYATAA

SEQ ID NO: 207869 - protein, 334 aa, unidentified
MENVALIGIALGKHSFHLHCQDKSGKAFQRKKFTRTNLMQFLATCSSTVVVMEACAGAHFMARRISDIGHEAKLISPQFVRPFVKSNKNDFVDAEAICEAASRPSMWFVQPRTEVQQAMRALHRVRESLIRDKVKTTNQINGFLLEFGISLPAGDTVIKRLPLVLVEHEIPEYLSRLLMKLHAHYLYLVEQITELESELNQSIKTDDATQRIMTIPGVGPITASLLSSQLGDGKQFSCSRDFAASTGLVPRQYSTGGKSTLLGISKRGDKNLRRLLVQCARSFMMRLEHQQGRLAEWVSEQLSKKHSNVVACALANKLARIAWAITTNHNAYQA

SEQ ID NO: 207870 - protein, 348 aa, unidentified
MKIIGCDFHPSYQQLVLWDQVTGEEVQKALPHDRQEEVRAFYAGLHGPVCVGLEASGQSQWFERLLTELGHEVRIGDAAKIRAAADRKQKTDRRDAQLLVRLLAEERFPQIWVPTPAERDVRQLLLHRHKLVRMRTQVKNQLQALALNQGVQRKRKLWSTAGRQQLAGLSLLPWSSRRRTELLRLLDQLDAAVTELDRAVTEQAHTRPAVRRLMTHPGVGPVTALAFVLTLGPAQRFPRGKQVASYFGLIPSEHSSGGKQRLGHISKQGSSFVRGLLVEAAQSAVRHEPQLRREYQRLAQRKCRALAKVAMARKLAVRLYWMLREEKDYAQLFQGSYAEQPESSCGRS

SEQ ID NO: 207871 - protein, 411 aa, unidentified
MEVVYEHCCGLDIHKKTVVACVVVSGSGKQPHKEIRTFNTMTADLLELADWLTAQRVTHVALESTGVYWKPAWNVLESSFTLLLVNARHIKQVPGRKTDVKDCEWIADLLRHGLLRASFVPDRPQRELRELTRYRTTLVRERSAERSRIQKTLEGAGIKLGDVASDVLGASGRQMLEALVRGVTDASLVADMAKGSLRGKRPQLERALTGEFGAHQRFLVGQQLAHLDGLDVLIDQLSQEIGERLRPVQDKIERLDAITGVGLRTAQVFLAEIGTDVKRFPTAAHLASWAAMCPGNNESAGKRKSGRTGKGNQWLRTALVEAAHAVSHTKDTYLNSQFHHVAARRGKKRALVAVGHSILRIIWHLLEHDCEYVDLGSRYLEERDRQQIQRRLVRRLEDFGYKVKLEPASAA

SEQ ID NO: 207872 - protein, 360 aa, unidentified
MTTTTTQTATAADTILALDLGKYKSVACVYRAADDLRFTTVTSGRQELGRLIDTCQPAIVLFEACLLAGWVRDLCADKGVKCLVANTTSEAWKFKHLKRKTDRDDALRLAEVYRLGKFPAVALPEKEVREKRGLIEARQKLVGRRVALQNRVRAILVSQGLPAPRGARAWAAPGLAGIAAYAQPIGECGPLELWRGRLHLALTELGHVKGLLGQAEKKLDDMGKTDERMKLLDTIPGVGPRTAEAVVAFLPAPERFRTAKQVSAYGGLVPRQYQSADTDHRGRITKRGPRTLRKLLVECAWVMLRYNRWARSVYERLTHGGRSRKKQAIVAVARKLLVRCWAMLRDGTAWRAEPAGAVAR

SEQ ID NO: 207873 - protein, 385 aa, unidentified
MQTPNDLSQSRIVLKQDSTLIAVIEMSLSSWLVAGIVPGVERQPLKKLAVDESALLKLLNRWREEAEKAGRKIERIAVAFEAGRDGFWLARWLRARGIEAHVIHASSVAVSREHRRAKTDRLDTELLKRAFLGWLRGERDHCKMVAIPTTKDEDAKRPNRERQSLVGEQTRIVNRMKAALIRLGIRGFNPKLKKAAGRLEDLRTPEGEPIPPNTLAELRRDMERRRLLSDHIRQIEEARLERMEQAPGDGPHAMVRLLARVIGIGIETSDMLVHEVLSRRLRDRRAVARYAGLTGAPDESGSKRREKGLAKAGNARVRRGMIQLAWRFLLFQKDSALAQWYRTRTEGAGKKRKTMIVALARKLLIALWRLVTTGEVPAGVVLRAA

SEQ ID NO: 207874 - protein, 374 aa, unidentified
MSKNTRYLGLDVHAETITAAIAEGRQKIRGLGQFPNRPEAVRKFIEKLGGPNGLKICYEAGPTGYALYWQLTKLGVECEVVAPSLIPKKAGERIKTDRRDAEKLAQCYQAGTLTAVWVPDGAHEALRDLVRARGAAKDDESRAKHRLVKYLLHYALRDPEGCRAWTHPWWRWLQALKLEHEAQRETLLAHIAEVLHQGERVSRLDKAIERAIESVSPEKKAVINALQALRGVAKLTAVTIVTEVGTFQRFRKPTELMGYTGLVPSEYSSGGKESKGRITRTGNAHLRHVLGETACHTRHKPWLSNRLKQVLPTLPPGVSEIAWKAQERLHRKFVKMTYQNKQPGKVLTAVARELVGFIWAIGSKVEREALAKAA

SEQ ID NO: 207875 - protein, 420 aa, unidentified
MPNIEIGVDSMVKENFIYVGIDLHKETHTVVMIDCYNQKLGEITFPNRPAAFPKLVTKVKKCNTDGKEVVYGLENAYGYGRALAVWLIDKGYLVKDVNTAISHRQAKHRGAMYRKSDSDDAKAIALATLNMLDKLPDACPNDAYWSLGQLVHRRDNIMKQRTRLVNQLHEQLCIAYPSYKQFFNDISRPTALYFWEHYPSRKYLKGKSVEDLRAELVPVSHNKCSTKTCEKILDAVASDKVKNNAYQDARDMVTLSIVSDLQHYDSQLAEVDKMLEQMYKMLGCTLTTIPGVNVITAVKILAEIGDIKRFSNANKLAQFAGIAPLHLSSSGKGKDLATKQGNRRLQATIYFLAIQMVQVSSNGTPRNSVVRAYYEKRKAEGKTSQQALICISRRLISIIYGMLKHGTEYRMPVVESAGEK

SEQ ID NO: 207876 - protein, 427 aa, unidentified
MGNEEANRYEAFCQFRTTVRGCRDYLLVGIDVAKERHHAFFGTATGKTLLKRFIFDNDNKGFEQLLERCQQLMVAHCCKRVAFGLEPTGNYHKPLAHWLLEQGQLLVLVSNKAIADNRESLDGRWDKHDTKDSANVADLMAQGKCQFFEKPSAELSALRSLLSLRKRLKRDEHSLRMQIRNGLLVRHFPEMDRLWGSCLKENLAIVRHCLDPRTISAMPFDDFVRRVTDRDRGLRQVKRLQRIHEAAAVSVGCPMDDAARFEARQLVDRLNDLRERIENTEERIAHLCRGFASYRRLLTIPGFGPYIASQLIARIGNPHRFAGRKQLIRLAGYDLNAKRSGKTSDTAVPVISKRGNGDLRYALYQAALIASYHDHGFRALYTRYLQGRERERGIKTKMRVKLAVKMLVIAWCMMRDDKDYDPALLQV

SEQ ID NO: 207877 - protein, 407 aa, unidentified
MDVHRDFLIACIAATNAQGVTEYQSRRFSTYTGSLRELRDWLLANDCKDVCMESTGKYWFPVHNILEESCHVVVSHPKFVKAIKGKKTDKKDAQWIADLFKHDLVRGSFIPPKDIRQLRDLCRYWVKLSSYMTGEKNRAQNCLTVSNFKLDDVFSNVFGKSASAITTQLLEHPGEQFDVAPFVDGRCKTPIAQIQEAVDGIFTYEQAEKLKIIRGHMDSLERHMAELESLILEIAQNYLPQIELLLTVPGIHDAFTAIRILAEIGADMTVFDTSKHLCSWAGLTPQNAESAGKKKTTRIGKSGAYLKPLLIQVALAASRGEKHPEIYGKKQALQKRRGKKKAIVAIARRLLTAIYHILSKNEPYNPAAYIQEDKNPMARQISQEKAFEMLARMGFIVSNPSPLSSSG

SEQ ID NO: 207878 - protein, 343 aa, unidentified
MIKVGLDVHAEKIAVCVQLDGATPQPAQLLMRETLMPWLAKLRGRHPGAAMVSCYEAGPLGYALHRELLAMQVTNYVVAPQRLDDRGKRQKTDRLDARALLERLDRYVRGNRHALAIVHVPTPEQEQLRARVRLRDQLAKTRRQFEARGRSALLLQGIRVNGPWWRPARWKAIAAELPAWLQAVVGVWQQLAVTADAQERTVRAELEAAAPAALPRGIGALTWIVLAREILDWARFKNRRQVASYTGLCPGISQSGGKSRDGCINRCGNRAIRHALLELVWRLVRWQPQYPPVRALVDGALSARQRRKQAVAAARHLAIDLWRLATGRCTPAQLQLDAAFAPV

SEQ ID NO: 207879 - protein, 378 aa, unidentified
MDIPLWKSAPVDVTIGTPFIFERGDQMNEVKGVVAVLGIDLAKRVFALHGVDRDGKVVLKQVVSRSTLPRLIAQLPPCLIGMEACSGAHEWARQFAQHGHMVKLMAPVFVTAYRKAGKNDDNDADAICEAVGRPNMRFVPVKTRAQQALLSLHRVRQGFVEERTALINRLRGLLAEFGFVFAQRHGGLRAVPSALEGLPALAKRAVDDLLEHLRTLNERIAAYDLEFKHLAAQDDAAKRIMTIPGVGPITALALVATLGNARDFKNGRQLAAWLGLTPKQHSSGGKIRLGPVTKHGDGYLRTLLVQGARAAMQHASRAQPTRLSRWATNLVTRRGYHKANIALAAKDAASYGQYLRAAVSFNRTPPQRRAGCSVAHEH

SEQ ID NO: 207880 - protein, 375 aa, unidentified
MTDRPLVWVGVDVGKTTHHACVMDPAGKVVFSQKVADDQAAIEQLVARAGQAAGEVRWAIDLTSSAAALLVAVLIAAGQQVVYVPGRVVNRMSGVFRGEAKSDAKDARVIAETARMRTGLSPITATDELVIELTRLTAHREDLMADWVRGVNRLREMLTGIFPVLERAFDYSTRSALVLVTGFQTLVADALAAAQAQTLRLPGEATTATLIAELARRLLDLDRRIKDTDKLITSRFRAHPQAEIIESLSGLGPILGAEFLVSTGGDLAAFATSGRLASYAGLVPVPQDSGRVTGNLRRPKRYNRTLRRVFYMAALSSLKANGPSRAFYDKKRGERLVHTQALLALARRLVDVLWALLRDGRKFTPTAPQPATAAA

SEQ ID NO: 207881 - protein, 432 aa, unidentified
MKVVYERVAGIDVHKDMIKVAIRSPGEKPWTRKTEIVEYRTFYGVLQQMAAELRRRGVTHVVMEASGVYTEPVYYALAERDFTEIAVINPAHAKALRGHKTDAKDAARLAELFECGLLRGSYIPAPELKEVRDLTRYRIKTVQARTSEIQRLAKALESAGIKVGSVASEITGKSVTAMIEALIDGERRGAVLADLARGRMRTAGKLADLSMALAGRFTEHHALLCRLHLDRIAVFDTAVAGLEDQIAAKAARWQREQNLLKTVPGFGDAVAQAWLAEIGPAPHAHFPSHDKLASWVTLCPGNNISARKRKHGRTGDAGTYIKPMLVQAAWAAIRVRGRLQARYHRLVRRFGGEKNPAAKKKAITAIAHTLLKIAYQVLKSGQPYQDLGADFYTRRESPEQRQAWLLRQLQKLNPGATITIAPPEAARPPGPA

SEQ ID NO: 207882 - protein, 360 aa, unidentified
MAKINLSQLNDVLEKQNGTAFHVGIDVHKSSYHVAFLGGAGKASTFVCSAAPEEVINHFNRFDGKIVQVVYECGPTGFELARVLKEAGYNVLVVAPSRVPRPVTEGAKTDRLDCIRLAQYSANGMLKSVAVPSRGQEAQRSLIRRRHDVLDSIRKVKQRIRSHLLYLSIKEPNGLNHWSDKSVKSLLKLQMPPGARDTLKSLVRELMFLKNERKRIEKQIRCVCSQERHGNTYECLQTTPGVGPITAATFQLELFDPGRFKTGDQVASYLGLAPCVRQSGESKGRSRLRPVGQKRLRSLLVEAAWCFCRKDEQAGAKYRRLVSKTNVPQKAIVAIARDLAVILWRLSLEQRSYQLRPVAA

SEQ ID NO: 207883 - protein, 378 aa, unidentified
MNRIIKIGMDVHTTNYTLCIFEPSFEHDGTVHCITQVKPEIKKIIHVIETFKKKHENEELNIVCGYEAGCLGYSLYHELKEKGIECVILAPTTMKTEKGGRKLKNDYRDAKMIAECLAYGGYSAVHIPTELDNSVKEFIRMRDDIKENLKSIKQQIIAFLTRNGKQFNGKSYWTKKHIDWINIISFSEPLLQDTLKEYMIEYNHLCDRVETLDKQIEEISLKEEYVEKVQQLQCLIGIKTHTALSLIVETSDFNRFKKGNMYSAYLGLIPGDDSSGGHEKKLGITKAGNSHLRKLLVEASQGYTRGRVGFKSKDLKARQEKCSSEVVAYADRANERLRRKYYRMTLRGKKYNVAKTAIARELACFVWGIMTDHIDLCS

SEQ ID NO: 207884 - protein, 340 aa, unidentified
MKKYLFIGIDFSKSKFDVTILKSIDQQDYVQATFENDSKCFNSFLKWVSKQSDIDKQDWLFCGEHTGLYSLSLTEFLVKKNLFVWLENPLQIKCSWGIKRAKTDRIDSLEIARYALRFQDKAIACKPVNKEIESLRLLLAYRGRLVKNKVSLEVSAKETRRVINRDSTSRFIFENSQRDIERIKKEIETLETKMNDVIMNSQLKENYLLVVSIKGIGMITAITLIVHTDNFSAFKTARQIACYCGVVPFEKSSGTSINGGNHISRFANKDIKVLLTQCARCAVQYDKELAAYYTRKLAQGKKERLVINNVRNKLIHRIFAVVTSKVPYRENYLNPWADCA

SEQ ID NO: 207885 - protein, 411 aa, unidentified
MLFLGDDWAEDHHDVELMDGTGRRLAKARLPEGVAGMAQLHTLIAEHLGADVEDEEDAADQVLIGIETDRGPWVQALIAAGYRVFAVNPLQASEYRRRHAVSGAKSDAADAHVLADMVRTDSHQLRTVAGDSDQAAAVKVVARAHKTLIWERTRHMQRLRHSLRDYFPAALEAFEDLTAADTLELLSRAPDPASAAKLTTTQITAALKRARRRGIADKAAAIQAALRSEHLGQPAVVTAAYAATVRSATAILAVFNEQIKVLEGQVEEYFGAHPAAKIIGSQPGLGPILGARVLAEFGDDPKRYASAKARKNYAGTSPITRASGKKKVVLARYVHNDRLVDALTTQAFSALQSSSGARAYYDRLRARDVGHHAALRQLANRLVGILHGCLKTGTLYDEATAWSHHAEKLAA

SEQ ID NO: 207886 - protein, 386 aa, unidentified
MANATRRRSNPSITTTGSPVGEITGGVDTHRDFHVVAALDGLGRLLGTATFDATSAGYSQLTEWLASFGPLAQVGVEGTGDYGAGLTRHLTGQHIRVVEVNRPNRQKRRRQGKSDTTDAINAARAVLAGEAHAAPKLRSGPVESLRVLRETKQQLTKARTAAINTLRALLVTAPTALRESLAGLSTTQLLVACANLDTPTVPASGLRGRARTASHDELAEALCDHETATRTALATLAATITDYDTRLTELTTQLEALIARIAPRTLACRGLGPDTTTQLLVTAGDNPDRIHSEAAFARLTGVAPLDASSGRQQHHRLSRAGDRAANSALYRITLTRMATCERTRTYLTERLAANGSNKKHLIRCLKRYITREIYPQLRTDLATLTP

SEQ ID NO: 207887 - protein, 359 aa, unidentified
MPARWVAVQCGVKEIFVEIYAIGIDLGKIVFHLVGLDREGNVVVRKKCSRNQLLTYTANLPVKLIGMEACSGSHFLGRALRAQGHEVRLMPAQYVKPYVKTNKSDYLDAEAIAEAVQRPTMRFVPIKTEEQLDLQAVHRVRERWVMRRTALVNQIRGLLLERGFPLPQGRKHLEQALPLFLAESDASLSASFQVLLTQMKLELEQLNTRIEQMDAVIEQQAREQESCERLTEIPGIGPVTATALVAAIGNGAAFRQGRELAAWIGLVPREHSTGDKQKLLGISKRGNGYLRRLLVQGARAILQRRTSQSPGLKNWLTQLSARTHQNVVIVALANKLARMAWAVLVKGERYRAPALALSS

SEQ ID NO: 207888 - protein, 392 aa, unidentified
MDDTIRFVGLDVHKRRTVVAIADSGRDGEVRQYGAVETERSAIAKLAGKLARGGKTLRFCYEAGPCGYSMHRWLTGLGHECEVVAPSLIPRRPGERVRTDRRDAVKLARLHRAGELTAVWVPDPAHEAMRDVVRARAVAVSAVRRARQQLSGYLLRHDRIYSRKAWTGAHRRWLAELKFEHAAQRVVLEDYIDAVGAAERRRDGLTEQIRELLPRWSLAPIVEAVQALRGVAAIAAIIIVAELGDPRRFDNPRQLMAYLGLVPSEASSGEKVYRGGITKAGNRTARRALVEAAWTYRFPARRSRHLLARCQAASPAIQAIAWKAQLRLSSKYRKLVGRGKLATVAVTAVARELIGFIWAIARELPAIPPEPVPGCGATNKVTTQRQLATLTG

SEQ ID NO: 207889 - protein, 535 aa, unidentified
MASKGKSRKSSKSCKSRPAFLGKPQGVIQPRVREVGPEHFGIVAVDCALARSKWMFCDFYGKVLLPPKNVEHTRSDLQLALAEIDQASKEHGIHDRIAAVEMTGTYHLPVKRAFRQAGWDTRLVHPFSSHHYLLPANPDNKTDDNDLEAIFRAAVNGFELVEPVWEETCLTLKYLVRARRDLVEKRSRLHCQIREHLQRCLPGYAALFPDDGLWTSPVAIRVARRAATAEVIRQAGIPGVTRWLREDRCRFQSRTVERVVAWAGNAAPADPLAPLLTRIWQQLDDDRQAKSQQILQRERQIAGFLVKTPYVLTLSHPGINVVSAGELAGEMGPIEHYANAKAITGRAGLFPSRYQSDEVDHADGPLARFRNHLLRAVWLRVAANLVKCNAHYRGMAGLWKLKEVDARDIRTRIANRATRPIFHMVSGRKLYDHPSRLDRGYVLDKLRQFHLDHQTPPQQILHDLKQAIEQLPQESFPQEAEALQEAYQRRRRRSGPMHIGEILLATLARLGGARIRINPVRGSGAPAVLLDARTR

SEQ ID NO: 207890 - protein, 355 aa, unidentified
MSILAERLDYVIGVDTHLHSHTAAVLTATGGLVASARIDAEEAGYVQLVQLVGRNAPGRRVWAVEGTRSYGAGLTGHLLRLGEVVGEVDRPRRPARKHGKSDEIDAVRAAREALSMGELASPRSSGRREALRIAATTRQEVMGERTRAMNQLRDLVVSSPEHIAARFRDRSGRSHSLERLTKRCLALRVTATHDVEDRIRLDTMKRIARRIVELEREAAHYESEMTELIRQLAPGLLELPGVGPATAAMVITTYSHRGRFRSEAAFASMAGVAPIPTSSGQQQRHRLNRGGDRRLNQALDLIVKNRIRYDPQTIAYMERNKGGQRTDRDLRRILKRYLARSLFRFLERTSPLDKG

SEQ ID NO: 207891 - protein, 430 aa, unidentified
MPADRSDAACTVAGVRKPSMKMLWGGVGEDIASVDVDVNRCSTPMQKLNDLGRSLTPLKPDRTLIAVIEMSLSSWLVAGIVPGIERQPLKKLEVDESTLLKLLIRWREEAKKSGHSIERIAVAFEAGRDGFWLARWLRARDIEAHIIHASSIAVSREHRRAKTDRLDTELLKRAFLGWLRGERDHCRMVAIPTIKDEDAKQPNRERESLVGEQSRIVNRMKAALVRLGIRGFNPKLKKAVERLDGLRTPEGEPIPPNTLAELRRDMARRRLVNDQIRQIEDTRLERLEQAPSDGPHAMVRLLARVIGVGIETADMLVQEVLSRNMRDRRAIARYAGLTGSPDESGRKRREKGLARSGNARVRRGMIQLAWRFLMFQKDSTLAQWFRARTENARSARKTMIVALARKLLIALWRLVREGVVPDGVVLRPVS

SEQ ID NO: 207892 - protein, 357 aa, unidentified
MSNKATKLDFRGQVFHIGIDVHKRNWRVTVLNNGLELKTFSMNPSPEDLSSYLQSNYPGGEYYTAYEAGFCGYWIHRKLESLGMKNLVVNPADIPVNFKETVRKTDTIDSRRLARALYSNLVHGNYIPSLEQQGFRSLCRLRKQLVKDQARVKNRIKSFLDFSGIKVLSQNEISHWSGLFLNYLSNLDLGNEHSNETLSRMLGQLMSLRNQIADLVKRLKTIVRQDEAILRVMNNLMTIPGVGFSCAIVLYSELMDINRFSSVDKLCSYVGLVPDLRSSGESEYTLGISKLQLQFLRAMLIECSWIAIRKDPALTAAFNTLSIRMKKQEAIIRIGKKLLTRIMYVWRNNEPYICSIV

SEQ ID NO: 207893 - protein, 346 aa, unidentified
MQQITTIGLDLAKQVFQVHGAEADGSPVVSRKLRRGDVLPFFKKLSPCLVGMEACGGAYYWAREIAKFGHDVRLVPPSYVKPFVKRGKTDAADSEAICEAVIRKTMRFVPVKSADQQAAAMVLKTRELLVRQRTQAINALRAHLSELGIIAGTGPAKIATLIEIVRDGEDARLPPAARFALSELANQIEWTKQRIDKLERAIVIEAKRDEDMRRLVTIPGVGVIIAASIKALVPDPHGFKSGRHFAAWLGLTPRSHSSGGKERLGRISKMGNSTLRSLLIIGATAVLKHVRHKADAPKWLVAILARRPFKVVATALANKMARIIWALLTKGGTYRKSGLAIGTANA

SEQ ID NO: 207894 - protein, 346 aa, unidentified
MDNNNVKGMIKVLGIDLAKQSFQLHGVDEDGHVVLKKKLSRKKLTAFIANLPPCLIGLEACGGAHHWVRVFTRLGHTVRMMAPQFVKPYVKSNKNDAVDAEAICEAVQRPNMRFVPVKSIAQQDIQSLHRIRSQLVGRRTAQANQIRGLLLEYGVVIPKGIGYVRKEIPLILEDAENALSSLFRGILSDLYAEMVHLDEKISAVETQLEGICAESEACQRLLTIPGVGVLTATALIAAVGDISVFKNGREMAAWLGLVPRQHSTGGKATLMGISKRGDTYLRTLLVHGGRSVVRVAHKHQDKRNQWVGEIKQRRGENISNVAVANKNARIAWAVLTKKVDYCAMGA

SEQ ID NO: 207895 - protein, 379 aa, unidentified
MFENITYVALDDHKRRHQVAVLLPGMKREDASTWRVENTRAGIRKMVRKVMKMAPGDVRFCYEAGPNGYVLQRQISEFDRVSCVVVAPSKTPRRPGERVKTDRRDARKLVSLFRSGELQSIVPPMEEEEAIRDLCRCRRTAQKRATASRHQLDKFLMRNGYIYRDGKNWTRRYWEWLRSLKFDDWRRERTFQAYVFGIEQDEDRVKRLDLEIVRAAEEEPYRTLVGFVRCFRGLDTLSAMVLTSELYAVGRFTTAPSLMGFVGMVPSEDTTGWDPHRGPITKAGNEHLRRILVEAAKHYRHPARVSKALVERRKGQPDWVIAIADKAQTRLHQKYWKLVMGKGKHPNIAAIAVARELVGFIWAVLIRAATTQSVDELVA

SEQ ID NO: 207896 - protein, 326 aa, unidentified
MQSILGIDVSKSTLDAVLIANGGTFHKTIRNTLQGYHQLEKWLRDHEAGKVQGCLEATGQYGEAVAEYLYECGYQVSVVNPARIKRYGESKLHRNKTDKADAALIAEFCQKENPAPWQPLSPEIKHLRALVRRLEDQKANLQQEINRLKSGEKDSWVVSDLQIHIDYLQERIAATEKEIEDFINRTPSLKSQQQLLTTIPGIGDLTAYILLAEIGDVSTFDNAPQLAAYAGLNPQGHRSGSSVHKKTRISKQGRSELRHCLYMPAVVALSYNPVIQNLSHRMAGRGSLKMEIVVAAMRKLLHIAYGVLKNQLPFDPNYGAQFDFSS

SEQ ID NO: 207897 - protein, 330 aa, unidentified
MKQYNYFFGVDISKRTVDISLLHLQSITHKQFDNNRSGMQELCQWLKELQIQFDETLFCMEATGLYCFTLTHFLAENTIDVWIEHAAQIKKSTALDRGKNDKVDSKRIAIYCSKNLDRLRLWRPMDATIDKIKHLASLRERLVETQKKLLTPINEFEETGNTEMAKLLRKTIKKSLDAIDADLKSVEIKIIDIVNADENIKQLYKIITSIVGIGFVTAINLIIHTNGFAILKDARKLACYCGVAPFEYSSGTSVRGKTKVHYMANKKLKCNLHMASLTAVKLDVDLKKYYERKVAEGKNKMSVLNAVKNKLLTRVVACVNNQKEYVNKRA

SEQ ID NO: 207898 - protein, 356 aa, unidentified
MKQVNKLDFSGQSIYVGLDVHKKSWSVSIFSEQCEHKKFTQPPEADKLVHYLKRNFPGANYHSVYEAGFSGFWTHNQLQENGVNCIVVHPADVPTTNKERTTKRDRIDCRKLARHLRSGELKGIYVPTRPQMEDRSLVRTRQSLVRKQTRCKNQIKSFLFFYGLDLPEEVVRSRWSQKFLHQLEQIRMERDSGNLAFKAHLEELKQLKILIASVNRGIILLSREPAYRELVEHLKTVPGLSTLASMILLTELCDLARFSDLDHLASYVGLIPDIHVSGETEHIGGLTFRRNAQLRDVLIEAAWTAARLDPVLLLAFNEYCRRMKKTKAIVKIARRLLNRIRYVLKNQMDYVPGVIQ

SEQ ID NO: 207899 - protein, 375 aa, unidentified
MATIARLGIDTSKSLFQLHGVDEREEVVLRKQVRRGQFLGFVAKLAPTKIGVEACGASHYWARQLQALGHEVVLLPPQHVKPYVGRNKNDKIDAAAICEAMSRPRVRERFVAVKSAEQSAAQMLLGTRDGLLHRRTQLSNTIRGHAAEFGLVTPKGLAHIKPLLERIAADDTVPALAKELFAALGEEFAELAPRIARLDKKLKAFQRSDELCRRLVEVPAVGPVIASSMVVKIGNPAAFRSGRRCAAWLGLTPRDHSTAGKMRHGGITRAGDEGLRAALVSGATAYIQQVKRGRTRPSPWLAQLLKRKPEKLAAVALANKTARIAWKLMVSGERYDRARAEAREGLGATQHRGSTPSPSLHPHTADQGASTMTVA

SEQ ID NO: 207900 - protein, 315 aa, unidentified
MECHRATPSFVGIDVSKHRLDVHVVPSGRTFTAQRDGKGLEQLAGDLRQLAPALVVLEATGGFEITVAAALASANLPVAVVNPRQIRDFARATGRLAKTDALDAEAIARFAERIRPEPRPLADAESLSLGELVARRRQVVEMICMETNRLHQAQNPRVQRMLKATLKTLSAQLAELDHDIDDTVRRSPIWRAADDLLTSVPGIGDVTAHTLIADLPELGQLDRRRVAALVGVAPINRDSGQMRGKRTIAGGRVEVRNALYMATLAATRWNPVINKHYHGLVDRGRPKKVALVACMRRLLGILNAIMRTKTPWQCA

SEQ ID NO: 207901 - protein, 369 aa, unidentified
MKDVERRFVGIDLAKRSYVAKVLQPGTDKGRILKGSTSPEGLKKLYHSLNSQDRVSLEACAQGFWLARRLIETVGCEVVVLNAGDLAIIYRSTKKTDLNDAEKLAWIIKRLPLKELPVVALPTEEEESRRSMVSELHFEKRLRTMQINRLHSIFTRVGQTEIRKKHLATIEARKESIQSLPGRAHREALRLLEVICLIENHIQLIEEEMAVSLSGEELAEHLLSMPGVGVQTAMAFLAHVGDGSRFSKGRQVSNYVGMTPRIYSSGETERMGHISKHGCLALRSIIVQSAWSAVHTRRSNVFKTKYEELVPRIGKKRAIVAIARRMLETMWILVTREEDFRGYDEFSKRLKLRKIQIKVERLEKTGLVA

SEQ ID NO: 207902 - protein, 421 aa, unidentified
MDFEVKHLICAGLDVHKKTIVAAVCMTDPVTLEAAYKVKSFSTNNSQIAAMRDWLLSYNCHDVCMESTGKYWIPVFNILETHMHVVLTHPKYVKAIKGKKTDKRDAKWIANLFRFDIVKASFIPPADIRALRELSYMRSAEKNRFQNSMTISRIRIDCVLTDPFGKTASSIMDYLLSDVPFDETECAKLIHGRVKASNEEIFDSIRGFEILSEQRFKMSHAKQHMELLSSYMDDIETELFRLSRSYDEVIKRISGIVGFTERSALFVISEIGADMGVFESAKHLCSWAGLTPANNESANKKKSTRCSKAGQYLKPLLIQCALAAVKSKKNPYYAIKYKRLAKRRGRKKAVIAIARMMLTSIYHMILNNEEWKPDDYEDIIHPSKPVKVALTLDNVIQFLGEQGADPETLKLLQQQCAVTPG

SEQ ID NO: 207903 - protein, 392 aa, unidentified
MLTSYQAFKEMNVKYTGSRSIKHTKEGFDEIVSLVREMEKKLETEVCVVYEATGVYHRVLKKVLEDNNIKQFIINPLLSAKTRKNDSLRSPKTDKLDPKSIAKTYYSHSLHNSHKPETIYHELRELSRYYEDILVHLRKDKVAFRAQLDVVFPGYDTLYDDLYGPVALAVIEKYPHPEMLQKKKINTVSKVIQSKTCHRQAMSDTMADKAIEYSKTIYSGCDKDDIEVLILQRFIKKLKEDMAEAERTIGEMIKLAQELPDFSIIKSIPGIGDNLAARIIAELGDMTRFKKKNELVAFAGLDPRISESGQNDGDHMHITKKGNKRLRCLLYLAVTCSIRLKRDDNSIKDFYIKKKQQSNPMCSKAAKTACASKLVRIIYSMCKTGELYQYNK

SEQ ID NO: 207904 - protein, 339 aa, unidentified
MQATTIGLDVAKTILHVHGVTEAGEVAFNRPLRRSQVLSFFDRLAPCLVGVEACASSHYWARELSKLGHTVRLMPPMYVKPYVKRGKSDAVDAEAICEAVTRPTMRFVEIKSEEQQALLSLHRARDFVVRQRTQLINMLRSLATEFGIAIARGVSRAIDFAKGIIEGQQADLPELAQDVLRVLSRQLVDLHNRLGWYEITMRVQARLSRQAQLLQTIPGVGPVTASAVAATIGSGHQFRSGREFAAWLGLTPRNHSSGGKERLGKITKMGDRYLRQLIVVGMTSRVRQVANHPDRADPWLAHLLQRKPTRLATVAMANKTARIMWAVLTRNEPYTPPTA

SEQ ID NO: 207905 - protein, 322 aa, unidentified
MSLPSPLCVGIDVSKATLDIAASSAIEQFSVANDADGFDSIIAELRKHNVALVLMEATGGLEAAVACALQAEEFELAVVNPRQARDFARSMGYLAKTDRIDARALAQMAEVINRHPERDRYIRALPDAERQVLNAMVVRRRQLITMLVAERNRLHPAHPQSRKSINIIIKALEDELARIDEDMKTHIRNHFKELSERLSNIKGVGTMTVAALLAEVPELGRLSRREISALVGVAPVNRDSGTMRGRRTIFGGRAGVRTALYMGALVATRFNPVIKAFYTRLVAAGKPKKVALVACMRKLLTILNAMLRKNEEWDESYHHIAP

SEQ ID NO: 207906 - protein, 396 aa, unidentified
MPEIWAGVDIGKEHHHCVVINADGERLLSRRVLNDETELLQLIGDVLEVSTDVLWAVDLNHGGAALLIGLLLSHGQPMAYLTGLAVHRASATYKGEGKTDAKDAFVIADQARVRRDVGLLRPGDEIAVDLRTLTTRRLDVVFDRTRQINRLRAQLLEVFPALERSLDLVNKGPVMLLTGYQTPAAIRRAGAKRIETWLRNRKVRGASALAKAAVEAARAQMTSLPGEELAAAMVVRLAKGVMALDEEIAELDALIEARFREHPHAEVIRSLPGMGPRLGAEFIAATGGDMDAFGSADRLAGFAGLAPRPRDSGRVSGNLRRPKRYHRGLLRSMYLSAMVSITTCPASKAYYQRKRSEGKGHKQALLALARRRLNVLWAMIRDGECYQGSPPVTAAA

SEQ ID NO: 207907 - protein, 392 aa, unidentified
MLFVGIDVGKNNHVASMMDENGKVVFKAFSFSNTTDGGNALFSKLSAYSSDPSGFEIGMEATGHYWLSVYSFLFEKGFLLHVINPIQTDGWRRGTEIRKRKNDAIDSVLIADLIRYGQFIETRPADENLFSLRTLTRFRTYLVESISDLKRKVVCVLDQVFPEYQSIFSNIFGKTSKEILLQFSSPIDFENVSSETLAELLAQLSRQKIGSQKAEQLKAAASSSFGITFAKNSFTFQLKTLVEQISFIENQVKETEAEISGIMGKLESPITTITGIGNVTGAAIISEIGDISKFDNPRKLVAFAGIDASVTQSGEFEATHNVMSKRGSPYLRKAIFQAALIASFKDPVLSGYYQKKRSEGKHHLTCVGAVARKMCNIIYAVLKNNEPYIPKA

SEQ ID NO: 207908 - protein, 390 aa, unidentified
MRFAGIDIGSETHVVAVVDGEGATVLKATSFSEDAEGYAKLLELLGNAEGCQVAMEATGHYWQNLYAALAAAGFEIALLNPVRTNRFAQEELARTKTDAIDALGIARFAHQKRPTPTRLPDAATQELRELVRLRDRVVQDMGDATRRLHRLVDLGFPEFTRHVKKLDSALATTLLREYPTAAAFPTTPRPIAKLVYDGRRKVGPELARALADAAKTSVGRHHGDAYRVQVRYVCEDIDLARRRLRELEERIETTLRDHQVGSLLTTITGVGPQTAARLVGEVGDFARFTTPAKLAAYVGAIPGLKHSGKSRPRGAMTTIGHARLRRALWMPLLTAVVRNEWLRSYFRRLVAAGKPKKVALVAAMRKLLHAIHSVATHRRPFVARLQEASS

SEQ ID NO: 207909 - protein, 320 aa, unidentified
MDHIGIDVHKRESQICILAEGGELIEQRIRTEPERFAAVLGKRPRTRILIEASTDSEWVARCLEGLGHEVIVADPNFAPMYATRTRKVKTDRRDARTLADANVLGAYRPAHRLSDAQRHVRGRLGVREALVRTRTRYISLIRALLRQQGYRVPSGSAEGFVHRVGAMALPGQVRSMIAPLLAVMLPVNRQLAYSDQVIEHLAVHDPRVQRLRTVPSIGPVTAAAFVATLDDAQRFRHAHQVEAYLGLVPREFSSGDSQRRGPITKAGPGRARWLLIQAAVSILRRRPPEAEALWTWALRIAARRGKHVAVVASPRRRWGP

SEQ ID NO: 207910 - protein, 367 aa, unidentified
MKKIAYVGIDYHLNSVTMAVVVEGQKDFHDAIRLSNHDKVISKYLKKLSEQFSVKACYEASSSGYAFQRKLSSWGYHCDVIAPSLIPKKPGNRRKNDLRDAKDLVQNYANGMLTMVRLPSEQEEALRSLIRCRLAFKESAKRVKHQINSLLLSHDFRWSQKSKWTQRHRHWISTIQMPHEHLQQALEEYLGHLNYLESRLEYLDAEIQHLADSAMYAASVKKLRAFKGISTLTAMLLIAEITDFRRFPTPRALMAFLGLIPSEHSSGDKQQGGSITKTGNKRCRKILIEAVQHYSKSPRITAKMKQDLAQVDSPNAAIAVKCLNRLHHRFWSLTMKGKIRPVVITAIARELVGFIWATMQPTSATAS

SEQ ID NO: 207911 - protein, 363 aa, unidentified
MVSPILAQWTTLSEDFVLLGAIMDTVSLIGIDLGKHCFHLHAQDGSGRMVLRKKLTRNQMFTLLSNFPSCTVVMEACAGAHWIARRLQTLGHEAKLISPQFVKPFRQGNKNDFADAQAICEAASRPSMRFVSPRNEAQQVVSALHRVREALVRNRTGTINQIHAFLLEFGISLPRGMAVIRRLPAVLEAQALPPRLVAVLERLQAHFKYLDEQIGQVEHELLTQLHEDERSERLLEIPGIGPITASVLMSELGDARQYGSARQFAASIGLVPRQYSTGGKPTLLGISKRGDKGLRQLLVQCARVIMLRIERRTDSLGVWVRSLLARRHSNVVACALANKLARIAWAILAKGTHYRSAPTALPA

SEQ ID NO: 207912 - protein, 396 aa, unidentified
MFIVGIDIAKHTHQASVMNTDGSLVGKSIKIPNTSVGFDAFISKLKEIDRDISHFEFGMESTGHYWLNIYTHLADLGCIVHVINPVQSDALRGLYIRQTKNDIKDSAIIADVIRIGRYCETSVSDDKMLALRDLTRQRFYLVDMVSDLKRKSLTLIDRIFPEYPTLFSDTFGTTSMELLANCNTPEDILAIETDKLVEMLSTASKGRFKQDKAEKIKETARNSFGALLCTDSASFMLKQFVEQIRFLENQIDELDEMISESLAELNSPITTITGIGDTLGAAILSEIGDIERFESADKLAAFAGIDPSVSQSGNFLGTRNKMSKRGSPYLRRAIWLAATAAILHDPAIKAFYDRKKAQGKHHYVCVGYICRKLVNIIFSVLKSGQPYQPVFPKNLD

SEQ ID NO: 207913 - protein, 416 aa, unidentified
MDEEVYYERCAGIDVHKKLLVVCLRVGRKAQVREFGTLTHEIREMVAWLKENGCQMVAMESTGSYWKPLYNIFEQEALPAMVCNAYHIKNVPGRKTDVNDAQWIARCLSQGLLNPSFVPDREQRELRDMIRFRKSQIEERSRNVNRLQKFLEGANIKLGSWLSDIDGKSSTALLELVIGKPDFTVDDVAKRMQGRLKSTAEELFRSLEGSITASQREFFAHVMAVILEQTTQIEKTDAMIQRNLSDNYKAAIATLDSIPGIGRISAEQILAETGTDMTRFKNQHAFSKWAGLCPGNNESAGKRKSGKTPPGNKALKSTLVQCAKSATKNKRSFFSAQYHRLVSHRGKNRATVAVAHSMIIAIFFVLSGAHFKDLGADYYTQFNRDKKINSHIRQLSKLGVTIPDDVLRAAIQPATG

SEQ ID NO: 207914 - protein, 416 aa, unidentified
MAPTAYAFYVGIDWGSERHQVCVLGHERRVHGERRVEHSSPGLAALADWLSALAPGQPERVAVALEVPRGAIVDTLLSRGLHVFAINPKQLDRFRDRHSVSGAKDDRRDAWVAAEALGTDRWAFRRLEAEHPVIVQLREVTRFDEDLQQELTRLANRLRDQLLRYYPAVLRLAPAADEPWLWALLELAPTPAAGAQLPRARVTRLLERHHLRRHTPDDVLAALRAPALLLTPGTVEAAGRPVALLLPRLRLVHAQRAECAGHMDRLLAALQAETPPGPHRKHHDLEILRSLPGVGRLVAARVLAEAAPLLAARAYHALRALAGCAPVTRQSGKCRGVRMRYGCNHHLQQAVYHWARVSPQCDLHSRAHYTALRQHGHPHPRALRGVADRLLAIFVAMLKTDTLYDAARPRRRELAA

SEQ ID NO: 207915 - protein, 346 aa, unidentified
MHYIGMDSHISTLDFAVVNESGRLVKASRVATSVNGFVEFVKTVPPPRTIYMEEGTLAAWALETCVRFREKLVITDAKKNHWIGSSGQKGDSIDALKLAQLARGGYIKEIHHPVGQRRRFRELMIAYHDTVRSTTRIKNKIKARFRQNGIQCTGVTVYSETYREEWKGKLPQEATLILILDGLWRQLEQSEQTEKEILAAARVQAKHYPEIKHFEALPGIGFISAATISAILETPYRFADKRKVWMYAGLGLMKRSSGGKLYSEKLTTDYNRLLKYTLKQAAEAAIQAKDNPFRRKYLDMTLLHGIAPHRAKLTIARDMLATMWAMWRKGEKYSPEIREKTAYKQG

SEQ ID NO: 207916 - protein, 334 aa, unidentified
MSLKLLAIDLGKRSFHIFGIDNEGVIISRKIGRSKLAETVRELAPETVAMEACASAHYWGRCFLAFDCRVLLINARFVKPFVKGSKNDAADAEGIYEAAQRPTMRFVPVKSTDQQDLQSLHRARDRIVCARTALINHTRGLLGEYGVVLPQGAWRFLEQARDAVAAAEFSDLARGLFNDMLKELDTLDLRIAQLDRQLAAICRTNEACHRLSKLPGVGPVVATALVAAVDDGRHFRSGRELAAWIGLVPRQYTTGGKPRLGGIGSRANHYLRRQMIHGARSVMFRLAKHDDRRSEWLKGLAARRGFNRTVVALANKTARTAWALLTRKEDYVAA

SEQ ID NO: 207917 - protein, 397 aa, unidentified
MAKVRSWAGLDVHARSVLAVTLDAQSGELRSRRLPGETAKVVEFLATLPGPTRAAYEAGPTGYGLARALQAAGIGCLVAAPGKIERPAQDKVKTDQRDAERVLRLLMIDALHPVRVPTVEEEALRDLVRAREDVRGDLMRARQRLSKLLLRHDILYEDTSSTWTQRHRAWLRAQDLGGGAQATLLDYLGAIDTLELRRGALEKTIAELVPASPCAQTVARLRCLRGVDTLSAVGLCAEIGDFGRFQRPGKLMSYIGLVPSENSSGETRRQGAITKTGSRHARRLSRPAGTTARPPPAASPSNAAKTGSPPTSSRSAGKPNNGCTASGAAWPRTAASAARSSRSPSPANSPGSAGHSPTPTDPPTPQHHVGREGRREPANAREHQRSKHEQPCGHARS

SEQ ID NO: 207918 - protein, 330 aa, unidentified
MNYHYVGVDVGAKELVVSIERGGIRESGIVFANDAGGHRKLIRWATKQGATARVVLESTGVYGLDLAFALQRAKRVEVMVANPRAITAFAKASLQRSKTDVLDAETILEFGKRMPFVPWTPPDPSILELRALSRRVEAMSKMVTQEKSRLHANEQTEELSDFVKEDIRELTDLLESRIERLRKQALLVVEQNPELAKAFGHLTSIKGIADAAGIQLLAELGSLPQDMTTRQWVAHAGLDPRQQRSGTSVHKPARISKTGNAHLRRALFLPAMVASRWEPKVKAFYEKLLARGKTKMQALIAVMRKLLHAIHGMLRHDQDFDGEKFFTTTG

SEQ ID NO: 207919 - protein, 359 aa, unidentified
MQTQSKTLDFSGQNIYAGFDVHLKSWKVTIMTDEITHKTFSQPPEPEVLHQYLQRNFPGGVYHSAYEAGFCGYWIHNRLVSLGIHSIVVNPADIPTTNKEKVQKDDKRDSRKIAKALRSGDLVPIYVPSSKTIEDRCLVRTRSMLVRDLTRNKNRIKSFLYFHGIKFPASFENTKTHWSKRFINWLEGIEMKEDSSKLTLSLLVSECKKLRTSILNVTRSIRALSQTEAYVEQEKLIRSVPGIGSTTAMTMLTEIETITRFSNNDQLHSFVGIVPSTNSSGDDDTVGDITPRGHSILRSAIIESSWTAVRHDPALMKAFHDYCKRMEPNKAIVRIAKKLLNRISFVLRNKQPYVLSVVK

SEQ ID NO: 207920 - protein, 387 aa, unidentified
MPQRNDLSRSLVDLDQQSTLIAVIEISQSSWLVAGIVPGLERHPLKKLDASEAALLVLLRRWQDEASRAGRTIKRIAIAFEAGRDGFWLARWLRARNIEAYVIHPTSVAVSRENRRAKTDRLDTELLKRAFLGWLRGEPDHCSMAAIPTLEEEDARRPSREREGLVGERTRILNRIRGTLARLGIRSFKLTLRNAAERLMEARTPEGVPLPRNTLAELRRDIARLRFVKDQIKQIEEARSERLQQDCAAGPNAMVRLLARVIGVGIETADMLVHEILSRNLRDRKALARYAGLTGSPDESGAKRRERGLAKVGNARVRRGMLQLAWRFLRFQQDSGLARWYRARTADGRGSTRKTMIIALARKLLITLWRLVTTGEASENIILRPVT

SEQ ID NO: 207921 - protein, 376 aa, unidentified
MRADVVKLRLMNPPNTTTGLTIGMDLGDRRHAVCVLSANGDIVTEEAITNTRECLEAFAQRYPGAVIVMETGTHSPWVSRLFEARGHRVLVANARKLRAISQSQTKSDEEDAWMLARLGRADPALLSPITHRSEVGQRELVKLKVREALVRARVNQMNSVRFLLKSLGVVVPASVKATAFVRKFRAQADPAMAALVEPLLQSLDHLNLQIKQLDAELETLAREKYPMTERLRQVDGVGPLTALCFVLTIESPKRFPHTRDVGAYLGLVPRRDQSGNTDKQLPITKAGNTHLRCLLVNCAHYILGPFGPPSHLREAGLRIAARGGKSGKKRAVIATARKLAVTLLALWKSGADYHALPPAGPALSQAEPSPSNRQAA

SEQ ID NO: 207922 - protein, 387 aa, unidentified
MPQPNDLSRSLVALDQDSTIIAVVEMSQSSWLVGGVLPGIERQPCKKLEPSAERLLGLLHRWRDEAVKAGSHITRIALAFEAGRDGFWLARWLRARGVEAHVIHPSSVAVSREHRRAKTDRLDTELLKRGFLGWLRGERGHCTMARVPTIAEEDAKRPNRERECLVGERTRIVNRMKGTLARLGIRNFKPTLRKSAERLATLHTPEGSPLPPNVLAELQRDMARLGFLICQIREIEEARQKRLEQEPETGPHARVRLLARGVGVGIETADMLVHEVLSRPMRDRKAVARYAGLTGAPDESGAKRREQGLAKAGNARVRRGMIQLAWRFLLFQKQSALARWYQARTADARAGARKTMIVALARKLLIALWRFVTTGETLEGVVLRPAG

SEQ ID NO: 207923 - protein, 410 aa, unidentified
MPKIVYPICCGIDVHKSFIVACIATTDDKLVTTYKRKRFSTFTGDLRRLAEWLVQNNCCDVCMESTGKYWIPVYNVLEPTCSIVLAHPKYAKAIKGKKTDKRDAKWIADIFKHDLINGSFIPPADIRQLRDLVRYRFKLTSYTTGEKNRAQNCLTVSNIKLDEVFSNVFGKSASAIITRLLESNEPFDVKPFVDSRCKTPIQEIQAAVDGSMCENQAEKLRIIRSHMDNLKLCKLNLESEILTVAEKFLPQISLMSTVPGIQSFSAIAIIGEIGVDMSVFETSRHLCSWAGLTPQNDQSAGKKKTTRISRAGAYIKPLLVQCALAAIKSTKHPEVRHRYQSIKKRRGHKKAIIAIARMMLTAIYNILKKNESYNAELYRVSDKPPVKREVSVEQAIFILQRQGYLVTATD

SEQ ID NO: 207924 - protein, 402 aa, unidentified
MNCVGIDVSKGKSTIAVMRPFGEVVVSPFEVCHTVSELSELARLLKSLDGETRVVMESTGNYHAPVAWLLHGAGLYVSVVNAMLVHDYGNNSLRRGKTDKKDAVKLANYGLDHWLTLPRYVPEEDARLMLKTCYRQYQQYSKVQTMLKNNLISLLDTAFPDANRLFTSPPRADGSEKWVDFVAAFWHCECVCGLSKKAFTTKYQKWCRKHGYNFSEDKALDIYVSACGRFGVMPKTKTAKLLVEQAISQLQATSAALAALKQEMQSLAASLPEYPVVMGMFGVGPTLGPQLIAEIGDVRRFHSKKALVAFAGIDAPPYQSGQIDVRSRSISKRGSASLRRTLFLVMGVLLQCAPMDEPVYQFMNKKRSEGKPYRVYMMASANKFLRIYYASVKAYLDSLEHN

SEQ ID NO: 207925 - protein, 328 aa, unidentified
MCTHILGVDIAKETFDIALRNEDGFCHTGHFDNSFVGFQCLRQWLANRHVDSVHACIEATGRYGEPLAAFLWADGHAVSVVNPARIRAYGQSRLRRSKTDKSDAILIAAFCVSEPLPHWEPPSAYHSELQSLTRHLDALKKSRTREISRLKSGIRSGAVQRSIQDHIEFLEEQIQQVDAEIQQLVKQDDEHRQQMKLLVSIPGIGPTTAARFLAEVPDITAFPQAKQLAAYAGLCPSHHQSGSSVRKKPRLAKTGNAYLRTTFYMPALSVMRGNNPLLQPLVARLRDEGKSAMVIIGAVMRKLLHIAYGVLKTGKPFDPNYLSGSLGA

SEQ ID NO: 207926 - protein, 370 aa, unidentified
MNYSAYVGLDVHKTTIAIAVAEAGRGSEVRFFGEIANSPDALATLLKKLGARHGKLYFVHEAGPCGYGLYRQIIDAGHVCDVVSPAHTPRRAGDRIKTDRRDAIMLARLSRAGELTKVWTPDYAHEAMRDLIRSREVASKDVRQARQRVQGFLLRNGRRYAGAVWKRSHRVWLGNQTFDHPAQQIAFQTHLNAMDQAVERKLEIEKQIQALLPDWSLGPVVEALQALRGVALAVAAGVVAEVGDFQRFDNPRQLMAYLGLVPGERSSGETRRPTSITKAGSIVARKLIVEAAWAYRMPAKIGQAMQRRQEGATAEVRAIAWKAQVRLCARYRRMLARRKTPPVVITAIARELVGFIWAIGRSVKPRMIAA

SEQ ID NO: 207927 - protein, 347 aa, unidentified
MKFYTRQHKHYCGIDLHARQMYVCIMDAAGKVLVSRNLECTPQTFLAAVKPFRDDLVVAVECMFAWYWLADLCAREGIAFVLGHALYMGAIHGGKAKNDKIDAHKITGLVRGGMLAQAYVYPPRMRATRDLLRRRCHLMRKRAELITHIQNTVSQYNLPPLESRIQKRCDREGLLTHFPDPQVRNSMALDLAMIEQYDTLLPKLEGHIRTCAKEHEPRAFTLLRSIHGADLIIPLVILYEIDTIERFPRVQDFVSYCRLVKPGRESAGKLLGHAGGKIGNAHLKWAFSELSVTFLRANPPAQQLHERLKKRHGKGKALAILAAKLARAVYFMLKRGQVFDPHKFYQD

SEQ ID NO: 207928 - protein, 349 aa, unidentified
MKKIVKQVAGIDVAQKELVVSLGRMYDDWSPQLYAHKTFANTAKGHVALLLWAKKMSDETNPVRFVMEATGIYHESIAYFLNENQYEVSIILPNKISNYFRTLDVKTITDKTASETIAMFGLERKLDCWQRPKAVFKKLRQLTRERDQIMEERTMVKNQLHAEQTEAEPNNESLKRIKERIKMLNRQEKEINAELAALVKQDEQLMQQVNIICSLTGVRLLTAAIVLAETNGFELIRNKRQLASYAGFDVKEKQSGTSVKGKARISKRGNTYLRKAMHMPALCAIRYDQRFKGVFARLVSKHGIKMKAVVAVQRKMLEMIYILYKTGMPYDKNYLQNRSEAIAKTEACV

SEQ ID NO: 207929 - protein, 346 aa, unidentified
MHSENIAAYVGLDVHKETLAVAIAAPERLGEVRYYGTINNEAQAVRRLFQKLQGLYGNILSCYEAGPCGFGLYHQLTAMNIKCQVIAPSRIPKSPTDRIKNDHRDAISLARLLRAGELTPVWIPDLTHEAMRDLIRARAAAKRDSRVARQRILSMLLRTDKHYAGKHWTGKHRTWLANQSFSQPSQQIAFQHYCQSLEQIEDRILQLDQEISRLLSEWSLCNLVCQLQALKGVGQLIAITLVAELGDFSRFSNPKQLMAFLGLVPGEYSSGNSIRPRGITKVGNSELRRLLYEAAWSYRTPAKVGAWLIYYRPDSVTQYSKDIAWKAQQRLCSRYRSLTAKGKNHK

SEQ ID NO: 207930 - protein, 428 aa, unidentified
MASSTDPSAARTWVAIDIAKGWNVALVEYPDGRQQRFRFRHCREDYDALVGLLRAAAGPCRVALEPTADYHRTLGYRLASEGFDLVLVSSVAGARLREAVFNSWDKNDPKDATIILRLLKQGMTQRYCDPVLMRTHDLQELSKTHHHIARARTRLQHVLITHYLTLYWPEVERFWSTQSNEWFIRLLMRFPTPRSVARLSMPEFVAEVWELMGRRVHKREKIEEIHALAARSIALPIADDSPAVGTFRLQLERYLQLCQIRRSLELQAHRLLSCRVDYQRLRTLPGIGPIIALVILAEAGDLRRFAHHRQFLKYCGLDLAKSQSGGTRSREQLSKRGNARLRCALWMAAMSAARMRENSFRDKYQRYIARAPDDADLKRKARTAVTAKMARVVYALIKHDCNYRQRFELGFPSGSTPLTRAVEAFGTS

SEQ ID NO: 207931 - protein, 430 aa, unidentified
MKSNTQNAKIEAITEKTLVLGIDVGSETHYARAFDYRGIEYSKKPFKFSNTEAGFVTFKEWILDLKDRHEKDKVVPGMEPTGHYWFNLGRFLQDNEMKPVLVNPHHVKKSKELDDNNPTKNDRKDPKVIAGLVREGRYMIPYLPDGVYADLRTASNIRFQLQAELTRIQNRISRWFNIYFPEYKTVYGKPDAKSGILILKAAPLPEDILTLGIDGVNQIWRDAKLRAVGKARAKTLIEAAEHSVGSKEGAVAARMEIRMLLEDYESRSIRLQEVMTLIEGLVKQIPMAEKLLEIKGVGIRTVSGFLAEVGDISRFNNPKELQKLAGLALVENSSGKHKGETTISRRGRKRLRYLLFEVAMSLVAKNPEFRELHNYYTTRRLNPLKKMQSLMAIAAKLIRVFYVMLTKGVNYDPKKMVNDIKRPAVYLQTA

SEQ ID NO: 207932 - protein, 355 aa, unidentified
MLYLGIDQHARQITISLRDEDGDVQQARQVSTQPEKIHAFFQQLTRERLRSGESFVAVLEVCGFNDWLIRMLYDYRCQKVILIQPEERKKQKTDRRDAATLSELLWVNRGRLLAGKPVRGLRQVDITSTTDQENRRLTTLRKEARQARTRIINKIKYILRCHNLQWDMPTKTFPTIDAVAWLQGLALPEIDRLEMNYLLVDLERIQQRVKELEEVIAQRCASSEEAVLLSSMPGVGRFTAVALACRVGRVERFPRSHSLANYWGLTPGCRNSGENNKRLGSITKAGSSMARWLLAQVAYQALRQDARLRQWFKRIKRRRGSSIARVAVMRKLATIIWHMLSNRKTYVECRQLTTT

SEQ ID NO: 207933 - protein, 356 aa, unidentified
MSREVKYIGMDVHKEAIVIAVLNDGGQLAMESIIETKASTLLQFIHGLRGELHVSWEEGTWAAWLYDLLKPHVHQVLVCDPRRNALLKEGNKNDKVDARKLADLLRTGMLRPVYHGEHGLRTLRELGRSYQTISKDLNRVMNRVKALYRGWSIACAGTQVYAPRYRQEWLGKLEHAGVRRRAELLYEQLDGLQALRRTLRPELLAESRKHKASKLLRQIPCIGPIRAARLIGLMQTPHRFRSKRQLWTYSGLGIETHDSAQYCYVHGQLQRSKKPQQIRGLNRNHNHEMKEIFKGAATRASCGVGPLRDFYVALLAKGMKPEMARLTLARKIAAIALTLWKKEERFDTEQLKAQAA

SEQ ID NO: 207934 - protein, 368 aa, unidentified
MEPYYVGLDVHSRQSAFVIEDGGGRVSAQGEIPTTPAGLEHLRAAHRLPPNTPVALETGTVAFFVARQLAAIGLAPQVIDAHEVRLKAHRPTQKSDRRDAFELCEGLRRGIYRAIVHVPRAAVLRLRETLARRRHFVRLQTAQISAVKALLRGAGLGRLSRSLGSEVGWAKVLAALAEHREVQAYVEQHRALWRCAREQITTLEAALAQQQRASFADALRRLQTIPGVGSIVASTAIAVFSDIGRFPDAKHAASYAGLVPATYQSGERDAHGRITKRGAAELRAMLCEAAHHASRPDHPLHPYFAPLAARRGYKMAVVAVAHRLCRIIFAMLRDTRDFDVGKLAVERGPFERKVGCLYRRKPAASGRR

SEQ ID NO: 207935 - protein, 318 aa, unidentified
MTESRYAGIDVAKETLELALSQGTPVKSFSNDGPGHEELAKLLLANEIALIVMEATGGYEFDLACALQAAGLAVAVINPRQARDFAKAMGYLAKTDRIDACVLSELARTIAAHPHADRFVKPLADAEQQTLKALVTRRTQLMGMLNAERQRLAISHPASRASIEKLVKTIREQLKGIEAQLAKHIAQNHADLSGLLKSVSGVGPALSAILIAELPELGRLRNRQIAALVGVAPFNRDSGAMRGKRSIYGGRAHVRRTLYMGALVATRFNPVIARFYQRLTAAGKPKKVALVACMRKLLIILNAMVRSGKPWDASLHSA

SEQ ID NO: 207936 - protein, 371 aa, unidentified
MAERRLVGIDLGIISAHTVRVLAGDGTVVCRRKAVPTVESLAEVERAALAGASTGTCLEVVLEPTGPSWLPIAVFFASRGHTVYRVSSAKAHDLRRVLSRQAKSNGIDADALARLPLVDPAGLHPLELPGAARAALDRRVRACDRLTRAGAEHKRRIKDLVRQLLPTSPLTGDLGVADLAVLERFGADPHALLRCGQARLARLIGKASTGHQGTQCAAQWLQAAHAALQLYDDHPAVAFQDLAVEVQTEVRLLKATQAELDRHATQREYCYRWVDPLQLARSLPGLAQIGGPALVATMGPAKRFANAARFRSFTGLAPKASETGNTDRKGQPISKAGNRLLRTTLVRAADNARHVDPQLARIYYVQMREGC

SEQ ID NO: 207937 - protein, 346 aa, unidentified
MKQVNTIGLDLAKNVFQIHGADAEGAPIFNRKLRRAELLVFFQKLPRCLVGLEACGGSHYWAREIAALGHDVRLIPPIYVKPFVKRGKTDAADAEAISEAVTRKTMRFVPIKSADQQAAAMVLRTRALLIRQQTQAINALRGHLSELGVVAALGTAKVAALIEIVRDEEDVCLPKAARLALAEIADQIEALTRQIDKLERGIVGEAKRDEDMRRLTTIPGVGAITAATVKALIPDPDGFKSARHFAAWLGLTPKPHSSGGKERLGGISKMGNPTLRSLLVCGATSVLRRVKGNDKAPRWLVALLARRPFKVVAIALANKMARIIWALLTRGGTYRNTGAASGAAHA

SEQ ID NO: 207938 - protein, 338 aa, unidentified
MSLYGGIDLHANNSVVVLLNEQDQVIYQRRLANHLPTILEQLAPYHTDIKGVVVESTYNWYWLVDGLMEADYRVYLANPAAMQQYSGLKYTDDHSDARWLAQVLRLGVLPQGYIYPKADRAVRDVLRKRAHLVRQHTANVLSVQNLLARNTGLRFSAKRIHEFTKADLEGLLPEPNQVLAVTSSLALLACLSQQIKTLEKAVTTSLQHTPAYEQLLSVDGIGTILAQTIVLETGHIGRFPTVGNYASYCRCVKSTKISNGKRKGQGNSKNGNPYLEWAYMEAAQFAIRFSPTVQRFYQRKQARSHVMAARKAVAHTLSRACYYIIRDLVPFKVQKAFG

SEQ ID NO: 207939 - protein, 381 aa, unidentified
MKRGPGPSHLLLTPDRAGNVVGIDPHKRTLTATVVDPRGAILASEHFRVSGDGHRAMEAWARQFGAVARWGVEGASGWGRHTAMFLTGRGYDVRDVCPNRTARTDRARQRGKSDTLDSERIAREVLAHSLLPKAFKRAGQDQGPDERQQLLAIWHNRRLSILKSRQHLVNEAESLLCELPLELREALPASKAVRPRLNALVARNRRRRYDAATKLRLAMLDTYHAQIAALDGEEKQVIAHLRELVRDSGSTLAELCGLDTRSVAELLVEVGDVRRFTEGGFARFNATAPLPASTGEGPGEPIRHRYNPGGNRRINAVLHRMAITQLRCEPRAQAIYANARANGPHTKTQARRVLKRHLSDVVYHRMTRDLAAHTTEQLLAA

SEQ ID NO: 207940 - protein, 398 aa, unidentified
MSLEAHAEPAAIQTHIGAIFISLELSRSRWLITSLVPGGGQRMSRHSVEAGDLAGLLARFWAIRDKVSARTGISYPIIVIQEAGLDGFWLHRALEQEGIESHVVDAASIAVSRRRRRAKTDRIDGEALLRVLLAFKRGEPRVCSMARAPTPEEEDRRRIGRERKTLLVERIQHVNRIKGLLFSQGIGDYEPLHRDRRRALEAVRTGDGRELGANMKTQIGRELDRLELLLDQIAAVEAERDAMLAREAEAKAAQDAKRTPAAVEMLMDLKGLGPETVAMLWTEAFYRSFDNRRQLAAFVGLAGTPWQSGSIDNEQGVSKGGNHRLRTAMIQLAWLWPSHQPGSALARWFVERTKDASKLQRKKMAVALARKLLVALWKWVDAGVVIEGAVLKSAAKAS

SEQ ID NO: 207941 - protein, 339 aa, unidentified
MQVTTIGLDLAKNVFQVHGITEGEEVVFNRPLRRAQLLSFFSKIEPCLIGMEASSSAHHWARELTALGHEVRLIPPMYVKPYVKRGKSDAIDAAAICEAVTRPTMRFVAIKTVEQQALLSLHRARDLLVRQRTQLINGLRGMVAEFGVYIAKGLARVIGFAEDILAGEVLDLPEIANEVIYNMCEHLMALHARIRWYDDRLKVVAKEDTRVRLLRTIPGVGAVTASAIIASIGDGHQFRNCREFAAWLGLTPANKSSGGKEKLGRITKMGDQYLRSLLVVGMTSLVRQTKSHPERASKWLTSLLERKPARLATVAMANKTARIVWAVLTRNEPYTPHTA

SEQ ID NO: 207942 - protein, 451 aa, unidentified
MAQKRNKVPSLPVIEPNAAGIDVGATVIFVAVPADRDPEPVRCFPTFTVDLERLADWLQQCQIRTVAMESTGVYWIPLFQILEKRKIDVRLVNAHHVKNVPGRKTDVADCQWIQHLHSVGLLRGSFRPDDEICAIRSLWRHRDNLIQLATLHLQHMQKALDQMNLQIHHVISDLDGTTGLAIMDAILAGERDPHQLARLRHPRVRASEETIMKSLVGDYREEHLFTLRQSLKAYRYYQELIQEVDLQVKQMMQRLPSKVADGEKPPKGDKPRPRKTPWRNEPPQLRNDLYRAFGVDLTEVPGINVLTAQMLLTEVGPNLARFPTAAAFCSWLRLCPDPKISGGQVLSSRTRPTKNRAALALRMAAQALHRSNTFLGDYFRRMKARMGVPKAMTATAHKLARIVYHMVTTQQEYDATIFQQHEQRRRQQKSARLRAQARELGFQLVPITSVP

SEQ ID NO: 207943 - protein, 331 aa, unidentified
MNYSHFVGLDVGKKTFDASLMSAAEKELSHKSFDNTPTGIQSLLDWIAGYHLSLSKLLFCAENMGSYVTELSVSSVSMGFSLALVCPLTIKKSIGLQRGKNDRIDAKRIANYAVLHYRKLELYKLPNKDLVRLRGWIIIRDNLVKQKVSSIKLLETFSWMAKLADVTESISFLEEQLKSIKEKILEVEEDMEQLIAASTSLYTNYLLLRSIKGIGIINAIVLLCVTDNFQRFDNPRKFACYCGVAPFEHTSGISIRGKTQTSSLANKEVKVYLTRAAITAISWDPQMKAYYKRKIAEGKHKASVINAVRAKIIARSFAVIRRQTPFVTLAV

SEQ ID NO: 207944 - protein, 354 aa, unidentified
MRREYFIGLDTHGSFCEMAAITQTGNLVARGSCDTTIPALRELLAKVPTPRHLVFEEGPLANWLFRNLVEDVKTLTVAQPRRNRLIACDGDKDDPVDAEKLANLLRGGYIKSVHQTQTLAETLFKQLVAQYHRRVRRRVAAGQQITAILKQHGVMAQAKHFDSPDDRAELLTRLPAHRLLSEMMTASWQEYDELSAHEDAWRKRLAREAKQDDLIKRWVELPGISWVRAATLRAYLDTPWRFRNPKALWKYLGIGLDRRHSGNGPEILAVPMQTNRLLKSTILGAARSAIAQGANPFADQYRTWISRGVSAKLAKRNVARSLSATLWGLWKNGTVYHPEWVGVNLAATQRAPTV

SEQ ID NO: 207945 - protein, 313 aa, unidentified
MYYIAFDVSKKELSVYDGKKDMTFSNSEGLGSLKKYLKNYYRDFSQLIFLLEATGSYSDYLIKMCAQYQIKAVIINPKASHHFAKSLGIRNKTDKIDARMIYQYHRLIHDQMITVPRINKEAKTLSTYLGSYQLAMKQRVALSNHLRHVRDKDLFGLLKKELKRALGLEEQILKRITAYILKDPQLKADYQRLLTIPGIGEKSAPALLYLFITYQGANRNQITALCGLDPIQRQSGTSVSGKPKISKHGSKLIRKVLYMPMLSAIQTNLRIRAFYQRLLRNHKVKKTAVIVAMRKMILIAHAIYRDKTEYVPA

SEQ ID NO: 207946 - protein, 409 aa, unidentified
MKLYVGIDVSSTDLYTCIMDQEGNTCAQFKVDNHLLGATFLRDQILLWANKRQPSEILIGMEATSVYSWHPAMFFHQQEELKSWHVKVFTINPKLIRKFKEAYTDLDKTDGIDAWIIADRLRFGRLKVTAVMHEQFIALQRLTRMRYHLVHQLTREKQYFLQHLFYKCSSFTQEVDSSVFGHAILELLLESFSLDEISQMDVQQLADFLRQKGRNRFADPECIAKSIQKAARSSYRLSKCVEDSIDLLLGLSIQSIRSLQAQIKELDKAITRHLEGIPNTLQTIPGIGPVYAAGILAEIGQIERFDNQAALAKYAGLTWSKHQSGRFQAEETSLIRSGNRYLRYYLVEAANSVQRHDATFRAYYRKKYEEVPKHQHKRALVLTARKLVRVIDALLRNGQIYTPRKEEDR

SEQ ID NO: 207947 - protein, 460 aa, unidentified
MNPKRSKSKDGGKMPMVHPNAAAIDVGATMHMAAVRADRAPEPVHSFGTFTADLHRLVDWFTECGVETVVMESTSVYWIPIFELLDARGFTVFLVNARDAKHVPGRKTDVSDAQWLQRLHSFGLLRASFQPKGQIAELRAYVRQRERLLEYAASHIQHMQKALTEMNLQLHHVVADITGATGLRIIRAILAGERDPEALACLRHYSCHSSAETIAKALTGSYRAEHLFALEQALALYDTYHEKASACDARIEAVLKELSNHRGRGHGPAPPASLRRNRTDQANALAFDVREALFALLGKDITTIDGLGPYLSLKLIAECGDDLSSWPSAKHFTSWLGLAPSNKVSGGKRLSSRTRRSGGRAAALLRLAAVTVGRTNTALGAFYRRLSSRIGKAKAVTATARKIAVLFYNAVRYGMDYVDPGASSYETRYRTRVVNNLHRRAKAFGFVLQPLEPNVGDAVS

SEQ ID NO: 207948 - protein, 387 aa, unidentified
MNKSNRVIGLDVHPDSFTGAVLLKGKDAASARVVSTSRRVELPELEKWVARHTGEQDVLVLEASGNAFAVAERLRVLQRQVVILDSHRAGKVGKAYCANDRVDAIKIARIYLTALSPVVWQPDAKTRERREVFSAYQAVVKEATRLKQQLRSMLNEHCVRLESGFRLSHPSAINRLLKLREWTPVRAMLLEQLHRGLVSAQARRTRLRRYMAQEVLDEPELLRLTRLCGISLITLYGLSASIGDIKRFSNSRKLSAYFGLNPSVEQTGNWEGEGALKRHGRGALRALLVQSAKKLLRVNNPLQKWGLAVATRRGRNKAAVAVARKLCVAVWHVMQGHVIGAIERMTTLHTKLHKLATELGLNTIKSQGYETKEAFVQKKLYLLRSYA

SEQ ID NO: 207949 - protein, 273 aa, unidentified
MTSIIYVGMDVHTTNYTLCCYSMEDDRFFAEVQVEPDAKNILKYLARIEKQQSRDCRIVCGYEAGCLGYSLYHQLHAHGIDCVILAPTTMMTKPGKRIKTDRRDARLISKCLAFHTYSPVYIPTEVDDAVKEYIRMRDDANSALARVKQQIIAFCIRHGKIHDGKSYWTNKHLEWLSSLDLGNKILSEVLQEYLIRYYQLREQVDMYDMRINELAQAEPYRQKVEKLGCFRGIAAHTALSFCVEVGDFRRFATAQQFASYLGLVPGECSSGDK

SEQ ID NO: 207950 - protein, 346 aa, unidentified
MNYIGMDTHISTLDFAVVNEAGRLTKAKSIATNVKGFMEFVKQVPAPRTIYMEEGTLAAWALETCVQYGEKLVITDPKENHWIGSSGQKDDPLDSFKLAQLARGGYIKEIHHPVGQRRRFRELMEAYHDTVRMTTRLKNKIKAKFRQNGIPCTGDTVYSETYREEWKGKLPQDATLLLILEGLWRQLEQSKQNEKEILAAARAQAKYYPEIKHFEAIPGIGFISAATISAILETPHRFANKRKIWMYAGLGLMKKSSGGKIYSEKLTIDYNRLLKCTIKQAAEATIQAKDNPFRHKYLDMTLLHGIAPNLAKLTIARNMLATMWAMWKKGEKYNPEIREKESHKQG

SEQ ID NO: 207951 - protein, 334 aa, unidentified
MEFTYYIGCDVSKNELDFAIYKGNAFVFHREIKNQAKSIDDLFKELKQLPEFELSSTVVCLEHTGIYNNLLLEYLHKKQTNICLESAMQIKNSQGNLRGKNDKIDSIRIAEYVYTFRDKITLWQPKREVIQKLARFSSDRTRLLAAQKMLKTPLNESKLFSGSKMHKESSNLFAKSLKSIKSDLEKVDKAIKEVIKSDEELTRLFTIITSVDAIGDVTAVGIIVTTNEFKDINDSKKYACYAGVAPFVRESGIFKGKGRVSTMANKVMKSLFHMASLSAIRYNEAIKTYYERKVAEGKSKMSVLNAVRNKLIHCIFACVNQNRKYNKIYTSSLV

SEQ ID NO: 207952 - protein, 331 aa, unidentified
MHYAGIDLHKRTLTVAIENDSAPFGKPKTFFCREEEEIVGFFSNLRPFRAVIEASGGYRWLYVLLSPLGEVVLAHPRRLKAIVEGRAKTDKLDAILLAKLLRADLIPTAYIPPDRYAQLRDLTRARARLSRHETEAKNEMHALLGRNNIHLPIKNPFCKRGILLLSRLELCGADAVIRDELLVRLGHYQEQSKVLDAALTAMSTVFPEVEALLPIHGIGLFTALLIVAEIGEPERFADGRQVGAYAGLTARVDQSGGHCYTGSITRQGSAWLRWALVQAAMHVTARDSQLSNFYTRIRKRSSAKIARVAVARKLAGICWLRLMRRRFAQAA

SEQ ID NO: 207953 - protein, 446 aa, unidentified
MSDRSGLSRGDRNRNARLARLRQLLPPENAIVGIDLADDKQAAVVADHDSRVIARRRVSARAWELGGLLEWAAGKAAAAGFASVTVACEPTGHRWRVLDQLAAERGLALVCVQPLLVYRAREGEDLTRDKSDPKDAVIIARLAAGLHCYEPERADAVWARLRHLGARRHQLTTAATAQVNQIRDLLECCWPAVLAAAGSPFRSASWRASVAVVLDRCAGELGRVRRLGAARFEAAVRRELPRWGAARPCLRIVRAVFAALADPAGVAMHRPGALERAGLALADWHVTRQRLAATETRMVAVLDELGLTALVTTIAGLTAVGAAAILAESGDPARFATPRSLVKHAGLCPRDNASGAFQGKTPISGRGRPGLRVAAWRAVWAAMPNNPVLAAKFTHLTTREDNRLARQQARTACAAALLRWIHVVVTQRVAWDPAIAAGTTPLPRAA

SEQ ID NO: 207954 - protein, 347 aa, unidentified
MNDGISVGRRFVGVDLHLYRSVIAGLDEAGEQLGWVRIDNDPKVLVREVRKAGGRGCPVAIEATYGWYWAVDALLAAGSEVHLAHPLGMKALRKRKRVKTDPADAYELANLLRLGSLPEAYISPPELRELRELVRHRRQLVKLATAVKAGIRALLAKHNIRLSATQLESDTATGMLDALALPGTYAARLASQRRLMLVLADEIAATEVELARRLRHHPGYRNLLTVKGIGPVLAVVFVAEIGDITRFPTAGALCCWAGLTPRHYESDKTVHRGHISKEGDTLVRWAAVEAIQRQTEPAVKAVHDGIVARRGKTARNIAKVAAARRMLEVVDYVLRDGQARCLTKAAA

SEQ ID NO: 207955 - protein, 394 aa, unidentified
MTESSDYESVQVFIGVDVGKDTHHAVAINRSGKRLFDKALPNDENKLRSLISDLKQHGQILLVVDQPATIGALPVAVARSEGVLVGYLPGLAMRCIADLHAGEAKTDARDAAIIAEAARTLPHALRTLKLADEQIAELSMLCGFDDDLAAQTTQASNRIRGLLTQIHPALERVLGPRLDHPAVLDLLQRYPSPEKLASLGEKKLAAQLCKLAPRLGKRLAADIAQALAEQTVVVPGTNAAAVVLPRLALQLITLRKQRDEVALEVEQRVLAHPLYPVLTSMPGVGARLLTEVACRAFASAAHLAAYAGLAPVTRRSGSSIRGEHPSRRGNKALKRALFLSAFAALRDPLSRAYYTRKMSQGKRHNQALIALARRRCDVLFAMMRDGTFYTPQAS

SEQ ID NO: 207956 - protein, 340 aa, unidentified
MKFVGVDLHKQTISVCVMAEDGRKRTVEQRRSLRCADVAGIRRFFEQLGGFQVVVEATSSYEWFLLLVEDLADRCVLAHPKKLRVIAESKHKSDKIDAQVLAEFLLLDMIPEAYRPSPRVRQHRVLVRHRDAVQSQITGVKCKLRYKAAFYNADIASLFTVRGLAHLAKIAMSHADRFECQALQDQLQFLQQQLKAVDQELRTFAETAPVAEREARAILATVSEVGPVTTDVILSEAGDVRRFRGAKRIVAYAGLDPGIRESAGKGKQLSITKEGSRLLRWALIETAWRLVRKTARWRQLFERLWSSTGHKKKAIVGVARRLLCVLFAMLRDGRAYRLAA

SEQ ID NO: 207957 - protein, 317 aa, unidentified
MNEPEDVVVGIDVAKAALDVAVRPRGEERHLANDPAGIAAAVEWLQTVRPHVIVVEATGGYEVPLVAELGSANLPVAVVNPRQVRDFARATGRLAKTDRLDAQVLAHCGQAVRPTPRPLPDAAAQALAALVERRRQVVAMRTAEENRLGATRVAAVRTRIQAHLTWLESDLQEIDDDLRQRLRASPLWREQDDLLRSVPGIGIGPVLSLTLLAEVPELGRLSHGQIAALVGVAPLNRESGSLRGRRAVWGGRRAVRTALYMGTLRATRCNPTIRLFYDRLLAAGKAKKVALVACMHKLLTILNAMLKHQTPWQAQAA

SEQ ID NO: 207958 - protein, 334 aa, unidentified
MENIALIGIDLGKNSFHIHCQDRRGKAVYRKKFTRPKLIEFLATCPATTIAMEACGGSHFMARKLEELGHSPKLISPQFVRPFVKSNKNDFVDAEAICEAASRPSMRFVQPRTESQQAMRALHRVRESSVQDKVKTTNQMHAFLLEFGISVPRGAAVISRLSTILEDNSLPLYLSQLLLKLQQHYHYLVEQIKDLESQLKRKLDEDEVGQRLLSIPCVGTLTASTISTEIGDGKQYASSRDFAAATGLVPRQYSTGGRTTLLGISKRGNKKIRTLLVQCARVFIQKLEHQSGKLADWVRDLLCRKSNFVVTCALANKLARIAWALTARQQTYVA

SEQ ID NO: 207959 - protein, 429 aa, unidentified
MNSTQNKKIEQVKETTMIVGIDVGSEKHYFRAFNWRGIELTGKPVAFSNSMEGFNSFYNSVVELMQKNELKEALVGIEPTGHYWFDLGQFMGEKNIKFVMVNPHYVHKTKELDDNSPSKNDRKDPRVIAGLVRDGRYFYSYMPTGVYAELRNASNRRFVLVEEQTRAKNRLQKWVAVYFPEYKGIYTHIDAKGGLPVLKQAPTPEEIVRLGVEGIIKIWKDDKLRGNGHKKAMLILNAAMKSIGLKAGLTEARMEIQDLIEDYELQTKRLERVNDLIKELCQQVRYADKLLEIKGIGITTVAGFIAEVGDITRFDSTKELQKLAGLELVADSSGKHNGKTKISKRGRKRLRYLLFEAAISVVGKNEEFKEIHRYYTTREKNPLKKMQSLIAVACKLIRVFHVILTKGISYDASKMLKDIRHPGEQLKAA

SEQ ID NO: 207960 - protein, 313 aa, unidentified
MKTRILYAGIDVDDKAYHVSVFDKGKGTRLEFKCGPNPQLLLRAFNRHGLDKESLQVCYEASYVGYSIYRSLTIAGFHCQIAAPSLIPSQAGVRQKTDKLDSRKLAEYYAKGLLTFIYIPNEEDEAVRDMLRSKLFLTEQQTMIKNHINGLCRRLGLNYKQQTEKKSRWTRHHLEWLYSKTNQLKQRSAKLTFQILLKQFEDVNKNIELFDLEIENQAEAPRFAKKVKVLAAFKGVESTTALTLITELGDIRRFDHPKRVTSYAGFDIVEYSSGGKQKRFSISKLGNSNIRVVVCIKKAAECFSTESLRKKYK

SEQ ID NO: 207961 - protein, 342 aa, unidentified
MAVYYIGADVHCNNTELAVEHNKKIIKRICVPATVPAIRSVLADLGGRCHVTFEEGPMAGWLYRNLKESVASITVCDPRRNRLIACDGDKDDQIDSGKLAALLRGKFLRPVYHDHSREQLEFKQWIKLYHDFVKSATRNINKVRGLCRCEGIRIPSHAVRDVVYRSHWLEVLEHKVLADQVGLLWHGYDTAACQARAAKKQLERRIRGNAVLQRWSEIAGIGVIRAATIYCYLDTPWRFKTKSRLWKYCGIGLQHSCSGKDSKGVAKQGQLQLAWQVNKMLKNAVMGAAMSAIRQKNNEFALYYERLLRDGITPGNARHSVARRMAVVLWGTWKQLLRQDQN

SEQ ID NO: 207962 - protein, 338 aa, unidentified
MTIVRVGLDIAKQIFQVHGVDRTGKVVLRKRLKRSEVATFFAGLEPCLIGLEASGGAHYWFRILSRLGHTVRLIAPQFVKPYVKSQKNDANDAEAICEAVSRPNMRFVPAKRVEQQDLQCLHRVRSRLIGCRTQLVNQIRGLLAEYGMVLPQHVAQLRRHLPALLEDAGNELTISSRYLFHALYEELVELETKITSADQRIERAFRENAECQRIGAVEGIGPVTATAVVAAISDGHAFRNGRQFAAWLGLVPRQHSSGGKSRLLGISKRGDPYLRTLLVHGARSVVYRAKAKIDCRSRWINDKQQRLGTARACVALANKNARILWSLIAKQQVYRPAV

SEQ ID NO: 207963 - protein, 375 aa, unidentified
MTTTSSEQTLYAALELSKNSWLLAIQVPERDNPSLHPINGGNVDGLIAKLDAARNRVAKVSGQTPKVILCYEAGYDGFWLSRLLEQRGIECRVMDPASLQVNRKARRVKTDRIDVEKLLQALIAWCRGERHVCSMVVIPSAEEEDLRRSHRERHRLVRERTAHINRIKALLFGQGIRGINVMRFYKTLTPADLVTGDGRPLPERLGQEIVREIERLAQVQEQIVEIEHERDLAPTPCVATERKRHQLQRLNGIGEVSAPVLAREVYYRQFANRRQVGSYLGMTPSAYDSGESRRSQGISKAGNSLARTVMIQVAWMWIKHQPESELTKWFRRRTEGQSKRMRRVMIVALARKLAIALWRYLETGLIPEGAILKAK

SEQ ID NO: 207964 - protein, 436 aa, unidentified
MRGCRCSMIMGFTKPIEHFILQRKKVITMNTLYVGIDVSSKSNVVYLMLPNGDKHSNFSVANSHEGSTQLVKRILSALTSHSLDTVLIGLEATSVYGDNLVYFLREDATLAPFNRKIHVLNPKQVKKFHDAYNDLPKNDYVDSFVIADCLRFGRINKEVYLGDYRYKALQNLTRARFFAVQNLIKEKQRFMNVLFKKYSTMTQEKVFSDTFSTTALAVYDEFDSAEALANMDLHELTDFIIEKGKNRFPDPDAGAKAIQKAARSSYRLPKTVNDSVNQVLSISITSMKALESQIKEFDKAIKAQMELLPNVLISIPGIGPVYSAGIMAEIGDINRFDNQAALAKYAGLAWKQHQSGSFEAEVTRLIPSGNRFLKYYLYEAAFSLVRCDKEYSDFYHLKYKEVNRCQHKRALALTARKFVRLVFRLLKDNRLYVPAK

SEQ ID NO: 207965 - protein, 417 aa, unidentified
MDTSLSVVLPICCGIDVHKNTLTACLLTTGASGKPAQDVRTFRTVTAQLQELARWLLDAKCTTVALESTGVYWKPVFNVLEPAGLEVVLVNAQHVKNVPGRKTDVKDAQWLATLLRVGLLRSSFVPPKDIRELRDLTRYRTQVVRQRAQECNRIQKLLEDGNIKLAGVATDILGRSGRDMLNALSKGDDDPKQLADLAQGKLRAKIPQLEEALRGVLSETQRWLLREQLHKIAELDEAIERLDRKIAELCLPFAKALAVLDQIPGVNARIAQIIVAEVGLDMSRFKTASNLASWAGMCPGNRQSAGKSQGGKTRKGNGWLRQALVEAGWAASRSKGTSLSATYHRLAGHRGGKRACLAVGHRILRMVHHLLSSHKPYEEGGPDYYRPTDTDRLKDKLVQRLKKLGFAVTVAAVETAA

SEQ ID NO: 207966 - protein, 321 aa, unidentified
MAKRTTICAGIDTGKRKLDVALDGNSLQLQVENTAEGHKVLLEWLRRHKVKRIGIEASGGYEQPVVAELRRKRFVVVVFQPAQVRAYAKFHLQRAKNDKIDAALIAACTAAVKKIHPAPDPRLQPFAEHLTMIEQIGEDIKLYKNRLETCRDPRIQKVWKEEIARLAKRERAELKALVAAIREHRDLAQRLDLIYSVGGAGLPTAVAILVRMPEIGQLSREQVAALAGLAPYDDDSGEQVGARHIHGGRKRLRRALYAAALPASFRWNPQLIALYTQLKAAGKEHKRCLIACARKLLIFVNTVVARGTPWQDEPLPTAATG

SEQ ID NO: 207967 - protein, 403 aa, unidentified
MGCFAGIDWGSTKHAACVVDDAGKVLASFEVAHDANGVAELLRRLCKFGPSSELRVGIERPSGVIVDTLLDAGFRVVAIHPNVLKACRPRYRAAGGKHDLGDAYIVADVVRTDGHRFRDLQPLGDEIRALRALVRTRDDLVHARVAHANQLRALLESFWPGAAQIFADVDSPIALAFLAKYPGPASAARLGEKRLASFLGQHKYPGRRSAAELLQRLRQAPDGKAGELEADARSEAVLALACILRHLVAQLRLLTSRIEHDVAALPDGRIVMSFPRAGRINAAKILSELGDDRGRFVSAEHLAAEAGVVPVTYASGKHCGVVFRWACNRNLRVAICTFADNSRHASPWAASVYQAACARGCDHPHAIRILARAWIHVLWRAWTDRKHYDPAQHGAAARMAATA

SEQ ID NO: 207968 - protein, 323 aa, unidentified
MNKDRIYFGIDISKDVFDVMDSNSNYFQFSNDYKGFKKLLELLDKSSHCVMEATGYYHYKLAYYLIENNIRVSVENPLSVKRFIQMRLSKIKTDKSDAKMICLYAQNVELNLWEGQSKNQIECLQITRLLSLYFKQTTALKNKIHGEDVLGNPSLLVVRSLKRSLKHTQKEIKLLEEKLTQIVKQDHQELLTRLESIPGLGRKTSIMLIVLTDGFERFTSASELCSYSGLTPIIRQSGTSIRGRARISKMGNRKLRNLLFMCSFTACKNNKACKALYDRIVAKGKSKKLALIAVCNKLLKQAFAVAKSELIYDETYRSTLVKN

SEQ ID NO: 207969 - protein, 327 aa, unidentified
MDAVYMGIDVSKDRLDYAYYEDKQRYQVAQDAEGIARLVRDCQARQVALVVVEATGGLEMPVVSALLAGGVPTAVVNPRQARDFAKSTGQLAKTDKIDAQLLARFGFAVRPRTYQMPSEEAQALDALLTRRNQLIEMRVSERNRLASTHASQKKRLCEHITWLEDEIKRLEKELERTVHQTDTWKAKDDLLQSVPGVGDILSASLLAWLPELGQLSGKQIAALVGVAPLNRDSGQMQGRRTVWGGRAQVRRALYMATLTATRRNAVIAAFYRRLRAAGKPFKVAMTACMHKLLTILNAMVKHNTYWIEPVLLGSQVVTAARAETVPI

SEQ ID NO: 207970 - protein, 322 aa, unidentified
MEKLQYLGIDISKKSFEVALLKENKYKHKSFSNNDKGYEELKKWLEFNQAKEVHCCMEATGIYGEKLAEYLYKEGYKISVENAAKISSFAKAQLSRNKTDKADAKIIAQYCEACKPELFTPQPKEVKELKELVRYVTELKEAKTQQSNRLEAVENKAVVESIKAVVKTIEKEIEEIEKLIKQHIDNNPSLKADKELLKTIPGIGETTASMLLAEIPEIKNFESAKKLAAFAGLSPSQYSSGTSVRKRTRICKIGNSRIRKALYFPAITAMRHNPILAEFSKRLAAKGKHNFAIICAVMRKLLHLAFGILRSGKAFDPNFSLN

SEQ ID NO: 207971 - protein, 308 aa, unidentified
MSSLPIYCGVDFAKEKFNHHGLPRPGSLPNTPAGHRRFLAMLPSGAHLVCESTGSCHRALVAAAQRVGVAVTVANPQQVRALAEGLGRRAKTDPLDAQSLHDFGRLVAPQADLAPSAAQAALRELVVARQQLVLARSTLQLQSADHQLPLVKALARAQLKLLCAQIAKLEAAITKTLAAESALAAQAARLAEVRGVGALTAATALALCPELGTLSRAQAAALLGVAPFNHDSGQLKGSRHIAGGRYRLRCAIYMAALSAARANPILRSFYQRLRAAGKPAKLALTAVMRKLFILLNHLLKNPHFQLAA

SEQ ID NO: 207972 - protein, 339 aa, unidentified
MKLCSGMDLHSNTTHIAIMDEKRQRLIDRKVRNDPELILRFLEPYRASLEGIVVESTYNWYWLVDTLRDQAYRVHLAHPVANQQYHGLKHSDDRHDAFWLAELLSLGVLKEGYIYPRELRSVRDLLRKRLQLVGYRTAMILSVKHVIHRNRGIIVEASQIKRLGKEGWAEILKGDDALWLAARSSKEAMDCLTQQIQEIERWVLRRVKLEEPFSRLLSLPGVGEILGMTILLETGPMERFPKVSQYASYGQLVSSQWTSNDKVKGRGNVRNGNRYLAWAYSEASDHARRHDPLCRAFYNRKLNQRGHRVAHKALAHKLARAAYFILRDHEVYREEKMFS

SEQ ID NO: 207973 - protein, 315 aa, unidentified
METIIAQNVGVDISKVTLDVHLHPAGIARQFANNANGIKALLGWLGGRDIVRIVFEPTGPYHHRLERRLGDAGLPLAKVNPLQARRFAQAAGAHAKTDAIDAAMLARMGALLTPPIRPITSEAIDEMRELHIARLALVKDRTAARNRQHACRSPLLKRHAAQRLAQIDRQIAAIDAALNARLQTDPELVARFEILVSIPGVGALTAITMLIEMPELGQLESKQVASLAGLAPQARDSGQYRGKRHIRGGRAVLRQALYMPALVATRFNVDLKAKYQAMVTAGKPPKVAITAIMRKLIILANTLLKADRKWIDKPA

SEQ ID NO: 207974 - protein, 342 aa, unidentified
MVQAITVGLDIAKNVFHAYGATADGGKAFSRKLRRAQVEMFFSKLEPCLIGIEACATAHHWARTFVAMGHEVRLMPPAYVKPYVKTQKNDEADAEAICEAVTRPNMRFADIKTIDQQSVLVLHRTRTMLIKHRTRMGNTIRAHLAEFGITEAIGREGLARLIDLIVTGEDARITGITRHAMMCLVGQYRLLQDQILDLDRQVMACHRSSEASKRLATIPGVGPLAASALVASIGDASSFKNGRSFAAFIGLVPRQSSSGGKERLGKISKRGDHYLRWLLVVGSLAVIRYAQRHGTKRPWLIKLLQRRTTKIAAVALANKIARIAWVLMTRGGVYREPAAQPV

SEQ ID NO: 207975 - protein, 433 aa, unidentified
MTTAPYDLIIGLDRSDQTADLCLLDTRTGERRRVSIATAPEALWEWLAELRQQYPAARVGLCLEQPAGHLIPFLEAYAWLTLHPINPLTLQKYREAFVTSRAKDDTKDAAYLADLLLNHHAQLPVWAPEDSATRAVQQLVFHRRAVVDERTALTNRLQALLKQYYPQALTLCGEDLWRPLATAFLLKWPHLGAVQKARPATVTQFYYVHGSRSQKLLAQRLALLEKAVPVTDETAVIQSFELRVQLVCRQLQALQRTLGEFDQQLAAAYAAHPDRAIFASFPGAGPVLGPRLLASLGANRERFADAATQLQRYTGVAPVTKRSGGSCRIHRRYLCPKFHRQSFHEYASQSVLWSRWAAAYYLQQRSKGCAHHTAVRALAFKWQRVIWRCWQSHTPYDERIYEAALRKHGSPLLALFERVQLGKSPWKNPAPKN

SEQ ID NO: 207976 - protein, 409 aa, unidentified
MSVEHDPSMRRPTAGIDWASTEHALAIVGPDGVEVQRMIVEHTATGLRKLLRCLQQTGVFEVGIERPDGPVVEALLEAGLTVFVIAPNQIKHLRRRYGAAGNKDDRFDAYVLADTVRTDHHRLRPLTPDSPATLTLRMTVRARKDLVAARVAMANQLRAHLEHVLPGVIGLFRDIDSAITLSFLTRFPTQDKVDWLSPRRLQNWLRSVSYPNPARAGLLHAHLLAATRGTTGPEATARAHVTAALVAGLTTLREQINALEEQMEVQLLQHPDAEVFTSLPRAGIVRAARLLAEIGDARGRFPTPEALTCLAGAAPSTRQSGKVKVVSFRWAVDKQLRGAVIDFAGDSHHANPWAADLYQRARARGHDHPHATRILARAWLHVIWRCWQDHVPYDPTRHRALQAVLATTA

SEQ ID NO: 207977 - protein, 373 aa, unidentified
MKRLAATNVVAQGPHKQTNAVKSRKWRPAVEHIGMDVHKRESQLCIVTEQGEVLEQRIRTERGRMAEVLGGRTGAKILLEASTESEWVARYLEQMGHEVVVADPNFAPMYGGRNRRVKTDKRDARALADACITGTYRKAHRTTESRRQLKAQLAVRDALVRERAKHIVLIGALVRQQGLRVATGSADTFLARLTKVGLSEEVRKVVAPLVAVIRTLNEQIQVVDAKLEKLASDDEQVARLCTMPSVGPVTAVAFVANVDDPKRFAGAHQLEAYLGLVPSEMSSGEKQRRGRITKVGSRRMRALLVQVAVSTMRLRKATTAGLWEWASRIEVRRGRKVAAVALARKVAGILYAMMRDGSHFKPCVSREAMTNAA

SEQ ID NO: 207978 - protein, 352 aa, unidentified
MKTYYGCDAHKRYSVFASMNERGQPGVSHKVDNDRALFRRFLTTLPSDSPIAVESVGNWYWMVDEMEEAGHNPILVHAAKAKLMMGQINKTDKLDAQGLALLLRNGTLPAVWIPPRELRDKRELPRLRMALVRVRTLLKNRIQATLAKYGIQVNEVSDLFGIGGRALLKNRLKELPPQTRQSVDVQLELLDQLEEQIQGTEDQIKAVVAATPEMKLLMTMPGVGPILAVVLAMEIGDVQRFPGPEHLASYTGTVLRIKSSGGKSFFGKVRPDLNRYLKWALVEAANIVVINQGRWSSRHVVRLYGRIKERKGHAKAVVAVARHLAEAAYWILRRNEPYKEPGTTNSISSTQK

SEQ ID NO: 207979 - protein, 334 aa, unidentified
MLYAAIDIHKHAFQAAVLDAESGEVVEERFSADRESLARWAESWRGRVAAVAIEATTGWRRVWRELVSYGFEVRLAEPVQTRGLLGRRRSAKTDRLDAGWLARLLAKEMLPESWIPPEQIQQLRDRTRLRKTLAEDRRRWGQRLHAFLLHEGWPCSRARLLTPEGLRWAGALRLSEHARLQVDSLLAIIAALEGQLDTVDAELRRFARADDRCQGLQSIYGIGPIIACHLLAEIGETRRFRRAEQITRLTGLDPVVEESGETRRRGHLAKAGSPHLRWALVEAAVHSHRSTAPDVALYRATRERRSATVAKLTVARKIGKRVFHTLRELERNAA

SEQ ID NO: 207980 - protein, 343 aa, unidentified
MVYYVGLDVSLKQTSICVVDQSGSVVREGVVDSDPEAISVYVRSKARDAVRIGLETGPTSTWLWTELKRLGLPVICIDARHAKAVLKMQINKSDRNDAVGIARIMQTGWFKEVHVKDIDSHSVRALLASRALLVKIKRDLENHVRGLLKNLGLVIGRAKFNIFAVRAEELIEGRPELIAAIRPLLEARHAVEQQVSDLDRKVVKLARHDAQVRQFMTVPGVGPITALAFKATIDDPTRFARSRSVGAYVGLTCRRHASGEVDWSGRISKCGDGMLRSYLFEAAGVLLTRVPKWSAVKAWGVKLVKRNGLRKAKVAVARKLAVILHRMWIDGTEFNWSKKEIAA

SEQ ID NO: 207981 - protein, 446 aa, unidentified
MPANKKRSPAPPPKVVHPNAAGIDVGSDAHVVAVPGNRDPEPVRTFGVFTADLRALTAWLKQCGVTTVVLESTGVYWMSLCDFLEAQGFEVLVVDPRSLARNLKKKTDVSDAAWLQELHAFGLLKSCFRPDQEVRALRTLWRHRDHLVTEAAKLLQMMQKVLVQMNVYLHLAVADIAGVTGMRILRAIAQGQHDPQTLAAMRDPNCKKTQAEIAKALEGTWDPAHLFELKQLLKAWDFYQNQLYVCDKEYDKAAGKMPDRSAGRPVPEPEKRPRQHRNAPRAFASDDLVFKMTGVRITEVDGLGANTVLTVLSETGPDLAAKFPTDKHFAAWTTLAPRKHQSGKRTKFPAQTASRVAKAFRLAARALLNCKSVLGNFLRRLRARLGIGTAIRATACKLAKLFYRLITKGEAYRRESTEAEEVKHHERQVKALERKARELGMQVMPI

SEQ ID NO: 207982 - protein, 460 aa, unidentified
MGNYYLGGDASKGYCDFLILDHHKRIIEPNFQLDDTYQGHLSLLSMIRKLFTQDKNAILYAALESTGGYESNWYNTLLRERQKLNVQVARVNPLGVKRNLEASLERNKTDKISARAIAEYQMDHSKKIIYNLDDPWESLRKLWGFLSMLTKQKVQLLNQLESALYNTHPFLLSFCKVSMPEWVLKVIIEYPSAMRIVESNPEMLSEIPFISHQRAKELIEMAKENIGSDQGLITEYRVKSLAQEILHLARLIKEQSKTIVSLCPYKEEMKLLQSFPGIGELSSVGLILIIGDINRFKTAKNLSAFFGVHPVYRESGDGSYGYYMSKKGSKKARSILFFVALNSIVNNEMIKRLFEGYQNKGKSKMSAIGIIMHKITRIIFGMLRDKHVFDPKIDEANRKNKKEREATKNANMARRYHKKDPKAPISHRQWKKRKEQEESQNGNTIKCGIITPTPSQKDII

SEQ ID NO: 207983 - protein, 408 aa, unidentified
MQVTFGIDVSKSTSTVCELIGESKNELTITNDRPGFIQLLHELAAFSKHPQIIFEATGVYSRRLQAFLEDYGYEYLVLNPLKAKKEMNMGLRYNKTDKTDAYHLALIQRLYRHPVNQSESQTYKQLNALSRFYDQLTSDLVIAKNRLHQALQSTFPEIENLFSIARGKNYWKIVARYPHCDLVRKDDKKQIINWLMKLKGIAFNHAQRTTDKLIELAHLAYPVVSCSDIEVQQAKYYARRLLNLSNQRQRIITKMVKLAKTLPNHDLENLESIPGFAQTTAVRVLAELGDLRRFSNPNKINAFIGIDPGRYQSGEMDSNLSITKHGNAVARKLLYRAIGQIDNAAKTNPCHIADYYESKKLSSQTKGFKKIAIASIHKLIRTIYALIINDQPYDYNVATHNQKDFSRN

SEQ ID NO: 207984 - protein, 463 aa, unidentified
MAARKPKRMGAQTVEDEDYQLRYERVAGIDVAKGSAMVCLRLPPGPGKVRRTSRTWEVMARVPDIEALAAELKAARVERVSMESTSDYWRIWVVVLEGAGLDVQLVNSSQARNLPGRPKTDKADAQWIARLTEMGLLRGSFVPPPEIRALRQYTRQLVHLSQDRTRYWQRLEKLLESALCKLTSVVSGLAGSASCLAMLEAMIAGERDPQVLAGYARGPMRSKHAALVKAFTGMQFGPEHVFSASSDLRMIKMLDAEITGLEQQVRDHLAAIPAAWGTDADGVTGPGAGTGPDAAVLPAVDRLTEIPGVGPAIAAGLIAEIGLEMSRFPTPHALVSWVGMAPVPNQSGPRTGRGRKGHGSSYARRLAGQAGNGAARTDTFLGQRHRRIRSRPAGGGWKKANVAVGRSIIIIVWHLLKDPAARFTDLGPDHYAKHTDTNRKARNHKRQLEALGYDVILTPREAA

SEQ ID NO: 207985 - protein, 400 aa, unidentified
MLSIGIDVSKGKSTVCGMKPGGEIVYTPFEVQHTREGMSELVLLLHNSGEEVRAVLESTGSYHCPVVAALLENGIFVSVVNSLRMKRFCSQSIRRVKTDQIDAMQIALYGLAYWQELQPTRLPENTYRELQLLARQYYQMTSLLIKAKVDFNAICDQVLPGMQELMSDHAGRHKLSDFVLRYHHTAHILKMGETRFRKDYCKWAEKKGYRNHERMAALIFATAQNGIPVLPDAPSTQIVITEAIRVLHTVEASRDAILTQMQALAKTLPEYSLVREMPCIGDTLAPRLIAEIGDVRRFHSKRALIAYAGIDAPPYQSGKFCANNRHISKRGNRYLRKTGYEVMQSYVMHKPANDPIFTFIEKKRSEGKSGKLAMVAGLNKFLRVYYGKVTELYRSLPAIE

SEQ ID NO: 207986 - protein, 393 aa, unidentified
MVCVGIDVAKDKHDCFIISSEGEILADVFTIPNNAEGFDTLLQAIRRSTRPEDKIKVGLEATGHYSYNILGFLLDKGLPTYVINPLHTNLYRKSLSLRKTKTDRVDARTIAAMLMSDVDLKSYTDTVYHNEELKSLTRYRFDKVRERAKLKQSVSRLVTILFPELEKLVSSLHSASVYALLSEFPGAKQISSTHMTHLKAILKNASQGRYGQEMAETIRNAARSSVGSVMPAKSLELQHTIRLIRELDAEIEDIETAIQAIVDEMQSPITTIPGMGVRMGAVILAEIGDFSRFDSPDKILAYAGMSPSTYQSGQLSLSGAYSHMEKRGSRYLRYALYNATKHVCHWDPTFAAYLAKKRAEGKHYNVALSHAAKKLVRLIFAMEKSQRPYCAAP

SEQ ID NO: 207987 - protein, 403 aa, unidentified
MNAVGIDVSKGKSMVTILRPFGEIVSFPFEIKHTSSDIHSLIKLIHSIEGESRVVMEHTGRYYEALAHQLSAADLFVSAVNPKLVKDFNNDSLRKIKSDKADSVKIARYALDKWQSLEPYSITDELRAQLKVMNRQFHFYVKQKTAMKNNLIGLIDQTYPNANTYFNSPTRSDGSQKWVDFVSTYWHVDCIRKMSLNAFVEHYQNWCKRKKYAFNKSKAEEIYTKTKELVPVFPKNEITKHIIRQAIDQLNSTSVTVETIRTLMNETASKLPEYSIVMQFKGIGPSLGPQLMAEIGDVTRFTHKGALTAFAGVDPGVNESGSYAQKSVPTSKRGSSHLRKTLFQVMDVLIKTMPQDDPVYQFMDRKRTQGKPYYVYMTAGANKFLRIYYGRVKEYLSVLPDPS

SEQ ID NO: 207988 - protein, 427 aa, unidentified
MLRPGNDVHDETEVERLSAIFCGIDWAEGHHDIALVDQDGSQLAKLRISDDSAGFHALLELLARHGDNVENLIPIAIETPRGLLVASLRATGRKVYAINPLAAARYRDRGSVSRAKSDAADARVLANILRTDRHAHRPLPADSEAGQAIAVLARAHQDAIWDRQQMVNRLRSHLREYYPAALTAFHGSGKLGLDSAHARAVLAAAPTPAAAARLTRSQLRALLTRAGRLRRGIDTEVERLREIFRSEHLHQLPLVEKAMGHQTSALIQQVNAACSSGTDLAAATEEAFLAHPDADIITSFPGLSVLSGARVLAEIGDDRSRFADARAVKAYAGAAPVTRASGRSHVVVARTVKNQRLAGVGYMWAFATLRTDAPRAHYDRRRAGGERHTAALRNLFNKLLGCLYHCLQNRTTYDPDRAFPAPLALAA

SEQ ID NO: 207989 - protein, 423 aa, unidentified
MMKLKYSICCGLDVHKNVIVATIVITNNDGISEYKQKSFSTINSDIQKFHNWLIENNCFHVCMESTGKYWIPIFNYLENDIDVCLTHPKYVKAIKGKKTDKKDSKWIADLYKFDLVRCSFIPPKDFRQLRELARYRFKLVCMKSSEKNRIQNCMTVSNVGIASVLSDPFGRTATEIMSYLLEHTADSMDEKAVRKLIKKGAKAKSDEIIEAIRGYNIETDQAKKLELARGHLEYLDDMITQTEVELYVRIKPYYEFVEFISTMPGMTELSSTIVLAETGVDINIFDDAKHLCSWCGLSPANNESAGKKKSVRITKAGDYLKPMMVQCALAAIKNKKQPYFAIKYGRIKKRRGHKKAIIAIARMMMVCIYHMVSEKKPFSPTDYEELMDPCNHVKRVVLNENNVFAYLESLGYDSSKLVKRNDN

SEQ ID NO: 207990 - protein, 338 aa, unidentified
MLSIGLDAHERTSSLCILDISGRTVKELTLKGHPRRVLQWLQELDEPFKICFEASTNYGWLYDELKSTAAEVLVAHPGRLRLIFRSRRKNDRIDAARLAKLLYLGELPLVYVPGVDVRAWRGLIEHRQRCVRERTRVKNGIRALLRTHGIQMPSRLQLWTRKGRTWLAELDMPTTVAVLRRDQFLDDLAHHDRKTHRLETMLEMIGNRHSGIALLRTIPGVGMRTAEAFLAYVDDPQRFRGRSIGAYLGIVPRQDASGGVNRLGRITREGPATVRQMLAEATWQAVRRSRTVRLRFERICQGRPDRRKTALIATAHYLARVMIAMLNTGEAWREEVTA

SEQ ID NO: 207991 - protein, 404 aa, unidentified
MIFVGDDWAEDHHDVYLMDADGARLASRRLAEGLTGIGALHELIADHVGEPSQVVIGIETDRGLWVQALGVSGYQVFAVNPLAVARYRERHQVSGAKSDAGDAKVLADLVRTDRHNHRSLAGDSPEAEAIKVLARAHQNLIWARTRHTNMLRSALREYYPAALNAFDDLHDRDALAVLSRAPAPAEGTRLSLSKIRSALKHAGRQRNIDARTHEIAVALRTEQLAAPATVTAAFAATTRATVGIIGELNRQITDLETQLATHFETHPDADIYLSLPGLGVILGARVLGEFGDDPNRYTTAKSRKNYAGTSPLTVASGKKYAVLARRVRNRRLYDAIDHWALGAINHSTGARAFYDQHRAAGDLHHQALRALGNRLVGILHGCLRHHTTYNEHTAWAHRQTAQAA

SEQ ID NO: 207992 - protein, 443 aa, unidentified
MKELPVLDTRAAFCDVGSEHMHVSIAGGLPKVFGTFTSQLHELRDWLLGEGVHSIAMEATGVYWLSLYGVLEAAGLEVMMVNGRQTRNLPGRKTDMKDSQWGATLHAHGLLKAGFVPPSNIRKLQDYQRLRTDHIASAASQVQHMQKALERMNVKLHNVISSLMGVSGLAIVHAILDGERDPAKLLELCHSMIRNKKAKAVIEALRGTWEPEHLFALKQALQSWEHYQRQITECDQQIDLLLQRITFNDTQGDGIGEKPKATAVKPPSANAPQISGLHSMLIDLCQGKDLSILPGHTDYSVLQIISEVGTDLSKWPTEKHFTAWLGLAPGTSQSGKRKSNVKHSRNRVGRYFCMMARSLARSKDMALGGFYRRLAARRGGLIANIALARKLAVLFWRVMVKGTEFVEEGLAAYEAKFLEGKKRSLRRLARELGQTLSPIPVTV

SEQ ID NO: 207993 - protein, 318 aa, unidentified
MLIHYIDIAKRNFVIAVSSLSKTKTETNNPKGIAHTIEYLKKHKVALVVTESTGGLEIPAAKAIRRAGIAVIIANPRQTHQFAQSQPLTKTDAKDAKMPAFFAQMTAQKEDSQTMPYQPPTEAEEVLEALVNRRNQPADMRTAEKNRLHQVHETQVGSVKQLIAHFDRLIDELDKQIDDHTHTHFDGKAQVAEQIKGIGSITTATLMAMLPELGRLSHKRIASLAGIAPHPRESEETKFKSRCFGGRSAVRKALYMATVVATRFKPLIRDFYQRLPSEGKPYKVAVTAYMRKLLTISNARMRDYFAENDTAENGIRTA

SEQ ID NO: 207994 - protein, 404 aa, unidentified
MEATPAFAGIDWSWHHHAVCIVDATGHRIEQATLAHSRAGLGKITALLSRHGVVRVGIERGDGPVVEHLLRDGFEVVVISARQVGSLRARYGSAGNKDDRFDAFVLADALRTDAGRWAIVHPDGEDTVALRMLVRARHDLINHRIAVHNQLLAVLQHHFPGAIGLFSQLDLPISLTFLRRFPSEAKAAWLSPSRMAHWLKANSYSGRHSAAELTAHLRDAVTGRTTGPAAEVGEVIVGTLVDLLSRLRSRQADLETRIKEALLAHPDGPIFQSLPRAGTVRAATLLAEIGDCRARFPDPQALAAAAGVAPSTRQSGKHRTVTYRRGCNKQLRAALIDWAQDTPRANAWAHYTYYRARHRGCRHPHAARILAQAWTRILWRCWHDHQPYNPDLHGQLNTLHQQAA

SEQ ID NO: 207995 - protein, 338 aa, unidentified
MTLYCGIDLHSNNSVISLIDETDQLISEKRLDNNLKAIAHHLQPYRDEISGVVVESTYNWYWLVDGLIERGYPVHLANTLAIQQYNGLKYTDDETDARFLAHLLRLNILPTGYIYPKARRQVRDLLRRRLLLVKQHTAQLLSLQSLIGRHSGLRLRSHQVKQLNQDTLAQYLDAGATLFAAQQILQLMQQLHGQIEVIEGYVLARCQDSEAYTLITTTPGIGKILGMTILLETGPIERFAQVGNYASYARCVPTDKISNGKSKGKGNAKNGNRYLAMAFVEAAHYATIWDPTIKRYYQRKCKRRPVMVAKKTVANKLTRACYHMLKDGTAFDVTRAFG

SEQ ID NO: 207996 - protein, 331 aa, unidentified
MKTTEVVGIDVSKKTLDCHIHCSKVSEQFPNNPDAIADLICWAFEVTGLNREEVLFVFEHTGLYSYHLLHLLSSENCILKIVPGLEIKRSLGIARGKEDKVDAKRIALYGYRTREEMDFSQAPLPIIEELRRMMSMRKRLVAQRAGYKASLKEQRAILGTVSDPLLFTVQEKMIECLSIQISALEKKIDGMIVREPDLNRMLKLLTSIRGIGKVTARFLIVTTYGFTAFETWRKYASYCGIAPFPNQSGTSVRGKTKVSNLANKDGKTLLTMCAMSAIQCDPEIRSYYTHRIESGKSKMSTINIIRNKLLSRAFAVIKRGSPYVDTMRYAA

SEQ ID NO: 207997 - protein, 345 aa, unidentified
MTEAYDGRQVVGMDLHRRRSVLVRMTEDGRKLETVRIANSPAALRAVIARAGEHPRVVIEATYGWYWAADVLAAAGAEVHLAHPLGVKAFSYRRVKNDERDCTDLADLLRMGKLPEAWIAPPEIRELREVTRYRHKLVGQRTSCKDQVHAVLAKAGIPVTRTDIFGSGGGIWLDGLPLPQPYAGKVASLRALIAVLDGEIGRLEEQAAAMLAGDRGYAAIRQLPGIGPVLGAVIAAEIGDITRFGKPGQLCSWAGLTPRHYESDTRVIRGHVSKQGSRMLRWALVEAIQRAPAETRPGLVKDAIIARRGDDARGIAKTAAARTLLTQVFYAMRDGYLRHATSAAA

SEQ ID NO: 207998 - protein, 385 aa, unidentified
MEISPRSAASAAEQPATIYLALELSRASWVVAVHSPLADKISLHRLAGGDSSGLLALIARLRARLERALGRPVAVVSCYEAGYDGFWLHRLLEAHGVRNHVLDPASLQVNRRARRAKTDRIDAASLLRALIAHLRGEPRVVSVVRVPSVAEEDARRLHRERHRLVAERVQHVNRIKGLCATQGVYDFPPLRRDRWQRLAGLHTGDGRMLPPRLAAELGRELKRLELVLEMIAALETERDAVLEASAPEHPHAPRIRALARLKGIGAEFATVLVGEVFHRAFANRRQVASYVGLAPSPFRSGGLAREQGISKAGNPKARTTMVELAWMWLRHQPESALSRWFRQRVGVAKGRLRRIAAAALARKLLVALWRYLETGLVPDGAVLKG

SEQ ID NO: 207999 - protein, 343 aa, unidentified
MDYFAGLDVSVKETSVCIVDDTGKIVREVKVPSEPKALLKVLTNPSYRFKRIGLEAGPLSQWLLSALAEAGLPVICVETRHMRAVLQAQINKTDRNDARGIAQMMRVGLYRPVHVKTLRSQKLRMLLTHRKLLQSKAIAIDNDLRGTLRNFGLKVGIVGKVKFEARIKELVENFPDLAVLVEPLLIVRRALREQIVILHRRVLAIVKDDDVCRRLMTVPGVGPVVALTYRATIDVPARFRKSKAVGAVFGLTCSKYQSGEINRTGAISRCGDDMMRMMLYEAAQSMLVRSTRWSWLKAWAMQIARRRGMKKAIVALARRLAVIMHRIWIDGTEFRWTREAAVA

SEQ ID NO: 208000 - protein, 452 aa, unidentified
MATKRRKKAEDLPVLHPDAAGIDVGASELFVAVPADRDSEPVRSYPTFTRDLHELADWLQSCGIRSVAMESTSVYWIPVYQILEARGIEVFLVNAHYLKNVPGRKSDVSDCQWIQYLHSVGLLRASFRPPGVICAIRSLWRHRGSLIEMAAEHILHIQKSLDQMNLQIHRVLSDITGVSGLRILDAILAGNRDPVALAQLCHARVKSSQDTVAKALEGDYREEHIFALKQSLESFRYYQRLVAEVDQEIKARLKGLETSPAAQAEPPARTKKSRYQRQHHEPTSFDMRSELYRIFGVDLTEVPGISGVTAHTILCEIGPDLSPFRNASAFASWLGLCPERQISGGKVLFTKSRRVRSRLALALRIGANSLHHADNYLGEFFRRIARRLGKPQAITATAHKLARIVFHLLSTKETYRESVFRRCEEDAQKRAEFRLRRHAAQLGFQLIPAANQ

SEQ ID NO: 208001 - protein, 457 aa, unidentified
MRHKRSKKQKRAGQGGAVPSLTCIEPNAAGIDVGAREIFVAVPQARDPSPVRSFETFTQDLHRLKDWLQQCHITTVAMESTGVYWIPLFQILEQAGLEVCLVNAQHVKHVAGRKRDVIDCQWLQYLHSVGLLRASFRPEDRVCIIRSLLRHRDSLVQMAAAHVQHMQKALTQMNLQIHHVLSDITGRSGLAILDAIVAGERNPAVLAQLRHPQVQASAEVVMKSLVGDYGREHLFTLGQSLEAYRYYQDLITRCDQEIEEQLQNFDRQLPPDAPDLPPEAYPHSRRKNEFHFDMRSELYRIFGVDLTAIPSINALTGYTLLAEVGTDWSKFPNLHAFASWACFCPHNKKSGGKLLSAKTRRSANRALRLAAQTLERSNSYLGIFYRKMCARLGRPAGITATAHKLARIIFHMVTTGRAYDESIFAAEEQLQRKHLESNLRRKAAKLGYQLTPLLQTA

SEQ ID NO: 208002 - protein, 370 aa, unidentified
MNEDSVVYVGVDAAKAKHAVAIAESGRSGEVRYVGEIDTTPAAVERFVRKLARKHPRLHFCYEAGPTGYGLYRQLVALGHACEGVAPSLIPKRPGEHVKTNRRDATSLARLLRAGELKGIWVPDQVHEAARDLVRAREAAGEDLRRKRQQLQSFLLRHGRMFTGRKAWSPAHSRWLAVQRFEHPAQQIVFQDQVDVIADASKRLERLDAQLVELVPTWSMAPVVAAYQALRGVSFVVAVTFVSEVGDVRRFDSPRQLMAFLGLVPSERSTGETVKRGGLTLAGNRRARRVLVEGAWSCRHPARVTETIRVRLEGLPKAVREIAWKAQTRLCARYRRMTAAGKKAPIVIAAIAREMAAFLWAIGRQVEPVR

SEQ ID NO: 208003 - protein, 436 aa, unidentified
MRGCRCSMIMGFTKPIEHFILQRKKVITMNTLYVGIDVSSKSNVVYLMLPNGDKHSNFSVANSHEGSTQLVKRILSALTSHSLDTVLIGLEAPSVYGDNLVYFLREDATLAPFNRKIHVLNPKQVKKFHDAYNDLPKNDYVDSFVIADCLRFGRINKEVYLGDYRYKALQNLTRARFFAVQNLIKEKQRFMNVLFKKYSTMTQEKVFSDTFSTTALAVYDEFDSAEALANMDLHELTDFIIEKGKNRFPDPDAVAKAIQKAARSSYRLPKTVNDSVNQVLSISITSMKALESQIKEFDKAIKAQMELLPNVLISIPGIGPVYSAGIMAEIGDINRFDNQAALAKYAGLAWKQHQSGSFEAEVTRLIPSGNRFLKYYLYEAAFSLVRCDKEYSDFYHLKYKEVNRCQHKRALALTARKFVRLVFRLLKDNRLYVPAK

SEQ ID NO: 208004 - protein, 345 aa, unidentified
MPIVGGLDIHRKQLTFDYLDTVTGEVKRGQIAPADRVHLRAWLARFAGRDDVAFALEGCTGWRYVAEELAGAGIAAHVAEPADTAFARGRKRHAKTDKTDSRHLRQLLAQGRLPECWIPPSRILECRALLETYHDLRAEHTAWVQRIHAVFFHQGAPALGDGALRTGRDLQAVRAAAACHLSPAGQLQVATAVDMLAGLEARLDVLRHRLLDAARHLTGAKVLASRLYGVGPVTALAMTCWLGGAGRFSSARKAVRFAGLDITVWSSDRKGPPGRLSRQGPPVLRWAVYEAGKTHARASAPDYRYYAAVKDRQDGKRAALSEARKILRQACHILTELGDDALSAA

SEQ ID NO: 208005 - protein, 387 aa, unidentified
MSQPNDLSRSLVALDQDSTIIAVVEMSQSSWLVGGILPGIERQPRKKLEPNPERLLALLHRWRDESVRAGRTITRIAVAFEAGRDGFWLARWLEARGVETHVIHPSSVAVSREHRRAKTDRLDTELLKRGFLGWLRGERGHCSMARVPTIAEEDAKRPNRERECLVKERTRLVNRMKGTLARLGIRNFRLTLRNAAEHLAALSTPEGSPLPPNVAAELQRDIARLRLVIGQIKQIEEARRQRLEEQPEPGPHAMVRLLARVVGIGVETADMLVNEVMSRPLRDRRAVARYAGLTGAPDESGAKRREQGLAKAGNARVRRGMIQLAWRFLRFQNNSALAKWYQARTADHRGATRKTMIVALARKLLIALWRFVTIGEPLDGVTLRPAS

SEQ ID NO: 208006 - protein, 353 aa, unidentified
MDTIYIGVDFHARQQTICSLTTMGGEIQTHELKHQNKDDVRAFYAQFAGHVIVGLEASGYSPWFEQLLEDLGHEVWLGDATEIRRRARWRQKNDRRDAELILDLMLHDEFPRLHRPSPQSREVLRMLRYRQKLIKIRTISKNSLQALALQSGLARRSQLFTRAGQQELRAAAMSPAMQWQREQWLQLLEPLNQRLVETMLWLKQQSQDDARIKLLRTHPGIGLLTSLCVVHTLWPVSRFRNQRKVAAYAGLEPMERSSAERKHFLGISKAGSRVLRYLLIEAAHTAVKKDDDLKRFYQRLVQRRGRPKAKTAAARKLLIRSYIMLRDEIDYAEFRRRAVAARLARQSSRPPCL

SEQ ID NO: 208007 - protein, 401 aa, unidentified
MDVHRDFLVACIASTSKLGITEYQSRRFSTYSGGLRALRDWLASNNCKDVCMESTGKYWFHVHNILEHTCNVVVTHPKFVKAIKGKKTDKKDAQWIADLFKHDLVRGSFIPPADIRQLRDLCRYWCKLTSYTTGEKNRAQNCLTVSGFKLDDVFSDVFGKSASAIIQQLLDHPGQDFDLKPFIDGRCKTPIEQIKLAVDGRFSPEQNAKLRIIFSHVDFLATMKQMVENQIFKIAEKYSDQIELLMTVPGIKEPLTAIRIIAEIGADMSVFETAKHLTSWAGLTPQNAESAGKKKTTRIGKAGAYIKPLLVQIAVASSRSDKYPEIKAKHQTLKKRRGGKKATIAIARRLLTAIFHMLKKGEAYNPTLYVREQPPKSRQISKEQALMLVAKMGYIVTESAA

SEQ ID NO: 208008 - protein, 407 aa, unidentified
MDKVNPRCAGLDVHKESVWACARVDGKVSIEKFGTTTRELLRLGDWLAGLGVRIVAMESTGVYWKPLWNLLEDRVELMLVNARHIKQVPGRKTDVRDCDWISQLLEHGLLRASFVPLRPQRELRDLTRQRTQLLGDRARVVNRVQKTLEDGNIKLACVASDITGKSGRAILDALVEGQLTPAQMAELVHKRMEAKKPALREALQGRVTPHHRFMLKQLLGQIDNLDRMIDAFDQRIVEVMSPLEQDAVKRLDEMPGFDVRTGQNVIAEIGTDMSRFPTPQHLASWAGVCPGNHESAGKRQSGRTRKANVWLKAALTQAAWGASRTRRSYYSAQHARLSKRRGVKRATIAVAHSQLLTVHCLLSDPKPYVDLGAGYFEKLRSPEQQAEQMIRKLQRLGYQVQIARPAA

SEQ ID NO: 208009 - protein, 313 aa, unidentified
MSNSKVLKEEQVSNHPQAIATVIAGIKEELSMSNDSLIICAEHTGQYTYPLICACKSVGSKLWLENASQIKYCSGVTRGKNDKVDARRIAVYAMRFFDKAKPYQRPTEELMRLKQLEAERSLYLTDLAKYKAQLSDQEGFMEDKIFKRKAKRLKEMIKSLEKTLKEIAQEMADVIYSSEELSRQMRLLKSVEGVGPVVAMNMIIATEAFTRFDNPRQFNCYVGVAPFAYTSGSSQHSRNRVSQRAVKYIKCLLHMAAVAIAHKKTGDLKTYFERKVAEGKNKMTVLNAVRAKLVARMFAVIRNNRVYQPILSV

SEQ ID NO: 208010 - protein, 535 aa, unidentified
MCGLNPGRRPQRPCPDTFSKVIHSRAERASEAERSEAVNNFAAMRIESNLRSEQNRPGREARSRTRFTSPDPARIKPRTPVDSRVFVKKSERTSPCEGSCIRTTHDKNKGQRAGKTMNDQIAWEKITHYAGFDWAKDHHDVVIVNQQGKIVKDLTFEHTAEGWAKWKEVVAAYPHLAVSIETSQGAAIEQLLESGVSIYPVNPKSAERYRDRKAPSGTKTDYLDAWSLGDALRVDGHGWKALKPLDPLIHELRLLCRDEVELISKRTELVNQLQAALHEYYPAALQAFDDWTASPSWSFVQQFPTPELLHQAGRRKWEKFLHVHRLYRPELNEKRLEIFAKAHEFCGPPAVTRAKSRLVLTLVKLLHALENQLEDYRKEIRRLFNEHPDHNLFGSLPGAGEKLAPRLLSEMGSDRTLFESAQALQCYVGTAPVSFESGQVRKAYVRFMCNKSFRHAVHLWADLSRKFCSWAQVYYQQLRANGQSHAAALRCLGQRWLKILWKMWQTKTCCSPDFHMANQLKHGSWVLTVKPAQSK

SEQ ID NO: 208011 - protein, 403 aa, unidentified
MNAVGIDVSKGKSMVTILRPFGEIVSSPFEIKHTSSDILSLIKLIHSIEGESRIVMEHTGHYYEVLAQQFSAAGLFVSAVNPKLVKNFNNDSLRKVKSDKADSIKIARYALDKWQNLKPYSIVDELRTQLKSMNRQFHFYVKQKTAMKNNLINLIDQTYPNANTYFNSPPRSDGSQKWVDFVYTYWHVDCVRKMSLNSFVKHYQNWCKQKKYIFNKSKAEEIYTKATELVPVFPKNEITKRIIRQAIAQLNSTSATVETIRILMNETASKLPEYPIVMQFKGIGPSFGPQLMAEIGDITRFTHKGALTAFAGVDPGVNESGSYAQKSVPTSKRGSSNLRKTLFQVMDVLIKTMPQDDPVYQFMDRKRAQGKPYYVYMTAGANKFLRIYYGRVKEYLCILSESS

SEQ ID NO: 208012 - protein, 404 aa, unidentified
MDEHTAGIDLASEEHRLVVVESNGRSIDERRVAHTEEGLATLTRRLRDLEVARVAIEQPNGLVVDRLLDAGIAVVAVHPNQLAAARDRYRSGGGKSDGFDAYVLAELVRTDMHRLRMLEPDSDETRALRTLTRAREDLVEHKVALANQLRAQLEAFWPGAARVFCDVDSPIALAFLERYPSPDDARSLGEKRLAGFLARNGYCGRRSAHELLARLRTAPNGRAGTSDSEARRQVVLALVALLRPLVEQIRLLTSEIRGLLDQHPDGHIFRSLFRDPKSVVTAAELLAEIGDRRTRHPDSSSLEAIAGQAPVAVESGKKKVACFRWACNKNLRNAVSVLADSSRKHNPWANEIYRRARARGHDHPHALRILGRAWLRIIWRLWQDGTAYEPTRHGSLNRLLAAKG

SEQ ID NO: 208013 - protein, 358 aa, unidentified
MGEFTALDVHRNYSLGSVDRDGQVVRESRIEHKRGAIKAFLSGCSKGTPVALEATGNWYWIVDEIEAAGMVPRLVHPRKAKLMMGMINKTDKLDVRGLNRLQRNGTLPTVWIPPGELRDQRDLPRTRMVFARQRTQLKNRLHAALAKYGVAGPEASDIFAPGARPALLQAIGQLPEHTRFAAGLELEQLDSLQRQIGRFEARMKAVCVPTREAQLLDSLPGVAFILSVVMSLEIGDVARFASAEKLAGYAGPTPRVKASGGKVVFGRLRPDVNHYLKWAFLEAANVICRGRSSWPERHVVRLYERVRQRRGHPKAIGAVARHLAEAAYWILKKGEPYRERGSQPVSSTKAQARRCHER

SEQ ID NO: 208014 - protein, 323 aa, unidentified
MSTKTTKKRRSFIGIDISKKLLEVGVHQSDYHFRCPNDPKNFPALITELISLRPARILLEATGGLERALLQALHAAGLPVAVVNPRQVRDFAKALGRLAKTDRLDARVLAHFAAATQPAIRAVKAQQETELDALMGRRTQLSDMLAQEKNRRGSAATKGTRDDIEAHIEWLEERLQELDEKLKEQLKCSAVWQQKDKILQSVKGIGFVTSMSLLADCPELGELNRHQIAKLVGVAPLNRDSGQQRGARHIWGGRAQVRGKLYMATLAAIRFNPVLKSFYQRLLAKNKLKKVAIVACMRKLLTIINVMVRENKLWNVKAQPVSA

SEQ ID NO: 208015 - protein, 419 aa, unidentified
MKVVYPTCCGVDVHKTFIIATIIKTEGITPKYARKRFSTFNNDILRFKQWLLENECRDVCMESTGKYWIPVYNLLEDEINVVVASPKWVRAVKGNKDDKKDSKWISDLFRLGLVPGSFIPPKPIRVLREYTRYRYKLVSCKSSEKNRFQNSFTVCNVALDSVVSDMFGKSATLITDYLIQTDDFDPEHCKSLLQRSLKKKADAVIDSIAGYQIDPAQKERMLMVKSHLSYIEKAIETMDAGIDALVKPYENHISLLYSIPGVDRRSAITIISEIGTDINQFAHSKRLCCWAGLTPGNNESAGKKKSVRITRAGVYLKPALVQVAHAAVKSIESPYYKNKYQRISKQRGKKRAIIAIARMILTAVYHMLKTGEAWNPTDLFKVDLPPLLIEKQKQKAIQNALKLLASEGITLTPNTHPAA

SEQ ID NO: 208016 - protein, 430 aa, unidentified
MYHFDFISVGIDVGADFSWISILTPDHKPVVKPFKVLHDSFDSLSNAVLTIKKAEESNSMKARTFLESTGIYHFPLFCYLKESGFEVFVLNPLITDSNKNSGIRKVKNDKSDSMRIAKTAYTHDLKVSLIPSDLVLNLRSLVREYYHLVDTKTGYVNKLHKDLRLVFPSYCKIFSNLTGKTSILILKKYKTPAGILAAPKDEVISLIALNSRKGLKYAREKYNKLVEAAKLSKSFGHSLECVFDIIQMNIEFIEIFSSKINSVLAKINDFTIEYEDHKFIEQIHLLDSIKGVGFISAVTLMCEIGDFSAFLKPKQLYAYFGLDPAVKESGKFKGTKVSMSKRGSRLARRVLFTIALSSVRSSKKGVPNNPVLKDYYDKKKESKPKMVALGAIMHKVSNIIFAVLRDNKPFALRTPDEHRTSYNSHLSLVA

SEQ ID NO: 208017 - protein, 338 aa, unidentified
MRTTYVGMDIHKNFIQAAAMDEQGNILREQKFSSDISGINRFVESLKAQKIKAAIESTCTWYHVYEALDSLGIETTLVNVRRTKVIAESKIKTDKLDAKSIVHCLRTGFIATAYIPPKEVIELRNILRHSMSLRKEITRHKNKIHAILLRNGIKHRYTDVFGMKGMRFLREINLSDSEKYNLESHLNIVESLLKENKKTTKKIEDLCIDNKQAMLITSIIGISYYGAMIIITETGDITRFPNPKKLCNYAGLAPRTIQSGNHMYHGRILKECNQNLKWILNQCVHIHIRRCPDSPITKLYHRVKNKKGNNKATVAASRKMLTCIWHMIMKNETFKYIN

SEQ ID NO: 208018 - protein, 348 aa, unidentified
MTVYCGVDFHARKQTISYLTTEDGEVQQTELHHEQDNIRGFYAKLRSQGPVIVGFETSGYAAWFEEMLEDLGCEIWIGMPAAIRRQARRRQKNDRRDADLILELMLRGDFPRLHRYTPASREVLQQLRYRHRLVKLRTIVVNSLQYLALSRGVSLRTKLLTGRGQQRMKELKLPSHLAKQRDEMCELLQELTAKIETAESWLELKAKQDAQVERLMSHPGIGPLTGLCLVSTLEQVERFANPRKVTAYVGFDPVEDSSGERQRIGSISKQGSRLLRFLLVEAGQVAVRTDPDLKTAYWRVQLRRNHQKAKVAVARRLLVRAFIMLRDGIDYAEFQRRGVAARSTRRTA

SEQ ID NO: 208019 - protein, 337 aa, unidentified
MIVIGVDVHKHSMSAVAVDGVGRQLDCLETSDEDELVSWSRRVGRRRLWALEDCRHVTRGLERTLQRERQRLVRVPPRLTAPERRRGRTRGKSDLIDALAVARAALREPVLDSPRPEEARLRELKLLVDHRDDLVDERRRAQQRLRWHLHELDPTLQVPLGALDRAIWLERLKRQLGRREQTTQVRIARELVTRCRALTRSIRELDRELHSHTTELAPQLLELPGCAALTAAKLLCEIGPIDRFRSDAQLARHAAVAPLDASSGKHQRHRLDRGGNRQLNCALHRIAVTQGRIHPPAKAYLERKQAEGKSRREALRCLKRQLARTVYTTLKNDPLLT

SEQ ID NO: 208020 - protein, 324 aa, unidentified
MEVEAVYVGIDVSKARLDVAVWPGAERFSVGNDPRGIAELVEKVVALTPQAVVLEATGGLETLAASELHAAELTVAVVNPRQVREFARSLGRMGKTDRLDALVLAQFAQSAHSNERLPKLRLRDEAEAELKALVTRRRQLVAMLIAESNRRERAPKVIRKSIVASIRALKRSIAAIEQQVREVMSDSPVQQAKAVLLAAVPGVGPQLTATLLAELPELGNLGRRKIASLVGVAPHPHESGKFYGRRRCWGGRATVRTTLYMAALSGVRFNPALRACYQGLLGRGKSRKLALVACMRKLLLILNAILRDSASWNPHHQLDFQHSR

SEQ ID NO: 208021 - protein, 342 aa, unidentified
MQITTIGLDIAKSVFQVHGVDAGGQVLVRRQLKRRHVLGFFQKLSPCLVGIEACGSAHHWSRELQALGHTVRLMPPAYVKPYVKRQKNDASDAEAICEAVTRANMRFVPTKTAEQQSGLVLHRARHLFIRQQTAVINAIRAHLAEFGIVAPVGRHGVEELLNVVTDPNDKRVPEMARVCLSALGAQLRRIKEQILEFDRLIRVWHRSNEMSMRLEEAPGVGPVLATALVAAVADPKSFRSGRNFSAWIGMVPKQHSSGGKNRLGNISKQGDRYLRGLFVAGALAVIRYAKIHGTKHRPWLTALLARRPTKVAAIALANKIARMVWAMMARGERYKEPVALAR

SEQ ID NO: 208022 - protein, 412 aa, unidentified
MEVIIERCCGLDVHQETVVACVLIGAPGERPRKEIRTFRTMTRDLEALRDWLQELGVTHVGMESTGVYWRPVYAVLEGCFDLIVGNARHIRNVPGRKTDVKDSEWIADLVRHGLIAKSYVPPRPLRELRELLRYRRKLVESQAAERNRLLKLLETANIKLASVASDVFGVSGRAMLRALIAGEASPEAMADLARGLLRRKRADLILALDGRLEEHHRFLLAMQLRRLEAIEADIAGLDSRIGERLEPYSAPHALLMQIPGVDWVVAAVLIAEIGVDMSVFVSVYHLSAWAGVCPGNHESAGRQRGGRARKGNVHLRAILVGAAVSASRTKGSYLKDKFHRLKARRGALRAALAIAHKILVSAYHMLERNLPYRDLGEAYLDQISQTRTVANLKRRLERLGYRVILEPTVQPT

SEQ ID NO: 208023 - protein, 337 aa, unidentified
MKTVTTIGIDLAKNSFSIYGVNAQGKPVLQRTLTRANVIRFFANLPECLVGMEACASSEYWARTIESLGHTVRRIHPRYVKAYLLGAKNDTNDAAAICEAVQRPNMRFVPHKSPEQTDIQCVHRIRQGFVRSRTALVNQVRGLLGEYGIVMRQGINTVRNRLPELIADEANELSPIMRRNLAALYESLCFLDERILTQEKILKDIARENEACKRLMQVPGIGLLTATILLSVAGVASNFKNGREFAAYLGLVPRQNSTGGKIKLLGITKRGDTYTRTLLVHGARSVLWHAPQARQNAWLMELAARRGNNRASVALANKTARIVWSMLAQGTEYKIAA

SEQ ID NO: 208024 - protein, 355 aa, unidentified
MDSKKYIGMDVHKESISIAVMNGAGKIVMECVIETKASMILQFIDGLRGDLQVTFEEGTSAAWLYDLLKPHVTKLLVCDPRKNASMREGHQSDKIDARRLAELLRLNHLSPVYHGEHGLRTLKELVRSYLTITKDLARIMTRVKAIYRSWAIPCTGKQVYAPRHRAEWLGKIGEPGVRRRAEFYYQQLDALRTVRQEVRRELLAEAKKHPAWKRLCQIPSIGPIRAAVLLGILQTPHRFRTKRQLWSFSGVGIETHSSADYRSVDGRLQRTKKQISIRGLNRNCNRDLKNLFKGAAIVASSKPGPFQEFYNALLTKGIRPEMARLTLARKIATIVLIMWKRGACFDAQHLKPQTA

SEQ ID NO: 208025 - protein, 309 aa, unidentified
MKEEVVYLGVDVAKAYLDATMGNEKRRLSNDATGHRQLINWIKQMEAQVQVICEPSGGYERRLIQALVGAQVKVSLVQANRVRQFARAAGILAKTDSIDAEVLCAFGQAMRPQTLSASKLQQEQLRELESQRRHLSRLLAMEQNRGARLGDSSVRRLNRSLVKQIQKQIARIDLLINEHIAASPELSAKAHKLTAISGVGPRTAALLLAQMPELGQLNRREVAALVGVAPFNRDSGKLRGKRTIFGGRRHVRHGLYMAALVAARHNPILRAFYQRLRTAGKPAKLALTATMRKLLIVLNSALKTDPIYA

SEQ ID NO: 208026 - protein, 342 aa, unidentified
MNHYAGIDVSLECSSVCVVDASGKILREARVASAPEALIAWLRSSGFEFERIGLEAGPLSQWLFAGMREAGLAVELLETRHVRKAFEAMPVKSDRNDARGIAQLMRLGWFRPVHCKSVSAQETRSLLTARKLVQSKLRDVENSLRGILRGFGLKVGKTTGQKFAGRIEELVAGHPHLQVITKALLAVRTVLRTEFAAFEKQTRRMVRSDMQARLLTSIPAVGPIVALTYASAIDDPTRFKSSKQAGAHFGLTPKKHQSGETDYTGRISKIGDASVRTALYEAANVMLTKPVKGCSQLKSWAMRIKRRAGMSKAKVALARRLAVIMHRMLADGTPFNAAAAAV

SEQ ID NO: 208027 - protein, 359 aa, unidentified
MLVERTCVGLDVHARSVAAAAIDGVTGELSQARLTPSHDHIRSWIEQFDGPVAVAYEAGPTGFGLYRALNGVGVRCVVAAPSKLQRPPGDRVKTDAKDAVHLARLLRLGEITAVTVPTVDQEAARDLVRARDDCRGDLMRARHRLSKLLLRHGFVYSGGQAWTGVHDQWLRRQRFDHRATTMAFESGYEAVTAITARRGRLDKAIAVLAAASEFTPIVHRLGCLRGIATLTAFALAVEIGDWNRFTGSSIASFVGLVPSEHSSGASRVQGSITKTGNTHVRRLLVEAAWQHRPAYRPGKVMRDRWDLADPAARARGDAGNRRLHQRWVQFNLRRKRPVIANVAIARELAGWCWSLAVMG

SEQ ID NO: 208028 - protein, 342 aa, unidentified
MKIMTVGIDLAKNVFQVHGVNEHGKTVLRKQLKRDQVATFFAIMPQCLIGMEACGSAHHWARKLRSFGHDVRLMAPQFVKPYVKTNKNDVADAEAICEAVGRPNMRFVPIKDIEQQAVLSLHRVRQGFVKARTAQANQIRGLLAEFGLVIPQGIAHIAKRVPELIEDEHNELPGLFRLLVQRLLEQLKGFDHQVREIESQIVAWHRVNENSRKLAKIPGIGPITASAMVASLGDAKSFKNGRQVSAWLGLVPKQNSTGGKTVLLGMSKRGDSYLRTLLIQGSRSMIYAAQRKDISDSWLGRLLKRRNANVAAVALPNKNARIIWALLAGDREFHSDYTTVVA

SEQ ID NO: 208029 - protein, 343 aa, unidentified
MDHFAGLDVSVKETSLCIVDDTGRIVREVKVASEPEALLQVLKNPAYHFKRIGLEAGPLSQWLFSALAEAGLPVICVETRHMRAVLKAQINKTDRNDARGMAQMMRVGLYRPVHVKTLRSQKLRMLLTHRKLLQSKAIAIDNDLRATLRNFGLKVGMVGRAKFEARIKELVEDLSDLTALVEPLLIVRRVLREQVGILHSRLLAVVRDDDVCRRLMTVPGVGPVVALTYRATVDVPARFRNSKTVGAVFGLTPAKHQSGEVERTGAISRCGDEMMRMMLYEAAQIVLVRSAKWSWLKAWAMKIARHRGLKKAIVALARRLAVIMHRIWVDGTEFRWTKDVAAA

SEQ ID NO: 208030 - protein, 439 aa, unidentified
MAVENQNNSDSKNPSAANSNGRRRRASNRVRIEDLADIHERCAGIDVHKAGVTVCLSLGGGEGEVAEFGVTTGELRQLRAWLEENGVTHVVMESTGVYWKPVWQILEQGSLQLLLANAKQVRNLPGRKTDGADAIWLATLLRKGLVRGSFIPPQQIRALRDLCRGRTTLVHDRTRITQRIEKVLEEANIKLDTVVSDLLGKSARHMLDELAAGQTDTVRMAELALGQMRRKIPELVAALEGNFLPHQLFLLRELLQQFDYLSSTIERYEQRIAEYAAPFEAELQRVDAMPGINRIAAVTILAETGVDMNQFPRPEQFCKWATICPGNHQSGGKRRNGSIGQGNRWLRGALTEAAWAASRTKDSYFKAQYARLLHRGKQRALVAVAHSMLYAIWHLLRHAVDYHDLGIDYFQRRNLQGQKKLHVRKLEKMGFRVTLEPAF

SEQ ID NO: 208031 - protein, 351 aa, unidentified
MLIIGCDFHTRFQKIAMMDTTTGELVTRRLEHGTGEAERFYAALAAPVRVGIEATLATQWFEKMLRHYGHELWIGDAAEIRAAMVRKQKTDDRDALHILDLLMQNRFPRIWVPSPAERDVRQLVRHRHKLVRFRTSVMNQLHALAMGQGLCLRKKLWTTVGRQKLESLTLAPWASRRRRELLELLDQLDPSIGELDRAVIGEAESRPTAVCLMQQVGVGPVTALAFVLTVGPVSRFPNSKKLVSYLGLNPSEESTGGRQRLGAISKQGNTMLRCLLVEAAQTSARLDPELRRNYQRLKLRRGNSGVAKVAIARKLAVRLYWKLREADRPNTAARMQGSPVSPVVGESLSAN

SEQ ID NO: 208032 - protein, 338 aa, unidentified
MTIVMGLDQHRAQVTAEWLDTETGEVSRGRVAPADRRSVRRFLERFRGMELEAALEATTGWRFVVEELRRIGAGAHLAEPAETSALRGNKKRAKNDRADARHLRELLQAGRLPESWIGPDHILDLRARVRLRHSLVDDRGEWQQRMQAVLYHHGVPKRADLLTCENRAWVSQLPLPAAGREQIAVGLAVIDAIDLRLAPFDRELCRYARRQPGCKALMGHYGIGALTSVTILAELGDVRRFGSSRQVVRYGGMDITVHASDKRRAPGHLSRQGPPALRWALYEAAQAASRERSPDRDYYLQAAERLGRNRACLALARKLLKRAYHTLKDLGEEGLAPA

SEQ ID NO: 208033 - protein, 453 aa, unidentified
MKKETPKLGIVKMGSGLPVFNPYAGGIDIGDTLHCVAINDGKGGHEVKTTSAFTCDLHEIVDYCKYNGVTTVAMESTGVYWLVLYLLLEEAGIEPYLVNAKHAKNVTGRKKDDTDAIWLQKLHTCGLLQKSFQPDNETRLLRSYTRQRKNLILLAADSIRRMQKALELMNIKIHTVISDILGKTGTAMVKAIIAGERAPEILCKLCDPRIKASREDIVKSLEGIWKEEYLFMLEQAVENYEFLQKQVKSCEEKIQQQLLRQVALIKDGDITGLEETPKKKSKAKAKKNQFDFSLLPYLIALAGADLCKIPGISQVTALEFIAEVGLDMSKWKSSKHFAAWLNLTPNTKISGGKIISSKMMKKNNKAGQLLRQAASCLVTNKTPIGDYYRSMRARMGGKGAALATAHKLARIIYTMLLKQTEYNPGMIIENHEKSREEKIKKLEKQINKLKQVA

SEQ ID NO: 208034 - protein, 417 aa, unidentified
MAESNDTPEPISAFVGIDWADAKHDIYLHPADGSTASHEVIDAKPEALHDWILKMREHFSAAGKIYVCLEQSKGALIHQLMQYDFFVLYPINPKTLARFREAFRPSGAKDDRSDADLLCELVRLHTHRLRPWKPDDEQTRKLNAFCQNRRQAVGSAVRLLQQIREQLKLYYPLALELELNTVLACDFLQRWPTLEELRQAKPQTIRKFFYAHNFRRGDKIEQFVQKLQKQTPVTSDRAIIEPAAMQVRLLAAQLRVILNSIPEFDQTIAEIFHSHPDAAIFESFPGAGPQLAPRLLTAFGTDRDRLESAEQMSVISGVAPIKIASGKSFATHKRWACPKFIRQSFHEFAGCSIKFCAWAKAFYQAQRDKNKGHHTAVRALAFKWMRILFACWKNRKPYDDALYTGALKKRGSAFASP

SEQ ID NO: 208035 - protein, 383 aa, unidentified
MRKIQETLQAQSTTDQDIMYIAFELSNSTWRLAFSDGNKKRHVTIKARDLKQLEMEIKKVKKRFGLKDKTKIMSCYEAGRDGFWIHRYLLSKGIDNLVVDSSSIEVNRRKRRAKSDRLDAENLLRLLMRYHGNERQVWKVVTAPTVEEEDARHLHREIETLLRERIRYRNRIKALLVQHGLDVKNPSRKNFLKVLNTLRTWDGQALPESMKARVVREHERLKMIEDHIKLLKKEREQKVKSKETASLRQVAQLRGLCGIGVNSSWVFVMEFFGWRKFRNRREVAALAGLTPTPYDSGGSQREQGISKAGNKRIRTMAVEIAWCWLRFQPHSKLSRWFNERFASGGSRMRRIGIVALARKLLIVLWRYLEHGVIPEGAIIKNAS

SEQ ID NO: 208036 - protein, 351 aa, unidentified
MVVVGADVHKRTHTFVAVDEVGRKLGEKVVEATTAGHRQAVRWARSQFGVGLVWAVEDCRHLSARLERDLLAADQKVVRVPPKLMALTRKSARTRGKSDPIDALAVARAYLREPDLPVASHDEVSRELKLLVDRREDLVAQRTSTINRLLWRVHELDSSRAPKPASLDLAKHRRLLGDWLGTQSGLVAELARDELADITRLTETINALAKRIGERVRVIAPALLAMPGCGELTAAKIIGETAGVSRFKSEAAFARHSGVAPIPVWSGNTAGRVRMTRSGNRQLNAALHRIAVTQIRLTDSLGKKYYDKKQAEGMSTPEALRCLKRRLARIVYNILITDHQATLGTCIPAAA

SEQ ID NO: 208037 - protein, 325 aa, unidentified
MIFGEYMTVAIDVGKKSSYIVVEDNGNVTSEGYVPTTKDGFSTVLSGLDKPTVIVEASSTIDRVASLLEEYNADVKVAHPRNVKLIAESVKKTDKNDAHTLLNLYNSGYLPESYLASKEVRDTRNLCRNRNFLVRQRTAVKNKIQDQAFRLGVDFKHFNKRTLIELSSLSFPLERLVGELRNLNNEVTIFDKKLEDALQQNKNAKLLYTIPGVGVYSALAIAAEIADIDRFSTSANLCAYAGLVPRTHQSGNKEWKGHIAKGNSYLKCILVECAHVHVRISDSWITEAYRRIKIRAGSKKAKIAAARKLLITIYCLLKEGRGYNA

SEQ ID NO: 208038 - protein, 435 aa, unidentified
MLVSSPSQAEYMARIRDVDRERCLVVPVDVGKRSAMALVADHCHEVVVDPFAFDLNEAGFLELVAKADAYAEFVGAGSVRFGVESAGHYHRGIVTRLDAAGRDVVELNPSIVKDARGRIGARRVKTDVQDCLAIAEVLIDGLGHTPTQRSTAMSTQAAWVGKRRRKVEARGVLVRQLHAQVDLAFPHLTSCYSHGLDMASLRVIMAHICDPVRVVRLGPKRLREYVTNRGVRMWTLKAVEVVEAARLALAVPEGQRKAVELFVARDMALLEMLEAELAECDRQLAQVIAETPAGVLVSIPGVGVTAASYYGAALGDPHRFRNASAAYRYSGLSPASYESAGKTSARTFISREGSAPLRHAIITMGRGMRSHEPDFDAYYQRLKSSGKPPLVALVAVGHRAHRLAFSMMRNQTIYDPQRWVEGVEKGRAVKAAIAT

SEQ ID NO: 208039 - protein, 454 aa, unidentified
MEEKKKKISMEIINPNAAGIDIGSRTHWVAVGQGEDDVREFGVYNDDLKAIATWLRENEVKTVAMESTGTYWQALYAVLQAEGFQVILCNGKFTKNIKGRKSDVQDCQWIQKLHSIGLLTGSFLPDDATEQLRTYCRHRANLLDQAADTARKMQKYLRLLNLRLDVVVNDICGLTGLAIIDAICKGESNPEKLAALRHGNCRKSEEELAKALQTNGRKDYLFALQQELEMYNHLQAKIALCDVEIERMLNDQINNDNDKRQHHIDKKVYKRVAKNTPKNIDLNLLSYQYFEGVDLLAIEGVSYSTVLTLMSEVGLEGIKKFPTAKQFSSWLRLSPNNKISGGKVLSHKIPKGSNRLKTALRNAANAIGNLKDSTPLSDFFKRINFRKGRTSAISATARKLAVIIWNMVVNNRPYVNPENYLFVDQKRKLAVLNRIKKQIDKFALTNQDLGFVNT

SEQ ID NO: 208040 - protein, 335 aa, unidentified
MNFCGIDVSRDQLVVALRVGERDQPLRTFANTAAGHQALLRWLLQSPGVVRVSLEATGVYSLDLALALSVHPRVQLAVLNPKLARRFAESLGERSKNDPIDAGGLREHAARMPFVAWQRPTPSALALREIARQICALTEMRAATRNREQAARSSGVSCACVRQELQRTLRHLQASILRLLRAASQLRAQDAQLERRFQLLRSLTGIGELSGVQILAEVNLLEGRKVRQWVKHSGLDVREYRSGKAVYHKPRISKCGNRYLRRALYMPALVAARHNPGLRAFYQHLLGRGKTKLQALVAVMRKILHAIYGMFRHDRPYDATCLCPGLVPRPAREVA

SEQ ID NO: 208041 - protein, 390 aa, unidentified
MTQDFCAASTVNHLEVASNGLYDSRVKQPTGKPNEETEMRLYCGIDLHGNNSVISIIDETDRVMFEKRLPNDIEAILSSLETYRADLVGIVVESTFNWYWLVDGLMDKEYKVHLANPAAIQQYDGLKFSNDKSDARWLAHMLRLGILPEGYIYPKKERAVRDLLRKRGQLVRYRTSNLLSINNLVSRNYGSSVSVRQIRQLDKEGESESKMKMKMKMNMNMNMNKNLGLAVNANLAVLRCLDEQIKVIEREVIKCAKLRPEFALLHSVVGIGDILALTIALETGDIGRFPNVGDFSSYCRTVSSERISNGKKKGKGNTKCGNKYLAWAFIEAANFAVRYNEQARKFYQRKSAKTNPVVARKALANKLARACYYIMRDKVPFDNERLFTTK

SEQ ID NO: 208042 - protein, 354 aa, unidentified
MLAELVDHVIGVDPDRDWITVAALDSRTSGVIATDRFPATRDGYRDAIVWADGHTVETERAWVIEGTASYGRGLTMALQHHDEFIVEFDRPTRKATKDGAKSDALDAIRAAREALGRDKLNQPRAHDGIREAIRVHTVARAAAVRARTAAVNELKAFIVTAEEQLRAELRGLRTNKIVSRCSRFRDSASRPLDARCTRNAMRALARRVQHLEAEIAEHDAALKELIDRAAPQLIAERGIGYVTAAAFYLAWSHPGRCHSEAAYARLGGTAPIEVTSGQNQDRHRLCRGGDRQLNRALHLVAVTRQRCCPITQDYMARRTSEGKTQREATRCLKRFIARRVWRLLEHPKLALDRT

SEQ ID NO: 208043 - protein, 343 aa, unidentified
MEHIAIDLGGRESQICVMSAEGDVVLEERRPTRGLGTFLAKRPAGRVVVESCAEAFHVADAARRAGHEAVVVPASLVRSLGVGARGLKTDVRDARNLAEASCRMKRLPAVHVPATASRDRKTVCGLREILIGSRTKMVNAVRGWLRTSGLGPMRRTTPEAFPVRLREHVKSRGGMVPPAVERVLAVIEKTNSEIATSDEAVEALATEDPVCRRLMTVPGVGPVTAVRYAAAIDDVSRFPSAAPLHSYLGLVPGESSSSDRRRLTSITKAGAVQVRWALIQAAWSARRWRKNDPMVRWALEVERRRGRHVAVVALARKIAGIMYAIWRDQTEYDPTRGAAPIAD

SEQ ID NO: 208044 - protein, 337 aa, unidentified
MEYFAGLDVSMEETHICIVDRDGVVIHEAKALSTPADIEAALSRAPACQRVVFETGRMAPMLYHGLRDRGVPVVCIESRQAYQALKSLATHKTDRNDARGLAHLGRTGFFKAVHVKSLAAHAVRSLIIARKKLVGQRVTLENQIRGLAVAFGVRLPRALSPAFIEQALRASDGINGLSAAMRGLVAARAAVLAAVTTIDADMKKMVRTSDACRRLMTIPGVGQLTALAFTAAVDDLERFRRSRDIGAYLGLVPRRYQSGEVDYTGSISKCGDRRVRTLLYEAANVMLTRFKGPLKLKDWAFAIAKRSTMRKARIALARRLAIIMHAMLRHGTEFKSA

SEQ ID NO: 208045 - protein, 400 aa, unidentified
MKQFTAKDNLIESETALAMIEQQQKPARHYPKYLGLDVHKDTIAVAIAPLDGSKPRYYGEIANTPKAVEKLINKINPTGEVLGICYEAGPCGYGLYRQFTAMGHDCIVVAPSLIPSKPGDRIKTDRRDSESLARLHRANELTAVWVPDSEQEAMRDLSRAREDMKLLERQTRQRLSMFLLRHGKSYDTTKSKWTQAYFRWLETIKFDQPVQQIVFQEYVDAVKQQQTRVKGLETQLEKALDGWSLAPVVEALMALRGCKLITAMTIMAELGDITRFDSPRQLMAYLGLVPSEYSSGQSTRRGGITKAGNGHVRRVLTESAWCYRFPARKTAHLQRRAELTSEAVQAIAWKAQKRLCGRYQSLLNRGLIKVKVCTAIARELVGFIWAIACEVSGKKAATIA

SEQ ID NO: 208046 - protein, 423 aa, unidentified
MSNSTPPTHTITDCPAFDATIGLDWADQRHAICIRHRDNGARELITLAHEPAEFQAWITQLRSRHAGGRIALAVEHGRSAVLYALLEHQDFITVFPVPPQAIHAYRQAVRTTSGAKSDPADAELIEDYLHRHGDALRPWCQQDDTTRLLQGLTERRRHLVDERTRLTNTMLADLKLAYPVVTAIFDQLGSPAALAFLRRWPTLQSLLKASRQTLRKFFIAQHWRNNQSLETKLDLIAEARPLVTDTVIIQLADTGIQNCAARLRALLPLIDSLEEQISAAYARHPSSAIFDTLPGAGRALAPRLAALFGTDKDRWPDARSLQVFTGIAPCTQQSGKTRVVSKRWACPHFLRQTLHEFARLSTVKCAWAKAHVEAQRQRGKSYHTAVRSLAFKWLRILWRMWHDHLPYCEATFTAAQKHRGLPA

SEQ ID NO: 208047 - protein, 401 aa, unidentified
MIDVSDIGVFLGLDVGKGEHHATAVTPAGKKSFDKRLPNSEPKLRELFGKLQAKHGTVLVVVDQPASIGALPLAVAREMGCPVAYLPGLTMRRIADLYPGEAKTDARDAFVIADAARVMPHTLRSVEVEDEAIAELEMLVGFDDDLASEVTRVSNRLRGLLTQIHPHLERVLGPRLQHPAVLALLERFGSPAQIRKAGRPRLIGLLRPKAPRMAERLVEDIFTALDEQSVVVPGTDAAALIVPSLAGSLATVLNQRNVLAVRIEELLDSHPLSKVLTSMLPGIGVRTGARILIDVGDGSSFPTAAHLAAYAGLAPVTRSSGSSIRGEQPSRRGNKQLKRAFFLSSFASLADPVSRAYYDKKIAQGKHHTQALLCLARRRADVLFAMLRDGTFYEPRTAMVT

SEQ ID NO: 208048 - protein, 346 aa, unidentified
MRSDLSIGLDVSLDQTSVCVVDESGGIVWRGRCKSTPDDIAATIQRHAADVARVGLECGQLSTWLFHELKARGVPVVCIDARHAKAALSLKINKTDANDAYGIAQIVRVGWYKEVTVKSMDTHAVRALLAARTQLVCQLTTLKNTVRGILKTFGLIVPPGSGRQFERRVGEMIDGHAVLTLVLTPLLATLDTLRLQIAKLDSAVGKRARADQVVRRLMTAPGVGAVVALAFTSALEDPARFRRSSSVGAYLGLTPTRHQSGEVDRAGRISRCGDGLVRSYLYEAACTLIKRCKRPCALRSWGLSLIDRVGNKKAYVAVARKLAVILHQMWRDGSIFRWDEERLAAA

SEQ ID NO: 208049 - protein, 340 aa, unidentified
MTITTIGIDLAKNVFAVHGVDQNGKTVLVKSRVTRAALPGLIASLPPCVIGMEACSRAHYWARLFLQYGHEPRLMAAKFVSPYCMAGKSGKNDAADAQAICEAVRRPHMRFVPVKDESQQAMQCLHRTRQGFIEEKTATYNRLRGLISEFGVIAPQSTDALRHMVSALKSSLPLQVQQCVDDLLEHVDRIEANITEYDRILSRIAKTDHRSQRLMKLKGVGPTTACALVACIGNAHDFKNGRQLAAWLGLTPSQYSSGGKSKLGRITKAGDSYLRTLLVQGARSVLIGAEKRTDSFSRWVCSLVERRGYWRAVVAIAAKNARLCWASLHYGDDFRLYSAS

SEQ ID NO: 208050 - protein, 326 aa, unidentified
MQCFLGIDVSKAKLDVALLLANGKFKSKQFTNDAAGFAALVQWLLGHVPDAQAWVHICLEATGSYHEALACFLSDQGLVVSVVNPLLVKRFAEVNRLRNKTDGADAKCLAQFCQSSRPERWQAPSVSVRALQALVARLDALQAMRQAECNRLEVAHSAVAGSVRQVINDLDGAIAQVKAQIASTIDDDPDLKKRAGLLHSIPGLGDKTIPQLLAYIGRPERFKSVKALMAYAALTPLIRQSGTSLDSRRGTHPMGHRELKRSLYFPAMVAARYNPLVAAFWNRLKAQNKPGKVVVVACMHKLLAIAYGVLRSGKPFDPNHLKQIST

SEQ ID NO: 208051 - protein, 341 aa, unidentified
MEKFIRTAIDLGKNYFQVHGLESEGGRSISRKVKRSRMHEVYSQIEPCRVGMEACGSAHYWARQLTAMGHEVVLIPPAYIKPYVKRGKNDAVDAAAICEAMSRPDMRFVPIKSADQQAVLMLHKTRELLVKQRTMAVNALRGHLAEFGIVAARGIGRVDELLALAEADAALPHIARASVACMARHLEGLDQSIETMEEEIAKAHRQNPTSRLLDEIPGIGTLIASVTAASVPDPGVFKSGRDFAAWLGLTPRQNSSGGKEKLGAITKQGNRYIRKMLVTGATSVLRVAGKRKGALADWINALRARKPERLVAVALANKLARICWAIMTTGEGFRTEMYVKA

SEQ ID NO: 208052 - protein, 363 aa, unidentified
MIVIGTDTHKKSHTAAAVFAGTGQLAGELTAPARKAGFGELLTWGRGLDVERIWAIEDCRHVSGSFERFLVASGERVVRVPPKLMGESRRGERTRGKSDPIDALAVARAALREGPETLPSAHLDEEALELKLLLDHREDLVRGRSEDQQRLRWHLHDLWPEFKLPAGSLDRIVWLDRVARKLARAELSARVRVSRELVRAIRDRTKRAAELEREIARMARAQAPQLLELPGCGPLTAAKLLAETAGVARFASDAKLARLAGVAPIPASSGNRTRLRLDRGGNRQLNCAVHRIAVTQSRVHAPAKDFLARKRAEGKSTREALRCLKRHLIRRVWQLLNDSERERSMKTADTQRGLPAPQFAAAA

SEQ ID NO: 208053 - protein, 338 aa, unidentified
MDRQYVGIDFHRRRSVIVRLSGSGERLGLHRIVNEPFELVQVLGLCGEAPQVVIEATYGWYWAVQLLQDLGAVVHLANPRALNWGDRRVKNDVNDATDLADMLRLNRLAEAWIAPPALRELRELVRYRAKLVQLRSGLKAQVHAVMAKEGVIPVVSDLFGPAGTRQLDALALGGPFARRVRSLRDLIAIHDREISALERDLHQHLKGHRGYEAVQEINGIGKISAAVLVAEIGDVTRFPSPAQLCSWAGLTPTHRESDLKTRRGHISKQGSRLVRATLIEAISRYHGGTLLDAQYRRIAKRRGANKARVAIARKVLTLVYYGLRDGEIRCLAPAETAA

SEQ ID NO: 208054 - protein, 279 aa, unidentified
MSSQIFVGIDVAKAHLDIALRPTGERWAVAHDDGGIAALVERLQAVQPHLIVLEATGGYQRAVVAALAAAGLPVAVVNPRQARDVAKATGPLAKTDALDARALAHVAEAVRPTPRPLPDAQAEELRALLARRRQLVAMRTAEQNRLGNAPPRLQADIPAPITWLNTRLTALDDDLDTTLRASPVWREREELLRSVPGIGPVCARTLRLDLPELGTLNRQRLAALVGVAPLNRDRGTLRGSRTIWGGRAPVRATMYMSALVAVRYNPVLKAFYNRLRAAG

SEQ ID NO: 208055 - protein, 343 aa, unidentified
MQTITTIGLDIAKSVFQVHGVDAAGQVVIRRQLKRRYVLAFFQKLPPCLIGIEACASSHYWSRELQALGHTVRLMPPAYVKPYVKRQKNDATDAEAICEAVARANMRFVPTKTPEQQSCLMLHRTRHLFIRQQTAVINSIRAHLAEFGIVAPVGRKGVTELLHIVADPSDKRVPEVARACLAALGNQLLSIKEQIVEFDRMIMVWHRSNETSKRLHYIPGVGPMLATALVASVAHPRTFRSGRNFSAWIGLVPKQHSSGGKDRLGSISKQGDRYLRSLFVAGALAVIRYAKIHGTKHRPWLTALLARRPTKVAAIALANKLARMAWAMMAKGERYKEPIALAA

SEQ ID NO: 208056 - protein, 366 aa, unidentified
MKSPAGLEAQRGPAMEQSISSVIGIDLGDRVSHACVLSKKSGEIVERRRLATTRKGICDLLEKRERSLVAIEVGTHSAWVSRTISVLGHEVLVGDARRLAFIFKSNDKSDRSDAENLARVARLDRGLLYPIQHRAETAQVDLAVLRVRNGLVEVRTKLINQVRGLVKSHGSRLRSCSATSFLSKAAPSIPDELRAAVRPLLDVLQEVGKKIRQCDAKVKELCMEGYPETELLRQGVGVGPVTALAYVLVLGDPARFERSRDVGAFVGLTPRRDQSGSRDPQLRITKAGNPFLRRLLVQAAQYILGPFGPDSDLRRFGMAMTDRGGANAKKRAVVAVARKLAVLLHALWKTGSVYESLRAQEPAAVA

SEQ ID NO: 208057 - protein, 337 aa, unidentified
MDVHKKSWTAHFKTDLFDNKTVTMPAESESLMNYVERNFAGHAVSCCYEAGCCGYWIARALRQKGWEVKVVNPADVPRSNKQDWQKTDRIDSRNLCKHLSDGNLKGIYVPGEEQEQLRALFRRRIHLARNLRSIKNHIKSQLLYFGIKLPAQYDNPNWSREMKTWIANVKWKYSCAAESMHSRLKQLEFVWYEELHISNELRAYCRKHYKKDYYLYKSVPGIGGITAAAIIAELGDIRRFNRLDELAAIVGLVPGIYQSSENKINLGLTKRSNHQLRSLLVEASWVAVRDDMALQQYYRKHAHKEPNKAIIKVAHKLLSRIRAVIHSGIPYQPGLIK

SEQ ID NO: 208058 - protein, 344 aa, unidentified
MVEYVGFDVSKEETAFCVKDAAGEVLARGKVSTDPRALFEALRAHCLYPGRIVLETGTLSGWLARELGGLGVGVDVIDARQANAVMRLQHNKTDANDAELLAEIARTGFCRPVAVKSAAAQASRALLKARCHLVRQRRDTQNTMRGLLGSLGIRFPKGSGKLAGRVREALEGRPELRVVIEPLLSTVAALEREIGRLDKAVVARAKGAPACRLLMSVPGVGTVTALAYVSTIGDAERFANSRAVGAYVGLTSRRWQSGGMDYSGRISKHGDAMLRALLYEAANSLLTVVRRAHPLKDWARRIRKRTSHKKACVALARRLAVILHRMLITGEAFRWPAKKESVTA

SEQ ID NO: 208059 - protein, 316 aa, unidentified
MSISETFIGIDVSKEQLDCASRPNGTTSSFKNSVTGIDALIKQLQEQRPRLVVLEATGGLERALVAALVVAQMPVVIVNPRQVRDFARAVGQLAKTDRIDAAVIAHFAEAVKPEVRTLPDQLTQEMDALMKRRGQLVSMLGVERNHLVSATSLVSNHVKEHISHLEELIKRLDQEIDQMIGKSPIWKAKDELFQSVKGVGPVLSRTLLAELPEIGQLSRQKLSKLVGVAPLNNDSGKRKGKRSCWGGRSRVRAILYMSALSATRFNPVIKEFYQRLLAKGKIKKVALVACMRKLLTILNSMVKNNTPWDPSFAQRG

SEQ ID NO: 208060 - protein, 349 aa, unidentified
MLHVGLDLSRRRVDVCLVSSDGELVEHFRAPADRDGLYGLTRRVAVYDEPVRGVVESMNGARFVHDELVKYGWEVLVADAQRVKGLAPLACKTDKVDARVLAELSFRDLVPAIWLPTPELRAERERARWRLHLVKHRAILKNRVHASLIAFGHQVPMADLFGVAGRRLLAGLDFPEPWLSHVKASLELIDDLDRRIGEIERWLRRSGADHRYIPVLMSAPGIGWVTGFTIAAEIGDINRFSSPVKLTGYTGLCPRVSQSGEMDRRGPLAKHGPRYLRWGLMEAAIAASSHPLYKERYQRTKRRLGRQRGAKVAQIELARKLTEAIWYMLTRNQPFKPFAPAGAVIRLTA

SEQ ID NO: 208061 - protein, 344 aa, unidentified
MTYYVGLDVSLRSVNICVIGDDGEIVQEAKVDSEPEDIVAKLRSLKPEIQALGLEAGTLTQYLTYGLQHAGYEVVCMEARQVAASLAAMRNKTDKNDARGIAQILRSGWYNRVHVKIIESHHIRALLSARKAVLRKCIDLENEVRGLFKVFGIKLPSPLKHGAFDGAVRERIEADPALAHALLPLLDARLVLYRTFLEMDGRARKMAAKDVVCRRLMTAPGIGAISALTYKAAVDDPKRFKRSRTVGAHFGLTPRRFQSGEMDNVGRISKAGDPDVRAVLYAAANAMLTRTTGWSAVKAWGMDLMKTKGRRKAVVAVSRKLAVILHRMWIDGNDFQWATEGATS

SEQ ID NO: 208062 - protein, 398 aa, unidentified
MRRFAGIDWASADHAVCVIDEGAKVLHRAMVAHTREGLTELVRALRKFGADLPVAIERPSGLLVDTLVEAGFQVVPIHPNAVKASRPRYAAAASKTDLGDAFMLADLLRTDGHRFQALRPHSDQTRALRALVRTRDDLVAERVGLANQLRALLERFWPGASAIFADVDSPISLAFLRRYPTPQSADRLGGKRLRAFLTRNAYCGRRPVAQLLERLRSAPAGLTGEAEAEASGELVLALVAVLEPLVAQIQRLTAAVERALEIHPDGALVASFPRAGCVNAAQILAELGDDRARFVSEEHLAAEAGVAPVTKASGKSRAVACNKRLRGAVTCFADNSRHASAWAAGVYQRARSRGCDHPHAIRVLARAWVRVLWRCWQDRRRYDPALHRAAAPLQAAAG

SEQ ID NO: 208063 - protein, 521 aa, unidentified
MVVSQKTARRVSLPAFAPRKGALGARVEAAGPKRFAILAVDCAKHSSRWRLADFYGRCLIPPTTLTHRAADFQAAINTVKLAVDDHKIADLIVVIERTGRYHLIVKKAFEDAGFEVRVIDPLATHQFRKPVHAGNKTDDTDLQAIHDAAAHGLGLAQPALPPVFQELQDWARHRRDLVVKSSRLRCQIREHLHTAMPGYAELFDDVFTCQIGLFIPLHFHLAALRAARSDQLADAAKAAGIRCLGKTLQTILAWARIAPEPDDRPPIRQTILTDLIADFHAKQDQIARAEVALARLLSQTPYLVLLSIPGLNVVTAGEFAAEAGPITAYAKARAITGRAGLYPSRYQSGPVDRADGPLVPKGNRRLRQAILRIADTLMRCNDHFGLLARTLELRGMPKPKIHVAVGNRFTRIAYRMVAGGQAYHHPSGQRGDYVIQKLLKFYHTHLINSTDTVSALQTAVDHLPATVRGGEAPPLSEDLTRIAGQRGTGPKRLGEILPSVLARLTSHELESPRSGELSQPV

SEQ ID NO: 208064 - protein, 342 aa, unidentified
MQITTIGLDIAKNVFQVHGIDADEKVVVRKQLRRVQMLAFFEALPPCLVGMEACASSHCWARELTKLGHQVRLMPAKDVKAYVKRNKNDAADAEAICEAVRRPTMRFVQIKSVEQQARLMLHRARDLLMRQRTQLINALRAHMAELGIVAAQGREGVKELLKIIASEEDARMPVDAHTSLVVLAAGLQALQTMIRSIERRIIAQHRSDEASKRLRSIPGIGIVGATAIAATVSDPKVFRSGRDFAAWIGIVPRQDSTGGKQKLGPISKQGDQYLRRILVVGAHAVLKRARHQPEKYPWVTRLLARKPFRVVAVALANKMARVAWALLAKGGTYRAPALAAAA

SEQ ID NO: 208065 - protein, 345 aa, unidentified
MNKLVSTQQVTVFCGIDVSACSLAVALIGSDGNLAQREFANSASGHKALLVWLANHNAQVRVSLEATGVYSLDLALALHSGARIELAVLNPKLVNRFAQTLRRSKTDAADAVVLAEYGQRMPFVAWQRPEASHLRLRTMGRYIESLVVEQAGLKNRLRTMEISATTPRVVLSDLRQALVALERRVTKMRRAALALVQADATLRERFRLLVSVPGIAEISALQILSELVLLAPTMTVRQWVASSGLDPVHQMSGSSVHKPSKISRAGNRHLRGALYMPALSAARYDPHLRAFYQALRKRHKTGLQALMAVARKLLHAIYGIFKSGAPYDGRRLFPNIQTAVESVAG

SEQ ID NO: 208066 - protein, 371 aa, unidentified
MEHTRFIGLDIHKERISVAVAESGRSGAVEYLGEIANEPGAISKLCDRLRRPGKPLAFCYEAGPCGYGIHRQLTRLGHRCDVVAPSLIPTKAGDRVKTNRRDATMLARLHRAGELTPVWVPDADHEAMRDLIRLRSVVRQIVTRARQHLQGFLLRHGRKHGRGTAWRMAYRRWLSTLAFEHPAQQIALQDYVDAVMDAERRLKRVEEQVFGLLPDWNLRLVVDGLQAMRGIALINAVVLVTEVGDFTRFSNPRQLMAYFGLIPGERSSGETVRRGAITKTGNAHVRRALVEGAWAYRMKARIGRHKVDRIEALPKVVRDIGWKAQVRLCTRYRRLRARGKTANVVNVAIAREMVGFIWSIACTIQSAPRAA

SEQ ID NO: 208067 - protein, 409 aa, unidentified
MSYTVAGIDVHKKVLMVVLGDVSQPHWKLQRQRFGTTTPELKRLAEWLRQQAAQEVVMESTAQYWKPVWMALEPHLKLHLAQAQSNRAPRGRKNDFRDAERLLRRLVADELTLSLVPNPEQRGWRTMTRMKSQLIRDRVRLQNQIESLLEEMRLKLSSVVSDLLGVSGRRILAALAAGETDPAKLAALGDERLRVSEAELRDALTASPQKMHQSLLGLYLERLYLLDRQIADLERMTAEALKPHEGAVARLAEVPGLQADSAQRIIAEIGPAAETFATAGNLASWVGVCPGEEESAEQNHNPRSPKGNKQMRQILTQVAQAAVRTNGSHFQAEFRRKLPRLGYAKAIWAVAHKVCRVVWKILHQGARYIEYGEYPNPKARKRRIQRMLQSLRKLGFEVNVTPLVPELQQ

SEQ ID NO: 208068 - protein, 429 aa, unidentified
MGSRSHFVAIGQDPEKDVSEFGVYSQDHQKMIDFLRNHRITTIAMESTGSYWQSLFYALQNAGFEVLLVSGQQTKNVRAKTDVKDCVWIQKLHSLGLLRGCFLPDKHTAKLRHLYRHRMSLIEESAKMTNKMQKAMRMMNVRLDVVINDITGKTGIAIIEAILTGERDGQVLSQLADSRIRRSKEEIALALKGRWDEELLYELEDCYQIYMMLQGKIKASEKRLEILLNEFTEDIHVDNQEVNLTRKQTKGKNQPKFNLTTLSYKFYGVDLFAIESISTSTVLTLICEIGQGIYKFHSAKQFASFLRLAPNNRISGGKVISSRTPKGGNKFALALRNAANTIDRTKDGALTRFFKRVAYKKGRAAAITATARKLAVIIWNMIVKNESYQPLDVPHYKELIKARTIASIKNRMIKMGISVLELSPQTEVS

SEQ ID NO: 208069 - protein, 342 aa, unidentified
MQITTIGLDIAKNVFQVHGIDATEKVVVRKQLRRSKVIAFFEALPPCLVGMEACASAHYWARELRKLGHEVRLMPAKDVKAYVKRNKNDAADAEAICEAVRRPTMRFVRVKSAEQQGGLMLHRTRDLLMRQRTQVINALRAHLAELGITAAQGREGLKELLKIIASDADERLPADAHASLVVLAAELQAMQTLIGSIEKRITAQHRGNEASKRLESIPGIGVIGATAIAATVTDPTVFRSGRDFAAWIGLVPRQDSTGGKQKLGPISKQGDRYLRRILVVGAIAVLRYAKQNPEKYPWLTQLLARRPFKVVAVALANKMARMAWALLAKGGTYRAPALAAAA

SEQ ID NO: 208070 - protein, 331 aa, unidentified
MDFKETIGIDVSKPFIDAVIHSNQKHRQFRNSSKGFKDLLSWVKKQSNHKASNRLFAFEHTGLYSAPLSIFLTKEEVAYIMIPGLELKKSMGIVRGKTDKVDAKTIALYTYRRRDEVKPYILPSEKLLILRKLLSLRDKLVKQSSAYKATNKEIKDFMNKENNEIYFEIHDEMISILNEKIKKVEKQIKTIIKTEEKLHEQYKLITTIKGVGDQTAWHMIVYTNAFTLFDNSRKFASYSGVAPFPYQSGISIKGKSKVHQFANKKFKSLLSNCASSAVMHNSELRLYYTNRLELGKNKMSTLNIIRNKILSRIFAVIQRGTPYVDTYAFAS

SEQ ID NO: 208071 - protein, 320 aa, unidentified
MAVTIVETLGQTRAITGGVDTHADVHVAAALDPLGGLLGVEEFPVTPPGYARLLGWLGGFGTVCLVGIEGTGSYGAGLARHVTAAGVRVVEVDRSDRQDRRRQGKSDPLDAVSAARAAQSGRARGAPRGRDGSVEAIRALMVAKRSARWSPRRPRCGPGPAAPSATPPGSRCASWGGAPSSPGGQLERLDELIVPLVTAHAPGLLALYGIGPDTAALLLIAAGDHPARLRSEAAWAHLCAVAPIPASSGKTVRHRLNPGGDRQANHALWRIVITRMSSHPPTRAYVERRTAEGLSKTEIIRCLKRYVAREIYPRLRAAAD

SEQ ID NO: 208072 - protein, 421 aa, unidentified
MSYRIAAIDIHKKVLMVVVVTAAEEVADATGEALEFACRRFGTGSSERSQLVAWLQQRGVVEVVMESTAQYWKPVWLDLEPHFAKLHLAQAHSNRAPKGRKNDFGDAKRLGRRLLAGELLLSFVPDAEQRNWRTLTRSKQQLVRDRVQLHNQLEALLEEMRIKLSSVISDLLGVSGRRILTALAEGEADPVKLAQLGDERLKCTQAELTDALRGAPMPVHLAVLRLFLKRLTLLDEQIRELDKLVAEELKKHEEAVLRVTEIPGFGVDSAQQIIAEVGVDAETFPSAGEFSSWVGVCPGSNVSAEQNHSSRSPKGNRFVRRILTQAAQAAVRKKGCHFQSVFRRFLPKLGYNGAIWAIAHRLAGVLWKILHNGVRYIEQGNETNPRAKKRRAQKLAQALRRLGYAVTLTPISPDAPVADQG

SEQ ID NO: 208073 - protein, 372 aa, unidentified
MEEFTKYVGLDVHKETIAVSVADGRGGELRYEGEIANTPQALKKRVGQLGKGGARLSFCYEAGGCGYEIYRQLTDLGWDCMVVAPSLIPRKAGDRVKTDRRDSLGLARLLRAGELTAVSVPDDEQEALRDLTRAREDLKHLQRQAKQRLLAFLLRHGRRYAGKSHWTQAHFRWLETVKFEHPGQQIVMQEYVEVVIACGKRVAGLEQQIAHTAQASRVWPVIQALMALRGVNLLTATTVVAEVGDLTRFAQASQLMAYLGLVPSEYSSGGGTRRGGITKTGNSHVRRVLVEAAWTYRHAARKTAVVQRRAERTPQVVQDIAWSAQKRLCQKYRTLEGRGKLKVQVCTAVARELAGFIWAIGHAVPGTDAAAA

SEQ ID NO: 208074 - protein, 357 aa, unidentified
MATYYIGADVHSNSIEMAILNRKKIVQRYTIPAGVSAAVEVLDSLNGKKYMAIEEGPMSGWLYRNLRRKVDRFVVADPRRNKLISSDGDHDDKIDSAKLAMLLSGGYLREVYHSDDDKRVELKHWVSLYHDRVCDAVRNINKIRARCRMHGVTIPRKVLRQPEHRMVWLRKLKNTALSNQLLMLWIGYDATAKQSRMAKQRLINLSKRYPIIRLWQQLPGVGIIRAVTIFAYIDTPWRFRKKNKLWKYCGIGLQRTASGTDKKGKPKPARLQLPWAANRILKNAILGAALTAINQNQNFLKTDYERMVLNGIISSNARHTVARKMLTVMWGMWKRSCQEGLDEVSLQKLNKKEVYVY

SEQ ID NO: 208075 - protein, 323 aa, unidentified
MIYIGFDVHKRFSRVGLFDPATGELQDLGSVNNDQQALEAQLAQMPAPKTVVLEAGRSSYYMARLLESMAEQVWIIDPGEVRRLQQSVAKTDRRDAAALAWWAAKGVLTPQWRPDAEVLDLRELTRGKTALTRMSTQVRTMIRGLLARYGYECPHRDLLGDSARGWLDDVQLAGYAGEMLTALRELLRVIQRSVDDFEAEVEQAAAVHPMAQRLRTVPGVGPFLSLALAVEIGDVRRFPSPANLRGYSGLTPAVYQSGDKDARGPLTKRGNKWLRYAAVLAAQRLAQMRQPDPKLKRTFLSVAFRHSQRNLPHDSRIPRSQDP

SEQ ID NO: 208076 - protein, 319 aa, unidentified
MGTVMNQTSSSLYIGIDVSGSTLDVAIHDTTEHFSVDNETAAIEQLVQRLIALGPTLIVMEATGKLELAVLRALCQAGLPAVAVNPRQVRDFARATGKRAKTERIDAFVIAHFAAVIKPVVRPLNDVQTEQLQALLLRRAQLIDMLVAEKARLERAHAAAKESLNDHIKWLKQQLTVADRDIDSFLRASPAWRQKEDLLRSVPGIGPGAAATLIAFMPQLGSLNRREIAALTGVAPFNSDSGKHTGKRRIQGGRAIVRRALYMACIPALRFNPTIRAFYDRLRQAGKPFKVAMTACIRKLIVTLNAMVHNSTPWSPSTN

SEQ ID NO: 208077 - protein, 419 aa, unidentified
MSFKIPKNNCCGLDVHKTWIYACIGITDSLKRTEYKEARFSSFTKGLHELCDWLSKYNCTDVCMESTGKYWIPLFNVLEKNNIWVTLSHPKYTKPQKGNKTDRKDAKWICNLYMCGMVKPSFIPPADIRELRDLVRYRFKLTCMITGEKNRAHNCLTVSNLKLDDVFSDIFGKSSRSITEQILQHPGETFDVSPFVDGRCKTPIEEIQAAVDGAISKEQAVKLRQCLNHIDELELHKVEIEREIFRLSDKYESVLSLIRTVPGFDKTHMTAIQVLSEIGGDMSVFPTAKNLVSWAGCCPRNDQSNHKIKSTRISRAGSYFKPVLVQVANALIKSKKHPEFTTRYRRIKTRRGHKKAIIAICRMILTAIWHILTDLKPYTPKGFLESRPVNKSKVLTTSQALNLMKQRGYIIKDDVVPIP

SEQ ID NO: 208078 - protein, 339 aa, unidentified
MKITTVGLDLAKNIFHVVCINAQGKEVKKRMLRRNQVRPFFVQLPPCVVGMEACAGSHYWGRQLRALGHNVKLIPPQYVKPYLRGNKNDYNDARAIAEAVTRPEMPTVGIKTVEEQDMQALHRMRSQCVRDRTALSNSIRGLLGEYGIVFTKGVATLRRKIPEVLEDADNGLSLRFRHCLARRYEQLVELEGHIAFYTKELNRLSEQDEACQRLQTVPGFGPIVASAFRSVIGDGRAYARGRDAAASIGLVPRQYSSGGKNVLLGISKRGNKYLRKQLIHGARSVVLQAAHKEDPLSCWINRIRKERGWNKAVVALANKMARIGWAVLRDETSYHPATR

SEQ ID NO: 208079 - protein, 342 aa, unidentified
MEFKAFVGIDISKLTLDAVILFPSKQTMIHRKISNDEDGFNQLLSWLKSQKEDLYDVLFCMEHTGIYSLPLTTFLSKHQLCFSLQSPLHIHKSMGLRRGKNDKADATMLARYAYLHKDEIKLSGVPSKVIQQIKNLLTFRDRLVKVKVLLQTSSGELAAFTDKEVHITILRNSTKYVKQFKAGILQIEGEINMNIKSSPDLKRTCDLVMSVPGVGLITAAHLIVYTNCFTLFDNWRKLACYCGVAPFEHTSGTSIRGKTRVSKFGNKRIKSLLGMGALVAITHDDELQNYFDRRIKEGKNKSSTMNIIKNKMLSRIFAAVKRGTPYVKLKQINENKGEKIKL

SEQ ID NO: 208080 - protein, 425 aa, unidentified
MEEQVMESETPFAALIGIDWSDQKHDICLVETETGSHELSVIPHTPEALNEWARHLRARFGGEPVAVCLEQSRGSLIYALMKYDFLVLYPVNPQTLSRFREAFTPSRAKSDPSDAEFLVELLIHHRERLKAWTPDDEKTRTLQLLVEHRRRLIGDQTRISNRLTALLKGYFPQVLAWFPNIRTTMVCEFLLRWSSLDALKGVRRQTLEKFFREHNSLRKETVEKRIGAITSAVPLTTDKAVIKSSVVMVRALASKMQTTLAAVKEFDREIEELCQEHDDFALFASLPGAGEVYASRLLTAMGSNRERWQSADELLCFSGIAPVMERSGKSSWTRWRYFCPKFIRQAFVEYAGESVRHSEWAQAFYMSQKAKGKSHQAAVRALAYKWIRIIWKCWQTREKYDEARYVECLRKRGSKLVPESAGAAA

SEQ ID NO: 208081 - protein, 354 aa, unidentified
MLIIGCDYHPSFQQIAFVDTDTGELQERRLEHREEAEKFYRGLGVQGMKVRVGMEASGQARWFERLLAELNIELWVGDATEIARKRERKQKTDRQDAQHILKLMLKDDFPQIWVPSWENRDLRQLLWHRHRMVQARTRIMNQLQAVALNEGLRSKKRLWREAGREQLEAIRLAPWASQRRRDLLELLDRLNPTIAKLTQAIEEEVGKCPAARRLQTHPGVGPLTALAFVLIIGKADRFQCGKQIASYLGLVPLEKSSGHQRRLGHITKQGNSLLRFLLVEAAQVTVRSLPEWRSKYVHLTMRRGRKIAKVAMARRLAVRMYWMMRKEWDYERLRKFGSHAGKPGSGDGVKSNTE

SEQ ID NO: 208082 - protein, 307 aa, unidentified
MFVGIDVAKDRLDVHVRPAGETFTVARDGEGIEALTGRLSRIAPALVVLEATGGFETIVAAGLGAAGLPVAVVNPRQIRDFARATARLAKTDTLDAAVIAHFAEAVNPPARPLADEQSRLLGELMARRRQLIEMIGAESNRRRMLTVRRTLKTVDRVLATLKAQLEQIDDDIDIAIRGTPAWREAEDLLISVPGIGPRIARTLIAELPELGRLGRREIASLTGVAPFNRDSGTLRGRRTIAGGRPVVRAALYMSILVSIRRKLPLALTYHRLRASGKPAKVAIVACMRKLVTILNAILRDKKPWATA

SEQ ID NO: 208083 - protein, 389 aa, unidentified
MYFIGIDISKYKHDCFIVSSDGEAPFGVFSFENNKNGFQLLLDRLDSLDSSEEKRIGFESTSHYTLNLKLFLEKHHYTFMEFQPALISQYGKALSLRKTKTDAIDSQTIARWLMTVEYKPYPLSFYHNYSLKSLTRLRFSLIKQRTFYLIRLTDILDHIFPEFKPFFNNNFSATALHILEKYGSPEKIAAFRTTSYDELRKISRGKFSMQKFLALKDLAKNSVGVSNRIFEMELSCILRLYRQIDEEITNIETEIKALTLELNRPCLTIPGVGVLSAAIILSEYGDISKFKSPGQMLSFAGLEPGYFQSGQSEHTGHMVKRGSSHLRCAIINCCLPLIQFNMTFAEFYAKKRAEGKPHRVAMSHVAKKLIRLIYTLETTNQPFDTDKLR

SEQ ID NO: 208084 - protein, 437 aa, unidentified
MLSYLNLNAAGVDIGATEIYIAVPGDRDPQPVRCFSTFTEDLHAAADWLKACHIETVAMESTSVYWIPLFQILEARGFQVFLVNAHHVKNVPGRKSDVSDCQWLQYLHSVGLLRASFRPEQAVCTVRSILRHRDGLVQMASSHVQHMQKALDQMNLQLHHVISDITGRTGITILEAILAGERNPHQLAKLRDRRVKATEETIAKSLVGDYRREHLFTLRQSLAAFRQYQHWIADCDHEIAQYLEQFESKLDPPPRPTSPSEDGSKPKANEQRFDLQTHLHRIFGVDLTQVPGIQVLTAQTLLAEIGPDLSRFEDGSALASWLGLCPDNRISGGKVLSVKTRKVKNRAATALRMAAHSLHHSQSFLGHFYRRMRAKLGAPKAITATAHKLVRIVYHMVTTGHAYDETICAQNELQNRQRLEAKLRKQARELGLQVVAA

SEQ ID NO: 208085 - protein, 345 aa, unidentified
MKHYVGLDVSVKETSVCIVDEAGKVCRELKVPSHPEDLVDALKDSTWRIERIGLEAGPLSQWLFSGLAEAGLPAVCIETRHTKAFLKAQVNKSDRNDARGIAQMMRVNLFRPVHVKTVTSQKRRALLTARKILQEKAVAIENDIRGLLRNFGLKVGGVGLGKFDERIRELVEGMPELVEIMEPLLAARQKLREMFTKLHRKLLLIVRNDGVCRRLMTIPGVGPVVSLAFKSTIDVPARFKNSKAVGPSLGLTPVLNQSGESRRIGRVSLCGDNMMRALLYEAAQVMMTRVQKWSWLKAWAMNVAKRRGRQKAIVALARRLSVIMHRIWIDGSVFRWTNKATPAAA

SEQ ID NO: 208086 - protein, 346 aa, unidentified
MLYAGLDLSRKRLDFRLLDQAGETIEAGAVPPDADGLRGLAGRVARFAEPVRAAIESMNGARFVHDQLEAAGWEVEIADAVKVKGLAPLACKTDRIDAWVLAELSRRELVPTIWLPDPAVRAERERARWRLHLVRHRSGLKQRVHAVLLAHGQPCPVSDLFGASGRALLARLALPEPWASTVAASLRLIDELDREIVALERELRRLGADHRYVPLLLTIPGIGWVLAYTIAAELGDIARFASPTKLAGYTGLCPRVYQSGDSDRRGPLSKQGPRYLRWALIEATTHACKHPLYRDRYQRTKTRLGNQRGPKVAQVDLARRLAEAIWHMLTRDQPFAPAGATNPLAA

SEQ ID NO: 208087 - protein, 582 aa, unidentified
MNATIAQIEHIGVGVDTARYGHRVTFVRRDHQPAAPPLTVMETRDGYQRLQSQLERLHRQYPQAEFHLHIDAAGQYARNLEHFLRRLNLPMVVSVGEPKRNKDYQNVFYPKRTTDDTESQAMARFGVVEQPAATYDVADEFYLLLEVAGRLQAQIRDSTRAINRLHNLLARVFPELATLVSNLGAQYVLILLKKYPTPQRLAKARIDSLKKIPYLKPELAEKILAAAKETVGSLHGELAESLVLQQVEQVEQTLANVDRLEKLLIQAFKALPRTGHVQVPSIPGIGLLTAAVLVAKIISMDRFVTPEKLVGYFGVFPQELQSGVDPEGNPLPGNKKQMSSKGCDLVRRYLWNAAKSAIQCNPAVRDLYARLRAKGTRGDVALGHCMRKLLHQVFGVWASDHPFDEQRSQPQKASPANQPDSNQPKGDCTSSPAETKTAAGHKRETCPQKKVVTAANSNVEPSPQAVKRPPADDGTVDYGLLRQQVTMEQVLTHLGHFGQLRGSASQRRGPCPLHGEQPGSGQTFSVNLQKNVFRCFHRDCHAGNVLDFWRYYHNLPLYEAAKNLAQTFQISLHPNREEEPVI

SEQ ID NO: 208088 - protein, 400 aa, unidentified
MDDIDDVGVFLGLDVGKSAHHGHGLTPAGKKVFDKQLPNSEPKLRAVFDKLAAKFGTVLVIVDQPASIGALPLTVARDAGCKVAYLPGLSMRRIADLYPGEAKTDAKDAAVIADAARTMPHTLRSLELTDEITAELTVLVGFDQDLAAEATRTSNRIRGLLTQFHPSLERVLGPRLDHPAITWLLERYGSPAALRKAGRRRLVEVIRPKAPRMAARLIDAVFDALDEQTVVVPGTGTLDLVIPSLARSLAAVHEQRRALEAQIGQLLEAHPLSAVLTSIPGVAVRTAATLLVTVGDGTSFPTAAHLASYAGLAPTTKSSGTSIHGEHAPRGGNRQLKRAMFLSAFAALHDPASRTYYDRCRARGKTHTQALLRLARQRINVLFAMLRDGTFYEPRTPHLA

SEQ ID NO: 208089 - protein, 438 aa, unidentified
MLQTLHLHAAGIDAGSTHFFVATPDGAVTSFESCTPELYRLRDYLQTHGVTTAAMEATGVYWLPLFEILETAGIEVCLVNGAHVKNLPGRKSDVQDCQWLRELHAHGLLRKSFVPPENIRALRSYTRLRDDHIRTGAMQVQLMQKALDQLNVKLHTVISQLHGVSGLAIVRAILAGERDPAKLAGLCDVRILKKKRAAVERSLHGVWKEEHLFALKQALAGWEFCEAQVQECDAAITRQLAALTRDLTLPEGKGPPPKSGRHHVPNVPQLHAHLLTLSGGQDAAQLPGFTATNWLKVMGEVGPDLSRWPNEKAFTAWLCLAPGKHQSGQKHGRGRRRGKTAAGQIFRLAAQSVGQSKYLALGGFYRRLKARTNAAVATVATARKLAALFYRAMRYGLAYVERGLEAYEQAYRERQRRYLAKCAAELGLTLTPTLAPSL

SEQ ID NO: 208090 - protein, 348 aa, unidentified
MKIIGCDFHPSWQQVAWLDAETGETGEGKLVNGDGEAERFYRGLPEPALVGVEACGNSQWFVDLLQQLGHEVWVGDAAQIRASYVRQQKTDKRDAAHILRLLLENRFPKLWVPSAEQRDIRQLLLHRHKLVEIRTRVKNGLQHLALNRGMQKKHKLWSEAGQKALRELPLQGWAARRRQDLLGLLKSLDEQIGQLDQAAEEESQRDKMAQLLRTQPGVGPITALAFVVTIGDVTRFRRGKQVASYLGLIPRERSSGGRQRLGAISKQGNRFLRMLLVEAAHTANRKDEGFRKTYQQRCHRMAKGVAQVAAARKLAVRLYWMLRTNTAYPEIVQIESSPRVPLVGRHGD

SEQ ID NO: 208091 - protein, 350 aa, unidentified
MKLYGAIDLHSNNNVTVLMDEKDKVVYQKRLTNDLPLILEQLSPYASSMEGLVVVSTYNWYWLVDGLMEKGHRVHLANTAAIQQYEGLKYTDDDSDARWLAHLFRLRVLPEGYIYPKEERAVRDLLQKRSQLVRQKTANLLSIQNLYSRNTGQSISANRIKQLTSEKLNALFTNSDVALAVKANLTVMRSLETEIAVLERVVKERINLRPAYRYLLTVNGIGQTLALTIMLETGDIRRFAKVGNFASYCRCVGSEKLSNGKRKGSGNTKNGNKYLCWAFVEAANFAIRFEPLIARFYQRKKAKTHRVVAIKAVAHKLARACYYVMRDEVPFRDEVPFRDEVPFNVDRAFA

SEQ ID NO: 208092 - protein, 465 aa, unidentified
MKTKASKFKKEKKKISIDQGWEAIHPHAAGIDIGSKEHWVCVPPDSAQRNVLGFGTFTADLEALADWLEQCGVRSVAMEATGVYWIPVFQILEQRGLEVILVNARQTKNVAGRKTDVQDCQWIQRLHTYGLLQASFRPADAYCTLRSYLRYRDELVSARALQCQHMQKALQQMNLQLTQVLSDVTGVSGLNIIQGILEGERNPAKLAKLVNRRVRASPASIQKALKGDYRKEHLFVLEQAFALYHTYEEKITACDEEILRESSQLPDKVDAALKAMPPRKEGRPASKDKMAGQDMRLSLYQKFGVDLTAIEGVGVLTSLVVLTEVGADLSRFPTEKHFCSWLGLCPDNRISGGKVLSSRTRKVVNRVSDALRIAATSLERSQSALGGFYRRMKAKLGGAEAVTATAHKLARIVYRLIKHGDAYVRQGTEDYERKFRERKLAALRKSAKSMGFELLPQQTVPCPVS

SEQ ID NO: 208093 - protein, 483 aa, unidentified
MHITRVPEWDGPFFETREVKLKGMNKAIGIDPDSKGYICYLVDTGEQRGVRKGFLITVPDLGSLIRWIKTEGEVIVALEGSNGYSRPLEEALREAEVVFYSFRPSDVSKFRKAVLGQNKNNEKDAESVARYALALQAQGKLEQFRRVWFADEPLRLLTRSFERKSKELTMELNRMWKLLRLASPDLYLALGGFNPEVEINENVLKNQGILSLLEQIPNLFEWKSLSTEDFGAAMGGAQYRGREKLIDALQKLSPVFPPVSQAVSLMIRNSAQTIRQIKRQMSEIQKMIAQMTAENPAVKALEEYKGISVITAATMVAEIIDIRRFVNDDRLASYAGLGRREYSTGDRSMMIPSQQFSHRLKDIFMTAARNFVRYNPDSHLAGYFRNLVKKGMKPNEARKRVARALVRMIFRKLRSLVGEGSEQEKRSESDMASGLESRGDLGRMSNISLSAPIEDDTEPVGKIKRRSRGKGAEEKNAVLVDKL

SEQ ID NO: 208094 - protein, 394 aa, unidentified
MILVGIDIGKNKHTFSIIDKNSGEILLSPSDFSNNLKGFLFLIQKLSSYTKSELLIGMEDTGHYHFALLKYLLDRRYTVALINPTTTDLARKLQGGITKNDPLDSLTICDVISSNHRNKPYRVTTLNRFDLYEQKQLTRHHHNLKEELNTYKNRLQKCIDIVFPEFNSLFHSKYGIVYMNILKAFSSAKAIANADIRSIRKCFEFKGQGKRISLSAEQLKLTAKSSIGIPSVAEEIQIRHLVSQIELLEKQLSEIDKRIEEFSLKNNSPILTIPGISHFSGTSIISELGDICNYTKASQIIKFAGVAPYHYESSQFTAQHTAITKKGSKYLRKTLYQIILPVISNNEVFYAYYTKKLNEGKGHRCAQGHCIRKLLRVIYHLLCTRQPFNPKLLL

SEQ ID NO: 208095 - protein, 356 aa, unidentified
MRREYQRGKVLARGKDVYIGIDVHKEKWHVTARIEGEEIFHGSMLSEYQCLSKFLERFKGSKIKIAYEAGPCGFGLYDKLTNDGIETIVVPPSLIPVESGNKVKTDKRDSRKLAKLLESNMLKKVYVLTEEDRANRELVRTRRQLMEHRSDVMRQIKSKLLFHDIKSPFPAKRGWTKQYVKWLRELHFEHEVVKVSFDTLIDLYEYLGSQLTRISKEIIGLSQSDKYSHKVKLLRSVPGIGILIAMELLVELPDIERFKTADEIASYMGLTPSEYSTGQYVRQGRITRCGNTRARTCLVESSWHLIVKDLFWRGKYMKLKYRRGAKRAIIAIARNLIIRIRRILLNNEPYMVAKAA

SEQ ID NO: 208096 - protein, 386 aa, unidentified
MQKLNDLSRSLIAFEPDGTLIAVIEMSLTSWLVAGILPGVERQPLKKLAVDETALLKLLHRWRDESEKAGRRIERIAVAFEAGRDGFWLARWLKARGIEAYVIHASSVAVSREHRRAKTDRLDTELLKRSFLGWLRGERDHCKMVEIPTMKDEDAKRPNREHNSLIGERSRIVNRMKAALVRLGIRGFNPKLKRANTRLDGLRTPEGEPIPPNALAELRRDMERRRLVNNQIRQIEEERLERIEQAPCDGPHVMVRLLARVMGVGIETADMLVHEVLSRNMRDRRAVARYAGLTGSPDESGRKRREKGLARSGNARVRRGMIQLAWRFLLHQKNSALTKWFRSRTENARGTRKPMIVALARKLLIALWRLVREGIVPDGVVLRAAQ

SEQ ID NO: 208097 - protein, 355 aa, unidentified
MSEYAGRQFVGIDLHRRRSVLVRTTESGEVLEAVQILNDVDRLNAVVERAGEDPEVVLEATYGWYWAVDALQAAGARVHLAHPLGVKAFEYRRVKNDLRDATDLADLLRMGRLPEAWIAPPATRELRELVRHRAKLVGLRSHCKVEIHAVLAKAGVQVLMSDLFSPAGEDLLDRCPLSGPYAARVQSLRRLIDDVEVEVDLFTRLTRGRLAADPDYVALQQIPGIGPILAAVFLAEVGDVSRFRTASQLACWAGLTPKHHESDIHVHRGRITKQGSRLVRWAAVESVKRLGPGNVVGAYKKQVADRRGKNIGTVAAARKQTEFVFYALRDHHVRALHPPRPPDCPRAGGQAGEAA

SEQ ID NO: 208098 - protein, 319 aa, unidentified
MAQNDSGVVGIDVAKDKVDACIRAFKLQQTWPSTAQGQRKLVGWLRKHQVNKAVMEASGGYERAWARVLREAGIEVRIVDPKRVRSFALSAGRLAKNDAIDAEMIAWFAETFSEAPSQPHDAAREELQALVKARLDLIDFRMRLVSRSEHVAPGLVQKAHARLLKSLASEIAKLEAAISAKIKSTPDFAERAEIIESVPGFAQTSSANLVAGMLELGQVSDEIAAALIGVAPYDDDSGKRRGGRHIKGGRRWVRNAIYMPCVGAATLNNPVLKAYYQRLLAKGKEPKVAIIACMRKLIVILNTMIARRQKWDPSRYVLS

SEQ ID NO: 208099 - protein, 346 aa, unidentified
MEQYAGLDVSLKEISICVVDDDGRVVVRGTVPTEPQAVASFLAKRQIVPELIVHESGQLSIWLQRGLEKLGLPVTCIDARMAHKALSARLNKSDRNDAEGLANLARTGWFTAIHIRSVTADRLRTLIGARERLIRLRKDLEGHVRGVLKTWGIRMTGIGQGRLRQGFRDQLASAGETDPVLAMIADGFITAHQTLCAAAYALETDVRAIAKESPLARRLMTVPGVGPFVSLSFIALVDDASRFRKSADVGAFLGLTPRRYQSGERDYSGRISKCGDVQMRSLLYEAAGCLIHQVKRFSSLKSWAVRLAGRKGFKKAAVATARKLAVLMLTIWKDGTEFEWRKEANA

SEQ ID NO: 208100 - protein, 350 aa, unidentified
MSNHITIGMDLGDKNHIAVILDAEGNELGVHKVSNTKISVERFFKKYSGSTVAIEAGTHSPWISRLLERLGCRVYVGNPYKLRVIWDSTDKSDERDARMLAMVCRMEPRFLWPIQHRALEAHNDLEVIKARDILVQSRTKLINHVRSVVKGIGERLPACSTESFASRVINLLPESLHPALMPLIDTISDMTCKIKDLDKQIKRLATEKYPETRRLDQVAGVGPVTALTYVLTLEDPTRFTKSRMVGPYLGLTPRRDQSGNTDKQLRITKAGNVYLRKLLVGCAHYIMGPFGSDSDLRRHGMGIAARGGKNARKRAAVAVARKLSVLLHQLWISGEAYEPLYVSMKVKKAA

SEQ ID NO: 208101 - protein, 392 aa, unidentified
MSQQHCHFDASRSLTALEQDSTIIAVIEMSQSNWLVAALVPGVERHPLKKLDAQEEGLLKLLHRWRNEAGQAGREIKRIVVAYEAGRDGFWLARWLRGRDIEAYVIHPTSIAVSREHRRAKTDRLDTELLMRAFLGWLRGEKRHCSMVAIPTIEEEDARRPNRERQNLVTEQTRIVNQTKAIFARFGIRTFRPTLRKAEEKLKGLRTAEGTSLPENTRAELCRHLARLRVVREQIRAVERERLRKLAAAPAAEKGSHAMVFLIARVLGIGIETADMLVSEVLSRRWRDRKAIARYAGLTGSPDESGKRRRERGLARAGSARIRCGMIQFAWRFLRFQKDSALAQWFAARTADRRASTRKTMIVALARKLLIALWHLATRGEVPQGVILRPAS

SEQ ID NO: 208102 - protein, 371 aa, unidentified
MIRSWTDSRRDWKPVAASVVGPRMSLVLRSFLPHPNSCLGTSPYQQGRDTKMAQRSFCGIDVAKDRLDVMVLPEELCWSVANDAAGWAELVAKLRGLRIAASGIEASGGYERGVVRALLAAGMSVRQINPFKLRQFAKACGVLAKNDRLDARMIALFVATLPTRSAQRYAPVERLAELVTARRQLSDDKVAAENASRLFEDAALRRLYGGRIARLAADIALLDKRLAEILAGDAMLARRYALLVSMPGVGPVLAVTLLALLPELGQMNRKQVAALVGVAPYDFDSGRLKGMRCIWGGRAPVRRVLYMAALIGCRCNPQLRAFHDRLAAAGKKVKVVLVAVMRKIITILNAMLRDNVPWVDHSIGRHILPAA

SEQ ID NO: 208103 - protein, 422 aa, unidentified
MLTQSQDNEEIIERVAALDIGKAELVCCARVPDEDHPGRRLQEVATHSTMTRALLGMSDHLACLGVTRVVMEATSDYWKPVFYLLEAAGFETWLVNAKDVKHLPGRPKTDKLDAVWLCKVAERQMLRPSFVPPPLFRRLRDLTRYRADLVATRTAEKQRAEKLLEDAQIKLSVVASDIFGASGRDMMAALVAGERSPKVLAQIARLSMRKKITVLEEAFTGYFTEHHAFLLQKMLDRVDGISADIAALEARIESQMAPFAAAVEKLDEIPGISLATAHVILAEIGLDMTRFPTAGHLASWARLAPGVKEPAGKKKGKSSTGHGNIYLARVLGNAAAAAGKTDTFLGERYRRIARRRGSKRAIVAISRSILVIAWHLLSDPDARYHDPGSDFYATRIDPERRKRSHIHQLEALGYTVTLQPAA

SEQ ID NO: 208104 - protein, 373 aa, unidentified
MDEDRAVCVGLDTHKAKIAVAVAEPGRSGDVRFQGEVANQPEAVRRLIERLADKHGKLRVCYEAGPCGYGLHRQITALGHDCTVVAPSLVPVRAGNRVKTNRRDAVTLARLHRAGELTAVWIPDPTHEAMRDLVRARTAAMEAVRRARQQLQGFLLRHDRVFTGRTTWSPAHRRWLAGLRFEHPAQQVVLQEQLDAVAEAERRRDRLDAQIRELAPTWSLAPVVAALQAMRGIAFLSAVVLAAEVGDFRRFANPRQLMAWLGLVPSEHSSGPRVERGGITKAGNGRARRVLVEGAWSYRFPARVTGPIQARLEGVPDAARTIAWKAQLRLCARYRRLVAAGKNANLVTAAIAREMAAFAWAIARQVQPAEAAA

SEQ ID NO: 208105 - protein, 342 aa, unidentified
MKITIVGIDLAKNVFQVHGVDQRGKAVVRKRLRRKQVLMFFAQLRPCLVGMEACGGAHYWARKLQAQGHTVKLMAPQFVKPYVKANKTDAADAEAICEAVTRPTMRFVPIKNAEQQAILSLHRARQGFVRARTAQANQLRGLLAEYGITLPQGISHVANRLPEIIEDADNELPGLFRGLLQRLVAHLRELNHQVHELEEQIEVWHRANEASQRLAKIPGIGPLTASALSASIGDAKSFKNGRELAAWLGLVPRQHSSGGKPLLLGISKRGDSYLRTLLIHGARSAVRVAKRKSTPTDRWSTGMLDRRHMNVAAVARANKNARIVWALLAHGRDYNADYKLAA

SEQ ID NO: 208106 - protein, 346 aa, unidentified
MLHAGLDLSRRRLDFHLLDQAGVTVEVGTARPDADGLGRLVERVGRHDQPVAAAIESMTGARFVHDLLERGGWRVEIADARKVKGLAPLACKTDRIDAWVLAELSRRELVPAIWLPDPAVRAERERARFRLYLVRRRAALKQRIHQTLVSFGHPCPVSDLFGLAGRKLLARLALPEPWRGTVEASLHLIDELEREIAALEGELRRLGAAHPYVPLLLTCPGIAWVLAYTIAAEIGDIGRFPSPAKLAGYSGLCPRVYQSGDSDRRGPISKQGPKYLRWALIEATMHASRHPAYRDRHQRTKARLGKQRGPRVAQVDTARRLAHAIWHMLTRNQPFAPAGAPSFLAA

SEQ ID NO: 208107 - protein, 466 aa, unidentified
MENNYILYVGMDASKGKEDAAILKVSDRRSVKPKFLRKKLSFKFVKSEVTSFLETVRSYSDDNCTSICFALEVTGIYSTNVYNFIKDNLNDNESIKFLNTDFVNQWRNAHNIAKSDPLDAQTISTIIGTDSDVQYVNDNVFENKNGYQDLKALVHRHYQIKKIYSQEINRLIAQCDCLFPELQYVFEPKSAAFIAVLSSYPTTHDIINASRLEVFNVVYEATKHRCSMDKIDKLFDLCHDTLVPDNISSYGRSIILDLVENIKNIKGQLKMIERYIRDVASLNPAYKLLLTITGCGPLTAATVIAETGDIKRFKNADCFVSYSGTSPRNKRSGTSVETMGKISKKGSRYLRHAIYIIAEFARRHNPVLKHQFERIKNGNKKRHKLANIAIANKIARYIYSIMKNESSFVILHEHIMRLPEETQNTFFNSISLDFPKNTRKQIYQYSDINGEVHKFVYTKLEETMII

SEQ ID NO: 208108 - protein, 410 aa, unidentified
MLDTAFKHKIVPRDYDIFAGLDVDKRSYDVTFVDHEDRLRSMKIPSNANHLLNYVRRHFPGKRIAFAYETGPTGYGLYDKLTAAGHPCLVLASSMIPTARGQRVKTNRLDSRKISVCLRGGELKSIHVPSILYRDLRHLIHVRDTFVRQAVACKLRIKALLLLEEIPFPSAPANSQWSNRVLFELQQRASRPAIRFTLDRLLEALTQAQRQVYTVTKEIRGFCQSDSELSHCTEFLRSIPGIGEIVATHLLARIGDWRLIRNSRQISGLLGVVPSEDSTGDDVNRGSITKIGDERLRNKLNQAAWAAIRKDPQLAQFYSHIYKKHPKTIAARKAITAVVNKLCRRIACVLKEQRPYVVGRKTTSVSSKNEETATLQGTTRRFAETRQPCLGSSFETETPGRPRAPRERRI

SEQ ID NO: 208109 - protein, 489 aa, unidentified
MSTPRKQREEKKGSDAQRSASKRKARDSHCQQGDGNRRRSKLTITNPDAAGIDVGARIHYVAVPEGRAEVSVRSFGAYTAQLDELVQWLKDCRIKTVAMESTGVYWIPLFQKLEEAGFEVLLVDARQAKHVPGRKSDVQDCQWLQQLHSYGLLRAAFRPEDSICRLRTLQRHRKNLVESAAMWIQHMQKALNEMNLHLHHVLSDISGRSGLAILDAILAGERDPKKLASLADRRVEKSQAQIEAALTGDYRPELLFVLSQSLHNYRQMQEQIAQCDLSIEKQLAKMADCPNPNQASEPIQQSQDSAGSKPRKRKPKDALELSLAGHLKRILGVDLTTIPGLNILAVLNLLSEIGTNMAKWRNEKAFVSWLGLSPNNKISGQRVLSSRTRKVVNRAATTLRLAVMILGKTNTPLGSFYRRKRAQLGAPKAITATARKLGCLIYRLIKNGQGYKEPDLHTYELKYKDQILNSLRKRANSFGFDLVQVPKAA

SEQ ID NO: 208110 - protein, 414 aa, unidentified
MSEVINKACGLDIHKIFFIATILSRFNDKQQKRFERSDDGILTFKNWVISEQCDVVACESTSDFWIPIYDALIKHLPVIVGNVRDMKAFTHKKTDKIDSEFIAQLALNNMIRPSRVFSKDHRTFRSNVRLRHSLVQKRTDIKNEAHAILAPEMFNLKSVLTDIFGKSGRAIISGISSGKSVDQIMESLSPNIRKKSAQIREILDKEISQGAAFRLKICLKLIKFLDDEIEALEREIFSYAYKNHKREMEILVSVPGIGELGAATLIAEIDSFKDFSSGNKLASWLGLVPNVYQSADKYHNGRITKRGSKEARWILTQIAQAAARKKNSKLKEFFNRKKKSIGHAKAIIALARKIATIIWHLVTNDEMYEDETGYQKGEIQKRKVVEIETFSIDERIRIISEVLVVMGKEDREST

SEQ ID NO: 208111 - protein, 480 aa, unidentified
MTKHAKQHPDLKAVPMLLNESIYVGIDIGKAKHVAGFLSKTLLARHERFEACPALAFENSREGFRMLIERLRTLAPLEHVFVLMERTGHYHRALEQYLQELDIPVYFMHVQSRPAGMLKTDKRDALTLANQLYSQLELGVQVTNKLQLVRRVVPPTEAAAQLKGLIRHRYELIHESTQRKNKLTAICDEVFPELTQVVKDPNSLFALALRERFSTPAALATASFTTLQDIRGGARCLSDEKLLELQRLAAQSIGVKEITRQRGLVLEQAQLIRELRLLREHVEQLETEIVRIVENAREGQILLSFPGIGPIAAATIIAAIGSILNFPSASALKSYFGWAPVVAQSGSTLDRSRLTSGGTRTMKQILFLVVFQAIRSQENEWGKLYERLVKARCPFNEKTQSYVGKKRVIGRIAGQMTEAIYALLKRDAELLSKVLPDQEPPPPLLYDPEVHRQHREGHYRPLKSTPLTNMITVLHPFPSQ

SEQ ID NO: 208112 - protein, 357 aa, unidentified
MDSLPPHNRIDNKMTHNPLQETSSQSTPRLFAGIDVGSEELVLLVRKNGKPLDPQKYANTRADHARMVKKLGKLPGVIVCMEATGAYHFDLAIALHDAGIKVMVVNPKVSHNFAKVLMKNSKTDAVDADTLAVYAERMDFVAWARPADEKIALRCFSRRIAALTRQKAAAKNQLHALGATAETPEGVMRDVKLAIAQLEKRIDSLTVLALALIGKHPELARVLQLLVGIKGIAEASAIALMGELLLLPPGLSHREWVKFAGLDPKAFESGKSVHKKTRLSKAGNSHVRAALYMPAMSAIQHDRHVKAYFQHLTEMGKLPLQGYCAVMRKLLHAIHGMLKHDKPFDNTRFYAIPISVG

SEQ ID NO: 208113 - protein, 288 aa, unidentified
MERYIGMDVHAASCTLAVISDKGRKLRDFPVETNGQALVEAVRMIPGRKHLVFEEGLQSAWLYETLSPHVDELVVTGITESRGPKSDKRDAYGLAEKLRVGNLDKPVFKAPRQFTRLRELSRSHMTLVGDTVRAQHAIVRILETAPGFGPIRAARLVPIVVTPHRFRTKRQFWSYCGLGIVTRSSSDWIQTSDGGWVKARVPQTRGLSRQHNRFLKDVFKGAATTVISQRNKDPIHARYKRLLDGGTKPTLAKLSLARMIAAMVLRMWKDEEEYDPERADSPTATREG

SEQ ID NO: 208114 - protein, 342 aa, unidentified
MDHFAGLDVSVKETSVCIVDDAGKIIREVKVASEPEAFLAVLKNPAYHFKRIGLEAGPMSQWLFSALAEAGLPVICVETRHMQAVLKAQINKTDRNDARGIAQMMRVGLFRPVHVKTLRSQKLRMLLTHRKLLQSKAIAIENDLRGTLRNFGLKVGIVGKVKFEARIKELVENLPDLAVLVEPLLIVRRVLREQIVVLHRRLLTIVRDDEVCQRLMTTPGVGPVVSLTYRATVDVPDRFRKSKSVGAVFGLTCSKYQSGEVDRSGRISRCGDEMMRVMLYEAAQSMLRSKKWSWLKAWAMQIARRRGMKKAIVALARRLAVIMHRIWVDGTEFRWTREVASA

SEQ ID NO: 208115 - protein, 371 aa, unidentified
MGESSKTLFVGLDVHKDTIAVAYAPNDRGADVVSLGTIGTRQCDIDKLTRRLESKGATLVFGYEARPCGYWLYRYLAQRGFSCSVVAPSLIPRKPGDRVKTDRRDAVTLARLLRSGDLTSIYVPTVADEAIRDLSRGREDAVGDLKRSKVRLKAFLLRQDIRYEGRANWNAAHLRWLARVVCPTPAQQIVFQEYVHTVTEQSERLRRLESELHTAVKTWRLYPVVEAVQALRGLDLTGAGTLIAEVGDLTRFDTPRKLMSYLGLTPSEYSSGAHRRQGGITKAGNGHARRALVEGAWAYRYPAKVSRHLQLRLEHVSPDARAIAWKAQVRLCKRYRLLSARGKHVNQVVVAIAREMAAFAWAIARTVPVAS

SEQ ID NO: 208116 - protein, 394 aa, unidentified
MFLVGIDIGKHKHSFCIINKETGESIVKPKFFNNNKVGFEELLSSFKGLPKKDILIGMEDTGHYHFALLKFLLDKKYQVALINPVTTDLTRKLSGSHTKTDKLDTLTICDVLTSNQRTKPYRISKVDRFDLYEQKQLTREHHNLKEQSNVLKNRLQKSIDIVFPEFNSLFKSMYGVVYMNILKEFGSADALAHSDIRTIRKCFDFKGRGKRIELTAKELKNAAINSIGFPSIAEVVQIKHLVNQIELVEEQIEELDKKIEEFSIANNSPILSIPGISHFSGTSILAELGDIHNYSKPSQIIKFAGVAPLTYESSQFMAKHTAITKKGSTYLRKTLYQIILPVINNNKVFKDYYNLKLSQGKGYRCAQGHCVRKLLRVIFQLLSTNTQFDPTLLV

SEQ ID NO: 208117 - protein, 361 aa, unidentified
MAQAKTWVAFDVHVSGVVAAVLDRDSGELWVRKLPGRSEEVAAFACGLAGPVRATYEAGPTGFVLARRLAAAGVDCLVCAPGLIPRGASDRVKTDRRDAERLVRLLAAGELHRVAVPGVEEEALRDLVRAREDLRGDLMRARHRLAKLLLRHEVRFDGPQANWTRAHLRWLAGVRIEQPGSQRALEDYRGAVAALMIRREQLESEIAQALPESPWAQTARRLMCLRGIDTLTAAGLCAEIGDFTRFDHPAQVMSYLGVVPSEHSTGERRRRGPITKSGSQHARRLLVEAAWQYRRPPRVAGRLARRQTSGEPEILALSWKAQRRLHHVWTRMEQRHKRRTIIAVAAARELAGFCWAVATAD

SEQ ID NO: 208118 - protein, 420 aa, unidentified
MKAYNINDFAALIGIDWADTKHDICEHPSHTEKYHYCIIKNKPEALHDWAMSLKQRYPNQQIAVACELKKGPLIYALAKYSHLTLFTINPSSVANYRKAFTPSNAKDDPSDALIQVEILTLHMDKLTVIEPESASMRSLTQLVEYRRNLVQDSVNLSNKLTATLKNYYPQALEWFKEKDTFIFCDFISKWPSLAHAKRARKQTLLDFFNSHNSHYAHVNDARILSIKHAMPLTEDKGVIEPNELLVGVLIVQFKVLLKGIESLDKVIKQAYKVQQDKPIFDSLPGAGPQLAPRLLVAFGSNRERYNDASDLQKYAGIAPVIERSGKKMWTHWRYSCPTFLRQTFVEWAGFSIRYSFWAKAYYEQQKSKGKPHNSIIRSLAFKWIRIVFRCWKTNTPYDESKYLEALKRRGSPLLKFAVNS

SEQ ID NO: 208119 - protein, 344 aa, unidentified
MQTTTIAVDVAKEVLEVAISNRPGRVSERRRLSRARFLPFLLNRPPATVVFEACGSAHHWGRQVQQLGHHVVLLPPHATRGYAPRNKTDQIDAKGLLEAFRNEDIHPVPVKSIAQQSLTALHRIRSTWIATRTSRINTMRGLLREFGITIPVGAQHVLPQVARLLAEAESAVPDPLRPILALACQEIRDLEQRIDEIESQLAALARQTPTVHRLGTIPGVGLLTATALVGFVGDVQRFPSGRCFASYLGLTPREHSSGRRRRLGSVSKRGNSYLRELLIHGARAVLWAAKRRQRPDRLRVWALNVERLRGHNIATVALANKLARIAWAVWKRDVDYRARQAAVA

SEQ ID NO: 208120 - protein, 388 aa, unidentified
MPKPVDLSKSLAALDQDSTLIVVIEMSQSSWLVAARAPGLARDPLKKLPPEPEQLFKLIDRWREESRRAGRVVRRVCVAFEAGLDGFWLARLLRHHDIEAYVIHPTSIPVKRDHRRAKTDRLDTELLMRAFLGWLRGEADYCSMAAIPMLAEEDAKRPTRERESRVNARSRLVNRLKGALARLGIRGFNPKLRKAAEKLEALRTGAGEPLPPNTLAELRRDMAQLRFVSDQIKQIEKAREARLEKAPREGAHPMVLMLASIKGVGLETAEMLVAEVLSRKLRDRRAVARYGGLTGSPDESGSRSREKGLARSGNARVRRGMIQLAWRFLMFQKESALAKWFEARTANGPSGVRKTMIVALARKLLIDLWRFVEDGTVLVGVELFDSRA

SEQ ID NO: 208121 - protein, 458 aa, unidentified
MWCCEPVQQCDDGGVGYQQLRREHVYENLWSAPPPRPWAARAKGGRDGAGVYVLLRPRPATKGTVVACLLRLDGTKEVRTVETTTAAWQGLADWLRAAGCTHAAMESTGVYWKPVYNVLDGACALLVVNAAHMKAVPGRKTDVRDAEWIADLLQYGLLRPSFIPDRAQRELRDLTRARANLIDERAAAVNRVQGVLEDANITLAGVAKDIMGVSGRAMLAALLEGVSDPVALAELAKGRPRRERAALGQALSGRPREHQRRLLALHLGHIDVLSEAIADLSAQIAERLRPFEGVLLLLETIPGVGRAVAEALATEVGLDRGRFPSAAHLASWAGMCPGNHESAGKQKRGTTRRGNRTVRRALTEAAHAAARTKKLGRTALATRYRHLAIRCGKKKAAVAVGHTILRLVHLLLSRHEPYQEFAPAHLDERRRARAQRRALDQLNALGFDVTITPKEPAA

SEQ ID NO: 208122 - protein, 343 aa, unidentified
MQGITAIGLDIAKSVFQVHGVDAEGNIVIRRQLKRRYLLAFFEKLPPCLVGIEACASSHHWSRELQALGHNVRLMPPAYVKPYVKRQKNDMADAEAICEAVTRTNMRFVPTKTTEQQSGLVLHRTRHLLIRQQTSVINAIRAHLAEFGVIAPVGRKGIEELLHVIADPSDKRVPDVVRACLAALGSQLLNLKKQILDFDRMILAWHRSNPTSKRLNCIPGVGPLLATALVANVADPKVFRSGRNFSAWIGLVPKQHSSGGRAKLGSISKQGDRYLRSLFVAGALAVIRYAKLHGTKYRPWVAALLARRPTKVAAIALANKLARMAWAMMARGERYNYPAGLRV

SEQ ID NO: 208123 - protein, 425 aa, unidentified
MNYKQNEKINQVKESTLVVGIDIGSTTQYARAFDWRGIELGKVFPFSNSREGFESFKAWMQHLQDKYKKLDAIVGIEPTGHYWFDLGAYLEDEGILLVMVNPYAVKQTKELDDNSQSKNDRKDPKVIAKLVTEGRYSAPYTPDGVYADLRIMVANRKRLIREMTQIKNRFARWFAIYFPEYTDVFGDYEAQSSMLLLKKVCTPEAIVELGAEKINQIWRDAKLRTVGMKRATTLCETAKRSIGLKKGSSAAQYEMKLLLEDYEYKKAQLDAVMEEIEKLCRKIPESEQMLAIKGIGVITVAGFLAEVGDVRRFESPRQIQKLAGLSLRENSSGKHKGQTTISKRGRSKLRAVLFNAAIPLIAKNPEFKSLHEYYTTRANNPLKKKQSVIAISCKLIRVFYAILAKGVTYDAQKLISDIHRQPQVA

SEQ ID NO: 208124 - protein, 318 aa, unidentified
MNNPTFQSINVGVDTGKAQLDIFIRPIGLFFSVSNDAKGIKEAIATIKKHQPERIVIEATGRLEVPFVLACSKAKLPYVVANPIHVRRFAGAIGQIAKTDKLDAQLIALYAERIEPPLSTLKPENIRLMSDLVIRRNQLLSMQTMEKNRLQILPKELAMTIKPILTTFKNQIQKIEEKIIKLIESCDEYKHKNEILQSVPGIGKVAAASLISNLPELGSIGNRKASALVGVAPMNRDSGRYKGHRKIKGGRKQVRTVLYMAMMSAMQCNPVFKSTYSRLVAEGKPKKLAIIACVRKMVVILNSMIRDGVMWNENHANN

SEQ ID NO: 208125 - protein, 392 aa, unidentified
MKSVYASVTGGGMDVHSKFTTVTMRDEKAKVVRRERLDHRDRRKLREVLSQWPPSASMVMEASFGWGWLAELMKELGLRPELSNCYKLQQMRKARGWVKTNKKDADLLSLLPYEKDGWWKVWMAPPEVRDRREWMRHRSSLVRVQTETKNRIWGLFHRHGILVELSDLFGVAGRKFQADICLSGRAGEVVLRPGALGALKGLVELLGHVRCQLARIARDLRAQLERSGTARRLDGIPGIGLILSHTLMAEIGLIERFESHRRLASYALLAPRSDDTGEDDGSKPIGRHLGHRGNRTLKWAFLEAAHGAVKSGGKWRVIFDRATGDGQSNRNRGYIKVARELVKVVYVVMKKNVEYCDNPPARPGSARRRMEQFFGSTRSGTGQPSRPMAAVH

SEQ ID NO: 208126 - protein, 422 aa, unidentified
METVAQLEPAAFVGVDWASEEHAVCVLGTDGRPKTAFSIEHSKEGLAKLIHRLAGVGSAGRLPVAIERPDGRLVDALLEAGHPVVAVSPNAIKAWRESEVVSGAKDDPGDAEVIAEYLRLRSHKLTVAAPFSDETRALRAVVRARDDLVAQRVAAHNQLEACLDAFWPGAKAVFADVTSEIALEFLARYPTPGSARGLGEKRMAAFLTKHGYSGRRSADELLVRLRAAPEGVADGPEAEARRDAVLGYIRVIRALNTSIKSLDRSVAAHLGEHPDGEIFTSLPRSGNINAAQMLAEWGDCRQAYDGPDAVAALAGQTPVTKKSGKHHAVGFRWACNKRFRAAMVTFADNSRHQSPWAADIYQRARARGCDHPHAIRILARAWIRVIWRCWQDRTTYDESRHTGAVRLTAATNPTTTINKEAA

SEQ ID NO: 208127 - protein, 435 aa, unidentified
MRLTEYGRNPHTRKAYVQQPDLLMVGVDVSKAKHNACLGTQRGVSRRKLEFTHTREGIERFEQTLKQQLVKNACRHVLIAMEPSGIYWQALYDRLQECGYGVCLVHCQAVRNNRKTMQEGTSKTDETDAYSVFDLLRQGKFFLPVERDPELKAAYRLMQRSMALKKRISQLRNQLRGAIHLAFPELNPLVQDLTQPTALRFLQTNPTPESILRHGRTSFLEQWQPRHRCGQWRPETFHRIYDLATTSIGLHDPYRIDEFEITTLAHDLIDALTKQQLWLAKAIELLAHRADYQLLVQLPRIGKPTAAAILTAIGNIHAYQNGKQLVKLAGLDIRLFESGSSIRKLPKISHIGSAYLRYWLYHYALRLIAHEPHFQAYYQRRKHQSPGKGAGQRALIAVCDKTIRMIYRILTDHVPYNPQKDQSIAAYYAAQQHAA

SEQ ID NO: 208128 - protein, 377 aa, unidentified
MNATSVCPSVQSTTGVIVGVDLAKNVFQLCVADAAWRPRESQRLSRTQFERWFANRAVSRVVMEACGSAHHWARWLTGLGIEVTLLPARYVRAYVKRNKTDAADAAALLEAARCADLHPVRIKSVEQQALQALHRTRSLWQADRTRRINTLRGYCREFGIAIAMGSRLGLEQIARVLAEPRSGIPELLRPTMVLLIEEVRLLEARIGALERELAALVRHSPACTTLLSVQGIGLLTSTAMVAAISGDVTHFQDARHFASWFGLTPKESSSGQHRKLGRISKQGDRYLRMLLTHGARSVLRAASAARNAGKPVSGLRAWALAVQDRSNHNKACCALANKLARIAYACLRDHTAFDEKTKLDKKLERQSFEMPSGALPA

SEQ ID NO: 208129 - protein, 401 aa, unidentified
MTVHSEDPAVVGGADTHADTIHLAVVSVHGRDLADREFPTTTAGYRGAISFLTSHGSIEAVGIEGTSSYGAGFARAAKAAGLKVVEVNRPDRAERRRRGKSDPIDAYQAAHAVRSGRATTPSKDEAIEGIRALHNARHSAVKARTAAINQIHQMLITSPENIRTKYAALQGNSLIKTLAGIRTVHSDPVVTAVLASLKALAKRCQFLTAQHTDLGAVLDAMVTAANPGLRAAYGLGPDTTTQLLITAGGNSDRLRSEASFAALCGVAPVPASSGKITRHRLSRGGDRAANNALYRIALVRMSSHAPTQAYVARQIAAHKTKAEIIRMLKRAIAREIYRYLSQHILVPEIADLRPARQAKNITLTHVANHFGVWPTVISRIERGTRRDDDFANAYRTWLTAA

SEQ ID NO: 208130 - protein, 493 aa, unidentified
MAARRKRKQKPAAGVAGPVEIPDAEHELVIERVAAIDVAKATGKVCVRLPGKTGRRFSRVWDLPARTGAITELGDQLTDLGIEKVTVESTSDYWRIWYYLLEAAGLSVQLVNARDVKNVPGRPKTDKLDAVWLAKLTEKGLLRPSFVPPPEIRRLRDYTRMREDLTRDRTRYWQRLEKLLEDALIKISSVASTMITLSTRDMVEALIAGEHDPYRLAELARGKMRSKRSELITALDGRFDEHHAELARMLLSQIDALDTQIHTLTMRIEELINELPEGTHAIEHTGSDEGPGARAGADSDADPGSASGGGTNPIRVDPTIEADSAIQAERALRTVDRLDEIPGISVANAQDILAEIGTDMSRFPTPEHLVSWAKLCPRTIQSGPVTRASKTGKGNPYLKGALGEAAAAAAKTDTFLGERYRRLAKRRGKLKALVAVARSILVVIWHLLANPLARFRDLGPDYHTNRIAIERKLRNHIAQLTAMGYQVTLEPAA

SEQ ID NO: 208131 - protein, 343 aa, unidentified
MSIVGGLDIHRKQITFDYVDTETGEVRRGQICPADRAHLAKWLARFAGQDAHFALEGCTGWRYVAEEIIAAGLTPHLADPAEAAHLRGPKRRAKTDRADARHQRVLLEQGRLPECWVPPSHVLECRALLETYLDLREQRTGWVQRIHAVLFCHGAPNIAGQQLGTAEGAAALRAAAAHCSPAGQLQLAIAAQMLLVYDERLHQVRRQLLDRARHTRGAAELTARLYGVGPVTGLALTCWLGGAGRFSSSRKAVRFAGLDITVYSSDGKRSPGHLSRQGPEVLRWCLYEAGKAHARASAPDHAYYAQVKERIDGKRAALSEARKIIRQAAHILAALGDDALTAC

SEQ ID NO: 208132 - protein, 356 aa, unidentified
MQKDITKEKGMTIGMDLGDRTNRICVIDAEGEELEKLEITNTARAIDNYFSRYTGVLVALEAGTHSPWISRKLEKMGHRVLVGNPRKLRAIWSSPNKSDMRDAEMLARIGRFDSKLMYPIHHRSEQAHSDLELIKSRDILVRVRSQLVNHVRGAVKATGMRIPKCTPECFHKKAPESIPQILKSATEPLLETIEKLSGKIKAYDKRIARLSKERYPETARLQQIKGVGPVTSLAFVLTLEEPERFQKSRSVGAYLGLTPKRDQSGETDKQLRITKAGNTYLRQLLVNCVQYIMGSFGEECDLREYGMRIAARGGKNAKRRAVVAVSRKLAVLLHHLWVSDEEYIPLHKTAIKKMAA

SEQ ID NO: 208133 - protein, 442 aa, unidentified
MEAVYRRCAGLDVHKDVIEVCVLPPAGQSGSPQRRRFATFTSDLIRLRMWLVSLKATEVAMESTGLYWVPVWRQLEGHIGKRLLCNPQQVKALAGRKSDRRDGQRIAEFLQDGRLDPSFVPPKEIQQLRELLRMRVSLVQEHNRLSNRVEKLLQSYGVKLSSVASDILGKTGQRILTALAAGQTDPDQLSWKAVGSLREKEAQLRRALRADFDEHSCWMLGVLLGQLKENEQWREQLEQRITEGMKPYEPIVIRLMTIPGVDRLTAWSMVAELGTDMSVFPDQRHCASWAGVCPGTNESAGKQHSTRTRRGNRYLRRILTQSAWATSRCKRGYLRAAFHRIAQRRGHKKAVVAIAHKILVAAYFIIRDQTTYLELGEDYFDLLHPERTARRLARRLERIGYQVTLTKAAATAPRSSEGQQPKKRARQKNSWVSSGSGNLPSE

SEQ ID NO: 208134 - protein, 386 aa, unidentified
MQKLNDLNRSLAALEPDGTLIAVIEMSLSSWLVAGIVPGVERQPLKKLVVDESALLKLLHRWREEAEKAGRRIERIAVAFEAGRDGFWLARWLKARGIEAYVIHASSVAVSREHRRAKTDRLDTELLKRSFLGWLRGERDHCKMVEIPTMKDEDAKRPNREHDSLIGERSRIVNRMKAALVRLGIRGFNPKLKRATTRLDNLRTPEGEPIPPNALAELRRDMERRRLVNNQIRQIEEERLERIEKTPCDGPHVMVRLLARVMGVGIETADMLVHEVLSRNLRDRRAIARYAGLTGSPDESGRKRREKGLARSGNVRVRRGMIQLAWRFLLHQKNSALTKWFRSRTENARGTRKPMIVALARKLLIALWRLVREGIVPDGVVLRAAQ

SEQ ID NO: 208135 - protein, 401 aa, unidentified
MAVLFVGVDWGERHHDLCLVDQDGGVLATRRITDGLAGVGALHAAVAAHAQDPAQVVVGIETDRGLLVGVLLAAGYQVYAVNPQVVSRYRGRHGSSRAKSDRGDAKVLADLVRTDRHNHRQVAGDSSLVEAVKVLARAHQSLIWARQRHVNALRSALRDFYPGALAALGTHLAEPEALAVLELAPTPEQGRRLTRAAVRRALVQAGRRRNLQGRVVAVHDALAAPQLAAPEQLEAAYREVVGALVTVLGCLNVQVAALEEQLTLRFAVHRDAGIVQSLPGLGVVLGARVLAEFGDDPHRYATAKGRKAFAGTAPVTRASGLRTTVVARAACNQRLVDACYLWAFAALTASPGARRCYDAHRARGASHHQALRALGNRLVGILHGCLARRVTYQEQVAWPAA

SEQ ID NO: 208136 - protein, 359 aa, unidentified
MATMTWVGLDVHARSIEAAAVDVRSGELAHRRFGGESGPVVAWLSGLAAPVSACYEAGPTGYGLYRAAREAGIAVEVVAPSKTPRGPGDRVKTDRKDAELLVRLLAAGALTPISVPAPAFEAARDLSRAREQVRSDLLRARHRLSKLLLRYGRLWDDGRSTWTVAHRRWLDGQRFAAEPTALAYHEGLAAIDELAARKAALDEQLSRLAEDPCFWPVVARLRCFRGLDTLSAFVLHLEVHDWSRFRRPAQLGAWLGLVPSLEQSGQSAQSGSITKTGSVYGRRILVEAAKHAGKPARISTELARRQEGQPAAVKAIAWKAQRRLYRLASRLRARGKPANVIAVAVARELSGFLWAAATE

SEQ ID NO: 208137 - protein, 371 aa, unidentified
MADYREAFVGIDVAKLKNAIAVAESGRDGEVRYFGEVDASDGSMRRIIRRIAAKFDHVHFCYEAGPTGYGLYRLIQSLGHKCMVVAPSLIPRKPGDRVKTNRRDALALARLLRAGELTAVWVPDEGHEAMRDLVRARAAAVETLRVHRQQVSAFMLKHSRIYPRKKGWTMRYLRWLQEQQFDHPAHQIALQEMVEAVRLSKERVERLEKVIEEFIPTWSLAPVIRALQTLRGVDLIVAVTFATEVGDVTRFESPRQLMGYLGLVPGERSTGETVRRGSITKAGNGRVRHMLVESAWTYRHPPKVGARKLYRMEQAPPKVREIAWKAQSRLTARYRTLTGRGKRTTVVCTAIARELSGFMWAVAREAQSIRS

SEQ ID NO: 208138 - protein, 309 aa, unidentified
MKEQLVYLGVDIAKSYLDAAVGNEKRRFSNDAIGHRELIKWVKQLKAPVQVICEPSGGYERALVQGLARARVKISLVQANRVRQFARAAGILAKTDRIDAELLCEFGKVMRPQIVTAAKLEQEHLRELESQRRHLTHLLVMELNRGARLSDASVQRLNRNLINQIKKQIEQLDLLIKGHIDQSPELSAKAAKLTSISGVGARTAALLLAQLPELGELNRREIAALVGVAPFNRDSGRMRGKRAIYGGRKPVRHGLYMAALVAAHHNPILRNFYLRLRAAGKPAKLALTATMRKLLIVLNSALKTDLSYA

SEQ ID NO: 208139 - protein, 439 aa, unidentified
MRKYQILQQKQEIVTGKLVIGIDPSKRKHQAIIVDNFGIPIGNSFIFPVSYEGYHTILWEKIKKQIPQDNQKNIVFAIETSCNLWQTLAHYLHSLGYTVLLVNPFDTYRSRSMLNHDSSKTDPKDALVVALNSIRGHFDMYKELSNQANSMHILSIAYDKLRKSLVQQKNRLRAVIERVFPEFMNVIAYDTKSALYLLKSYLAPQDFLTMDIQKEAKALYKISSKLNSVNILQQLKCNAKSSIGIIKPGEDFSSIKLAVHSWIILIETIIPQMDEIMNKLIYIAKQTPYFDILTSLKGISDKSAALLIAEIQDFSLFSHYKQIEKLSGYNLKLSESGEYQGTRHISHIGNKRLSWILYRMTEEAVKYIPETRIKYLKRQILKKSHRKNVVACITILLKLITTIVKENRPYEYREETINIMKKLEEEYTAIKDKKRKTFS

SEQ ID NO: 208140 - protein, 420 aa, unidentified
MKIFVPVAGVDVSKRFSDLCVLSPDNNVLLRQKIYHDMVSMKLAEKKLHEIELECGARPVVVMESTSHYHLILFQFFTDAGFEVVVVNPIQSGALKNISVRKVKNDRVDAYRIAMLYRLKVLRPSQIPTSSLRGLRLLTRQRSELKGDVARFKNRLTAYLDQIFPGYGEVFSDVGGSASRAVLHMCPTPEELLNADGSLLAKVICEAGNKGPKFGAEKAAKLREAAGSAQVIGVRSASNASLIKNVLDIIEGLLAAIQRIEGEIKELVTQDTRLDEDVKLLCSIPGIGFSSAVVIVAEMGNISLFGKPKQLAAYFGLDPGERQSGTFKGRKNKLSKRGSPQVRAVLHMAAVSSVSQNRDGTYRNPVLAEYYERKCAEKPCKVARVAVMRKLSNIIYAVLRDRRPFELRTPQEHMALLAAA

SEQ ID NO: 208141 - protein, 355 aa, unidentified
MERYIGMDVHAASCTLAVISEKGRKLKDFPVETNGQALVEAVRMIPGHKHLVIEEGLQSAWLYETLSPHVDELVVAGITRSRGPKSDKRDAYALAEKLRVGNLEKHVFKAPRQFSRLREFSRAHMTLVSDVVRTQARIKSVYRSRGVLVSGIDVYGARRREEWLDQMPSHSRSRATRLYDHLDFLLDQKKQAESDLLREAKKYSIVKILETAPGFGPIRAARIVPIVITPHRFRTKRQFWSYCGLGVVTRSSSDWVQTADGAWIKARRPQTRGLSRHHNHFLKDIFKGAATTVVTQRNKDPIHARYKRLLDGGTKPTLAKLSLARMIAATVLRMWKDEEAYDPERAGLPAKTREG

SEQ ID NO: 208142 - protein, 305 aa, unidentified
MNTTLCGIDISKDWLDAHIEPMGAANRFANDAAGIADLAAWCQNHDVELVIMEASGGYERLAFLLLWEMGQPCGMANARSVRYFAEAMGFLEKTDRIDAAVIARYGAVKRLKPTPPPSAAQQRLKALVARLSQVGGDLTIQKQRKSTADAETIASLDEVIALLARQSRRLEGEIATLIDDDPLWACLDRAFRSLKGVASRTVARLMAQLPEIGILSNKAIAKLAGLAPIANDSGKRSGRRPVRGGRAGPRGVLFLVASIVAKAFKQRLQTAGKEKMVIRIALARKPLVILNAKARDARNEFANAT

SEQ ID NO: 208143 - protein, 340 aa, unidentified
MRQLYAGCDLHGNSNLIGIIDGEGKRVFKKKLPNDLSLVLDTLGPFQEELVGIVVESTYNWYWLVDGLMGEGYKVHLANPSAIQQYSGLKHADDKHDAFWLAEMFRLGILPEGYIYPKQERPVRDLLRKRGHLVRLRTSLIISLQNILSRNLGRKVNVNDVKVLKEDRVSPLLESSEDLMLAGRVSKEAIDFLTYQIRKIEGVVEKRIELKEEYRYLLTLPGVGKILALTMMLETGPIGRFATVGEYVSYCRKVPSQWTSNGKWKGSGNKKNGNKYLAWAYSEASELARRFYPEPRAYYHRKMQKTNAPVAHSALAHKLARAAYYIMRDQVPFRPEKLFG

SEQ ID NO: 208144 - protein, 341 aa, unidentified
MQIHSIGIDLGKTTFHLVALGEAGKVLVKKKFTQKQLLAYTANVQTSLIGLEACSGAHFLGRALRKQGHDVRLIAAQFVKPFVKSNKNDFVDAEAIAEAVERKNMRFVPIKTDDQLDLQAIHRIRDRLVSRRTAVINQIRAFLLERGLVFAQKPAKLKAAMADILENAEADLTPLMRNLIDTLWGEWKTVEQQIEELNDELERISAADAGCTRLRQIPGIGPVVATAIVAAIGNGAAFRKGREFSAWLGIVPRQYSTGGKAKLLNISKRGNVYLRKILIHGARAAVLRIKRDRVPIGAWLDRLDARAHKNVVVVAMANKLARIAWAVLSSGNEYRPIAVPA

SEQ ID NO: 208145 - protein, 401 aa, unidentified
MKRACGLDVHKDTIFCATYNGTKHGPVKEYTTLTTSIRTMGEDLRNEDVDSIAMESTGMYWVPVWNILEEMGFHLILVNPYLIKQMPGRKSDVKDAQWIATLLQKGMLRSSLVPGKEIRELRTYSRRYVKLQQRQTSVLQDMERTMEMCSIRITSFVSNISGKSVLRVIEQIVHGETSADVLVKSIHGRIVNAHSKKDIKESLTGFITEHHRFMLELSLQEYEMLVGQGNQCLSKMEALCNEHYKQEMKLLVTIPGISQISAMIVLAETGADMKAFENSGKFSGWTGLRPRNDESAGKYKSTATTKGNRFFRAILVQSAWAAVRTKGSYFKEKFNRLAMRKSKKKALIAIARKIGVLIWNVLYFEEPYNPQRLIIYDPGKLQAKISYHQKEWDRLHDLLKK

SEQ ID NO: 208146 - protein, 416 aa, unidentified
MNDRKSWYAGIDWASKTHHVRLIDGDGRSLGERIFKHDGEGLAAMADWLMATSGAERPEDIAVAIEVPHGPVVETLLERGFAVHALNPKQMDRFRDRYSPAGAKDDSRDALVMASALRTDPHCFRRLAATDPLVVELREWSRIAEQLGEQRTQQANRLRGQLWRYFPAFLDLDADLAAPWMLELWNAVPTPDKARRVSNTTIANILKRNRIRRFDAEKLLAILRQPHIPVAPGTAEAAQAHIALLVENLRLINRQITQAHHRLDELPKRLATDQPADGETAPGQIEQRDVVILTSLPGLGRINRATLLAEATDALQRRDYPVLRALTGVAPVTRRSGKACSVSRRFACNRRLANAVYHWARTATQHDPISKAKYAALRARGKSHGHALRVVADRLLNVACAMLRDGTTFKKAAHTI

SEQ ID NO: 208147 - protein, 339 aa, unidentified
MEQIKFFVGSDVSKEWLDMSIVSAGKVLCHARIDNKAVAINRWLRQTQKEFSYQYADTLFSMEFTGLYNHHLLEVLHDKKAKVWLIPGLQISEGSTNGLKRGKSDKQDAGRIAVYASKNLEQVRLWRKPRKVIQELQTLLMLREKLQKTKHQYETTLKEYKSFSEASLCRLVKETTAAMLKTTKQQLLNVEKEMSSLIKGDEKLQELNEYISSVDGVGLITSVNVLVTTNEFLNIREAKQYACYAGVAPFKDESGKVKKKQKISHKANKKMKKLFHLLAMSAIRIKGEMKTYYERKLAEGKNKMSVLNAIRNKIILRIFSCVKNKKRYEKNYVYSLAKP

SEQ ID NO: 208148 - protein, 345 aa, unidentified
MKITTVGIDLAKHVFQIHAVDERGQLVLRKQLRRAQVAVFFANVPPCVIGMEACASAHHWGRTLQRFGHTVRLMAPQFVKPYVKTNKNDVADAEAICEAVSRPNMRFVPIKSIEQQAILSVHRVRQGFVKARTAQANQIRGLLGEFGLIIPQGIINVTKRVPELLEDASNELPVALRQLIERLSEHLKELDRQVKEFEKEIIAWHRSSDLSRKLEEIPGIGPLAASALVASIADANSFDNGRQVSAWLGLVPRQSSSGGKSTLLGMSKRGDAYLRTLLIHGARSAILAAQRKSENTNIWLAKLLTRRHPNIAAVALANKNVRTVWALLAHGRDFKADYVPSRMAA

SEQ ID NO: 208149 - protein, 407 aa, unidentified
MRLFVGDDWAEDHHDIEVMDQAGKVLAKRRLPEGVAGMTQLHELAGRYLPEDAADAEVVIGIETDRGPWVAALVAAGYLVFPVNPLQASRYRERHAVSGAKSDGGDAHVLADMVRTDWHQLRPAAGDSPQAGAVKVVARTHKTLIWDRTRAVQRLRHQLREYFPAALEAFEDLDAPGTLELLGKAPDPARAARLTRAQVAAALKRARRRNIKDKTDAILAALHGEHLGLPSELTAAYAATARSLIAVITALNEQVRILEEQVREHFGRHPDAEIYRSQPGLGAVLGARVLGEFGDDPHRYAGAKSRKNYGGTSPITRASGKKKIVAARFIHNDRLLDALMAWAFAPLNASPGARAFYDHQRAKGLDHRDALRRLASRLVGILHGCLKTRTLYHEATAWSHRFSDLAA

SEQ ID NO: 208150 - protein, 408 aa, unidentified
MDVIYPRCAGLDVHKQTVVACARIAGNGAPLQEVRTFDTTTSGLLALCDWLDSFGVEQVAMEATGVYWKPVWHVLEGHFELVLANAAHVKNVPGRKTDVNDATWLADLLAHGLIRASFVPPVAVQELRTLTRTRKQFVRERSAHVQRIEKVLEDANLKLSVVLSDILGKSGRAVLQAIIDGQDDPQRLAACIGTRVKASRSELLEALRGHISPHHRFMLGLHLSHIDALDKAVAAIETEVGLGLEPFRQAAQLLSTMPGLRDVSAHVIVAEIGIDMSRFATAGHLLSWACLCPRNDESAGKRRSTRLRRGGKWLKTTLVQAAWAAVKVKGSYLQAQFHRLRARRGAKKAIIAVAASMLTAAWHMLRDGTPWHDLGAAHFDRADAHKTANRLIRRLQQIGYLVQVSPAE

SEQ ID NO: 208151 - protein, 316 aa, unidentified
MNDINTNEINIGIDTSTTQLDIFIRPHGHFESFENNTQGIKKAINYIKPFKLTRVLIEATGRLEIDFVCAAAKAKLPVVVCKAINVRQFARASGRAAKTDKLDAQDIAHFGEALKPVLTQLKPEKMRLVSDLLTVRSQLLTMSTMQKNRLQRMPKTVHTPIKNILKSLQKEIATIEKKLDQEIAKIPEWQDKIDQLTSVKGVGKVVAYTLISELPELGQLNRKQIAALVGIAPMNRDSGSFEGKRYIRGGRHKVRTVLFMSMMTAIQHHPKMKAMYKRIVDTGKPKKVAIIACMRKQLIILNTMVKNGTHWDENMA

SEQ ID NO: 208152 - protein, 422 aa, unidentified
MKTTDYAVCVALDWSDQQHAFALQFAAANSKETGMITGSPEEFHRWLEEIHARCPNQRGAVILEAGRNSVVHVLVEHGWLDIFPIHPATCARFRTAFTPSGAKDDVPDAEVLLTLLLRHRDQLHQLHRDTAQTRELAALVVARRHAVDRRTQLGHQLRTTLKSYFPQALQLIGEAFEHPMALDFLSRWPDLVCLKKARAATLRAFYYLHRARRPELIEQRIKLIAEARALTPDPAVVGPAVMQVQMFVELLRVQEKHIARFDDQITELFAAHPAAAFFRQLPGAGANLAPRLLVAFGDDLSRYPTPSSLQKYAGVAPVRECSGKKSWTHWRWHAPIFLRQSLVEWAGQTVVFCPWAKAYYWQHRRAGQAHQSILRALAFKWIRILWRCWQAHEPYDDARYVAALRRRNSPLIALIESQDAAA

SEQ ID NO: 208153 - protein, 380 aa, unidentified
MSRSLATFDHDRTLIAVIEMSQSSWLVAGIVPGIERHPLKKLAVDEEALLRLVQRWQDEAAQAGRKIERIAVAFEAGRDGFWLARWLRARNIEAYVIHPTSVAVSREHRRAKTDRLDTELLKRAFLGWLRGEPDHCSMAAIPSMEEEDAKRPHRERESLVAERTRIVNRMKGCLARLGIRTFKPTLQRATDLLPTLRTPEGTPLPANALAEMSRDLARLHFVEDQIREIEAARLERLNQAPDERSHAMVRLLARIIGVGIETADMLVREVLSRNLRDRRAVARYAGLTGAPDESGSKRREKGLARAGNARVRRAMIQLAWRFLMFQKESALAQWYRGRTADGRQGTRKSLIVAMARKLLIQLWHFVTTGQAPVGVEMRPA

SEQ ID NO: 208154 - protein, 370 aa, unidentified
MRIIGCDLHARQQTMAMLDTTTGEVVKLTLMHEGNNVWEFYSKLPRPVLVGIEATGSMPWFLNLMEELGIECRVGHPAQIRAAEPRKQKHDRRDADLILKLLAENRFPAIWLPTKELLDLRALLLHRHQWVRMRVRMQNALQAIALANGLRRGPSLWSCDGQAKIAFLPLMPHAGYRRSALQAMYQTLESEIESLTQQVAEQAGNRSGARRLMTHPGVGPVTALATEVFLGDPQRFADSKALASYVGIIPQEYSSGGHQRLGGVTKQGSPLLRFLWGEAGAHAARRDPELKRFYRRKLVQKGLGKARMAVARKLGIRLWIMLRDEIDYQEFCRRGQMQQKTVRPVAGMPETGNGAKSHRPVDEATRFPES

SEQ ID NO: 208155 - protein, 355 aa, unidentified
MGHDVFAKTHQKENGSTMKITTIGLDIAKSVFHFVAVNQAGKLVKKKMLKRKDVMRFVAKIEPCLIVMEACGSANYWAREFQKIGHQVKLIAPQFVIPYRQGNKNDYNDALAIAEAAQRPNMRFVQPKPVEQQDIQMLHRMRERLNKQSTALVNQVRGMLAEYGIVIAKSKAAFRAAFPDILSNESSELTVKGRFIFTQLHEEFTDIEKRLKSCDTQILEERNTNQVCQRLETAPGIGPVTSTAFYAAAGEGKDFSNGRHFSAWCGLVPKQHSSGGKDNLLGISKRGNAYLRTLFIHGARAVLQHCGGKQDRLSRWAYALAERKGFNKACVAVANKLARMAWAIAAREDEYKAFA

SEQ ID NO: 208156 - protein, 346 aa, unidentified
MLYAGLDLARKRICFDARRPDGEIVDRGASPTDSEGLDRLAQRLLAHDPQVLAVVESMNGARFVHDQLELHDIDVQICDAERAKGLAPLACKTDKIDAGVLAELARRDLVPEIWLPDPGTRADRERARFRLHLVRKRTALKNRVHSTLIAWGKPCPVSDLFGRRGRGLLGRLSIPEPWRSTLQASLQLIDSIDGEITAQERELRLIGAAHPYVPQLTTVPGIAWVLGFTIACEIGDITRFPSPKKLTGYTGLCPKVNQSGEHDWRGPMKKNGPRYLRWALIEAAQHAGRSPHYRELYERTRKRHGPQRGAKVAAIVVARKLSGAIWHMLTNDEPFAPGSAAGTLAA

SEQ ID NO: 208157 - protein, 501 aa, unidentified
MRRIGLDLAFRAPHQAAVFDDAVPVGRPFEVDRTKAGMDELERRATAGAEGPCEVIMEPTGLAWIPMAAEMNRRGHRIYVPKPQKTYDLRRVYYSAHAKSDGIDATVEALVRHVDPLGVHELCVPTATETALRLSVKHRARRREEAAGSKNRIHGWLVLANPHLSEAFGESMFTKIGIAFLRRFVDPFEVRKLGKKRLRRFWDRHAHGAVRPQLFEAVWRACVTSWELYNELHKAGKLPIDYPRLQQLVSQELDLIVFLDTQVVNLETTNDELYQQLDPDRVLERQVPGLGKVIAPAVEALVGDVERFDNIKCFASYFGVVPCSSRTGGKDKPRRHMTKAGPNLLKQYIFLAADVARRCDPELAVTYARAIEKGKHHNAAVAIVAHKLVRKIYALLKLRAERRRALAEAQPDQPPPAVAYLLVDPDSGKPLSRPQARAYINTHFPSKAKRKATAAAAATSQKPGSPKQARASINTSVPSKAEKRAAAATSQKPGSPKAPPQ

SEQ ID NO: 208158 - protein, 337 aa, unidentified
MEYFAGLDVSMEETHVCVVTRNGTVIHEAKVPSMPASIAAALARVPSCQWVLFETGRMAPMLYHGLSQLGLPVVCVESRQAYQALKSLATHKTDRNDARGLAHLARTGFFKPVHVKSLPAHAVRSLIIARKKLVGQRVTLENQIRGLAVVFGVRLPRALSPAFIRQALQASEGIPGLSAAMRGLVAARAAVLAAVVAIDGDIRKMARASAACRRLMSIPGVGQLTALAFTAAVDDPGRFQRSRDIGAYLGLVPRRYQSGEVDYTGGISKCGDRRVRTLLYEAANVMLTRYKGPLKLKDWALAIAKRSTMRKARIALARRLAIIMHAMLQHGTEFKPA

SEQ ID NO: 208159 - protein, 470 aa, unidentified
MKQLARNSPGVILVGMFMKEKNVSMKVVNPHAAGIDVGSRSHFVAIGQDDDQVREFGAYSEDLNSLAQWLIANDVKTVAMESTGTYWQNLYTVLQGAGLEVILCNGKFTKNIKGRKTDVQDCQWIQKLHTLGLLSGSFLPDEASEQLRTYCRHRTNLLGLAASTTHKMQKYLQLLNLRLDIVVKDVTGLTGLSIIHAICNGESNPEKLASLRNGNCKKSEKEIAKALQSNGRKDYLFTLTQEYKLYLSVQEKIKECDEEIEKMLQEQINGDEEKKQHFIGKKVHKRVNKNTPKNIDINLLAYQYYEGVDLLAIEGVSHATILTLMSEIGTGINKFSTAKEFSSWLRLSPNTKISGGRVLSSKVAKGSNRLKIALRNAANAIGNLKDTALSNFFRRIAFRKGRVSAISATARKLAVIIWNMLVKKVPYKPETDYEFLDQKRKRKVMEMKKLIHKFDITPDDLGLQLNINNL

SEQ ID NO: 208160 - protein, 392 aa, unidentified
MDSPPPRHHSATVAFIKANGSEGETMKKHSSKHDPLSSTDVELCTTLCVDLAKQVFQLAGEDATGRVIYEDRIKSRQNFHDFLIKLPVTVTVLMECGPGAQAWARLLQAKGNPVRILPAQRVAEHRSGAKNDRNDAHAILRAGRDTSIASIPIKSITALAIQALHRVRRGNIKRHTALGNQIRGLLLEHGVSMPQGDAAINTHVPLALEDASLPLPDLLRELLDELLTDWLSLGERIAALSRRLEATAQEDEVAQRLVTIRGVGPIIATAIVAKQTEPSRFASGRMYSAFFGIVPDQHSSGNKIRLGRMSKRGDGYIRSLMIQGAHAVLSQLRPDSDQPDDHRLLRWLSRLGRKEAAIRLANRNLRIIWALLQSDQVYQRKPNSNSEAAMSL

SEQ ID NO: 208161 - protein, 411 aa, unidentified
MLLKVIHPICCGADVHKNFVTATILITQPDGTFTEDIRTFSTMTNSLIEMREWLLSNNCNQIAIESTGKYWIPVFNILEDYVTVTLANPKHVKNIPGKKTDPNDSRWLAKLHRLGLVPGSFVPPRHIRELRELTRYRAKLINMRTSEKQRVHNTLTVCNIMLSNVASDVFGVSGKAIISSLLAGEELDEDKLAKITKKNLHKKIPELIEALNGKLSEHHISKPKVTLEHYFYINESIYNVEQLIAQKVKPYEHLVALLDTIPGINVTSAQAILAEIGTDMSVFHSALHLCSWAGVSPRNNESAGKKKNTKITKGDTYLKTILCQCAHAAVKDKDTRFSVKYHYLKYRRGPNKAIIAICRLMLIAIYHMLTKNEPFKNLCDDPYLNRLSQKSQKSMIKKLEALGYKVVKEQA

SEQ ID NO: 208162 - protein, 395 aa, unidentified
MMYLGIDIGKNNHEAGIISEGGKKVGKSLRFSNDREGFTALPDLIGRSVPAGEDLSIGMEATGHYWIPLYSFLHEKGFKVRVINPIQSDSLRNFHIRQAKTDSIDCFLIAETLRFGGFTETRLADEDIMSLQKLARFRESLKDKCGDCKRQVIAVLDQVFPEYDTLFTDMFGESSKAFLKTCGTPEQTLEVDVKSLAALLSKASRGRHGTEKAGEIKDLAANSVGVTLCADTFAFQLRLLIEQIEFTEKQIEKIDKLLARLLKKLNSVIMTIPGVGPVTGAIIPGETGNVNRFDNPKKLVAFAGIDPTVRQSGNYSGTNNRLSKRGSPYLRRAIWMSAVVAARFDPVFKAFCEKKRSEGKAYGTAIGAVARKLIYTIFAILKENKPYEVRLNPPG

SEQ ID NO: 208163 - protein, 370 aa, unidentified
MNRKSSSRKLYVGMDVHKESIDLAVAEEGGEVRHHGRIGGDMNALWRAVRKLESLGRELVFVYEAGPCGFGVYRGLIARGDACWVVAPSNTPRRVRDRIKTDRRDSLKLAGLARAGELTPIYVPDVRDEAMRDLVRSREDAVVAQRQARQRLSALLLRNDVRYPGKTAWSAAHRRWIAGVNLPQPAQRLAFEEYVQTVEEASVRVQRLGQCIEQELATWRWRPVVAALQACRGIQLIHAARIVAELGDLSRFGHPRQLMGYLGLIPSEDSSGEQRRQGAITKAGNRSARRALVEAAWAYRYTARVSPDIARRQTAVPKAALDIAWKAQVRLCARFRRLAARGVNRNKIVVAIARELAGFVWAIAQHVKPV

SEQ ID NO: 208164 - protein, 402 aa, unidentified
MTYDYVIGMDVGKYFHHACVLDIDGTQVLSKRINQNEQSLRALFSAFSAYDHKVLVVVDQPNNIGRLTVAVAQDIGIDVRYLPGLAMRQLSRIHAGNAKTDIRDAYIIAHAAKNLPESLRSVDRVEEAFLQLKVLNGIDEDLARSYTRLINQIRSALVGCYPQFEQALRGQIIHRKWVLHLLARYGGPTKIKRLGKAKAAAFARRYKARNPEPVLDAIFAAISEQTVTIAGAHYAEMGVAMSAKDALLKLEHRQQIEKEVIKLINDIPHTQFLLSMPGIGPKTAAQILMTAGDMSDFPSAGHLASYAGLSPRTNQSGTSIMSNSLNRAGNKKLKNALWQSSFASIRSHERSRQFYERKRREGKRHNAAVVALARRRLNVLYAMMRNHEHYHDPAPSQEDLAA

SEQ ID NO: 208165 - protein, 310 aa, unidentified
MDNVIVGIDVSKDRLDVALRPSGEAFVVERNAAGLEMLVARLRELSPYLVALEATGGFETIAAATLAAAGLPAVVVNPAQIRAFAKAIGQRAKTDPIDAAVIARFAEATKPEPRPLPDEATRLLADLVARRRQIVEMIGAERQREKRVTVPHLRKSITRLLKALEKELTGLNTDIDDAVRGSPAWRDKENLLASVPGVGPIIARTLIAELPELGQLGRRQIAALAGLAPFTRQSGQWRGRSFIGGGRTAVRTVLFMGAMVAKQHNPTLKAFFDRLVTAGKPKMVALVAVARKLLTILNAILRDNRPWQIA

SEQ ID NO: 208166 - protein, 401 aa, unidentified
MKEFNTEAVRIETASALATVRPAQAFVRYPAYIGLDVHKETIAVAVARAGRAAPESREEIANKPKTVAKLVDRLNREFDGEVLLFCYEAGPCGYGLYRQLLELGHDCQVVAPSLIPKKPGERIKTDRRDARKLARTLRNGDLTAVWVPDEEQEAMRDLTRARDDMKGQERKARQQLNAYVLRHGHAWPSNKTRWTQTHYNWLESLKFPHDWQQVVLQEYIDAVKAASQRVADITAQMERVLPQWSLAPVVDSLVALRGIDKLAAMVLLAELGDISRFDSPKQLMAFLGLVPSEHTSGGRRRQGAITKTGNSHARRMLVESAWSYRFPARQTAHLKRKAANASDEAKVIAWRAQKRLCGRYRTLLQAGKNTKQTTVAIARELAGFIWDIACHEIPKVRQTSR

SEQ ID NO: 208167 - protein, 345 aa, unidentified
MIIGCDFHPSWQQIAWLDSETGESGERKLVHASGEAQQFYRQLAAPALIGMEATGNSQWFIELVEDVGHEIWIGDAAEIRASYVRRQKTDKRDAAHLLKLVVEGRFPRLWTPDREQRDLRQLVLHRHKLVMIRSRVKNELQHLSLNKGMQRKRQLWSQRGMQLLRELPLKPWAACRREDLLGLLAMLDEQIEKLDGAVQQAAEENPQSKLLMTQPGVGPNTALAFVLTMGDVSRFARGKQVASYLGLIPREQSSGGRQKLGAISKQGNRMLRSLLVEAAQIAVRYDPQFRKQYLHRCHQKPKAVAKVAAARKLAVRLYWMLRTQTGYPEIVGIESSPRVPLVGAS

SEQ ID NO: 208168 - protein, 346 aa, unidentified
MPYYLVKHQYTCGVDLHGRNLYLCVLDRDGEKLLHRRVGCDPRRLLKVLDPFREDLVIGVECMFKWYWLADLCADNDIEFVLGHALDMRAVHGAKSGNDRMDAERIARLLLGGLFPYAYVYPVGMRSTRDLMRRRSFHVRRRSDLFNHIQMKGLQANLDPFGKIARPSLREGLKERFSDPAVRCSVEADLSLIDLYDVVVERLEKSILESAKAHDRHALSLLKSVNGVGDVIALTLLYEIHDIQRFESVGRFLSYSCLVRCKKTSDGKVKGVGGKKRGNLHLKDGFSEAAVHFLRGNAKGQALHSRLVKKHGTQKALGVLAAKLGRAVYFMLLRNTPFDLDRFVTA

SEQ ID NO: 208169 - protein, 312 aa, unidentified
MDAIYIGIDVSKDRLDVHVRPGDEAFPVARNGAGIDELIARLGAHKPALIAVEATGGFETVVAAGLAGAGLPVAIVNPAQVRAFAQALGKRAKTDPIDAAVIAHFAEATKPQPRPLPDEMTQLLADLVSRRRQIVDMIAAESQRERRIVNKRMLKSIARVKKALEKELADINEQIDDQIRGSSVWMEKEELLKGVPGVGDVTARTLLAELPELGTLDRRAIAALAGLAPWTRQSGQWRGRSMIGGGRASVRTALYMAALSAARYNPPLAAFRQRLLAAGKPKKAALVAVARKLLTIINAMLRDKKKWQPEIA

SEQ ID NO: 208170 - protein, 362 aa, unidentified
MEFIGIDLHKKESQICILSETGELILEQRIKTEREQFKKMFEDRGPCRIVIESATESEWAARCLEELGCEVVVADPNFAPMYATRSKKVKTDKRDARALADACRLGGYRKAHRSSDEQRAVKNQLTVREALVRTRSRYISVVRAMLRQQGLRISSGGAESFGSRLTKVELPIETKETIKPLLTLMAKLNQQIKKADKKIALGNKKDPRCMRVQTAPGVGPITAAAFISTIDNTERFKNAHQVEAYVGLVPSERSSGEKQNRGGITKAGPPRIRWLLVQAAWGIVRSKTEESAPLRNWTLNIVKRRGYKVGVVALARKLCGILFAMTRDERDFEWTKATSGKGLAQSKKWQELLSDTETEAAV

SEQ ID NO: 208171 - protein, 424 aa, unidentified
MKPHPDIEFAAFAGIDWSDTKHDICLQVANSEEREWTIVAHRPAAIDTWASALRQRFGGRPVAVCLELAKGPLVYALQKYDFLVLFPVHPATLSKYRQAFVPSHAKADPTDAQLALELLLRYRAKLKALCPQSVPMRMLLRLVEQRRRLVGDQNRISNRLGDALKQYFPDVLTWFPDKDTILFCDFLTRWPTLKQLKRARRTTLQSFFHDHHVRSQARIEERLRAIKGATSLTDDPAVILPNQLLVLALIEQLRVTLQAIERFDAEIATVSEELPDYALFRALPGAGVTLAPRLLAAFGEQRERYQSASEVQRYTGIAPVTESSGKKHWVHWRLQCPTFLRQTFVEWAGATIPRSFWAAAYYRQQRDKGCSHQAAVRALAFKWIRILYRCWQTRTPYDEATYLNALSRRGSPLLTSIAANAKNP

SEQ ID NO: 208172 - protein, 325 aa, unidentified
MSSHEIVGIDVAARQLVVIGERVALAAAYENTLAGRSRLVKALCRSERPVRVVLEATGIYFLDLACELAAAGIAVMVVNPKATHHFAEAILQRRKNDPVDAAMLREYGRRMDFVPWQPPRPELFAFRALTREAQALTKAVAAAKNRLHAITATKLAPHTLIRALERQIAQNQALIDELVAAALEQTKADPKLARLLARTDSAPGFATKAAALVIGELAVLPPMTARQWVAQAGLDVREETSGTSLARRPRLSKRGNKRLREALFYPALTAARCCPLAGAFVDRLVAAGKTRLQAIVALMRKLLHGLHAMWRHDEDFNAAKLFAQA

SEQ ID NO: 208173 - protein, 388 aa, unidentified
MIYVGIDIAKLNHFASVVSSDGEVLVEPFQFSNDLEGFRSLSLVLDRYDRDQLLIGLESTAHYGNNLVEFLVAKGYRFCVLNPIQTSSTRKKNIRRVKTDKVDTFVIAKTLMQEEHRLFEKQDLDYLHLKSLGRSRQDLMKKRTTCKIRLTSYVDQAFPELQYFFNGVHHKAVYALLKEAQTPEQIASMHMTHLANLLRVASHGHFKKEKAQELRVLAQRSVGSNDSSISIQITQTIEQIELLDRQIDDDEAKIEEIVKAMGSVIMTIPGIRYVEAGMILGEIGDIHRFPSYSKLLAFAGLDPTVRQSGKFNASRTRMSKRGSRVLRYALVYSAHNVVKNNETFRKYYDLKCSQGRGHYAALGHCAGKLVRIIYKILSEDIAFDPNRL

SEQ ID NO: 208174 - protein, 374 aa, unidentified
MLSARPAGACRPPPDQQKELAITTIAHPERPRVTVGVDTHLDVHVAHAKDQLGRRMETVSIPTTPAGYQDLLAWARGLGEVEAWGVEGTGCYGAALTRFLGDQGQVVLEVNRPDRQARRRRGKSDPVDAEAAARAVQAGEVTTLPKAGTATVEMIRSLRVARQTAIKARTQAINALKALLVTAPAQLREQLRGRSAAMLVRQAAALEPGPLVTPTAAAKLALRCLACRYQALHAEVATLDTELARLVAKAAPGLLARFGVGPDSAGALLVAAGDNPGRLRSDACFSMLCGSSPIEASSGKTRRHRLNRGGDRQANAALYRIVVVRLRWHQPTKDYMARRLTEGKTTKEIIRCLKRYVAREMFTVLNQTVPTPAT

SEQ ID NO: 208175 - protein, 364 aa, unidentified
MTTVRYVGMDVDKQKIVLARLEAGRDAKAVEHVIANTPNAVKKYFAALLGDAEVHATYEAGCFGFGLYRQLTAMGVSVVLAAPGLIPRKPADRVKTDRRDAHNLAMALRAGQISAVYVPTEPDESVRDYLRMYEALRGDLRICKQRILQFLLRRDLPYDGGGPWTVKHRHWLSALQFSQPRDRQTLDMYLSQMQQLEAMCAEAAAEVEAIAAQDCYRQQTKKLTAFKGIKTLIALSFVTDIGDFRRFASARQFMAYLGLVPSEHSSGNKRRQGGITKAGNSHLRRLLVEAAWHYRSYHPSSRDLTERRRGVDPSVLSYVNRSGRRLNRKYMHMLLRGKRSQVAVTAVSRELAGFLWGVMTDQVA

SEQ ID NO: 208176 - protein, 332 aa, unidentified
MENFYFIGVDVSKKKLDFCVMFEGKVVHEEETTNHQSAIMALLHQLEEDYGIVGCQMLVCAEHTGQYTFPLACACKAVECKLWLENPAEIKYSSGVQRGKNDKVDAKRIAIYAKRFQDRVQYYERPTEDIERLKQLESERTLYVTDLAKYKGQMNDQKDYMPKTLYERKMKRLQALMEDLEEAIQAITDEMDEVIASCPVLCRQRELLMSIDGVGRVVATNMIITTEAFTRFDDPRKFNCYAGVAPFSYSSGSSQHSKARVSHRADKVMKRLLHLAAVAVTHRVGGELKQYYERKVAEGKNKMSVINALRAKIVARMFAVIKRNEKYKPILS

SEQ ID NO: 208177 - protein, 378 aa, unidentified
MKAALQTKDNASGDVLYMALELSNKKWKLGFSNGEKTRIKTIDAGNWVSLIAEIEHAREKLGCSPSCRVVSCYEAGRDGFWIHRALLEAGIENYVLDSASIEVSRRRKKVKTDRVDVVALLRLLMRYVNGEKEALHAIRVPTVEEEDQRRLNRERDRLIKERGAHSARIKSLLKLHGISLGKVNDLPGLLPSARALVVEYALPADLKRELEREYERYELVNQQIKGLEKLQIQRAEDLDKPAMQQITQLMGLKGVGWQSSWILNMEFFLWRDFRNSKQLGSCAGLTPTPYDSGDSTREQGISKAGNKRIRRLMVELSWLWLRYQPDSALSQWFERRFGQGGKRMRRIGIVALARKLLIALWRYLEHGVLPEGAVLKAA

SEQ ID NO: 208178 - protein, 341 aa, unidentified
MGEKKYCVGVDLHRNQFTYCVRYSNGQEKVGKESIVHLERFARRLGKHSEVAVEATGNTWMFCQVLKKYAGRLVVVNPNQFKVISRSVKKTDKNDAKTLAEFLEKDLLPEVRMKDELQSKVASLTQTREKLVQLRTVLKNKINNLFASRFILLKREELSSEKGLQKVLTYHFDSISDVELRVMVDQIRSLNKSIEELDKAIEDNGTKMDGLDNLKSVKGIGAKGAATLLSVIGNINDFRSAKQLAAYIGIVPRVSDSNETVHHGRITKQGSKIARTTLVQCALIAKRYNAYLFNFHEGIKARRGGAKANIALARKFLEIIYRILKNKWIFEDFTQFKLKTA

SEQ ID NO: 208179 - protein, 334 aa, unidentified
MKSDAVHIGVDVSKEKLDVFVPAQKEGMRPTAKELHNNVTGFKELRDLARKAKATVCVEPTGGYELELIAFMHRFDVPVAYTDALRVRQFARAEGNLAKNDRIDAALISRFADKIGVRLIEAQDVEAVELKRKAKFRQTIMDSRTAMANRLETEINPEMRAMLRAQIKGLDRLIDKTERLCLETVGKNERMNTLRERFTLVGGVGDLTAISILAGLPEIGTLSDEKLNRLVGISPEENQSGSKDRLRRIWGGRKDVRNALYMAAVASIQWNAILGGYYRKKRAEGHPHKWAIVPTMRKLLSLLNRIARDPGFTPMPEPEATKQNANVGRKTKAA

SEQ ID NO: 208180 - protein, 312 aa, unidentified
MQNDTIGVDVSKDHLDAYRLADGAARRFANNKGGHKALVKWLAETPPYRVVFEPTGPYHRAVERALGVSGVPFVKVNPRQARRFAEATGKLAKTDRLDAAILARMGALLELEARPARSEILLELKELYVAREALVKDRTAAKNRGKVLTLSLLKRQNAQRLEQIDRQIATVEAAILQIIEADTSLADRFAILTSIPGISNITAFALLIAMPELGAMEAGQAANLAGLAPIARQSGRWTGRSFIRGGRADVRQALYMPALVAARFNPDMKAKYAHLIKTGKPAKVALTAIMRKLVVLANALLKAKRPWTPKTA

SEQ ID NO: 208181 - protein, 340 aa, unidentified
MSKITTIGLDLAKNVFQVHATDETGGLAMRRPLRRGRVLRFFAGLPPCLVGMEACATAHYWARELQALGHEVRLMPPQYVKAYVKRNKNDAADAEAICEAVKRPSMHFVPVKTAEQQSALLMHRGRELLVRQRTMLANALRGHMAEFGLITAQGLHKLAELIAIVRDEQDARVPTMARQVLRVMAEQLGDLETRIAAIEAQIMAWHRSNPVSRRLATIPSIGPIIATAIAATVADPSVFRSGREFAAWLGLVPRQNSTGGKARLGGISKRGDSYLRRLLVNGAHAVLLRSKAARADPWLLALRGRRPRLVVAVALANKTARIAWAIMSKQDTYRRTTAAA

SEQ ID NO: 208182 - protein, 317 aa, unidentified
MEPELFVGIDVAAAHLDVAVRPGGEAWRVANDEAGIAALVTRVAALGPALVVLEATGGYEAAATGALAAANAPVAVVNPRQVRDFARATGRLAKTDALDAAVLAHFAQAVRPEARPLPEEAALELRGLLTRRRQLVEMITAEQNRRRGVPARVLRQIDAHLAWLRAQLAALDRDLAALLKASPLWHAKERALRSVPGVGPVLTLTLLADLAELGTLDRKAIAALVGVAPLSRDSGAQRGRRRVWGGRSPVRAALYMAALAAARHNPVIAPFYRRLLAAGKPKKVALTACMHKLLTILNAMLRDGTAWDPSRHPTLPA

SEQ ID NO: 208183 - protein, 337 aa, unidentified
MKFCGIDLHSNNSVVVVTDETDRVLVSRRCPNELTPILSLLEPHRDELVGVVVESTYNWYWLVDGLMAAGMDVKLANPVAMKRYDGLKHSDDKDDAVFLAHLLRLGILPTGYIHPPQERALRDLARKRIQLVRTRTQHILAVENIAARQFGHGFSCNEIKGFSAASVDRLGLPTDVALAMNANVAVIQTLEAQIAGLEARLLQQAKLRPEYLLLKTMPSVGEVLATVIMLETGDIGRFAEVGHFASYARCVKSARYSNGKKKGEGNAKNGNAYLIWAFIEAANFARRFSDDAKRFFEKKKAKTNGVVATKALAHKLARATYHILKEKQPFDAKRCFA

SEQ ID NO: 208184 - protein, 411 aa, unidentified
MFYVGIDIAKRSHVACVMRDDNSLEIRPFEFTSTKSGFEKLRAQLSSLTCDVSEVLIGMEATGLLFDNLYRFLRSLHYRVVLLNPYQTAKFREMDTMKRVKNDNIDAQMIAALIKSGRFSEGYVNDDQLQSLRTLYRHRASLDDQLKAIKRQTQTVLNVVFPELEQVISDPFNITGLLLLEKYPTAKHYEYASEKRILKTFRGIKGNNFNEVKAKKLLSLAKESIYSGVGKEGYEATIRSNISLMRLLKEQMQSVEEAMFALFEAKKATYEEQEEMAELIDNLRTIPGVSDKTILALLAECGNLDRFYNAKALTGYLGLYPTLEQSGDSQKNGRLAKRGARLAKKAIYLAAIAAVRHNKELRQVYMNYRSKGRAKKECIIITARKLLAIIYAIYTHNTPYNPNRVFVAQPN

SEQ ID NO: 208185 - protein, 350 aa, unidentified
MKYVGVDWAYRTAQWCALAPGGEVAGEGRIAADRDGLARLVFELGDEVKACLEMMSGALWVRDQLVACGWQVEVADARKVKTVAPLAAKTDKVDARLLAELSRRELVPALWLPSLDERALRERLRRRVHLVRLRTSAKGRIFGLQTQWGVRVSLARLRRADGLTLLERAGMPEVWRRSVSECLALIDFLDARLEPLERELRPFAHGDPRAVLLDTIPGVAELLALTIAVEVGDISRFATPQKLVSYGRLAPRVRQSGQARPRSGPLNKSGSRLLGWAAVEAAQQAWRESNPWHDLYLDVGSRSGHSNAAKAAVARKILIAAWHMLSRNEPFNPAPRTTSVSASSRLALAA

SEQ ID NO: 208186 - protein, 459 aa, unidentified
MRTIGIDLAIQGSHKAIVADEGGRYITPVIKLHTRASEIDKLLARAREGAEGCPLQVVMEPTGMAWFPLAAYLARQEGVTVYLVNSQQVADLRRFYKRHAKSDRIDARVLARVPLVNPEKMHPLVLPPAGAFGCQRGCNQLDQMQTQITAIKNRLRAVDRFAWPGLEELIFADPFSPTARWFRQHWYDPRQVIQAGAQTIRHQWQNSSLAGGDKGEWAEQLVELAEQVLALYGHDTGYLDFALLQAEVGREQEQLAFLEEMHHNLRLQTVRPLYRQIHPSRNLETLKGVGQDGAAVYASFIGDPDRFGSNRRFRGWHGLVPGSKQSADSETKGLHVTKAGPNLLKRYAYLNAEVARQWDPQIAAIYYDQMVNKGKHHNQAVCTCATHLLDRILVVLREDRSYQLRDVDGTPITVEQARAIIAERYTVPEEIRRRNNKRHRRERAERRSERKQKRESRPR

SEQ ID NO: 208187 - protein, 401 aa, unidentified
MVSDFRKGRYNLMKIFVGIDIAKLNHFAAAISSDGEILLEPFKFTNDADGFQLLVSKLESFDKNSIIIGLESTAHYGDNLVRYLVAEFYQVCVLNPIKTCQMRKNNVRKTKTDKVDTFVIAKTLMMQDDLRFITFFDLDMMDLKALGRFRQKTIKQRTRLKIQLTTYVDQVFPEIQYFFKSGLHQHAVYALLKEAPSPKEIASMHMTHLANLLKVNSHGHFTKEQAKELRVLAQKSVGANDSAISIQITQTIQQIELLDSQLEKIEAEMTDIMKFNDSVIMTIPGIGYINGGMILGEIGDIHRFSNPNKLLAFAGLDPSVYQSGNFQAKTTRMSKRGSRVLRYALVNAAWNVVRNNATFKAYYDAKRAEGRSHYNALGHCSGKLVRVIWKMLTDNVEFNLK

SEQ ID NO: 208188 - protein, 360 aa, unidentified
MAKARSLVGLDVHATKIVAAVLDAQTGQLQHFRLGGDVTEAAGLCAGLARPVRATYEAGPTGYGLARELARRQVECVVAAPSKIPRACGDRVKTDRRDAEHLVRLLLAGKLHPVRVPGPAEEALRDLVRAREAVRVDLMRCRHRLSKLLLRHGIRFDDGRAWTERHRAWLTQVELGWPAAQATLIDARGAVDALVHRREQLEREIVALLPDSPWAMQVGRLRCLRGIDTLTAAGLCAEIADFERFAKAEQLMSYVGLIPCENTTGEQRRLGAITKTGSGHARRLLVEAAWHYRKRPAISRALQDRQDGQPTQAVAISWSAQQRLHRTWQRLQARGKRRTIIAVASARELAGFCWAICRIE

SEQ ID NO: 208189 - protein, 387 aa, unidentified
MENTYSNVACGGMDVHYKFSNVTFRDKDGRVVRRERLMHPLRDQLRQRLSRWPRGTPIVLEASFGWGWLSDLLSEMGLEPQLSNCYKLEQMRKARGWVKTNKKDADMLSLLPFETTAWWEVWRAPPQVRNRREQMRFRGDLVAVQTAVKSRIHAIFHRHGLFHEFSDLFGGKGRRFLAELCIGGSEYLSPQALQALRGQVKLLDHLRGQLADIERILHRQLAKTPLISRLKKIDGFGLILSHVLAAEIGKIERFRNHKALASYSLLAPRSKDTGQDDPDHSPLGRHLGTCGNRTLKWAFIEAAHGAVRSGGRWRAMFDRVTCGGRKDRNRGYIKVARELVKVVYVVWSKGLDYQPDPPARPGSDRNKKRSRSGTGQLLHPMVHALRA

SEQ ID NO: 208190 - protein, 450 aa, unidentified
MAQGSGLTRGDRNRNRKIAGLRGVVTADRAVLAVDLGEDKQVAVVVDHDGRVLGRKVVKLKAHRLGGLLEWAAGAAGKAGLGGLVVACEPTGHRWKALMGLADAAGQGFCCVQPLAVSRAREGDDYTRDKTDHRDAYLIGKLVIRLECYLPERADEQWARLRHLGARRAGLEQDVVACRQQAADLLGCAWPAPLSACRRPLESVTWLAGMTVVTARCCGDPRRVRKMGYEKFLAAVRRELPRWGGARAFHAVVRALWEALADEGGVAAQRPGALERLRLLLEDWRGLRGRLADAGERMTAALEDLGLAGLVASIPGVSVLTGAMILAESGDPRRFSSSRALVKHAGLSPSERASATMNGQSRVSRRGRPGLRAAAWRAAWGAMPHNAVLAARHARLTGRDKHALAGGQARAACAATLLRWIWAVTTTGIPWDAAIASGQAAARPAIAAAA

SEQ ID NO: 208191 - protein, 459 aa, unidentified
MNRKQRRETLRRIHAEDLSLKVIHPEAAGIDIGNESHYVAVPPDRDGEPVRCFGCTTTEVRQMADWLKQCKIRTVALQSTGVYWIPVYDILEAAGLEVYLVNARETKNLPGRKSDVQESQWLMKLHTYGLLRNSFRPPQEIRTMRTYWRQRRDLVQAAGRHVQRMQKAFTQMNIQLANVLSDISGKSGQAIIHAILEGERDRHQLAALCDVRVKANEEEVTLALEGNWQEDLLFMLKQEQDGYDFCQKQIAECDEQLYRYIREKPDRSAGVTLPEEKRKGRRVKAKKNKPRFDLREQLFRLTGSDLTRIDGIDVLTAMTVISEVGWDMSKWPDEDHFVGWLRLCPDNRVSADRVIGKGRLPTHNPVNVALRMAATTLRETDTYLGAQFRRLRRRLDAPVAIKAMAAKLARLIYRTLRYGMQYVDKGAAVYDAAHHQRQVLRLKHQAAELGFQLTEVAAA

SEQ ID NO: 208192 - protein, 344 aa, unidentified
MTYYAALDISVRTVAICIVDQEGAIRLERSVRSELPDILKVLTEFGEPIAKIGFEAGVLTQHLTYGLKAAGHEVVCMEARQVSAALAAMRNKTDKNDARGIAQILRTGWYSRVHVKSIESHYVRALLASRKAIFNKCIDLENEVRGLLKVFGVKLPPRVYHGAFDGEARKGIEGDRQLTEALAPLLDARLVLLRAFRDLDARVKRMAREDQVCTRFMTVPGVGPLTALTFKAAIDDPARFTSSRTVGAHFGLTPRRFQSGETDNPGRISRAGDADVRAALYIAANSMMMRSIQWSWLKAWGTRLIKTKGRRRAIVAVARKLAVILHRMWVDQTDFRWSNTEAAA

SEQ ID NO: 208193 - protein, 426 aa, unidentified
MKITRTAEKINLNQVLDVSVDVHMDILNFFFEIEGKEYSDECHNRTSTISSRLKKYIKIAKEHGRQTLRVICEPTGQYQNKLLRTARRLGCFTNYVNAESVNKFRIVETNDTGKTDIKDPRVIRTLGKLGKVIKHRMVGEDYVMLRKLGKIYDETDVELVRIKGRLNKLLVELFCDYSFKKDFLYSNSGKALVQKYSCNPYKIIKSGNTRFSQTMKRASSRIRQLTLTRLWEDAQNSVLNELPPGYVDVLEMRLHQLFSDYLVQENRKAEIVEEMVKILDRIREKDPSIPPPTLGVISAKNIARLLGETGPLNDFDNWRKLMRYFGLNIRMRQSGKSKGQYKITKKGRPLGRKVLDNIIFPLVTRRGLYGEYYLRKKEQEKRPGTKAMTIVMRNFLKKFYGWYKSGAVFNQERFFNSTSELIKKAA

SEQ ID NO: 208194 - protein, 472 aa, unidentified
MPTFYVGGDVSKGYADFEVINEAGSSLTWSGRYDDTPNGHGALTEAFERQAARDPDSIFVVGVESTGGLERNWLHRFRALALRFNVSLYHLNPLALKRFLDTRLHRAVTDAHAAKDIALFLQSGVRLGREYKPKLQEDIRWYRSLCNQTKRLAAMKNELQYSLVTAHPDLVQYARENLPQWLLRLLVKYPTAARLSRAHSSTVASIPFVTATRAKTLIAAAKNSVASSSGSCTEAMVSNLAGEILRLEAKLKRWREDLCSHFREHKVVAILDSLPGIAKWTAVSFLLEVGDFDRFPSERALIAFLGLDPCPQFSGDGRKRRGISRRGPARLRGLLFMSALSAISHSPVFRSLYARLRANGREHASALTACMAKLVRVAYACVMRGTPYDSAKHEADNARCEPQPEVDPNPGLPPVDGEGVSLSAPISSREAKKRRRATALPQTRTVSRKHVVPAPPSDDMVAHAAKRTQVSA

SEQ ID NO: 208195 - protein, 370 aa, unidentified
MSIKRILVNTIDTDLEYEVIGIDLAKNCVSAILLTTDGEIFGIDRLDYQELEKSAQELSPTIFAMEPCTEMNYMVQKLEDWGHHCIVISGKNVKDYVESHFSNQKTDLNDAQALAFLTKDTQLRTVKVKDPEQLKYASLTTLREQYVKQYRQTMVSLKGICQVWGLSISKGISGKARLKDMIENHAAFPAELRTALVGMVAHAQAVQKDLKSVTKILEELAKKDKACQLIQTVPGLGTICSCRLRATVGDIQRFKHPKDFPAYYGLVPRSMATGHNEKKGKITHRGDKTMRSLMVQGAGIVINQATKGNLHSKQLTKWILKKQKEKMPWGKLVCAVAAKLLRIVRAILISGKPYNPKIAGVAKCSLPKAS

SEQ ID NO: 208196 - protein, 411 aa, unidentified
MEEILCGIDWASDHHDVALIDVEGIKLGRRRISDDAVGLGELTGMFAGHGAGPGTVKIAIETERGLLVASLRAAGYDIYPVNPKAVDRYRDRHHLARGKSDAADAMVLAHILRTDAHLHRPLPADSPAARAIEVLARAHQDLVWSRQHEVNRLRSLLAGYYPAALAAFGDLTTRTAMTVLAAAPTPAAAAQLTTSDLLDLLAAAGRGRRRADARRLAEVFAAPQMRQPAAVEQAMGDAATAVITTITAMNTAVTALAQRIDASFEQHPDAAIYHSMPALGPILSARVPGEFGDDRTRWPDPASRRAYAGSAPITRASGKKRVVLARSIRNRRLYDAAHWWAFAALSVSPGARAYYDQRRAAGDGHQAALRRLASKLIGQLHHCLQHRVPYDEATAWTRHQEQSQPAPPAAA

SEQ ID NO: 208197 - protein, 337 aa, unidentified
MRFIGVDLHSNSLTACYLAENGHEEMRTFELKELVKFQETLESRDQLAVEATGNTRHFREAIKNLVSKVVVVNPSQFEVIRKSVKKTDRHDARTLALFLSKDMLPESRLKEPAHAQLNSVAHTRDKLVKLRTTLINKLHALHVAAGIKCKKTSFSSVKGLRVALNHTWDELTRAELEVIVSQIGSLNEGIKRLDQQLSEHGRRLIGHRNLTSIKGIGDKSAALLLSVIGDVSDFAGEDKLASYFGLVPRVANSNETIHHGRITKRGSKLGRTTLVQCTLVAARYSPYLKNFYERIKAKKGAGKAIIATARKFLGIIYRTLKHNWVFADFPNFVLAED

SEQ ID NO: 208198 - protein, 422 aa, unidentified
MLSEANDDEQLIERVAGLDIGKAELVCCVRVPSGKPAGRRLQEVSTHSTMTRSLLALSDHLRALGVTRIVMEATSDYWRPVFYLLEAQGFDPWLVNAKDVKHLPGRPKTDKLDAVWLCKVAERQMLRPSFVPPPPIRQLRDVTRYRADLVRVRTAEKQRVEKLLEDAQIKLSVVASDIFGVSGRDMLAALIGGQHDPRVLAQLARGRMRGKITVLEEAFTGHFTDHHGFLLAKMLTHIDAFSVDIADVETRTDELLLPFAPAAARLDEIPGVGHTAATVIIAEIGVDMTRFPTPAHLSSWSGFAPMVSESAGKKKGKNSTGHGDAYLAAILGEAAVSAGKTDTFLGERYRRIARRRGKKKAIVAVGRSILVIIWHLLSDPEARYTDLGPNYYDSRINPERRKRNHVHQLEALGYTVTLQPAA

SEQ ID NO: 208199 - protein, 386 aa, unidentified
MSDRSGVSRGDHNRNARLARLREAVPLSNAILAVDLADGKQRVVVTDHESRVLARRTFRRRARELGTALDWAAGRATAAGFAGVTVAVEPTGHRWRVVGQLAADRGMAFVCVQPLMSSWARRAEDLTFDKTDDKDAVLIARLTGELRCYLPEPADETWAQLRHLGIRRARLIAGQVAQVQQMRDLLECAWPAVLDTARQPFKSTTWHAALTVALDRAAGGGLSRVTGLGHKRFDAAVGRQVARRDAVHPWQKIIDGVFAACASPAGVIALRRGALERAGLLLADWHDTRARLAYTERRMIAVLGELRLTDLVTSITGLSAVGAAAILAETGDPRRFTTGRALVKQSGLAPRQKTSGTCTGRTRTTGQGRPGPRGGRRYLRWSSRSA

SEQ ID NO: 208200 - protein, 386 aa, unidentified
MTWVAHKNVDRANIQKEPTVSTLNSASQKAIWVGLDVHRDSITSAVLAPGREVPVVDRWFHDEPSVRRFVSTLGDPKLLRLCYEAGPTGYDLARLLGRMGVSCEVIAPSLIPVTPGAKVKTDARDARRLAHLYRAGELTSVHIPTAGEEAIRDLARTRADLVIDRTRSRHRLSKFLLRHGEIYRGGVAWTVAHEHWLTQVHFEDRALTQTYAHYRAIVAGLDAHLGAVEQDLKVYLDQGPFAEAVSRLSAYRGITELGALMLSAEVCDWRRFPRATSLMGFCGLVPSEYSSGDRVKRGRITKSGNTHLRSQLVESAWAYQHRPAVGPRMKKRQERCQSDTIGRAWAAQLHLCTKFRRLAERKSSRKVVVTAIARELTGFLWAEMTA

SEQ ID NO: 208201 - protein, 347 aa, unidentified
MNFYHSTHRYYCGIDLHARSLYVCIIDEQGEVLLHKEIKARPEPLLALLEPFRDDLVIGVECMHCWYWISDLCEEHGIHFILGHALYMKAIHGGKTKSDRIDSFKIAMLMKGGNFPLAYTYPKEMRATRDLLRRRTRIVQHGAMLKAHVVNTTSQYNLLPNKANLKNIGAREQVRATFADRDVQHNIDLDLAIIECYHRALSKLEEHLERQAKQHDPASLSVLRIIPGVGRILTLTMLYEIGDIQRFETVQKFASYARLIKCKAESAGKVCGTQGNKIGNAHLKWAFSEAAVLYLRGNDKAQRYLQKLQKRMNKPKALSALAHKLGRAAYFMLKHQRVFDEQRFLKG

SEQ ID NO: 208202 - protein, 482 aa, unidentified
MKPKQQEKTKEATCRATQGNWQQMNRKQRREMTRKIQSEDIRLEVVHCDAAGIDIGNESHYVAVPPARDSQPVRRFGCTTAELKEMAVWLKQCAIRTVAMQSTGVYWIAVYDILEEAGLEVYLVNARDTKNLPGRKSDVQESQWLMKLHTYGLLRNSFRPSQEIRTMRTYWRQRNDLVQSGGRHIQRMQKALTQMNIQLANVLSDVSGMTGQAIIKAILAGERDPHKLAAFRDPRVKASEEEIARSLEGNWEEDLLFVLQQEQDGYEFCQKQMTECDQRLAQYLERREDRSAGAHLPEEKRKGRLKKKSGNKPRFDLRTGLFRMSGADLTRIDGLDVMTAMTILSEAGWDMSKWETEDHFVSWLRLCPDNRISGDKIIGKGRLPTNNRVTTALKMAANSLRTSKTYLGAQFRRLRSRLDTPVAIKAMAAKLARLVYRMLRYGMKYVDRGAAFYEAQHRQLQITHLKSKATKLGFQIIQVPTA

SEQ ID NO: 208203 - protein, 376 aa, unidentified
MKQFNDIYVGLDVHKDTIAVAIVRGLRSKPTYFGEIPNTPAAITKLLHQLSPDGEVLNFCYEAGPCGYEVHHQLTKLGQSCSVVAPSLIPRMPGVRIKTDRRDAMSLAKLHADGSLTAVWVPGKEQEGIRDLSRAREDFKQTETKARQRLGAFLLRNGKIFTGKSKWTVAHWRWMETLTFETPMQHIVMQEYVEALKEASRRLLGIEKQILLAVRGWSLEPVLNSLLAMRGVNTITAVTLLAELGDITRFDNPKQLMSYLGLVPSEYSSGSKRQQGSITKTGNGHVRRVLVEAAWNYRFPARKSRTIEMRAEKTSDRVQAIAWEGQKRLCGRYQKLLSLGKLKQKVCTAVAREMVGFVWAIACEASGRVHASRATA

SEQ ID NO: 208204 - protein, 372 aa, unidentified
MKQISKIGITKKVINNAKDNNDHFNGIKIYVGLDVHKKSWFVTIYVENILYKSFSISPPSSVQLIGYLNEHFPGGEFHVVYEAGFSGFGLYDDLTKAGMECLVVSPADVPMSDKDKRFKTDRHDSKNLALQLKSGSLEGIHVPDVDLREYRALLRLRNKLVKDRTRTKNYTKSNLMFFGKEIKDDEEESVTSWSKEYFRLLSEVDYKTEEGSKVMEKQMKVIQFYDDEIKGIDKDIKELSELTKFKDDVKILSSVPGISTLSAMIFLVEIGDFSRFEDTHKLKSYVGLIPNEHSSGEKEIKTGITRRGNKFLKKIIVEASWVAIRKDKSLLTTYTKAIKRMTGTRAIILVASSLLSRIRSIMRQRTAYKIAG

SEQ ID NO: 208205 - protein, 348 aa, unidentified
MKILALDLGKSKTCGCILETLTGEQRFRTVATTAAALTRLLQRERPTDLVLEVCTLAGWVHDLGVGAGVRVHVANPNHEAWRWRNVKRKTDRLDAAKLADLLAARQLPTVHVPSQTVRAHRALIRYRGQLVARRCRIKNTIHSLLLRQGLRHVSGPGGWTQTSRAKLSELSRPWEQVDADSLWRGALWEDLQALERLDEQIQRVESRLNEIGRADERIQRLQTIPCVGPRMAEMLVAVIDDPHRFRSGKEVGSYVGLVPRQYQSGAMDRSGRISKQGHRALRSLLVEVSWLALRYNPQLRQVYERLCRGTRSRRKIAIVAVARKLLIIAWAMLRDKTCWQPSRLQSAA

SEQ ID NO: 208206 - protein, 384 aa, unidentified
MKQTQETLRKEDSTKQPALYIAFELGNVEWKLAFSEGSKIRYVSIDARKLYQVEREIERARKHFGLSEEIQIVSCYEAGRDGFWLHRYLVGRGIENLVVDSSSIEVNRRRRRAKTDRLDAGKLLGMLQRYVGGEQRAWRVVRVPTEQVEDERNIGRELDVLMAERTMHSNRIKGLLVQQGIVIKNVISKKFLNKLEVACRWDGQRVAGDFKARIVREHERLRMVYEQMRRLKKERAARVQRQATRSMKQVVQLQKLRGIGPESSWDLVMEFFGWRQFQNRRQVAALAGLTPTPYDSGGSVREQGISKEGNRRIRALSIESAWCWLRFQPESHLSQWFEQRFATGGKRMRRIGIVALARRLLIELWRYLNTGVIPQGAHLSRQET

SEQ ID NO: 208207 - protein, 412 aa, unidentified
MDAIVECCAGLDVHQETVVACVLKGALEGRPRGQLRTFGTTVAGLLELSDWLQEQAVTVVAMESTGIFWRPVWNILEGQEFELLLANARKVKNVPGRKTDQRDAEWLAQLLRCGLIERSYVPAVEQRDLRDLTRRRRRLLQTLAAEKNRVHKTLQDANVKLTTSVSDIFGVSGRALVQALRSGQKLDSEEVLALLKGKLRQKAPEVAAALEGRVRPHHLEMIEFSMDHIDFLERQVQVIEERIEATLAPPFREARDLICSIPGIERASATEILAEIGIDMSVFHSEAHLASWAGVSPGNFESAGKSKSGRTGRGDRYLKTVLVQAGWAASKTKATRLSGRYQRLARRLGRDGKKKAVVATAHTLLRIVYFVLTTRRPYQEYGAEYGVASAEARTRRVIAQLQRQGYTVTKAA

SEQ ID NO: 208208 - protein, 343 aa, unidentified
MQAVTTIGLDIAKSVFQIHGVDAAGNVIVRRQLKRRYVIPFFQKLPACLIGIEACASSHHWSRELTALGHTVRLMPAAYVKPYVKRQKNDAADAEAICEAVTRANMRFVATKTLEQQSCLMLHRTRHLFIRQQTAVVNAIRAHLAEFGIVAPVGRNGVEQLLDVVADTSDKRLPAIARACVLALGAQLRTLKVQILNLDRQIMAWHRSNEASKRLDDIPGVGPALATALVASVADPKAFRSARDFSAWIGLVPKQHSSGGKDKLGSISKQGDRYLRSLFAAGALAVIRYAKVHGSKRHPWLTTLLARRPTKVVAIALANKIARMAWALMARGDRYKEPVVLAA

SEQ ID NO: 208209 - protein, 341 aa, unidentified
MKQFIRIGVDLAKNYFQIHALPSEGAPAIKRKATRRKMREFFSQIAPCCVGMEACASAHYWARELKAIGHEVRLMPPAYTKPYVKRGKNDAVDAEAICAAVSRPGMRFVPIKTAEQQAALMLHKTRELLVKQRTMSVNAVRSHLAEFGIVAAKGIGRVEELLELAKEDATLPSATMMAVKVLGRQIEELEKGIEDLEKEIAKAHARSETSQSLSEIPGIGKLVASVIAASIPDPSVFRSGRDFAAWLGLTPRQNSTGGKRSLGAITKAGNRYIRKLLVLGATSLLNVVSKRKGGLRDWIVGLLAKKPARLVTVALANKLARIIWAMMKNGECFRTEMFAKA

SEQ ID NO: 208210 - protein, 426 aa, unidentified
MNNNASPEFAALIGLDWGDRSHAIAVQPAGADIQTSTLPHSAESLHQWLDQLETTYNGRPVAVAIEASKGAVVYALLERPWLTIYPIHPATSTRQRSAFRPSGAKDDTPDALVLLSILQHYRDRLRPLQTDDEATRTLAHLVEARRKAVDRRTLLANQLKSTLKNYFPQALVMVGEDLTIPMALDFLAKWPRLTDLQCAKEITLKNFYHRHNVRRSELIQTRLDFRRSARLLTRDSAVVEVSVRVVRMLLAELHVLNEHIGEFEATIDEAFTEHPEKSFYRELPGAGTVLAPRLLAAFGTARDVFPDAGSMQRYFGVAPVTEKSGGRCWIHWRWNAPTFLRQTLIEWAGQTIVFCPWAKAYFEQQRAKRVGHHAILRSLAFKWLRILWRCWQSRQDYDQEKYLQQLEKRKSPIAARSRQIALEMAA

SEQ ID NO: 208211 - protein, 412 aa, unidentified
MIYCGIDWAERTHDVALVDDTGQLLAKRHITDDVAGYKILLELLAEYGDTEENPIPVAIETSRGLLVAVLRTGKRKVFAINPMAAARYRDRHSVSRKKSDPGDALVLANILRTDMHAHRPVPDDSDLGRAIAVLARAQQDSLWNRQQLANQLRSLLREYYPAALAAFAAWTNGLCRPEARELLKTAPTPTRAARLTRTQVQAALKRAGRQRGIEAEAERLREVFRDEWAHQPPLIEDALGKQMLALLIQLDAACTAADQLAEAVEEAFPQHPDAEVLLSFPGLGIQLAARVLAEIGDDHGRFADARGLKAHAGSSPITRASGKKSAVTRRWVKNDRLNHTGYLWAFASLRASAGANAHYRRRRDQGDWHAVAQRNLSNRMIGQLYHCLQHGKAYDETQAFPAAEPSPKASAA

SEQ ID NO: 208212 - protein, 386 aa, unidentified
MQYPNDSRRCLTVLDQDSTLIAVIEMSLSSWLVAGIVPGIERQPLKKLEADKHALLKLLHRWRDEAVKAGRKITRIAVAFEAGRDGFWLARWLRAHGIEAHVIHASSVAVPREHRRAKTDRLDTEMLKRAFLGWLRGERDHCKVVAIPSLAEEDAKRPNRERESLVGECSRLVNRMKAAFVRLGIRGFNPKLKKAPERLGALRTPEGEPIPPNTVAALRRDMERLRLVREQIRQIELTRLERLQKAPEVGAHAMVRLLARVMGIGIETADMLVQEVLSRELRDRRAVARYSGLTGSPDESGRKHREKGLARAGNARVRRGMIQLAWRFLMFQKNSALAQWFRQRTENAPRTRKTMIVALARKLLIALWRFVREGVVPEGIVLRPAP

SEQ ID NO: 208213 - protein, 346 aa, unidentified
MKRYLGIDVHRESCTVVVLSAGGKETDQRVVPTEAAALVQYVRSLSGELHICVEEGEWSEWLVELLSPRVHRVVSCTARGRRGPRSDAKDARELAERLRTRQTGPPVYKPLAAQWGRLREAVRLESKLLGDEVRAKQRLKSLYRRRGVACVNAEVYSPRLRGEWEKKLPPSLRPSAELLGQELDQLAELQQIAEQQMCDAAGKFPMWRKLQTVPGIGQKRAAQLLAVVVTPHRFRTKRRFWSYCGLGVVTRSTSDWVRQADGQMVRVPVIQTRGLNKASNRQLKGIFVGAARTALSCRPPNPLLEAYERIVESGTKPNLARLTIARKIAAVVLAIWKTESEYRIMN

SEQ ID NO: 208214 - protein, 320 aa, unidentified
MQNATTKPATAGIDTSKAKLDIAVAGNGQCWQVQNALNGWQQLAAHLTKADITRVGIEATGGYEHGVVAHLRQHGFTVLVLQPVQVKAYARMHLRRAKNDKIDAGTIAACTAALNQDQRQSDERLNDLAQNLTFVEQIEEDIARIKVRLEHIDQPRLRRVAEADIARLKKRRAAELERIAASLRTHDDFARRLNLVLSVPGIGERTAISLIVRMPELGRVSREEAAALAGLAPFDDDSGKHKGHRHIAGGRSRVRRSLYAAALPAAFRWNPALTALYKRLTAKGKAHNAALTACARKLLIYANTVLARNEPWIKNSASYL

SEQ ID NO: 208215 - protein, 353 aa, unidentified
MRKDSKLVAGCTVGLDVGDHRSSVCVLDEDANVLETGEIATTRTAIRSRFGGRQRMRVVLETGTHANWLDEELKLLGHEVIVANARKTRAISTADCKSDRKDAEMLARLGRSDPKLLCPVNPRSEDVRKDLLLVRARAVLVAQRTLLVNYVRGSVKPFGMRMPDKSTESFHKLAVPKDLANALAPMMQLLKAITAQIGAYDEEIEKLGHGKYPQTSRLQQVPGVGPLTAATFVLTIADPDRFKHARDVGPYLGLAPRKHQSGKSDPQLGITKSGDTMLRTHLVQCGQHILRKSSPDTSLKRFGLHLARKGDKISKRKAVVAVARKLGVLLLALWKSGEEYEPLRGSAPSASKA

SEQ ID NO: 208216 - protein, 343 aa, unidentified
MKITTIGIDLAKNVFQVHGVDEHGKTVLKKQLKRDQMMPFFANLPHCRIGMEAYGSAHFWANKLQELGHTVKLMAPQFVKPYVKTNKNDAADAEVICEAVSRPNMCFVPIKNGGQQAVLALHRARQGFVKARTVQANQIRGLLAEYGIIIPQGIVHIGKRLPEILEDGENGLPGTFRQLIDRLGNHLKELDKQVNELEVQIQTWHRENAASKKLAQIPGLGPIAASSLVASIGDAKNFENGRQLAAWLGLVPRRNSSGGKPTLLGISKRGDTYLRTLLIHGARAVIRVAERKAAHAGSWLAGVMERRNKNVAAVALANKNARIVWALLVHGRDYQVDYGSAAA

SEQ ID NO: 208217 - protein, 316 aa, unidentified
MSHSIFVGIDVSQDWLDVWLHPINKHFQVDNSPRGVQQLVQALAGYEVAKIVLEATGGLEYLAAKQLQAAGLTTAVVNPAYIAAFRSMRGKYLKTDARDAETIALFAQKMDPEARPVATDQEQALKELTARRLQLLVMVGSERNRLRRTASPVMKRSIKKVLAVLEAEKAEVERLLIEAIGRDEHHRENYRLLTSIPAIGPAIAVSLLTGLPELGRLNKKEIAALVGVSPNNRESGKSVGKAITRGGRRCVRASLYMGALVAIRHNPPLRAFYQRLVANGKPKKVAIMACMRKLLIIANQIVKDQRPWQASYAMSS

SEQ ID NO: 208218 - protein, 445 aa, unidentified
MHYKRLLALIDSVSSYLSVGLDVGADFTWMSIALPNGSFIGKPFKIVHSDPGARDLAVAKIKEAQETYSLKSRCFLESTGIYHIPLLCFLRDKGFDCSVINPIITKNSTNINIRKLHNDKFDSKKAALVGLNVSLKTSIIPDDSVVDLRNLIRDYYYFKDLQSAVALKLTAELKVSFPAYAKIFSKVTTQSSLKLLSSYPLAEDMLTAPKDDIVKIIRSTARFGEAYALRKYDAIIAAAQDAAVFGRALPSNAVRIRLYIDTYQEYQKHLDALLKALHETVEKLQDTLIYDQICLLQSLRGIGFLTAAVLIAEMGDFKLFSSPKKLYAYFGLDPAVKQSGKLNGDKVHMSKRGSSLARRVLHMVALNNIKIDKGSGTPVNPVVYNYYTRKCSGKKKPVAMGAVMHKICNIIFAMLRDNKPFEVITPEEHCRRFAAEHPDKIQKAA

SEQ ID NO: 208219 - protein, 314 aa, unidentified
MTDTAGIYVGIDVSKTWLDIAVYASDLCWRVGNEEQGIASLVKRLKEMKATLIVLEATGGYEMPVVAELAHARLPVVVSNPRQVRAFARSTGQLAKTDKLDAKLLAHFAAAIRPAARPLPSEEEEQLTGLLVRRRQLVDMLTMEKNRLHTVRPALREDIREHIAWLQAKLAKLDEEIDQFVRQSSLWKEKDALLRSAPGVGRVTSCTLLAMLPELGTLNRQEIAALVGVAPVNKDSGRKQGKRRVYGGRATVRSVLYMAALAAKRYNPRIKKFYEDLLHRGKEKKVALTACMRKLLVILNAMVKTNQLWRTEPI

SEQ ID NO: 208220 - protein, 425 aa, unidentified
MKSTQNEKISQIKIETLVVGIDIGKETHYARAFDYRGIELAKLLKFSNTAEGFEHLDRWMRDVCEQKEKTEIIVGFEPTGHYWFVLGDHLKRQGHKLAIVNPFHVKRTKELDDNSPTKNDRKDPKTIAMLVKDGRYREVYIPEDLYQELREVVSERERLQERLTAVHNRVVRWLDIRFPEFESVFKDWRRSAALITLRSFPTPEKIIETGAAKIVETWRKEMKRTGFKRAEALVKAASKSVGRTSGKVASEASLQNLLAEYELYREQYEALEQLMQELLMQVPNAEKLLAIKGIGLVTAATFVGEVGDISRFQDPRQIQKLAGFNLVENSSGKHKGKTTISRRGRRRLRHSLFFAMIAILGKNTEFRSLHLRNLTREKNPLNKMQSIIALCGKLIRVFFALLSKGVDYSPEKMLCDIQLPMQEAA

SEQ ID NO: 208221 - protein, 426 aa, unidentified
MVDDEYRIYVGIDWATEAHQACVLDYTGRVLAERSFAHTGEAVAAFAQWLHGVAGGDPGQAAIAIEVPRGAVVETLVEHGFHLYAINPKQLDRFRDRHSVAGAKDDRRDAFVLSDSLRTDRARFRRIRLDHPLVIQLRELSRVEEDLAREVNRLTNRLREQLHRFYVQALKLCPSADEPWLWALLERAPSPAAGSRLQRKTIERLLRQHRIRRLNPQDVLAALRAPALWVAPGVVEAATEHIGLLLPRLRLVHTQRQRCGARLDALLEKLAAVEGDEGQQRERRDVEILRSLPGVGRVVAATVLAEASGPLAERDYHALRTHAGIAPVTKQSGKRRTVVMRHACNGRLRYALYHWARVAVTCDPASKTYYAALRQRGHSYARALRSVADRLLRILVAMLKSESLFDSTHPRRSPHPAAAPETPCAA

SEQ ID NO: 208222 - protein, 376 aa, unidentified
MAQTDVQYPTIHLAIELSRSAWLVAARLPGVEKPSLHRIEGGDTAALLALAAALRARAAARLGTPVRVACCFEAGRDGFWLHRLLTAEGVAAYVLEPTSILVNRRARRAKTDRLDALGMLRVLAAYLGGDRQACSMVRVPTPEEEDAKRPHREREELVRERVRLENRIAALLATQGVRERPSLRSWERDLAALRTGDGRPLPPHLRAELDRLRRRLVLTLGLIRELEAERDAALAAGPRDAAGRKIAALCRLRGVGANFAAVLTREVFYRAFDNRRQLAGYVGLAPVPHQSGEADRDRRISRAGNARARTTLIQLAWLWLRYQPDSAPARWFRDRVGALRGRTRRIAIVAMARKLLIVLWRYAETGLVPEGVEVAA

SEQ ID NO: 208223 - protein, 360 aa, unidentified
MIILAIDLGKFNSMCCFYDTKTQKYRFQTVAMSRMYLTTVFEKHEIDLVVMEACGPSGWISDLCQELGLKTFVCSTNDAAWEWKNVKRKTDKDDALKLARLAMMRQLTRVHMPQHQVREHRSLIKYRKKLVGRITAIKNAIRGLFLCHGIEIAKGLPAWYSGRDLINSYRKPLAECSAEELWRGQLDFELTLLDSLRKQITDVETRLDMLAANHKGIQRLRTIPGLGPRTAEVIVTALDDVHRFKNGRQVSSYIGLVPRQYQSGETDRNGRITKRGSRILRTILLECAWVSLQYNDWSRATYDRIQGGQKTRKKKAAIALARKIAVVSWAMLKNETDWDPEKAKLNIKPTVEECLAGSTA

SEQ ID NO: 208224 - protein, 334 aa, unidentified
MVYAAIDIHKRVFQAAVLDTDGDELTDARFPATREGLVDWAMTVRGRASAVAIEATTGWRWVWRELSALGFDVRLVDPGELKARRGHSRRAKTDRLDARWLVLLLAKEMLPESWLPPAEIQELRDKTRLRKALAEDRTRWAQRLQAFLLHEGWPCGRGKLLTAQGRRWVEGLVLAPAARAQVETLLRLIDLLEDEQREVERELRRFARADRRCQALETIYGIGPILACHILAELGEAQRFRRARSAVRAAGLDPVVAESGETKRRGHLAKHGSPELRWALVQAAQQARYPRSPDRPLYASIKARRKASQPAVLTIARKIARRSYHVLNAIEQAA

SEQ ID NO: 208225 - protein, 403 aa, unidentified
MAAVMIGVDPHKGSHTAVVISPAEEPLGELRVRASAGQAGKLIGWAAAWPERTWAVEGAAGLGRLLAQQLVAAGERVLDVQPKLASRVRLLQAGDTNKNDPSDALSVAVAALRSTVCREVIADDYRVVLKVRAERHRDLARTRNQVACRLHSVLCDLVPGGHQKEISAAHAARILAQATPSGAVALARAELAAEFLADLRHLDGQLRDTRKKLAAAVRASGTTLTQVFGVGPVIAGTVIGDVGDVARFPGRDHFASYNGTAPVEVSSGNRKIHRLSLRGNRRINHAIHMAAITQLRHKHSEGRAYYDKKVAEGKTHKEALRSLKRKVSDAIFARLQADARQAREKGPGGQPGNGSDSSAASSHPERQLFGPATPGPDTTIRPGTTAGTPSPSKPALKKTRPAT

SEQ ID NO: 208226 - protein, 371 aa, unidentified
MMNTIICGMDAHDNTLTNRIGVNTEAPETMTVKNTLDGRQKLFHYLKDLAQKKDGARIIVAYEASPLGFGIYDDCVEAGIECHILAPTKMPKAPKDRKKKYDERDAHRIFELLRAHVLAGNDLPDIWIPDHQTRDDREMVRSRLDEGKKLTALKTQVQMLLKRNKAVKPNDVGNSWSKTHRRWLEELELKKGARIALSSLLRQIANLEEESKIMDKEIESLSETDRYRLAAVALVVQIKGVGLLTAMVYLTEVGDMRRFNNRKEIGSYLGLVPSSNESGEGSDRKGHITREGPARVRKVLCQAVWARVAHDEEEARVYQRIVKKNPKHKKIAVVASMRRLGVLMWHIAWDAQVKAGVFKDEYMKVASFQTA

SEQ ID NO: 208227 - protein, 339 aa, unidentified
MTHLPVGIDIAKSVFQVHYVDEATGEIVNRPLKRAQLLVHFANRAPCVIGMEACGGAHHWARQLMSLGHQVRLLPAEYVKAFNIRNKNDAADARAIWLAVQQPSKAVAVKSETQQAMLALHRLRQQLVKYRTMQMNGLRGLLAEYGEVMARGRASLDKGMPAILARVSQRLPAFLVDTLREQWNGLAKVDEQIEAIERRIREWVKSDAAVAAIIAIPGVGLLTATAAVATMGSAKTFRSGREFAAWAGLVPRQKGTGGKVDLSGISKRGDTYLRTLLVHGARSVVMRSKDSRPWVEELRLRRPLNVVIVAMANKIARTIWAVLAHQQPYDKNHVSAKPA

SEQ ID NO: 208228 - protein, 356 aa, unidentified
MQTQVTKKIDFSGKELFIGLDVHKKSWSVTILVEGMEHRTFTQPPDPRALYNYLQRMFPGGNYYSAYEAGFCGYRIHRELNDLGIKNIVINAADIPTSQKDQLQKRDPVDSRKIARALEKGMLRAIHIFDRDMEELRSLNRTRFYLMRDLRRSKNRIKSFLQYYGESIPPEFDNNQWTLKFLSWLKQVKMQTMSGHDAFSNLIRSYEYHREQLLTLSRQIRQRIREYDNELYSLLKSISGIGPLTSSALITELGDINRFPHIDHLSSFVGLIPRVRESGETIHTGGITFRCNTFLRTMLIEASWQAIRQDPALMQYYNEHLINNKGHKVIIKVARKLLNRIRYVMKNREPYLIGVA

SEQ ID NO: 208229 - protein, 318 aa, unidentified
MSDLTFIGIDVSSQTLEIASSRERATWQVSNDGEGIERLVKELPSLAPELIVLEATGGYEFEAACALQASGLMVAVVNPRAARDFARAMGALAKTDAIDARMLAAFARVLHQHPERDRFIKPLADAELQQLQALVLRRRQLVQMLTSERQRWRLAHAVAKPSLERHIEFLKSELGDSDGEVAAHVEKHHAQLAKALASVPGIGMASVVVLLAELPELGTLDRRRIAALVGVAPLNRDSGQMRGQRSIWGGRADVRRTLYMATLTAVRHNPPIKAFYDKLVAAGKRKKVALVAAMRKLLGMLNAIAKHGSTWDPSLHSA

SEQ ID NO: 208230 - protein, 331 aa, unidentified
MEEVKRFVGIDVAKAALDVFIGSAGGAFSVANDEVGIRELLRQLEPADFVILEATGGLETPVASALAAAGIAVAIVNPRQVRDFARATGKLAKTDRLDAAALARFGEAVRPEARPLADEQAQALGALVTRRRQLVEMLTAEKNRRARAPKVLHRSIDEHIRWLEKRLTGFDDELGELIRNTPLWRERDEVLRSVPGVGKVLSSTLLAQLPELGMLNRKQIAALAGLAPFNRDSGSLRGSRCIWGGRAQVRRVLYMATVAGVRSNPVIKNFYSQLRTRGKYPKSALTACMRKLLVILNAMLHNQTPWQTPPLTPSISPLSLRLSADTQHGCC

SEQ ID NO: 208231 - protein, 405 aa, unidentified
MDITPIHRRVVGLDVHQSKITACALIEQPDGSVAVEQREFGGLKRDRRALAEWVRGFDPEVVVMESTGIYWKSPYAALERVGVVAWVVNARHARNVPGRKTDISDAQWLATLARAGLVRASFIPPAEIRHLRLIARQRQKLGGMLASEKNRLHKVLADAGIRLNVLVSDLHGVSARAMIRALLDDQPIPAILDHAGRLRASREDLFEALQPEELSAKHRFVLNEILAHIDYLEATMARFEQQLLDGLAPWEPQLCLLETVPGIDRMGAAMLLVEIGTDMDSFGSAERLASWVGICPGNHETAGKRKSGRTRKGNAWVRRLLCEFAQAASRTRCALKDKFSALSIRKGHKRSIVALAHKMLRIVYAMLVHATPYQDRNIDYEALVVQRNAPRWMKMLAKHGYIATA

SEQ ID NO: 208232 - protein, 453 aa, unidentified
MEHFVGLDVATLKTAVCVVDREGEIVFETEVETDPLIIAEILKPWARTLRGLGHEAGALAPWLHTGLLEAGLPTSCLETRHVRASLGAQRNKTDRNDARGIAQLMRTGWFSAIHMKSRDCYRIRLILVHRRTLKRKFLDIENTIRHSLKVFGIKLGLVSRGKLGDAVMAAVAGDTLLEGLCGAMLAAREALWAQVERLDRLVGELAGGDEVCRRFMGIPGVGPITALTFKTAIETPGRFTKSRDVGAYLGLTPRRWQSGDSDGHNGAISRRGDGEVRTLLYEAAQSMLTRSGTWSTLKAWGMAQAKRSGHKKAVTAMARRLASIMHAMWRDGTVFEFAPGKWAPDWEPSPSNPGKPKRDRSKPQKNDDLSADEKPPKAPRQRPPQGVTPQIIALVQSSKRTLPARHLGKIKAALAALDPKLRDEAIAAASKPMTLKRRGKPPKAGPAITAPPA

SEQ ID NO: 208233 - protein, 343 aa, unidentified
MQTVTTIGFDIAKSVFQVHGIDAAGQVVVRRQLKRRQVIAFFQKLPPCLVGIEACASSHYWSRELHALGHSVRLMPPAYVRPYVKRQKNDMADAEAICEAVTRANMRFVPTKSPEQQSGLMLHRTRHLFMRQQTSVINAIRAHLAEFGIVAPVGRGGVEELLRVVADPNDKRVPEVVRACLAALGSQLLSLKQQILDFDRMIMAWHRSNQTSKRLNCIPGVGPLLATALVASVADPKTFRSGRNFSAWIGLVPKQHSSGGRDKLGSISKQGDRYLRSLFVTGALAVIRYAKIHGAKHRPWLTALLARRPTKVAAIALANKLARMAWAMMATGARYNYPASLRV

SEQ ID NO: 208234 - protein, 345 aa, unidentified
MKIVGCDLHTRYQQIAMLDEETGELVERRLEHGNGEAKEFYTHLAGPVRVGIEATGHTRWFEQLLAELGHELWMGDAARIRAAEVRKQKTDARDAALLLDLLASGRFPRIWRPAREERDLRHLLWHRQKLVWMRNAIGNQLHALAMGEGLCRKKQLFTKKGRCELEALQLDKWAGRQRQELLRLLDQLDASLAQFDQAVNEQAAANGDAVRLMTHPGVGPVTSLAFVLIVGPAARFERSKQLVSYLGLNPCEHSSGGKQKLGAISKQGNPMLRGLLVEAGHTAARMDPELRQDYQRLRLRRGGSVAKVAIARKLAVRMYWMLRRAVNYTQLVRTQGSSRATLVQQ

SEQ ID NO: 208235 - protein, 426 aa, unidentified
MRSVGRAIGLDVHRDFCEVAIAQDGEVRSSGRVDTTPEQLELFGSSLHPWDRVALEVSGSAWEVARILERHVARVVVVSPADTGIRQARAKTDRLDARTLARLLAAGELDGVWSPDERCRVMRRRLSRREQLARARSRAKNEIHAVLVRRLVHRPPVSDLFGVKGRQWLAELDLPLEESETIEACMRHIEFLDSEIAAVERHIAAQALDSAEIRRLMSVPGVNVICAASFMAAVGEIGRFQNPRALTGYLGLDPRVYQSGSAPATGGHISKQGSASTRWALVEAAWSVVRQPGPQHAFYQRVRARRGHGIAVVASARKLACLFWFMLTRGEDYAHQQPSLTAKKLRLLEIRAGARTLKGTPTGTWATRQAMRAGERRLAEQAEASYQQMVRDWQAAAPKKVGASVTPGRASQKPSKGKVTRQTTSP

SEQ ID NO: 208236 - protein, 345 aa, unidentified
MKQYAGIDVSLEYSSVCVVDADGRIVREAKVLSEPDALIAWFGELGVAMERIGLEAGPLSQWLHAGMTKAGLAVELIETRHVRAAFKTMPVKTDKKDARGIAQLMRLGWFRPVHCKSLPAQEVRALLTARKLIQGKLHDIEMSMRGILRGFGLKVGPTTRRTYAARIRGLIEGHPTLEAIAASLLKVRDTLADEFSGFERKLRALARQDDNALRLMTTPGVGVLVALTFVSAVDAPERFQSSRAVGPHFGLTPKKYQSGETDYSGRISKIGDMSVRTALYEAANVILTRPVKGSDLKSWALAVARRAGPRKARVALARKLAVVLHRMLRDGTNFIAHKPMPAKAA

SEQ ID NO: 208237 - protein, 363 aa, unidentified
MKRKVYVGMDVHKETIQIASLTSNTKDLVKEQQIKHEEVQIKKFIQKLKLEKSEIHCCYEAGVTGYPLYRYLKTLGVNCTIVAPGKIPRQSSDKIKTDKRDAIKLARLLRSGELESIHVPSEEDEAVRDYLRSRDSLRLDLGRNRQRLMKFLLRKGIKYSTTKSKYWTTSHYKWLNNLQFENEILQTTFNDYYSRVRVQEENLKAMDKKIQEIAESEPYREKVGILRCFRGLTAMFLLSEVNDFKRFKTAGSFMSFLGLVPGEYSSGSKRKQTGITKTGSPRLRRILTEAAWQHRFSGTGSKVVVARRVGQSALVVSLAEKASLRLHKKFKNLQLRGKSPQVMITAVSRELSGFLWAAMNLVV

SEQ ID NO: 208238 - protein, 457 aa, unidentified
MARVKRSRRRRDMSPIHPHAAAIDVGARMHVAAVGPGRDAEPVRTFGTFTSDLHRLADWFARCGIRTVAMESTGVYWIPIYEILEQRGFEVLLVNARDAKHVPGRKTDVSDAEWLQRLHEYGLLRGSFRPQGEIAALRAYLRQRERLLDYAAAHIQHMQKALTQMNLQIHQVVSDITGVTGMRIIRAMVAGERDPDTLASYRDRRCHASVEAVRQALVGNDREEHVFALAQALELYDVYQAKVAACDKRIEALLKRLKESSAKPAEPLPAARHKTRQPNAPAFDVREALYAVLGVDLTQIHGLGPYLALKLVGECGTDLSAWPSAKHFTSWLCLAPSNKISGGKVLSSRTRRSSNRAAALLRLAAVTVGRTETALGAFYRRLSARVGKAKAVTATARKIAVLFYNALRHGMDYADPGASFYEERYRRRVLSNLRRRAKSLGYVLQQTDPMPATTTVS

SEQ ID NO: 208239 - protein, 377 aa, unidentified
MERLKFVGLDVHAETIAVAVAEQGGEVRALGIIPNREESIRKLVRKLGPVEQLRFCYEAGPTGYALYWQLTRMGAKCEVVAPTLVPVKAGDRVKTDRRDALKLARNYRAGELTPVWVPDAAHEALRDLVRAREAAKKDELRARHRLNKFLLRHGRRPPMGVKAWTMKYLEWIKREVHFEQMAQEATLLDYLHEVEHAGARIMRLDGAIEEAVKCVPPKMRAVIEALQALRGIARVASVTIVAELGELSRFARAKQLMGYGGIVASEHSSGECTRRGGITKTGNAHLRRVVVEAAWTYRHRPAVGTSLRKRQEKVSEEVKEIAWKAQQRLHQRYRKLLAKGKNKGIVVTAVGRELLGFIWAIGIKIEATQKESLQQAA

SEQ ID NO: 208240 - protein, 355 aa, unidentified
MDQKKYIGLDVHQASISVAVRNAAGKLISESIIETKAASILEFIRGIRGSVWITFEEGTSAAWLYDLLKPHVTKVLVCNPRKNALLKAGNKNDRVDAQKLSDLLRAGLLTPVYHGENGVRMLRELGRSYLTVTKDLTRVMNRVKALYRSWAIPCAGDKVYSPRRRNAWLEKLSEAGVRRRAEQLYQQLDALSKIRRGVRAELLAESQKHPAHPLLRQIPLLGPIRVALLIGLMQTPHRFRTKRQLWAYCGLALQTRASGEYRFSGGELQASKKAPALRGLNVNHNHDLKNLFKSAAMHLSTSTGPLGDFYRNLLAKGMKPSMARLTLARKIAAIVLAIWKKGAGFHPEELKQQAA

SEQ ID NO: 208241 - protein, 412 aa, unidentified
MTNPLLVGVDVHRKTNTVCLMDGQGREVAPRFTVDNNLPGTETFVQKVAQQVIAGDFDALHIAAEATGWYWWHFFQTLERDPFLNRWPLELYSLNPRLTANFKRTYTDQDKTDPLDAFVIADRLRLGRDLPPPFHYDERFFPLRLLTRYRFHLVHNLAREKAYCLTILYLKASEYTRIRPFSNVFGAASRAVLQEFTSLEEIAAIPFEELVEFIDRKGKHRFPDPTQNARKLRQVIRDSYPLPEALQQPVHLILGMSLQHITFLERQEKRLRTAIAQQLAPIPHTLDTIPGFGPVFSAGIIAEIGGIERFDYNQAKVAKYAGLKWRKHRSADFEAEETRLSRTGNRYLRYYFCEAANRVRMCDPEYAAYYDRKFHEVRKHQHKRSLVLTARKLVRLVVRLLTTNQPYRPRRR

SEQ ID NO: 208242 - protein, 391 aa, unidentified
MSLYFVGIDISKYKHDCCVMSAATQTVVTKFTIKNDKSGFEHLITTLLSLSTPEDIRIGFESTAHYALNLELFLENAHHSFMEINPVLIKEYKKSTSLRRTKTDSVDCESIARWLMTVEYKPHSKGFYHAYSLKSLTRLRDRLVRQRSFYLVKITNVLDHTFPEFKPFFHERLSKTALFLLENYGSAEKMARMNSASYEKLRSLSRGKFSPQQFLRLKELAANTVGVNNSIFDVELNSLLALYKSLVKEIDTLEAEINRLIEEVHPHYMSVPGIGPISAAVIYSEYGDISNFSTPAQMLAFAGIEPGINDSGTESHGGRMVKRGSSQLRYVLINCCLPLIRFDMTFAAYYAKKRAEGKPHRVAITHVAKKLVRVIYALERQGTDFNTQKIR

SEQ ID NO: 208243 - protein, 345 aa, unidentified
MPIVGGMDIHRKQITFDYLDLATGEVQCGQIAPADRRHLRAWLQRFAGVPDVVFAFEACTGWRYVAAELAAAGVQVHLAEPADTAAARGRKKRAKTDRADSRLMRELLLQGRLPECWIPPEQVLECRALLETYHALRREHTAWVQRAHAVLFHQGAAHLGQGGIGTAEGRKLLDRICGEQLSPAGRQQIGLYLRMLEVTEAELDALRAQLAGTARRLRGAKALQDKLYGVGPITGLALTCWLGGAGRFSSARKAVRFTGLDITVYSSDGKRSPGHLSRQGPPVLRWCAYEAGKTHARGPAPDHRYYAQVKDRIDGKRAALSEARKIIRQACHLLAELGDDALTAV

SEQ ID NO: 208244 - protein, 423 aa, unidentified
MEVMHERCAGLDVHKKVIVACVRLAIGRKVERECRTFDTTTTGLLALRSWLSASGCTHVAMEATGVYWKPIWNILSDGPFELVVANAAHIKNVPGRKTDMNDAMWIADLVACGLIKASFVPDQPTQELRSLLRTRKQMTREQTSHVQRLQKTLEEANIKLDSVISDIVGVSGRCMIEALIAGETNPVRLADLADRRIRAPRQALREALHGRVTNHHRFLLQLHLGQYDALAAAIAEIDHQVGVLIERLDERVEGGQATFRALIRLLCSIPGVSTLAAVVILSEIGRDMSRFPTAGHLLAWAGLCPSQNESAGKRRSSRLRKGAPWLKTLLIQCAWAASRKQDSYYKAQLNRLKSRRGPKTAICAVAASMLTAIYHMLKDGTEHRDLGTNHFDRRSVDTKAKRLVNQLTKLGFQVRLEPLTQAA

SEQ ID NO: 208245 - protein, 411 aa, unidentified
MKEKACGLDLHKKFILAAIIDLGGATVEHRFSRTQTDLFALRGWVLFHDCEVVACESTSDYWIQVYDLFVGKIPVLIGNARDIKVISHKKTDTIDAVWIAKLALHDLIPASRIPDPETRDLRSLVRLRKFLVEKRTDLKNQVHHILDSCLFRLSTVFSDIFGKSGMLILTGVTEGKAVEEILATLPVRTRKRSEEIRSTLETTLPELALIRMQCCLNLIMELDTQIETLMQRVHQCVARQTRLLQILMSVPGIGYIAAVTLIAEIGNFTNFSSGDKLASWVGLVPTVNQSADHLRMGAITKRGSRTARWILVEIAQAAVRTRSSRFHAFFTRKVGVIGFSKAIVAVARKIVTILWHLVVNDEEYEEPEGNRKQEVRIPKAKQPKFLTLNEMLKVLAEANIFLKQSDPHGGG

SEQ ID NO: 208246 - protein, 341 aa, unidentified
MKIIGCDFHPSYQQFAMVDTETGELREGRLEHEQGEARRFYQALQGQTVRVGIEAVGNSQWFEQMLAEMGHELWIGDAAQIRRLVVRQQKTDRRDAQHILDLLLDGRFPRLWVPSQQIRDVRQLLRHRQKLVELRTQVKNQLQHLALNQGVRRKRRLWSVQGRAVLEQLPMQGWTARRRSDLLAMLDRLDEQIGELDRAVRAEAEQRPEVRLLMTHPGVGPVVGLAYVLTLGPTTRFPRGKQVASYLGLIPKERSSGGRQSFGPISKQGNTMMRTLLVEAAQTAVRFDEELRRGYGRLKAKKHSAPAKVMVARKLAVRMYWMLRENKSYAQLYAQRPVARM

SEQ ID NO: 208247 - protein, 425 aa, unidentified
MKSRLINAQNQRVERISTSTLVIGIDIAKEKHAAQAINFRGIVLTNRPIMFSNDIGGFEHFERSVQKLQKMHGMNDVVVGMESTGHYWFNIANWLMKRGIDVVLVNPMTTKRNKENRDNSPSKNDPKDALVIADAVSRGFYTLFSPKEDAFRRIRVIVTNREHWVVESGRIENRIHRWLDIRFPEYRKAFDDIFSIRSLATLRRFPAPSDLLQLAPEQMVEIWGEYMARPGGLRGKNKAIELQELARHSVGDSVALEEDKWELRHLLDEYERVRQIIDEADDMIEKLLPEVPCSDLVRSVGISLPATAAILAFGGDLSQLSHGNQLLRKAGLNLAERSSGKYKGKIKLTKRGNSLLRKHLYFTVFHLLSHNYTFQALHAHNVEVKRMTKMQSMMKLIGKLARMLVAMAKEGQKFSEDKAQLPLVA

SEQ ID NO: 208248 - protein, 342 aa, unidentified
MNHIAIDLGGMKSQVCVRGPDGELKLEGKRDTRDLDLFLQKQPKSRVIVESSAEAFKVADAALAAGHEVRVVPSTLSKVLGVGARRTKTDERDARALSEMSCRMEVLPAVHIPSARTRELRSTCTAREALVSARTQLVNSVRGYCRTQLVRLPAGRTETFPQRVRKMLGMRKEGVPSIMERLLLAIEALNTQIAAADEELEQIAQQDATCRRLMTMPGVGPVTAVRYMAAADKIDRFEDAHKMEAYLGLTPGENSSSERQQRTGITKAGPARVRWTLVQAAWCLWRTRPQDRNVLWAVGVAQRRGNRVAIVALARKLAGILFAMWRDGTDYDSHHTPMTRQA

SEQ ID NO: 208249 - protein, 343 aa, unidentified
MPCSLTCIGVDASTEHLDTHGLPGQSHRRFPNTLETHTALAALLSGHIGDGQDVLVVLEASGGCERGLHRALVEAGVPAAIVNPQQVREFARSQGLRAKTDRVDAQAIRRFGEVSRPRPTPLPEPARAELIELLGYRDQIVAEITARTLQRGHLRSAFLLRRADAALEKLRQESETLARLIEATVAADPELSRRAAVLTSFKGVGPLVAADLVAHMPELGTLNGRQAASLAGLAPFARESGKMRGVREIAGGRPKVRRALFHVARVGLRWNPALKALYERLTARGKPGKVALVACMRKAVVILNAMLKSGQPWDPDYEAKKAAKAARHQSGPAEGVAEGAAAA

SEQ ID NO: 208250 - protein, 342 aa, unidentified
MSVYVGIDVHRKRSQVAVIDAKGEVLANRNVPNGAEPILKVIGGLPPGTPAAFEAAYGTSWLVELLEDYGFGPHLVHPSRCKAIASARLKNDKVDAAILGQLLRADLLPEAWIAPPAIRQLRALLRHRVHLVRLRTRLRNRIHAIVADYGYDRPAGGYWTGPGRAWLAALELSAVSRELVEDYLGLIDALQDRIDRLDWEIRQRARSDPRVKVLTQLPGVGPFTALVILAEAGDISRFASARKLASWAGLTPTVRGSDRVAHYGHISKEGSAWLRWVLCEAAQTAKRSPEFAPAFQRIAKRRGKKIATTAVARKLATRAWHLLTDAEHAAAPPPAAPPAAAR

SEQ ID NO: 208251 - protein, 391 aa, unidentified
MFLLGIDIAKLNHVASCIDSSTNEVIFSNFKFKNDFKGFSALLNKIKSFDAKNLIIGLESTSHYGENLINFLFRHDFKVALINPLQTSHLRKANIRDAKNDNLDSLNIAKSLLFTKLNFVSEKNIECFSLKKLTRFRSNLIKQRSKAKIQLTSLLDLLFPELQYLFKSKIHNKAIYSLLKKYPSTEEIAALKDDEISNLLYASSKGHFKREKSIELKSLAKTTVGIKDTSISLHLIQLIELIELYTKQIKDIEIKITDTVNKLDTTLLSVPGISIIACAIILGETSNFENFSSSKKLLAFAGLDPKIRQSGNFNASSCRMSKKGSPYLRYVLIFTAWNIVRHSEKFNKYYSLKRSQGKSHYNALGHVAHKLVRILFTLIKKNISYQEEKLE

SEQ ID NO: 208252 - protein, 339 aa, unidentified
MKPMPVGVDIAKSVIQVHYVDKETGEVVNKAIKRAKFLEFFANRTACLVGMEASGGAHHWARRLISMGHQVKLMPGEFVKAFNIRNKNDVADAHAIWRAVQQPSKAVAVKSEMQQAMLALHRMRSQLMKFKLMQTNALRGLLAEYGEVMGAGAASLARAIPEALSRLSERLPAVLIESLREQFNQIDALNQRIDALERRIRELSKNDLAVKAISEISGIGFLTATAAVASMGDAKAFRSAREFAAWAGLAPRQVGSGGKINLHGISKRGDQYLRTLLVNGAHSVLLHAKKPSAWVTQLKERKPINVVAVALANKMARLIWAVLAHEQPYDRDHMRAKPA

SEQ ID NO: 208253 - protein, 373 aa, unidentified
MPRYSTAFGMDVHLRSTTVCALDAETGEAVTRRFRGNPWGEVAEWMSGFPGPSLAAYESGYLGFAPQRELSGLGVDCVVAAVSKVPRSAADLSSKNDRNDAARMAKAILSHDVTPVWVPSPEIEGLRDLAAAHDAATARLAAAKQRLLAFLARRGYVYGGTTPAGNPRKYWTYGFLRWLDGIHPADDGGIRALAALRNEVEAADETRGALLAEYRAAVAAGPLSAEVEALQSIKGCGFALAAAFASEVGDFSRFRSGRQVTSYFGLAPKQRSSADSVRLGGISGAGNALVRKLAVEGSWCYAQAGHQPKLMPKGSGVPLEIRMHGRKGSERLLRRREEMIARGMPQAKANAATAAELVRWLWALGAMCREGAE

SEQ ID NO: 208254 - protein, 403 aa, unidentified
MNAVSIDVSKDKSMVATLQPGGKLLARPFEVLHTKSGIRELISFVHSLDGDTRIVMEHTGRYYEPMLQWLADSDLFVFAVNPKLIKDFGNNTLRSVKTDKADAKKIARYALDNWCDLPQHTGMDTTRTQLKTMNRQFAFCMRQRTACKNNLIALIDQVYPGANTYFESPARADGSQKWVDYVAAFWHVDYVCSMRLSTFTERYRKWCHRHGYNFQSDKPRMLWEKAKDLIAMLPMDKMTKSLVQTAVAQLNVLSKTVETLRTQMIELAEKLPEYPVVIAMNGVGATLASQLIAEIGDITRFPRRGSLTAFAGVDPGAKQSGTMQLRSNKTSKAGSPHLRRALFQIVSGLLMRAPDDPVYNFMAKKRSEGKPYYVYMTAGANKFLRIYYGRVNEYLAGLSKEQE

SEQ ID NO: 208255 - protein, 346 aa, unidentified
MNYIGMDCHISTLDFAVVNETGRLVKASSVATSVNNFMEFVKKVPPPRTIYMEEGTLAAWALEVCVCYGEKLVITDPKENHWIGSSGQKGDSIDALKLAQLARGSYIKEIHHPVGQRRRFRELMQAYHDTVRSEVRIKCKIKAKFRQNGIQCIGDTVYAKNHRQEWRDKLPQEATLLLILEGLWLQLEQLEQTEKEILEAARAQAKCYPEIKHFEAIPGIGFINAATISAILETPYRFANKRKVWMYAGLGLMKKSSAGKLYSEKLSTNYNRLLKYTIKQAAEAAIRAEDNPFRRKYLDMTLLHRIAPNLAKLTIARDMLTTMWAMWKKGEKYNPEIRKKAVHKQG

SEQ ID NO: 208256 - protein, 321 aa, unidentified
MQDAQTGSSVFVGIDVAKQSFDVAALPSEQSASFSYDETGLRQLLDWLRPQAVRLIVLEATGGLERRIAGELIDAGHQVAIVNPRQVRDFARGLGKLAKTDRIDALVLARFAQQAQPRIVEKASEKQVELAALVTRRRQLQSAAVAETNRRETASTSQARKSVEKHLNWLRKEVARIDAAIAQLIASDDTWRDQAERLKSVPGVGPATSATLVAELPELGRLNRREISALVGLAPYNHDSGKLRGKRSIWGGRVSVRSSLYMAALSARRCNPIIRAFALRLEQAGKPFKVILTACMRKLLIILNALAKKRQDWSTSLNLPS

SEQ ID NO: 208257 - protein, 362 aa, unidentified
MTKVRSWVGLDVHARSVLAVTIDGESGELRSRRLSGATSEVVEYCSSLPRPTRVAYEAGPTGYGLARALHAAGAGCVVAAPGKIERPAADKVKTDQRDAERVLRLLMIDGLHPVRVPSGQEEALRDVVRAREAVRGDLMRARQRLSKLLLRHDVRYEDTASAWTVAHRGWLTKLDLGERGAQITLLEYLGAIDAIVIRRDALEKIIAELIPGSPWERTVARLRCLRGIDTLSAVGLCAEVGDFERFQKAGQLMSYVGLTPSEDTSGEKRRLGSITKTGSRHARRLLVEAAWHYRRAPAKGQALRRRQDGQPAHIIEISWQAQRRLHNVWQRLDTQRGKRRTIVAVAVARELTGFCWALANAG

SEQ ID NO: 208258 - protein, 424 aa, unidentified
MKVTYQTCCGVDVHKSFLVATIIKTSGGIEPSYQKKRFSTFNNSILEFKHWLLDNNCRDVCMESTGKYWIPVFNLLEDEINVTIANPKWVKAVKGNKDDTKDSKWIGDLFRLGLVRGSYVPCKTIRILREYTRYRYKLVSCRSSEKNRYQNALTVCNVALDSVVSDIFGKSSTSIIDYLLEQSGHSINHEEIASKLLRRLKSKTDAVIESIEGYQMTDAQKYRMRLVRAHMDYITAEITDIDSMIENLISSDPDYENTVQLLCTIPGVKHDSAITIISEIGIDMTQFCTSKRLCCWAGLTPGSNESGGKKKSVRITRAGVYLKPALVQCAHAAAKSDQSPYYKKKYESLVKRRGKKRAIIAIARMILTAIFQMLSTGEAWNPSDLYKIDMPEVLLEKQKQKAIKQAQKLLIREGLLPPLEPLAS

SEQ ID NO: 208259 - protein, 317 aa, unidentified
MKKHSMVCAGIDTGKRKLDVALNGQAERLQVANADAGYRELIGWLRRHRVKRVGIEASGGYEQAVVNRLRRDGFLVIVFQPLQVRAYAQFHLQRAKNDRIDAALIAGCAAEAKKIHAPPDPRLAALAAQQTLIDQIVDQMARFKNYREACRDAPLRQFWNDEIKRFRGLFKRELKQLVTAIRRHPDLAERLELIASVDGIAVRTATAILVRLPEIGSVSREQAAALAGVAPYDDESSDRIGERHIAGGRERLRKNIYGAALAASFHWNAELIELYQRLTAAGKDHKVALIACTRKLLVFANAVVARGTPWQPRTAVR

SEQ ID NO: 208260 - protein, 398 aa, unidentified
MSRIWAGIDSGKGHHHGLALDADGKTLLTRRVANDEPELLKLIGDVLDLADGREVTWAIDMTGGEPALLLALLVNHGQEVLYIPGRLVNRASDGYRGEGKTDARDAYVIADQARMRRDLRPIRPGDEAAIELKLLTGRRSDLVEDRTRSVNRLRSTLMSMFPALERALDVTNTGPLRLLTGYQTPAAIRRTGVARLTKWLANRKVRNARALAEVAVEAAERQHTAVPGEKTTARLVHTLAGEVMALNEQIAEMDKLIEGRFREHELADIVLSVPGIGATLGAEFLAAVGGSLDDFDSPDALAAFVGVAPAPRDSGKVSGNLHRPVTYHRRLQRVFYTSALVSVRYDPNSRKFYDRKRAEGKKHVQAVLALARRRVNVIWALIRDRRRYEVTPPVIATT

SEQ ID NO: 208261 - protein, 372 aa, unidentified
MNPMLKQNTEPDPAPDFAAFLALDWADEKHAFRLQVVGQSKIETGTLEQKPEVLGPWLAKLRERFGGRPIAVGLEQSRGALIHGLMAYDFLVLYPIHPTTVAKYREAFKSSGAKSDPLDAGQILEILTKHQDRLHRLNPDMIETRLLGRLVEDRRKAVNLRTTHIQALGANLKEYYPQALELTNDNLSSRLACDLLIKWPTFEDFQQAKPSTLKRFYYGHNVRSPEVIERVLTLAQKSQALTTDPAIVESGRRLTQMYARLIQALHPAIADYDQRIKQVFNAHPEATLFTDLPGAGPALAPRLLAFFGTDRSRYAAALNVQSFTGIAPVTKSSGKSRVVYARAACPKFDRQTFHEFSRLSVTHCQWARNYVQ

SEQ ID NO: 208262 - protein, 423 aa, unidentified
MRQGPGCQGAPLVPHNTSTSASEVFAGIDWGGSFHQVCLINAHGHVIVQQRVQHDLAGLTELDRLLLVHRNAAGRLRVAIERADGLLVEHLHTIEVEVFCVSPKISARARERYRLAATKSDAFDAFVLADTLRHEHRHWRALSPASPALAELRAISRDRDRVVIAQQATENRLRAVLEAYHPAPLHLFSSLDRDITLDFVTDYPTPEQAARVGEARMQQFCRRHGYSGRTDPTVLVERLRPHLLSAAKGTEAGKAFSASMFTEELRLLNAHLRAYDKRLVELLDQHPDAPIFTSFPGIGPVVAAALISEMGEDRGRFPAPEALLAEAGLSPVTRASGRTRQVRFRYAANRRMRHMIDWWAFVAAREDAWSRRIYDDARARRQGKYRALRGLGSRWTRILWRCWTDHTTYDPAIHHKQQEPAQA

SEQ ID NO: 208263 - protein, 308 aa, unidentified
MIMQNYVGCDISKQWLDFFDEASGRFRRIDNQADAIAAYVAGLDPSRDFVVMEATGVHDRLLRHALAKAGVPFSRHNPAHTHHYAKSTRRRAKTDPLDARMLSDYGRRYHPEAEPAPSEEVERLQSLAGHRDHLVNMRATAKKHLAEAFNEIVIADLEETIAHFDTRIKALESLIAEVIRQNQGTARDHALMVSVPGVSKVGALSLLALLPELGQRSPKAIAALVGLAPFDNKSGKLTRRSQIQGGRSRVRRALYMAALTAIRTCDRFKSFYTALAARSGSKKLAIIAVARKLLVVLNAIIRDKTAFA

SEQ ID NO: 208264 - protein, 338 aa, unidentified
MDILRQNVGIDVAKKSFVAAFTILGKDQTVACKRTKLFSNSPVGFQELMIWVKKHMVKDFQISYTMEATGVYYELLAYFLWEQGVRVHVILPNKAKKFAESLDAKSKTDNLDAKALGQMGVERNLKDWTLTSKIYRKLKTLTREKEELIKERTRLKNQLHAEQHSGDPIRSYLTRHENHVKYINKQIRAVEKEIKTLVIGDEFISKKIEKVTTIPGIGFITAVTVAAETNGFVNIQNIKQLTSYAGYDVRLRESGRWKGKTAISKQGNSHIRHALYMPSISSVQHSLTYKRVYERLNMQKHNGIISGTAIQRKLLGLIYTLWKNDSEYIENYESKIAS

SEQ ID NO: 208265 - protein, 353 aa, unidentified
MDILGGFDVNRKQITFNYIEMVSGEVHRGKICPATRQSLREWLDEFTQRFSGKQIAIAVEATTGWRYVVEEIKRAGIEPHLAEPAETKSLQGRKKRAKTDRLDAGHLRDLMVIDRLPESWIPPDHIQEIRTLMRFRHSLIEERTTHMQRIHAQLFHNGYPQINNLDSIEGRAHLEDMELPAAARKVVDLSLAMFEHINEELAPIEKELRAYARSQAGCKALMTHYGVGELASVALLSELGDARRFSSSKKAVRYAGMDITVHSSDDKWAGKLSRQGPPTLRWAAFEVAKRAWRKSSPDHEYYLRTKERIGANRAALSIARKLIRRAHHTLRELGEEAISEPVLSSSNSSSSSA

SEQ ID NO: 208266 - protein, 348 aa, unidentified
MRTNFNQREAEMKYSGIDLHSNNCVVTVTDEGDRVVAEKRLPNDLGKILGLLVPWQGELAGVVVESTFNWYWLVDGLQAAGFKVHLANTTAIKKYDGLKHSGDEADARYLAHLLRLGILPTGTILPPEQRAVRDLARKRMQLVRSRTMHILAVENITARQSGAPITSNRVKQLTAEIVDQMSLPKDVALAIKANVAVIRTLSAQIDLLEKRLQEDIRARAEYALLTTVPGIGQVLATTILLETGPIERFAAAGNFASYARCVDSVRTSNGKKKGEGNTKNGNKYLAWAFVEAAHFALRYCAEAKRFYERKKAKTNNVVAIKALAHKLARACFHILKERKPFDGARCFA

SEQ ID NO: 208267 - protein, 456 aa, unidentified
MARRLVGIDLGIASSHTVRVLDETGQQVCRRRCEPTVASLTRIEDAASVGAPPGTVLEVVLEPTGPAWLPVAVFFASRGHRVFRVSSAKSADLRRFLSKHAKSNSIDAETLARLPLFSPGGLLPLELADAEHAALDRRVRACDRLTRAASEHKTRIKDLVRQLLPMTPLVEDIGVADLAVLERWADPRTLLRIGPSKLKSLIVKASHNHHGAERAEQWRNAAAAAVELYGEHPAVAWQDLAAEVATEVRLLKAIQAELAVHSARREQAYRWADHGQLARSLPGIAKVGGPVIAAAIGRAERFPTGAQFKSYAGLAPRASETGNTDRKGQPMSKAGSSLLRTTFFRAADTARKQDPQLAKIYYTQMVERGANHVKALCVVAAHLAERAWAVMARGMPYVICDINGEAVTAQQAKTIIAEHWTVPPQVRARRRSTKTAKVGKAPQRVHTGPAKPNRRP

SEQ ID NO: 208268 - protein, 429 aa, unidentified
MNDSQNQRISQITDSTLIVGVDIAKHNHVARAQDDRGLMYGKAFSFRSTRQGFQAFCRWIESLKAEYQKTKVFVGMEPTGHYWMTLAAFLRNRQVSVVVVNPMHVKKSKELDDNSPTKNDPKDARVIAQLVKDGRYSVPYLPIGDYAELREAVKIRDHISCEIQRIQAKVHNWLDRYFPEFLQVFTSWEGKAALETLNHFPLPQDIIEAGATQILTTWQKKIKRGLRPKRAMELVEQAKHSVGLCEGINMARLELQTLLATYELKQQQLEQVMKEIEDVLTNIPGVEYILTIPGMGIATLAGFFAEVGDLSRYQHPRQIQKLAGLNLKENRSGKHQGKIRISKRGRPKLRALLYKVIRPLVAKNSVFKALHMYYTTRQQNPLCKQQSLVALCCRLLRIIFVLARKQVAYDMEKMMKDTPLCNRVQHLVE

SEQ ID NO: 208269 - protein, 394 aa, unidentified
MKLIGIDIGKNKHFFCVMDQQTGEIISQPVSFSNDKEGFDFLVKKIKSYPKDSILIGMEDTGHYHFALLKYLLDLQYTVALINPKTTDFNRKMQGGITKNDKLDTINICDVLDTPERKKQYRITKVNSFDLYEQKQLTRHHHNLKEEENVYKNRLQKCIDIVFPEFNKLFNSKYGIVYMNILKMFGSAENIANTDIRTIRKCFEIEGRGNRISLTPERLKVCARSSIGISSSAEVIQIKHLTAQIELIEEQLTEIDKKIEEFSIQNNSPILSIPRISHFSGTSILAELGDISNYSKPSQIIKFAGVAPLHYESSQFNAQHTAITKKGSKYLRKTLYQIILPVIRHNPVFNKYYQLKISQGKGHRCAQGHCVRKLLRIIYHLLKTNQQFDPQLLR

SEQ ID NO: 208270 - protein, 408 aa, unidentified
MKTLHKRCAGIDVHKTEVVACLRVITHRKVEREVRRFPTTTHGLLELAEWLESARCTHVAMEATGVYWKPIWHILDGRFALILANAAHVKTVPGRKSDVNDATWLADLLAHGLIRPSFVPPAAIQDLRDLTRTRKQLTREIAQHSQRIQAVLEEANVKLCSVITDILGASGRRMLKAMIAGEIHAHKLAALGSERLGCAPETLIDALTGHMREHHRFLLAQHLQTIEQLEKTIAAFDTRIEEKLMPFRDTVERLKEVPGLGSTATEVILAEIGLDMSLFPSAGHLLSWAGFVPRLDESAGKSRSTRIRKGAPWLKPVLVQAAWGATRKKNSYFQAQFLRLKARHGAKKAAIAVAASILTTVYHMLRDGTCYQDLGPEYFTRRNPAKAAARLANRIRNLGYHVEIRPAA

SEQ ID NO: 208271 - protein, 375 aa, unidentified
MVHPANFIYAGMDIHRETHSVCVLDCFGQPLWENTINNEQKDFVKLHQKVEKIAKGKNLNVVFGLEDTSGSGLLLAHYLAKQGCYIKTINPVLADRLRRKTTHPEKSDTLDAKGVAKVLIREGIDTLPDYKISQSSQLAKELRELNNDRNYLVSEQTRIKNQLHALLSLTYGKEYKVLFKNPFSQKALRYFIENPLSKQIIKNGFPYSIEVAGNRIRRKANRLFALISEIKEVEKEQADVVAKTDQQIETLPGCGLVTAAAVLAEVKDINRFDSSAALAKYAGLSPRQKSSGKSFHHQKTYSGNRRLNAAFHRIALSQIGRRGSDTAKEYYLRKVSEGKTKKQAITCLKRKLCDIVYLMLKKQEAYNYPSKKLLT

SEQ ID NO: 208272 - protein, 346 aa, unidentified
MMIIGCDFHPSWQQVNWVDSETGETGEQKLVHAGGQAKAFYQQLRAPALIGMEATGNSQWFIELVQELGHVILIGDAAQIRASYVRKQKTDKRDAAHMLKLLLENRFPTLWTPDAEQRDLRQLVLHRHKLVEIRSRVKNELQHLSLNKGMQKKRTLWSQAGQKMLRELPLKPWAACRREDLLGLLGMLNQQVGTLDVAVLKAAEENPQAKLLMTQPGVGPNTALAFVLTIGDVSRFPRGKQVASYLGLIPREESSGGRQKLGAISKQGNRMLRSLLVEAAQIAVRFDPGYRKQYLHRCHQKPKGVAKVAAARKLAVRLYWMLRTNVAYPEIVRIESSPRVPLVGAS

SEQ ID NO: 208273 - protein, 360 aa, unidentified
MSAATAHAPEISTGHDVVVGIDTHKLTHMAVALGANGGWLGSLKLDAKRSGYQELIRWAAAFGSNPVFAVEGTGCYGAGLCRALQAAGMAVVEVNRPDRSTRRRIGKDDTIDAEAAARACIAGTASVIPKAGDALVEMIRMLKVAKDSATANRTAALNQLHAIVVTAPAALRERLQRLKRKELLESCTGLRSGEITTPQAAAKMTLRILARRIQQLDEELKETVTQLDRLTMQLCPELRNTYGVGVDISATLVVAVGDNQERMKSEASFAALCGVNPLPASSGKVVRHRLNRSGNRQANCALHRIVICRLQRHQQTREYVERRTAEGRSMKEIIRCLKRFVAREVFGILRGGPAVRTATA

SEQ ID NO: 208274 - protein, 420 aa, unidentified
MSKNLFCGCDVAVSTFTNWLLLDDGTEPVKSFTLDNNQLGAQTLVEKLGSLAKEHCVSNILVATEATSMYDWHLLEFLSESKLASQFNLKLYRFNPKWIRNFKKSLTPKGKTDPVDSFAIAERLRLGRLPREYTPDFQYQPLRRLTRFRYHLMQSMAREKNFFLSNLFLKASSYSSVKPFTSNFSATSLATIEEFFSVDELANTSVDDLLEFVKKQGKDHFADAKDVVAKLKKVSRESYRLRPELKPVVNLVLASCLNNIRCYKETIKRVDDAIKEQLKAFRTTLDSVPGLGPVYCAGLIAEIGDIRRFDSQAALAQFAGLTWPRYQSGKFEAEESYLAKTGNEYLRYYLVEAADSVRRHNAIYSEFYQKKYAEATKHHHKRALVLTARKLVRLVYALLSRQELYQPEKCSLDNFSKIGS

SEQ ID NO: 208275 - protein, 344 aa, unidentified
MEQIIRIGMDTSKNVFQLQGVNAVEQPILRKTFSRKEMVNFFEKTARTTIALEACGGSHHWARLLSCLGHEVKLIAPQLTKPYVKRGKNDAADAEALCEAMSRPTMRFVPVKTADQQAALMLAGMRERLIRNRTQLANAIRGFGMEFGIVAASGMCRIEPLLERIAGDQSLPDLARELFAVHGDEYRGLLSEIKRIEEKLMDLHRADECSRRLAEIPGVGPVGASLLMMKTPDPRMFKCGRDWIGLTPKDHSTAGKVRLGGITRAGDEMLRSVLVVGATAVLQHFGAGRSRHASRWLTELLQRKKPKLVAVALANKIARIAWKTYGERRNVSANGRTAEGSIGD

SEQ ID NO: 208276 - protein, 338 aa, unidentified
MTLYGGIDLHSNNSVISIIDSQDRLVSERRLPNNLPTIQAHLESYRRELDGLVVESTYNWYWLVDGLLERGYDVRLAHTGAIQQYSGLKYTNDASDARYLAQLLRLGILPEGYIYPPAQRAIRDLFRRRLLLVHQRTMQHHSLQSLIARHSGIRLTALQVKQLKPDDLTAYFRYPASLETARVLHRQMAQLTQAIDLVEKQVARDCQERTDYGLVTSIPGVGAILGKSILLETGPIERFPAVGNYVSYARCTPTARISNNKQKGQGNRKNGNRYLAMAFVEAAHYAAIWDPTIKRYYQRRQRRVHTMVAKKAVANKLARACYHMLKRGERFDVNRAFS

SEQ ID NO: 208277 - protein, 429 aa, unidentified
MEKIRKHAAGVDIGSSKVFVGLESGEVRSFEIFTSDFKLLASYLKENQIQTVAMEATGVYWVVLYDILVENELDVWLVDGRQTKQVPGRKTDVKDCSWIQQLHSHGLLNRCFVAEGLLKELRSYQRLREDHLRSSAMHINHMQKALIEMNLRLPEVLSQVHGKSGMAIIEAILAGERDKEVLLSLCHESIQKNKPEAVLKALEGYYSKAGLFALQQAHQAYHFYQSQIEECDLQIQQVLDQINQGNEQPALSRKAIRHNRPHIENLGGHLLTIFAGKDACVMPGITDYTWLQIYSEAGSDLSRWPTEKHFTSWLGLSPGQHHSGKKRKSVKKGSPKAGQIFRQIAQSLINSKKIAWGAFGRRLKSRKGPAIAIKATARKLAAQYWRLIVKGTSFVEKGVNQYQEQLTKQKYKHLNKLALELGMSIVPNS

SEQ ID NO: 208278 - protein, 494 aa, unidentified
MKAKAGKAKAKHSNSSKRNAKMAARGEPKGMEIVNPHAGGIDCGAEEHYVAVPPQSVEPGQPAVRCFSAFTEGLDASVEWLKACGVTTVAIESTGVYWIALCQKLEAAGIEVFLVNARHVRHVPGRKTDVKDCQWLQRLHSFGLLSASFRPEDGICRLRSLQRHRLNLIWTAGAEIQHMQKALQQMNLHLHHVVSDITGLSGLRIIDAILAGQRDAVQLAKLRDYRVCKSTIAQMEAALVGDYRPEHLFVLGQSLQAYRFYQARIQECDVQIESHLQQLAQRYESSSALAAKLPEPEVLNDAQAQNPQPAKPKVKRKPQANEPKIDLADYLRRICGVDLTQVIGLNVLSVLLIVSEIGVDMSKWRSAKAFSAWLGLCPRNKISGRKVLDTRTCKVISRVATTLRLAAQSLGRTNTALGLFYRRKRAHLGPAKATTATARKLACLVYHLLKYKEQYREPDPTTYQLKVEKAILARIQKQAAVLGYKLLPTALVPA

SEQ ID NO: 208279 - protein, 412 aa, unidentified
MEIVYDRCFGLDVHKSSITACVLLEQGHKPQRHLQRFGCTTRDLLELVSWLKGFGVQYVAMESTGVYWKPVWNVLEEHFQMLLANAQHIKTVPGRKTDMKDCQWIAELLRHGLLRGSYVPSLLIRDLRDLTRTRATLSQEQSSVGSRIQKVLESANIKLSSTASNTMGKSGRAILDAIVRGEDSAERLADLALGKLRSKISQLQLALEGRIRDHHRFLLDSLLRQFRFLEAEITALDLRLEHLGKQHKELADAVARWITVPGVERVAAWAFVAEIGFDMAQFPTAAHLASWAGVCPGNHESAGKRLSGKSRKGSPWLRRMACQSSWAAARTKNCSLSAQFKRLAARRGSKRAIIAVAHSLLVIGYHLQKNCCVYQELGGNYFDHLHAEGLKRHLVKRLESLGLSVTLHPQTA

SEQ ID NO: 208280 - protein, 379 aa, unidentified
MQQNTTVSSVATIGIDIGDRVTHVAVIDSSGEWQESTAMPTTPAAFRRAFAAYEGSRVVLEVGTHSPWISRLLAERGFDVVIANPRRVRLIAAAQRKTDGVDAEFLARLGRVDPRLLAPIRHRDRQAQADLVLLRTRDGLVEARTKLINMVRGQAKSLGLRLPGCSADAFHRRVRPLMSEEEVPGMDAVLETIEHLTARIRELDRRIDSIARTHYPETQLLRQIAGVGPLTALCFVLTIEDPSRFTRSREVGAYLGLVPKQRDSGDRQPQLGISKSGDPMLRRLLAGSARYILGPFGPDTDLRAFGLKLSASGGLAARNRAAVAVARKLAILLHRMWVTGEFYQPKGYPRYRLEGTIEAPLPGAGKTTKRTVRRNVTLA

SEQ ID NO: 208281 - protein, 437 aa, unidentified
MNSSNREAVGRSVPQGSDPVALKKEVKSVSTLHVGIDVSQKDLVGQALDDEGQLVFGALCVPNSLWGCGKLRNTILLHTPAADSIQIGLESTNVYWEHAYRFFLEDEELNTNSTLQLYRLNPKVVNNFKRVYGNSLPKNDNIDSWVIADRLRFGHVTSSSLPETVYQSLRQLTRYRFQLGKSLRAEKSRALNLIFLKFSNYDDEAPFHTFSKASMALLEHFSPEEIATTDIEELATFLIQNSNHRLGGNSSPQEVVKVLRRAARNAYRLSPDMNDAVTQTLTMTFDTIRFMQSQLKRADKVIARQLKSIPQTLSTVPGMGPTLTAGIVAEIGDIQRFKSQASLANYAGLVWRTRQSGSFIAEETSMTKEGNHYLRYYLVEAANSLRVHNEQYRKYYHKKYHEVPKHQHKRALVLSARKFVRLVFALLTKGEIYQARR

SEQ ID NO: 208282 - protein, 399 aa, unidentified
MFVGIDWAAESHDVCVVDPAGKICGRATVAHSQQGFDELTKHLVRWSQQGEVLVGIERPEGRLVDAILEAGYSIVLIPTFAMKDLRRRYAVSGAKSDPGDAYVIADVVRTDGHRLRRLEPLSEQTRALRAVVRARNDLVDQRVALGNQLRACLEAFWPGAAVIFADVASEICLSFLERYPTPESAARLGEMRLQSFLKKAGYSGRRSPAELLERLRSAPEGIVGVEAEARSDAVRCMARVMQSLLRSIKDLDRAVVAHLGEHPDAEVFTSLPRSGRINAAQMLAEWGDCREAYPEPDAVAMLGGLCPVTHASGKHRDVSFRWACNKRLRLALTTFADNSRHASPWAAEVYRRAVARGCDHPHAVRILARAWVRVIWRCWQDRTPYDPALHGAAVLLEAA

SEQ ID NO: 208283 - protein, 477 aa, unidentified
MAKAATRRAHLTPVPLLARESLYVGIDVGKQAHVAGFISTTLLERHTHFEGCPALAFANGREGFTALLDRIRAYVPLQQAFVLVEKTGHYHLALLGFLQEQGLSVHVMHVQRRPTGLLKSDKRDALALGNHLYNQLEKGVQLAERSQLVRQALPPIPAAIELKALMGHRFELMHDSTRRRNKLTAIADQLFPEITTVLRDPNTPSALALRLPFPTPRDIARASQADLLGVRLGGQPRVEKLERLRELAASSIGVTDLAYQRALIFEQETLIAELELIRRHLVRIEEEVAHVLVSSREGRILRSIPGVGPLTAAAALAAIGNIGNFPTAGALKAYFGWAPNVAQSGTTLDHASITRKGNRVTKQILYMAAVAAVHEEGSPWQALFERLVPLKRVRDGRTGQWRGKRVVLGRVAGQMTRMMYAFLKADAELVARTPVGQPLPEPLLYDPAVHRAHRTGSYRPLKPAPAPPTIIRLPLPT

SEQ ID NO: 208284 - protein, 438 aa, unidentified
MSNKVIFNLDELFISVGIDVGADFSWMSIALPNQQFVGKPYKILHNSIDSLTTAVSKIKEAEELYSLESRIFLESTGIYHYPLFCYLRDKGFNCSVINPIITKNSTNINIRKVHNDRFDSKKAALVGLKPDLKVSLMPSDLALNCRNLCREYYDLMDNRSAYVNKLQGELRMAFPQYLGIFSKVTINTSLTLLETYTSPSAFLKADKQEIIDIIKSTARFGLTYAQNKYNAIIQAATDANQFGYIIDSNIKRIRLYISFIRKYDEEINSILESLHELVDANEDADFVKQIHLIETFKGAGFLSAVSIMGEIGDFSAFSKPKQLFAYFGLDPAVKQSGKFEGTKVQMSKRGSAIARRVIHTLTLQSISISRNREAKNPVLREYYLKKCDSKPKLVAMGAVSHKVCNMIFAILRDNKPFKIIAPQEHIKQYNAAKCDIAA

SEQ ID NO: 208285 - protein, 313 aa, unidentified
MTNDLLYIGIDVSKHHLDVFFSTIGQFLRVSNDPEGIVGLRERLLKDKPSLITLEATGGFQMPAVIDLVTAGLPVAVVNARQVRRFAQALGKLAKTDKIDARTLSEFGQMVKPAVRPLPEEQTRELAALVERRRQLVSILAAEKNRLSACPKSIRSDIEISIAFLKDRIALLDDDLSTRIKESPAWQEQSDLLQSVPGIGSVTATSLLASLPELGRLNRRQIANLVGVAPHCCDSGQWRGQRHIYGGRAKVRKTLYMGALVAIRYNQQIKAYYQKLKAAGKPSKVAIAACARKLLVILNALLKSGQKWQPQVS

SEQ ID NO: 208286 - protein, 441 aa, unidentified
MTMSKEKLVEKNAQPFKQKRFAQGLPVLNPFAAGIDIGDSKYDVAIACNDGHEVREYATFTSDLKSMVKWLKEEGITTVAMESTGIYWLNLYLMLEEEGIEPVLVNARHVKNVTGRKRDDTDAIWLHKLHSCGLLQKSFQPEGTIRVLREYVRQRKRLTQNRSDTVRRMQKALEMMNIKLHIVISDILGKTGMQMVQAILQGERNPNNLLKLKDPRIKASEEDIRKSLEGIWKEEHLFMLQQAYDGYCFYQHQIKQCEEKIKEILLSQVAEIMHGDITDLGAVREKKRLKNDLSFDVQRILHIIVGVDLCKISSISEVTALEIISEVGVDMTKWKSGKHFSAWLNLTPNTKITGGKIISSKMQKKNNQAGITLRMAASNMSKSKCQLGDYARKMRSRIGKKSAIVASAHKLSRIIYAMIKEQKEITIVFQLKILTSKKNVF

SEQ ID NO: 208287 - protein, 418 aa, unidentified
MKSSKTKKITKINDKTVIATLDIGKTVQYGYFRAPNGNDVKPFAFYNSKKSYNAFWQKLCQFQKQEGLEQIVIGFESTGPYAEPLFHFLRKKPVILVQVNPVHTKRVKELTGNSPNKTDNKDPRVIADVISLGHALTLVVPEGPAAELRRLTQARERAIKTRTAMVNQLQHLIFVIFPEFLKVLKVSTKTARYLIKYYTVPEKIGALGLESVGQILKKVSRGKLGQDRAKQLYEAATNSIGISEGKQSIVFEIEHLVGMIETEDQFIASLEKQMRVYLQQIAYSQNILSIKGLAEVTVAGLIGEVADFNKFDTISEVMKLAGLDLYEISSGNHRGQRRISKRGRPLMRKLLFFAAINAVKSKGIMHQKYHQMLNRGMLKMKALVAIARKLLGLIFAIVRDNTKYVENYSDNYHYKLAA

SEQ ID NO: 208288 - protein, 353 aa, unidentified
MKYVGLDWAYRSAQWCALAPGGELAGEGRIAADRDGLARLVLELGDEVKACLEMMSGALCVRDELVACGWQVEVADARKVKTVAPLAAKTDKVDARLLAELSRRQLVPALWLPSLDERALRERLRRRMHLVRLRTSAKGRIFGLQTQWGVRVSLARLRRGDGLMLLERAGVPEVWRRSISECLALIDFLDARIAPLDAELRPFAKADPRAVLLDTIPGVGELLALTIAAEIGEISRFASPEKLVSYGRLAPRVHQSGQGRPRSGPLSKSGSRLLGWAAVEAAQQAWRESNPWHDLYLDVGRRSRNHNSAKAAVARKILIAVWHMLSRNQPFKPAPRSTGGTSVPASSRLALAA

SEQ ID NO: 208289 - protein, 363 aa, unidentified
MRIIGCDLHARQQTLAMLDTTTGEVVKMTLTHEGNNVREFYSTLPRPVRVGIEATGSMQWFVNLMEELGIECLVGHPAEIRAAEPRKQKYDRRDADLLLKVLVENRFPAIWLPSKELQDLRSLLRHRHQWVRMRTRIQNALQSIALANGLRRGPSLWSHDGQNTIASLPLARHTAYRRSELQALYAKFEAEIEKLNQRVEEQASERPGARLLMTHPGVGPVTALATEVFLGDPARFADSKALASYVGMIPREYSSGGRRQRLGGLTKQGNPLLRFLWGEAGAHAVRRDPELQRFYRRKLIQKGFGKASVAAARKLGIRLWIMLRDKIDYHEFCRRGQKQQKSSDACAGMPETPNGANSHRPVD

SEQ ID NO: 208290 - protein, 410 aa, unidentified
MGLFCGIDWATEHHDVAVIDDDGHVVARGRVSNDAPGFAALLTLLAQAGDSAADPIPVGIETDRGLWVAALRETGRTIYPINPLAASRYRARYGVSGAKSDATDAVLLANIVRTDPGAHRPLPADTELAQAIRVLARAQQDAVWARQQIGNQIRDLLKDFYPAALTAFADLPEGGLARRDARTVLAAAPTPAQAAKLTPARLRRLLIKAGRKRYLDRDIARLCEVFTDTYLHQPPVVENAMGIHLAALLGQFEAACTAADALAEAAVAHFEQHPDAEIITSFPGLGMLVGARVLAEIGDDRSRFADARGLKAVAGSAPITRASGKKTVVLHRYIKNRRLAAVGPIWALGSLRASPGARRHYDARRAAGDWHQQAQRHLFNKFLGQLHHCLHTGLRYDEHLAFPPPLQLAA

SEQ ID NO: 208291 - protein, 388 aa, unidentified
MFKVGGWSLARWRGQGRLLKLILAPGRLMSKQIVSIVRPVLSDNKLTDPLHASVFCGIDVSAETLAAAVIEAGRPMEQREFSNTANGHKRLIAWLGKRKALARVSLEATGIYSMDLALALDAAEGIEVAVLNPKRAHDFAKSMMRRSKTDRADAAVLAEFSLRMEFVAWQRPSLSALTLRSVTRYIEALSLEHTRGLNRLHAAQGSRGTPRCVVEDLKRALATLKRRIVKQRRAARKLIDSDEQTREQFRLLLGMPGIGEISALQILGELVLLAPDLKARQWVARSGLDPVHEDSGSSVHKPAHISRAGSRHLRRALFMPALAAVRCDPHLKAFYETLLARHKSKLQALIAVARKMLHAIYGVFKSGQPYEGKLLFPNIRLEVESIAG

SEQ ID NO: 208292 - protein, 343 aa, unidentified
MNIASVGIDLGKTTFHLVALGERNKVLIRKKFSRAQLLAYTANLPASLIGLEACAGAHFLGAALQGQGHQVRLIPAQFVKPYRKSNKNDFIDAEAIAEAVSKQNMRFVQIKTQEQLDWQAMHRVRDRLVQRRTALINEIRGFLLERGITFPAQPIHLRKNLPTVMEDAEQNLSPRLRWLLDRLWQEWKQTEIDIKAITDEIERISNDDARCRRLRQIPGFGPLVSTATVAAIGNGAAFRRGRDFAAWVGVVPRQYSTGGKQRLFGISKRGNIYLRRMLIHGARAVLLRVKYDTGGFGQWVHRLAQRAPRNKVVVAIANKLARIAWAVLSSGKDYQHQPLPIAA

SEQ ID NO: 208293 - protein, 375 aa, unidentified
MKNKVRFLGLDVHAETIAVAIAEPDGEVRSLGTIANRADAIRKMVKKLGSPEQLKACYEAGPTGYVLYWQLAELGVACEVIAPTLVPMKAGDRVKTDRRDAERLARSFRSGDLTAVWVPDEESESLRDLVRAREAAKQDQLRARHRLSKFLLRTGQRPAVGVKAWTLVYMAWVRQLRFTQVARESTRLDYLHEVDHLAERVVRLEQAIMEAVKLASPAVQEVVKGLQALRGIAQISAVTIAAELGNITRFESARQLMGYSGMVPSENSSGGRTQRGSITKTGNAHLRRIAGEAAWSYRLRPGVGPALRKRQEGVPEEIKEIAWKAQVRLSKRYARLAAAGKDQRKIVTAVGRELLGFVWAIGVKAEAATRQKMAA

SEQ ID NO: 208294 - protein, 393 aa, unidentified
MICVGIDVAKDKHDCFILSSEGEVLADVFTIPNNAEGFDTLLQTIRRCARPEDKIKVGLEATGHYSYNILGFLLNEGLDTYVINPLHTNLYRKSLSLRKTKTDRVDARTIAAMLMSDVDLKSYTDTAYHNEELKSLTRYRFDKVRERAKLKQSVSRLVTILFPELEKLVSTLHMASVYALLSEFPGAKQVSEAHLTHLKAVLYDASKGRYGSDMATTLRDAARCSVGSVMSAKSLELRHTIRLIHELDAEIEDIEAAIQSMMGEIQSPITTIPGMGVRMGAMILAEIGDFSRFDSPDKILAYAGMSPSTYQSGQLSLSGAYSHMEKRGSRYLRYALYNATKYVCLWNPTFAAYLAKKRAEGKHYNVALSHATKKLVRLIYALEKSKRPYSTAA

SEQ ID NO: 208295 - protein, 325 aa, unidentified
MSRIQGKDYTDSATAYAGIDVCKAWLDVHVLGAGRDEGFRVANTAEGIAELLARLEGLPLGRVVLEATGRMHHAVWRALHGAGIAVVELNPYRSRKFADTIGQLAKTDAIDARLLALAAASLALAPTPPRPQSILRLKELQALRRNLVTRRVALANQLAAATDATVRKILAAEQRLVQRHVAELDAEILALVEADARLARTHAILVSVPGIGSVSACTLIAGLPELGAATDKQIAALAGVAPMNWDSGATRGRRCIKGGRAPLRAALHMAALAAARTNPAFAAVRDRMRQAGKHASVIRIAILRRLIVLANALVAQDRLWTPQRP

SEQ ID NO: 208296 - protein, 327 aa, unidentified
MTTQDKMILGIDISKNDFDVALLRTNKFKNKKFSNKPKGFTELVKWLQGLKVELSQLHACMEATGVYGDSLATFLHDHGCYVSVVNGARIKGYAQSELSRTKTDKKDACVIARFCDALNPDQWVPPAREIRELRALAKRLEALQDMLRQEENRVAVSDSILLPEIKGHIADLKVRIAQTKQAIDDHIDNFPGLRQQRELLESIPGVGPTTSAMLLSVFSNIDAFSSAKKMAAFCGLTPRQRQSGSSINGKARLSKMGHSQLRKSLFFPAIVAMQYNPIIISMKVRLLRAGKCKMLIVGAAMRKLVHIIYGVLKSRTPFDENLSAVTA

SEQ ID NO: 208297 - protein, 352 aa, unidentified
MAIVQRREPIMAEIMTIGLDIAKSVFQVHGVDAVGQVVVRRRLRRSHVLKFFAELAPCMVGIEACATSHHWSRQLRALGHSAKLMPPSYVKPYVKRQKNDMADAEAICEAVVRPTMRFVETKTPEQQSVLMLHRIRLMLVGQRTMLSNTIRAHMAEFGIVAPIGRRGLDELLAVLSDLGDERVPALARDCLVAVAEQLMLVKGKILDMDRRITACHRSSDMSRRLAEIPGIGPLLATALVATVPDPRAFASARNFAAWIGLVPKQNSSGGKERLGGITKQGNRYLRSMLTVGALAVIRYAERHGTKRPWIIKLLARRPTKVAAVALANKMARMAWAIMARDERYREPVLIAA

SEQ ID NO: 208298 - protein, 329 aa, unidentified
MVYAGIDVHRKRSQLCVLEESGAEVMNRNYENSSQEFRDALDDLEPGTKVAFEAAYGWGWLADLLEQCSLEAHLVHPAACKAIASARLKNDKVDARIIAQLLRTDFLPEAWIAPTEVRDRRQLLRHRAALVRTRTSLKNRIHAVLADEGLKAEGEKLWSDQGRSWLAAVALRPAHRQVVDDCCELLEAVAVPIARLDQQIHALARHDPRVPALCVLPGVGELTAMTLLAEIGDISRFATARKLCAWAGLTPTVRNSDRKVHHGHITKAGPAAVRWVLAEASCKARNFPQFEPTFSAVAARRGKPIAGTAVARKLLARCFHILKALEAED

SEQ ID NO: 208299 - protein, 340 aa, unidentified
MDTPHTPQQSPPPADRAVYVGIDVAKDRLDLARSDSATAAAAAAFANDPAGIAAVVAHLAPLGPALAVVVVEATGGLERPLVDALLDAGLPAALVHPGRVRHFAKALGVLAKTDRLDARVLARFGQLAAPRLAEKRSANRAALQALVGCRRQLAVTRAQQANRLAATTHKPARKAIEKVVATLDKQVASLDRQIRDLVDADDDDFKHLDGLLQGVPGVGPTLSATLAAELTELGETDRREVAALVGVAPLNRDSGKASGKRAIAGGRTAVRCVLYMATVAACRCNPVIKTFSDRLRAAGKANKVRLVACMRKLLTLLNAMVREDLTWDQLDVVKKLAKNP

SEQ ID NO: 208300 - protein, 369 aa, unidentified
MTDLTLFVGLDVHKKTIAVAMVEATAGADVRFYGTIANTPDALRTLCKKLSNDGGRLTFCCEAGPCGYGVQRHLTRLGHHCDVVAPALIPRKVGDKVKTDRRDAMMLARTLRAGQLTAVWVPDEAHEAMRDLVRLRAQAMRDLRKARQQLLSFLLRHGISSPYGHWTKMHRRWLGELTFAHPAQHLAHEEMLQRIERAEALCDRLKQAIAELVPQWSLAPVVQAIQALRGVSLVVAAVIVAEVGSFGRFDNPRQLMAYLGLNPSEHSSGATIRRGPITKTGNALARTCLVEAAWTYRFPARVTQIIRDRMKDLPEPIRNVAWKAQVRLSGRYRKLTAVGKPAPKVVVAIARELVGFIWAIARMVEPKFA

SEQ ID NO: 208301 - protein, 351 aa, unidentified
MKVTTIGIDLAKDVFGLHGVDGEGRVTFKRRLVRSRLLEFLSQLPRCLVGLEACSSAHYWAREIERLGHRVRLMSPRFVKPYRKSDKNDANDAEAICEAVTRASMRFVPTKSEAQHEVQALHRVREQLLKSRTALVNQVRGLLAEHGVVAPHGIARARRLLLGILADPERHGLSGLFRETLQEMAERLRFFDERVGAYDDRIERVFKEDERCRRLAKVEGVGPLVATAVVAAVGNASEFKSGRELSAWLGLVPRQHSSGNRSQLLGISKRGDRYLRTILIHGARAALRRADHKRDQRSRWAMRIKLARGYNKAAVALANKNARIIWALLTRGENYRPAAISVASAGSVESV

SEQ ID NO: 208302 - protein, 355 aa, unidentified
MNRYIGLDAHSESCTIAVMGETGRRLRKQVLDTRADVLIDFFKGIAGHKCLCLEDGQLAEWLVEVLEPHVDKLVVIQPEKHAGQKSDEEDAWSLAEHIRVRAKGVHVFKPTHELRELREAARMYMVSVKEIVRAKGRLRARFRSRGMRELTNAIYDDPETRRECISMLPKEFRPRVKWLGEQVDAMSRLHDVAQSTLEKSAKKNADVLRLATIPSIGIVRAAMIVAIVVVPHRFRTTRQFWTYCGLGIVRRSSSDFEKSPNGNWRRRTKGIQIRGLNPNRNAVLKYVFKGAATCVIRQTNHPLRRHYDQMVAQGTAPHLARLTIARRIAATALAMFKKKEAYQPEKYLAPAPAPA

SEQ ID NO: 208303 - protein, 389 aa, unidentified
MIYVGIDVAKDKHDCFICNGDGEVLANVFTIENSKSGFKHLLSIINTCTGIDDKKKVGLEATGHYSYNLHGFLLDNGLPTYVINPLHTNLYRKSLSLRKTKTDKVDARTIASMLMSDVSLKPYSQTLYHNEDLKSLSRYRFDKVKECSKLKTSVSRLINILFPELDKLVCSVHMTSIYALLSEFPSAKDISSAHLTRLTNLLYSVSKGHYNRDTAIKFRDAARNSIGCYMPAKTLELKHTIKLIRELNTEIKEIDIEIKRIMDDINSPILSVPGIGYSLGAMIVSEIGDFNNFSTPDKILAFAGLSPSTYQSGKLDNAYAHMEKRGSRYLRYALFNAAKLVCTWDNTFSAYLAKKRNEGKHYNVAVSHAAKKLIRLIFALEKSGRPYKV

SEQ ID NO: 208304 - protein, 442 aa, unidentified
MEKRHYLGIDVSKGYADFTILNKEKTIVEENFQLDDTFEGHQQLFNFLKTHFATYSKLTLYCAVESTGGYENNWYNSLHKYQSAMNLFVARLNPLGVHHSSKAALNRITTDKESAKNIAEYLISYPEKVDYQREPFLATAKRVWTFISLLKKQKTQLFNELESILYIANPEIIPYCSDGLRVWTLKLLEKYPTAKHIARAKVESISKIPYVSKLRATELVENAKNSVASGADETTKEIIISLVKQIFSLKMNIDKHLKILESNIDLPNEIEILKSFDGIGTYSAVGLMLEIGSIERFSSSKKLASFFGIHPAYRESGDGKSTVRMSKKGRKQPRHILFNVTRYGIAHNEFIKDIYAKHLKKGMAKKAAMGAIMHKILRIIYGMLKSRKYFDPQIDRNNRIKIRVVKLSSQTTIKRRLQPHDSMAPISKRQAKNRKEKELLPK

SEQ ID NO: 208305 - protein, 357 aa, unidentified
MLALGDSAPRKGADAMTFVGCDLHTRMQQVAVLDTRTGEVSERQLAHDGNAIEEFYAALPGPVTIGIESTGYAVWFHTLMQRLGHTVLVGDAAKIRAMVVRKTKTDRRDALHLLDLLRHDRFPTVWVPDPATRDLRALLTHRMRLVRIRTMVKNGLHAIALNYRLVRGAKLLRQAGLAQLHALALPPHTAQRRDQSLELLAGLTTQIRELDDAITTAALAHPDGPRLITHPGVGALTALATIVVLGPVARFHDSKHVVSYVGLAPALNASADKYHLGHITKQGSTLLRFALGQAAAHAARMDADLKRTYFTLVHRRGRPKAKVAIARKLLVRLFIMLRDQIDYDEFRRRGRTAPASA

SEQ ID NO: 208306 - protein, 344 aa, unidentified
MDHFAGLDVSVKETSICIVDETGKIVREVKVASTPEALLAVLKNPAYHFKRIGLEAGPLSQWLFSALAEADLPAVCVETRHMQAVLKAQINKTDRNDARGIAQMMRVGLYRPVHVKTLRSQKLRMLLTHRKLLQSKAIAIENDLRGTLRNFGLKVGMVGKVKFEARIKELVENLPDLAVLVEPLLIVRRVLREQIIILHHRLLAIVRDDEVCQRLMTIPGVGPVVALTYRATVDVPARFRKSKAVGAVFGLTCSKYQSGEIDRSGRISRCGDEMMRVMLYEAAQGMLLRSKKWSWLKAWAMQIARRRGMKKAIVALARRLAVIMHRIWVDGTDFRWTREQAAAA

SEQ ID NO: 208307 - protein, 351 aa, unidentified
MEGYAGKQYVGVDLHRRRTVIVRTSETGERLGMARIDNDPVALAGEVAKAGPDAEVVLEACYGWYWAADVLAERVGGEHVHLAHPLGVKGFSYRRVKNDENDSSDLADLLRMNRLPEAWIAPPEVRDLREGVRHRAKLVAIRTNLKSQVHAVLAKQGVPVAMSDVFDVAGTLFLNGLDLPGEYGARVDSLRRLIGMLDFEIDTAGRRIQARLRDDPGWRAIQALPGVGPVLATVFVAEIGDVTRFTSPHQLTCWAGMTPKHRESDTTVHRGRITKMGNRAVRWAAIEAVQRARTGQTGAVKARLGPRRGTNIAKVAAARKLLTLVYYGLRDGHIRALDKYAAPATRSRAAG

SEQ ID NO: 208308 - protein, 340 aa, unidentified
MSTINILGIDIGKFTFHLVGHDLSGREVYRKKFSRPKLIQVLSTLEITTIAMEACGGSHWLARKCQEFGHKVRLIPPQYVKPYVKTNKNDFIDADAIAEAATRPTMRFVSVKTESSQVISVIQRIRSSYLKDRTACMSRIGSILLEFGMAFPKSHAKMKTLFQWLAEHGEPISPMLLLELRDHHDFYLKLNQLILTQDKKLNEIVDHDERAQLLKTIPGVGTLTASRCISDISNAADFKNGRHLAAWIGLVPRQFSTGGKPTLLGISKRGNKGLRELFIHGARAVLVRPEKAVAVFGNWILELLSRKHFNVVVIALANKLARIAWSVLSTKQAFEVRVQA

SEQ ID NO: 208309 - protein, 457 aa, unidentified
MARHSSRSTRQRDKLQVVHPNAAAIDIGSRFHVVAIPPDRDPQPVRRFDTFTGDLRRLADWLAEKNIVTIAMESTGVYWIPVYELLEERGFDVILVNAREAKNVPGRKTDINDAQWLQRLHSYGLLRGSFRPTQELASLRALLRQRERLLEYCASHIQHMQKALMEMNLQLHHVVSDITGKTGMRILRAIVQGQHDSAVLASFRDPRCKASEETIRQSLEGHYREEHLLTLRQSLALYDTYHEHVAECDQLIEATLKRLSLATPAPEGSLPDARHRDANPNAPAFDVRHSLFQVLGIDLTQIHGLGPYLVLKLISECGTDMSRWPTVKHFTSWLALSPGSKISGGKVLSSRTRRTKNRAAALLRLAATTIGRSQTGPCAFYRRLASRLGKAKAVTATARKIAVLFYNVLRYGWVYQDPGADYYEERYHQRIVRNLQRRAQSLGFELAPITDPSQRVS

SEQ ID NO: 208310 - protein, 376 aa, unidentified
MENDSTLYVGLDVHKDSITVAYALGSGEVELLGKIGTTQTDIDRLCKRLQSKARRIRIVYEAGPCGYGLYRQLVQKGFDCMVCAPSLIPRKPGERVKTDRRDAVKLVRSLRAGDLSAVYVPTVDDEAFRDLARAWVSAKDDLKRARQRLKAFLLSHGVRYAGRADWGPAHRRWLSAFSFDSLWQQLAFDELRRTIEDRLAQCERLEAALREAVVNWRFYPAVLGLQTMRGVQFTTAVGMLAELGDLSRFAHPRQLMAWLGVTPCEHSSGDKRRQGSITKNGNSYARKLLIEAAWSYQHPARVSPEIQRRHEGIPKPIVDRAWDAQVRLCRRYRKLVARGKQKNIAVVAVARELSGFIWDISRLAVSLAIPREELTA

SEQ ID NO: 208311 - protein, 345 aa, unidentified
MSDYKIIGLDLAKRKFHFVALNEAHEVVLKKAQTRDAFFAELASMVNPGETFAMEACGGAHYTAQRLMAAGHTVILLKPKDVKPYAKSRQKNDMNDALAICKAAADPNLMRVQPKTKEEQEISYLHKARRNTIRQRIQRSNSLMTALFEFGCLLACGKTQFARSCEEHIKKAYEDGFISQMVYDQMLLDGEEIKALLAREKQLDKAIVALNKTSAKAQRLETIPGIGPVNASILSIKPVHLYTSPKDFAASLGLVPRQNSTGGHITLGGISKQGDRYARTMLIQAGRCLVMRSCKDKPPKDPVFELIARLKKAGKPFNVICVAVANKLARMAYALLTKEENYVAA

SEQ ID NO: 208312 - protein, 443 aa, unidentified
MSEEVRHTSEPEFAALVAIDWADKKHVWRLEVIGTGQRERGELEHTPEAIEAWASHLAERFGGRAIAVGLEQSRGSLLYTLTKYAHLVLYPIHPTTLARFRAALFPSGAKDDPMDADLLLELLLHHRGFLRPLQPDTLETRRLQLLVEQRRQLVNEKTRQTNRLTARLKMYYPQILQWFEEVDSPMVSALLLRWPTLQKLQRARPDTLRKFFHQHNCRGTQRIEQRLEQIGQAIPATHDAAVVETCVVAVQLLARLIATLRRGIAELDRRIEKVAASHPDFALFDSLPGAGKVMAPRLIVAFGTQRERYSSAKEIHAYSGIAPVLERSGKSTWTHFRWTCPKFLRQTFHEWAGHSLSKSHWARLYYQQQRAKGKAHHAVIRALAFKWIRIVFRCWQNRTPYDEQIYLRALQQRRSPLAVTESPTVNLQWIKSGGFWKLSTDPS

SEQ ID NO: 208313 - protein, 452 aa, unidentified
MPARKDRLMHFNKILQMLDSSPYLSVGLDVGADFTWMSIALPNGSFWGKPFKIIHDDPYSREMAVAKIKEAQELYSLKSRCFLESTGIYHVPLLCFLRDKGLDCSVINPIITKNSTNINIRKLHNDKFDSKKAALVGLNASLKTSIIPDEDIADLRNLVRDYYYFKDLQSAVVLKLNAELKVSFPAYLKVFSKITTQSSLKLLAAYPLAKDMLAAPKEELVGIIRSTARFGETYALSRYEAILEAAKDAAVFGRALPSNAVRIRLYIESYQTYQKHLDSLLLALHEAVDKLQGTPVYDRICLLQSLRGVGFLSAVVLMAEMGDFDLFPSPKKLYAYFGLDPAVKQSGKLNGDKVHMSKRGSSLARRVLHMAALNNLKVDKGTKAPVNPVIYNYYTGKCASKKKNVAVGAVMHKICNIIFAMLRDNKPFEIIPPQMHCKQYALNPPASVTNAA

SEQ ID NO: 208314 - protein, 342 aa, unidentified
MSRYLGVDLHRNCFTVCTQLETGRQYLATLKLEALPKFVSRLRPDDEVAVEVTGNTRLFWDAVAPHVARVVVVNPSQFHVIRKSVKKTDEHDARALALFLSKDMLPEVRMKDPEHAEMASLAQTRDTLVKSRTALKNKVNNLLSARGINLAKESLASEKGLKEVLGMYFGSTVDVELQVLVDQIRSLNQSIAKIEKAIAEQGPKLPGYENLKSIKGIGDVGASVLLSVIGDVNDFADEGKLAAYFGIVPRISNSNETQHSGRITKRGSKLGRTILIQCALIAKRYSPYLRRHYERIKARRGTGKAIVALARKFLGIIYRTLKDDLIWDDFANGVICDTEGHA

SEQ ID NO: 208315 - protein, 357 aa, unidentified
MARYSLSALQTFIEPCRSLPFWIGIDAHKRSNHLAILRSDGQNYTFVSTAEPSKLVEQIVALDFTVGGVAYEAGPTGFSLARAFERVGFNVLVAAPSRLPRSVSMGAKTDRLDCLKLATYAAKGLIRPIALPTAEEEARRSLMRRRHQVVSEIRSTKQRIKALVLYLGLEEPPALRTWRATLTEELQKLVMEPESRLTLESLLRELGFHKEELSRLEQQIDQLCCKPEHRSAIRAIKSVPGVGNVVAATFYLELYRPERFNRGDEVSSYLGLAPMVRHSGAKTPRGQLRPAGQHQLRSLLIEAAWIWRTKDPYASNLYNKLVNKSGIAQKAITALARRLAIILWRLSIEKRAYHPAS

SEQ ID NO: 208316 - protein, 339 aa, unidentified
MRQITTLGIDTAKQVFQLHGVDAQGNVVLHKRVTRKQVLPLLAQLPPCLVGLEACGGSHYWAREITKLGHTVKLMAPQAVKPYVQGNKTDGRDAEGICEAASRPRVRAVAINSTADQDLQTLHRIREQCVKMRTALANQLRGLLGEYGLVVPQGIGRIRQAIPLIVEDADNGLSALCREWLWDVYQRVCTLDAEITRYNARIAQLADQSEVCRRLTRVEGVGPLTVTAFVAAVHDSRAFKNGRHCAAWLGLVPTHHGTGGKTVLGGMSKRGNQYLRRLLLHGAMAVIRRVDGKKDARSVWLQQLRARRGTQVAAVALANKNARILWALLATGDSYRQAA

SEQ ID NO: 208317 - protein, 389 aa, unidentified
MIYLGIDVSKFKHNCYLTDEDNFDKGCHFEIKNSREGFEYLLKKLSNFDKDKIRIGLESTGHYHLNLSRFLLDLNFNIHFFNPYQTSLYRKADSFRNTKTDKVDAFFITKLLRATDSNPIHNELYHNYELKSLTRYKSSLKNDRVKLKNTIVGHLDLLFPELCEVCNDVFCKYILEVLKEYPSADKIAKANLTRLSNVIKKASKVSHSKEKAIEIRNAARRSIGIDSSAVSFRLVQDIKSFEFLCKQIKEVNKEIKPLLDCLDSPIMSIPGVGIEIGPSLIAEIGNIENFENPSKLLAYAGLDPSISQSGTIYSNYSSMSKRGSSYLRDALFLAAFLICQNEETFRQYYEKKKNEGKHHYVALTHVARKLTRVIFHLLNTNQKFVSQTP

SEQ ID NO: 208318 - protein, 353 aa, unidentified
MKGSSGQDSIGSSVLRGSIRKKDLMRRRFVPVIGIDISKDKFDVCLIKSEGGKELYNKFENSEDGFEAFLSWIGVHKVRKFHACLEPTGRYGQALAEFIREAGHAVSMINAYQIKGFAISELKRSKSDKLDAGIIARFGVAHRPESWHPTSPNIKEVQELGRYVDSLKCMITQEKNRLSAGAVHDAVRTAVEQHIESMKETVVRLEKQMKHVVASDQELKRCFDLLTSIVGIGDVAALAFLGEIGTGERFVHTRQVETYCGLIPKTRQSGSSVNGKARLSKVGNSRMRRALYMPALSALQANPAIRTFAERLVKAGKPPKVVICATMRKLLRVMFAIVKSGRHYDLQYLPMVN

SEQ ID NO: 208319 - protein, 391 aa, unidentified
MIYVGIDVAKDKHDCFITNSDGEVLFKAFTITNNLDGFNDLYQKIVSVTEDITKVKVGLEATGHYSYNLLGYLIDKGLPAYVINPLHTNLYRKSLSLRQTKTDKVDARTIASILMSDVNLKSYSDISYHNEELKSLTRYRFDKVKERAKLKSSVSRLICILFPELEKLVPTLHMASVYALLSEFPGAKQVANAHLTRLTNLLSEASKGRYSKDTAITFRDAARTSIGSNMPAKSLELKHTIKLIKELDSEIDEIENEIKIIMDEINSPILSIPGINYRMGAMIIAEIGDFSRFDSPDKILAYAGFSPSTYQSGHLYGAYAHMEKRGSRYLRYALYNAAKYVCHWDPTFTAYLAKKRAEGKHYNVAISHAVKKLIRVIYHLEKTNQQYIKAS

SEQ ID NO: 208320 - protein, 410 aa, unidentified
MEVLYPHCAGLDVHKDMVVACLRHVVDGTIKREVRTVKTTTKALLDLSQWLASEGCTHIVMEATGVYWKPVWHILEDGDFDLALANAAHVKTVPGRKTDVNDATWLADLLAHGLVRGSFVPNAQTQEMRGLLRTRKQLVRERTSHVQRLQKTLEDANIKLDSVISDVMGLSGRTMIEALIAGETDPNTLAALAHRRIRAPAEELCEALRGRVTKHHRFLLRLHLQQIDIFDAAIVAIDQEVDANVEPFRAAITILTTIPGVSDLSARAIVAEIGTDMSRFPTDGHLISWAGLCPRNDESAGKRRSNRMRKGAPWLKTTLIQCAWSATRKKASYLQTQFHRLRARRGAKKAIAAVAASILTAIYHMLTNGTLYQDLGADHFDRRGKTAQTKRLVAKLQNLGYAVQITPLAA

SEQ ID NO: 208321 - protein, 370 aa, unidentified
MTSIVQIGMDVHKNSFTVCCYDIESEKTKHLTVLEPDYKQVIKYIASVRRHYSDGTEFVCGYEAGCLGYSLYNELTAHHVKCVILAPTTMPNLNNQRYKTDKRDAENIAKCMAYHTYKAVYVPSEEDNRIKEYIRMRDDHKVAIKRIKQQILAFCLRFDKKYSKDNWTQTHIKWLKQLSFDDEILQETFEEYLITFAYLLSKIEMLDKRIEEFAHNQTYVERVKRLECFLGIKAKTALSIVVEIGDFNRFATAEHFASYLGLTPGEHSSGDKQFRTGITKAGNGHIRKLLVEAAHGYPRGSVGFKSKELIKRQEGNPPEVIAYADKANERLRKRCYKLMLKGNKNRNVAITATARELSCFIWGMMTDHIA

SEQ ID NO: 208322 - protein, 412 aa, unidentified
METLYRRCAGLDVHKKTVVACVRILAEDGTLHEEVRRFGTMTRDLLALSDWLQTEGVTHVAMESTGVYWKPVYNILEGTFTEVLLVNPQHIKNVPGRKTDVTDCQWIAQLLQHGLLRGSFVPAQPQRELRDLTRHRAQLSAEHTRAVNRIHKVLEDANIKLASVASDVLGVSGRDMLEHLVAGDEDPQALAQLARQRLRKKIPELQAALQGHFTTHHRFLLKTLLAHVKFLEGQLSELNVRIEEQMRPFLSETQIERLDEIPGVNLKTIQAVVAEIGSDMSRFPTDQHLNSWAGMCPGNNQSAGKRHSGKTTNGNPWLRRALAEASWSAARAKDSYFSALYRRLSARRGKKRALVAVGHSLLTVIYHMLKYGLPYQELGPDYFDRLHANNLQHYLVKRLEGLGYAVTLSPAA

SEQ ID NO: 208323 - protein, 486 aa, unidentified
MPSPISDGKGQPSLTLHRYGVGVDCHSRFFQVCILIPQGTEIAKIERNVPALWPAMRAAKAWILDTLREHGINVPQSDLRYTCESTGQYHMPLCLAWKGRPAIINPSDTGHVRRKTDRLDAEKLAQHSLHGLWRESWMAPDEIQELRVLANQRSKLVAERSRLTNRINSDVLRFGHVVGQLGRINGPVVRALIEDFCIKGSVALHCDYFGENTLPAGVVFVLDQRWKRIDALDQEIKVIEELCVRRADDLTWRTGAGMTASGRQLRANLESVPGVGTQTVITWLAEVGDITRFGSVNKLLAYCGLDPSDQISAGKVTGTKTRKGNARLHGALRNSARAMFERASSCKFSIWARGYMGRHSRGGKSKAIRALARRVAKALYYCHLKNEPFDDSGYHALLSESSYPLCSVEEMGLSAGVLRRLKSNGLHTSRQVVEAFYSDLGRRPGCGKLTIQAVAMWIDVHRQRSRGATQKPKGIGPLKDPTRLEG

SEQ ID NO: 208324 - protein, 419 aa, unidentified
MKIIYPRVCGIDVHKKFIVAVICISESVEPVYLKKRFSTFHNDLIRFRDWLIQNDCQNVCMESTGKYYIPVYNILESHISNIVVANPKWVRAVKGEKDDDKDAKWIADLFKLGIVKSSFIPQKDFRILRELTRYKYKLVNMRSSEKNRYQNALTSGNCKLDMVFTDVFGKSASNIIDLILSDNPYTDEDILSKVHKNCKASPDMILNSINGTDLTPVQKSRIELVNNHIKQLSSNIQRLDKLIDLMIEPYEDYISFLCQIPGVSRNSAITILSEIGVDMNQFTSTRRLTSWAGLTPSSNQSAGKKKSVRISRAGVYLKPCLVEVAHATVKDTNHPYYANKFNKISKRRGKKRAYIAIARKILVAAYHMLFTGEIWNPADLAEVETPVEQRIKYVKNNLKSDIKQLLDIGLTVEELTLMI

SEQ ID NO: 208325 - protein, 370 aa, unidentified
MAKSTTLFVGLDTHKDFNTVAYAEGATTDPPVFVGPIGTRQADIDKLIRRLHSKASHLVFAYEAGPTGYGLYRYLTGKGEECRVVAPSLIPKRSGVRVKTNRRDAVELARLLRSGDLVSVWVPRVEDEAIRDVCRARDAARITLKAAKLRLKSFLLRLGLQYTGRATWTDAHRRYLARVVCPTPAQQIVFQESLHAVDEQVERLARLERELVELAPSWRLSPVVAALQALRGVQFLVAITVVAELGDLTRFTNPRQLAAFVGLIPSEHSSGTTRRQGGITKTGNGRARRVLVEAAWAYRFKAKVSEEIRMRLEKLPAPIQAISWKAQARLCARFRRLISRGKNANVAVTAIARELLAFMWAIAKEVPLEA

SEQ ID NO: 208326 - protein, 341 aa, unidentified
MKIAGIDVHKKVLMVVVVDASAPEEKPARRRFVTLPSELQRFRIWLQEQGVEEAVMESTAQYWRSVWLELEPHMRLHLAQAFSNRAPRGRKHDFKDAERLVRRLIAGELILSFVPDGEQRIWRSLTRMKVQLTRDRVRLQNQMECLLEEMRIKLSIVVSNLLGASGLRILHALAQGESDPKKLAELGDERLHCTEEQLVDALTGRVQPMHRGMLGLQLQRLQLLDQQMAQLNRMIAQAMNSHQDAVIRLAEVPGLGVDSAQQIIAEVGVQASTFSSAAELTAWVGTCPGKEESAEQNQSSRSAKGNKYLRRVLNQAAHAAVAKKGCHFQVVFRRLLPRLGY

SEQ ID NO: 208327 - protein, 349 aa, unidentified
MKILAIDLGKYNSVACLFTPGNQQTEYETIGTHRYYIEQLLAKTQPELVVMETCSITGWVHDLCKNLGYRVLVANPSQDAWRWKNVKRKTDKDDSLKLAKLTALGQIVAVHVPTSENRQYRHLVKYRKVLVGRVNTVQNNIRALFDQQGIHIPIGHRAWTVAGLEELSRYRKSLAECDKKEFWQGELDLELTALEQLWQQLARVDERLEQESKQDERVQLLMTIPGVGRRTAEVIVTCLDDPQRFKDVRQVSSYAGLVPKQHQSGQTNRIGAITRRGSRLLRTALVEVAWAMLRYNTWALETYKRICGGQKTRKKTAIVALARKLLVRCWAMLRDHKPWRVDLVQPAAS

SEQ ID NO: 208328 - protein, 262 aa, unidentified
MEFKRIAIDTSKHVFTIHGVDDQERPVLRREIRRSRVEPFFAKLAPTEVVLEAWAGSHHWGRVLCGMGPRVRLIPPQYVKPFVKRSKNDRNDAEAISEAASRPTMRTVPVKSADEQAATVIVKHRELLVNQRTQAIDALRGHAAEFGIVAAKGCANITALLAVLSAEEAIPEIAKAMFEQMGEHVTALDVKIDALEKQLLEQHKANAVSKLLAAIPGVGPITAITMALTVNPASFETGRHFAAWIGLTPREHSTGGKHRLGG

SEQ ID NO: 208329 - protein, 426 aa, unidentified
MNYKQNEKINQVKESTLVVGIDIGSTTQYARAFDWRGIELGKVFTFSNSREGFEAFKAWMQHLQDKYRKSDVIVGIEPTGHYWFDLGAYLEDEGILLVMVNPYAVKQTKELDDNSQSKNDRKDPKVIAKLVTEGRYSAPYTPDGVYADLRIMVANRKRLIREMTQIKNRFARWFAIYFPEYTDVFGDYEAQSSMLLLKKVCTPEAIVELGAEKINQIWRDAKLRAVGMKRATTLCETAKRSIGLKKGSSAARYEMKLLLEDYEYKKAQLDAVMEEIEKLCRKIPESEQMLAIKGIGVITVAGFLAEVGDVRRFESPRQIQKLAGLSLRENSSGKHKGQTTISKRGRSKLRAVLFNAAIPLIAKNPEFKSLHEYYTTRANNPLKKKQSVIAISCKLIRVFYAILAKGVTYDAQKLISDIQSMFLKIH

SEQ ID NO: 208330 - protein, 338 aa, unidentified
MFIIGIDPHKGSHTAVAIDGDERLVGELLVRADRRQRERLLRWAAEFEPRVWAVEGATGHGALLSQQLVGAGETVLDVPAALSARARLLDSGHKDKTDPYDARSAAIVALRNRNLRSVVLEDHRQIMRLLARRHHQLIAARTRAICRLHAVLCEIVEGGLSKNLSAKRAASELRKVHPSDAIGIERKRIAVEFLDEVRRLDRSLVELHARIVAAVNTTNSTVTAIYGVGPIIATYLIGYTGDIRRFATAGHYARYNATAPIEASSGPRVRHRLNPNGNRQLNHAIHIAAVTQVAHDSPGRAYYLRKQAEGKSRKEAMRCLKRRISDVVYRHLRADAGS

SEQ ID NO: 208331 - protein, 334 aa, unidentified
MLYAAIDIHKRAFQAAVLDPDSGEVVEERFAADRESLARWAEQWRGRLEAVAIEATTGWRWVWRELVANGFDVRLAEPVQTRALLGRRRSAKTDRLDARWLARLLAKEMLPQSWIPPAEIQELRDRTRLRKALAEDRRRWGQRLHAYLLHEGWPCSRSNLLRPPGLRWAAALQLPEHARLQVDSLLAVMAALQEQLDTVEGELRRFARNDQRCRALQSIYGIGPILACHLLAEIGEASRFQRAEQITRLAGLDPVVDESGETRRRGHLAKAGSPHLRWALVEAAVHAHRTTAPDLALYRATRERRDTTVARLTVARKIGKRAFHALRELELATT

SEQ ID NO: 208332 - protein, 340 aa, unidentified
MDVRTLGIDLAKNLFQVHGVDGQGRTVVQRQLRRRQLLPFVAQLQPSLVAMEACGGAHYWAREIAKRGHQVRLMSPRFVRPYVKSNKNDARDAEAICEAVGRPSMRFVAVKSQAQQDMLALHRVRSLLIRERTALMNQMRGLLAEYGIVVARGAIPLRRALPLLLEDRDNGISELLRELLAEMSERLRWLEERLKRYDQRIAECAGTDERAGRLMAVEGVGPLIATALIAAIGDARQFHSGRDLSAWLGLVPRQHSSGGRSVLLGISKRGDRYLRTLLIHGGRAALRFAARKRDPRSRWIQAVRERRGANIAAVALANKNARVLWALLARDEDYRVPAAA

SEQ ID NO: 208333 - protein, 345 aa, unidentified
MSIVGGLDIHRKQITFDYLDTVTGQVCRGQVSPADRVHLRAWLARFASRGDVAFALEGCAGWRYVAGELAAAGARAHLAEPAGTAFARGRKRHAKTDKTDARHLRMLLAEGRLPECWIPPGHILECRALLELYNDLRRERTAWAQRIHAVLFHQGAPVLGEGALRTHKGVAALRATAAAHLSPAGQLQVATAVEVIDALEARLHVVRHQLLDAARHLAGAKALAARLYGVGPVTALAITCWLGGTGRFSSSRKAVRFAGLDITVSSSDRKGPPGRLSRQGPPVLRWAVYEAGKAHARTSAPDHRYYAAVKDRKNSKRACLSEARKILRQAHHILAELGDDALAAA

SEQ ID NO: 208334 - protein, 348 aa, unidentified
MSLALQSLLPYPNSCEGASPHQQGRDTKMLSFCGIDVSKDRLDVMVLPDEYSSSVPNDPAGWAILVEQLRGFSIAAIGIEASGGYERGAVRSLQAAGMPVRQVNPFKLRQFAKASGVLAKNDPLDARMIASFVGIMPTRPAQPTTPAAEQLVEMLAVRRQLSAEKTAAENASRLLEDLMLQRLSRRRIARLAADIELLDKRLVEIVATDATLAHRYRLLTSMPGVGPVLACTLIALLPELGGMSRKQVAALVGVAPYAFESGTLKGRRCIWGGRANVRQVLYMAAMSASNWNPALKLFHDRLKGAGKLPKVVIVAVMRKMITTLNAMVRDDIAWADRLSGRHSVTTAR

SEQ ID NO: 208335 - protein, 349 aa, unidentified
MRFYNTMHTYYCGIDLHAKTMYLCILGTSGEPILERNIKSRPEAFLKTIEPYRDNLVVSAECIFTWYWLADLCRRERIDFVLGHALYMRLIHGAKAKNDKLDALKIAMLLRGGTMPLAYAYPPEMRATRDLLRRRLHLVRKRAELLSHIQNTHHQYNLRPPAAKIAYKSNRAGVAEAFAEPDARKSMEVDFLLIEQHDQIIKDLELHLSRQAKLHDPDAYHRLRSIPGIGNVLALTILYEIHDINRFPKVQNFLSYSRLVKPEHSSAGKKVGGGGGKKGNAHLKWAFSEAASLFMRHCDEGEKMARRLQSKHGKSKGLSILAAKLGRCVYYMLSREKSFDLERFLTGQK

SEQ ID NO: 208336 - protein, 355 aa, unidentified
MDKINSNFAGQNIYVGMDIHKASWNLGIHLNDMFVKNVHQKPDPHIMAKYLKQHYPGAHYKAVYEAGKFGFWIQRQLTALGIECLVVNPADIPKSQKDTLQKTDPRDARNLAMRLQSGVLKSIHIPDEQQEADRVFFRHRKRIWKDLTRCKNRIKGMLAFSGIDIPEQYDNASWSHNFINWLKVLDCRQQSRRSSLDYMISQMEFLRKELLSISNAIRKMMREQRYKTNYYLLRTIPGIGPLTAASILVEIGDVHRFETFYHLNSFVGLLPMEHSSGQSENKLSLTVRKHRQLRSDLVESAWTARRTDPAMALYFQEQIKRKDSKIVIIKIARKLLNRIRYVLINQTAYEFGIVK

SEQ ID NO: 208337 - protein, 422 aa, unidentified
MEDERNWFVGVDWASETHHVRVSDARGRKLGARAFAHSGEGLAAMAAWILEVTGAPPEAVFVAIEVPYGPVVESLMERGFRVHAINPKQLDRFRDRFSPAGAKDDTRDAEVLGDALRTDPRCFRALQPLDPVVVELREASRMAEDLKQERNRLGNRVRELLWRFYPQMLGLTDDVAAPWFLDLWRLIPIPEKATRVREVTVDRLLKRHRIRRLSAADVLEALRRPAILLAPGTVSAAVSHREAIAKRLDLVNRQMLAVDERLDRLTQSLAGAQERAGGQRPEPCDVTILRSLPGVGRIVLATLLAEAVEALQRRDDRALRCLAGVAPVTKRSGKSRIVLMRQAAHVRLRNAVYHWARVAVQHDPRSQAKYAALRARGHGHGRALRSVADRLIGVACAMLEAKTIFDPNLASQRAPNLGKPTC

SEQ ID NO: 208338 - protein, 370 aa, unidentified
MKRFSTYVGLDVHKNSISVAIAKRSDDKSQSLGRLPNDLTRLLRALEPLGESAQVQICYEAGPTGYGLVRQLRELGYDCQVVAPAKTPRVASDRVKTDRRDAIKLADFLRSGHLTFIRVPTPEEEALRDLVRAREDIKTKHTNSKRQLNSMMLRHGRIFRAGKSLWTKRHFDWVETQEFEFEGSREARDTYVGELRRYQLLLDGLDKRIEEVAGTLSQADLVHALRAFKGIKTLTAATIVAEVGDLRRFPSAGKFASFLGLTPSEHSSGDSRNRGRITKAGNRRLRRMLVEAAWAYWRSPHVSRELEARSAGVTADVRELSWNTQRRLYRRLRALQMRGMCAKKALIAVARELACAIWALGQQEKLMSEA

SEQ ID NO: 208339 - protein, 343 aa, unidentified
MQSIKFIGVDLAKSVFQLALADAQHHVVQSKRLTRSQFKTFFVNHPPVQIIMETCGTAHYWARTFITLGHQITLLPAQYVKPYVRRNKTDRNDAMALVEAIRNHEIHSVPVKTEHQQALQGLHRLRAQYMRTRNARINTLRGLLREFGILVPMGPRAAIKSAVETLDQIPSSLRPAVCAVIEEIQRLQAQMKAIENQLKQEVKTDDVLQRFMHISGIGLLTATATRAAVQTPDQFKNGRQFGAWLGLTPREYSSGNQRYLGRISKRGDKYLRTLFVHGARSVMVRIKIQQSNNKPLTRLQQWAYQLEQRVGHNKATVALANKMARILWATWMHQREFDGDYAR

SEQ ID NO: 208340 - protein, 410 aa, unidentified
MYKICCGIDVHKTFVVACIASTNEKGVTTYESHRFSTYTCGLKNLLQWLLSRNCKDICMESTGKYWIPVYNILENDCSIVLAHPQYVKAIRGKKTDKKDAKWIADLFKHDLVAGSFMPPADIRQLRDLMRYRFKLTCFKSSEKNRLQNCLTVSNIQLGTVVSDTFGKSAQAILDKLLENPADTSFDLDPLIHKSLKKKLPELRDAIDGYITPEQAGKLKVIKSHYEDLESRKAELEELILALAAPYQQELAILQTAPGISSIFTAIGIISEIGTNMEAFPSAKHLCSWAGLTPTNNESAGKKKSVRVSKAGCYIKPLLVQCANAVVTSKKHPEIRNRYLRLKKRRGHKKAIIAIARMLLTALYHMLKNGENYNSELYKKSDSLPVDREITVEQASIIARNQGYKIKSATA

SEQ ID NO: 208341 - protein, 339 aa, unidentified
MRLYVGMDLHSSNCYTGIIDENSKKLLGRKITNDKRKIMSALSPYKEDITGIAVESTYNWYWLVDALMEEGYKLHLANPSAMKQYEGIKYLDDRHDAFWLANMLRLGILPEGYIYPRETRGIRDLLRQRSRFVVQKTSLKHTLQQIYCNNTGVILGNNTMYGLSEEEIRNALHDEYLSSNGVSILSTIRFIEGQIKTIETQILNKLKGELPYTLLTTVPGIGIVLGMTIILESGQIDRFASAGNYASYSRCVPTAYWSNSKQKGGGNKKNGNKYLSWAFAEAANFAIRYCKEAKAFYQRKCAKTNQPSAYRAVANKLSKACYYIMKDQTPFDAQRLFQK

SEQ ID NO: 208342 - protein, 461 aa, unidentified
MRRKTKRKAKAKTTLPEGLETINLNAAGIDIGSTEHYVAVPPGGSSETVRSFGSYTAALYEMARWLKACGITSVAMESTGSYWIAPYQVLEASGFEVILVNSRHVKNLPGRKTDVLDCQWLQKLHTHGLLSGSFRPVNKVCVLRSYLRHRENLVHAASAHIQHMQKALTEMNLSLHHVLSDLTGLSAMMIIRAILAGERDPWKLAGMKDRRVKKSQEQIARCLEGDYRDEHLFALTQALELYEFYQAKIAQCDLQIEKQLHTFKAQVDPKKNPLPENPKKKSLKAQSNFELKTHLYAICGTDLTRIDGIDVMSAQSLISEIGLDMNRWKSEKHFTSWLNLCPSNRISGGKPLTRQPRKGHNRAADILRLCAQSAIKSSSAIGAFGRRLKARLDAPTAVKAVAHKLARIVYRMLKYGKQYRDAGERYYEEKYRDHLLRRLQKQAAAFGFQLTPQQPIMDPVS

SEQ ID NO: 208343 - protein, 315 aa, unidentified
MVTGIDCSKDYLDISVLKESKEVFRGRFDNNQEGFESMLPHIKDTHVAMEATGPYYFQLARFICEQEVKVSVLNPLSVRRFSQMRMSRAKTDRKDALLIAQYTEMTRPQEWRLPDGQVLRIRNLETYITGLKKRRHLLHGQLHALEASGTLEKDLQKEIESELDGYDVRIARKEKEIAGLIDENYKDLSQNLQSVPGIGPRSAALLIILTDGFDMFEGYRQLISYFGLAPRIYESGSSVKGKSRICKMGMGTMRKVLYMAATSAIRCNRACKELYERLRAKGKPYKVALIAAVNKLIKQAFAIAKSGKPYQVQRP

SEQ ID NO: 208344 - protein, 332 aa, unidentified
MNMNQQVRVANGAERPNAGVDVSKQHLDACWGEHELRVGNDAAGWGELTAKLKASQVELIVIEATGGYERGLVCALQEAGLLVARLNPRQARDFAKSMGVLAKTDRVDARCLRDFADVLARHPDRLKYITPAADSQREALAELMTRRRQLVEMRVAESNRLELAAKRARRSILSVIRTLDKQLANIDRDAQRHIDDHFDGQRELLDSVKGVGPVTTLTLLAALPEIGALGRRAIAKLAGLAPIANDSGPRKGQRHIRGGRGEVRAVLYMATLSATRSNPVISAHYQRLLASGKPKKVALVACMRKLLTILNAMVRDGLPWDSSRHTQAQNVA

SEQ ID NO: 208345 - protein, 375 aa, unidentified
MCERAVLTNRPSLDLSPFVLEGHRACRGAWDRSGVFLNPNSCMGFEPEPSKEGSWMMAQNDLIVAGIDVAKDKVDVCIRSLSLRRTFASTAEGRRELASWLRRKKVGKAVMEASGGYEREWAKALRDAGIEVRIVDPKRVRSFARSAGRLAKNDAIDAEMIAWFAETFGEAPGQAYDAAREKLAQIVNARQGLLDLQTKLQNRGEHAGPEPVQKMHARLLKAIAVEVAKLEAAIAAMIKANPHFAELAEIIESVPGLAGTTSASLIAKMPELGQVSNKIAPALLGAAPYDDDSGRRRGERHIKGGRRKVRNLFYMACLGAATRHNPVLKAFYRRLIAKGKEPKVALVACMRKLIVILNIMIARREKWDASRYAVG

SEQ ID NO: 208346 - protein, 417 aa, unidentified
MEELPFRIFVGVDWGDREHQVCSLIEGKAQQKRFEHSGKGIASLISWLMELCERQPGTVAVAIETPHGVLVDALLEHGFAVFAINPKQLDRFRDRFTVAGAKDDRRDALVLSSSLRTDPQAFRRLEPEDPLILQLREFTRANRNLEREHRRLCNQLRAQLNRFFPQILQLSKAADEPWVWSLLERFPSPDKVRHAHESSVERILREHRISRFTAVQTLEILKSPPLPVTEGVVEASTQHIALLLPRLRLVRDQRRECEQHMARLIKKVAEAEDAQPGAKREHRDVEILLSQPGVGNIVAATVLAEAYQPLVQRNYHVLRACGGIAPVTRQSGSTRTVTMRYACNQRLRQAFHWWGNSVCHHEPRDQALYTAHRDRGHTHARAVRAVMDRRLNILVACLEHGRLYQTDYTHQETLDKT

SEQ ID NO: 208347 - protein, 408 aa, unidentified
MKVQYICCAGLDVHKRIVVACVRKGAFGEEVISKVKSFGTTTPELMEMIEWLKSCGATHVAMEATGNYWMPIYNLLEGHFELVVANAAHMKAVPGRKSDVQDAELLRHGLLRSSFIPSREQRDLRELTRHRSALAGKRAQAANELQKSLESANIKLQSVLTDITGASSMEMLQELISGKNNPKELAQLAKRRLRAKIPELEKALRGNLRRHHQMIIEQLLADIGLFAAQIAELDAYIENLLRQEQEIIDRLDDTPGINRRIAEIVIAEAGTDMNRFPNQYHFASWIGLCPGQNESAGKRKSGKTRKANRALRCALVEAAHGAVWKKDSYYGAQYRRIAVRRGKKRALVAVAHSMAIAIYHMLKSKTAYQELGANFFDTINPIKALNRLTKRIENLGYHVSVTVADRAA

SEQ ID NO: 208348 - protein, 389 aa, unidentified
MSKYTATASTHERSNMTSALLLAFELGEESWLLGFSVGGVGKVLRRKIVSRDTESLLREVARAKEHFGLGGETVVRSCYEAGRDGLWLHRFLVSKGIENVVIDSASIEVNRRKKRAKTDRLDVLALVDLLWRYVVGSRKAPFAVVTVPEIEDEDLRHLGRELKLLKKDRTRISNRMKGLLANNGLVIRGRRRLAAQIRGLRMWNGEALPVQLESRLLRYAKDFDTHSERIVELEQERRVLLRSDERCSSHEKVLRLLELRSVGIETAWCYGMEFFGWRNFQNRKQVGSLAGLTPTPHGSGQLDVEHGIGKDGSRLVRGVAIEQAWAWLRFQPESALSQWFPSRFGGGSKRLRKIGIVALAWKLLIAFWRFVEFGEWPEGAVAKVRMRLT

SEQ ID NO: 208349 - protein, 395 aa, unidentified
MFIVGIDIAKRSHEAIIIAEDGQVVRKAFSFRNNCTGYNLLLEQVRRLTLVKSQIVFAMESTAHYWLALYARLLKAGYAVMVLNPIQSHSLRELYIRKAKTDARDSLIIADLVRFGRCKASNVPQDKILALRELCRSRAYLVDMAADLKRKLIALLDRIFPEYESLFDSVFSKASIAVLSKYSTPQKVKNAHLGKLTDILMESSNGHFGEWKAHQLKEAACSSFGIDDSGGVYSTLLGMFLEQILSLTAQADSLEKQISVFFQEFNNPLTSIPGVGTVLAATILSEIGDITRFSSADKLLAYAGLDPSVKQSGEFKSNQNRMSKRGSPYLRRAIWLASTVAVHRDPMFQTYYEKKISEGLHYMNVIGHVSRKMTAVIFAVLRDGQPYQPVLQTAD

SEQ ID NO: 208350 - protein, 431 aa, unidentified
MKTYILRDPKAVEPQYRKRNPWPNPLRNDPVLNATVDAICGPAAAPPPAFGPRVLCIGLDVHNDSIAVSLAPGDSTEVRRYGILGGHHDDVLRLIKKLSTAHPGAALQFCYEAGPRGYPLCRFIRAHGAECIIVAPSKVPRQPGDRVKTDRRDADQLARLYRAGELTGICVPDPQDEAVRDLIRARYQVQKQQHRARQQLKMFLLRQNIRYAGTKPWTLKHLRFLATVKLPFAEQQFVFQEMVHVITEAGQRLERYEKQIASVVEGWRWAPVVKALMSLRGVALLTGATLVAELGDLERFASAPQLMSYLGLCPGEHTTGADRRQGGITKMGNGIARKAMIEAAWNNRTPARISRTVLARQEGLPKAVTEAAWNAQTRRHQRYKHLTGVGRKKSQVAAAALGRELAGFVWAIGRMVKPRAVKTEPVEPAAA

SEQ ID NO: 208351 - protein, 434 aa, unidentified
MKVTRGMRRRTAKLERRAALITPDTLIAGIDLAKADSVVVFVRARDKARLGRLRIPTTATGVQTLVRRAGELQQRHQLPRLVLGMEACGHYWKILAKAVAKLGVPYVLVQSFVLARSREMDDLTRDKTDPRDAGLIADLVADLRFLEAQLEEGVWAELRLLAEARDDRGVEVRSALQEQRALLELVWPTLLEQVRDLDGTHVQAALRLGLSPLQIAALTPDEFSRRLREEHHDHRFLGWMAERIWQAAQLAVDSDELSAAILRIQLAALRVREGRRTIALLDQRMAAALDRTGYGWMRGQIRGLGEVGLANLLALTGDLRRFDHARCLPKLAGSNPTERSSGQSKASGGIHRRGRRTLRVFAYQAAVNLVKYHPDFRQRFLALTKRDEHRLENKQAYVAIANKLLRTLWSMATSGQGYDSEIALGVRRQEARAA

SEQ ID NO: 208352 - protein, 343 aa, unidentified
MDYYVGLDVSLKQTSICVVNQAGSIVHEGVADSDPEAIASFVRSKAPGTLRIGIETGPTTTWLWTELKRLGLPVICIDARHAKAVLKMQINKSDRNDAAGIARIMQTGWFKEVRVKDLDSHAVKALLASRALLVKIKRDLENQIRGLLKNLGLVIGRAKFNVFAVRAEELIEDRPELVAAVRPLLDARKAIERQVGDLDRKVHKLARHDVQVRRFMTVPGVGPITALCFKATIDDPTRFRRSRSVGAYVGLTTRRHASGEVDWSGRISKCGDAMLRMYLFEAAGVLLTRVPKWSGLKAWGAKLTKRNGLRKAKVAVARKLAVILHRMWIDGTEFDWSTKKAAA

SEQ ID NO: 208353 - protein, 408 aa, unidentified
MNPLYVGIDVSSKNNVIYLMLPNGDKHSSFSLANSHDGSTQLVKRIFAAMTSNNIDSVLIGLEATSVYGDNLVYFLKEDTTLASFDRKIHVLNPKQVNKFKESYNDLPKNDYIDAFVIADCLRFGRINKEVYMDDYRYKALQNLTRARYFAVTNLTKEKQRFINVLFKKYSTMTQEKVFSDTFSTTALAVYEKFESAETLAKMDLQELTAFIMEKGKNRFPDPDAVAKALQKAARSSYRLPKTVNDSVNQVLAISITSIRALESQIKAFDKAITKQMELLPNVLISIPGIGPVLSAGIMAEIGDINRFQNQAALAKYAGLAWQQHQSGDFEAQTTRMIHSGNRFLKYYLCEAAFSLVRCDKEYSRFYRLKYKEVNRFQHKRALALTARKFVRLVFALLKDNRLYRPAE

SEQ ID NO: 208354 - protein, 367 aa, unidentified
MKKVSTAAAKQNRNFSQQKLTIGLDLGDRNSWYCVMDEAGHIQLEQRVRTTAKALREVFGAMPRSRMALEIGTHSPWISRLLAELGHEVIVANARKVRLIGESRKKDDRLDAQTLARLARIDPQLLYPVKHRSAQAQSDLMMIRARAGLVRARTGLVNTARGLAKSYGERLRGCNVRNMNAEKAEGLSPELQQALEPLLSAIEELSERICEYNDRIEALAEQSYPQVELLKQIKGVGTLIALTYLLTLEDPHRFGKSRDVGGYLGLQPGRRKSGQSEPQMHISKEGDPYLRTLLVQGAQHILGPFGVDCDLRRWGLKLAERGGRNGKKRAIVATARKLATLLHHLWVSGEVYEPLHNSSRMTVAAAA

SEQ ID NO: 208355 - protein, 442 aa, unidentified
MNIYDNHPKMKHIYIGVDTHKTMHHAVIINCFNEKLDTLTFNNNNGGFNELLNMVNTYTTDGLTAIYGLEDTKHLGHALATFLMAKNCAVRVVNSTLTYNERKKYPIISKTDDIDATCIAKVTLDELDNLPVASNDEIYWTLKQITKMKKSIVFDNIKAKNKLHAQLLHHYPYYTEFFSGFDGKTALDFWEQFPSPKHMTLSVEELSDFLYEKSKGVFAMAKATQIYNLIHNEKYESMNYQNERNILITMLVKQIKHNNKQMLEIDNSIISLYDELGFKLHTIKSLSKVTSAEIIAHIGNINRFSSKDKLARYAGIAPVNFSSGGKDKSIRNEFGNRTLNSHIYNLAVRSISQGNSRQQPFNPIFLEYYHRKISQGKNKQQSLTCVMRRLINIIYVMLKNNTEYQVKEELKNECLKTYHEKIKPVIDKSNSSKKIKAVNKKL

SEQ ID NO: 208356 - protein, 371 aa, unidentified
MGESSKTLFVGFDVHKDTIAVAYAPEDRGAEVVSLGMIGTRQCGIDRLIRGLEAKGATLQLAYEAGPCGYWLYRYLTRRGLNCFVVAPSLIPRKPGDRVKTDRRDAVPLARLLRSGDLSSIYVPTVEDEAIRDLGRAREDTVRDLKRSKVRLKAFLLRQGIRYEGRANWNAAHLRWVARVVCPTPAQQIVFQEYVHAVTEHSDCLRRFETELATAVKTGRLYPVVEAVQALRGLDLTGAVTFVAEVGDVTRFDRPRQLMSYLGLMPSEYSSGQHRHQGGITKAGNGHARRALVEGAWAYRYPAKVSRHLQLRLERVPTEVRAIAWKAQLWLCKPYRVLSARGKHVNQVVVAIAREMAAFAWAIARTVPIAS

SEQ ID NO: 208357 - protein, 339 aa, unidentified
MLYVGIDIAKNKHDVTALNVPGKTVLKPLTFSNNKAGFELLDLSLRQLNQDCLIALENTGHYAFNLLNFLHEQGYKVYTYNPLLIKEFAKSLSLRKTKTDKKDAHGIALKLLSDPNREQFQHDNRQVELKILARHIHRLKRKQSDWKVQYTRCLDIIFPELDKIVGKHAECTYQLLTRYPNPQKRLEAGFDKLIEIKRLTASKIQDILSVAPRSIGTTSPAREFEIIKHYKRLIDKAETCVNDLMAEFNSVITTVTGIGNRLEAVILAEIRNIHAFDNPAQLQAFAGLDSSIYQSGQIDLAGRMIKRGSPHLRWALIQAAKACPRFSPAFKAYLKTKLE

SEQ ID NO: 208358 - protein, 356 aa, unidentified
MSRDIKYIGMDVHKEAVVIAVLNSSGKLVMESIVETKASSILQFIHGLRGELHVTWEEGTWAAWLYDLLQPHVQQVLVCDPRRNALLKEGNKSDKVDARNLADLLRTGMLRPVYHGEHGLRTLRELARSYQTISKDLNRVMNRIKALYRGWSIPCAGTQVYAPRYRQEWLHKIEHAGVRRRAELLYQQLDGLQRLRRTLRPELLAESRKHKAAKLLRQIPCIGPIRAARLLALMQTPHRFRSKRQLWTYSGLGIETRDSAQYRFVCGQLQRSKKPQQLRGLNRNHNHEMKEIFKGAATRASCGVGPLREFYVALLDKGMKPEMARLTLARKIAAITLTLWKKEEGFDAELLKTQAA

SEQ ID NO: 208359 - protein, 378 aa, unidentified
MNRIIKIGMDVHTTNYTLCIFEPSFEHDGTVHCITQVKPEVKNIIHVIETFKKKHENEELKIVCGYEAGCLGYSLYHELKEKGIECVILAPTTMKAEKGGRKLKNDYRDAKMIAECLAYGGYSAVHVPTELDNSVKEFIRMRDDIKENLKSIKQQIIAFLTRNGKQFDGKSFWTRKHIDWINTVSFSEPLLQDTLKEYMIEYNHLCDRVETLDKQIEEISLKEEYVEKVQQLQCLIGIKTHTALSLIVETSDFNRFKKGNMYSAYLGLIPGDDSSGGHEDKLGITKAGNNHLRRLLVEAAQGYTRGRVGFKSKDLKSRQEKCSSEVVAYADRANERLRRKYYRMTLRGKKYNVAKTAIARELACFVWGIMTDHIDLCS

SEQ ID NO: 208360 - protein, 409 aa, unidentified
MLFAGIDWASTEHAVAVNDDAGRALASFTVEHSAEGFDKLVARLRAFGEPGGLTVAIERPDGRLVDRLLEAGHPVVAVSPNAIKAWREGEVVSGAKSDPGDAAVIAEYLRLRFHLLEPLQPFSDHTRALRAAVRARGDLVAQRTAAHNQLEATLDAFWPGAKEVFSDVTCKIALAFLRRYPTPASAAKLGEKQMAAFCRKHGYSGGRSAADLVERLRRAPAGITAVAETAARKAAVLAYVGVIASLNAAIKDLDKEVATALGEHPDGEIFTSLPRSGLINAAQMLAEWGDCRQAYDAPEAVAALAGMSPVTKRSGKYKAVHFRWACNKRFRTAVHTFADNSRHGSDWAAGIYAQARARGADHPHAVRILARAWIRVIYRCWSDGVGYDPAKHKAAVALAARDKPASQAA

SEQ ID NO: 208361 - protein, 412 aa, unidentified
MLYCGIDSSDQSLEYHLRDSQGKVLCCGQVVPNVEGLAELFARLDAHDRPEQIGVALECAHGAWVQLLLDQGYSVFPVNPKTVGAFREALSAAGEKCDSIDAGCLALFLATCHHKLHPLHPDAPDIVVLRFQCQDRLRFVEERTAKLNELQALIKIYYPAFLGLFGDLSSRIALDFLDEFPTQDRMRAMTSRRLENWLKRHHYSCLRRLEDMKAILSKPVLPVPAHLQSAKAPRIQFLAQALIALEATITGYDREITRMFEAMPEADWIGSLPGAGTVLAPALLACVGRDPNRFAEPAQAQALIGTAPVSHSSGKSYAPHFRRGCWKFARRTFQLFAYTSLQCCTWAQELYSRQIASGHGHHAALRVIAHKWIKIILAMKRSGQPYNEAIFTNSQSRHLLKAPGGNLVPAFP

SEQ ID NO: 208362 - protein, 342 aa, unidentified
MPCYVGLDASKRTTKICVLDEKGRVLREGSVESDPKAIAGFLRGEGRRYARVGMEAWSLAPWLYAGLARAGLPIICIEARHAHAVLNATRANKTDKNDARGIADIMRTGIYKTVHIKTPASQQARALIAVRKLLKSKSLDVENGIGATLLVFGLKLKSGARSTYERRVRRLMVRDGFLKGLIEPLLSVRKRVLEEMDSFEDRLKVMAAEDPVCRRLMTAPAVGAVTALTFRAAVDVPGRFVRSRDVAAHFGLTPKANQSGEMDRQGGISKRGDAGVRVALFMSAMYQLRPGAKPSSLKTWGEAVAARRGRMKALLAIARRLAVILHRMWVTDTDFRWTAETT

SEQ ID NO: 208363 - protein, 371 aa, unidentified
MDESTKMLFVGLDVHKDTIAVAYAPDDRGADVVSLGIIGTRQCDIDKLIRRLESKGATLVFVYEAGPCGYWLYRYLTRRGFGCSVVAPSLIPRKAGDRVKTDRRDAVTLARLRRSGDLTSIYVPSVDDEAIRDVSRGREDTMRDLKRAKVRLKAFLLRQDLRYEGRANWNAAHLRWLSRVVCPTPAQQIVFQEYVRAVTEQTERLQRLESELHELVKGWRLYPVVEAIQALRGLELTGAIVLVAELGDLTRFDTPRKLMSYLGLTPSEYSSGGRRRQGGITKAGNGHARRVLVEGAWAYRYPAKVSRHLQLRLEKVPAEIQGIAWKAQIRLCKRYRQLSARGTHANHVVVAIAREMAAFAWAIARTVPVAA

SEQ ID NO: 208364 - protein, 343 aa, unidentified
MVHYVGLDVSLKQTSICVVNQVGSVVREGVVDSEPEAIAAFVRSKAPGAVRVGLETGPTATRLWSELKQLGLPVICIDARHARAVLKMQINKSDRNDAAGIARIMQTGWFKEVRVKDLGSHSVRALLASRALLVKIKRDLENQIRGLLKNVGLVIGRAKFNVFAVRAEELIEDRPELIAVVGPLLKARQAIEQQTDDLDRKVLKLARHDVQVRRFMTVPGIGPITALCFKATVDDPTRFKRSRSVGAYVGLTTRRHASGEIDWTGRISKCGDAMLRSYLFEAAGVLLTRVPKWSALKAWGMRLAKRNGLRKATVAVARKLAVILHRMWMDRTEFNWSKKEVAA

SEQ ID NO: 208365 - protein, 337 aa, unidentified
MENVALIGIDLGKHSFHIHCQDRFGKALLRKKFNRAKLIESLATFPVCTIVMEACAGAHYMARRLAEFGHESKLISPQFVRPFVKSNKNDFIDAEAICEAACRPSMRFVTPKTESQQMLGALHRVRESFVRDRVKASNQIHGFLLEFGISLPIGHAAIKRLPSVMAEHELPARLIAMLERLHAHFKYLEQQIAEIDKELASQLGDDDLGQRLMTIPGVGPITASVLAAELGDGKHYRCSRDFAASVGLVPRQYSTGGRANLKGISKRGDKNLRRLLVQCARAYMQRLERQTGRLADWVRSMLTRRHSNVVACALANKLARTAWALAARHTEFLAMPT

SEQ ID NO: 208366 - protein, 414 aa, unidentified
MAEEETVSWFAGVDWGSERHQVCLLDAQGTTVGEREFPHSGEGLAELGDWLLSMASAASTVAVAIEVPHGPVVDALIDRGFVVYAINPKQLDRLRDRFSVAGAKDDRRDAYVQADGLRTDRRLFRRLQVADPRLIELRAWSRLAEELGAERVRLSNRMRHQLWRYYPQMLKLTKDLAAPWFLELWAIASTPAKAGRLRKSTVERLLKQYRIRRMDAETVLRILREPAIKVAQGVAEAASIHIRSLVARLRTVNRELREAERKLDELCTAVSEIEQTSGESLQRRDVAILRSMPGIGRINLGTLLSEASGPLSRRDYEGLRTLSGAAPVTKRSGKSLIVIRRYAAHVRLRDTVYHWARVATQRDPKCRARYTALRQRGHSHGRALRGIADRLLALACVLLQRQTLFDPHFGQPTA

SEQ ID NO: 208367 - protein, 412 aa, unidentified
MQVIIERCAGFDVHQETVVACVLIGAPGEWPRKQVRTFRTMTRDLEALRNWLQELGVTQVGMESTGVYWRPVYAVLEGHFDLIVGNARHIRNVPGRKTDVKDAEWIADLVRHGLIAKSFVPPAPQRELRELLRYRRKLVESQAAERNRLLKLLETANIKLASVASDVFGVSGRAMLKALIEGSASAEAMADLARGQLRRKRDDLVLALEGRMEEHHRFLLATQLRRLEAAEQDIAALDDRIEAKLESYRVQHGLLMQIPGVDWVVAAVLIAEIGVDMSVFLSVHHLAAWAGVCPGNHESAGKQKSGRARKGNVHLRTMLVGAATSAARTKGAYLKDKFHRLKARRGAMRAALAIAHKILVAAYHMLAKGLPYRELGEAYLDQIAQIRTVANLKRRIERLGYNVTLEPKAEPA

SEQ ID NO: 208368 - protein, 410 aa, unidentified
MEVIHRRCAGGDVDAKRIVVCVRIARDRRIHRETRTFDTTTKGLLALADWLEENRCTHILLESTGVYWRPVYHILSERLTVVLANAAEVKNVPGRKSDVSDAAWLADLMAHGLVRASFVPPPPIQELRDLTRTRKQLVREVARHKQRLQKILEDANVKIAHVLSDLLGESGRRMLEALIAGETDPSRLADLGDVRLKSAREDRVEALRGRVTEHHRFMLNLHLTQIRSVEKTIVDLDQRIGKAVTPFRDVLGRIVKIPGVSKVNAPAVLGEIGIDMSHFPASPQIVSWAGVCPQLNTSAGRKLSTKTRRGNVWLKTLLVQAAWAASRTKGTYFEAKYRRLRARRGPQKALIAVAASLLIAIYHVIRDNAEYRDLGGDHFDRLANKDLLAKRYLRRLEKLGFHVTVTTEAA

SEQ ID NO: 208369 - protein, 345 aa, unidentified
MEQISRIGMDTSKYIFQLHGVNTAEQPVLRKKLRRKEMFAFLEKLAPTVIAIEACGASHHCARLLQSFGHSVKLIAPQLVKPYIKRGKNDAADAEALCEAMSRPTMRFVPVKTAEQQAGLMLVGVRDRLIRNRTQLSNAIRGYAGEFGLTAAKGKAHLAPLLERIHTDDNLPALARELFAAQAEEYAQLQAQIDEVDARLMAWHRADECSRRLTKIPGVGPIGAVLLTMKTPEPELFRSGRQFAAWIGLTPKDHSTAGKVRLGGITRAGDEGLRSVLVVGATTVIQHAQRGGRPSPWLTQLLKRKSPKLAAVALANKTARIAWKLMVTGENYAAKAAPAALAAAA

SEQ ID NO: 208370 - protein, 424 aa, unidentified
MKVTYQTCCGVDVHKSFLVATIVKTTGGIEPSYQKKRFSTFNNSILEFKQWLLDNGCLDVCMESTGKYWVPVFNLLEDEIKVVIANPKWVKAVKGNKDDTKDSKWIGDLFRLGLVKGSYIPCKIVRILREYTRYRYKLVSCRSSEKNRYQNALTVCNVALDSVVSDIFGKSSTSIIDYLLEQSGTSINHEEIASKLLRSLKSKEDAVIESVEGYQMTDAQKYRMRLIRAHMDYITAEINDIDKMIENMISSNPDFENAVQLLCTIPGVKRDSAITIISEIGTDMSQFSSSKRLCCWAGLTPGSNESAGKKKSVRITRAGVYLKPALVQCAHAAVKSDKSPYYKKKYESLVKRRGKKRAIIAIARMILTAIYQMLSTGEQWNPSDLYKIDMPVALVEKQKAKAIKQAKKLLQREGLLPPDEPLAS

SEQ ID NO: 208371 - protein, 387 aa, unidentified
MSQTVAAPIPAAVDHERTLVLAIEVSNKSWVIAAQVPGLPHTKAKRTIDPEAEALLAAIAAYRARAAATGRSIERVIAVYEAGWSGFWLARWLMRHGVEVYVVQPSSVPVDRRIRRAKSDGIDSELLLRTLLAWLRGEPRVCSMVPVPDEADEDARRCVRERSELISERIGLTNRIGAILATLGVSDYNPLLRNRGGRLAELRTALGEPLPANAHAKLKRLLARLELVLTQIAELERERDAVVETEASDGASKMIQQLTALRGIGVQSATVLVREAFVRRFANGKALGSYAGLASSPYSSGGIDREQGIGKAGNRRVRTVMVELAWLWTRYQPGAAQVCWFRERVASTGRRVRKIMVVALARKLLIALWRFVIDGVLPEGAVLKPAA

SEQ ID NO: 208372 - protein, 384 aa, unidentified
MTEVGSAKVVERRTARQTHSPVIHEIVPQLGRLAAPVPSPDSCQSRSRSELESARLGRVQESRRTRSSVNAAEQVHVGIDVSKTTLDVAIEPQHERCQVANDERGIQQLVERLRQLHPERIVLEATGGYELAALAALGCAELPAVAVNPRQVRDFAKAIGRLAKTDALDAQLLAQFAAVVKPELRPLPDAATRELAGLLARRRQLIEMRTAESNRLSLAVEPVRPEIREHLRWLNKRISQLDRDLHDRLRASPLWRDKEDLLRTIPGVGPVLSITLLAEVPELGHVDHRQLAALVGVAPFNCDSGKSKGTRRIWGGRAAVRAVLYMATCTAVRHNPIVRTLYQRLVAAGKRKKVALIACMRKLLTICNAVIAHGTPWRYQPLDN

SEQ ID NO: 208373 - protein, 357 aa, unidentified
MISIGIDVHKKKCTATLKRDSKRIVEQTSFCNNSYGINEFIQHIKGCYKEDAIAVCESTGNYWIRLHDTLEDNGINTLLANSLKTKIIAQAKLKDDKIDSNVLVDLLRADLVYESFVPDKEYRELRQLVRTRLNLVTERTVLKNKVHALLAKYEYQCPVSHIFSNKGTEWLKTIDLSWIDRMAVDAYLDALVAIQKQIGIFTAKIAFVSKEDQRVKLLMTIPGIDYFTALTIVSEIVDIRRFSTPWKLVGYAGLAPSKRDSGDAHRNGGHITRQGSKWLRYAIVEAANTSTRCDDRIGRFYKRIAERRGPQKARVAAAKEMLVIIWHMLIKNEPYRTMNREMVERKYKKMERESNMV

SEQ ID NO: 208374 - protein, 431 aa, unidentified
MKYKHARKQNQRIQQITESTLVVGADIAKKTHVARAVDFRGIELGKDCVFGNDHQGLTKLVTWMKELQRRHHKTEIVLGIEPTGHYWFPLAEYLQREGVRVVVVNPHHVNKSKELEDNSPTKNDYKDAKVIADLVRNGKYSEPKLPMNVYADLRILMNLREKVMVNFGQVQRRIQNWLDRFFPEYGQVFKDWEGKASLITLSEFPTPSEIVALGVGAIVRRWKEDVKRAVGPKRASQLLETARTSIGLKQGLAAAKIELKTLLEQYEMFAKQLEDIMMEVERLLAQIPGTKEMLTIPGVAIVTLAGFLAEVGDLSGYDHGQQIIRLAGLNLKENSSGKKKGKSTITKRGRSRLRALLFRAVMPMVTKNAEFKALHQYFTKRSHNPLKKKQSIVALCGKLIRVLYTLGTKRIPYQPSDVLGPVRQAQLQMAA

SEQ ID NO: 208375 - protein, 355 aa, unidentified
MQKIYIGVDFHARQQTICYLTTDSGEILLHQLKHEDKAAVRSFYAQFSGPVIVGLEASGYGPWFERLLEELGCEVWLGHATEIRRRARWRHKNDRRDAALILDLMLQDAFPRLYLPPLPSREVLRMLRYRQKLIKIRTIAKNSLQALALQAGLAKGPHLFTKIGLQELGRAPMSPAMQWQQKQWLQLLEPLNQRLLETMLWLKQQSQADQRISRLRTHPGIGLLTALCLVHSLEPVSRFANTRKVTAYAGLDPVERSSAERQRFLGISKGGSRVLRFLLVEAAHTALRKDAELSRFYQRLAERHGRPKAKVAVSRKLLIRAFIMLRDEIDYAEFQRRAVAARSAPPAHGHLRPEP

SEQ ID NO: 208376 - protein, 328 aa, unidentified
MKLQHIIGADLSKESIDLASDQLQTHLKIANTVNGFGQMLKWLRQQKINCSDVMIVMEHTGLYSYHMEKFLYQHQISFAKVSALAIKRSLGLVRGKNDKIDAQRIARYGFEKKDVLVPAKKPHEAIKRLQMLHSTRNRLVRQRASLKCAVKEYKSVTKQSDLIIESQLILIKSFSQQIKKIETQITELITKQQEVNQNFQLLTSIKGVGKVVATAAIIKTGNFTRFMNGRKFACYCGTAPFEHSSGKSIRRKTRVSHLADKQMKTLLDQSAKTAIQYDKELKSFYERRLEMGKSKKSTINIVRNKILYRMFAVIKRQTPFVENYLQTT

SEQ ID NO: 208377 - protein, 443 aa, unidentified
MDSTATNPSQSSNASSTSPDAASESFRSLTHFGGFDWAMEEHQFAVVSQEGTVLLNLRFTNDAQGWAELRAKIAAYPRLGVAIETSCGPAVERLLELGVIVYPINPKAAERFRDRKAPSGAKSDPLDAWCFADALRTDGHGWRELRPLDPITAELRILCRDEIALIEQRTAMVLQLKAALHEYYPTALAAFEDWTSQAPWEFIISFRDPHRLVSAGKRKWEKFLHIHKLYRPETAAKRLELFAKAKQFASPSQAVTNAKSLLATTLARQLCLLQTQLDEYRKRITELFNNHPDHDCFGSLPGAGPKIAPRLLSELGNDRARFDSHQALQLYAGTAPVTLQSGKRSVAKMRRACNKTLRATVHLWADLSRPLCAWAQAYYQQKKDQGMTHAAALRCLGQRWLKILWKMWQTRTAYNEALHMRNQVSHGSWVVGLMTPTQNPATK

SEQ ID NO: 208378 - protein, 429 aa, unidentified
MARMIIGMDPHKRSATIEIIDGREQVLAQGRYGTDSDGYRAMLAVGRRYPQRVWAVEGCNGIGRHVAQRLVADGEVVVDVPAKLSARARVFATGQGCKTDPVDAHSVAVVALRTNGLRQVMVDDATVALRLMVDRRDWLGRARTDTVNRLHALLLDLVAGGAKKHLSAPQARTILATVRPRDVVGRTRRQLASDLITELAVIDKKIKQANAALTALIATTGSRLRRLNGIGPSVAARLLGDIGDITRFASRNHFASWNGTAPLDASSGDQQRHRLSRAGNRRINRALHIMAVVQLRHDTEGRAYFRRKLAAGKTPMEAMRCLKRRLSDVVYRQMRADMKASPGGHSGATLTSSAADPTPTVDSSDKPQPGLSHEPTPPTTPVEADPPPAPTQAAKRPRTRTAKPARPTALTSTPRTTSAHPRKRSSSKA

SEQ ID NO: 208379 - protein, 422 aa, unidentified
MLGVGVDWAESFHDVALGRPGEGVIEQFRIEHGPAGVARLTARCLELEPDPAEVRVVLETRHGLLVEALADAGFTVLPVNPGLVARRRGPAKKKDDTEDARICCLLALDAYLDLRKLIPHGQTGAELRAIARDDERAARDERRIGNRLRADLLAVFPAAITIADGDLGAAVFLKLLERWPSADALAAATGKEIEAFARSCRHGWPAQFADRVTAALATPQLSVRPELARAKAGTIRLAAAQLLLLRAQRKAWQRRMGELLLGAPRHGRSKTPEDPDPGKAFPGGEIYLSMPGLGDRLAARIAGEIGEHPEQFTTPNALQCYAGRAPVTRRSGRSEFTIARRLACNRHLGEAVQQWAFCSLTRSAWAREFYDTKIAAGKNHHTALRTLGNRWLEVLWHCLRLNVPYDETIHAANRNRALKNAA

SEQ ID NO: 208380 - protein, 387 aa, unidentified
MQKPHDNSKASLAAFMQDNTLIAVIELSLSSWLVAGLIPGASREPLKKLEPNPEDLLKLLHGWRDEAIKAGRLITRIAVAYETGRDSFWLARWLRERGIDAHVIHANSVTVSREHRRAKTDRLDTAMLKRGFLGWLRGERGHCTVAIVPTMEEEDAKRPHREREGLVHEQTRVVNRMKSALIQFGVRNFNPKLRKASVKLETVRTPEGKSLPPNTIAALRRDMERLKIIKQQIKAIEQARLQQFEQKPEALANRMIYLLVRIYGLGLETADLLVHELLSRTLRDRRAVARYAGLTGSPDESGSKRREKGLSRSGNARVRKIMIQLAWRMVKFQPDSALVQWFKQRTENAKRSRKPMIVALARKLIIALWRYANDGLIPAGFRLHSAA

SEQ ID NO: 208381 - protein, 340 aa, unidentified
MKVTTVGIDLAKSVFSMYGIDEHGKAVMKRTVSRGKVMEVMASIPPCLVGVEACSGAHHWARELGRLGHLVRIMAPRFVAPYRKSGKNDGNDAEAICEAVGRPTMRFVAVKSVEQQGLLVVHRVRKGLTDERTALINQLRGLLSEFGIVIPKGRYQARHQLPVVLEDAGNGIPELARQVFLEVNERIREIDARILAYDRRIEALARESEAAQRLMAIPGIGPVTATAIVATVGHATEFKNGRQFAAWLGLVPRQYSTGGKTRLGRITKQGDVYLRTLLIHGTRAVLARVSERTDRASSWVRSLIERRGYKRAAVALAAKNARTIWAMLAKGQAYCQSAPA

SEQ ID NO: 208382 - protein, 406 aa, unidentified
MNAVGIDISKGKSMVAIIRPAGEILVKPFEVSHGEDSLKKLSAKILSFGENTRVIMEATGRYHEPVAKILHEAGIFVCVLNPVVIKQSGAGSVRKVKSDKKDALKIAKYGIDNWRDLRGHSVMDITRQQLKLFSRQYNLHMKTVTALQNNLISLLDATYPNVNRLFSSPARDDGSQKWVDFAMHFWHVDLVAKVKFETFADRYLKWCKRNGYKFSLTKAQRIHSTSEGSFATLPKSDETKLLITSAISALSQTMKVRATVKLEVIRIASLLPEYEAVSALYGVGEITAAQLIAELGDVRQFNNRGAIVAFAGVDPEVNQSGTQNRISNKVSKRGSPHLRKTLFQVVSTHLKRSPSDEPVYQFLDKKRKEGKPYYVYMTAGANKFLRIYYARIKEHLNSLDESHLLQ

SEQ ID NO: 208383 - protein, 394 aa, unidentified
MKLVGIDVGKNSHHFCVMDKETGEFNVTPSSFSNNKEGFDFLINSLKPYSKKSILLGMEDTGHYHVALLKFLLSNGYTVALINPKTTDLTRKMEGGITKNDKLDTITICDVLDTPERKKQYRITKVDRFDLYEQRQLTRHHHNLKEELNIYCNRLQKSIDLVFPEFNTLFGSKYGVVYMNLLKTFGSAEAIASTDIRTIRKCFEIKGRGGRISLTAEKLKECAKNSIGISSEVETIQIKHLVSQIMLIKEQIAEIDKKIEEFSIKNNSPILSIPGISHFSGTSILAELGDIGNYSKPSRIIKFAGVAPYHYESSQYNAQHTAITKKGSKYLRKTLYQIILPVINNNPVFQKYYRLKISQGKGHRCAQGHCIRKLLRIIYHLLETGQSFDPALLR

SEQ ID NO: 208384 - protein, 340 aa, unidentified
MDKITKKKWFIGIDISKVNIDAAIVNENEPKRFQNGRFSNDLKGFEAMENWLSKHDVKVKDCLFCMEHTGTYGLLLFAWLSKQNADFCVEPGLQIKRNLGMTRGKADKIDARRIATYAMEKKSKLKQYELPSENLIRIKQILTYRDQLVRLRTSLKNSLQSHQEYQQISSLNFVTKDIQKQIMQLDESIESCVKQIKEIIKSEEYLKQNFKLATSVKGIGLVIASFMLVSTNNFTGFENGRKYACYAGIAPFPNESGTSIKGKTKVSHLANKKIKTLLSNGANSAKSHDPEIKAYYERKIEEGKDHKSVINAISCKLVNRVFAVVKRQTPYVSTYQQKIA

SEQ ID NO: 208385 - protein, 327 aa, unidentified
MIEHYIGVDLHQAFFQVCAVNAIGTRLWEERFPRSEAGVAALLARCDRRTSLAVEASTPTWHFADAVSDHVGDLRVVDPVKTKLKAGYAAKTDRLDARRLADALRRDSVVGIYYPPVAIRELRELCRYRHAIVQVRTALINRLRAVLLRQGIVDGRRLARTRSDAWLETLTLPPRAAASVAGLRRLLTTVRTAAADADREVLAAVAVDPIAQRLQAIPGFGPVLSLMVRAEVGTLTRFPTPAHLASYAGLVPSVDASARRIRYGRITRRGSPWLRWALVEAAIHGTKRHDRIGRWGRRLAVRKGALNARVALARTLCEDVFRHWPID

SEQ ID NO: 208386 - protein, 366 aa, unidentified
MSKSSTVVSNRVEIFKDDKLTIGLDLGDRFSHYCVLNGAGEIIREHRLPTTPKGIDEVFSKIPPSRVALETGTHSPWISRQLARWGHEVIVAHARNVRLIGGSSRKDDRLDARTLARLARIDPGLLGPVRHRSAKAQIHLTVIRARAGLVSARTALVNAARGLTKSYGERLQKCGTQQMNRESAKGLSQELRDALEPLLAEIESLNARIAEYDRRIEQIAKEVYPQVALLKQVKGVGTLIALTYVLTLDDPHRFRRSRDAGCFVGLRPGRRNSGMSQPQLHISKEGDRYLRTMLVQGAHYILGPFGEDSDLRRWGMRLAERGGKNAKKRAVVAVARKLAVLLHKLWVSGEVYEPLRNSHKVIGQVA

SEQ ID NO: 208387 - protein, 313 aa, unidentified
MERSRFVGIDVAKDFLDVHVRPTEEYWRVPNDAAGHTALRERLAAFPEALVVLEATGGYEVPVVAALASRGLAVVVVNPRQIRAYARATGQLAKTDALDARIIALFAEAVRPVVRPLPTEETRSLDEMVTRRRQLLDMLGAETNRRRLVRDRGVQQRIEAHISWLKRALRELDRDLDKAIRASPVWREMDDVLQSVAGVGPITTITLLAELPELGRLTRRKIAALVGVAPMNQDSGQSRGRRMIRGGRSSVRRVLYMATVSAIRRNAVIRAFYQRLRANGRLPKVALTAAMRKLLTILNAMVRDGRPWREQPA

SEQ ID NO: 208388 - protein, 343 aa, unidentified
MQIRSVGIDLGKTTFHLVALGDNGKVLLKKKFTQKQLITFTANMQTSLIGMEACGGAHFLGRALREQGHDVKLIPAQFVKPFVKSNKNDFIDAEAIAEAVDRQNMRFVPIKTDDQLDLQALHRVRDRLMTRRTSVINQLRAFLLERGLVFAKSPARLRERMPEILENADEDLTPRMRNLLALLWNEWKDLELQIVEMNDEVEQIATSDPACTRLRQIPGIGPLVATAIVASIGNGVAFHKGREFAAWMGLVPKQYSTGGKAKLYGISKRGNNYLRKILIHGARAVVLRSKRERIAMGAWMTSLETRAPRNVLIVATANKLARIAWAVLSSGEDYRAVQELVAA

SEQ ID NO: 208389 - protein, 415 aa, unidentified
MNRLIERCAMLDIHKSQITACVRVPDGTGGRRQEICEFRTTTAGLITLADWLRSWSVTVVGMESTGVYWRPVFYLLEDEFECQLFNARHLRHVPGRKSDVQDAEWGCQLIEHGLVRPSFVPPRPLRELRDLVRYRKAKIQERGREVQRVEKTLQDAGIKLSSVASEVLGVSARKMLDALISGTNDPEILAELAKGALRKKIPALREALQGRFTGHHALLVSRMLAQIDSLDETIATLSERIEELTRPFSRELELLDTIPGVDKRAAEMLLAEIGPDMSRFPTDAHLASWGGMCPGQRESGGKKHSAATRKGSKWLRGTLTECSKAIVRTKGTYLSARYHRIKSRRGHAKATVATGHKILTAAYHVLNQRVPYHELGEEFFYRRDAEASERYRRRLVHQLERLGHKVTLEPLPEAA

SEQ ID NO: 208390 - protein, 341 aa, unidentified
MKKTLYCGIDLHSNNAMYVITDEQDRPLFQKRLPNELPTVLAALAPYRPRLKTVAIESTYNWYWLVDSLEDNGYPVVLANPAKMEQYDGIKEANDLTDAAFLAHLARLKILPTGYIYPREDRPVRDLLRRRMLLVRYRTGLKLSLQNMVARQTGQSLGWRGVRTLDEDGRAELLGDNDCLPFVATHQVELIESLNEKIGLFEGKVLQRVQLRPAYERLLTLPGVGVILALTIMLETGDIGRFETVGDYTSYCRCVRARHTSNGKKKGENNKRNGNAYLSWAFVEAVHHALRCCPAAKRFYDRKVAKRNGALATKALAAKWSKAAYYVMKRQEAFDLTRVFG

SEQ ID NO: 208391 - protein, 455 aa, unidentified
MKGTKVTTETLTCLYPNAAGLDIGSREIWVSVPAERDPEPVRRFGTFTPDLQQLVDWLVACHIDTVAMESTGVYWIPVFELLEKRGLEAWLVEPRQLKRVPGRKSDSLDCQWLQKLHSLGLLSASFRPDAEMRALRIYLRHRSELLERRAAHILHMQKALQQMNLQLAQVLTDITGVTGLKILRAIVAGERDPLKLAQLRNPACKSNSETIAQALTGTWQVELLFTLAQSLEFYDFYTQKVAECDAVIERHYAAMKPRWDGEVPPDLPPLKPDSNSKNQPSLRTRGELFRLTGVDLVAVHGINASLAQIILSEIGTDMSKWPTEKHFASWLGLAPHNDISGGKILRSRTLPTDNRAGQAFRQAAASVTRSPCAFGAYYRRKKARFGPLPALVATAHKIARTVYAMLKHRIQYHDIGAVTYEQKQQERELNSLKKKAAKLGFTLVQHEPALVMVPV

SEQ ID NO: 208392 - protein, 346 aa, unidentified
MKYYVGLDVSLKEILVCVIDGDGKIKARGTTPADPMAVKSWFKKRSLEPETIVHESGQLSIWLQRGFLELGLPAVCIDARRAHKSLSARLNKSDASDAEGLAQLARTGWFTPGFVRSVEADRLRALVGARERMIRLRKDLEGHIRGVLKTFGIRMAGVTQGKLRQKFRDQLAAAGETDPVLRIMADAFIDIHAMLCKAAADLGRALKTKVETHPVAKRLMTIPGVGPIVSLSFIALIEDPSRFTKSTDVGAYLGLTPKRYQSGEIDWSGRISKRGDKAMRSLLVESASTLIRNVKRFSALKSWAIRLAGRKGFRKAAIATARKIAVLMLTLWKTETDFQWTKEVKS

SEQ ID NO: 208393 - protein, 349 aa, unidentified
MQHYVGLDVSVKETSVCIIDEAGKVIREVKVATEPVAIFAVLTEEALAIERIGLEAGPLSQWLYSALAEAGLPVICVETRHMKAALSAQINKSDRNDARGIAHMMRVGLYRPVHVKTLASQKRRMLLTSRQLLQAKALDIENDLRGTLRNFGLKVGMVGTVKFEARIRELVADHPDLATIVEPLLIARRVLREQLGVLHRQLLEIVRHDEVCRRLMTTPGVGPVVALTFRATVDVPSRFTSSKAVGAAFGLTPRRQQSGEIDRMGGISKCGDALMRETLFEAALVLMTHSRKWSWLKAWGMKIARHRGMKRAIVAVARRLAVIMHRMWVDGTEFRWSRKEASGGVTVSV

SEQ ID NO: 208394 - protein, 315 aa, unidentified
MFTLGFDVAKDHVDVALINKAGHCKQRWQISNTVVDITELLDVVHHQHAKLQVGCEATGHYHMMTTQACRQLELPCYVLNPLLTKQYTKSTIRGRKTDKDDAVSIARLVLRGEGSLARHEHSLAQTYMRLATKVVQAKQALGLQERFYQELHQTLDVEASTPFTASLDELQDLSIVLRDQATQLVDPRATELLRSITGIGPLVAVTVLAEIGDIHRFPGPKQLVAYAGLDPRVRQSGTVLNRHTKLTKRGAPELRRVLFLAANIARLYDPELTAYYQKKRSEGRTYTAATVATARKLCYRIYAVLQRGTPYIKSP

SEQ ID NO: 208395 - protein, 493 aa, unidentified
MIEIPAVLERCAGIDIGKRELAVAVITGPADQEGEVKTRAFGTNVPELEKLRAWLVEEGCTSVAMESTGSYWIPVKNVLEGSVKIVLVCPRKHKPPRGEKTDFQDARHLAHLHRHGLLQGSYLPSRDIIELRDLTRRRKKLQSNLSAEKNRIQKVLEAANVKVGNIISDVFGVSGQAMVSVLISGQEVSVEQIADLSERRLRKRIPELKEALARHQMNEHHRWLIQQSVDHAVLLDQQMEELEIRIKEKLIPYLEQYELLQTIPGIKETAAASILAEIGPDMTHFPSGKQLCSWAGICPGNNRSAGKSKHGRVKKGSRFLLAALVQAGWAAGQQRDSAFRRRFHRWRGKLGEAKANLAIAHSLLRVIYVLLKERRAYREPDPSAMHQLERTKLVRHHTRRLRQLGANESLIEELIAQLNDSAELSPEEKQAEIDTPQRTRKTYTVKARQGALGFRARPEKRQQYSVVTDPSAGGLPRARPKSKTSKPKTKTKS

SEQ ID NO: 208396 - protein, 385 aa, unidentified
MAPIRMPEAVIGLDVGKSSHWACVATRDGEVLLSTPVANREDDLDSLFGRFPDALVVVDQSRNIGALALARARAAGMSAAYLPGLAAHGAARLFAGDAKTDERDAMVIAKTALGIPDALLPVGDPGPTIAAARALAAQRNFLTCENTRNKNRLRSILLESCPAFEALVDLSDGPQLRLMASLGGAWSVADAGPRRAAALTRGAARGKIEALVRSTASSTRPDASVVAAEDRAVKLLARRISENSAEIEAITAEISALLEGDDTYRCLLTVPGIGPKTASELAISIDIEDFPSHDRLASYCGLAPRNRQSGTSISSVTASRQGNKRLKNLLIFSCNCLTRTEGRWGDYYTRCRERGMSHGKALKALARKRLKVIYAVMRDRVPYAA

SEQ ID NO: 208397 - protein, 411 aa, unidentified
MNERPSQAWCGIDAGKGHHWAAVVDETGATMWSKKIDNDETAILAALGEVLDLADEVRWAVDISGTASALLLALLAAHGQQAVYVPGRTVSRMAGAYRGEGKTDARDAYVIAETIRHRQDFAIIRVPAQLGADLALLTAHRSDLVADRVRMINRLRDVLSGAFPALERAFDYSAHKGALILLTGYQIPADIRRRGRARLTAWLANRGVRSADTVAAAALDAAQAQYTSLPGEAVAAQIVTELAVQILALDDRLKRVDRQIGEAFRTHPQAEIIESLPGMGPILGAEFVVAAGDLSAYADAGHLASAAGLVPVPRDSGRRTGNLHRPKRYSRRLRRTFYLSAQTSIIREGPSRDFYLKKRGEGCKHVQAVIALARRRVSVLWALLRDNRIFSPTPPVPQNNVGSSLSGAAPA

SEQ ID NO: 208398 - protein, 303 aa, unidentified
MQIRSVGIDLGKTTFHLVALSAAGKVLLRKKFTQKQLITCTANMQISLIGMEACSGAHFLGRALREQGHDVKLIPAQFVKPYVKSNKNDFLDAEAIAEAVDRQNMRFVPIKTDDQLDLQALHRVRDRLIARRTSVINQLRAFLLERGMTFAKTPAKLKLAMPEILENEGANLTPRMRNLVSLLCNEWKDLEQQIVSLNAEVEQIASSDPACQRLRKIPGIGPLVATAIVAAIGNGAAFQKGREFASWMGLVPRQHSTGGKARLFGISKRGNSYLRKILVHGARSPVLRVKRERAPFRSMARCA

SEQ ID NO: 208399 - protein, 291 aa, unidentified
MKLIVIGMDIAKYVFQLHAVNANTGEIERIKLKRSQVTDFFAQRERSLIAIEACGSAHHWARELQKLGHEVKLISARSVRPFVLRNKTDAADARAIWTAVQQPEARFVAIKSEQQQTILALHRIRAQLMKFRIMQTNALRGLLYEFGEVLPEGYRVFAEKISGALAKIANRLPAMLIDSLREQWARVQATDKEIAALERRLKVALRDNQECKKIAEIPGVGLLTATAAVAAIGDAKTFRSGREFAAWLGLVPKQTGTGGQVRQLGISKRGDTYLRTLLIHGARSVIISRLV

SEQ ID NO: 208400 - protein, 448 aa, unidentified
MSELAVLDPRAAFVDVGSEKMHVSIAGGPPALFGTVTSQLHALRDYLAEHQVRSVAMEATGVYWLPLYGVLEAAGMEVVMVDGRQARNLPGRKTDMKDCQWGATLHAHGLLRAGFVPPANIRRLQDYLRLRGDHIAAAAGHVQHMQKALERMNIKLHEVISSLTGASGLAVIRAILAGERDPQVLLGLCDIRIRNVKAERVVESLRGDWAEEHLFALAQAVQSWDHYQGLIAACDRQIAVVLRQMPDAKTPDAKTPPPAASTKTGKPRTRPGVNAPDIADLREILAQICDAKDLTTLPAHSEYSVLQLIGEVGTDLTKWRTEKHFTSWLGLAPGSAQSGKRKASVKRRRNRAGQIFCVMARALARSKNIALGGFYRRMAARRGGLVANKALARKLATLFWRVMVKGLDFVDTGVAQYEAKVLETKHRMLRRLARQLGQQIVPNPAAVV

SEQ ID NO: 208401 - protein, 350 aa, unidentified
MVVVGADVHKRTHTFVAVDEVGRKLGEKVVAATTAGHAEAVMWARERFGTEGVWAIEDCRHLSARLERDLMGFGQAVVRVAPKLMAQTRASARTRGKSDPIDALAVARGFLREPDLPVASHDEVSRELKLLVDRREVLVAQRTATINRLLWRVHELDPDHAPKAGSLDLAKHRRILGEWLVTVPGLVAELARDELADITRLTETINALAKRIGERVRVVATVLLSLPGCAELTAAKLVGEAAGVTRFKSEAAFARHAGVAPIPVWSGNTAGRVRMTRSGNRQLNAALHRIAVTQIRLDGLGQTYYRHRIAVSGSKTEALRCLKRRLARVVFNHLHTDHQNRIQPCQPAAA

SEQ ID NO: 208402 - protein, 332 aa, unidentified
MDKHSVIGIDLAKRSIQICLINTRSNKVIKNKAVNCNKLLQHMSNMNPCKIFMESCFSAHYWARQLKKLDFDVKFISPQHVVHYRTGQKTDANDALAIAEAGLRTNMHFVADKGIEQQNLQCLERVRARLVKQKTQVVNQTHGLLLEFGIVSGRGLKAVSAILASALEDGENELTWEMREMFSEQRDEINRVHDRINELTKRIEHYSQTVSPCKSLTAIRGVGPIGAALLYVMLGDGKSFDNGRQAAASVGLTPKQYSTGGKVTMYGIGRRGNTQLKAVLIRGALAAIANLGDKQDHFSCWLRSLIERGCINKAAVAMANKIVRTAWAMLRH

SEQ ID NO: 208403 - protein, 356 aa, unidentified
MVKHTIIDWLGQHVHIGLDVHKRSWVVAIMTEQTTFKTFTQPPSVKHLIDYLHRHFPQAEYHCVYEAGYCGYWICEQLRSAGIDCMVINPADVPTTDKEKKNKTNRVDARKLARSLRNGELHGLYIPSRSALEDRTLVRSRHVYVSKQTRCKNQIKALLSFYGITVPEDITDRYWSARYISWLESLSLQSSSGRSALRTLLNELTFLRKSILETTRAIHTLAHTEQYALNVANLITIAGVSTLTAMILLTEIVTLERFHSQDQLASFVGVIPGEQSSGDDRTMTGITDRKNRHLRWIFTESAWIAIRHDESLSLAFNTLCRRMPKNQAIVRIARKLLNRIYFVLKHQQPCIVLRAA

SEQ ID NO: 208404 - protein, 431 aa, unidentified
MEKNAVEKEWERLFEVAAGIDVHRDTVVVSVRRLQPGGRHKVETRTFETFHDSLVKMAGWLAEEGVQVVGLESTGVYWQPVVRALQQYAPAALLWLVNPAHVRKVPGRKTDVTDSQWLSKLVMYGLVAPSFLPSAELQELRKLTRHRTKVVADRTRHSNRIIKELEAGGIKLASVCSDVLGKTGRAILDALIENRPVTEEAIAEMAHRQLRKKTAQLVRAVDGTMTPCTRVILKQMLERLDDLAADVASLDAQILQRLSSMACEVALLNEIPGFDSVATAAVLAEMGPDISVFPSAAHLTSWAGLSPGSEESAGKPKKVPTRKGDKYLRTILVQIALAASRTKGSYWQRKYRQLVHLGPKKAIVALARKLLAIVYKILKDRVPYRDPASVPLPPHRVQATLRRLSAQIEALGYQANLTPKTATSTAQLSVS

SEQ ID NO: 208405 - protein, 349 aa, unidentified
MKKNHPSKIDQEEIIYERCAGIDVHKKMITVCLRIGRKTQVKEFGTLTCELREMAAWLKENDVQMAAMESTGSYWKPLYNIFEQEGIPAMVVNAGHMKSVPGRKTDVKDAEWIAKLLSQGLLKASFIPDREQRELRELTRFRKSQIEERARTLNRLQKMLEGANIKLSSWVSDIDGKSATQLLELIIGKGEFTAQDIARLRHFNMKASSEELFKSLEGIVTPIQRELFTHIMNVIKEQTAQIEKTESLILGYMTQSYQEAANAIDAIPGIGQISAQQIIAEIGIDMSRFPDAAHLSNWAGICPGNNESAKVRKSGKTNYANKALKSTLTQCAQAVKKTRIVSSMHNTSV

SEQ ID NO: 208406 - protein, 433 aa, unidentified
MKVLYERVAGIDVHKDMIKVAIRSPGVKPWARATEVLEFRTFYGVLQEVGRLLRRRGVTHVVMEASGIYTDPVYYALAEQDFTEVAVVNPAHARALKGHKTDAKDCARLAELFECGLLRGSYIPPAELKEMRDLTRYRMKTVQARTSEIQRLGKALESAGIKLGSVASDITGVSATAMIDALIDGERRGQVLADLAVGRMRNAGKLADLSMALSGRFTGHHALLCRLHQDRIAVFGEAVDGLDGRIAGMVRRWQREAGLLTSVPGFGDVVTSAWLAEIGPAPHQWFASHEKLASWVTLCPGNNISAGKRKHGRTGDAGTYIKPVLIQAAWAAIRTRGRLQARYNRLVRRFGGEKNPAAKKKAITAIAHTLLKIAYQVLKSGQPYTELGADFYTRRESPEQRQAYLERQLQKLHPGRTITITIGPPEAALPPGG

SEQ ID NO: 208407 - protein, 321 aa, unidentified
MEKEKAYVGIDVAKASMDVAVHQSKELRSFTNDDRGIVRAVSCLRETAPALVVVEATGGIEMPLVAALGAARLPIVVVNPRQIRDFARATGQLAKTDVLDARVIAHFAATVKPDLRPLPDDQAQEFESIMARRRQVVEMITAERNRLSSARSKVVRRHLKDHIAWLERELVETDNNIKRSVRESPIWREKDNLLRSVPGVGPVLSATLLADLPELGTMNRREIAALVGVAPFNCDSGTLRGKRVTWGGRAKVRAALYMATLVATRYNPIIRAFYRRLCAAGKEKKVALTACMRKLLTILNAMLKHRAPWRYSACQIMGPCS

SEQ ID NO: 208408 - protein, 348 aa, unidentified
MKNKSFVGIDISKNVIDVSIFREDTNIKMFPHEVFNNTRKGFGDMCSWLKKSRVVLSQALFGMEFTGCYSLDLEKFLTSKNYSFCMLSTRIVKHHPMGTIDKRDKNDSAKIADFLYRYDGTECTKPYKLPSKAMQQLKQLVNERKFLVEQRTNFMNRMQMFETKEDSAMYESYIKKLNHDIEKIDQEECELMSKEEDVFDTFQNLLTIPGIGFVNATNIIAITRNFTAFDTARQYARYVGVAPCSHTSGTSVKWRARPSAHCNGQVKADLSMAALRAVEYDVEMQMFYNRKLGGRKDSDTKRKALNAVKFKLIRRMFAIGKQKRKWEVLNTSDDRKNLHIEKSKASEL

SEQ ID NO: 208409 - protein, 977 aa, unidentified
MSVQYAELQVTTYFSFLRGASSPIELFEQAKALGIEALGICDRNSLAGMVQAHVAAKETGIRLVVGCRLDLADFAPVLVYSTDRAAYGRLCRLLSLGKARAGKGKCHLLWEDLVAWGEGLLVILLPDTADDACALHLRKLKDAFADRASMALTLRRRPNDQMRLYELANLVHQARVPMVVTNDVLFHTHDRRILQDVVTCIRNHTTIDEAGFARERHADRYLKPPAEMARLFSRYPEAIDRTREIVAHCRFSLDDLAYQYPDEVSVPGQTPQQALEALTWEGAAAAYPEGIRPEVRKTLSHELALIGRMDYAPYFLTVHSIVRYARSQGILCQGRGSAANSAVCYVLGITAIDPARTSLIFERFVSEERREPPDIDVDFEHARREQVIQWIYGHYGRNHAALTAVVTRYRAKGALRDVGKVMGLPEDLIRTLSGQIWGWGRKLDEDALNETGIDLSDRRIRLTLDLARCLIGVPRHLSQHPGGFVLTHDRLDELVPIEPAAMDARQIIEWDKDDIDVLKFMKVDVLALGMLTCMKKGLDLLAEHKGQHYTLQTIPAEDPRTYAMIRKADTIGVFQIESRAQMSMLPRLRPRVFYDLVIEVAIVRPGPIQMGWTASMRHQCAMMRSEDHSEETARMKVTIIGLDIAKSVFQVHGTDASGKCLLKKKLGRSEVISFFERLERCLVVLEACSTSHHWARVIRDTGHEVKLIPPEMVKPFVKRGKKNDAVDAAAICLAAIHPDTRFVPIKNREQQSLLSLHSTRTLLVKQQTMLVNALRALAAEFGLIVPLGNARLPELLAKIETSSNLPDALKQTTMLLFEQYGRLNESIENLEGGIRTHAKQDEDARRLLTIPGIGPVTASLIVASVTDIGAFDTARHFAAWLGLVPRQHSSGGKTRLGRITKTGNREIRKMLVLSATSMLYRAQKWDSAAGVWLCKLLERRPGRLATVALANKLARIIWVLLSRKEIYRPAGRSVAIV

SEQ ID NO: 208410 - protein, 328 aa, unidentified
MENEIHFIGIDVAKAKLDVDMLRPDGRHRSKKFANTPGGHDELVSWLRGHQVIHAHICMEATGTYMEDVAAHLSDAGYQVSVINPMLSKAFVQSQGIRSKTDTVDARQLAYFCREKRPAIWEAPHPVERALRALVLRHQALTEMHVQEQNRRESARDVQLPSIDMHLLWLDTELKRLEKQIKDLTDDDPDMKHRRKLLDSIPGIGPKTSAVLLAYVGLKERFREARQFAAYAGLTPRQHESGSSIRRVSRMSKMGHVSLRRALYMPAMVTLYKTEWGREFRERLEKNGKNAKLIIGAMMRKLAQVAYGVLKSGRPFDASLHTKNACMA

SEQ ID NO: 208411 - protein, 268 aa, unidentified
MTTNIGMLAIDLAKGSFQVCAIGPEGAVLYNRSMSRTRLASLLAEQPACIVAMEACATSHHWGRVAQLHGHEARLVPAAYVKPFVKRQKNDRADAEAIAEAALRPTMRFVAVKSAETQARAVAFRTHQCLVRQRTQLINGLRGHLAEFGLVAPKGPASLNALDDEATDLPSPVREMGAIYLDQIARLTAVIEQLADELQAASKADAQLRRLCTIPGIGPVTAGAVSAFAPDLDTFDSGRNFAAWLGLVPRQRSTGGKTSSLGQQDGPN

SEQ ID NO: 208412 - protein, 363 aa, unidentified
MRMAGRSDEKSAKRGSPPEPVYTLLDMTSRTGEICLEEEVPSERQALWDCLEPLRERGPMRLIIEACGFAGYWWDQLDPLGEVVAVHPKHVKDYRGNKRKNDRRDAAFLVALSQLNRLPRAYLGTTAERDLKDLLRYRVGLVRVQTRLRVRLRNVAQRYGSVLAASDVDSAKARRLWEEWPLRETHRLIVEQLLAILEEVGRKLAVVDARILAAARPDRRVELLDTLPGLDYFGALLAAVEIGDWQRFHSGDAVACFAGLVPRESASGGHIQRGRITKEGSPYLRWIMVQAALHADKSPRLKRLQERVAKRRGPMQARVAVAREMLVIAWHMLRDDKPYEERAPRESGGRPTSSGKPESPLTR

SEQ ID NO: 208413 - protein, 320 aa, unidentified
MLSFCGIDVSKDRLDVMVLPDEYSSSVPNDPAGWAILVEQLRGFSITAIGIEASGGYERGAVRSLQAAGMPVRQVNPFKLRQFAKASGVLAKNDPLDARMIASFVGIMPTRPAQRTTPAAEQLVEMLAVRRQLSAEKTAAENASRLLEDLMLQRLSRRRIARLAADIELLDKRLVEIVATDATLAHRYRLLTSMPGVGPVLACTLIALLPELGGMSRKQVAALVGVAPYAFESGTLKGRRCIWGGRANVRQVLYMAAMSASNWNPVLKLFHDRLKGAGKLPKVVIVAVMRRMITTLIAMVRDDIAWADRLSGRHSVTTAR

SEQ ID NO: 208414 - protein, 392 aa, unidentified
MSQHRHFDASRSLTALEQDSTIIAVIEMSQTKWLVAALIPGVERQPLKKFDAHEEALLKLLHRWRREAGQAGRNIKRIVVAYEAGRDGFWLARWLRARDVEAYVIHPTSIAVSREHRRAKTDRLDTELLMRVLLGWLRGETRHCSMVAIPTIEEEDARRPNRERQNLVTEQTRIINQIKAIFTRFGIRSLRPTMRKVAEKLEDLRTAEGTPLPQNTLAELRRHLARLRVVRDQIRAVEQERLRNLAVAPAAEKKSPHAMVRLIARVLGVGVETADMLVNEIFSRHWRDRKAVARYAGLTGSPDESGSRRRERGLARAGNVRVRSGMIQLAWRFVRFQKTSALAQWFAARTADGRASTRKTMIVALARKLLIALWRLVTRGELPQGVVIRPAS

SEQ ID NO: 208415 - protein, 436 aa, unidentified
MNNPLDLPILNAHAAGVDVGSEKFFASVGGKEPKVFLTVTAQMKELCEHFKAEGVRTVAMEATGVYWINLYDVLEEAGLEVVVVNGAHCRNFPGRKTDMKDCQWLAVLHAHGLLTSGFVPPADIRRLRDYLRLRADLVSLAAQHVQHMQKAMDRLNVKIHVVISDILGRSGMRIIKAILQGERNPETLVALCDEQILKTKRAPMIEALRGIWRKEHLFALELAVDSYEAYQKQIDRCDALIAEVVKEMSGGKPTPELGRAKELRHNAIVLPGLQARMAEVLGKDLTKLPCLNSSTVAMLLAEIGRDMTRWKDWRHFGSWLALAPSSAQSGRRRKRVKRYLSRAGQILCRAVQCMAMGKHTWLASFYRRIRAKRGAKVAIKATAYKLAKLIYLVLTQGWDYVEAGIAKYEQRVRETQFKALKKLAKTLNYELVPKTA

SEQ ID NO: 208416 - protein, 344 aa, unidentified
MKVFYLGVDVSKKKLDLCLRSNGKDILYDVIPNDLSSIKSWLTRTFEKFFLSEDSLVVCAEHTGQYTYPLVCATKSIGVYLCLEDAAKIKYCHGIPRGKNDKIDACRIAMYAERYNDCLQPYTASELIIQKLKNLSTERSMLVADRAKYQSQLKDQVDYMEHSIYIAKCNRVEGIINTFTDYIAQIDLEIKELINQAPVIAHQMDLLMSVDGVGERVALKMIMETDAFTSFTDPRKFCCHAGVVPFVYVSGSSFEKLSKFACVIHKNRGGSTRPDERDFSYLSTAFTNIFHRSSHLYALMRSNIIVCIYGIGYTFIQLFKAVICTVKKPPILDRVIHPFSQSIM

SEQ ID NO: 208417 - protein, 481 aa, unidentified
MAARKKNMTKDTAPGVAGASSVPGGDGAEVAEDRVEVVTYAAAIDVAKGFGMVCTRVPGSRPDRRRQKVWRVEATYDAVVALMDHLRCEGIQRLVLESTSDYWRIWYYLAEAAGLEVWLVNARDVKHLPGRGKSDREDCVWLCKLNERGMLRRSFVPPEPIRDLRALTRTRSRLAQDQVRHQNRVEKILEDALLKISVVISDLFGLSGRRFLDALVAGERSPKTLAALGDRRLKASTTELEAALTGRFREVHAFEIATHLRLIDAINGEIARLDARIEQQLASIPGVAPACTGCGLIGGGHAPGCASKDAAVLGLVERLDEITGVGARNAQVLIAELGTDMSVFPTAGHAAAWARLTPRTLQSGATARPGRTGKGDPYLRGALGQCVMAASRTDTRLGEQYRRTARRRGKQKGIVAVSRVICEIAWLLIGDRAARFTDLVAGYYSTQNPQRHTRSKIREIERLNPGMKVTLTPIEPAGTAA

SEQ ID NO: 208418 - protein, 398 aa, unidentified
MAKQLTRLWVGIDAGKAHHWLAAVDDTGATIWSKKVLNDEGAILTALGEILALAEQVHWAVDIAGTASALLLALLAAHGQQAVYVPGRTVKRMSGSYRGEAKTDARDAYVIADTARLRRDFASIDVPAQLAADLALLTAHRTDLIADRVRMLNRLHVTGIFPALERSFDYADHKGALILLTRHQSPAAIRRHGQARLTAWLKGRNVRNADAVAATALQAARTQHTTLPGQDVAASIVADIATQLLALGDRLRHIDQEIWQTFRTHPQAHIIESLPGMGPILGTEFIVSAGDLSTYADAGRLATAAGLVTVPRDSGRRTGKLHRPKRYSRRLRRVFYLSAQTSIIREGPNRDYYLKKRAEGCKHVQAVIALARRRVDVLWALLRDGRLFTVHPPVAQAA

SEQ ID NO: 208419 - protein, 426 aa, unidentified
MTYRIAGIDVHKRMLAVVIADVAVEGEYQFERRRVGTSPSELCRLADWLVAQQVDEVVMESTAQYWRPVWATLEQRWRPKRLQESAGARSGQLHLAQAQSNRGAAGRKKDFPDAERLVKRLVAQELRLSFVPDVEQRLWRTIMRRKHQLTRNRVQFQNRLECLLEEAHIKLSSLVSDLLGKSARYMLQAVAEGETNPETIAALADHRLRATAPQLRDALGACRDLHPVYRQLLKMALEELKLMEEQIDKLEQEMANLLSAQQDVVQRLAEVPGLGVDSAQQIIAEVGPQAAAFPSAKHLASWVGVCPGEEESAGVNYSHRSPKGNRQMKGLLNQASNAAVKTKGSIFEFIYRRLVVRLGHAQAIGAIAHRLCRLIWMILHQAIRYEERGPAVSRSTTERRAAKMIRELRRLGYRIEPVECKAEGSV

SEQ ID NO: 208420 - protein, 347 aa, unidentified
MFNNNVIAIDLAKTSFHACNLNKHNKLTTNKAFTRKKLQEWLIKQPKSTVAIEACGSAHYWARFVQAHGHTAMLLPPKLVTPFRKGHKTDKNDALAIAIAAKQPEIKTTAIKTVEQQGLQGIERMRQHHSDFITATGNMLRGLVYEFGIVIPKGKAALSRDIPFILEDAENNIPDAFRHQFADMFSFYQKSEKALAKVEKKLAQLIKQQKTCQSLISLEGVGPVNALGLVLALGERGESFKNGREASACIGLTPQQYSTGGVVVLGGIGKKRGNKRLRSTLIQGALAVTKVLKNREPKNNKEAWLKTLMERCGVRKAAVALANKNIRTAWAMLHYDKAYQKPSMLVA

SEQ ID NO: 208421 - protein, 319 aa, unidentified
MFQLGIDVSKKTLDLCLLREGVKGRVKNRKLKNDFNAVGTVVSWLRKQHCEPGDVHIIMEATGVYHESLVNPHRSREFARSMDILTKNDKVDAYMLACYGALKEPEPWEPPPENIRYLSALLRRHDALVTDSSREKNRLEKCRATDTPAAVAESIENVLRNLSAELQRLETLIQGHLDQHPELKKDFDLLTSIKSVGFQLGLNMLVILRSHRFGTAEQAAAFLGVVPVEKSSGTSVRGLSRLSKIGPPEIRAKLYLASLCGMRFNPAMKVMYERLCQRGKAKMCAIVNAKVYGRFGGADDFLDSQEMNNVYRSRTDPRN

SEQ ID NO: 208422 - protein, 374 aa, unidentified
MTMMQHRQIRYIGLDVHKVSITVAIAEESGAPTSYGSIANDPSAIRKLMTRLGGPEVELRVAYEAGPTGYALYRQLAKMAIDCIVVAPSLIPKQPGNKVKTDRRDALKLARLLRSGDLTPVWVPDEAHEALRSLVRARADAKADQLRAKHRLSKLLLRQGCRPPSGVRTWSQRHVQWLRQLEFEHLPDRVVFADYLAEVTAAGERIKRLEAALYQCAQSSSQVAVIRALEAFRGIGFLSAVTLVAEAGDLRRFRTAPQFMAYAGLVPSESSSGGKQHRGSITKTGNSLLRHVLGETAHHARHAPRVSSKLKARQADVPREIVELAWRAQLRLHARYRHLSSRIGSLKALTAIARELAGFIWAAGQVLQEVPTAA

SEQ ID NO: 208423 - protein, 413 aa, unidentified
MDVVHPRCAGIDISKRDAKVCVRIQGRGNTPTTSTVTTWGAMSNQILALREHLLTERVSCVVMEATGDYWKPYFYLLEDALTVMLVNAHDARNMPGRKTDVSDAAWLADLGAHGLLRGSLVPPAPIRELRDLTRARTALTRERSRQVQRIEKVLEDAGIKLSSVATDIMGVSGRAMLAALIAGTATPAAMADLAQRRMRSKIPALTEALTGRFTPHHGYLIRMHLDLIDQYGQALADLDVRIGEAMAPLAAARELLISIPGVSRIVAEVLLTETGGDMSVFPSAAHLASWAGTAPGCNESAGRVKSTKTRRGNRYAKTALGTAALAASRTKETYLSDKYKRIAARRGPMKAVVALEHSILVATWNMHTNGEFYRDPGADYFARRIPAKTKARAIGQLEALGYRVSLQPITDTA

SEQ ID NO: 208424 - protein, 343 aa, unidentified
MNKTTTIGIDLAKTVFALVALGPTGQELWRKTLSRHQVLPFLATQAKAQIALEACGSTHYWARQIRALGHAVVLLPPQHVKGYLRGQKNDYNDARAIAEALYHGAIRPVPIKSVEQQDDQALLGIRRGLSRDRTRLANQLRGQLAEYGLVAPHGVASLRKALPVILDDRANGLTERYRHLLRRQYERLLALDGELGWYDEQLQVWVRDDEVCQRLCEMPGIGAVNACALKSWLGDGRQFGCGRAASAALGLIPRQYGTGGKVVLSRITKRGDGQLRAWVVHGARAVVSRAAGKSDRLSCWIEEIKARRGFNKAVVALANKLVRLAWVIVARGERYRPAQVAMV

SEQ ID NO: 208425 - protein, 406 aa, unidentified
MTGAANEEARSEIRQFGTTVGELKRLLEWIRQEGCTDVIMESTGSYWKPVFNILEGSVKVALANPHEVKARKGQQTDNKDAWWLAHLLRHGMVTRSFIPPRWQRELRDLTRRRRKLIQSAAAEKNRVGKVLEDANVKLGSVLTDLFGVSGQRMLEALLKGTADPAEIAAFAKNRAKKKIPQIMASLEENLMRDHHRMMVRFSVEHMRFLEEQILALDEEIRRKIVEAGYVKEWELLRTLPAVRDSAATILAEMGPDPAQFPSEKHLGSWSALCPGNNRSAGRSKSSHTKNGNPWLRGALCESAWAVSRMKQGHLRDKFWRIAAKGDPKKSRPIAIVAVAHDLLKLAYFVLQRGTPYEEERGKPMTEKQKQRLIRHHVRRLGKLGVALRPSPAPNTTCRRRKRSLPS

SEQ ID NO: 208426 - protein, 338 aa, unidentified
MFIIGIDPHKGSHTAAVIDSDEQVVGEFSLRADCRQRDRLLRFARSFTPRVWAVEGATGTGHLLAQQLVGAGETVVDVSPALSARVRLLDAGRKDKNDAHDARSTAIVALRHRDLAAVTVEDHRQVLRLLARRHHQLNAGRTRAVCRLHALLAEMLEGGLPRNLSVNRAVSALQRFQATDLVGAERERLALELLDEVRRHDRSLVEIRDRIVRAVQLADTTITDIVGVGPIVACYLLGYSGDMRRFPTAGHYARYNATAPIEASSGPRVRHRLNPNGNRQLNHAIHVAALGQISHDTPGRAYYLHKQAQGKSSKEALRCLKRRISDAIYRQLRADTNR

SEQ ID NO: 208427 - protein, 343 aa, unidentified
MQIRSIGIDLGKTTFHLVALGDNGKVLLKKKFTQKQLIIFTANLQTSLIGMEACSGAHFLGRALQAQGHDVKLIPAQFVKPFVKSNKNDFIDAEAIAEAVDRQNMRFVPIKTDDQLDLQALHRVRDRLMARRTSVINQIRAFLLERGMIFAKSPIRLREAIPEVLENANENLTPRMRNLVAMLWSEWKDLELQILEMNDEVDRIASSDAACLRLRQIPGIGPLVATAIVASIGNGAAFHKGREFAAWMGLVPKQHSTGGKAKLYGISKRGNRYLRKILIHGARAVVLRCKRDRIAIGAWMTSLEARAPRNVLIVATANKLARISWAVLSTGQDYRAVQDPVSA

SEQ ID NO: 208428 - protein, 319 aa, unidentified
MNTTTAAHIDRSERNVGIDIGKSTLDVCIFELDVYLQYPNATEGIRELIKKLSRYKLTRILVEATGGYERGLVEACAERELPVIIVQPTQVRQFGKAQGVFVKTDKIDSRLIAQFGAILKPEPRPLNSKKVRYIRDLLSRKRQLNEMRTQELNRQHKAPSILTATHKRLLKVLDKEIESINKLLAKAVSEVTEWQRTYEILSSVPGVGDGVTFTLLGELPELGQLSPRKIAALCGLAPYNRDSGIMKGRRRIKGGRAPIRTVLYMAMLSAIQCNPIMKKFYKKLVEQGKHKKVALTACMRKMVTILNAMVRDNCEWQAN

SEQ ID NO: 208429 - protein, 348 aa, unidentified
MQGRGTRGLAYHEGERGLKKCNRVGVDVSAKDLVVAIEASGRREAPIMLANDADGHRKLVKLATKRGASARVVLESTGTYGLDLALALHRAKRVEVMVANPRAIAHFARASLQRSKTDRLDAGTILEFARRMPFEPWSPPAPQILELRALSRRIEAMSKTVVQEKNRLHANDQSEELSEFVKHDIREFVDHLEGRIARLRKQALLVIEQSEDLATAFAHITSIKGIAEASGIAILAELAVLPADMTTRQWVAHAGLDPRQFQSGTSVHKPARISKTGNAHIRRALFMPALVATQWEPHIKAFYDPLLERGKTKMQANVAVMRKLLHAIHGMLEHDQDFVGEKFFAMRG

SEQ ID NO: 208430 - protein, 393 aa, unidentified
MDQVRSGQCSAHSLSLAACAVDEVGRPIAEGSFSNDVKGHRALRGWLNRFPQPRRVGLEGAANFGAVLARALLEAGEDVREVPSILTRRERRRTGRPGKSDPTDALAIARVVARDEHLPPALRGGANEDLELLVDYRDQLISERTRVQNRLHADLMILVPGYRAKVRRLTTKGQRDQAARLLRATAGVRADLALRRLGRLKEIEAEVAVLTERIESAIQQHGTHLTSIVGVGAITAAKLLGETGDARRFRSMAGFAMACGAAPIPASSGQTNRHRLNRGGNRQLNRALHTIALVQARVDARAQGYLDRKRAEGKDVARQRPVPQVAPRRRRLPPDDRGHVRVGLDNIGAQYEPKPAGRGSDARACFGSRQGSPGRVPQDGCALTTSWERSARR

SEQ ID NO: 208431 - protein, 310 aa, unidentified
MATPCYVGLDVAKRHLDLATCPATAAARFAHDETGLSALVAHLRPLAPALVVFEATGGYEADVAAAVALAGLPVAVVNPRQVRDFAKAIGRLAKTDALDADVLARFAAHVRPEPRPLPDTAQLDLTALVARRRQLVEMLTAERHRLALARDRVKRDVQTHIHFLEQRLKETNTDLRACVQASPVWRAQDDLLRSVPGIGPTTSATLLADLPELGRLSRQQIAALVGVAPLNRDSGMRRGPRVTWGGRAVVRAPLYMATRVATRCNPVIRAFYQRLRAAGKPPKVAAVAAMHKLLTILNAMVRAQRPWQPA

SEQ ID NO: 208432 - protein, 369 aa, unidentified
MADYREAFVAFDVAKIKHAVAVADSGRGGEVRFLGEIENRPVTIERTIRKLAKRYDRLHVCFEAGPTGYGLYRQVGDLGHDCMVVAPALIPKRSGERIKTNRRDAVTLARLHRAGELSAVWVPDIVHEAVRDLVRARQAGAEDLRRKRQQLLSFLLRHGRIYDAGGHWTLAHRRWLARQAFEHQAAQIVFQETSDAIEDAAQRLHRLDEQLAAIVETWSMKPVVEAYQAMRGVSFLVAVIFAAEIGDVRRFETPPQLMAFLGLVPGERSTGDTVRRSGLTLAGNRRARRALVEAAWTYRYPARVSEPLRARLEGLPKAVRDIAWKAQVRLCARYRRLAAAGKKPPVIAAAIAREMAAFLWAIGREVAPS

SEQ ID NO: 208433 - protein, 338 aa, unidentified
MTIETLGVDRAKNVFQLHGVDRNGRVVLKRRVMRDQLVQVMAQIDPCTVVVEACTGAFYWARKFEVLGHRVKIISPQYVKPFVRRQKNDGNDAEAICVAARQPHIPFVPKKTIEQQDIQALHRARQRLVNHRTAVVSQIRGLLLDRGFAFAKSITRARRIIPELLSNFNNELTALAREALAELYDLVRDLDRRIASFDKKIDRVFRESEPCQRIAKIKGVGPKTATAVVAAVGDGSEFKNGRHLAAWVGLVPRQFSSGDRNVLMGISKRGSQHLRSLLVHGARAVVRTAPTKTDPNNQGVNQLRERRGFNRATVAVAKKNARIIWAVLRTGEPYRAAF

SEQ ID NO: 208434 - protein, 322 aa, unidentified
MAMLSFGGIDVSKDRLDVMILPEERCSSVKNDAAGWADLVERLSGSSIAAIGIEASGGYERGVVRALLAAGMPVRQVNPFKLRQFARASGVLAKNDPLDARMIASFVTIMPTRPAQRQTPAAERLAEMLAIRRQLSAEKVAAENASRLLEDAMLQRLSRRRIVRLAADIDLLDKRMVEIVATDDALVHRYRLLTSMPGVGAVLACTLIALLPELGRMSRKQVAALVGVAPYAFESGTLKGRRCIWGGRAHIRQVLYMAAMSASNWNPVLKAFHDRLTAAGKLPKVVIVAVMRKMITMLNAMVRDDVVWADRLSGRHVLPTAR

SEQ ID NO: 208435 - protein, 392 aa, unidentified
MVVSVGVDVSKDKHDCFILSSEGEVLADVFTIPNNLDGFRFLLRRIRDCTHAQDKIKVGLEATGHYSYNLLGFLLDNGLPTYVLNPLRTNLYRKSLSLRKTKTDRVDARTIAAMLLSDAGLKPYTNTAYHNEELKSLTRYRFDKVKERAKLKSSIARLVCILFPELEKLVPSLHIASVYALLEEFPGAKQIAAAHLTRLKALLETASKGRYKRDMALEIRDAARNSIGSWMPAKSLELQHTIRLIRELDVEIAEIEEQIQSIMDELHSPITTIPGVGFRMAAMILAEVGDFTRFDSPDKLLAYAGMSPSTYQSGQLKNCYPHMEKRGSRYLRYALYNAAKYVCHWDPTFAAYLAKKRAEGKHYNVALSHAAKKLVRLIFAMEKSRQPYCSAA

SEQ ID NO: 208436 - protein, 349 aa, unidentified
MLIIGCDYHPSFQQIAFVDMDTGELQERRLEHREEAEKFYRGLGVQRMKVRLGMEASGHARWFERLLGELNFELWIGDATEVARKRERKQKTDRQDAQHILRLLLKDDFPRIWVPNWENRDLRQLLWHRHRMVQARTRIMNQLQAVALNEGLRCKKRLWREHGREQLESIRLAPWASRRRQDLLELLDRLNPTITELSQAIEQEAEKFPEARWLMTHPGVGALTALAFVLIIGKADRFQCGKQIASYLGLVPLEDSSGNRRRLGHITKQGSSMLRFLMVEAAQVTVRSLPEWRSKYFHLMMRRGRKIAKVAMARQLAIRLYWMWRKGWDYEQVKKFGSHAGKLGTGDGV

SEQ ID NO: 208437 - protein, 348 aa, unidentified
MVTIGVDPHKQTHTAAAVNQLGVEVAHRTAAARPAGNGQLLEWARALDSERVWVIEDVRNVSGSLERSLIDRGETVVRLSPQLMAGARRGMRERGKSDPIDALTIARAALPEGVESLPTARLAGPERELRMLALHRGRLVDMRTRLSNELRWQLHDLWPDSEIPTKAFVQPSWQTKTQARLARAEQSTQVWVARDMIRRISELTRAAKDLHQKIAALVKQVAPQLLAEPGIGVLLAAKFIGEIAGIDRFTSDAQLARLAGCAPIPVSSGRSDRHRLDPGGNRQLNSAFYMLASIRIAHDPRTAGYLARQRANGKTKREAIRSLKRYLVRRVYTLMRTPNSLPTTIYLT

SEQ ID NO: 208438 - protein, 409 aa, unidentified
MRIIGLDIHRAFAEAVAWEDGRLRRLGRVDMRRDLLDAFAAKLSLDDVVVIEATGNASSAAAVVAPHVKKVVIANPKQVRIIAYVKIKTDTIDASVLAQLYASGFLPEVWIPDEPTQALRRQVTRRNQIVRQRSRLKNVIQSILHSHLIPSCPHADLCGTKGRSWLSEQVVPQDERLAIDRHLREFDRLGEDLQVIERDLARSALADEGVKRLMTIPGVDMTVALAMKAAIGDVSRFDDPQKLVSYLGLNPSVRQSGPGPAYHGRITKQGRGHARGMLVEAAWAAARAPGPLRAFFLRVRARRGQHVAAVATARKLSVVIWHLLMKGESYAWARPSLHAKKLRDVELKAGSKAVRGQKGAAHAYNIKSHREEERRWVEQAEGAYARFVAGWNQRGPRKARTDAANEVRR

SEQ ID NO: 208439 - protein, 347 aa, unidentified
MNFYTKEHLFYCGVDLHTRSMYICVLDQVGQVLLHRNLPADPQRFLDAIGPFRQDMVVCAECMFSWYWLADLCAKENISFVLGHALYMRAIHGGKAKNDKIDSHKIAALLRGGMIPQAYVYPAPMRPTRDLLRRRNYLMRKRADLLSHIQNTNSQYNLPEFGKKIAYRSHRTGVAEQFPDANVQLSIKTNLELIDHYDKLINALELFVLQNARDHDPGSLHLLQTVPGIGKILSLVILYEIGDINRFPSVGQFVSYARLVACAKESAGKKQGTSGRKIGNMHLKWAFSEAAVLFLRKNPQGMKYKKRLQQKYGKSKALSILAHRLGRASYYVLKRQKAFDMKRFLSR

SEQ ID NO: 208440 - protein, 343 aa, unidentified
MDHYVGLDVSLKQTSICVVSGTGSVVREGVVDSDPDAIAAFVRSKAPGAIRIGLETGPTTTWLWTELKRLGLPVICIDARHAKAVLKMQVNKSDRNDAAGIARIMQTGWFKEVRVKDLDSHTVKALLASRALLVKIKRDLENQIRGLLKNFGLVIGRAKFNVFAVRAEELIEDRPELIAVVGPLLKARKAIEQQTGDLDRKVLTLARYDAQVRRFMTVPGVGPITALCFKATIDDPTRFKRSRSVGAYVGLTTRRHASGEIDWTGRISKCGDAMLCSYLFEAAGVLLTRVPKWSALKAWGMRLVKRNGLRKAKVAVARKLAVILHRMWIDGTEFNWSKKEVAA

SEQ ID NO: 208441 - protein, 382 aa, unidentified
MMPMTRPIESTAPSAGMLMAFELGQRSWKLGFTVGMGQRPRVRQIPGGAVDALATEITRAKKRLGLSADAPVTSCYEAGRDGFWLHRYLVAMGVTNYVVDSSSIEVNRRARRAKTDSLDLAGLLSLLARYALGDQRAWRVVRVPTVAEEDARHLPRTLEALTQDRTRLVNRLKSLLATQGLSLPINAQFLKRLSAARLWDGAPVPPGLQERLTRTWTQLEEVDGQMRDLKALHLTRPEQLPPATSRALAQLLTVRAIGPIGASVLATEIFGWRRIRNGRELGALVGLVPAPYQSGQIDYDQGITRAGNAHVRRVMVQLAWGWIRHQPDSALTHWYQQRFGGGGTRVRKIGIVALARKLLIALWRYLETGAVPAGAQLKPIVV

SEQ ID NO: 208442 - protein, 387 aa, unidentified
MSQVSDLSRSLAPFDQNTTLTVVVELSEASWLVAGMIPGIERQPVKKQDPDPVALLRLLERWRLEAIKAGKTIGQIALAFEAGRDGFWLARWLQARDIAAHVIHSTSVAVSREHRRAKTDRLDTAMLMRVFVGWLRGERGHCRMVAIPTLEQEDAKRPSRERESLVGERTRIINRMKAALARLGIRGFNPALRKAPQRLAALRTPEGVPIPPNTLDEFRRDMDRLAVVRKQIDGIERARLARLEHAPAAGPHAMVRLLARVVGVGVETADMLVQEVLSRNLRDRRAVARYVGLTGSPDESGKRRREKGLAKAGNPRARRGLIQLAWRFLRFQSGSALAQWYRARTDGPKGARKTTMIVALARKLLIALWRMVTIGDIPVGVALRPTT

SEQ ID NO: 208443 - protein, 323 aa, unidentified
MDGSILETPQVFIGIDVSKSSWDVHLLPEGRSFTIRVDDGAVERLLEKLGPPEASLIVLEATGGLERQLVAELIDAGWTVAVVNPRQVRDFAKALGRLAKTDGIDAETLAMFAQRVQPRPTQKTPEKQQELDALVTRRRQLVNLRSMEKMRRPQAVHKVASRSIDKVLKVFDQQIAALDKAIARLIEADDDWRAKRDLIESVPGVGPTTSATLVAELPELGRLNRQEIASLAGLAPFNHDSGKFRGQRRIRGGRGALRATLYMAALTANRCNEKLRAFAERLHRAGKPFKVVITACMRKLLTILNTIVRSGKPWTPHPFVEQR

SEQ ID NO: 208444 - protein, 372 aa, unidentified
MFIVGCDFHPSWQQIAVFDNESGEVNEYKLSSGDGAAEQFYRKLPAPARIGLEACGNSQWFVQLLQELGHEVWIGDAAQIRASYIRKQKTDKRDALHILKLLLEDGFPRLWTPTAEIGNQRQLLVHRHKLVRLRAQVKNELQHLAPNQGVQKKARRWSQAGQKLLRELPLAGWAASRRANLLELMKLMDRQIAELDRALEQAAEENPQARLLRTQPGVGPVTALAFVLTLGDVSRFPRGKQVSSYLGLIPREHSSGGRQRLGAISKQGNRFLRQTLVEAAHSVVRLDEGFRKQYQRRCHRKPKGVAKVAAARKLAVRLYGMLRTNIGYPEIVHIESRPLVPLVDHGQTETLNGRSRIQQTGAKDGPAGLGKR

SEQ ID NO: 208445 - protein, 343 aa, unidentified
MEVVIGIDPHKASHHAFAVDEREVELAQLSIRATRSQTQRLLAWAEPFERRVWAIEGADGLGYLLSQQLVAAGERVVNVPATLAARTRVLGSTRSNKTDPNDARSVALTALRHDDLREVQAVGHSEVLRLLAKRNIDIGDRRTQVVCRMHALLVELAPGGIAKEINASDVDGFLTTLSPASPVEQIRFDLAVELLAEIRSLDAQLKVSHKRIEVAVRASGTTVTDLFGVGPIIAAMLIGFTGDVRRFANRDHYAAYNGTAPVEFSSGGRTVHRLSQRGNRNLNHALHMAAICQLRQPHSEGRAYFERKVAAGKTKREGIRALKRQISNAAYRQLLIDADRVGR

SEQ ID NO: 208446 - protein, 398 aa, unidentified
MFCGWDWGSTHHGVCVIDDGGTVLRRWLIAHNGERLGELFFELAEIAPPESLPIAIERGEGLVVELIADAGHAVLMVDPAGFKAARPRWGSAGAKSDLGDAYMLADYARTDGHRLRRVQPMAHATRDVAVLVRSRTSLVEARTAASNQLWAVLAEHWPGAGAVIQKLISPIALAFLADYPTPEAAAHLGEGRMGQFCRRHAYRGAKTPAELLGRLRAAPSATNPISAPVLASVVAASVAQIRLLNGEIARLERDGRDALAAHPKAALLEELPRVANVSLAQLIAEIGPLLERCDNAEQVAAMCGAAPVTRASGKTRTVGFRYAANKPARVAITGFADNSRHSSAWAAERYRQARTRGARHPHAVRVVTRGWIRASGPAGTPAPRTPRHDTVANSSQQR

SEQ ID NO: 208447 - protein, 412 aa, unidentified
MNVFCGIDWAEDHHDIALVDRDGQLLARRRISDDAAGLAALLDLLAGHGDQGDELIPVAIETPRGLLTGCLRATGRPVYPINPMAVARYRDRHSVAGRKSDHGDAVVLANILRTDAHAHRPLPADTELAQAIAVLARAQQDAVWARTAAHNKLRSHLREYYPGFLAAFAGARGGITRPDARAVLAAAPTPAAAAALTVAQLRALLRKAGRSRGIDTEAARLRAAFGAQQMRQPPLVEQAMGRQALALLRQLDAACAAADDLEQAAIESFNQHPDAEIITSFPGLGPLTGARVLAETGDDRSRFADAKGLKAYAGAAPITRASGKTTAVLHRRVKNQRLAAAGYTWAFAALTASPGARAHYDRRRTDGDRHAAAQRNLFGRLLGCLHHCLATGQHYDENTAFPTAATKLPQAA

SEQ ID NO: 208448 - protein, 321 aa, unidentified
METATAYVGIDVAKEKLDIAVHSSDQQWTFANSDAGIGQAVSCLRELNPALIVLEATGGIEVPLVAALAVARLPVVVVNPRQVRDFARATGRLAKTDTLDASTLAHFAAAIRPPLRPLPDAHTQEITAVLTRRRQLVEMLTAEGNRLGAARSKAVRRRISAHITWLEKELANVDDDLDSSIRNSPVWREKDNLLQSVPGVGPVLSTTLLAHLPELGSLNRRQIAALVGVAPFNRDSGNFRGKRAVWGGRSAIRAALYMATLVATRYNPIIRAFYHRLCAAGKPKKVSLTACMRKLLTILNAMLKHRTPWHYAGIQTFAPCS

SEQ ID NO: 208449 - protein, 363 aa, unidentified
MAMKAMTLVGLDVHARQTHAAVLDPTSGEIAVSRLRMAPLEVASFLADLAPAVRAVYEAGPTGFGLARAAREHAIDVRVAAPGSIPRGPGDRVKTDRRDAIRLVRLLAAGELSFAFVPSVADEQFRDLVRAIEDVRGDLMRARHRLGKFLLRHGERYPGAGHAWTGAHMKWLRALSLPDPCSRATFADYLASVELLIGRRASLLAALEQQIPECSHAPVIARLRCFRGIDTLSAAGLCAELGHFARFPRPDQLAGFPGIVPSERTSDTKRRQGAITKAGPPHARRLLVEAAQHYRHRPAIGQKLARRQAGQDPRIIEIAWRAQRRLHARWQHLHQHRRKPAGVVAIACARELSAFLWEAATLD

SEQ ID NO: 208450 - protein, 374 aa, unidentified
MGKLIRVKGLKQLKAVVGIQTIGLDLGDRFSQFCAVGGKGEILQEGRVPTTVAGMQRFFGGMEPVTVAVETGTHSPWVSRLLFSFGHKVLVAHARKLRLIYENRNKRDEVDARYLARIARVDPELLYPVRHRGESAQKDLAVLRSREALVAARTQMVNHVRGSVKSFGARLPSCSTPAFPKRAAEHVPESLKTALLPVLDCVAQLTEQIKEFDRRIHALIEESYPEARRLMQVQGVGEITSLAYVLTLEDADRFERSRTVGAYLGLVPAKDRSGESDPQLRITKEGNALLRRLLVQCAHYILGAFGSDSDLRGHGLRIAERGGKNAKKRAVVAVARKLAVVLHRLWRTGEIYQPLYNTERKSKRVGSGEKAMAG

SEQ ID NO: 208451 - protein, 324 aa, unidentified
MYKYIGIDISKQTFDAYSISSKQKETLLKEDNNKKGFKKLIKSYGSEGIYVMEATGPYYLQLATFLYEEGVKVSVVNPLVIKRFSQMQLLRAKTDKKDAQTICKYAMNNLIVLWKPSPVEILEMQQILTALELLNKQHSAVNSQLSSFISSGNIDKQVKETLSTTLSNIKLDKKKLNQRLNQIVDENYPETRRLLESIPGIGPKAAAILIAITNNFTKFIHYKQLIAYVGLSPRTYTSGTSVKGRGHICKMGKSQVRKQMYISSWSAKFHNKACKEFYDRLIKKGKPERVVKIAIANKLLKQAFAIVTSKTMYNENFKSQLRYA

SEQ ID NO: 208452 - protein, 348 aa, unidentified
MNTTVKVIGLDIAKNVFALVGQDAHGKVVLKRALSREAMLPAFANLPATTIGIEACAGSHYWARKLNALGHDVKLIAAQHTRAYVTGNKNDSNDAAAIAEACSRASTKTVPINTAAQQDLQMLHRARQALMQERTAMICRIRAFAGEYGTVFAVGVAKFLAGFNAWLADIINGLSGSAVTTFTELKAQLDDKDARIAIYDERLAKAAKEDARAKKLMAVPGVGKLTATAVLAAVADARHFNNGRDFAANLGLVPREHSSGGKQRLFGITKRGDTYLRTLLIHGARSALRCAGEKPDKLLRWALKLAERRGMKVAAVALANKMARVIWALLAHGREYVPVWSKSMTKPV

SEQ ID NO: 208453 - protein, 357 aa, unidentified
MHHTEKNPSTIGIDLAKNIFHLHALDAEGNTLWTKAMGPQNTLIFLEALSPCILGIEASGGSHHWHRMFTSLGHEVRMIAPQRARAFREGQKNDKNDAEAISHAIMNRQTRFVAPKTLKQQKLSSINAMRNLHIRQRTQTINHIRATFKEYGISYKKGAAYFENNVEEILQEETKKKRLPIEVIQGLLAQIVVLKCYKDTIKQLEKKILILSEEEEECKRLKTVPGVGPVVSTMLSGHGGDVAHYETSKDFAASLGLVPRQYSTGGKQVYGRISKRGNLSLRANMIHGARSVLAAANKKRKTGESSGNTLIDWGLQCYDRMGMNRASVALANKIARISWKILKTPGEVFMPSMPQAA

SEQ ID NO: 208454 - protein, 340 aa, unidentified
MEDTIYDHYIAIDWSIKNMAIARMTKKSNKITAIDVPSDIEDLQAYLKNLRGSKILTIEETTTSQWLYTELKKYVDRILICDPIRNKLLNEGPKTDKIDACKLVQLLKAGLMKEVYHSTDKFLYLRRVVSGYEDLVTSGVRLKNQRYALLRACGKNGKEKAGSPIDSQGEQFVLDCLDRQIEAYETEKEGYGKEFERLARKNIEIKHQKSLPGIGTINAVKIVARVVTPYRFPDKGHYLSYSGLIKLDKISGGRSYGKRNPRYSRQLKSVYKSGVLAAIGGNNPIHDYYEYLIQEDNCPKFNARQKACRRLATLSLGVFKSGKKYQPFRRKDVKSSARSA

SEQ ID NO: 208455 - protein, 366 aa, unidentified
MTSVALAAERIYLGMDVSRDKIAVAVLRPGEDVPAVEVISHDGEMVRRLIGKFADRSVLAACYEAGPGGYELYRLLAAAGVACDVVAPALIPKAAADRVKTDRRDCVRLALSHRAGLLTAIRIPSEQEEAVRDLVRTRADLVDDRKRMMQRIGALLQRHGRVWRAARWTCEHRAWLDRQSFTEPALEAALRTYLAALDARDAELAVLESQLRGCWASVDPLASMVRQLGCYRGIAELTALTLAAEVADFRRFGSAPAFMGFTGLTPSEYSSGARTRRGGITKAGPQLVRGALIEAAWSYRHRPAIGATLRRRQAGCAAETLARSWKAQQRLHATYAKLTRRGKIPSVAVTATARELAGFVWAEMTS

SEQ ID NO: 208456 - protein, 346 aa, unidentified
MEHYVGLDVSLKQTAICIVDGTGKVQREGIVSSDPESIAAFIKSYAPNVVRIGLETGPTATWLWTELRKLGLPVICIDARHAKAALKMQLNKSDRNDAVGIARIMQCGWYKEVRVKDLDSHAIKAVLISRALLVKIKRDIENQIRGLLKNLGLVIGQAKMNLFATRAAELTKDRPELAAAVVPLLKAREAVGQQIADLDRQVMRRARDDAQVRRFMTAPGIGPITALCFLATIDDPTRFRKSRSVGAYIGLTARRYASGEVDWTGRISKCGDKMLRSYLYEAANVLLTRVAKWSALKAWGVRLAKRSGLRKAKVAVARKLAVILHRMWIDGSEFKWSSKQAASQSA

SEQ ID NO: 208457 - protein, 420 aa, unidentified
MPDDRCRLGSDDVVIGLDLASAEHQVVVLTSDGQRLTRFKIPHSRVGLEELRRRTMPAALSRTGGSRVFAFEATGHVWEAMAYILRARGERYVVINPLTTFRVREARQLSREKTDLTDAEQIAELGRTGLVTRTQLEARPYLALRRAWGEYRRLREERARLKVLVAHQLYGLFPEFLRVWADLLQPGALAVLRTGLTPAMMAALSLSEFVARVREQRAGRRVWRFKLAQVHRYAEQTIACPDGGDVLAREVQRAVARMDVLTAQMTAVATEIDARLADLDEVQYLRTIPGLGWASGAGLLAHVGAITKYRHGRQLIKLAGTNPSRRDTGQTVGRGQRMSRRGRAGLREVMYLATISCLQHNPRIRAHDDRLIQRADRPLPKMQALGACMNKLLLYAFAVMSRREAFQLDHDWQRTISRVA

SEQ ID NO: 208458 - protein, 348 aa, unidentified
MAIVEAARTTAVTGGVDTHLDLNVAAALDSIGGLLGVEEFPTTAAGHEKLLCWLAGFGEIARVGVEGTGSYGAGLARYLRGADIQVVEVDRPNRQARRRTGKTDAVDAIEAARAAQGGRALGAPKTRDGNVEAIRALVVARRSARDTRIKTMNQIRHLGFTAPDQLRQRLAGVSRSCLAKKAASLRPRADQGTVVFATTTALRALGRRVVALDEEAKQIDKLLDELVRATAPELLAVYGVGTDTAAALLVAAGDNPDRLRSEPAWAHMCGVAPIEASSGKTKRYRLNRGGNRHANAALWRIVITRMSSDPRTQAYVARRTEEGLTKGEIIRVLKRYVAREVYRYLRPA

SEQ ID NO: 208459 - protein, 461 aa, unidentified
MKGFLGIDVSKGYADVVLLNEDGLKLEDTIQLDDTQNGHKAFVNWLDGLPASYSITELYCGLESTGGLENNWFAMLKSLKLNYAVYSSRLNPTAIFNASKAELNTNVTDSQSARNIASYLLRYCDKVDFKQQDNVYCSFRSLHTHIQLLIKQRTQILNELKVVLYSSFPELQRYCRKGIPAWVLTLLKAYPTSEKLSKAKAEKLAKIPSITLDKAKKLIESAKGSVSSRTSKTDGFIIENMADEILAKTKRIKELKNHLALNCTGPETRLLETIKGIAAYSAASIMIQIEDIKRFESPKELASYFGLHPKLKESGDKKIVSRMSKQGRPAMRATLYMCAMSAVLHDPYLKSIYARHRAKGKNHKQAIGVIMHKMLRIVWGVLSSAKPYDCEIDKLNQRKKEKPVEEKTQKETERKRRIQAFDPDAPVSRKANKRRKAHATFQSGETRNVRNLEHEPLITNI

SEQ ID NO: 208460 - protein, 374 aa, unidentified
MKNSITYVAMDTHKKQHKIALHYPCREEIIEFTINNKVRDIKKMVNKIKKHAPGKVEFCYEAGVCGFTLKRRIEQFGCRCSVIAPSLVPSKPGERVKTDRRDAKKLLMMQRAGLLTEVHAPDEHQEATRELTRLRETARDNLKRTRHQLIKFLTRHGYVYREGRHWTQKHISWLRTIEFAESTLTSVFESYFNEMIYCIGRLENLDKEVGHLADSGEYKEIVGLLCCYHGIDTLTAITIITEIFEFGRFESPRHLMSYLGLTPSEDSSGDKQKKGSITKAGNKRIRRLLNEASWHYRHIYVPSAALKKRRKGQPQWAIEIADAAGRRLSKRHRYLINKGKMPCKANIAVARELAGFIWFTITQYQARKNTKGVA

SEQ ID NO: 208461 - protein, 346 aa, unidentified
MEQIIRIGMDTSKNLFELHGVNAAGEAVLRRRLRRRQMIEFFKELPPTSVGIEACAGAHHWARLLGSYGHAMKLIPAQHAKRYVKRGKNDAADAKALCEAMSRPDMLFVPVKTTDQQAALMLIRIRERLLRNRTQLANAIRGFAAEFGLIAPKGLCRIEGLLERIAADETLPALARKLFARQGREYARLQAELDATEAMLMAWHRADERSRRLTKIPGVGPIAACMLVMKTPAPEAFRSGRDFAAWSGLTPKDHSTAGRRRLGGITRAGDEALRSVLITGATAVIQHARRNRGKPSAWLAGIIASKKPKVAAVALANKNARIAWKLMVSGEQYRARTAAPAAARAA

SEQ ID NO: 208462 - protein, 338 aa, unidentified
MSAQAVGIDLGKTTFHLVALDSTGQVVEKKKCSRPQLLRRMSNLSAHVVGMEACAGAHWLAQALTQQGHHVRLLPPQYVRPYVKTNKNDFVDAEAIAEAVQRPTMRFVPIKTEAQLDLQALHRTRQRWMGRRTALINQIRSFLLERGIAVRVGPAWLRKQMPALLANENGTLSGSLLNLLAELWQEWLQLEERIERANQSLRATAEQDPGCQRLLSIPGIGLLTATALVAAIGNGGTFRKGRDLAAWLGLVPRQHSTGGKTKLLGISKRGNAYLRQLFVHGARAVFFHLKREPHRMGHWLNQLSARKRTSTVIVAMANKLARIAWAVLVRGQPYQATA

SEQ ID NO: 208463 - protein, 337 aa, unidentified
MTQVHILAIDLAKRSFQVCGTDRGGAVLFNRLLSRARLQQLLNEQSPCIVAMEACATSHFWGRFSQGCGHNVRLIPPIYVKPFVKRQKNDAADAAAIAEAAQRPNMHYVEVKSAEHQARAVAFRTHQCFVRQRTQLINALRGHLGEFGIVVAQGPANLTTVVAILADQTNGLPDGVREIGQLYLEQIRLLTEKIDGLMLKLREATKANEDMRRLCTVPGVGPVTAGAILAFAPDLRAFKSGRNFAAWLGLVPRQHSTGGKTRLGGVSKMGQTDIRKLLIVGAMSLIRWIVRKGVLPDNWLGAILGRKPRMVAAVALANKMARIIWAMMTREQNYRMA

SEQ ID NO: 208464 - protein, 341 aa, unidentified
MNAALAVNDAGTEIGTWEGPNSQGGWASLARWASGLGEVRQWGIEGAWGYGRGLAQHLVGEGETVYEINARWTALRRRSAHKPGKTDQLDAQAIALFVRQESGLPRVLPEDDTAILELLTSQREDAQAEANRLRNQIHALLQQADPEYKAHIPPVNSKAGLEALRSYTGRSTSVLQQHRAAVIRRLAQRLAIALEHETALAAEIRALAKERFTPLTKLCGVNLLTAGRLAAILGPGNRFATDAQLAAYAGVAPLEAPSAGKTRHRLNRGGNRRLNHVLYFIVLTQAHHHPEAKAYLARRVAEGKSRREAHRALKRYVVRAIWKLWQECMEGQVAKSCEAAA

SEQ ID NO: 208465 - protein, 408 aa, unidentified
MQRMNPRCAGLDVHKDSVWAAVRIDGAEPLIAKFGTSSRELLRLGDWLTSLGVTICAMESTGVYWKPVWNLLEDRLELILVNAQHIRNVPGRETDVKDCDWISELLEFGLLKPSFVPDRPQRQLRDLTRQRTQLLGDRARVVNRIGKCLEDANIKLASVATDITGKSGRAILDALVEGKQTPEQMAELVHKRMEAKKPALREALRGRVTAHHRFMLRQLLQQIDALDQQIEAFDAHIEEVMSPLMRQAVARLDEVPGFDRRNGECVIAEIGTDMSRFPTPHHLASWAGICPGNNESAGKRKSGRTRHANRWLKAALTQAAWGASRTRRSYFAAQHQRLTKRRGIKRATIAVAHSLLVTSHCLLSNPEPYADLGCGYFQQSPDPSRLAQQLVRRLQKMGYVVDVKQNAA

SEQ ID NO: 208466 - protein, 523 aa, unidentified
MSAIRVRQRYRSRHQEVLQKPSGVIHPRVQKVGPEHFGIVSVDCAKARSKWMLCDFFGNILIPPAVVEHNRADLDAAVERLREANQKYALHDLIVAVERTGRYHHVVRQAFAAAGFEVRIVHPFTTKRYRQVSDPGNKTDDIDLAAIQRAAVNGFALLERPVDLIWRELQLLIRHRRDLVFKSSAVATQIREHLEAVLPGYAACFDKLWESAAAWTFVRHFESPRAIHEAGIVKLIEVLQGDKVRFQRPTVERVLAWAGQAAPSDQAAAWHRRIALALHDDHIRKTQEILERERDIAGYLTQTPYVLLLSFPGINVVSAADFAGEMGPIANYANSRCITGRAGIRPSRHQSDQVDLPNGPLVRCANRKLRAAILSIADNLAVCNHHFSAMAVKWRAAGKDPRHTRIKIAARFCRIAFQMVAGGQVFRHPALQQRHYILDKLLAFHREHHTPMPQTLIGLETALGHIPSSAHADEAKPLAAELLRIHAGRRRGPQLLGDILPLVLARLGVAALQSEESGERDST

SEQ ID NO: 208467 - protein, 403 aa, unidentified
MELSEIGVFVGVDMAKTDHFAQATTTGGEELFARSVLNDQTAIEKLIDDASSHGDVAIVIDMTASNAQLLLAIAAEREVPVAYVTGLQMRRAADLYAGTAKTDPRDAWVLADFARRNADRLAWLDVGDALLLELRVLNGRDVDLATDANRIINRTRDALAALSPGLERVVGHRLVQAGVRDLIAKWPTPTALRAAGKIKVRNTIKKRSPRVAAKITDEIWAALNAQTVVLPAEETWGQVVHELLDDLDRIQTQRARLTAQIEEAFLAHPLGQVLVTLCGFGPRTGARTLAEIGDPTRFANGSRLASYAGLSPTDWRSGSSIKGAFQHRGGNHRLKNAMFLAAFVATQHDPDARAYYLRKRAEGKKHNAAVICVARRRCDLIHAMLTTATPYDPSRSKKLAEAA

SEQ ID NO: 208468 - protein, 429 aa, unidentified
MQNESIPDARGPVFCGVDTHADSHWLYVLDWRGRKVLSRQFPADAAGYEALAGAIAAAGEPACVAMEGTSSYGAGLTRHLASLGMPVREALSPARTQRRRPGQGKCDEADAERAARAAMSGSRLGTPKSQDGWVDGVRCMLAARSGAVKARTSAINTARSLLTTAPEGLRSRFRGMGGPRLMEELPSVRAEGALGAALGALADLWAAARDAALDMERAIEASLEENCPALLAMYGCGPVSAAKLAVAAGDNPGRLRSEASFAAICGACPIPASSGKTVRHRLNRGGDRQANSALHEIARQRVMRDPETAEYAERARGRGKSDREVMRCLKRYVAREAYRALMRPHEIRRPEDASELVAARRAAKVSQVRAASILGTSEKYISMLERGQRELKPIRRAYEAWVEAGLPLDWDRQAFEAERKMDSKKHLAK

SEQ ID NO: 208469 - protein, 339 aa, unidentified
MTTPVYILGIDLSKARLDCATLPDGQSLQFANSPTGFAAIIELLAGPRAQGWEVLAVVEATGGYERALVAALCAAGLPIAVVNPKRVRAYAKALGIRAKTDRLDARVIARYGLMVRPRPSETRDRDRLELAELLAYRDQLTGEIVARTQQKRLYTAPALLSRAETALASLRREQRELEREIARMLTERETLEGTAALVLSVFGVGTVAAASLLAFLPELGQLDEKEIASLAGLAPMAHDSGQHRGRRHIAEGRSKVRRALYMAVVAGLRRNAGLRTVYDRLIKAGKPGKVAMVACMRKLLVWLNAMVRDGLPWQPDATKRRQAANEDTAAPAAERPRAA

SEQ ID NO: 208470 - protein, 373 aa, unidentified
METIITYVGMDTHKKEHAIALHYPGQEEIVRLTVRNISSEISKMVKRILKKAPGEVRFCYEAGVCGFDLKRKIEALGCKCAVIAPSLTPVKPGERIKTDHRDALKLLMMFKAGLLTEVYAPDPQQEAARELTRLRQSARKDLMTARHRLLKFLTRHGYIYHQGSHWTGRHFRWLGSLEFENPLMRDIFDSYFTEMQHCMQRLDSLDKEVERLAESDPYKEIVGIVRCFYGIDTLTAISIITEVFDFGRFAHPGCLMSYLGLTPSESSSGEKQNKGPITKAGNKRVRRLLVEVCWHYRHPYRVSKALKERRKNQPQWAIDIADRAGQRLRKRYWYLINRGKMPCKANTAVARELAGFIWSVLREYQARNMEKVA

SEQ ID NO: 208471 - protein, 339 aa, unidentified
MELYAGLDLHSRNTYIGIMDKEFKRVFGKRVSNNLPLILKTLDPFQDQLEGIVVESTFNWYWLIDGLMDAGYKCVHLANPAAMKQYEGIKHTDDQYDSFFLAQMLILGILPQGYIYPKEDRPVRDLARKRLFLVRHKTSHILSLQSLIARCCGQRISANEIRTFTVEDLQQLLKQEYIVLSAQANLDTIVFLKQQIVQLEKAIKNKVKLSKAFQQLMTVPGIGLILAMTIMLEVGDIGRFPQVGNFASYSRCVSSQRLSDGKSKGHGNRKNGNRYLSWAFTEAAHLSRRYNEHFRSYYNRKVAQANTSLATKALSNKLAWICYYIMRDQVAFRDNLLSQ

SEQ ID NO: 208472 - protein, 348 aa, unidentified
MRNRPRNAAVYGIDIGKNIFHVVGINIDGLPIQRVRLRRETLLQFFERAEPAIVGMEACPGSQWLARRIEALGHTARIIPAQFVKPYLKSNKNDTLDAEAIAEAVTRPTMRFVEVKQVLQIDTQALHRARDQMVMQRTGLISQMRAFCIEYGVAIRQGAGVFKVDLPRVVADHTNDLSPSIRRLLTRLFDDLKHLEARITEVTREIETLVDQNDVARRLMTVPGIGPLSASALIAAVGQGQQFKRARDLAAWLGLVPRQYSTGGKPTLLGISKRGNGYVRRLLIHGARSCLMHLDRSRDRLGSWLGQLSARMHPNKVVVALANKIARIAWVIINRPETLYRRIDPVFT

SEQ ID NO: 208473 - protein, 325 aa, unidentified
MNTAKMHIGIDVAQKYLDVLPFDHKPARVPNNAQGIKQLIKRVKAAVKAAGQPALLCCEATGGYEQLLLDTVSGAGLDIARVNPGRVRHFAKSDGHFAKTDALDARLITRFAEQKKPLPFARPSPFIERLRNYLDRRAQLVDFQTQDTNRLHQTADKETRRLIESTLKHIKTQLTLVNGKIRDLIAGDPAQHARAKRLLSVCGFGEATVAALLGYMPELGQYDEQQATSLAGLAPWADDSGGRTGDRKISGGRAKVRRALYMAAVVAARHNHVLKPFYQRLLKNGKEKKKALTAVMRKLLRLANRLLRDESFQLQPKVNPSPASA

SEQ ID NO: 208474 - protein, 332 aa, unidentified
MKKNLVFIGIDVSKATLDIFIYGFKYSFIVENNPKGFVVLIETSCRVTKQNMDDLFFCFENTGKYSRMLSVFLHTNSLKFAMEPALRIKKSLGMTRGKNDKVDAERIALYAYEKRDRLVSTILPGAEIDQIKSLLSLREKLIKHRTAYKNGLTDLHDCYLEGENNLIKEVQLGLIGSIDIEIKKIEKQIYSIIRADESMSKNFKLILSVKGIGKIIGFYLIAFTANFTLFANARAFACYAGIAPFEHSSGTVNGSPRVHPYANKQLKSLLNLAAQSVIQVRGECSQYYNRRVKELGKSRMSTLNIIRNKIVFRVFAVVQRQTPYVDLYKFVA

SEQ ID NO: 208475 - protein, 339 aa, unidentified
MSKRCPPPQPIAQPVSCPGHIAPEPVIIGIDVAKDHLVIAQLNHSHVQTIANTHEAIEAWLEGIPPSSWIALESTGRYSRLACQLAHLAGMKVYLLNALDVHHYAKAMGQRGKTDRLDAQVIAHYVAGQGAQLRPWQPTPVALEQLRSLMRCRSKIVKAGVQLKLSLQDAPALQDQAKRIAQQFKQTIRSIDAQLRAMVHDDPALSQGAARLQTIQGVGPLGATLLATLFARVPFHNADAVVAYSGLDPRPADSGKKQGVRRLSKRGDPQMRQQMWLCAMAASRCSGFKAHYEALRARGLPTTAAYVVIARKLLRIAFAIWHSEQRFDPAKVMKQPQNG

SEQ ID NO: 208476 - protein, 349 aa, unidentified
MTVYCGVDFHARVQTVSWLDTNDGEIHQKELHHQKDNVRGFYQQFTGEVIVGIEASGYSSWFEDMLEGLGHQVWIGDAGEIRRLARRRQKNDKRDANHILDLMSKGEFPRVHRLSRESREVLGQLRYRHRLVKMRTMATNCVKAIAIGAGLSDKRRLITGKGRSKLESVGLPSVFSEQCKRWLEVTDDLTTKIKAVEQWLEEQAQGDQRVERLRTHPGIGLLTGLALVHTLEPVERFCSTRKIAAYFGLDPMEDSSAERKQYGGVSKAGSRLVRFLLVEAGQTAAKRDPELKVFYQRLRDKRKTAKAKVAVARKLAVRSFIMLRDQIDYSEFLRRGVEARSSRTTGAAK

SEQ ID NO: 208477 - protein, 456 aa, unidentified
MSKLSKPNVGLEEARPFAGMSQVHAHAAGVDIGAHEILVCVQGGDTTQLVRSFGSYTVDLQAMGTWLEEHGVETVAMESTGVYWIPLFEELERRGFHCHLISSRSLRRVPGRKSDVVDCQWIQTLHSYGLLESSFRPEADLVALRTLLRHRAQLIQHRAPHILHMQKALLQMNIQLSQALSDVSGTTGQAMIRAIVAGERDPHKLAALRNYRCKKDEREIAKALTGTWREEHLFILQQSLELYDFYTKQLEECDAEIERMYSLVRVDWDPEERGDIPEKKRNSHSKNAPKKVQVRKHLQRICGVDVTAVHGVSASLAQTIVIEVGTDMSKFPNEKHFCSWLGLAPKNEISGGKVLKTKTLKTKNRAGQAFRMAAGSVMRADCAFGAFYRRQKARLGPAQAAVATAHLIARIVYRMLKYKVEYEPLSVAEYEQHYREQQLKYLQKKAAKFGFQLTPT

SEQ ID NO: 208478 - protein, 331 aa, unidentified
MHKDTYAVTCVCNKQIVKTATAKADPAGLTASLSQWFPGARLYTAYEAGFSAFVLHRALTKAGIMNIVVNPASIAVAANDKVKTDRRDSKKLALDLSDGRLQGIYVPTEDEELARLLPRTRAQIVEHRATIARQIKAKLHQFGLIAPASRRLISNRYLREIDAWPLPPDLRVSLTFLAEQWRFATRQLIEMRRLLREQAKAHPAIEQVYRSVPGIGEVVARTLATELGDMTRFANERALFSYTGLTPSEYSSGPSVRRGHISRQGSSRVRHLLIETAWRALPRDAVLKEIFDRIAATRGKKRAIVAIARRLTGRIRACFRQGTTYAVGTYA

SEQ ID NO: 208479 - protein, 299 aa, unidentified
MVTIVSDEPPRIVVGVDSHKEKHQAAVLDLQGALLGNRCFEASSAGYRELETWLATFGTVERIGIECTGSYAAGLTRFLRERDVQVLEVNSTHRATRARRGKDDAIDAEMAARKALSGEAKAQAKDTTGFIESIRLIKLARESAIKARTGAFLQIRDVLVTAPAELREHVESAGGLRHRVNRAGALRPDLEHIDEPLQAAKFSLRVLSRRVKTLDEEIAAMDAQLSRLVHQCAPNLLNCLGVGVQHAATLLITAGQNLDRLKNDGAFARLCGAAPIPISSGKTNRMRLHRGGDRQANRT

SEQ ID NO: 208480 - protein, 426 aa, unidentified
MRVMYDRVAAIDVHKDMVKVAIRVPGAKRGTRKTDVLEFRTFYGVLQAMARELRGRGVTHVVMEASGVYTDPVYYALRELDFTEVMVINPAHAKALKGHKTDAKDAIRLVDLYECGLLSGSCIPAPDLREVRDLARYRMKTVQARTSEIQRLQKTLETAGIKLSSVVSDVTGGSATAMIEALISGERRGSVMAGLAQTRMRTAGKMADLSMALTGRFTDHHALMCRLHRDRITIFDDAVADLDAKIAPLVARYAREAGLLKTLPGFGDVIVAGWLGAIGPAPHQHFATASRLASWATLCPGNYMSARKSKGGRTGDGGAYIKPLLIQAAWGAVRVPGRLQARYNRLVRRFGGNKNPGAKKKAITAIARTLLKIAYSVLKTGTPYADLGADSCTRRESPDARQHYLMRQLQKLNPGCVITITPAETA

SEQ ID NO: 208481 - protein, 370 aa, unidentified
MGNRSMFVGLDVHKETIDVSIAEGHRGGEVRHYGVIASDLEPLDKVVRALRAPDRQLHFVYEAGPCGFGIYRHLTKRGEHCVVVSPSMVPKRSGDRVKTDRRDSLALARLHRAGELRAIYVPDDADEAMRDLVRAREDAVVVGTQAKYRLKAFLLRQGRRYPGREGWTLPYRRWLADLSFPTAPQHITLQEYRDTIDETERRIARVTEQLRQLAPTWRWAPVVAALQALRGVSFLTAVALVAELGDLTRFGHPRELMAYLGLVPSEYSSGPSVRRGAITKAGNPHARRLLAEAAWAYQGIPRIGRQHAYRQEALPKVVCDIAWKAQLRLTTRFRRLVARGKAKPKVATAIARELTGFIWAIAQEVSPASS

SEQ ID NO: 208482 - protein, 343 aa, unidentified
MKLIRVGVDLAKNVFQVHGVDRNEKVVWRRKLARESWIKVLLETAAPGCAIGMEACGGAHHWARRLQAHGFKVRLVAPQFVKPYVKSNKNDANDAEAICEAMSRPHMRFVSVKTVEQQDIQAVHRIRAELTKQRTAKANQIRGLVAEYGLVAPKELMHLRRALPCWLEDAENGLSARFRRLLNGLWGDLRTLDERIAELDCEIAMIAQNDPTAKRLQQLRGVGPIIATALVAAVGNGEQFANGRQMSAAFGLTPRQHSSGGKERLLGISKRGDAYLRVLLIHGARSVIHHSKGKDDRLSQWVTRLAARSHTNVAAVAMANKTARMAWAMLRNGTDYQPAMVTG

SEQ ID NO: 208483 - protein, 444 aa, unidentified
MKPLPVLDPKAAGIDVGSEKLHVSIAGDTPKVFGTFTAEVAALRDWFKEQGVRTAAMEATGVYWLYVYEVLEAAGLELAVVNGRHVQNVPGRKTDMTDCQWLATLHAHGLLRGGFVPPADIRRLQDYQRLRADHIIGAAAQVQKMQQALERMNVKFHDVISDLSGVSGLKVVRAILRGERRPGELLALCDEQIQKKKSAAVKESLRGSWKQEQLFALRQALELWETYQQKIADCDRELACLLHQLAGPPQPPEDGDTPGELKLAPAKTPGKNAPVIERLQELMARLCGGRDATQIPGLSVYLVLQLVSEVGTDMSRWPTEKHFTSWLGLAGGRRQSGKRKGTVKAHRNRAGRMFCAAARALAQSIDKALGGFYRRLRGRVGGLAANVALARKLAQLFYRLLRYGTEYVEKGLKAYEARVWETEARLLRKLAKKQGFTLMPALAN

SEQ ID NO: 208484 - protein, 348 aa, unidentified
MTLTTIGLDVAKLVFQVHGVDENSRAALKRKLHRPEVVTFFEELPRCTVFLEACGASHYWARLLTALGHEVKLIAPEAVKPFAKKGKKNDAVDAAALCVAGSRPEIQFVPIKSVAQQAVLALHTARSLLVKQQTMLANAIRGLASEFGLVVPQGLHRLEELMVQVTAEASVPAEGRQALIVLHAQLQAAAERIVMLEEQIVVHARQNASARRLATIPGIGPITASLIAATVGDNITAFTSARHFAAWLGLVPRQHSTGGKPRLGRITKAGNTEIRRLLVLGATSMVRRAETWNSAAGIWLRGVLARRPVRLTTVALANKMARIAWALLTRNDVYRAQGRSKVAAGAAA

SEQ ID NO: 208485 - protein, 320 aa, unidentified
MEMATTEDLLVIGVDVSKAKLDIVWGSDGSPEAIKNTDKEIARNLIAKIKAPANTLVVMEATGGYESLLVDLLHQANVTFAVVNPRRVRDFAKGIGWDAKTDPIDAKLIARYGEVVQPKPHRAKTDQEKKLEALVTRRRQLLGLINQENNRLQQTRDQEIQELIRQSLETLKKQVEEVDERISQAVATDEKNARKIEILQSVKGVGPVSVSTLVAELPELGELNRGQIAKLVGVAPMNNDSGQKEGKRQTSGGRSSVRRVLYMATLVATRFNARIKEFYVRLLAKGKPKKLALVAAMRKLLTILNTLIKKDELWTEPKVG

SEQ ID NO: 208486 - protein, 339 aa, unidentified
MNNNSVISVDIAKNIFQLCRLNEHNKITTNKKVSRNKLLESVLNLDSKQVVMEACYTSNYWGRLFERHGLTVNLIPPHQVKPFVIGNKNDHNDAVAIAEASRRPRAKFVAVKSLEHQDIQSLERIRERLIKTRTALANQTRGLLAEYGINIKKSLKQLRSAIPQALEDADNQLTVISREFIQGLFDELKALDQRISDNENISAQRLKNNDDYQRLQTIPGIGPIISRGFICAINNVQQFKNGREMAAWIGLTPKQHASGDKSKMMGISRRGNQALRKQLIHGARSVVRWCEGKDDPLSLWLQKLLKTKHKNRVVVALANKLARIAWAILAKNENYKLNP

SEQ ID NO: 208487 - protein, 317 aa, unidentified
MTPIICGVDVSSISLEAFVNPAGPGRTFANSAEGIAQLACFCQQHGVELVALEATGGYEKQAFALLWAQGVAVALLNPRAVRDFAKAMGWLEKTDRIDARMIARFAAVKGSVASTPASAEQQHLKALVTRLRQLTQLHVDQRNQRLLVTDATVRASISKLLKVVEAQKRSLATKIAAVLASDPLWKELEQAFRSIKGVADRTVAAVMADMPEIGLLSNKAVSKLSGLAPLARDSGKMHGRRLVRGGRRQLRAVLFVVAGVVSRHNPDFAAFHQRLSAAGKPKKVIRIALAHKLLVRLNAKARDVRIRFEAANACQTA

SEQ ID NO: 208488 - protein, 357 aa, unidentified
MSSENKILDCNNQRFYVGIDVHKKSWNVTIRSGGIALKTYSMNPSPQELSKYLHEKYPGGSFMSVYESGFSGYWAHRQLEQLGLNNIVVSPNEVPTNGREKTYKTDSVDSRKLARELEKGSIKGIYIPDQLNQELRSLVRMRYQLMQSSTRLKNQIKSYLNFYGHVIPEDYQTKHWSGIFISYLKSLNFQYGMGKEQLEMYLSDLSEKRKLMAKTIKKIKSYCEEYEFNKSIRLMMTVPGIGYITSVTIYSELIDINRFPKLENLASYVGLTPSVSASGDKETNLGLKLQHNKYLRNMLIEAAWIAVRKDPALTASFNEYIKRMSKQEGIIRIAKKILNRVRTVLKENRGYVCSIVK

SEQ ID NO: 208489 - protein, 359 aa, unidentified
MVPIGVDVHKRRCKVVEFSDSKVKVRKPMENTREEWLELLAELPPDAEIALEVSTAGYFAMSVLEEAGWGERAHWVHTAGIDSPRKQKCDRLDAERLARKLAVHHLDPLPEAWFPPAEIRELRLRSRQRCWLARLRTQAKNRLQSLLEMHGLQPPGSDPFGRRGRDWLDQQKLPAALSESVPQMLRLVEVLGKELETSEGYLEGVESQFPELSLLRTIPGIGPLLAPVIWSEIGCLKRFTSASALVNHTGLVPSLYESAEVSVQGHITRQGPRWLRWALITAANVAIQHRNPLARRYYRLRRNKKKPNVAKTAIACSLARCIYGVLKHRSPFREERWGRKVGALEQEACGSAGSTKTVL

SEQ ID NO: 208490 - protein, 405 aa, unidentified
MYYVGIDVAKEKHYICILDESKELACKPFWIYSDITGLKELIQIFTSISINYNDFLVGVESTGAFSENLYEYISDAQYKVVLLNSYQTAKYRDFSTMKKIKNDAIDALVIAELLASDKYKESYISNDDYQELKVLGRLKKSLSDKIKTIKREISTVIATVNPEISKVFPNIFTKTALAIIKAYPTAVDIQKATPKKLAKIFRNIKGNNFNDEKAKLLIELSKSSIYGGRALESRALMIRTNIKILELICQEKDEIELQINSLIYNKIETVDSSIENIKTIPGVSDKTIASVLGECGDIKRFVSAKAFIGYLGLYPTQYQSGNSISIGKLAKRGIPIAKHALYMAAIASVRHNEELNKIFHDKVSSGKSKKEALIIVSKKLAVIIYSIFKYNKPYEPKRVFIPRNK

SEQ ID NO: 208491 - protein, 473 aa, unidentified
MSRVDEENEDVLLLSLTGSSPNDSEEDVVSKGSGLSRGDKRRNAKLAELRRLVPVNHAILGIDLADKKQAVVVCDHDSQVLARQTVKARAWELGPVLDWARRVAHKRGFADVTVGCEPTGHRWMVLNQLAARRDMTLVCVNPMLVGRAREAEDYTRDKSDDKDAMLIARLVAGLHCYAPECADETWARLRQLGARRERLVTEATACVAQLRDLLECVWPGVLEAAVKPFDSANWCAALALVLERCNGCPERLARLGLARFEAAVVRELPRWGGQRRRRPIISAVYSALVDPRGVMTQRRGALERARWVLADWRSATTRLTEVQTRMVEILDELGLTAYVTSIPGVSAVGAAAMLAETGDPARFDSPRALVKHAGLCPRDNASGTFNGRSRISRRGRPRLRLAAWRAVWGALPHNSVMAARYRHLTTRQHNRLTDGQARAAIAAALLRWLHVVVTERVHWDATIAGAAEMPAAA

SEQ ID NO: 208492 - protein, 412 aa, unidentified
MEVIHRRCAGLDVHKKTVVACVRCVQDGEVRREVRTFGTTTSELLALSAWLAENGVTHIAMEATGVYWKPVWHILSDGEFDLVLANAAHIKNVPGRKTDVNDATWIAELLAHGLIRASFVPGEEIQELRVLMRTRKQLVREQTSHTQRLQKTLEDANIKLDSEITDILGVSGRRMVEALIAGETDAAKLAALAHRRIKASQEELQAVLQGRVTENHRFLLHLHLRQIDGLAALIEEIDGQVAVHLEPFRDAIGQVSTVPGVRDIAAPAILAEIGVDMSLFPSAGHLLAWAGLCPSNNQSADRRRRSRLRKGSRWLKGILIQSAWAAVRTKGTYYRSQYYRLAARMEAKKAICAVAAAMLTAIYHMLKDGTVHQDLGADHFTRRSKQSRTNRLVKQLASLGYHVEITPMATTA

SEQ ID NO: 208493 - protein, 362 aa, unidentified
MRNTTTGEAGDRLTIGLDMGDAYTQACVLDEDGEVIEESRVSTTPKAFRRRFASLPPARIILEAGGHSHWASRLLGELGHEVIVANPRMLRFIYGSDSKNDKADAAYLARVGKLDPALLHPIVHRSEQSQADLTLIRSRDALVRVRAALVTHVRGLVKVFGTKLPSCATEAFAIKAESQVPELLRPALEPVLAIIASLTTQIREFDRKIRALAKESYPDTSLLSQVGSVGRVTSLAYVLTLEDPSRFPRARAVGSYLGLRPRQADSGDLKPRLRITKAGDEMLRRLLVECAQYLLGPFGRDSDLRRWGLKLVERGGKSAKKRAVVAVARKLSVLLLRLWQTGEVYEPLRNARLRGELTPSPS

SEQ ID NO: 208494 - protein, 355 aa, unidentified
MDSTKYIGLDVHKETISIAVLNSSGKLVMETIIETKASMLVQFVQGLRGNLHVTFEEGTWAAWLYDLLKPQVTKIVVCDPRRNALLKEGNKSDRIDARKLAELLYLNKLKPVYHGEHGVRALKELSRSYLTISGDLARVMTRLKAMYRSWAIPCAGKQVYAPRYRSEWLGKISEAGVRRRAEFYYQQLDALRALRQQVRRELLAESGKHKASKLLCQIPSIGPIRAALLIAILQTPHRFRTKRQLWAYGGLGIETHSSADHRYVEGQLRPSKRPVSLRGLNRNHNHELKNIFKGAAIIAATKAGPFQEFYAALVAKGIRPEMARLTVARKIAAITLLVWKKGVCFDAQHLKPQTV

SEQ ID NO: 208495 - protein, 351 aa, unidentified
MKTKSSSTTTPGIDLGDRKRAVCALDACGEIIAEQSIPNTRESLTKLSASHPQALVVMEVEMNSPWVSRFLEGLDHRVLVANPRKLSAIYSNDHKCDRRDAEMLARLARADEKLVHPITHGTERAQRDLLQIKLRDNLVRQRVDVISAGRFTLKSMGIRLRSPKTSCFARHARRELETDFPGTLALIDPSLAVLDAMTAQIRELERAIEKLAMESYPQCAHLQGITGVGTITSLTFVLTIGDPKRFSRSRDVGAYLGLVPKRDQSGDTDKQLRISKAGNAYLRRLLVSAARYVLGPFGPDCELKRHGMRLAERGGKRAKKKAVVAIARKLAVIMLALLRDGADYREEPAAA

SEQ ID NO: 208496 - protein, 343 aa, unidentified
MEHYVGLDVSLKQTSICVVNQTGSVVREGVVDSDPEAIAAFVRSNAPGVVRIGLETGPTATWLWTELKQLGLPVICIDARHAKAVLKMQINKSDRNDAAGIARIMQTGWFKEVRVKDLDSHSVRALLASRALLVKIKRDLENQVRGLLKNLGLVIGRAKFNVFAVRAEELIEDRPELVAAIRPLLAARKAIEQQVSDLDRKVLKLARHDVQVRRFMTAPGVGPITALCFKATIDDPTRFKRSRSVGAYVGLTTRRHASGEVDWSGRISKCGDAMLRTYLFEAANALLTRVPKWSALKAWGMRLAKRSGLRKAKVAVARKLAVILHRMWVDGTEFNWSTKKAAT

SEQ ID NO: 208497 - protein, 313 aa, unidentified
MLPSLVYVGMDVAKRTLDLHAASEPRSQFRQFPNHLKGHRALIRWLQGLGSVHVVGEATGGYERAVVAALHAANVIVSVVNARHVRDFARATGRLAKTDRLDAAVLAAYGTAVPPIGTVALSAAQSQLAELVTRRQQVLALRVAEHNRLEHITHPAARRQIQRHLIQLDRHLEQLRAWINERVQTEPTLAQKVARLCSVVGVGRLTAVVLLALVPELGTLNRRQVAALVGVAPFNRDSGPHRGRRQIAGGRAAARQALYMAALVAAFRNPRLRPFYQHLIAAGKVPKVALVAVMRKLIILLNQLLKNPEFQPT

SEQ ID NO: 208498 - protein, 344 aa, unidentified
MNHYAAIDVSLELSSVCIVDATGKVVKETKVETHPEALVKFFKDIGLPLTRIGLEAGPLSQWLYAGLTEAGFETTLMETRHVKAALSAMTVKTDRRDARGMAQLLRMGWFRPVHAKSPGSQEVRALLVARKQLQHKLTDIELSIRGILRGFGLKVGQVTDKTFEARIRNLVTGHAMLEQIAEAMLAARATLLIQFNKLHKAVLDIVRHDEVCRRFMTTPSVGAIVAITYKSALDDPSRIKKSRNAGPLFGLTPKRYQSGQTDVTGGITRVGDEMVRTVLYEAANVLLSRVTRFSALKRWGLEVAKRRGLKRAKVAVARKLAVILHRMWVDGTTFRWTTPEAARA

SEQ ID NO: 208499 - protein, 413 aa, unidentified
MDVLHPRCCGLDVHKSSISACILLREAGRVQKHQRRFGAMTQDLRELAEWLREFGVTQVAMESSGVYWKPVWNILERQFTVVLANAQHIKNVPGRKTDQKDAEWIAQLLQYGLLRPSYVPCEIIRDLRDLTRMRASLSQEASRISSRIQKVLEDANVKLASVATNVLGKSGRAMLEDIISGEDDAEHLASLALGHLRVKIPQLRLALEGKIRSHHRFLLRRLVDQIQFVEHEIALLDERLEDIGRQRPELAQAVARWDTIPGIDRVAAWALLAEIGDNMAQFPTAEHLASWAALCPGNHESAGKRLRGTTRQGSPWLGRMVCQCAWAAARTKNTYLSSQFRRLAARRGKKRAIIAVAHTLIVIAYHLQKNQSNYEDLGGNYFDRIHSDGLKRYLVRRLEQLGHKVTLEPMEAA

SEQ ID NO: 208500 - protein, 344 aa, unidentified
MATYYIGADVHTNNTELAIEQRGRIVARYSVPTTIPAISTVLSSLEGKKILAMEEGPMAGWLYRNLNQEVEQFVVSEPRHNKLIAGEGDKDDKIDAGKLAILLRGNYLKSVHRTSDDHRAHLKHWINLYHDRIRDAVRDINKIRACCRMHGVRIPRKVVRNPVRRHQWLSGLDNPVLKAQLHMFWIGYDATKEQIELAKKQFSSYARKYPIIKSWCELPGVGMIRATTIFAYLDTPWRFKNRAKLHKYCGVGLVRASSGTDKKSRPKPARLKLPWAVNRRIKNAVLGAATSAIEKGDNAFKDYYQRMLSHGITPANARHSVARKLVSTMSAMWKTGSEYDQKLL

SEQ ID NO: 208501 - protein, 416 aa, unidentified
MELQWFVGLDWSKSHHQICLVDRERQTRGETVIPHSGAGFQQLAAWLAEKTRHAPSERIGIVLETSVGSVVKSCQTLGYEVYAINPIQLDRFRDRHYPAGAKDDRREALLLVTALCLEPHLVRPVEIEDEDTMQLRLRNRRRNAFGTTRSALITQIRQLLEEYFPSFVTMCGDHLASPFAATLWHRIPNPQKAHQTRVSTVVTILKQHRMRRFKASAILEQLRAEPLPIPQYVMTARQQELTMLWEQMHLVNKQIQTLEQQIAEQLDARVNALHDVANPATEEPARPTDEAILASMPGVGKTVLATLFGEAGSVIRNRDYQALRCLTGVAPVTKSSGKYRRVQRRRTANRQLSDSVYHWGRVAMIHDSVCREKYQRLRAKGHTHGRALRSIVDRLLYVACAMLNNGTLYQNPATES

SEQ ID NO: 208502 - protein, 368 aa, unidentified
MDHPAIRFTPKKVRYEMHITLGVDGHKETHTIVAINPVGRFLDQMTVPNDFTGYEQAYQWACRLGMFRTWGIENSGHFARAFAQYLLAQGEIVLEVSPHLTGRKRNRSRDASKSDPNDALAVARVVLQENDSLPAVEKEDQTTQVKLLVEQRDNLVGERTRLLNQLHAQLTEVDPHYKGRLGDPKQPGTLNSCLAYPVPESDPIGEIRVTIIKQLACLILQLNEQIDALEKRIHPLVEQIAPALLTIQGIGFLNGATLIARVGNIGSVSSASALAHYGGLAPIRCGTAGNYYYRVNPKGDRQLNAVFHRIAQTQSACNPLAKAYLAKKKAEGKTPKQAFRCFKRRMVDIVYAVWKSGKPYTPPVSNVV

SEQ ID NO: 208503 - protein, 346 aa, unidentified
MLHAGLDLSRKRLDVCLLSDQGELVEELTAFPDSSGLKALAQRVESDGEPIRAVIESMTGARFVHDTLERHGWEVEIADAQKVKGLAPLAAKTDRIDARVLAVLSHRDLVPAIWLPDPRVRGERELARFRLHLVKHRSQLKNRIHSALMSFGRPCPVSDLFGVAGRDLLAELDLPEPWRGNIDASLALIDDLGTQVVEVDSKLRSSGADHPYVPLLLTVPGVGWVLAFTIAAEIGEINRFETPTKLTGYTGLCPRVVQSGDSDRRGPLSKHGPRYLRWALLEATMHALRHPAYAERYQRNKRRLGKQRGAKVAQVDISRRLTVAIWHMLTRNESFAPRGAALRLAA

SEQ ID NO: 208504 - protein, 381 aa, unidentified
MKSVNVNPKVSVNGVILGIDLGKYKSVVCAYEPAEPSWQMSSFTTNREELIKVLEKYRPRIIVIEACALCGWVRDLCAERKMPCQVANTSSEAWKFKHTKRKTDKDDALRLAQLEALGQLPTTTIPPKPVREWRALIAFRQKLVGRRTAVQNRLRSILVGQGLTAPRGAKAWSEPGLQGIGQFARPLAECGPEDLWRGMLDLALTDYRQIGALMVQAEKRLDALGKVNDDVKRLQTIDGVGPRTAEVVTAYLHEPKRFQTGKQVSAYAGMVPRQYQSGETDHRGRISKRGPALLRKLLVECAWCLLRYNAWARSVWQRLTRNGKVRRKQAVVALARKLLVRCWAMLRDGTTWREDTGDAGCVSPGQPGGVSPRRKVETAPA

SEQ ID NO: 208505 - protein, 318 aa, unidentified
MQQQSTTVAGIGIDVSGAKLDLSIRLSDSSYLDDSFENNTAGIKSLISALKCQETAKAAPLVIESTGNCHLQSAIMIKQGDYLVKVINPLLTKKFQKSSVRNSKSDKIDARRLADIACLEPNLPDFKADIDNIAIRKLSSYLAHLEKTKQQMGSSLKQLIQSKELLKMDIDLKPVKKAMAKIDEQIEMITIRLIEAMPEKASQLAENTRGLSEKKLAVLMALIGDRIFENRDQLTAFVGLDIAIRQSGAWRGKQKLSKRGNSYARKILYQIAWGLKQHNQLYRDYFDRLRTEGKKHYNTAMVATARKFLRFLGVMVNL

SEQ ID NO: 208506 - protein, 386 aa, unidentified
MRGQTFVPRDYDVFAGLDVDKRSISVTFSNHQGFISSLHMPYSTEHLIKHVRKHFGDQKVAFAYEAGPTGYGLYDGIVAQGYRCLIAAPAMIPRAPGQRVKTNRLDGVSLSENLRGGQLKSIHVPTPIYRELRHLVQLRDTVMSEVVATKQRIKSLLLFEGLDFPTAPAGSQWSLKVKRQLQKLACSKGVRFKLDELLDSLEFLEKKVVRSTREIHRFCKDDPELLQCIKYMMSVSGIGWIVASQLLARIGNWREIQNVRQLAGFLGLVPTEHSTGDRIRRGSITHSGDGRLRSKLIQASWSAIRQDGELRDFYRSVCRTHARHLGPRVAIVAVARKLSARIAVVLMQQRPYVVRKKVDTAPLTQEETVPQGTTRRPGEPGETDNS

SEQ ID NO: 208507 - protein, 466 aa, unidentified
MGKSRLERRGKLFFNLYGENFSPHEIAIAAIDIGKTHAVAGVFGYFGEVLHESFILTPDRRGVEILCQVAEETAARCGRKHIVFSFEHTGHYHEPVVALLRERNCTVLPLNSVTTKKERESNLDRSKTDELDIHYIAAAVSAGKVVTDRPLRPEDEELRFLSRQRRTLVQRRANAFVELHVLIDHYWPAFQGIPEVADGKAHVERIFAKTWPERALRFLKHVSTPAEALALGEAGLSGLSRRERLALGIRRIRLILRAAGLAPKVPQSLIEQYVERLRAILESIEGLSTRIDALEDRCQEFLTGSRGVLLLTIPQVGAVTAADYMAEIGFLVPSLHSASAVIKLAGTNPVPDQSGNRRWMRKISKQGVAHYRTLTYQLGNNLFYGKGNPYFQAFGRRLVHLKPKQIRIAVGNKAHRVIFAMLKNREVFAPKTWPGPPLTMNPLPKLKPCYQQRAREQLLRLGITGY

SEQ ID NO: 208508 - protein, 402 aa, unidentified
MTIQQTNVTVIGGVDTHKHTHHASAVDIHGRFLGHNEFPATDVGYQQLLDWMHSHGDVASIGVESTGSFGATLTRFLTSAGVEVIEVNRPNRQARRMDGKSDRLDSEHIARAVLGRTSTAIPKAKSGIVEVIRTLRVTRASAVKARTQAFNTLWGIMIGAPSPLRDELVVLTKRTLVNRCLGLRPETGDLLSLADTPERMLTAGVKTSLRDLARRWKSLDNEIKALNTNIAALVQRAAPELLELKGVGVEIAGQFLVTVGDNPSRIHSEAAFAKLCGVAPQPASSGRTTGRHRLSRSGDRAANSALYIITIVRMRHHEPTRNYVDRRTAEGLTKREIIRCLKRYIAREIYKNLPAKTQRPPGETPILIIDDLDIRVVNKTTGELIRHFQLNPNVGYQPRFKT

SEQ ID NO: 208509 - protein, 408 aa, unidentified
MEKNEKRYIGLDVHKHYLIALGVDENLEVVLPARRVELSHLEGWMKKTLTRQDEVVLEMTTNTWQLYDELSTYAGSVTVVHPPHVALITRSQVMNDKIAASILARLLAKGLLVGIWVPPQEVRELRGLVAQRQKMTRLATQAKNRLHAVMQRHHLKPPTGNPFAKTNNGWWEALPLGKLEKMNMQSDLETLQFAEQQEARIQKEMTGIVAENEEIGRLLHLAGFGVITTVTVYAAIGDIRRFAEPKKLVGYAGLGTRVHDSGLTTRTGKITKAGRRDLRVVLVEAAHVVANSHPHWKAELARLQPRLGYNKAIVAIARKLLVTVWHVLARKVSDRFAETEKISEKMLRFAYEVGKGNRPGRQTAAQFARERLDALGMGQELTSIPWGSKKPIPLPPSTLKGRSDVPNK

SEQ ID NO: 208510 - protein, 403 aa, unidentified
MIYAGIDIAKNSHVIGATDERGKDAAKPMQFANSTAGFDRCAAYLDGLAESKSDLLVGMEATGHYWLPLFCRLQDEGYAVVVINPVRTDAMRRFKGSSRVKTDMIDCVLIAETLRCGDFEPSKLGEESMIELRQLTRLHQELKESVADLKRQVIVALDQVFPEYDSIFSNTFGESSKAFLKRCPTPEECLAVRVDSLARTLERASHGKIGREKADEIKGIARNSCGIDVATSAFSFQIKLLIEQIDFIEGQVSEVEARIREGVEAVEPLVLTIPGIGHTLGAQIVSEIGDVRRFRNASAIVKYAGINPSISQSGKFASEENHITKQGSPYLRRALYLAAMSQLQLKTPFYDYYAKKRADGKSHREALIAVARKLVHVIYAVLSKQEPYDPEITRNPELASRSE

SEQ ID NO: 208511 - protein, 480 aa, unidentified
MNVNAKKTKKQVKVQDSSVNVLSMEEMKSKIEAVEKDMKSYTWHELETNGKFTKNDKLSFISDDMLIVGCDIGSEIHYIRAIDTRGRELSKEVYSFSNNEAGFQNARDWMLNLAAISDKKQIVLGLEPTGHYWFVLAAWMISKEISVVQVNPYAVKQSKEIEDNSQLKDDRKDPKLIANLVKDGNYGMPYLPEKVYADLRRLSMFRDQLTEDRIRHINRLHRELKIYFPEYMDAFGKIDGAFALEVLKTAPMPDDILALGEAGLRKLWHEAKLRGRGYSRAKEIVEYAGKSVGLKDGSYAGREAVKWFANQILVLDERLTEVESALHQRCMEIPHAENIIDIRGIGENILSGILAEMGDVTRFDDVKEIQKLSGLSLVACSSGKHKGQTKISHRGRKRLRYWLFQAAKSAVSHGYEYKQLHEYYTTRTDNPLKKMQSLIVIACKLLRVIYTILKTGIKYDPEKLLKDIRRSEKAMVKAVA

SEQ ID NO: 208512 - protein, 410 aa, unidentified
MTDKDTRYVGLDVHKHFVMVGAVARNQKVLMPPRKVSLAEFEDWAKKHLLPTDEVVLEATTNAWFVHDLLAPIVGRVVVTHPPHIKLIAATMVKTDKKDTMVLAKLLAAGLTPEVWVPPEHVRDLRPLISHRRRLVSQQTQCKNRLQSVLHRNHILPPQGKAYHPDNRNWWLDLKLSPGDKLRVRQELVMLEQLDTLIDETSDELHRLSLSDPWLNQLPYLIQLPGIGVMTGLVILSAVGDISRFPSAKKLVGYAGLGARVHASGQSYRTGGITKQGRKELRHALIEAAWITVRFDPTWNEQFERLANRIGRRKAIVAIARKLLVVIWHVLSKRRVDRQADPQRLVRYFLAWGRQARVFSRLGLKASVFARQQLDLLGIGQDLPTLITFGATYRLPPSTLPVIEAAVASA

SEQ ID NO: 208513 - protein, 353 aa, unidentified
MTSLTDLREVVDVVIGVDTHVHTHSAAAVDARTGGVLGEITVQATADGYEQLVEFADEHAALRAWAIEGTGGHGAGLARHLSRREEVVVELDRPERAKRRHGAKSDPLDAIRAAREALARPRLGTPRNSGDRQALSVLLAARRSAVNAAGDAQRQVFSLVIAAPEPIRERFRGQRLPAMLKTAAALRVHPSWDLETTTTVTTLRSLARRARALAQEAAEHEKTILRIVRSWRPDLLDQLGIGPIVAATVLCAWSHPGRIHSEAAFAMLAGVAPIPANSGQVTNRHRLNRHGDRQLNRALHTIVLARIRHDHTTHDYVARRTSEGKTPREIKRCLKRYIARDLYRLLEHRPIPA

SEQ ID NO: 208514 - protein, 390 aa, unidentified
MEVRTVNNLPPAAPHDDAVRCLLAIELSKKSWIVAVNTPLSDKISRYTLKPGDGRELLDLCERIRTRVARETNKRVDIVSCYEAGYDGFWLHRLLEAHGIRNYVIDPASLQVDRRARRAKTDRVDVERMLRSLMAYLRGEPKVWSVVRVPSVAEEDDRRLHRERDRLINERIQHVNRIKGLLAIHGIYDYQPLRRDRMQRLERLHTPDGQPLPPRLKAEILRELQRLELAMEMIKAIEAERDAIASAKTETEHTSAKKIQDLVKIKSIGPEFATILVGEVFYRSFDNRKQLGGYVGLTPAHFQSGSMSRDQGISKAGNAKARTAMIELAWLWLRHQPDSSLSMWFRDRVGKLKGRIRRITIVAVARKLLIALWRYLETGLVPEGANLKMK

SEQ ID NO: 208515 - protein, 311 aa, unidentified
MELPTLEFTNSQGGINKMLRWYDKLEKEYLASCGEPELVIEPRVVMESTGIYSRQIEGYILSSRPTLRPVIENAMLIKSFRMSLNLKNETDFIDAKAIAYYGTERQPELKIKSEKMYQELCEMCRLHDFYVTEMTAYRNMHEGLNSAMLKRMDTSIIKHLEKKLKELDREMRKFVREHEEIRQELEIMVTMPGVAFLSAATLIGEFGSMKNYATRNKISAMSGLNPLVKESGTSVRRYRLSKKGSPLARRMLYLNCTQALTHDPHLKRFYDTLLARGKKPLQVRCACMRKILLMLRAMVINNQPYNPELRH

SEQ ID NO: 208516 - protein, 345 aa, unidentified
MSLMFFLGVDVSKKTLSVVLTDHKDKILWSNKSISNDEVGFKKLVETVIKNTSKKAGKEEYSIAAGMESTGVYGERLAYYLNGNSHNGRIVTYVLNPAAVRAFGTSVMAPNKNDSADAQLIASYLSMAVTKEQISPWKAPSPEGRALRELSRRREELTELHASECNRLEKLECMQEPPEAIVRNVRELISYLEDSIHNLEKEIEEHIDDDPGMREDIELLRSIPGIGDVTSVTLQGESDGLINFASVKGLVSFVGIAPSEHTSGTSVFKKSKISRRGNSRIRHHLYMATLVAARVNPVIKEFYERLLNRGKCKKLALVACMRKMLHIIWGVMKNRKRFDPCYSLK

SEQ ID NO: 208517 - protein, 423 aa, unidentified
MSYRIAGIDVHKKMLAVVVADVEVHGEYQFERIRYGSNPEPLRLLAAWLIEHEVEEVVMESTAQYWKPVWGALERYWKPSCQEREGAGPMSGTLHLAQARSNRGRRGRKKDFPDAERLVKRLVANELILSFVPDAEQRLWRTVTRRKYQLTRNKVRLQNQLEALLEEAHIKLSSLVSDLLGVSARRMLKAIADGGTDPAALAALADKKLRATQAQLCDALGACTELQPVYRRLLKMFLEELHLIEQQIGQLDQEMAALLSQHPESVQRLSEIPGLGVDSAQQIIAEVGATAATFPSGKHLSSWVGACPGDEESAEVSQSHRSPKGNRHMRRILNQAANAAVKAKGTIFEIVYRRLVTRLGHNQTIGAIAHRLCRLIWIILHQGVRYEERGPSVNTKSRRQRTSRMIRELRTLGYRVEPLGTPA

SEQ ID NO: 208518 - protein, 331 aa, unidentified
MEQKEQMIMGCDISKDKIDLCLLEKATGKIIISKSYANNSSGHQRIVKQLSDKDNCLVVLEATGNYHLRFISCLAAYNLCFAVINPLVLKRFAQMKMLRTKTDKLDAFIIAQYGKEQSPKAHQMPSKEQQELKALITVLNNLLKQRTQTKNLLHSQLLLPGNSIEFQKPIKKVLFTLNKQIQAIQKSIDKIIVNNFEHLKELITSIKGIGDKTAQGVIAYLGDLKSYSSYKQVASYVGINPAIKQSGQSLYKTSGISKQGNAVLRTLFYMSALSAIRVNKACKAFYIRLLQKGKKKKTALIAVANKLIKQLFAIIKKNIFYLDDYYHPKFT

SEQ ID NO: 208519 - protein, 378 aa, unidentified
MQRIYIGVDFHARQQTICYLTTETGELVTCELKHQDKEAVRAFYAAFRGHVIVGLEASGYSPWFERLLEGLGCEVWLGHATEIRRRARWRQKNDRRDAELILDLMLHDEFPRLHRPTLQSREVLRMLRYRQKLIKIRTMSKNSVQALALQAGVARRSALFSREGKQELEAALMSPAMQWQREHWLQLLQPLDQQVLEAMVWLKAQSKDDDCIARLRTHPGIGLLTSLCLVHTLQPITRFRNGRKVAAYAGFDPVERSSAERKCFLGISKAGSRLLRHLMVEAANVAVRKDEDLKRFYHRLADRRGRPKAKVAVARKLLIRAYIMLRDEIDYAEFRRRAVAARLARLGHRPNVPVVVIGQPASTERQKPTHGRAKRSRR

SEQ ID NO: 208520 - protein, 345 aa, unidentified
MNEVSTIGLDLAKQVFQAEGRDAGGRRVFCRRLRRRDVLAFFRKLAPCVVGMEACGSAHYWGREIAALGHDVRLMPPTRVKPYTKRGKKNDPADAAACCEAVTRPSMRFVPLKTVDQQAALMLHRARKLLVEQRTQLSNAIRAHLAEFGVIARKGDGGFKALVALLGNEHDKHVPALIRPILAPVVEQWRVTGEQIVALERQIAAWHKSNRDSQRLDTIPQFAALTSSAFVATVSDPTRFDGGRQCAAWLGLVPAQNSTGGKTSLGPITKCGDRYLRQLLVNAGAGLVRRVKADPSLSPWIAALLQRMPAKQAAVAIANKLARIAWAILVSGETYKASTLTADAT

SEQ ID NO: 208521 - protein, 401 aa, unidentified
MKTVLSVDVAKNKSMIMLMNSDGEIFIDTKEINHNLEDFEKVKEEIKEINPQNLTVFMESTGTYHLPVERYFKENGFNTLVINSLTTKNNYDTIRKTKTDKKDCYRLAKLFFVNEVEYHDLSKKDLYANLKAMTRQYFYLLQQNVSCKNRYKRLINICFPELEKIFKSTRIYDDTALNFIKEFPHAEIVKEKRIDALYNNLYKTNGRNFNFYKKLATTIKTASINSYPGVDKEHEDVKNLSYMAKIVQNNNNIINELREKMIETAKQFPYYKIINSFYGIGDTLTAEILGELGDITRFDSPKEIIAFCGLDPTIKQSGKSINVKGAISKRENKYERYILFNCSQMVVKLGASNYPEHPVYIYYQNKKAEGKHYYESLTACSTKILRMLYSMCKNNKQFLEN

SEQ ID NO: 208522 - protein, 388 aa, unidentified
MTHLPIPCPVPAAPDYDCTLVLAIELSNASWVLAAQVPGLPRVKAKRTIEPRAEALLAAIQGYRERAQAAGRQVERVVATYEAGWSGFWLARWLATHGIETHVVQPSSVPVDRRARRAKSDGIDAELLLRTLLAWLRGEPRVCSMVPVPDEADEDARRCIRERTELVAERVALVNRIGAVLATLGVDEYNPLLRNRRERLDALRTALGTSLPPHAHAKISRMLDRLDLVRAQITALEQERDAILDDEAPDQAGGMIQQLATLRGIGVQSATVLVREAFVREFANGKALGSYAGLCATPYSSGGTEREQGISKAGNRRLRTVMVELAWLWQRYQPGSAQVSWFRERVGGTGARMRKVMVIALARKLLIALWRFATQGVVPEGAVMKPAS

SEQ ID NO: 208523 - protein, 483 aa, unidentified
MAERKKNTFQRLKKGQLNRKERRDLERRLSTEAPGLEIVNRNVAGIDVGNESHYVAVPPSRDPQPVQEFGSWTADLERMADWLKMCGIETVVMQSTGVYWIALYDVLEKRGFQMCLANARHTKNLPGRKSDVQESQWLLKLHTYGLLRNSFRPPDEIRALRSLWRLRDRHVKEAARTVQHMQKSLITMNVQLSNTISDLSGTTGLAIIRAILTGERNPEKLAKLRDWRIKASEEEVARSLEGNWREDMLFELRQSVDAYDFIQKQVAECDQRLQTLMAELPKREAPAAVPALGDGVKPPVRKKKSTRNKKNVPRFDLKAELQRVCGLDLTSIDGIDVMTAQTVVAELGTDFSRWKDEAHLTSWLGLAPCRDISGGKVLKQTTLRVKNRVAAALRGAANTLLHSDSYLGARFRSLRTRRGAPKAIKAMARYLACIIYRMFTRGQAFVDRGAQQYENSRAQRELAALQFKAAAHGFRLVDVQHPA

SEQ ID NO: 208524 - protein, 331 aa, unidentified
MFPVGIDVSKNTLDLCMLYDGIKGRIKTRNIQNNRHSVENILRWLRLQHCGPEDVHVVMEATGVYHERLATELHDAGFRVSLANPHRSRKFARGMGIMTKTDKVDAYMLACYAFLKKPHRWEPPAPEIRYLGALLRRRDVLLGDALREENRLEKYLSTDTPADIISSCRRMAQLLREEVSNIERQIKAHIKASPALRRDYTLLTSIKSVGPQLGMHMLVVLRSHNFVSAEQAAAFLGVVPIEKRSGTSVRSRPRMSKIGPPQLRAKLYMSALCGKIYNKRMRNIYDEMCLRGKPKMVAIGALMRKLVHWCYGVLKTGTVFNDESLKQVLST

SEQ ID NO: 208525 - protein, 311 aa, unidentified
MRMYVGVDVSKQWLDACVLPEGFCGRFDNDQAGIKDLIKLLSKPGEVLVVLECTGGYEMDLFCMLQELGIAVSKVNPRRIRDFAKACGKLAKTDEIDAKVIAEFARKMEPAASEVQEAGCIELKALVARRGQLVGMRTAESNRLEHARDKSVERSIKRMLIEIAKQIEAVENDIQKHIDKMPELKSKQELLDSVRGIGKNTAAMLVTELPELGRLNRRQIAALAGVAPINRDSGSFRGKRMTGGGRCQVRAQMFMPTLVAIRHNPRIREFYMRHLANGKEKMVAIIACMRKLLLIMNSMVAKNQMWVAKTA

SEQ ID NO: 208526 - protein, 376 aa, unidentified
MKKYSKYVGLDVHKADISVGTADGGRGEAGFYGTIENADHTYLKLAKKLSKGGEEVLFCYEADPCGYGIYRQLMRAGYDCVVIAPSLIPKKAGDRVKTDRRDAVSLARLLRAGELTPIWVPEKEQEAMRDLTRAREDMKGMERKSRQRLGGFLLRHGKVYPGRSKWTKTYFRWLESLRFETAAQQIVFQEYIDMGKHTKERVASMEEEIRKALESWTLKPIVEGLMSLRGIDLVAAMTIVAELGDLSRFESAGQLMSHLGLVPSEHSSGERQKRGGITKTGNGHVRRVLVEASWCYRLPARKTAHLRRKAEKASKAVQEIAWKAQKRLCSRYWYLINKGKLHVKSCTAVARELVGFIWAIACEVMGKSAVSASLNG

SEQ ID NO: 208527 - protein, 372 aa, unidentified
MDRVCGLEVHKDRVFMCILTANGEKIEDVFGTLTPELDRLRDTLVSHGVGKVAMESTSIYWVPIWRILECDFDVKLVNPYFIRQLPGRKTDIKDAQWIATVLQKELIKGSYIPDSKIQELRQYSRRIFHLTRRKQQAESAIDLTLQRCNIRLSNYVSDIGCKSMRKVVNALICGETDSEVLALLVHKRIRNKHCHEVIKSSLTGIVSSSDRDMLKMSLEEVELYDRQLLECKEKMRIICEGHYAEELEILQTAPGIKEESAMRIIAEIGVDMKAFLTASALVGWAGLRPRNDQSAGKIKGRKTLHGNKYLRVMLTQCAWGACRTQTSKFYSRYHTLKKRMNHNKALMANARKLLVVIWNLLAKKQPYMPFVN

SEQ ID NO: 208528 - protein, 355 aa, unidentified
MTMTDAERAATEVVLGVDTHLDVHVVVALDRLGRRLGELSVPTTAKGYESLLCWAEGFGTVRCAGVEGTSSYGAGIARHLKIAAIPVTEVERPKRRHLHRNSKSDSRDAESAARAVLAGETAGEPKSADGRVEMIRALRTARRSAVKSRTQAANQLRNLVVTAPDGLRHRLRGLSTKELVAVAARFRLKDDPDDVLEATRFALRSVARRYEALSEEIAQLDVQLDRLVVETAPKLVSLTGIGTDHAATLLTVVGDNPERLKSEASFASLCGVSPVQASSGKVVRHRLNRGGNRDANRALYMICMVRMGRDRRTKEYVARRTAEGKSRREIVRCLKRYIAREVYRVLVPAASPIGP

SEQ ID NO: 208529 - protein, 365 aa, unidentified
MSSIAHVGMDVHKDTTRVLLLGIQGPLPLDAVTVPTEEAALLKYLRPWRARYELHCYYEAGTLGYVVYRWLQRAGIACTVVAPSKIPRAPGDRVKTDQRDARTLALQGRAGTLAAVRVPTPAEEAVRGLVRCRGAHQRDVQAARHRVLKFLALRGEMYRAGKHWTQLHRRWLAARRFAGPDAWTYQEYLSELSYREQRLTEADREVEALAAAEPYATLVRALCCFRGISTLSAMILVTEALDFGRFGRPPAYMSYLGLTCREASTGSRRRQGSITKAGSGRCRHVLVEAAWHYRHPPAVGACLRRRQAGQPAAVIAHAWKAQQRLHKLFQRLTRTGDRRRAVVAVARELAGFLWAATQLVAAPGV

SEQ ID NO: 208530 - protein, 264 aa, unidentified
MCTGKWLDIETGETRRGRIMPGLRKTVREFLVPFQGLDAHVALEATTGWRFVAKEIVRAGCTAHLRSSAETATLRGTKRRAKTDRRDCDHMVDLVLSKRLPESWIPPAQVLEIRTLGRLRKDLSDGRREWQQRLQAQLFHQGIPSVRLTTAEGQAQLAKADLSAAGRRVVSTGLSVIDHLDRQLAPLDAYLLRFAKLQSGCRTLKHRLYGVGDLTAVFIWAELGNCVRFSSSDDAVRYAGLDITVYDSNDRRPPGHLSRRGPRH

SEQ ID NO: 208531 - protein, 346 aa, unidentified
MELNTIGIDLGKTVFHLVGLDLRGEVVVRKKFSRKQLLHFTANLRVKLIGMEACGGSHFLGRALREQGHEVRLIPAQYVKPYVKTNKSDFIDAEAISEAVARPTMCFVPIKTDDQLDLQSLHRVRERWVMRRTAVINQIRGLLLERGITVRKGRCHLDAVLPGILEDATTKLSSAVRLLLAQLKVELDQLVIRLEEADALVKKIAQESEVCRRLDAIPGVGPLTATAIIAAVGNGAAFRKGREFAAWVGLVPREHSTGGKQKLLGISKRGNCYLRRLFVQGARAVLQFREKQSSGLSAWLAQLASRAHHNVVGVALANKLARMAWAVLAKGEVYRPPELASSLACR

SEQ ID NO: 208532 - protein, 346 aa, unidentified
MDQIIRIGMDTSKHIFQLHGVDSAERPVLRRKLRRSQLLAFFAKLPPTVIGMEACGAAHYWARELRKVGHEARLMAPQHVKAYVKRNKNDGRDAEALCEAMSRPTMQFVPVKSEEQQAALMLAGVREQLIARRTQLCNAIRGYAAEFGLTAPKGLDKIEPLLAQIAQDKTVPAMARELLALQGKDYARLQIEIKAIEAKLMAWHRANATSRRLAQIPGVGPIGATALVMKVLDPRLFPSGRHFAAWIGLTPKDHSTAGKRRLGKITRAGDERLRSVLVAGATAVVQQAKIGRGRASPWLLALLKRKAPKHAAVALANKIARIAWKLMVTGESYDGARMPGASAFAA

SEQ ID NO: 208533 - protein, 351 aa, unidentified
MEQYIAFDSHKHYTQVELEEVETGKTRQFRVDHGPGTIKRFLQGQARAASVAVEATGNWYWIVDEIEQAGLEPKLVHPRKAKLMMGMINKTDKLDAHGLNRLQRNRTLPTVWIPSRELRDLRELTRTRMVLGSQRTRLKNRIQATLSKYGRVLKGYSDPFGKKARVELNLSIGHLPPQTAYVTGVLMKELNELEEQIKEMEKRLRALAQETPEMKILMTLPGIGWILSVVIVLEVGDILRFPSAQHLASYAGTTPRVHQSGDKRRYGRLRPDVNHYLKWAFIEAAHSVCLNQACYPKRHVTQLYQRLRARKGHAKAVGAVARHLAEATYHVWSKGEPYRDPSLKPGRSTEM

SEQ ID NO: 208534 - protein, 361 aa, unidentified
MAKSLKTRSRRSLSRELLKEKKFFVGVDVHKRSYHVSLWNEEHGLLGSWVQPSSPRLLILKLEPFAANLERVVYEAGPTGFTLVRALRSKGFSADVIAPSKMLVVPGPDAKSDRIDSHRLAMYAAKNLLTAVHIPTEEQEGDRQIVRLREQMTRKSRSIQQQIKSFLLMHGIDEPAGLANWTKAGIASLRQLHLSAQLRFCLDVMLDEFDHVKVQLVRILKQIRQLASEERHRKTVDLLQTVPGVGLLTAIVFRTELVNPQRFSDGGQISRMIGLAPGIRESGDTRREGSILRSGNARLRWVLVEAAWRWVAGDLAAAKIYHRLVANTGSAKKAIVAVARRLGIVLWKISIQQREYTPQPT

SEQ ID NO: 208535 - protein, 372 aa, unidentified
MVVRAHYKVGCDAHKHYSVFAVRDENGQEVQPRRVDHVRGAIGAFLSQFPPGTPVAVETVGNWYWIVDEIEQAGCLPLLAHAAKAKSMMGHVHKTDKLDAGGLASLLHLGSLPLVWIPPGDLRDERELPRTRMAFCKVRTMLKNRIHSTLAKYALSLGTNSDIFSPKWRPQLLALLQRLPAETRRCVDQELELLQLLQAHIQRLEARILERVEISPTMQLLMSIPGPAEILSIVIERELGSIDRFPCAKHLASYSGLVPRVQASGGKVHYGRMIKQANHYLKWAFIEAANIIVLKRHHPNWRRKYVVQLYERIRRRKGHGVAVGATARYLAEASFWVLKKGEPYREPLAGLRRGRDHGFAQAGSGPRPTWVH

SEQ ID NO: 208536 - protein, 399 aa, unidentified
MRPVIGIDVAKGKSVIQAFIKRNAPYGRDQVIWHTLNGLEHLLRVLREMERKTKMKPAVILEPTGHYHRVLVQRLQSEGYDPILINPLQAQRARRTSLRKVKTDASDAWHLGDLYYQREDWITQPQREEHLVDLQFLTRHHEFITSLYVQAKLNLRTLLDQVFPGYEGVFKDLFSKTSLNLLEMLLTHEKVQSGEEEEWKEAVRQATRTSRSEAWMNRKIDHLRTAMLQNPVTYVPFGLETALRSMLATVREFQVQLTELEKTILELSELIEEVKLLETIPGVGAKIAASIVAEIGDATQFQNAKQLVAYAGLDPSVFSSGKFTATQNRITKRGSKRLRRAVYLAVTCGLRVGLNLHLREYYDKKKSEGKPHKVAVIACANKLLHHIYAMLKRRQPYTY

SEQ ID NO: 208537 - protein, 308 aa, unidentified
MGIDVSKDYLEIYIHPNSKSFKVENSKKGVQALLGKLTNYVIERIVCESSGGYENLMLKMLKLADYNVWHVDPKQIKAFIISQGIRAKNDRIDAKMMALFASQNQPKYLKKDISQNAEKLRALVRRKSDLTELISIEKKRFNHPKQQYCGDVIRSHIEFMEKQIEILETEIEQLIDDDPDWSNNTKLMKSMPGIGDATSALLIAEMPELGKVTDKQIAALLGVAPYTKESGTMRGKAYIGGGRIIVRNILYMASLSAVRYNPALKKFYTRLKEAGKCSKIALVAVMRKMIIILNIMIKRQIGWSPAHS

SEQ ID NO: 208538 - protein, 364 aa, unidentified
MNATAALPVVGVDLAKSVFQLAIADGSWRVVEQQRLTRTQFERWFANRAVGLVVMEACGSAHHWARWLNARGIEVRLLPAAYVRAYVKRNKTDATDACALLEAARCADIAPVRVKSVEQQALQGLHRTRSLWMATRTSRINALRGFCREFGIVIAQGSRLGVEQIGRVLADPHAAVPTLIRGTMTLLVEEIRLLEVRIAQLERELTVLARQSPACTTLLSIPGVGLLTATAMVAATSGAVSHFRDARHFASWLGLTPKEYSSGGTRHLGRISKRGDRYLRMLLTHGARSVLRAATVAVRAGKTVDGLRQWALGVQHRANHNKAACALANKLARICYATLRDGEPYGQSYRLNKKIERTAFALPN

SEQ ID NO: 208539 - protein, 372 aa, unidentified
MASIIYVGMDVHTTNFTFCCYTADSDRGFAVAQTEPDYRQVIKYMERVQKQRGEECKFVCGYEAGCLGYSLYHQLTRCGVDCVILAPSTMHQEKGKRIKTDRRDAENIARCLAFSLYSPVYVPTTEDDAVKEYIRMRDDIKADLKRVKQQIIAFTTRHGFAFDGKSYWTQKHLKWLETLVFEHPLYKEILQEYLILYYMLDEKVAVYDTRIEEMSHLEHYEENVQKLCCFRGVAAHTALSLLVEVGDFQRFRSAKHFAAYLGLVPGEHSSSDKQIRTSITKAGNTHLRRLLVEAAQSYNRGATGKKSAALKARQGGNPAEVIAYADKANERMQRKYYRIAFKSRHNIAKTAIARELACFVWGMMTGNISNAA

SEQ ID NO: 208540 - protein, 440 aa, unidentified
MNDLRVLDAHAAFVDVGSEQMFVSIAGGSPEVFGTVTSQLHALRDWLLTHEVRSVAMEATGVYWLPLYAVLEAAGLEVLMVNGRQMRNLPGRKTDMKDCQWGATLHAHGLLHAGFVPPAHIRRLQDYLRLRANHITSAAAPVQHMQKALARMNVKLHHVISSLTGTSGLAVVRAILRGERNPEQLLALCDTQIQRAKAQRVKESLRGTWAEEHLFALRQALASWEHYQNQIAECDRQIEALLPASADHHTPPNTAVHTRPRKRAGPNAPEIPKLREILTQMCGGQDLTRLPAHTEYSVLQIVSEVGTDLTKWATEKHFTAWTGLAPGSHQSGKRKGSVKRQRNRAGRIFCVMARSLARSKDIALGGFYRRMAARRGGLIANIALARKLAVLFWRVMVKGTDYVEHGLAQYEAKVLQTKQRALRRLARQLGQQLVPSPVPT

SEQ ID NO: 208541 - protein, 346 aa, unidentified
MRFYNRQHTYYCGIDLHVKTMYVCILDGAGQVLVHRNVPSTPAAFLEEVAPYREGLVVAAECMFTWYWLADVCAAEGITFVLGHALAMKAIHGGKAKNDKIDSHKIAVLLRGGMLPQAYVYPAAMRSTRDLIRRRLHLVRKRGQLLAHIQNTRAQYNLPVFGRKLAYRTNREGVVEHFPDPSVQKSIAVDLALIDQYDALVIDLELTIVREAKRHNADAFHRLRSVPGIGKVLALTILYEIHDITRFDRVQEFASYARLVKGQRQSGGKTLGTGGAKMGNVHLKWAFSEAAVLFLRHTEGKKLIARIEKQHGKGKALSILAHKIGRAVFYMLSRETVFSMEKFLAA

SEQ ID NO: 208542 - protein, 342 aa, unidentified
MNLPIRIGMDTSKSVFQLHGVDENEGVIVRRQFRRAEMIRYFERLPPVLVAIESCGSSHHWARLLQSFGHEVKLIPPQYVKAYVKRGKNDAADAEALCEAVTRPSMRFVPVKSKERQAACMLMTVRERLVSVKSQLSNAFRSYAAEFGIVGPAGRQNVTALIKRVLEDDSLPEMARDLFRLQAEEYAAVQARLAKIEAKLMKWHREDDVSRRIATIPGVGPIGSSMLSMKAPPPETFRSGRDFAAWLGLTPKDHSTGGRQRHGGITKAGDSVLRSTLIVGATALLRHIRTGRHKPTPWLASLLERKPPKLVAVALANKFARIAWRLMISGGVYNRPAAAMPI

SEQ ID NO: 208543 - protein, 446 aa, unidentified
MQGVEDNEEIIERVAAIDVGKAEVVVCIRIPDPARPGRRQQEIVHSSTLTPRLLVLADRLVELGVTRVVMEATSDYWKPVFYLLESRGLDPWLVNARDVKHLPGRPKTDRLDAVWLAKVAERQMLRPSFVPPGPIRLLRDLTRYRAGLVKVRTAEKNRVEKLLEDAQIKLSSVVSDIFGVSGREMLAALLAGERRPAVLAQLARTRMRPKIPLLEEAFAGQFTEHHAFLLRLMPARIDEAGADIAALEDRIRQLAAPFASVVDRLDEIPGVGATAAWTILAEIGLDMSRFPTSAHLCSWARFAPGVNQSAGKNKGPAVLPGTATAISAKPSARPPSPPRAPTPSSASATGAWPAVAEAHEPPSRSGGRSWSSSGICCASPMPATATWDRTTPAAVPTPTTAPATTSGNSKPSATPSPSHPRPDQRTLLSTAAQTSVSPWSRSPVPD

SEQ ID NO: 208544 - protein, 391 aa, unidentified
MVCVGIDVAKDKHDCYILDSDGTIRADCITIPNNMDGFKQLLQTIRDCTKKSDKIKVGLEATGHYSYNILGFLLDNDLAVYVMNPLHTNLYRKSLSLRKTKTDRVDARTIATMLLSDVDLKSYTDTAYHNEELKSLTRYRFDKVRERAKLKQSVSRLVTILFPELEKLVPSLHIASVYALLSEYPGAKQISEIHLTKLTNLLATASKGRYGKDKAIQIRDAARTSIGSVMPAKFLELKHTIKLIRELTSEIDEIEVSIQKIMDELNPPILSIPGVGIQSAAMILAEIGDFSNFESPDKILAYAGCSPSTYQSGKLTNCYAHMEKRGSRYLRYALYNATKYVCHWNPVFAEYLAKKRAEGKHYNVALSHATKKLVRLIYALQKSGKAYLVAA

SEQ ID NO: 208545 - protein, 357 aa, unidentified
MEHTQVDFTGQHVYVGLDVAKKSWKVNVLVGEQFHKRFSQEPSTRTLVNYLRRNFPGAQYHCVYEAGYCGFWIHDELRALGVDCIVTNPADVPTSDKERRHKNDRVDAGKLSRHLRSKELRGIYVPDRTALEDRTLIRTRARFVRKQTRCKHQIKALLHFYGYAAPDTTVEHYWSRAYIRWIESLTLTERSGTYSLQSLLRELFFLRETILDLTKQIRLLSHEERYSRRAELLCTIPGIGILAAMTLLTELITINRFTSLDALASYVGLVPGERSSGEDEHDTGISSRRNAALRYLLIEIAWVAQREDPALMMAFNSLSLRMPKPQAIVRIARKLLNRIRFVLKNDQPYVKAVLQSA

SEQ ID NO: 208546 - protein, 341 aa, unidentified
MSGCAAVDVGKDVIAVAVRLPGGGPDGRQIIKRTFRTFCGVLAEAARWLASLGVTHVAMEATGIYSMPVYHALIEHGGFEKVLVCNAGHVKNVPGRKTDFSDAEWLVHLLECGLLAGSFIPPAEVKAARDVLRYRAKVARQRVSGIARLGNVLQDAGIKIDSVASSIATTSGRAMIGALIGGERRGPVLAGLAKGKMRAKIPDLAMALEGRFGDHHALMCRLHLDHTGHLEAMIARLDVQIEAMMTPFQAARDLLITAPGIGSLSAAAVISEIGADVTGFFPDDAHLASWTGLCPGNHESAGRRRSGKRRKGNQHLHPSWSSAPGPPSATTATSSPFTTGT

SEQ ID NO: 208547 - protein, 424 aa, unidentified
MRAIGIDVHRDFCEVAISEGGRLRSAGRVPSTPEALELLGASLSDDDEVALEATGNALAIARILEPHVARVVVASARELHAISGAKAKTDRRDARTLAKLLAAGMLAGTWLPGEETRALRRRLAQRAQLVRARSRLKNEVQAALMRNLVGAPSATDLFGAAGRRWLADLVLPADERETLDSCLRTIAFLDGEVERFEVAIARYAMHSVEIRRLVTIPGVGLISAATLVAVVDDVHRFRCARKLVGYLGLDPRVRQSGSTPARMGHISKEGPAAARAALCEAAHAAMRTPGPLRAFGERVAARRGRQVAIVAVARKLATIAWRLLTSGEDYVYANPGQVRLKWRRVELLAGEPSQKGRRTGVSLASQHERELALAAERAYQRLVADRQAAGSRRKGAGAAPGRAPDGSSQDQAARQAQQPHRSAL

SEQ ID NO: 208548 - protein, 328 aa, unidentified
MAKDITISAGIDTGKYKLDIALEGTSEQLQVDNTPADHNVLADWLRRHRVKRVGIEASGGYEQAVVAALRRKRFVVVVFQPAQVRAYAKFRLQRAKNDKIDAALIAACTVAVKTIHAPPDPRLAPFAEQLTMIDQIGEDIARLKNRLETCRDRGIWRTWSEEIARLTKRRNSELKALVAAIRQHWDLAERLALIESVDGIGLPTAVAIVVRLPEIGRITREHAAALAGLAPYDDDSGKYVGIRHIAGGRQRLRRALYSAALPASMRWNPQLIALYRRLIAAGKEHKRALIACARKLLIFANTVVARGTPWERTAPALPTTSHAQLAVA

SEQ ID NO: 208549 - protein, 350 aa, unidentified
MRKHSENREVKVMGIDLAKNNFHVHGMDASGGKAVGKKLSRQKLKEYLVTLPQCTIAMEACGSAHYWARLLHSYGHEVRLIAPQFVKPYVKSNKNDAADAEAICEAAQRPNMRFVAVKEIGQQDIQAIHRMRSLAVGRRTAQINQIRGLLLEYGIEIPAGRANLLKRLPEILEDADNGLTDLFREELFGLYGELRHLDERIAHYDKKIKQIARTDERMQRLQTIPGVGPMIATALLAAIGDIDAFKNGRELAAWLGVVPRQHSTGGKATLLGISKRGDVYLRQLIIHGARSILCTVDRKSDRTSRWAATLKVRRHKNIAAVAMANKMVRVAFALLKTGERYRTESTPSAA

SEQ ID NO: 208550 - protein, 359 aa, unidentified
MQRNKISFNGQKIFVGIDVHKRKWSVATITESGYQRVHTQNASAQELIDFLHRHYPDGEYHAVYEAGFSGFSTYYSLAEADIDCMVIHAADVPTTQYENVMKTDKIDCIKLAKSLRAGLLKGVYIRPKDSIDDRGVIRVRRAVVKDLSRYKTRTKHLLMSNGVAIPEQFDGRKGRNWSSAFIQWLKSDIELLSTTRRTLDIIIAQVERMRQAQLDATRELRKLSRTEIYKDNYALLCSIPGIGGIVAMTLLTEINDITRFNNEKQFASYLGLVPTSHSSGEKTLHGEKTFRGNKELGPMMIEAAWSAIHNDAGLAASFSSYCRKMMPQQAIVRIARKLANIIIAVLKKKKKYVPYSSNG

SEQ ID NO: 208551 - protein, 339 aa, unidentified
MQVTTIGLDLAKNVFQVHGIDDHGEVAFNRALRRSQVLAFFGRLEPCLVGIEACGTSHHWARELIKLGHNVKLIPPAYVKPYVKRGKSDAVDAAAICEAVTRPTMRFVEVKTPEQQAILSVHRTRDLIVRQRTQTINMLRAQLAEFGIILPQGVYHALQFAKVCVNGEPLNLPADAEEVVFDLCDQLLFLHAKILRHSRHMTQIAKREKRVALLRTIPGVGPITASAIVATVGSGKQFNNGREFAAWLGLTPLNRSSGGKERLGHISKMGDQYIRRLLVLGMTSRIRSIRLQPEKFDPWFADILSRKPSRVAAVAMANKTARMIWAVLTCNEPYKVRTV

SEQ ID NO: 208552 - protein, 373 aa, unidentified
MEHNITIVGLDAHKNSIEIVTAETAGNQEVRHYGKIGGDMTSLDKAIRKLRSVRSNGEELRFVYEAGPCGYEIYRHLTKQGFQCVVVAPSMIPKKSGNRIKNDRRDAENLARLERAGELTKVYVPREEDEAMRDLTRAREDAVKAQRTARQLLGAFLLRHGHRYPDKKSWTPAHMRWLSNVTMPHPAQQITLQEYIHAITESTGRVTRLTDQIQKLLPEWHMEPVVKALQALRGVAPIVATTSVAEIGDMNRFERPRQLMTYLGLIPSEHSSGESVKRGSITKTGNGHVRRALVEAAQAYSFPARVSRPLLKRQEGLPQSIREIAWKAQVRLCGRFRRLMARGKQRNKVVTAIARELAGFMWAIAKEVQVPGV

SEQ ID NO: 208553 - protein, 414 aa, unidentified
MPCVRLPPDGCQITEKIEVMKSTDTSAPAPVGRVVGLDLHPEVFSASALSGRDAATAQVEQSWSGRTAELERWARGLRPGDLIVVEASGNTFVAVERLRAMGVAAVVLETQRAGQIRTSYCANDRLDAVKLARIYLSGLAHVVWQPDARTRERRELLHGYRKAVTTATRTRNRLKSFLSDHHVRLPKGVRLAHQNGAARVQASASWTPLQKLLLEEMLAELRAAHERRRRLSAVMAQEVAADRSLLQLLRLMGVRHIVAFALGAVVGDISRFANPKKLVAYLGLSPSVEDSGETIRGRGQLVSFGRRDLRTLLVQSAQNALSQKSSPLHTWGWKLCLRKGTKKIAVIAIARKLTVSVWYLLRGLFTPLQQIDTTLEVKLSKLATAIGVKTLRDLGYPSKSDFLQKSRDCLLNPT

SEQ ID NO: 208554 - protein, 348 aa, unidentified
MKIATIGLDLAKNVFQVHGVDERGVTVLRKQLRRQEVKAFFVRIEPCLVGIEACSGAHYWAAQLSALGHTVKMMSPQFVKPYVKSNKNDALDAEAICEAVGRPNMRFVAPKLPEQQSVLALHTARQGFVKARTAQANQIRGLLAEFGLVVPQGIRSVYERVPRLVEEAEASLPGRFRHLVERLMQHLRELDRQVQELEGDIQLWHRDSEASRRLEAIPGIGPITASALVASAGDARNFSNARQFAAWLGLVPRQCSSGGKPQLLGISKRGDVYLRTLLIHGGRAVVRHATTHAERASGWLKGLIGRRHANVAAVAVANKNARVAWALLASGRAYEAAAGKTNTALEGA

SEQ ID NO: 208555 - protein, 333 aa, unidentified
MAQKELVVSIGKMDEQAVITVYANKIFPNNEKGFANLEVWINKQSIPQYPLRYVMEATGVYHERLAYYLAGKGYAVSIVMPNKISNFFKTLEIKTITDKSMSFAIAMFGLEKKLDNWVQPKRVFRTLRQITREREQLIAERTMIKNQLHAEQSEAFPGEDTIRRMMDRIKMIGEQLKEILTEIRTAVAQDKHLKQTLATITTIPGVGLLTATVILAETNGFELIRSKKQLTSYAGLDVREKESGSSVKGKPKISKRGNKHLRKAMHLPALAAIRHSERYKAIFVRIVSRNSVKMKATVAVQRKLLEMVYTIYKTNKPFEKDYLQQNAHISENS

SEQ ID NO: 208556 - protein, 322 aa, unidentified
MAMLSFGGIDVSKDRLDVMVLPEEQCSSVPNDAAGWAKLVEQLRGFSISAVGIEASGGYERGAVRALLAAGMSVRQVNPFKLRQFARASGVLAKNDPLDARMIASFIAIMPTRPAQPHAPAVERLAEILTVRRQLSDAKVAAENASRLLEDAMLQRLSRRRIARAAADIDMLDGRLVEIVMADAALVHRYQLLTSMPGVGPVLACTLIALLPELGRMNRKQVAALVGLAPYAFDSGKLKGARCIWGGRASIRRVLYMAALIAMRCNPALKAFHNRLAATGKKPKVVIVAVMRKMIITLNAMLRNETPWVDRSSGRHSVLTAR

SEQ ID NO: 208557 - protein, 343 aa, unidentified
MQTITTIGLDIAKSVFQVHGVDAGGQVVVRRQLKRRYVLMFFQKLSPCLVGIEACASAHHWSRELQALGHIVRLMPPAYVKPYVKRQKNDATDAEAICEAVTRPNMRFVATKMAEQQSCLMLHRTRHLFIRQQTSVINAIRAHLAEFGIVAPVGRNGVDQLLGVVADTLDKRLPEIARLCVAALGAELRMLKAQILEFDRMIRAWHRSSEASMRLDAIPGVGPALATALVASVADPKAFRSGRDFSAWIGLVPKQNSSGGKERLGNISKRGNRYLRSLFTTGALAVIRYAKIHGNRQRPWLTALLARRPTKVAAIALANKIARMAWAMMAKGERYKEPAALAA

SEQ ID NO: 208558 - protein, 370 aa, unidentified
MTSIIYVGMDVHTTNFTLCCYSIEDNSVFAETEVKPDYRNILKYLEQVEKNRGGDCFFQCGYEAGCLGYTLYNQLTNHGIDCVILAPSTMPQTRKKRIKNDKMDARNIAKCLAYNTGSAVYVPTKEDNAVKEYIRMRNDAKDTLKRTKQQLLAFCTRHGKRFTEGRKYWTQTHLAWLKKQDFGDAVLQEAFQEYVILYHQMSDKVTLFDKRIAELAHGETYEERVKKLTCLTGIKEHTALATIVETGDFNRFGTAQQYSAYLGLVPGEDSSGESIRRGPITKAGNSHIRKLLVEAAHCYSRGAVGAKSKDLKRRQAGNDPKVIAYADRANERLKRKYYRIQYHSKSNIAVTAVARELACFIWGMMTDNIA

SEQ ID NO: 208559 - protein, 395 aa, unidentified
MFIVGIDVAKRSHEVCMITSDGQTVQRPFSIRNNCTGYNLMLEKIRKHTNIKSQIVFAMESTAHYWLALFTRLRKDGYHVILLNPIQTSAMRDMFIRKIKTDAKDSFIIAELIRFGRYAESNVAQDRLLALKELCRNRFYLVDMAGDLKRKLIALIDRVFPEYEAQFDTIFCKSSVALLKKYPTPQRLSNAHLDKLTELLWNSSNGHFGEWKARELKDLARNSFGVEDCDGAYSTLILLMLDQIQSLSGKADALEKEIFRLFQSFDTTVTTIPGVGPIIGAVILSEVGDISRFSSADKLAAYIGVDPSVNQSGEFQAAHAHMSKRGSPYLCRCIWMASQVAVQRDPMFRAYYEKKAAEGLKYMTIIGHVTRKMTAVVFAILRDHKVYEPILPTAA

SEQ ID NO: 208560 - protein, 352 aa, unidentified
MTVTIVETRVQAGAITGGVDTHADVHVAAALDPVGGLLGVQEFPATPAGYAQLLGWLGGFGTVCLVGIEGTGSYGAGLARHIAAAGVRVVEVDRADRQDRRRQGKSDPLDAVSAARAALSGRAAGAPKGRDGAVEAIRALMVAKRTARAERVQTINQARALVLTGPDDIRARFAGHATEALVAELAALRPRPGSMVRYHTLLSLRELGRRAQFLDQQLGRLDELIAPLVTARAPGLLARYGIGPHTAAMLLIAAGDHPGRLRSEAAWAHLCAAAPIPASSGKVKRHRLNPYGDRQANHALWQIVITRMSSHPPTRAYVARRSKEGLSKKEIIRCLKRYVAREVYPHLRPGVG

SEQ ID NO: 208561 - protein, 367 aa, unidentified
MTALVSSEVQVTVGVDTHADVHVAAALDQLGRLLATQSVPSTPAGYRVLVAWASGLGTVERFGIEGTGSYGAGLARWLRSRGLDVLEVERPKRQNRRRHGKSDAIDAEAAARAVQAGTATARPKSGDGPIEMLRTLQAARRSAIKARTQAVNQLHALVVTAPDTLRTRLRGLSRARLVATAMAFRPRLPLTSKIAATQLALKSLAVRHQQLTAEVEALEAQLELLVARTAPDLVAVKGIGTDIATTLLATAGDNPDRLRCEGAFAHLCGVAPIPASSGKTNRYRLNRGGDRDANRALYLLAVGRMGWDPATRAYVERRTTEGLSKKEILRCLKRYIARELYPLLARNPALLTLRQKCASATPLIGQK

SEQ ID NO: 208562 - protein, 418 aa, unidentified
MRAVALDVHRDFCEVAIVEAGRLRSAGRIKARPEELELFAQSLDSRDWVALEVTGNAWAIAGILEPQVARVIVVSPTDTGICQARAKTDRLDARTLAKLLWAGELDAVWTPDERIRAMRRRLARRAQLVRARSRVKNEIHAVLMRCLKDRPPAADLFGVKGRRWLGEQELALCERETVDAGLRQVDFLDTELAQVDQLIAADALGWPEIKRLMTVPGVNVTVAATFMAAIGDIRRFGDRRKLTAYLGLDPRVRQSGNTPANHGHISKQGSTSARHALVEACWSTVRQPGPIAAFYARIKAKRGHSIAIVAAARKLACLFWCLLTRGEDYAFAQPSLTTTKMRRLELAAGAPPRQGGRHVWSTNTAMRQAERELALQAQRAYQRTVADWQANKAGASATPGRASQEPSKGKAARQTTSP

SEQ ID NO: 208563 - protein, 340 aa, unidentified
MVYGAIDLHLRYSQIRIVDAEGRVVREQRVVTSAERLVQAFAGEGRMRVLLETGTESEWVAQALEAAGHEVVVADPNYAPMYGEVRRTIKTDRRDVAALAEANRRGWYRATHRVSAAQYGVRQVLRTRRQLVQMRSGSIALLRSLLRQSGYRLASGSAPTVPTRLSRLTLPPALLATLTPLRRAIEMLTAEIATVDARLQQVAAADPIAQRLQSVPGVGIVVALSFRAYVDDVARFAHAGQVSAAVGLVPREDSSGERRHRGHITKAGPRELRSLFVQAAWSCWRSRRAVRLRAWADALAARRGRRIAVVALARRLSRIVYAIWRDRSVFDAAHAAGAAA

SEQ ID NO: 208564 - protein, 318 aa, unidentified
MSSAAPAFVGIDVAKAELVIAIRPSGEHWTIANDVAGIHMLVQRVRSHAPTLIVLEATGGYERAAVAALAAAQLPVVVTNPRQVRDFARATGQLAKTDRIDADILALFAERVRPAPRALPDDAAQALDALLTRRRQVLEMLIAERNRLEHAVPTVRRGLTQHIRWLERQLDDVDRDLDDAIQASPVWRAKENLLRSTPGVGPILSRTLIGELPELGTLPRKQIAALVGVAPLARDSGTLKHKRLVWGGRAPVRAALFMAALVGTRCNPVLRAFYRRLLAAGKPKKVALTACMRKLLIILNAMMRTNTAWHHIDLSPTT

SEQ ID NO: 208565 - protein, 334 aa, unidentified
MKQVNQVGVDVDSEELVCVMQRAAERMPLATFANTAAGHKRFIRWATKGGRPARVCLEATGIYSLEFALALHHAKNVEVMVVNPRAIKDFGRACMQRAKTDAVDAGGILEYLQRMPFTTWQPPAPEILELQAINRRIVQLTTERTREKNRRHAAEFAGASGDAIAHDIEVNIHHLERRIERMHDSGLQLIRGVPALATKLAHLVSAKGIGEASAMRLLAELLVLPDDLAAPQWVAHAGLDPRPYESGTSVHRPRRITKVGNRHLRAALYMPALVAIQHEPNVKAFYNKLVGRGKKPMQAVVAVMRKLLHAIWGMLKHDQDFDGNKFFKLAEKTA

SEQ ID NO: 208566 - protein, 337 aa, unidentified
MKDITTIGIDLAKSVFQLHGVDAEGRPSLRRQLRRSQMLEFFQRQPACLIGMEACASAHYWARELIKLGHDVRLMPPSYVKGYVKRGKTDKADAEAICEAVSRPSMRFVPVKSEDTQALLMTHKAGEFLVRQQTQIVNAMRAHLGEFGVVVPKGIHNVERLIMACDRADLPAPARKALNLLADQLVDTQKKIEKLTADIRADARANEEAQRLQTIPGIGPITASALVSALPDIADFRSGRDLSAWLGLTPRPHSTGGKERLGRISKMGNRYLRRLLYLGAMAQVSARRRGEPSEDWLWKIIQRKKPKQAAIALANRMARTAYALMKNQTEFRAATLA

SEQ ID NO: 208567 - protein, 332 aa, unidentified
MTIVEDRPVITGGVDTHADLHVAAALDPLGGLLGVQEFPATATGYAQLLDWLGGFGTIAVAGVEGTGSYGAGLTRHLAAAGIGVVEVDRADRQDRHRQGKSDPLDAVSAARAAQSGRACGAPKGRDGAVEAIRALMVAKRSARHERTQAINQARALIVTGPDELRARFAGHSPAALVEAIAALRPRPGNVPGYATRVALRELGRRAQFLDTQLDRLDELIGPLVTARAPGLLSLYGVGPDTAALLLIAAGDHPGRLRSESSWAHLCGVAPIPASSGKVSRHRLNRGGDRQANHALWRIVITRLSSRPATRPPAPTSPGAPKRACRRRRSSAA

SEQ ID NO: 208568 - protein, 363 aa, unidentified
MIVIGADIHKSTHALAAVSGDGGVLAGELGIRADEAGHRAALRWARELDAERVWAIEDCRHLSRHFEQALIAAGERVVRVPPKMMGQSRRGEREPGKSDQIDARAVARAVVREGVERFPAAFLDERALEIRLLNDHRSDLVAERTRQISRLRWHLVDLCPEFEAQIPARHLDSSVTLDRIARRLRREERTARTRVALELVASIRAISRQASELERELRTLVIAYRPTLLAEQGLGVLTTATLIGRTAGAERFPTDAHFARQAGVAPIPVSSGRKDRHRLHRGGDRQLNRALHVIAITRARIDPETRAYLERKRAEGKTNREALRCLKRHLARQIHHLLSMPPANPDRRTRIQLNTATSVPCLT

SEQ ID NO: 208569 - protein, 417 aa, unidentified
MEEMPFRIFVGVDWGDREHQVCSLIEGKPQQKRFEHSGKGIAALISWLMELCERQPGTVAVAIETPHGVLVDALLEHGFAVFAINPKQLDRFRDRFTVAGAKDDRRDALVLSSSLRTDPQAFRRLEPEDPLILQLREFTRANRDLEREHRRLCNQLRAQLNRFFPQVLQLSNAADEPWVWSLLERFPSPDKVRHAHESSVERILREHRISRLTAAQTLEILKSPPLPVTEGVVEASTQHVALLLPRLRLVRDQRRQCEQHMARLIKEVAEAEDAQPGAKREHRDVEILLSQPGVGNIVAATVLAEAYQPLVQRSYHVLRACGGIAPVTRQSGNTRTVSMRYACNQRLRQAFHWWGNSVCHHEPRDHALYMAHRDKGHTHARAVRAVMDRRLNILVACLEHGRLYQADYTPQKTLDKT

SEQ ID NO: 208570 - protein, 403 aa, unidentified
MFHLGIDVSKKSCHYFLINPEGKKVKSFSLDNTHEAFQNLLKRLEDLSIPKEDLLIGLEASGGFWENLYSHLKDNGFRVVLLNPYHTKKFREALAKKAKTDDIDALVIAQLLRTGEYVQSQVAEELIQSLRELTKLRYELMIERKNFQRQVFSLLSIIFPELEKTTLKNPFSVASMAILQRFPTAKDLAQAKPKEIEKIVRSIQGNNFNIEEIGTLIQTAQTSIYSGRAKEARATSLRILLRHVETLSSSIQELEAQIKEILSPHESKGSFPGENLLTIPGVGEKTLAAVLSYLGADGCSFSSSTKAVGYVGYFPKIYQSGQTLRDNTICKRGPKLLRWALYMAAVASLKHNPEMRTLYHRKISQGKTEKQALICVGKKLLQVMLAMLKSGEPYNPAKVFVSC

SEQ ID NO: 208571 - protein, 419 aa, unidentified
MPKSTTSETNSANPENVVISDVRLGSRATGDTYPLECNAPAGVEPKYFIGIDLHSNNIVYCVLTQENGQPKKVKTGKVSCNNTKGIASVAEALRPYCENVPHFAVVEATYNWYWLANLFESEGWFLRLADPCTVSQANLKYSNDHTDAAYLAERLRVHSLKTFPIMGKEYRDLRDLSRSLMVLKQDMARLKITVVNELANHCSVRVRIDSLIREPLKLIRGNEKKPGIYEELDELMSKIVYEFVQLPGTHYMLCSQLRRIVRLTLEVEKLGELLFGKMTDSPTTQALKTIKGCGPVLSTIIATEVGDIRRFASAKNFQSYCRLAPTSKLSNGKSKGQGNAKNGSAYLSWALTELATLMARFNPEVGAEFQRLLARAGGLRVKAIRALAAKISRAIFHMLRNGEVFDVKRCFAPRKTEAK

SEQ ID NO: 208572 - protein, 357 aa, unidentified
MESQEVKYVGVDCGKKSIEVVRINSENSLERRQFSTTESGINNLLQWLTLNDIVGLEAGSQSFRIAKSILNKGVQVIVLNPGNLATIYQSLKKTDKEDSLKIARLIQRFPIEELPVVPIPNDEEEDNRRLCTEQENWTRQLTQSKNRLHSLFTQAGLTHITKKHLRTKANREISVALLPSRYQKEAERILKVLDLVELNLKLIEEEIQEALKKNKAYVQTIMSMPGIGMITSLAIMSYMGDCKRFSSAKQAAYYAGLVPRVDISGDTVRYGRIINRGCHSIRRVIVQAAWSLVRCQHGGKVKEFYQRLYLKKGAKKSIIATSRKMIEVLYVMIRTGKLFDSMPENILNRKLTQYGLM

SEQ ID NO: 208573 - protein, 331 aa, unidentified
MKNKQIVGIDVSKSTMDAFIFKSNHLFQVANNPTGFVRLLQESIHVSSCSKDSLLFCFENTGCYSRALSVFLEDAGIEFYAVDALDLKRSMGLSRGKSDKKDAKAIAMYAWRRRDELVGSKLPGPVIDQLSALLSHREMLIKQRTALKNANKGHHNTYSENEFKFLKESQMRMIKQLSEEIKITESEILRIINLNAELKNSYDLLLSIKGIGKILSFYLITLTHNFTKFTDPRKFACYAGVAPFEYSSGTSVKGRTKVHPCANKQIKSLLNMAAMSAIQLQGEYQLYYLRRTAEGKNKMSTLNIIRNKLIFRAFSVVKRGTPYVDLHKFAA

SEQ ID NO: 208574 - protein, 382 aa, unidentified
MGLVEGNTYIGLLVEESITLLDWGNMVERETEAKSSGSGVTNPYRRTEHCDKIHEYRCDKEVGVIGIDISKEHLITSRGRVRRYENSKKGYEEILKMKPCTIVLEPTGVYAIKPSQYFKERGVRVLQVSPNVLSGEKELRGKKTDFYDAEKLENMVNKAKEYEYNPLREMVTLYLFLKDIEVKYKNRLERTLFLVSDNNKISKERLEKLAKGDFTQEELYQLEYTPIVVEEIKVLAKTLLETQEKLKEVRRMIEEQVPDNHVLLTIPGIGRLAAGIIIGIVGDVKRFPKPESFVAYCGLDPVVERSGKAVISKGISKRGNKYLRSLLCFLAEMNYSRNPTLLKFYEAHKDRLHGRKLYAALARKLARVVWSVWYNNKPYEPK

SEQ ID NO: 208575 - protein, 341 aa, unidentified
MGEITIIGLDIAKSVFQAHGADAAGSVMFRKKLGRGRLLAFFAGQPRCIVAMEACAGAHHWGRELEALGHTVKLIPPAYVKPFVKRQKNDEADAEAICEAAQRPTMRFVPVKSREQQASGVVFRARDLLVRQRTQIMNGLRGHLAEFGYVAPKGVMYVERLVAEIEDPQSQLPPAARVSLQVMVRMLDALQTEIASLDAEIARRAKEDPVARRLMTIPGIGPVTASAMVALAPGSEAFRCGRDFSAWLGLTPVQRSSGGKQKLGQITKAGERTLRRLLVIGASAVIKQALIRGAPPGSWLAQMLARKPRMLVAVALANKTARIIWALLARGGVYRAPALAA

SEQ ID NO: 208576 - protein, 341 aa, unidentified
MHPYFVGLDVHKQIIAYCVKKVDGQLVTEGTIKATRTALAEWVKSLPQPWVGGMEATMFSHWIYVALQPHAAELYMGHAARMKAISAGKKKSDKLDSRTIADLLRCNVFPKCFVIAPELGRLRQQLRFRQLVVKQQVAFMNKTAGLLMETGIEYERRRLHGKRYFSELMATTHWVNQELKPLLKFSRQQIESLAGMDKRLIRMLEKHPQLKARVAALRTIEGVGPILALSWALETGTPERFPSIKDAQSYCGLTSAFWESAGQQKRRPLSKQRNKHLQTVLIEVANLAPMYNEKLKALYQKEKAAGADSNQATLEVARKLVAYLLAVDRAFWRSAQPKRAA

SEQ ID NO: 208577 - protein, 427 aa, unidentified
MSGRDYTKQVEKRQKIKKTTLVVGLDIGNEFNAMGMMNKEGEVIGKYPKIYNSRKGFEYFKKEIEETKRRNGLKRVLIGMEPTGHYWRKIAYYAKEEGDETKFIRTTATKHQRELDESSSAKTDMKDALTIANITREGKYIDTVIEDGMMRQLRTLGKLREKIQVGNTATRHRLGAVLDDYFPEIKKIFWSTKAKSLIALLERCPYPEDVLKKEEKEIERIIARSSRRKQEAKEKAREVYRVAKESIGLKNIGEGDRYRLKVNLESIKQTEKELMEIEKQMSKILEKIPGAEIIQSIPGVGIITTAVFLGELGNPEYFKGAKQIIKYAGYDPQENDSGKSVGRKTISKKGRWLLRKCLYFMGLGVVNNNRFFKEYYDRKLSTKNRFGQDLRKKEALCAVVIKLIKVIFALLRDKKKFTEERPVFARA

SEQ ID NO: 208578 - protein, 458 aa, unidentified
MYRELQPFREALSQELKADLFPAAAGVDPDKLLETYLDRLTMYTGVDVADQTFTVLAMDAGKEILGSLEGCANDPDGFQRFVTWARDLRDQHGLRITAIAGETTGIYYWALWDFLGEQPDMARVLYNPRTTEHMGEVLSKKVRNELVDALLLAEQLRLGSTPEVLVQEDADLLAARYYSRGARDLATQINRKKNQLRALLRAYCPPLRQVFPGSKLHHPAVYALLEEYLFPDEFVQAGAEAIAAILAAHCRDAFGLAEAQELVDAAKKALVRPVGRDAIRHLVHGYCQDISTFQQRKSFYLKTGYALIKSRQETKLLRTVKGAGISNTLALVSELGDISRFPSGEHLASFLGLTTSKHISGATLYRSKRITKQGSPNGRYAAVNIALHLGHRVPRYQAMYQRIKGRKPPRKGHFVALVAIARDFVTHVLYDMWRNQRPFFVKDEDYRKYRQKQSHSEG

SEQ ID NO: 208579 - protein, 344 aa, unidentified
MGEVITIGLDIAKSVFQVHGVNEAGAVMIRKRIGRAKMLEFFGKLTPCLVGIEACPAAHHWGRELQALGHTVRLMPPSYVKAYLKRSKNDANDAAAICEAVTRPTMRFVALKTKQQQAALMLHRARQLLVRQRTMLSNAIRRHLAELGIVSAKGRNGTGALLEIISDAGDSRVPPVARGILDVLARQYGALGAEIGSIDRNILAWHRSCEASRRLEEIPGIGPIVATALVAEIGDWKAFGSGRSLAAWIGLVPKQQSTGGKDKLGSITKQGNRYLRWLLVAGAMAVIRYAQKHGTLKRPWLGRLMARRPTKVAAIALANKIARTAWAIIVHGDRYSEPKPLLAA

SEQ ID NO: 208580 - protein, 446 aa, unidentified
MEMDIVNPNCAGIDVGSRSHFVAVGQSLEDVKEYGVYADDLTEICKWLEETGITSVAMESTGTYWQNLYVELVRHGFEVTLCNGKFTKNAKGKKTDVKDCRWIQKLHALGLLSSSFLPDATTEILRTYCRQRGNWIDLTSEASQKMQKYLRLLNFRLDVVVNDVCGLTGLAIISDICKGNLDPEKLSEHRHGNCKKSKEEIAKALKGNSREDFLFCLKQEYESYLYYQRQIENCDKQIKSFVKSQINSQPEKKKLKTENKSHKRINKNTVKNLDLNQASYQYFGGIDLMRIEGLSHSTVLTIMSEIGPDGFAKFETAKQFASWLRLAPNNKISGGRVLSHRIPKGSNRLKIALRQAANAIGNLKDTHLSDFFKRVAYRKGRQSAVSATARKLGVIIWTMITKKVQYKPPTDYLFLDQKRKLKLVARIKKNISKFELKPDELGFAIS

SEQ ID NO: 208581 - protein, 339 aa, unidentified
MVTIGIDAHKRSHTAVLVDEHGRELAQRTIGSRSSDHLELIAWARRQARERLWAVEGCRHLSRRLERDRIVRVPPKLMAKTRTSARSYGKSDPIDAHTVARAALREPALPAARLDGEERELRLLVDHREDLVGERTRTLNRLRWHLHELDPDLEQAARSLTRVRSLDTLAASLEGLQGTVARLARELAGRCRELTLEIRALEREIAALALRLAPSLLAIVGCGPLTAAKIVGETAGIERFRSPDAYARHNGTAPLPVWSSNRARHRLSRSGNRQLNAALHRIALTQAHWHPGARALLARRKAQGDGGLEALRVLKRRLSDVVYRALKEDAARSEQALVA

SEQ ID NO: 208582 - protein, 409 aa, unidentified
MKLFVGIDVSSKDLVTSRISEENHEVVSRGNFVNDLKGATELKKQIINTANSNQIDQVIIGMEATSIYSFHPAMFFQEDIDLKAFNTQSVVVDPKKTKRFHDVFAEDKNDQIDAYYIADYLRVGHYSIGIVRQENYIALQRLTRSRYEIVQSLVRAKQHFIENLYYKLNKLVISDELNTSIFGSTMMQLLTEDLTTDDLLNISINDLTDYLAEHGRGRFAGPEALAKTIQKAVRSSYRLDKVVANSVDAVLSVYAEEIKAFQKMIKDLDKSIEKVVKVTDDEQILRSIPGIGPVYAAGILAEIGQIDRFNNEAKLAKYAGLSWREKQSGSYTSDNTPLKRTGNTYLRYYLVEAANLVRTHDPVFGEYYQRKYKEVKHTPSKRALVLTARKLIRVIYFLLKNHQIYQEKR

SEQ ID NO: 208583 - protein, 310 aa, unidentified
MEQFTVVGIDVSKDRLDVHVLPAGEAWSVSRDGEGLAELCRRLGGTARLVALEATGGYETVVAATLSSEGLPVVVVNPAQVRAFAHALGQRAKTDPIDARVIARFAEATRPEIRPLPDRATRLLADLVARRRQIVEMIVAERQRLHRTEPPRVRKSIARLLKALEKELASVDGDIDGSVRGSPVWREKEDLMASVPGIGPIIARTMLAELPELGTLDPKRIVALAGLAPFTRQSGAWKGKASIGGGRSVVRTALFIGAQVAKRWNPTLKVFYDRLIAAGKPKMVATIAVARKLLTILNAILRDKTPWQNA

SEQ ID NO: 208584 - protein, 319 aa, unidentified
MGRSKVEYEQIIDRGCGLDVHRDTVVATVMGRGLKTETRTFGTTTSSLNELGEWLESLKVTDGAMESTGVYWKPVLHVLRSFPLNLIVVNARHIKNVPGRKTDKADSQWICKLLISGLLKGSFIPPENIQELRDLHRYRKKLIGVVASEKNRIIRVLEDANIKLSSVMSDTSGVTASYLINGLIEGRRDLERLISECYHRKLQASPKDIKEAINGRLTSHHAFILKSMQKHIRSVEEQIKEIDQEIQKYITSFEKEIELLQTIPGVGKDGAIGIVSEIGVDMEVFPDEHHLASHSGMCPGNNESAGKKKVQKPDMGIKI

SEQ ID NO: 208585 - protein, 316 aa, unidentified
MDEAGEIVEEVRVENANLDDLAQRYAGAEAALEATSNYYHIHDTLSEHLDVTVAHPKELNQIANSDKKTDRVDAKELARMVRLNSVPESYVPTDEVREARALVRGRQTLVENRTKYANKIHGLLSDHGITEDVKPLTKEGREFLGELSLPMPWDSLLESYIELIETLNEEIRNLEETIEERAGSLKETQLLMTIPGVSYYTALTIYAELGDIGRFDGDKSVVSYVGLNPVIRESGDSRIEGSISKRGSGRVRWLLVQAANTAVHTSNDEYLSRFYERLASRKNSQKAIVACARKMLVSIYHMLDRGEVYDPPDVSA

SEQ ID NO: 208586 - protein, 396 aa, unidentified
MATTHVLNSNPAPAATLYVAFDLGWGEWKLAFTTGVAQKPRLRSIPARDLCALELEIARAKARFHLPADTPVMSCYEAGRDGFWLHRYLLTKGIQSMIVDAASIEVNRRKRRAKTDRLDAASLVVMLIRWHLGERKLWSIVQAPSPDAEDLRQLHRELITLKGERTEHVNRIKGLMASIGLAIAVDRRLPERLDGLRQWDEKPLPADLRVRIVREYDRWLLVDSQIHSLEVEQIRRVRDDATPGVERIRQLFGLRGVGLQGAWLLEREFFGWRSIRNRRQVASLAGLAPTPYGSGQTEREQGISKAGNKRLRWLMVELAWCWRRYQPTSDLSLWYQRRFAEGSARMRKVGIVALARKLLVALWKYVSQGEVPEGAEDVPWRQKLSHRKRAEVSVAC

SEQ ID NO: 208587 - protein, 412 aa, unidentified
MLSKRIDLDRTLVLGVDVASLEHEGFLRGPRGQGVGPFGFSNDRSGFELLRSKVAEAGVARGVSEVLLALEPTGPYGEALARWARRRGWDVVGVLGAHTSRANELWGNSPLKSDGKAAEVICDLAVEGKWVTFSLREGPYAELKALGVYRDQLVQERTRQKNQVRALLHVLFPEFTKVMDPFSKSGVRLLESYPTPASYGETDVVALGAQLRRWSRGRLREERAEQVLKAAGESVGVRAGATERVWQLRGKLRRLRELEGEIGSLEGRMARWLSDIPYAGYLLTMPGVGTVTAATLLGECGDLRDYPSAQELLKFPGLNLVSRSSGKRRGRNRISKRGSRRVRHQLYLLAGRLAKRGAPWRDRYDRLLARGAEKKEALTALSRKALCVLFALARDGVAYRSNVVGETISKAA

SEQ ID NO: 208588 - protein, 337 aa, unidentified
MDRQYVGIDFHRRRSVIVRLNAAGEKLSSVRVANDPVAIAAAVAEAGPDPEVVVEATYGWYWVVDLLQANGARVHLANPQGLNWGQRRVKNDERDAIDLADMLRLGRLPEAWIAPPGTRELRELVRYRAKLVGLRSGLKAQVHAVMAKEGVLPAQGRMFGPAGNAQLDAIAISENYRTRVESLRDLIELYDRQVAMLEGQIHQQLRHHRGYQAVQAIDGVGRTIAAVLVAEIGDVDRFRSAEALCSWAGLTPKHRESDTTVRRGRITKQGSRLVRWAVIEAVARYHGGPALAPGFRRLAERRGTNKARVAVARKVLTLVYYGLRDGEIRCLAQARAA

SEQ ID NO: 208589 - protein, 413 aa, unidentified
MDIIYTSCCGLDVHKRTVQACVRRMDRSGKIHHEVRTFSTMTGDILALADWLGAQGVTHVAMESTGVYWKPVYNILEGSFTILLVNARHVKNVPGRKTDVKDCQWLAQLLQCGLLKGSFIPDRPQRELRDLTRHRSQLVAERTAVANRIHKVLEDTNIKLGSVATDILGASGREMIRALIAGEQDAEKLADLARKRLREKIPELRLALQGHITDHHRFVLGELMDHVEYLERQIDRFSARIEETSRPFEKAIEAVTRMPGFEKRSAENVIAEIGINMGQFPSAGHLASWAGMCPGNNRSGEKSKSSKTTKGSRWLRCALTQAAWAATHKKGSYFQAKYRRLVGRRGKKRALVAIGHSILVAIYHILKSQVEYQDLGSNFFDKLNSKQLVKHHVNRLKSLGYNVTLNEPQKEAA

SEQ ID NO: 208590 - protein, 328 aa, unidentified
MVSQYVGVDLHKAFLQACAVDGTGTRLWEQRFARTPSGLAAFVAQCGRTSAVAVEASTPTWHFADTVVDAVGQLTIVDPWKTKLKAGYAAKTDRLDARRLADALRRESVVGIYYPPLAIREVRELCRARHALVQVRTAVVNRLRALLLRQGISDARRLAKATDDRWLTERPLPPQATASLRTLREVLGVVRREVAALEDEVRALAAADPIAVALQALRGIGPVLALTIRAEVGTIERFPTGAQLASYAGLVPRVEASAGRVHYGRITKRGSPWLRWALVEAAIHGTTRPDRVGKWGRGLAVRKGALKARVALARVLCEEIHRHWPRIA

SEQ ID NO: 208591 - protein, 341 aa, unidentified
MSEVSIIGLDLAKNVFQMHGADASGTVLFRKKLRRDQVLKFIAAQPTCTVAMEACASSHYWGREIGRLGHAVRLIAPDYVKPFVKRQKNDAADAEAICEAAQRPTMRFVAVKSEEQQAAAVVFRARDLLVRQRTQTINALRGHLAEFGVIAAQGLSHVAKLVSAIDDHDTDIPELARPILRLLVEQLRSLDERVALLDRELARRAREDAEAKRLMTIPGIGPITATALVALAPTAQAFKRGRDFAAWLGLTPLQRSTGGKQKLGETSRMGERTLRRLLIIGASAAVRWAMRKGSTADPWLARMLSRKPPMLVIVALANKMARIVWALMARGGTYRVPAAAK

SEQ ID NO: 208592 - protein, 403 aa, unidentified
MFYLGIDVAQKTSSCLILSVEGRKVKAFTFENSPEGFQGLVERFKEKSISQQDLLIGFEATGNLWENLYGYLKKEGFHVVLLNPYHVKKYREALAKKAKTDKMDALVIAQFLRTGEYVQSQVAEETIQSLREITRLRYELLKERKNYQRQVCSMLAVVFPEYGQTALKNPFTVSGLAVLQKFPTAKDLAQAKPRQIEKIIRTIPGNNFGLKEIDTLISTAQASIYTGRAKEARAISLRILLIHIAHLVQSINQLEQEMDKMLSPQGPQDSFPGENLLTIGGVGPKTVAAVLSYLGEDGANFSSSTRAVGYVGYFPKIYQSGESKRENKISKRGPKMLRWALYMAAVASLKHNPEMKTLYHRKRSQGKTKKQALICVAKKLLQIMLAMLKSGEPYNPSMVFVQG

SEQ ID NO: 208593 - protein, 346 aa, unidentified
MDKTICGIDVSKDRLDVAVRPSGERFVVARTGAGLDELVARLKVLKPNLVVLEATGGFETVVVAALAGAGLPVAVANPAQIRAFAKAIGQRAKTDPIDAEVIAHFGEATGVAPRPLPDQATQQLADLVARRRQIVDMIGAEGQREKRANSRIRKSIGRLLKALERELSSVDSEIDDAVRGSPARREKEDLLSSVPSIGPVISRTLIAELPELGSLGRKQIAALVGLAPFTRQSGQWRGKSFIGGGRTSVRKALFMGAMVARRHNPVLKAFFERLVAAGKPKKVAIIAVARKLLTILNAIVRDGIPWKGALGAGLVAILAEPQLGRPSNEVGATETGAVRMAAPSSL

SEQ ID NO: 208594 - protein, 414 aa, unidentified
MEIIHSRCAGMDVSKRDAKVCVRVAGRGRRKTVETVRTWGSTTNAVLALREHLINEQVTLVVMEATGDYWKPFYYLLEDADFEVMLVNARQVKNLPGRKSDVSDAAWLAQLGAHGLVRGSFVPPAPIRELRDLTRARTAMTRERGREIQRLEKLLEDAGIKLSSVASDITCVSGRLMLQGLIDGQHDPAVLADLAKRRLRAKIPELTEALTGRFSDHHGFLAGMYLDAIDQRSQQIADLTARIEVVVEPFRSFCDLIGTIPGIGERSAEVIVAETGADMSIFPTAAHLASWAGCCPGSNESAGRVKSTATRPGNPYLKAALGTAALSIANSHNTYLATKYRRIAARRGPKKALVAIEHTILIAIWNMAHTGALYDDPGADYYTRHDPERARRNAVNQLQRLGYQVTLTPTAASA

SEQ ID NO: 208595 - protein, 320 aa, unidentified
MDAVLGIDIAKAKFDVALLLPEGKLRRKSCPNTVTGFAELARWLERQGTPVVHAALEATGTYGDALAHYLHDAGHVVSVLNPAVTHAFAASQLARAKTDRIDAELIARYTATQHPAAWTPVPREVRDLQALIRRLDALQGMKTQETNRLEAGPVVAAVRVSLETIIATLTAEIKAVQRQIRDHLDQHPGLRDQRDLLTSIPGIGEATAAVLIAELFDKRYSSARQAAAFAGVVPRVCESGTLKARGRLVKIGPGRLRKALYFPALAALRFNPTLRALQTRLRAAGKPKMVIVGAAMRKLIHLAFGVLKSGRAYNSTYAHP

SEQ ID NO: 208596 - protein, 337 aa, unidentified
MDNIYLGVDVSKDRLDAAFADGRAVETLGSFPNSSKGFALLKRRLMEKIEPNRQVHLVIEPTGSYHLSFVAFAHHQRWPVSLPNPQVVREWARGQGQRAKTDQVDARLLASYGIKEEPHSQQPLSPEVEALDELLHRQEDLKKMLRQERNRLHSLQRRPHPSPAVVDSVEALMGMLEQALVEVEEAIQEHLKEFPLLDRQRRLLLRVPGIGDKSVLPILVFLYRWDARTSGLGDAKGLTAFAGLDPVVHSSGSSVFKQPSISKMGDADIRSRLFLCALGGNHAKDTPLTRFYQRLVARHKPKMVALVASARKILVWAFAVFRSGEPFDPALAMAKTR

SEQ ID NO: 208597 - protein, 353 aa, unidentified
MEVTTIGIDLAKSVFALSGADSRGRVVIRRQLRRAQVLGFMRGLPRCVVGMEATGGAQYWARQFTALGHEVRLMSPALVMPYRKGNKTDRNDADAILEAVSRPSMRFVMVKSVAQQDLLALHKVRAQLVKSRTALCNQLRGLLRERGVAVRVGVAALKRSLPAALTDESSELSGEMRELLSEMSQWLRTLEQRIASCEARITRKFKHDERCVRLAEVPGVGPLTATALVAAVGNAQRFKNGRELSAYLGLVPRQHSSGGKTVLLGITKRGDRYLRTLLIHGARSALRQCKLEGDARSRWMARISAARGPNVAAVAMANKNARILWARLSRGDRYRPSRVLTRAVLRPGSPTPG

SEQ ID NO: 208598 - protein, 403 aa, unidentified
MNYYVGVDLADRKHDICILDSTGKKLKEFTVPHSPEGLDQLITGIQEFSANIHNVFISAETYKHLFMESLHAIGYTVYSINPKSVDRARDRFSPAGAKDDSRDAQVLADLIRTDQHQYRPLRKDSNELKELQLLVRDRESLVALKVRIENQIMACLKSYYPQALECFCKLDQQSTITFLKAFPTPTEFASADLDHLEHILKECYNFGWKSKAKELFLLGQQKQFQVNAVTAQAKSRLLLSLLTQLELLIQDIKAYDKAIECLVKSHPDSEIFLSLKGVGTNLAARLMVEFGDDHSYYPHANALQCEAGTAPVTRKSGKRRLVHFRRACKKTFRNTMQQFALQMVKHEPWSKEMFKKHRKLGRGTSESMRIVANTWLRILFAMWKNHQHYDRAIYLETKARNAA

SEQ ID NO: 208599 - protein, 400 aa, unidentified
MNRTRTVAGLDVHKDSIYLCIMGYDQAIIWENTYGVLTPDLRQMHHDMRAHGVTEAAMESTAVYWVPVWTELCESMELRLVNPYFIKQLPGRKSDVKDARWIAECLLKNLIKGSFVPEPIVQDMRKLNRRIMDLCEDTTYNSNKLDAALQRCGFRLSNYVATTKSKSYRSVLKAIIDGQTDPDELLSLVHGRILNKHGRERVKAALTGSFSETDLIVLRQLKETLDLIEEQTADCQQELVRLCKEHYPKPYERLQTIPGVKERAATAIIAETGVDMKMFATSASLVGWCGLKPRNDVSNGRFKSRKVTHGNRYLRQILIEIAWAASRTRNCFFSHFSYLQTTVKKKNKMKIQVAIARKILVALWHMLSKEEDFIDIYLKRQEELKRTEGQIKLLESYMAD

SEQ ID NO: 208600 - protein, 412 aa, unidentified
METLVERGCGLDVHQATVVACLLIVRKDGKVQKQVRTFGTTTRELLSMREWLLSQGCTHVAMESTGVYWKPVYAILEGAFQIVVANAQHVKKVPGRKTDVKDAEWIADLVCHGLLRQSFVPPKPIRELRDLTRYRRKLVESQSAERNRLLKVLETANIKLASVATDVFGTSGRLMLRALIEGKTTPEEMAELAKRKLRSKIPQLELALEGKIEDHHRFLLKLQLDRLERAEGDLAVLEEHIQEKLEPYAAQLALLDEIPGVDWTLAAVIIAELGVDMSVFQSVSQLASWAGVCPGNNESAGKRKSSRIPKGNVYLKTALVEAAHAAARTKGTYLRDKFHRLKARRGYKRAAVAIGHKILVSIYHMVSQNVSYNDLGDLYLDKLNKNHLTRNLVHRLERLGYTVTLTLEQKAA

SEQ ID NO: 208601 - protein, 341 aa, unidentified
MQIATIGLDIAKNVFQVHGIDRDEKVVVRKQLRRNQVIGFFQDLPPCLVGLEACATSHYWARELARLGHEVRLMPAKDVKAYIKRNKNDAADAAAICEAVRRPTMRFVQVKSADQQAHLMQHRARDLLMHQRTQLINALRSHLAELGIIAPQGREGVKELLAIIANEADTQLPNDARASLIVLAAQLQALQTTIGAIEKRIVVQHRANKESKRIQTVPGIGVIGASAIAATVPNPKIFRSGRDFAAWIGLVPRQMSTGGKPKLGPISKQGDRYLRRLLVVGAVSVLRRAKLHPGKFPWITQMLARRPFKVVAVALANKMARVAWALMVSGKTCRAAWFAAA

SEQ ID NO: 208602 - protein, 424 aa, unidentified
MKVTYQTCCGVDVHKSFLVATIIKTTAGIEPSYQKKRFSTFNNSILDFKSWLLENECHDVCMESTGKYWVPVFNLLEDQINVTIANPKWVKAVKGNKDDTKDSKWIGDLFRLGLVKSSYIPCRLIRILREYTRYRYKLVSCRSSEKNRYQNALTVCNIALDSVVSDIFGKSSSSIIDYLLEQSGTTINHEEIASKLLKSLKSKEDAVIESIEGYQMTDAQKYRMRLIRAHMDYITAEINDIDKQIESLISSDPDYDKAIRLLTTIPGVKRDSAITIISEIGIDMSQFCNSKRLCCWAGLTPSNNESAGKKKSVRITRAGVYLKPALVQCAHAAVKSDKSPYYKKKYESLVKRRGKKRAIIAIARMILTAIYQMLSTGEVWNPSDLYKIDMPAPLAEKQKAKAIKQAKKLLQKEGLLPPDEPLAS

SEQ ID NO: 208603 - protein, 378 aa, unidentified
MILQNAVSCYNPKTLNLLKKEAVMKFYTKQHKYYCGVDLHARNLYVCIIDQKGEIVKHKNIDATPEAFLNIIKGCRKDVVVAVECMFAWYWLSDLCRKEKIPFVLGHALYMKAIHGGKAKNDRIDAHKIAALLRGGMIPMAYVYPPDMRATRDLLRRRNHLMRKRADLLAHIQNTNHQYNLPRFKKNICYRGNREGIAEQFSDECVQKSIEINMALIDKYDYLLRKVEHYICKKARVQDMDSFVRLQSVPGIGQTLSMIILYEIHDIKRFPRVQDFVSYSRLVKPAKESAGKRYGHSGAKIGNAHLKWAFSETAVLMLRESADIKKYKAKLQRKHGKAKALTILAHKIGRAVYYMLKRKEVFDIDRFLNKQIIQTGRA

SEQ ID NO: 208604 - protein, 350 aa, unidentified
MDTTTSHLASIGIDIGKEVFHIVGFSTDGKIAFRRKIKRLALIETFKRLPPSIVGMEACLSAHFVSRALRQLGHEPRIIPAIYVKPFVKGQKNDYNDAEAIAEACLRPNLRTVREKTQDQLDLQACHRVRSRLVSRRTATINQIRAFLIEQGIAVRTGSRALRNSLLAILKDRQDEISPRMGGLIAGLYEDWICLDERIETIASEIEKISEKEANCQRLMSVPGIGPLISTAVVAAIGAGEAFERGRDFGAWLGLVPRQYSTGGRSILGRISKRGSKYLRTLFIQAANVILMRPNNWERFSFGTWLLNAAPRLHRNKLATALANKLARIAWSILRNEKTFDINRHEAMAI

SEQ ID NO: 208605 - protein, 339 aa, unidentified
MSEIKRIGIDTSKAVFTLHAVDQADRPVLRVNLRRAQVLSFFRKRSRTEIAMEACSGSHHWARKFTALGHDVRLIPPQYVKPYVKRAKNDRNDAAAICEAAGRPGMHFVLAKSEAQQADGLVLKVRETLVAQRTRLINTLRGHAAEFGIVAARGTSQVAPLLAAIEAEAGIPAAAKEMLALLGEEIAHLDVRLQELQTKLLAMHRANAISQLLATIPGIGPIIALTLAVEIDPEAFQSGRHLAAWLGLTPREHSTGGKQRLGGISRAGHERLRSLLVAGATAVIRHASRADSRLATEWLRQLLSRKPRKLAAVALANKMARIAWAVMTRGEAYRSPAAA

SEQ ID NO: 208606 - protein, 403 aa, unidentified
MNNVAGIDVSKGKSMVSVLRPFGEVVAKPFSIGHTGSELKELADYLKSLDGETRVVMEHTGRYYEPVARFLHDEGVFVSAVNPKLIKDYGNNTLRKVKTDKADSRKIARYGIDNWAELRQHTPMDTIRMQLKTLNRQQSLYTKTKTMMKNNLIALLDQTYPGVNALFDSPVREDGSQKWVDFATTFWHVDCVRNMSLTAFAERYRKWCKRHGYNFSQSKAVEVHAGAQDLIAMLPRDALTKTMVRQAIDALNAVSASLERLKAEMQALAAQLPEYPVVMAMHGVGDSLGPQLMAELGDVARFTHRNAITAFAGVDPGADQSGTHEAKSTRVSKSGAPELRRALFLVMDCLLKTQPQDDPVYRFMDKKRAEGKPYLVYMTAGANKFLRIYYGRVKEYLASLEGN

SEQ ID NO: 208607 - protein, 352 aa, unidentified
MARATKFHSVTTTIGIDMGKNTLHMVGLDSNGAIVLREKVSRGRIGSRLANLPPCLIGIEAGMATHYVARELAALGHNVKQVPPAYARPFRQGHKNDFRDAHAVAEAVQRPTTRFVPAKTNEQLDLQALHRVRSRLVSERTAVINQIRGFLLEHGIIVRQGQRFLRHLLPDILAKRTDVLSPRMVRIISDLVGDWRQLDERIETMTDEIETLAKSDDSCRRVMTVPGIGPLISSAMVAAIGNGTAFAKGRDYSAWLGLVPRQMSTGDRTILGRITKHGNGYLRMLFMQAARVVLLRPTNWSKHGFGAWLVRAAQRLHPNVLAAALANKLARIAWTVLVQERNYEARVTRAAA

SEQ ID NO: 208608 - protein, 389 aa, unidentified
MKIFVGIDIAKLNHFAAAISSDGEILIEPFKFTNDADGFQLLVSKLESFDKNSIIIGLESTAHYGDNLVRYLVAEFYQVCVLNPIKTCQMRKNNVRKTKTDKVDTFVIAKTLMMQDDLRFITFFDLDMMDLKALGRFRQKTIKQRTRLKIQLTTYVDQVFPEIQYFFKSGLHQNAVYALLKEAPSPKEIASMHMTHLANLLKVNSHGHFTKELAKELRVLAQKSVGANDSAISIQITQTIQQIELLDSQLEKIEAEMTDIMKFNDSVIMTIPGIGYINGGMILGEIGDIHRFSNPNKLLAFAGLDPSVYQSGNFQAKTTRMSKRGSRVLRYALVNAAWNVVRNNATLKAYYDAKRAEGRSHYNALGHCAGKLVRVIWKMLTDEVEFNLE

SEQ ID NO: 208609 - protein, 417 aa, unidentified
MEVVHPRCAGIDVSKQDAKVCIRIQGSNGRKTSSTVTTWGSMTNQILALRDHLAAQQVTVVIMESTSDYWRPFYYVLEADFEVLLVNAREVKNVPGRKSDVSDAAWLADLGAHGLLRASFVPPEPIRQLRDLTRARTHITQGRTREIQRLEKLLEAAGIKLASVATDSTGVSGRLMLQALIDSNGTADPAVVAGLAKRRMRSKVPVLTEALNGHFTAHHAFLTLLFLDRIDGHTKDIELLSERIDELMTPFLPARELLESIPGFSQTVAEVFIAETGGEMRQFPTPEQLASWAGASPGSNESAGRVKSTKTRPGNRYLKGALGVAALNQARSKSKKTYFSAKFRHLAPTRGPMKAIVAVEHAMLTAAWHMLTNAEFYRDPGADFYTRHDPTKTKARAVKQLEALGYGVTLQPAAQAG

SEQ ID NO: 208610 - protein, 357 aa, unidentified
MTNDKYVGLDVHQASTSIAVLDSNGKLITTAVVRTTANAIRDFIRGLSGTIHVTFEEGTQAAWLYEVIKRLVAELIVCDPRKNKVLAVGNKGDRIDATKLAELLRGGLLKSVFHSNHDTKLLKQLTHNYDSLVGDTTRVMSRIKAVFRSQAILCSGRDVYYKRNREQWMTRLTESGLRIRAQFLFDELEPLKELRRAAKRAMLKEARRHQAFKILSEVPTLGPIRIAQIIAVVGTPHRFRTRRQFWAYCGFAVVTRSTDDYRWDENGPLRRSRLPATRGLNRNFNRRLKHVFKSAALQGAGREPFKSYYQARVASGMRPEMARLTLARKIANITLTLWKNGGQFNERKLSAQHDRTT

SEQ ID NO: 208611 - protein, 339 aa, unidentified
MKKYVLFIGIDISKKWIDVALTPDGQKDQMHHQRFSNKLKGFKKMMRWIMKFIRQQNLAPCFLFCMEHTGVYTFPLCYFLQEQGFDYVLDSALRIKRSLGIKRGKDDKADSMDIARYIYLHHKGLKASVLPTKVLMDLKNLLAYRNRLVKKCQAIKVAASETKAFMPDDSIMKWIMEDSAEIIGLLKSKIKKVESRINELVSQDREIKRIFDLATSVKGIGPINALQMIIHTNCFKAFDTARQFACYIGIAPFHKKSGTSLNIEAKVSPLGHKKLKAILTNGVMSAIQNDKELKAYYERKVAQGKIKYKVLNAVKNKLVSRVFATVKRGTPYVELSNYI

SEQ ID NO: 208612 - protein, 314 aa, unidentified
MQQDEVMVGVDVSGTQLDVALWPSGENFSVSNDMQGVEQLLTRMVEVHPRAVVVEATGGLESLLVGELCAAQVPVALVNPRQVREFARSLGQLAKTDRLDARVLAQFGHSAHRSGRLKLTQLLPAADAELKALVRRRRQLIEMLGAETNRRQRASKVVKKSIVATIRSIKRTLAELEQQLRETVKNSPAQQKKAAILEQVPGVGPQLARTLIAEVAELGQLGRRQIAALIGVAPHAHESGQFKGRRMIWGGRAGVRRTLYIGDAYRYPLQPASGTLLSPPFGSREEQKARVHRLRSQTARHPQRHVPRSYNLES

SEQ ID NO: 208613 - protein, 440 aa, unidentified
MPRRIGLDVHREFAQIAVWEDGVVRQAGQVGTTPEELRTLADSLLATDEIAIEATCNTHAIAKLLAPRVARVVISNPMKTRAIAEAKVKTDKVDAEVLAQLLAADYLPGVWMADEDTQALRRQVARRAHIVRQRTRLKNQVQSILHRNLVPRPPVADLFGIKGRCWLANQPLPPDEALAVEALLRQLDFHGQELRIIDAALGRVALAREEVKRLMTIPGVDATVALSIVAAVGEFHRFSRPEQLVSYLGLNPRVRQSGGAPASHGRITKQGRAHARGMLVEAAWVAVRVPGPLRAFYERIRSRRGMQIAVVATARKLAVLCWHLVIKDEDYAFARPSLTDKKLRALELRAGMPPRRGQKGKAAAYSLKEVRRRERELAEQAEQAYRQLVADWQARGAGKPGVAAANGTRLQRPSVGQAARQASVPDPALRSGVDHAHAEA

SEQ ID NO: 208614 - protein, 438 aa, unidentified
MSRPQVIEDEEHERIFERVAAVDVAKASGVVCMRTPHPSRPGARQSTVWTVQATVPAVRGLAAQLAAEGIEKVTLESTSDYWRIWYYVLEAAGLDVQLVSASQARQLTGRPKTDKLDVMWQARLTEKGLLRPSFVPPSEIRALRDYTRARTHLTQDRTRCWQRLEKLLEDALIKISAVASKLTTLSAQDMIKAMIAGERDPRTLAALARGKMKAGMFDDHHAELASMLLDQIAFLDARITQLTARIEEQIAAIPDARGVDSDGATGPGAGTGPDAIVMPAVARLDQIPGVSAELACSIIAETGLQASRFPTAAHLVAWAGLCPRAIQSGPRTRHGKGQGNTYLRGYLGQAAIGAAGTATFLGERYTRIARRRGKAKAQVAVARSILVIIWHLLHDPQARFSDLGAGYHESKIDKNRKARNHIRQLEALGYTVTLTQAA

SEQ ID NO: 208615 - protein, 366 aa, unidentified
MDTIYIGVDFHARQQTICYLKTETGELVTCELKHQDKEVVRAFYAQFVGQVIVDLEASGYSSWFERMLEELGCQVWLGHATEIRRRARWRQKNDRRDAELILDLMLHNEFPRLHRPAVQSREVLRMLRYRQKLIKMRTMSKNSLQAIALQAGLAKGSRLFTKAGQQELGTAEMSPVLHWQREHWLQLMEPLNQQLLETMVWFKSQSKDDDRITRLRTHPGIGLLTSLCIVHTLQPVSRFRNTRKVAAYAGFDPIERSSAERKCFLGISKAGSRLLRYLLVEAAQTAVRKDEDLKRFYQRLADRRGRPKAKVAAARKLLIRAYIMMRDEIDYAEFRHRAVAARLARRSQGPANVPEVLIGQPASPEQ

SEQ ID NO: 208616 - protein, 315 aa, unidentified
MSDVPCFGGIDVAKAQLDIALRPSGERWAVTNDASGVATLVDWVQTLHPTLIVREATGGLERAVTSALAAAGLPVVVVNPRQARDFARATGQLAKTDALDARALAHFADVIRPTPRPLPDAQTQELRALLGRRQQLIVMRTAEQNRLAGTSERLTQDIVAHITWLNADIATLDNDLETTLRASPLWRENDDRLQSAKGIGPVCARTLLLELPELGTLTRQQIAALVGVAPLNCDSGTLRGRRTIWGGRAHVRTVLSMGTLVATRYNPQIKAFYERLLAAGKVKKVALTACMHKLLTILNAILKHRTPWQPQEVQN

SEQ ID NO: 208617 - protein, 411 aa, unidentified
MEQIHDRVAGLDVHRDQVAACVRTPGPRGGVQTEKARFDTTTGGLAALAEWLAGHAVALAAMEATGVYWKPVYYALEGRFLVWLCNAHHVKNVPGRKTDMSDAEWLADVAAHGMVRPSFVPPPPIRELRELTRYRKTQIDVRAAEIARLEKVLQDAGIKLTSVASKVLTQSGRAIIEALIAGQRDPAALAGLAKGKLRPKIPQLTAALRGHFGAHHAIVAARILAHLDFLDETIGALDAQIAARVAERCQPAARLLADVPGLERRSIEVIIAETGADMSRFPGPAHLASWAGLCPGNHESAGKRRRVATTPGNQWLRRTLIESARAAARTKGSYFGAQYRQIARRRGPNKAAVAVAHSLLDVIWHLLTTGEVFADLGADYFTSRQDKEHQARRLLSQLEKLGFTVQLTDAG

SEQ ID NO: 208618 - protein, 404 aa, unidentified
MKVTYQTCCGVDVHKSFLVATIVKTTGGIEPSYQKKRFSTFNNSILEFKQWLLDNDCHDVCMESTGKYWVPVFNLLEDDINVVIANPKWVKAVKGNKDDTKDSKWIGDLFRLGLVKGSYIPCKKVRILREYTRYRYKLVSCRSSEKNRYQNALTVCNVALDSVVSDIFGKSSTSIIDYLLEQSGSSINHEEIPSKLLRSLKYKEDAVIESVEGYQMTDAQKYRMRLVRAHMDYITAEINDVDKMIENMISSNTDFENAVQFLCTIPGVKRDSAITIISEIGTDMSQFSSSRRLCCWAGLTPGSNESAGKKKSVWITRAGVYLKPALVQCAHAAVKSDKSPYYKKKYESLVKRRGKKRAIIAIARMILTAIYQMLSTGEQWHPSDLYKIDMPVALVEKQKAKAIK

SEQ ID NO: 208619 - protein, 368 aa, unidentified
MIVIGVDTHKRSHTLVALDAATGATRGQLTIAASDDGTLDAVRFAGKLDSERVWAVEDCRHVSGRLERGLLATGDRVLRVAPGLTETSRRAVREPGKSDPIDATAIARAAIREGLDTLPAAFLDEQALEIRVLNDYRDQIITERVRLINRLRWHLVQIAPEAEAAIRPAGLIGPQIRARLARKLGRLPHSPQLRIAKALLKRINEIYREELELLAELKTLIEAHCPQLLAEHGCGTVTAAIIIGHTAGAQRFTSEAKFARHAGTAPIPASSGNTQRHRLHRGGNRQLNRAVHIIALSRARTDPATRAYLDRRHSEGKTKREAIRCLKRHLARRIWHVLYATTPTPPAPPSRPANTVAIGAPGITPCTG

SEQ ID NO: 208620 - protein, 425 aa, unidentified
MKKTDYLSTLFVGIDIGSRTNVVSAIDFNQDFFIRMKPVPNAKEGAETLESLLVDVLSAHHEFNHVIIGLESTGFYGVHIANYLSASDLLAPFGTEVYCLNPKEVAKYKESFNSLDKNDGIDSFVIADFARVGRISIKPWRGAQYLALQRLTRHRLHIAECIAREKTYVLNNIFLKFSEFAMLKKEDHPFSNKYGATAEAILEQYVTNDDIIEASIEELVELIESKSRGRITDPEETARILKAAANGSYRLDKVVAEPITLSISSSFNCIRAFEKELKAIEKAIEHTVQGLNPVEYQVLKSIPGIGHVYAAGILAEIGTIKAFTGNGALAKYCGIVWKENQSGNFRAEDTKMSKAGNRYLRYYVIEATGSVINNCPEYKDFYDKKFAETTTHQHKRALALTSRKFLRMLFGLLDKSQLYSLERSR

SEQ ID NO: 208621 - protein, 370 aa, unidentified
MRIIGCDLHARQQTLAMLDTTTGEVVNLTLLHEGNSVREFYSKLPPPVLVGIEATGAMQWFLKLMEELGVECRVGHPAQIRAAEPRKQKHDRRDADLILKLLAENRFPAIWLPSKELLDLRALLLHRHQWVRMRVRMQNTLQAIAMANGLRRGPSLWSYDGQAKIAFLPLLPHAAYRRNRLQAMYKTMESEIENLNKQVAEQAGNRPGAQRLMTHPGVGPVTALATEVFLGDPQRFADGKALASYVGIIPREYSSGGHQRLGGVTKQGSPLLRFLWGEAGAHAARHDPELKRFYCRKLVHKGLGKARVAVARKLGIRLWIMLRDEIDYHEFCRRGQIQQKTVRPVVGMPETGNGAKSHRPSDEATRLPES

SEQ ID NO: 208622 - protein, 343 aa, unidentified
MSKISIVGLDLAKNVFQVHGVDASGGVVLRRQLRRGAVEKFFAQLPPCTVGVEACGSAHHWARVIGRYGHQVRLMPPAYVKPYVKRNKNDGRDAEAICEAVSRPTMRFVPVKSVEQQATMAVHTTRALLVRQRTMVANSLRAALSELGIVAAQGIKGLRELMAKLEAPHEEVPEIMRGALLLLARHWQSLEADERVLEQQIAKAARSDREACRLMEVPGVGPIIASTVLAKVPDATVFRSGRNFAAWIGLTGRDHGTGGKHRPGRISKQGDRMLRALLISGASAYLRHQRTRGVSDPWLRDLLARRPYKVVMVALAAKTARIIWAMLVKGEPYRDRASAPAAA

SEQ ID NO: 208623 - protein, 411 aa, unidentified
MRLFVGDDWAEDVHDIEVMDQAGKVLAKKRLPEGVAGMAQLHELTGRFLPGDAADAEVVIGIETDRGPWVAALIAAGYVVFPVNPLQASRYRQRHGVSGAKSDGGDSHMLADMVRTDSHQLRPAAGDSAEAEAIKVVARTHKTLIWDRTRAVQRLRHQLREYFPAALAAFEDLDARDTLELLGKAPDPARAARLTRAQVAAALQRARRRNIAGKTDAILAALRGEHLAQPAALTAAYAATARSLIAVITTLNEQVKALEEQVREHFGRHPDAEIYQSQPGLAAILGARVLGEFGDGPHRYTDGKARKNYAATSPITRASGKKKVVAARFIHNDRLIDALMAQAFAALNASPGARAFYDQQRAKGLEHNDALRRLANRLVGILHGCLKTRSLYNEATAWGHRENLPQSSVAA

SEQ ID NO: 208624 - protein, 415 aa, unidentified
MKILYDNCCGIDVHKKLLVCCFIQGKKQETKNFGATTTEILKLADWLAAGNCQMVAMESTGSYWKPLYNILESAELKAIVVNAQHMKAVPGRKTDVSDAAWIADLLQHGLLKASYIPNKEQRELRELVIYRKSLVSEKGRELNRLQKMLEGANIKLSGTVSRILGKSSRNLLEYVLNGGKITEDVLIKLQEEKKIASQLKASYSQLAEDMNGVLTRLQCRMLKEVLSHIDELNAHIANLDDEIDTNMTDGQKRAVEAIDNIPGIAKDTAKGIIAYIGTEMKRFPSAAHIASWAGVCPGNNESAGKRKSGRTNKGNNYVKSALVVCAHAASRVKSSYFSALFQRLSIRRGKKRAYLAVAHSLLIAIYHVLKNNENYKDLGADYFTKFNVERKIKSYLKKLTELGWDGDITSLRAQQ

SEQ ID NO: 208625 - protein, 343 aa, unidentified
MRLYTGIDLHSSNSYLAIVDETGKRVFKKKLPNDPEQILSAFAPYKDSIIGIVVESTYNWYWLVDALMAEGYKVHLANPTEIKQYKGLKYSDDQHDAFWLAEMLRLGILPEGYIYPKEDRPVRDLLRKRGHLVKLRTSLIISLQNIICRNNGFRLKTNDVKALTTDRVAPFLEQNEDLALAGKISKESIDFLTLKIKAVERVIEERMELREPYKKLLTLQGVGKTLGLTIMLETGPISRFAQVGNDCSYCRKVSTKWISNDKKKGKGNKKSGNKYLAWAFSEAAEIARRYYPEARAYYQRKMQKTNAMIAHQALAHKLARAAYYIMRDGVSFMPEKIFTQQSS

SEQ ID NO: 208626 - protein, 313 aa, unidentified
MEFESIIEKGFGIDVHKEMIMVCVQGKGIKKEIKEFSTFTEDLEKCKNWLKSLELEYGAMESTGVYWKPIFNILGEDFKLILVNARHIKNVPGRKTDVKDAEWICKLLISGLLRASFVPPEVIRNARDIFRYKTKMVEEVAREKNRVQRILEDANIKLSSVVSDVFGATGQKILKMFLEGETDEDKIVRECYHGKLKTSREDIKKALKGRFTEHHYFMIKQMFNHIAYLEGQIAELENQLDVLLSDYKTEIELLQDVPGIDKTAAVGIISEIGTDMEVFKNEHHLASLAGMCPGNNESAGKKKVQEQHKEINI

SEQ ID NO: 208627 - protein, 366 aa, unidentified
MKPNFEPGKWFMQCVGVDIAKSTFTACLCMYEFDMGCSTNPVVFNNNKTGFNQFVKWSRKEALKGYPLRFLMEPTGVYYEPLAFHLNKLGLDVCVVLPNKAREFAKYEGILTKTDDMDAYTLGMLGCLDKRLKSWTPPSPVYRELRQMTRFVADINKVRTELQNHLEALVHSETMERSIVKHYNKLIDEIDRQLAANQKAIREKIKQEPGLSEHIDRIVTIKGVGFMTVVTILAETNGFALITNRKQLTRYAGLDVPAHQSGPVDPKRHISKQGNVHIRTALYFPAIVSTQYNPQMKDFYGRLCARKPQSKMIGVTAAMRKLLLLIYSLWKSGEEYDPERNMPVSSKKKKEAETPEGQPHGIDVGT

SEQ ID NO: 208628 - protein, 440 aa, unidentified
MSTCLRTPAPEFAALVALDWGDRKHCWALRPVPEGAVESGELENTPEAIALWAAQLEQRFGGRPIAVALEQQQGAVVYMLSRHAHLVLFAVPSSMSAAYRKAFCPAGAKNDPGDTALLLDLLLCHRQRLRCYQPDTTDTRLLQMLVEERRQSVEQKTGVVQRLTDCLKQYFPQLLRWFGSPDRLLVADLLDQWPTLQQLQSTNPAPLARFFRQHHFGNEERIHQQIQDMYTAVAATTDAAVLEARTLRARALVRLLRTLWLTIAELEARIQQLVAQHPDAALFASLPGAGAATVPRLIAAFGTQRDRFDTAYQLQCFSGIAPVLKASGKTRTVQFRLACPKFLRQTFHEFAGQSVRYCAWAKDFYEYQRTRGVPHHTAIRALAYKWIRIIFRCWKDRQPYDEARYLASLRRRGALLGAVFARPPEIKWKSVAGFQKLSEI

SEQ ID NO: 208629 - protein, 368 aa, unidentified
MENKIDLSNAIYVGVDLHCDQITCCYLKPNGNVLNSVYYLKDDGLSKFKKSLCKNCHLLVEASTSTFAFQEAVNELAGSVTIVDARKMALIFKDKKKTDKVDARKLAIFLNMQMTSGHELIMAVYKPEKQIQELRSLFVTYKLFLKQLVQVKNRVHALTRQNLLSYRKQDIFTKKNREEILAMDFIGFKTQIKFLYESADRIEKDIQQIKELILLRGEKYSAEINLLTSIKGISVFTALALISDIADIRRFKNEKHLASYLRSTPSVDSSNAVTRVGKTSKFGRKMSITLLTQSVTHFRKGNSNLQSWVDKHASKSRGKVRMALCRKLICTIYHMMQNGELYRHMDDDNHTEKMSEYTKFLEKARKAA

SEQ ID NO: 208630 - protein, 277 aa, unidentified
MTNQPCFAALHVSLEKTTICVMLLDGTILREVVVTTDPNAIATCLAVDQERLERIGLEAGPLSEWLVRGLADHGITAVLMETRQVRAALSAMIVKTDRKDARGMAHLLRMGWFRPVHVKTMDAREQRTMLSARSTLMARLKDIENCVRGLLRGFGLRLPLLLRGRWDAGVREAVAGHPSLLQILDPLLTARRVLREQLILLDKRVRDAARVDRVCRRLMTTPGVGAIVAMTFRAAVDQPDRFRSSKKVGACFGLTPRKYQSGETNRDGACHRACDSP

SEQ ID NO: 208631 - protein, 314 aa, unidentified
MRIVGIDVSKDKIDAAIVAASAHRSFANSAQDQQQMLSWLDEHDVEKAVMEATGGYERPWAKLLQDGGIAVQIVDPRRVRHYAQAAGQRAKNDRLDAEVIALFGETFADEPGQLHDEDGSALDQLVSGRARLKAIAWQLGNWTEHAPPQEIAEACQAVAAVLEQQLERLDKTIAGKIEQTEHFAERAAIIESVPGLGSGSAAGLIAGLPELGLVDNKAIAALLGVAPYDNDSGKHHGARSIRGGRAKLRQLLYLPTVGAATRHNPVIKAYYQRMIDNGKPPKVALIACRRKLIVILNTMIARGEKWDPTKHATP

SEQ ID NO: 208632 - protein, 370 aa, unidentified
MPDTTTFVGLDVHARSIKAVSLDVMTGEVRCATFGYDAGAVAEWVRSVDPRARCVYESGVTGFDLQKRLSGLGVDCVVGAVSKMIKPSADRRRKNDRNDAEFLARMLSVGNVVEVWVPDDECEAARDLTRALEDARDDLSRSKQRLSKFLLRHGLAFDERTPTGRRKGNWTRAHWSWIESIRFAEGADNDVLAYYVDAVRRAAEEKARLEGLVEAEARKPRWRRRVDSLRCLKGVDTATAADLVFEAGEFSRFRNARSFAAWVGLTPSEHSSGESDRRGAITKAGNKHLRKTLVEAAWHYLTCSGRPKDLAKGQAPDRGARRHAAKGVRRLVERREALLARGVHGNKANVATARELACWVWAVGLMAEEA

SEQ ID NO: 208633 - protein, 369 aa, unidentified
MDKDTTYVALDDSKRKIVAGILRPRDAEPELREIVNDPRQIRRLLERLKREGPVAACYEAGVSGYDLHRQLTALGVECAVIAPALTPRRPGQRIKTDRRDAAKLVRLFRAGELTAIHVLDESEEAVRDLVRCRDDLRRDVLRWRHRVLKLLARHGRAYLSGKNWSQGHWRWLREQRFDLPPLQRAFEATVFALEQALARQAELDKELEAVAGTAPYREPVGWLRCFRGIDTLSAIILLAEIVDFQRFRRPRELMAYLGLVPSEYSSGESQRRGALTKAGNSHARRVLVEAAWHYRHRPTIGRALASRSQGQPDEIVGQAWRAQQRLHRRYRHLVGHGKRPPIAVAAIARELVGFIWAAMTRPENRRQAA

SEQ ID NO: 208634 - protein, 354 aa, unidentified
MKQGTQLDFSGQTIFVGIDVHKKSWKVSLRSTHMELKTFSQEPSPKALSGHLQQNYPSADYRLVYEAGFCGFGYQRQFSELGMSCIVVNPADVPLTDKEKQRKSDTVDCRKLSKTLSEGALKGIFVPGIEQQDDRGIIRVYQQMIKDQTRYKNRIKGWLNFQDQSVTVDTDKYWSNHYICLLKALCLPSSARINLDILLQGYQQTRIMVLTATREVRALSRQPRYQQIIKLIRTIPGIGEITALLFVTEIGDIERFDSLDALCGYIGLVPDMHSSGDQKIILGLTKRAHHQLREKLIEASWIAVRLDPAMTLAFNNLCKKMKKNKAIIRIAKKMLNRIRFVMKNQKPYVTSVVK

SEQ ID NO: 208635 - protein, 381 aa, unidentified
MQSIKTWVGVDVSAKTLMAKRRRKNGDKEEAREFSNDAAGHRELLKWIGKGARVCMEATGVYHLQLALMLVAARVEVMVINPRVAKDFGRALMNRSKTDRVDASTLLEYVWRMEFVAWNAPRAAVLELRELGRRLSELVHAGAEEKNRFHAKNVAAISSTVIRDVQAHVVQIEKRVKQIEKAAAVVIRGDAGLSEQFAILTKIPGVAQRSAILLLTELAVLDPAMTVKQIVGHAGLDPREYESGSSVQKPTRISKLGNARLRAILYMPTLTAIRHNRGARLFFAQLLARGKKKMQAIVAVMRKLLHGLWIALQRRVTFDGSILFAASLAKAESSDSAVAANQPEPRQDHPKGRSEAQELRQQLDPVSAQATRSRRRRSKAA

SEQ ID NO: 208636 - protein, 316 aa, unidentified
MAMRVSKAIVGVDVAKAELVIYLADPDLLTSITNEKLAIKRWLKTLAGPTAIAVEATNIYHVDLVELAHESGHDVYIIDGFQLSNYRKSIGGRSKTDASDARLLARFLKNEGEDLRPWTPPPAVYGKLQSLLRRRASLIRAKTSLTQSWANDASLKGVFATFIKSIERLDLLVQKKLKEVLREAGLLEEVARCQAIEGIGFLTATALVMAYNRGDFTSGDSYIAFLGMDLRVSDSGQKNGRRYLTKRGCSEVRRLLHNAAMSACRSNAWKEFYNHHLSCGKATTQVLVMLGRKLARIAFALMKNQSEYQSKGGVMA

SEQ ID NO: 208637 - protein, 346 aa, unidentified
MKFTLLAIDLAKNSFQLHGIDERGNAVLRQQHNRKKFIEFMGQCPRTIIAMEACGGAHYWGRKFRAQGHEVRLMAAKFVKPFVKSQKNDRNDAEAIAEAASRPSMRFIGIKEIWQQELQSIHRVRTMLIHDKTALSNQIRGFLTEFGIIAPVGFANLNTLVQSALEDGDNDLTGTLRDLIADLWSRVLDIDSRLEKINHQLKTISREREPCKRLCEVPGVGPTIATAMVSAIGDPKTFKNGRDASAWLGLVPRQHSTGGKTVLLGITKRGDRTLRSLVVQGARSLVLSVQIKKEIAPEDRMGNWIKKNLATKGFNKTAIAVANKNVRIMWALLAREESYRPAQMAS

SEQ ID NO: 208638 - protein, 343 aa, unidentified
MQIVRIGLDLAKYVFEIHGVDAQGKTVVRRTLRRHAVSTFFANLPPCLVGMEASNGAHFWANALSDLGHDVRLISPQFVTPYVKSNKNDRNDAEAICEAVGRPSMRFVPVKSAEQLAVQAVHRIRSRLVADRVRLVNQIRGLLGEHGVVVAKDIGNLRRALARIVDDEDRVLNPLARALMAELREELAELDARIGGYDLKIRELYRNSEICQRLGKVEGIGPVTATALVAAVGDRSSFKNGRQFAAWLGLVPKQRSSGGRARLFGISKRGDRYLRTLLIHGARSALERVRDKQDPRSLWLGRMRQRRHPNIVAVALANKNARIAWSLLTSDSVYDVRLSVRAS

SEQ ID NO: 208639 - protein, 344 aa, unidentified
MDHYAGIDVSLECSSVCVVDAIGKIVREAKPASEPEALIAWFRSLGFELARIGLEAGPLSQWLYAAMKKAGLAVELLETRHVSDAFQAMPVKSDRNDARNIAQLMRLGWFRPVHCKSMSAQETRAMLTARKLIQSKLQDVENSLRGLLRGFGLKVGKTTKRCFAVRINELAAGHPALEVIAKATLAVHAVLLREFNGLEKRVRAMSVLDAKARLLMSTPAVGPIVSLTFACAIDDPSRFTSSKRAGPLFGLTPKKYQSGETDYSGRISKTGDASVREALYEAAHIMLTKPIKGCAQLKSWAMRIARRAGMNKAKVALARKLAVIMLRMLKDNLPFNPAATAATP

SEQ ID NO: 208640 - protein, 400 aa, unidentified
MKNRNNQKLEAITPKTLIVGVDIAKETQWARFVDYRGIELGKALKFQNDKTGFETILASIEAICKNKRLDDVIVGMEPTGHYWKPLANYLLMHEVKVVMVNPYHTKKAKELDDNSQTKSDKKDALTIAKLVRDGRYYEVYMPQDIFGELRVLANARISLMKRHNALKNTITAVMDEYFPEMKLVFKNPLNGKASMQILKTCPFPSLILELGVEGVLAEIKKAVKKTVGRKKAQQLVETAQNSIGVSYGTVSSKLKLELMIEELELLTKQLDQVESTMELALAATGIGEIILGIPGIGVVTAASFLGEIGDPLRFDHPRQISKMAGYNLVEDSFGKSKSGTAISKRGRKNLRSILYLMAMTMVAVNKEMKELYQYLKTRETNPLKKKQALVVISKKIITVI

SEQ ID NO: 208641 - protein, 310 aa, unidentified
MTILCGVDVSKSWLDAWIEPPGHQRFANTAEGVAELGAWCRAHHAALVVMEASGGLEQPAYLALWQAGQPCAVANARSVRKFAEAMGYLEKTDRIDAMMIARFADAKRMVATPPPSADQQRLVALAVRLRQVTADLGVQKQRLHSVRDPFARQSIQEAIAFFTTQASQLASEIAALIEVDPLWVALDRTFRSIKGVADRTVAYILAELPEIGTISNRAVTKLVGLAPLPDDSGQRRGRRSIRGGRAGLRSILFLVADVARRYDQSLTDFRERLLARGLSKMEVRIALARKLLVRLNAKARDVRAELAHAL

SEQ ID NO: 208642 - protein, 323 aa, unidentified
MNKSTKFYGIDISKDVFDVTDQKEVHYQFTNDIKGFKKFKKILDENSHCVMEATGYYHYKLAYFLQENEVLVSVENPLSVKRFIQMKLSKIKTDKSDSKMICKYAESVDLRIWEGESKDQQECLQMTRSLSIYKKQSTMLKNKIHGEEVLGVPSKFVLRSLKRSLKHLQKEMKLIEEKLLELVKKENQELLTLLESIPGIGRKTSVMLLVLTDGFNRFQSASELCSYAGLTPMIRSSGSSVNGRPRISKIGNQKLRNLLFLCSFNACKYNQACKSLYDRIVAKGKSKKLALIAVCNKLLKQAFAIAKSRLPYDPTYRSTLSVN

SEQ ID NO: 208643 - protein, 349 aa, unidentified
MLADELDYVIGVDTHRDRHTLAVVAAGTGAVEAQTVVAARARGYAAALRFADRHAGGARVWAVEGAGHYGAGLSRSLAEQGETVLEVGRQARGERRLRGKDDTLDAIRAARSGLAAETLALPRVGAHQEALRVLLLARRSAVDVRRVALVQLRSLIVTAPEPLREELRRLPLGQLLRRCSRFRRSDSRPVDQLAIVLTLRSLARRIEAATVEADELEREILTHVRALVPDLLNEPGVGPIVAAQLIVTWSHPGRLRSEACFARVAGVAPLPASSGQTIRHRLSRGGDRQLNRALHTIILHRRQHDPATRDYIARRVAEGKSTRDATRLLKRYLARHLYRVMQRTAPAMT

SEQ ID NO: 208644 - protein, 350 aa, unidentified
MPRKFDTAVVTIGIDPGKNTLHLVGLDARGEIVLREKVARTKIVSRLANVPPCLIGIEAGMGTHYVTRELLALDHDVRQVPPVYAKPFRQTHKNDFRDAHAVAEAVQRPTTRCVPPKTDEQLDLQALHRVRYRLVGQRTAIINQIRCFLLEHGITVRQRLHWLRHALPDILAQRIDVLSPRMVRILEDLAQDWRRLDDRIEAVTDEIDALSKNTEPCRHLMTIPGIGPIISSAVVAAIGNGTAFACGRDFAAWLGLVPKQISTGDRTILGRITKRGNRYLRMLFLQAARVVLLRPKNWMKHGFGPWLAAAAQRLHHNVLATALANKLARIAWSVLVQQREYEAHLSVAAI

SEQ ID NO: 208645 - protein, 366 aa, unidentified
MENHSIVWVGMDTDAKKNHVALYRGLEGEPAAEWEAGMDAKGIKQLIGRLKKETGEVRCVYEAGPSGYPLCRKLRQAGIGCDVIAPSLTPRKPGERVKTNRRDARKLGRLYRAGELTVIVIPDEAQEAVRDLTRVREDVREDCTRRQHRLSRFLLRHGYMYQEGDKWTLKHWAWIRKIRFEDSNLQTVLEESIRAVEQTQEQMKTLDARIEENAQKPEYAPKVARYQTLRGIRTVTAMTIVAEGGDLRRYARAPEFMGSTGLVPSEYSTGDHERRGRITKTGNAHLRRVLVEAAWQYRHRSIPGASVKKRRKGQSPSIVTIAERADQRLCRKFRKLVDRYNKKPVIAAVAVARELAGFIWAIGQQE

SEQ ID NO: 208646 - protein, 348 aa, unidentified
MTITTVGIDLAKNVFAVHCVDQHGKTVLVKPKVSRAALPELIASLPPCVIGMEACSGAHYWARLFRQYGHEPRLMAAKFVSPYRMAGKSGKNDAADAQAICEAVRRPHMRFVPVKDESQQAMQCLHRIRQGFIEEKTATYNRLRGLISEFGVIAPQSTDALRHMVSEQKSSLPLQVQQCVNDLLEHIDRIEDNITEYDRILSRMAKTDHRSQRLMELKGIGPTTACALVASIGNAHDFKNGRQLAAWLGLTPSQYSSGGKSKLGRITKAGDSYLRTLLVQGARSVLIGAGKRTDLFSRWVCSLVDRRGYWRAVVAIAAKNARLCWHHCITVMISGCTQPAKARNKITI

SEQ ID NO: 208647 - protein, 331 aa, unidentified
MKEKEIILGIDVSKASLDICILINNQTELRRIKNNTKTIKSFISKVLKQNQGFRIVVCMENTGYYYWPCLEAFEGIEMDLFVVNPLHLKNSMGLVRGKTDSIDATRIAKFILLHKENLKQTLIPRKQIRVMQALLAQRNRLVETKKKFSVPTAELVFIADKELSKKVEQSSKKIIKQIETQIIAVEAQLNELIANDEDLKQQYQFITSVQGVGKVLAWTMLVKTNEFKSINNPRKLACYAGVVPFEFKSGTSIYKRPRVSFMADKTLKKLLHLSALRVIQLKGELQTYYQRKVSEGKNKMLVLNAIRNKLVARICSTINNKKMYEINLHLS

SEQ ID NO: 208648 - protein, 374 aa, unidentified
MLSARPAGLSHPPLSGRETAITTIAHAEPIRVTVGVDTHGDVHVACAKDQLGRNLAATRVATTPAGYQGLLDWARGLGEVEAFGVEGTGCYGAGLARFLDSHGQTVLEVNRPDRSARRRRGKSDLVDAEAAARAVQAGEASAVPKAGDGAVEMIRALRVARASAVKARSQAANALRALLVTAPAELREQLRGLPADRLAQAAARLRPGPIVTTTAATKLALRLLGERYRALGAELVAVDADLDRLTAQAAPALRQLYGVGAEIAGALLVAAGDNPGRLRSEAAFSMLCGASPIQASSGKTVRHRLNRGGNRQANTALYRIVVVRLRWHQPTRDYLARRTTQGLSKKEIIRCLKRYVVREVFAALQLGTAQTQAP

SEQ ID NO: 208649 - protein, 425 aa, unidentified
MNKQSQQTDTPQNLSDAVVVGIDWADREHVVCIIDRNDRTTIETLKQSPQAIDAWVAELRRRFPGKTIAIALEQSKGALIHALMKYEHLVLYPINPKQLSRYRDAIHPSGSKNDPGDAKLLAWFLKRHADQLRPWKPDTEATRKLARYTEIRRKIVEERQRLAQQLGSLLKGYFPLMLELFPSKPPLMMALIKRWGSLEKLKRVHPKTLRTFLKENGMRDQDKQTQLIEAVRAAVPLTRDKAIIEPNALYAQMLAGQIQNLSNTLKQLEEDIATAVAAHPDEKIFRALPGAGDALVPRLIAAFGSDRDRYDSAEEIQCYSGIAPVTRQSGKTRHVSRRHACPKFLKQTFHEFADHSRKWSPWSAAFYHQKRAAGCRHQAAVRALAFKWIRIIFRLWKTNTIYNEDLYIQQLKKRNSPIVKFLQNV

SEQ ID NO: 208650 - protein, 343 aa, unidentified
MQTITTIGLDLAKSVFQVHGVDAGGQVIVRRQLKRRYVVTFFQKLSPCLVGIEACASAHHWSRELQALGHTVRLMPPAYVKPYVKRQKNDATDAEAICEAVTRANMRFVPTKTPGQQSGLLLHRARHLFIRQQTSVINAIRAHLAEFGIVAPVGRHGVEELLNVVADPNDKRVPEIARACLSAFGAQLRRIKEQVLEFDRLIRAWHRSNELSMRLDEVPGVGPVLATALVAAVADPKSFRSGRNFSAWIGLVPKQHSSGGKNRLGNISKQGDRYLRGLFVAGALAVIRYAKIHGTTHRPWLTALLARRPTKVAAIALANKIARMVWAMMARGERYKEPFALAR

SEQ ID NO: 208651 - protein, 369 aa, unidentified
MTDLTLFVGLDVHKKTISVAVVEAAAGAVVRFYGTIANTPDSVRTLCRKLSKDGQQLDFCYEAGPCGYGVHRQLTRLGHRCDVVAPALIPRKVGDRVKTDRRDAMMLAQTLRAGQLTAVWVPDEAHEAMRDLVRLRTQAMRDLRKARQQLLSFLLRHGRNSPYGHWTKMHRRWLGELVFAHPAQHLALEEMLQRIERAEALCDRLKAAILELVPQWSLAPVVQAIQALRGVSLIVAAAIVAEVGCFSRFESPRALMAYLGLNPSEHSSGATIRRGAITKTGNTLARTCLVEAAWTYRFPPRVSQIIRDRLKELPEPIRAVAWKAQVRLSARYRKLTAAGKPGPKVVVAIARELVGFIWAIARMVEPKFA

SEQ ID NO: 208652 - protein, 456 aa, unidentified
MRTIGIDLGVSAAHRAVIMDEQGQFTTPVLTFRASWQEIKGMVARAREGVEPDHPLQAVMEPTGMAWFTVAVPLSRLGVTVYLVNGRKVKDLRMYFKRHASSDRVSARVLAKLPLIDQESLYPLILATPAQLACQRGCKQEDRLQTWITAIHNRLLDTDRFAWPGLERLLPDTIGPVARLFREEWYDPVRVVEAGADNLREALAAVTDPKDDLAWVDSLVELALDILTLYGLEALDYSLLQEEVGREQRLLAKLEEEQTAINEDIIQPLHHQIHPSGHLESIYGVGKKGAPVFASFIGSADRFPDARHFRGWHGLVPDSRQSGNTEVKGLSISQAGPDLVKKFAYMGAITAKRCDPQIAAIYYDQMVHKGKHHTQAVCACATHLMDRVWVVLRDDRPYELRDVDGTPVTAEQARAIIAERYIVPEEVRKSNTRRARRERQEWRLEQKEQKGSRSRR

SEQ ID NO: 208653 - protein, 321 aa, unidentified
MDKYNEIYGVDISKDVFDVMNSKGKYVKLSNDESGFKKLVKTIEKDSLIVMEATGYYHYCLAQYLYHKGYLVSVVNPLSVKRFIQMKLSKIKTDKSDAKAICEYACVNEVPLYTGKNKNQAECLQILRMLEVYTKQSTALKNKEHGEKTLGKPSKIVYHSLNRMLKSIKREVQVLEKRLLELVKEEQQDQLTLLKSIPGMGVKTAMMLIVMTDGFERFENSKQLCSYIGITPTIRQSGSSVRGRSRISKMGNRQLRSLLFLCSFSAYKYNKSCKDLFDRIVAKGKSKKLALIAVSNKLLKQAFAIVKSGLPYDENFVSKLS

SEQ ID NO: 208654 - protein, 338 aa, unidentified
MAIVMGLDQHRAQITADWLNTETGEVRRARLTPAHRDGVRQFLGRFAGQQLEVALEATTGWRFVVEELQAVGADVHLAEPAETSSLRGNKKRAKTDRADARHLRELLMVGRLPEAWIPPAHLLDLRARVRLRHTLVDQRGEWQQRIQAVLYHHGVAQRRDLLTVEKRQWLEELDLPAAAREQVTVALTVIDALDAQSEPLTRELRAYGRRQPGCRALMAHYGIGALTAVTILAELGDARRFSSSRNAVRYAGLDITVHQSDQRRAPGHLSRQGPPALRWALYEAAQLSRRAGSPDHAYYEQAAARLGGNRACLAVARKLLKRSYHTLRELGDEALQPA

SEQ ID NO: 208655 - protein, 386 aa, unidentified
MSRPSNILLPAINYDHTLVLAIELSNKSWVLAAQVPGLPRTKAQRTIEPNKNALLAAIDGYRARAAALGYTVDRVITTYEAGWSGFWLARWLVAQGVEVHVVQPSSVPVDRRLRRAKSDGIDAELLLRTLLAWLRGEPRVCSMVPIPDEADEDARRPVRERTELLSDRVGLTNRIGAVLATLGVNDYNPLLQSRRRRLAELRTGLDEPIPPNALGKIERLLARLELVLAQIAELERERDEVAAADAPDRAGKMIQQLASLRGIGVQSATVLVREAFVRHFPNGKALGSYAGLTSTPYSSGGIDREQGIGKAGNRRLRTVMVELAWLWQRYQPGAAQVAWFRDRVGSTGRRIRKVMVVALARKLLIALWRFVIDGVMPEGAVMKPSI

SEQ ID NO: 208656 - protein, 334 aa, unidentified
MENIALIGIDLGKNSFHIHCQDRRGKAVYRKKFTRPKLIEFLATCPATTIAMEACGGSHFMARKLEELGHFPKLISPQFVRPFVKSNKNDFVDAEAICEAASRPSMRFVQPRTESQQAMRALHRVRESLVQDKVKTTNQMHSFLLEFGISVPRGAAVISRLSTLLEDSSLPFYLSQLLLKLQQHYHYLVEQIKDLESQLKRKLDEDEIGQRLLSIPCVGTLTASTISTEIGDGKQYASSRDFAAATGLVPRQYSTGGRTTLLGISKRGNKKIRTLLVQCARVFIQKLEHQSGKLADWVRELLCRKSNFVVTCALANKLARIAWALTARQQTYEA

SEQ ID NO: 208657 - protein, 367 aa, unidentified
MKNGSTGARKQSRNISQQKLTIGLDLGDRNSWYCVLDECGQIQLEQRVRTNAKGLREVFEAMPRSRIALEIGTHSPWISRLLSELGQEVIVANARKVRLIGESRKKDDRLDAQTLARLARIDPELLYPVKHRSQQAQADRTLIRARAGLVRARTALVNTARGLAKSYGERLPGCNVGNLNPEKAESLSPELQAALEPLLNAIESLSERIVEYNQRIENLAQQSDPRVALLKQIKGVGTLIALTFLLRLEDPHRFAKSRDVGGYLGLQPGRRNSGQSEPQMHISKEGDPYLRTLLVQGAQHILGPFGPDWDLRRWGLKLAERGGRNGKKRALVATARKLAVLLHHLWVSGEVYEPLHNSPRTTVAAAA

SEQ ID NO: 208658 - protein, 398 aa, unidentified
MTRKNTLKSLPTDTEFRVVGLDLAKSDVSVAAIPVDDNTPSLVDRMTYADLLDWAGKISPTLFAMEPCNGYSLLCLQLENLGHEIKVISGSTVSMWINTHLSGQKTDLNDAIALARLAVSDAELTPIRHKSITEIRIQTVQAVRQQLMSQRSKSIVSFKALAQQWGIPCAAGHRNLKKLRESIEAKVDLITRPVANAMLFLLDAVKSLDRQIGQLNQTLQELVMSDERGRLLQSVLGVGTQISARVIIVVGNVERFNSPRSLVAYVGVAPRNFITGHKNLTKKKHGNCPDLSHKGQGKISRRGDKLLRSLFIQGAACLYMQFCKDQLPECQLKRWILKQLAMQKPYGKLIVSLAAKLIRIVWAVLTYREKFNIQKAGMTRSMWSEMALETPLNKEVPA

SEQ ID NO: 208659 - protein, 359 aa, unidentified
MRSISLVGLDVHAAQTHAAILDVETGELRGVKLRVAPIEVVEFLGSLPGPVQAVYEAGPTGFGLARYARERGIDVRVVAAGKVPRASGDRVKTDRRDAERLARLLAAGELRFAFVPTVADERFRDVVRAIEDVRGDLMRARHRLGKMLLRRDIRWAGPGSAWTVKHMAWLRTLRFSDPCSTAVFIDYLSGIEMLMGRRAALVAALEQAIPDSTHAPVVAALRCFRGIDTLSAAGLCAEIGDWQRFRPKRLSGFLGIVPTEHTSDTRRRQGAITKAGPVHARRLLVEAAHHYRHRPAIGDSLRRRQDSQDPRVIEISWRAQRRLHDRWSVLKGQRHKPHGVVAIAVARELAAFCWEAATL

SEQ ID NO: 208660 - protein, 339 aa, unidentified
MNVTRMGIDLAKNVFQLHGVNEHEKIVVRKQLKRAELLEYFVNKPPMLIGIEACGGSHYWARMLSKLGHTVKVMAPQHVKAYVKSQKNDKRDAEAICEAVSRPTMRFVAIKSEEQQDMQAIHRVRDRLVKARTALANEVRGLLAEYGIVIAHSGVPATRRGLLQALEDADNGLTVKMREILFDLHEELDAIEIRIQRYLQKINQHCTQDERVQRIMEIEGLGPISASAIVTAVGDAKQFKSGRDMAAWIGLVPKQYSSGGKEKLGGISKRGDKYLRTLLIHGARSAMRCSNTKTDKRSTWINALIARRNKNIATVAMANKNARIIWSILTRGEGYRAVA

SEQ ID NO: 208661 - protein, 315 aa, unidentified
MTNLKMSKSAVHVGIDVGKFVLDVCIHEKQLHWQDENTDEGIKRILKRLSYYQVERLVMEATGRYEFELAQAAHKKKLPVCIVKPLRVRRFAGAIEQNAKTDKLDAELIAEFAFRVRPEITPEKSKNLLAIKHLIARRRQLMIMRTQEMNRVQIMDKSLEVSCKRIVRILDQEIMRIEKRLSKHVEDQAEWTEKQQILKSAPGVGDTLVYTLLADLPELGNLNRKQVSSLVGVAPINRDSGKMKGKRRVQGGRHTVRTILYMATLSATQCNPVIKAFYQQLVAQGKHKKVAITACMRKFITMLNAMVRDRCEWAY

SEQ ID NO: 208662 - protein, 343 aa, unidentified
MSGVVTIGLDLAKSIFQIHGVDDAGLTKLRRRLSRHELVPYFAKLPPCLIGMEACSAAHHWARELSRLGHSIRLIPPQYAKPYVKRNKTDAADAEAICEAVARPNMRYVPIKTLDQQSVLSLHRVRALFVRQRTAAINTVRGLLTEFGIIAGKGIGRIAELRRRANETASEMLPGEARAAITEVFEHIEALTDRIDATEAKIVAWHKSSDTSLRLASAPGVGPITASAIVASVGDARQFRSARHFAAWLGLTPRLHASGGKEHVGRISKGGDRYLRALLIHGARAIVGTSFRKDIPPRPWLKQLLARRSVNVAAVAVAHKTARALWAMITREEGYRRIAVQAA

SEQ ID NO: 208663 - protein, 341 aa, unidentified
MKEYYYVGLDIHKKTITYCVKKPDGEVVDKGTVRATRRALAQWVETLPRPWAGSMEATLFTGWVYDFLLPHADELKVGHPLMLKAIGASKKKSDRIDARTLADLLRCGLMPECYMAPQEIRELRRVLRYRNLMVQESSRMKNKTAGLLMEMGAQYSKRKLHGKRYFSDLLQNLDEVPPSVVELLKMTRAGLEMFASNQKRLVEALENHPALRERVRRLMTIPCVGVVTALTWALEIGEPQRFASQKQAVSYCGLCSAQNESAGKAKRGPLSKQRNKHLQTILIEAAKLAPLWNQQLDAEYVRQRQRGANSNRATLAVARKLVAYLLCVDKTRKDFEYRTAV

SEQ ID NO: 208664 - protein, 415 aa, unidentified
MNRLIECCAMLDIHKSQITACVRIPDDAGGRRQEIREFASTTSGLLTLADWLRSFAVTVVGMESTGVYWRPVFYLLEDEFECRLFNARHLRHVPGRKSDVQDAEWGCQLLEHGLVRASFVPPRPLRELRDVVRYRKAKIQERTREVQRIEKTLQDAGIKLSSVASKVLGVSARKMLEALISGTHDPELLADLAKGTLRKKIPALREALQGRFTGHHALLVSQMLAQIDFLDETIGTLSERIEELTRPYSHELELLDTIPGVDRRAAEMLLAEIGPDMSRFPTDAHLASWGGLCPGQRESGGKHHTAATRKGSKWLRGTLTESAKAVVRTKGTYLSARYHRIKSRRGHAKATVATAHKILTAAYHVLNQRVPYHELGEEFFYRRDTENTERYRRRLIKQLERLGHKVTLQPLPEAA

SEQ ID NO: 208665 - protein, 330 aa, unidentified
MRKDTEAGIDVSKDVLDVAARRDGARLETARFGNDAAGHRTLVRWLTTRSRTVRVVLESTGTYSLDVALALHRARGVAVMVANPRAVKQFTGALMQRSKTDLTAAAALCEYAVRMPFVAWQPPAGEVLALRGMARRIAALVVERTREHNRLHAVQATAERVAVVVHDIEVNIRHLERRIELLTADAVALVHEHAELARAFERLTSVPGIATHSAVQLLPELLVLPEDMTVRQWVAHAGLDPRACQSGTSVNKPARISKVGNAHIRRALFMPALVAVRHDPHVQAFFDKLVARGKKPIQAYVAVMRKLLHAIYGMFATETTFVGEKFHAAA

SEQ ID NO: 208666 - protein, 294 aa, unidentified
MYAAIDHHKAVFQAAMLDPQTGVAADERFEGSRGGLASWVARWQGRVTDVAIEASTGWRWITQELEAHGIRVHLADPAEARAKRGRTKKAKTDKLDARWLVLLLAKQDLPEAWIPPEEIQQLRAQTRLRKALADDRTRWAQRLHAVLHHEGWPCRRSQLLTKKGRQWVAALRLTGAAQQQVSAYLFLIETLEAQLQPLENELRHFAEGDPRCQALMTLFGVGPIIACHLLAEIGSALRFRRSRQLVRLSGLDPIVEESGERRRRGKLAKQGPPLLRWAAVEAAQHGRRYNSPER

SEQ ID NO: 208667 - protein, 320 aa, unidentified
MTSRGAEKMKNDTIGVDVSKDHLDAHRLADGATRRFANDKGGHKALIKWLAETPLNRVVFEPTGPYHRAVERALGASGVPFVKVNPRQARRFAEATGKLAKTDRLDAQILARMGALLELEARPARSEVLLELKELYVAREALVKDRTAAKNRGKALTLSLLKRQNAQRLEQIDRQITTVEAAILQIVEADASLADRFAILISIPGLSNITAFALLIAMPELGALEAGQAASLAGLAPIARQSGRWTGRSFIRGGRADVRQALYMPALVAARFNPDMKVKYAYLIEAGKPAKVALTAIMRKLVVLANALLKANRTWTPRTA

SEQ ID NO: 208668 - protein, 330 aa, unidentified
MNYVGLDIHTENIVYTVLSDDRNVKMRGKIVNDIEYIIEFLRNFEDGDLFVMDSTGFYEPIYDTIESKGFKVKLANPLKVKLIAESRIKNDKIDSEILARLLKNNWVPESYVPDKKIREIRRIVRTRINLKRVSTGFKNRIYMELKRLKIDYDGNLFTLEGRHFLRTLNNFRINIYLNSLEDIEKEIKIIENEIQKYSDIEEVKLLMTIPGIGLFSALIIYSEIGDINRFSNSRKLISYAGLNPTTRQSSDVIYHGHITRQGSPYLRWILTECIHIHLIKDSHSNLSNYYRRMVKRIGKKKAIVASASKLLKIIYWILKEKREYIKNYAQ

SEQ ID NO: 208669 - protein, 345 aa, unidentified
MDTRTMAVDLAKNVFEVAVADEQWRIIERRRLSRLQFQRYVATSSATHVAMEACASAHHWARTLQGLGMRVSLLPAQYVRPYVRRDKTDRADVAAILEAVRCAEIRPVRVKSVEQQALQGLHRVRTMWMKTRIARINALRGLCGEFGVCAPAGAREGVRQLSLVLGEESSPIPKLLRPALRLLVEEIRALEERIRALEGELAILSRDSEVCRRLQTIPGVGLLGATAFLGSVGDIGSFRNARRFACWVGLTPRESSSGSYRHLGRISRLGDNYLRRVLIHGARAVLYSAHVARRAGRPLDRLRAWALKLEARSCHNKASVAIANKLARLVWATWHHQEDFEFRPA

SEQ ID NO: 208670 - protein, 427 aa, unidentified
MISASIERCAGIDVGKKFLAVCVMVGPLEGEPRVEIRKFGTIRAELEGLRDWLKQQGVTHVVMESTGSYWKPVFNVLEDAVKVYLANPQEVKNRKGHKTDNKDGWWLAHLLRHAMIHPSFIPPPAIRELRDLTRRRKRLLGTGTSERNRVQKVLEDANVKLGNVLTDLFGVSGQLMLEALLRGQAKPEEIAQFAKGRAKKKIPEMIAALEGHQMSDHHRRMIRYSVDHMRFLEEQIAQLDKDIAARIREAGLEPQWQLLQSVPGVQETSAAAILAETGTDMTQFSSEKHISSWAGICPGNNRSAGKNRSSHTTGGNQWLRGTLTECAWAAAAKKNCFIKDKFWRITTKSGGKKASAVVAIAHTLLILIYQALHTGQPYQDKRLPVPDQRQKQRMIRHHIRRLGKLGIAVYSPRPGSPAIAASPPTST

SEQ ID NO: 208671 - protein, 396 aa, unidentified
MPEIWAGVDIGKTHHHAVVINAHGERLLSRRVRNDESELLELIGDVLDISRDVLWAVDLNHGGAALLIGLLVDHGQPVAYLTGLAVHRAAGTYRGEGKTDAKDAFVIADQARVRRDLGLLRPGDEIAVDLRTLTTRRLDLVFDRTRQINRLRAQLLEIFPALERALDLTNQGPILLLTGYQTPAAIRRAGARRVETWLKNRKVRSAAALAKTVVEAAQAQHTALPGEKLAAAMVVRLAKGVMALDEEIAELDALIEARFREHPHAEVISSMPGMGPKLGAEFLAATGGDMDVFGSSDRLAGFAGLAPQPRDSGRVSGNLRRPRRYHRGLLRSMYLSAMVSLRCCPASKAYYDRKRREGKGHKQAVLALARRRVNVLWAMIRDGECYHASPPVTAVA

SEQ ID NO: 208672 - protein, 371 aa, unidentified
MEALVFTERTTIGLDVHARSVRAAALDTVTGELREAKLGGGTGEAVEWVLAAQRDFGIAAVAYEAGPTGFGLARAVEAAGVRCVVAAPSKIRRAAGDKVKTDAKDALLLARMLRMDELTAVRVPTITQESARDLVRAREDARIELMAARHRLSKLLLRHGIVYDAQAWTGRHDAWLRRLRVDGLDGAGVGTLAAFDAAYDTVTMTLARRDRLDEQIEQMARDSEFSDVTRRLACLRGISTLTGFALAVEIGDWDRFTGANIASYLGLVPSEHSSGESRTQGGITRTGNQHVRRLLVESAWHHKPVYRPGSTLQQRWKLAPAAVVARADAGNRRLNRRWQVMTARKKRHTIATTAIARELSGWCWSLATMDA

SEQ ID NO: 208673 - protein, 420 aa, unidentified
MKSPSNMEFTAFVGLDWADKKHDICLQAAGCEDREFDRFAHQVTAIEQWALALHQRFGGRIAVALELAKGPIVYALQKYDFLVLFPINPSMLAKYREAFKPSRAKDDPTDAELALDLLVRHRERFQPLQPQSEPMRTLAYLVEQRRRLVDDLVRYTNRLVIALKQYYPQALDWFADRDTVLFCDFIQRWPTLMQVKRARKASLVTFFRTHNMRFPELIERRICAIKAAAPLTQDGAVITAYKLQAQVLVEQLRVTLQAVRRFDQEIADLTPKLADYAFFRALPGAGSVMAPRLLVAFGERRDRFAGADECQKYFAVAPVTERSGDKTWVHWRWHCSTFLRQTLVEWAGQTINKSFWAGVYYRQQRDKGSSHQAAVRALAFKWVRILYRCWQTRTPYDESKYLEALRRRGSPLIKQLGETM

SEQ ID NO: 208674 - protein, 327 aa, unidentified
MKKNPAPVYVGMDVAKATLQVHLNGHQFEFKNDSKGHARLSEKLAKLTLPHVICEATGGYERPMVEACHKAAILVSVLNPAHTLAASQAQGKRAKTDPCDAAALTDYGQRFQPAPTAAVSPAIREITELTLWLKQLIDNRAVVKTQAEHQANAFVGQQHEALLAYYESQIETVEKEIKKMVQAQAPFQQRLDCLTQIEGVGFRTALLALVFLPELGSMNRGGTAALAGLAPWTRDSGTLKGKRCIGGGRAQVRPVLYMAALSASRCNPVLALFYQNLKKREKPSKVALTAVMRKLVIHMNSKLKKLAANPVVEKVDKTQNAKKSLAK

SEQ ID NO: 208675 - protein, 428 aa, unidentified
MNEVDSIRLEEFRQLKKQIRGSKQYLVVGIDVAKDKHNAFFGTPTGKTLLKRLVFENTIEGFEKLLIQADALKVQHALKKTVFGLEPTANYHKPLGEFLIKAAHMVVLVSGVAVKRNRELLDGRWDKHDTKDSANVADLISQGKCLFYEYPPMALRELRNLLSLKRRLKKQEHGLKARIRNHLLAQYFPELDRYFAQSGSEGMEIVRWCLEPSVIAGLEYGQFVQLVAPRIRSIGQQERLKAIWKKAVDSIGCIAGEAVEFEAKVLVEALEQLRDTIAHSDAKIKEISLQFPEYKYILTIPGFGADVSSKVLAGIGTPSRFNTGKQVLKMAGMDLSAARSGKRSDAASPVLSKKGKADLRYALYQAALIASTKNQHFIAYYTNRLRGREKEKAIKIKMRVKLAAKLLIIAWTLMKKKEPFNPDYLKTD

SEQ ID NO: 208676 - protein, 358 aa, unidentified
MSEITRVGVDLAKNVIQVHAVDGVGKVVANKALQRDKFMAWCAQLPPGCLIAMEASSSAHHWARKLVTLGLDARIIAAHLVSPYRLQGKSGKNDANDAAAICEAASRPSMRFVAIKTISQQGMLSVHRLREGLKEDRTACTNRIRGILAEFGLVFAQSYEVLRENLSTVIEDASNELTGITRLVIERAQSLWAELDAHIEWCDQRIAAHIKQDASAKQATQLMGVGPVSASAVVATVGDFKQFKNGAQFGAWLGLVPKQNSSGGKNNLGSITKRGDMYVRMLLIQGARAAVLTAHRRDDPISKWVHQLREKSGWQKAVVALANKNARILWAMFARGKPFDAHHVSVKPGDPQAAMPAT

SEQ ID NO: 208677 - protein, 338 aa, unidentified
MTIVMGLDQHRAQITAEWIDTSTGEVSRTRVAPADRDRVRRFAGRFRGQQLEVALEATTGWRFVVEELQAIGADVHLAEPAETAARRGTKKRAKSDRADARHLRELLMVGRLPESWIPPEHLLDLRARVRLRHTLVDARREWQQRMQAVLYHHGVPSRSWLMTPESRAWLARLALPPAAREQITTALAMIDAHDLQLAPLDQELRDYAKRQPGCRALMCHYGIGPLTSITILAELGDARRFSSSREAVRYAGLDITVHQSDARRAPGHLSRQGPPALRWALFEAAQCARRTNSPDHDYYQQAAERLGGNRACLAVARKLLKRSYHTLRELGEEALQPA

SEQ ID NO: 208678 - protein, 326 aa, unidentified
MQSILGIDVSKDKHDLVLICEGRKFHKVISNDLKGFEQLGKWLKKYQVTQLHACLEATGQYGEPAAEWLYNQGHQVSVVNPARLKHYGESKLHRNKTDKADADLIAEFCLKEKPSLWKPLSTEIKHLRALIRRLQALKDNLQQEKNRLQSGEKDVWVTKDLETHIKFLQERIDATLKEIEDFIDQSPGLKSQQKLLTSIPGIGDLTANTLLGEIGDFSAFEDAPQLAAYAGLNPKGHRSGSSVHKKTRISKQGRVELRRCLYMPAVSSLSSNPVIQSLAYRMSMTNHEKMEIVVAAMGKLLHLAYGVLKNQLPFDPDYGAQFNYSS

SEQ ID NO: 208679 - protein, 400 aa, unidentified
MHCTDHPAHLKASVREEDRSLFVALELSKSIWLIAASAPGSEKISKYRVAAADVAALLALLARLKAQAERYCGGPVRVVSIHEAGLDGFWVHRMLEANGVESHVVDAASIAVDRRSRRVKTDRIDVERLLRTLMGWARGERRICSMVRPPSPADEDERRLTRERGTLVTERTRHVNRIKGLLATQGVFGFEPLHKNRRKRLEELQQWNGQPLPPRLKTELVRELDRLELVMSQLAALEAERDRALQARRTAVSNTTKAPSSGTASAGEVGSQLLRLRSIGPEIASVLSLEAFYRNFNNRREVAAYSGLAPSPWKSGGIDVEQGISKAGNARLRTTMIQLAWLWVRHQPGSALSRWFHERVGDKRGKIKRIAIVAVARKLLVALWRYVTQGVVPEGAELKA

SEQ ID NO: 208680 - protein, 338 aa, unidentified
MQLQPLYIGIDVSKLTLDVSCLGQASTHCYHQFENSKAGLRSLNRWLLQQEGFSYTDVLFCMEHTGIYTRQVVAFLILQGAKVWLESALHLKRSIGMIRGKNDKVDSYRIARYAMVNADQAKLISPSNGTLQLLKDLLACRTRISKSIQSINVSVRELARIDKASGKELADLNKAALEGLRKSKTAIEKRMQELINSDSELNRIFTLATSVKGIGRVLATELLIYTHKFTRMTNVKQLACYCGVAPFTHTSGISIRGKTRTSHFANMNLKRTLHLAAMSSTQYVPDLRKYYERKVAEGKSKMCVINAIRNKLLHRILAVVKRGTPYVLNYAEINLVKS

SEQ ID NO: 208681 - protein, 466 aa, unidentified
MENNYILYVGMDASKGKADAAILKVSDRRSVKPKFLRKKLSFKFVKSEVSSFLETVRSYSDDNCTSICFALEVTGIYSTNVYNFIKANLNDNESIRFLNTDFVNQWRKAHNIAKSDPLDAQTISTIIGTDADVQYVNDNVFENKNGYQDLKALVHRHYQIKKIYSQEINRLIAQCDCLFPELQYVFEPKSAAFIAVLSSYPTTHDIINASKFEVFSVVYEATKHRCSMDKIDKLFDLCWDTLVPDDISSYGRNIILDLVENIKNIKGQLKTIQRYIEDVVSLNPAYKLLLTMTGCGPITAATVIAETGDISRFKNADCFVSYSGASPRNKRSGTSVETMGKISKKGSRYLRHAIYMIAEFARRHNPVLKHQFERIKNGNKKRHKLANIAIANKIARYIYSIMKNKSSFVILHEHIMRLPEETRDTFFNSISLNFPKNTRKQIYQYSDINGEVHKFVYIKSEDTMIV

SEQ ID NO: 208682 - protein, 316 aa, unidentified
MICGVDVSSKSLDARIGRDGATACFGNDPKGIAKLAEFCRSHKVDLVAMEATGGYEKKPFALLWAAGIQVAVVNPRAVRNFAQGMGLFEKTDSIDAGVIAWYAQTKQCVAVAPASAEQQQLKAMVTRLRQLTELRAAQRNQRRLVTDKVVLKSFRKLLELVQRQIRDLEVAIAELISADALWQKLDQSFRSIKGVADRTVARLMAEMPEIGRLSNKQISKLAGLAPLACDSGQWKGKRTVRGGRRTIREILFVVAAGVSRHNADFRAFRERLAAAGKAKKVIRIALAHKLLVRLNAKARDVLQQFREATPGAVLPS

SEQ ID NO: 208683 - protein, 316 aa, unidentified
MSATPCFVGIDVAKAHLDIALRPTGERWAVANDDVGIAALVERLQALQPTLIVLEATGGYQRAVVAALAAARLPVAVVNPRQARDFAKATGQLAKTDALDARALAHVAEAVRPTPRPLPDAQADALRALLARRQQLVAMRTAEQNRLGNAPPRLQTDIQAHITWLNTRLAALDDDLDTTLRTSPVWREREDLLRSVPGIGPVCTRTLLLDLPELGTLSRQRLATLVGVAPLNRDSGTLRGSRTIWGGRAHVRTALYMSTLVAVRYNPMLKAFYERLRAKGKAAKVALTACMRKLLTILNAMVKHHTPWQVQEVPNA

SEQ ID NO: 208684 - protein, 354 aa, unidentified
MCNHGVNIAPEGFVITITTVGIDLAKNVFAVHCVDQHGKTVLVKPKVPRAALPELIASLPPCVIGMEACSGAHYWARLFRQYGHEPRLMAAKFVSPYRMAGKSGKNDAADAQAICEAVRRPHMRFVPVKDESQQAMQCLHRTRQGFIEEKTATYNRLRGLISEFGVIAPQSTDALRHMVSEQKKSLPLQVQQCVDDLLEHIDRIGNNVTEYDRILSRMAKADHRSQRLMELKGIGPTTACALVASIGNAHDFKNGRQLAAWLGLTPSQYSSGGKSKLGRITKAGDSYLRTLLVQGARSVLIGAEKKTDSFSRWVCSLVERRGYWRAVVAIAAKNARLCWASLHYGDDFRLYSVS

SEQ ID NO: 208685 - protein, 335 aa, unidentified
MTKKAQSELANFAGIDVGAQQLHLVRRSNGVSSKPQAFANTPRERRELAKKLAKVPNLIVCLEATGVYHQDLALALHDAGVRVMVLNPKVAHNFAKVLRRDSKTDSLDADTLAQYPERMPFEPWARPSTAALQLRAFSRRIEAVKDKKRAAKNQLHALRFSPETPKSVLQDALKEIEQLEQRLVTLTKEARTVIASNPTLHGCYELLLSVKGIAQTSAIALLGELAMLPAGLTHKQWVKFAGLYPRHNDSGTSVHKQPRLSKAGNLHLRKGLFMPALSARTHDPHVQAYFEHLVAAGKKPLQAICAVMRKLLHAIHGMFKNNQPFDNTRFYALPA

SEQ ID NO: 208686 - protein, 370 aa, unidentified
MIATEVETVIGGVDTHKHTHYAAVIDQHGRLLGHQQFPATDAGYHALLSWMRTHGSLEAIGVESTGSFGATLTRALTTAGERVIEVNRPNRIARRMDGKSDRLDAEQIARAVLGQTSTATPKTKCGMVEVIRTLRVTRSSAVKARTQTFNTLFGIMIGAPSPLRDELVTLTKRTLINRCLGLRPETTDFAHLRAHPERLLMASIKTALRDLARRWKALDGEIKALNKQIEVVVRAVAPDLVELFGVGVELAGQFLVTTGDNPERIHNEAAFAKLCGVAPQPASSGRTTGRHRLSRSGDRQANSALYIATIVRLRHHEPTRAYVERRTNEGLTKREIIRCLKRYIAREIYANLPRPQATSTPAAEPHQTAA

SEQ ID NO: 208687 - protein, 417 aa, unidentified
MNPPPETIPIQRYIGIDIHKYYLMIGGQNRHQEWTLRPRKVQVSRFRDWAEKNFQPGDAVVIETTGSVWDIYDIVAPLVTTTLVAHARKVRQIAEARVKTDKEDIKRLITLLIADIVPEVWVPPMYVRELRSLISFRWRLTKQITMSKNRLHSVVQRFNLDPPEGGLLTDKNKSWWERQTFTDLTGFEVERDLEIVKTLEGQKEAIDLKLAELSNTEPWSSDMVYLMQIPGLGLIFSMVILSAIGDIKRFSHPKKLVGYAGLGAGVHASGEKYQEKSITKEGRKELRWALVEAAWRAVGSDPYWKAQLKRLEKRMHRNKAIVAIARRMLVSIWHILTKREPYRHFDEETIAYKMLIWSWAMDEKSRDGMTPQQFAKYGLLRLGVGQDLERIVKGGGPRRIAPTEEVLALKPELAPPR

SEQ ID NO: 208688 - protein, 524 aa, unidentified
MVTKTRKRKSTGRTKRFIGKPTGQIQDRVHAVGPEHFGVVAVDCAKRRSKWMLCNFYGQVLVEPSRVEHTAGGLRTMTQLVSEVCRAEALTDGIVAVEMTGVYHKPVYRAFRQAGFDTRIVHPFASNHFRRPLHPDVKTDDNDLEAIFHAAVKGYGLATPPVGEVYQSLQAVSRHRHNLVKQRGRLMVQIRRLLHQTMPGFADLFDDNKLYDKSIALPVALGFDCPDAIRRARVEGVAAYLKEKRIRFQRRTIERIVAWAGAAAEPSELAAMHARQWRQLNELRCLLDEQVQDAERESAGFLVKTPYVLLLSVTGINVVSAARLAGEAGPIEHYATARAINGRAGLYPSQYQSDEVSREGGLVRQCNRKLRGAAMLVAENLIKCHPYYRGLSQLWKQQKVDPRDRRCRIANRAMRMVYQLVGGRQLWRGRGVDREYLLAKLQEFHRLHKTPIEQSIRDLHEAFAWLPKSAYAAEAQPLQALAGKRRRGPQRVGDLLIPLLVRLGVADTPAAEVESNTSDARGSG

SEQ ID NO: 208689 - protein, 347 aa, unidentified
MLIIGCDFHSRMQQIAMLDTETGELVEKRLEHESGEAKRFYEGLKEPALVGIETTGYTRWFAELLAELGHELVVGEAGKIRAQRPRKQKHDRGDAEHLLHLLVRGDFPKIWLPSAEERDVRVLVEHRHQLVELRTRAKNGLQAMALSYGLRRRGRLWSERGQEELKKLPLREGMERRREDLLRLLGQLNTWVKELDRRIEEEVARREDAQRLMTHPGVGAQTALATVLVLGPVERFPDSRHLTSYLGLIPREDSSAGRQRFGHLTKQGNRLMRFLLVEAAQTASRYDPGLRRAYRRLAFRKGAALAKVAVARKLAIRLYIMLRDRIDYQEFCRRGSHAGMLGDVALA

SEQ ID NO: 208690 - protein, 452 aa, unidentified
MSRRRKNNRTTGAPVLHCLNPHAAGVDVGATEIYIAVPVDRDPRPVRRFSTFTEDLRAAADWLKSCHIETVAMESTGVYWIPFFQILEAQGFRVFLVNARHVKNVPGRKSDVSDCQWLQYLHAVGLLRGSFRPEQAVCTVRSILRHRNDLVQMASSHVQHMQKALDQMNLQLHHVISDITGMTGVAILEAILAGERNPQTLAALRDRRIKASADTIAKSLVGDYRHEHLFTLRQSLLAFRHYQELIGECDTEIAQYLEAFESKVDPPEGPLAKSPEQRKPNSDQPHFDLRSHLHRIFGVDLARVPGINVLTAQTLLTEVGPNFSHFAQGPAFTSWLGLCPDNRISGGKVLSVKTRKVKNRAATALRMAALSLHHSQSYLGHFYRRMRAKLGAPKAITATAHKLARIIYHMVTAGQEYHETICAQNEMQHRQRLEARLRKQARELGLQLIAAS

SEQ ID NO: 208691 - protein, 352 aa, unidentified
MERYVGVDPHGGTCTFGVMSAAGKRLNSLVVETNGRALVETVRGIGGRVHLCLEEGTQSAWLYELLGPHVAEIAVTVPGKKKGSKDDLRDAFSRANELRTGAIETRVFKAPEHLAGLRNAVRAYGFATTDVVRAKNRLKSVFLSRGISTDASVYDPAKRPGWLKQLSSPHRELAEWLGRQLDRLEPLREEAEGLLLSEAKKHPIIKKLSTAPGMGPIRTAQVVAIVATPERFRTRRQFWSYSGLGVVTESSSDWVRDRAGKLVRAHNVQTRGLSRKRHPRLKAVFKGAATTVIAQLADDPLHADYERMLKSGIRPTMAKLTLARKIAATVLSMWKHQEVYDPKRHRPTPEQK

SEQ ID NO: 208692 - protein, 394 aa, unidentified
MKLVGIDVGKNSHHFCVMDKETGKLNVTPSSFSNNKEGFDYLINSLKPYSKKSILLGMEDTGHYHVALLKFLLSNGYPVALINPKTTDLTRKMEGGITKNDKLDTITICDVLDTPERKKQYRITKVDRFDLYEQRQLTRHHHNLKEELNVYCNRLQKSIDLVFPEFNTLFSSKYGVVYMNLLKTFGSAEAIASTDIRTIRKCFEIKGRGNRISLTPEKLKECAKNSIGISSEVETIQIKHLVSQITLIKEQIAEIDKKIEEFSITNNSPILSIPGISHFSGTSILAELGDIGNYSKPSQIIKFAGVAPYHYESSQYNAQHTGITKKGSKYLRKTLYQIILTVINNNPVFKKYYLLKISQGKGHRCAQGHCIRKLLRIIYHLLETGQSFDPALLR

SEQ ID NO: 208693 - protein, 387 aa, unidentified
MARVIIGVDPHKRSATIEVINEHEQTLGQGRFGTDTDGYKAMLAAGRRHKDRQWAVEGCNGIGRHVAQRLVADGETVVDVPAKLSARARVFATGQGRKTDPVDAHSVAVVALRTTGLRQVQADDTTVALRLLVDRRDQLGRARTDLVNRLHTLLLELIPGGAKKDLSAQQARALLSTVRPRDVVGKTRRRLASELIDELAVIDKKIKTAKRELTELVDTTGSRLLELHGIGPSGAARLLGDVGDIRRFANRAHFASWNGTAPLDASSGDNNRHRLSRAGNRRINRALHIMAIVQLRHDTEGRAYYRRRLAEGKPPMEALRALKRRLSDVVYRQMLADAKRLETGPGGHAGATLQSSAADPIPMIDTSDKSLPGPAEAQPKTLSLATS

SEQ ID NO: 208694 - protein, 426 aa, unidentified
MNANWTDHLYFAALDWAQDHHDVTVVDRTGRIVAELRFAHSAAGWAEFTEKLKPFSGCPIALETCSGPAVDQLLQRGFRVYPVSPKASQRYRDRKLPSGTKTDRHDAWSLADALRTDGHAWRMLHPQDEATATLRTLCRDEITLIEQRTALVNQLRRTLTEYYPVALEVFEDWTQPCAWAFVRFFPTPAQLVAAGKRRWEKFLHTHKLWRTESAPRRLELFAQANALPTCAATTNAKSLLALSLVALLETLQHQLDEYRRRIEQAFQQHPDHELFDTLPGAGAKLAPRLLAEFGTRREVFPDPDALMCYAGVSPISYQSGQFSKVRVRRACNHILRHTVHLWANLSRKRCAWAQTYYRAHRAKGKSHACALRCLGKRWLKILWRLWQSGERYDETKHLQNQQRHGSWVSALLKEQNQATSSSMPQT

SEQ ID NO: 208695 - protein, 319 aa, unidentified
MGKSNVEFEQVIDRGCGLDVHRDTVVATVMGKGIKTETRTFGTTTSSLNELGEWLQSLKVTDGAMESTGIYWKPVLHVLRAYPLNLIVVNARHIKNVPGRKTDKADSQWICKLLISGLLKGSFIPPENIQELRDLHRYKKKLIGIVASEKNRIIRVLEDANIKLSSVVSDTSGVTASYLIKGLIEGRKDLEKLISECYHRKLQANPQQIKEAINGRLTAHHGFILKSMQKHIASVEEQIAEIDEEIEKYIKDFEKEIELLQTIPGVGKEGAIGIVSEIGVDMDVFPDEHHLASHSGMCPGNNESAGKKKVQKHDMEIKI

SEQ ID NO: 208696 - protein, 312 aa, unidentified
MSEPLYVGLDVSKQHLDLAFEPARTPRRVPHTDEGIATLITELRPLAPTLIVLEATGGYETDVATALALAGLPVTLVNPRQVRDFARALGRLAKTDALDAQVLALFAARVRPEPRPLPDEAHQALAALVTRRRQLVDMLTAERFRLSLAKGPIRRDVQAHIHWLEQRVKHTNQDLRAALKTSPLWHAATRLLQSVPGIGPTTAAVLIADLPELGRLTRQQLAALVGVAPLNHDSGHHHGIRTIWGGRAQVRCALYMATLVATRYNPVIRAFYRHLLAVGKPKRVALVASMRKLLTILNAMIKAQQPWAPRHP

SEQ ID NO: 208697 - protein, 353 aa, unidentified
MQHFIGCDVHTRNQVVAWIEEETGEIKKRRLQHEGEEVKAFYAQFPSGTVVGIEATFPAYGFERLMGELGHELWVGDAARIRASEVRYQKTDARDAGGILDLLRTGRFPRIWVPSLEDRDLRQLLVHRMKVVRARTQVKNQLHALAISQGVCRGRKLWSAKGRKELESLTLMAWAARRRKDLLESLDRLDEQVRELDRAVEEAGRARPEVALLRTHPGVGMVVALAFVLTVGPIERFPHSRQLVSYLGLNPREDSSAGRQRLGSISKQGNTLMRWLLIEAAQTAARFDPQLRRLYQRLKRQRNKTGVAKVAVARRLVVRLFWMLRTRNNYAQLVHMSGSPSSAVVPPPSGPTV

SEQ ID NO: 208698 - protein, 375 aa, unidentified
MATTRQALVNDTSVAVMLYMALELSASKWRIALADGKRAGSQHTVSAGDKEALLRVIDKAKQRCGMSGAVRVMSCYEAGRDGFWLHRWLLEQGVENVVVDSSSIEVNRRARRAKTDGLDAAKLYEMLVRFAGGDKRVWRVLRVPSVEQEDARRVHRELERLKRERNAHANRISSLAVLHNVRLERVGGRGWSERLAQLKGQLPGALWAEIERESAREKLVRAQILALEKSRQEQLKAMPEGPLLALLKLRGIGLQSAWVLTHELFGWRRFDNRRQLAGCVGFNPSPYDSGESQREQGISKAGNRRCRTLLVELAWYWLRYQPNSALSAWFKRRFAAGGKRMRRIGIVALARRLLIALWRYVEHGVIPDAAQLKRP

SEQ ID NO: 208699 - protein, 341 aa, unidentified
MKKFIRVGVDLAKNYFQIHALASEGAPAVTRKLKRSKMHEFFSQIEPCLLGMEACGSAHYWARELKGMGHEVLLMPPAYTKPYVKRGKNDAVDADAICEAMSRPGMRFVPIKSAEQQATLMLHKTRELLIKQRTMSVNALRGHLSEFGIVAAKGIGRVDELLDLAESDATLPAAAKAGVKVLAQALEGLDKAIDRLEDEITSAHAQNEMSRLLDKVPGIGKLIASVIAASVPDPSVFKSGRDFAAFLGLTPRQNSSGGKQTLGGITKQGNRYIRKLLVLGATSLLNVVGKRKGALRDWIVGLLAKKPARLVTVALANKLARILWAMMKTGECFRTEMFAKA

SEQ ID NO: 208700 - protein, 373 aa, unidentified
MKKTIKNVGLDVHKNSISISIADDDRDGEVRYYGSINNNLNQLDKVIRTLVSQGGELRFVYEAGPCGYGIYRHLTGNAFDCVVVAPSKIPQQSGNRLKNDRRDSLTLARLHRAGELTPVYVPTPEDEALRDLMRARIDATRALRVAKQQLSAFLLRHNVVYPGKTLWTKTYFNWLPTVAMPHPSQRIVLQEYIDTVTDSINRVQRLTEQIRLQSQQSSRSELIKALQSMRGISLIVAATIAAELGDLTRFETPGKLMAFLGLIPSEHSSGAKVKKGSITKTGNRHVRNALIEAAHAYRFAAKKSRTIRQRQEELPKKIIEISWKAQCRLCDRYRYMMAKGKQVNVTKTAIARELVGFTWAIAQELSKTSPSNA

SEQ ID NO: 208701 - protein, 405 aa, unidentified
MAAVMIGVDPHKGSHTAVAIGADEVPVGLVRVRACAAQAERLLTWAKSWPERIWAVEGAAGLGHLLAQQLAAAGERVLDVQPKLAARVRLLATGAVNKNDPGDARSVAVAALRSAACLPVRPDDHAAVLKIWARRHRDLSRARTQVACRLHAVLCELVPGGLSKEICAAQAAAILDQAEPGGAVRQARLELAAEFTADMRRIDVQLRETRKKLAVAVRASGSTVTEVFGVGPFIAATMIGDVRDVSRFASRDRFAACDGTAPIEVSSGNRKVHRLSLRGNRRLNHAIHMAAITQIRYQHSDGRACYDKKIAEGKTPKEALRALKRQISDAIYQHLKADAARAAAAGAQGPGGQPGNDSVASAASSHPERQLFGQATPGPVTTLRHPADQQKRASSRARKKTARTS

SEQ ID NO: 208702 - protein, 338 aa, unidentified
MNIVFPGIDLAKNVFQLCGLNQAGKPVYTKRTGRKELLQTLANIPACLIGIEASTGAFYWQREFEKLGHKVKVISPQYVKPFVRGQKNDGNDAQAIAVALMQPTMQFVPPKSPEQQDIQALHRARQRIVNHRTATVCQIRGLLLDRGIPIGSAVSRARRAIPLIPEDAENGLSSRMRRTIAELYDLFNDLERRIHFFDKEIETVFRQSEACQRIAKVKGIGPETATAVVAAIGKGTEFKNGRHFAAWLGLVPRQHSSGDRQVLMNMTKKGDRHLRTLFIHGARAVVRVATNNKDGHMNQWVNQLKERRGFNKTTVAVANKNARIIWSMLRNETEYQVV

SEQ ID NO: 208703 - protein, 373 aa, unidentified
MEHNITIVGLDAHKNSIEIVTAETAGNQEVRHYGKILGDMTSLDKAIRKLRSVRSNGEELRFVYEAGPCGYEIYRHLTKQGFQCVVVAPSMIPKKSGNRIKNDRRDAENLARLERAGELTKVYVPREEDEAMRDLTRAREDAVKAQRAARQLLGAFLLRHGHRYPGKQSWTPAHMRWLSDITMPHPAQQITLQEYIHAITEGTGRVTRLTDQIQKLLPEWHMAPVVKALQALRGVAPIVATTSVAEIGDMNRFEKPKQLMTYLGLIPSEHSSGESIKRGGITKTGNGHVRRAIIEAAQAYSFPARVSRHILKRQEGLPQSVREIAWKAQVRLCGRFRRLMARGKQRNKVVTAIARELAGFMWAIAKEVQVPSV

SEQ ID NO: 208704 - protein, 391 aa, unidentified
MVCVGIDVAKDKHDCCILDSDGTIRADCITIPNNMDGFKQLLQTIRDCTKKSDKIKVGLEATGHYSYNILGFLLDNDLAVYVMNPLHTNLYRKSLSLRKTKTDRVDARTIATMLLSDVDLKSYTDIAYHNEELKSLTRYRFEKVRERAKLKQSVSRLVTILFPELEKLVPSLHGASVYALLSEYPGAKQISEVHLTKLTNLLVTASKGHYGKEKATLIRETARASIGSVMPAKSLELKHTIKLIQELTSEINEIEDSIQKIIDELNPPILSIPGMGVNSAAVILAEIGDFSNFSSPDKILAYAGCSPSTYQSGKLTNCYAHMEKRGSRYLRYALYNATKYVCHWNPVFAEYLAKKRAEGKHYNVALSHSMKKLVRLIYALQKSGKTYLAAA

SEQ ID NO: 208705 - protein, 344 aa, unidentified
MKEVITIGVDLAKNVFQVHGVDAEGTVIVGRQLRRSQVLPFFKKQPPCLVGMEACATAHHWARQLIELGHEVKLMPPHYVKPYVKRGKNDAADAAAICEAVTRPTMRFVSVKSTEQQGVLMLHRTRDLLVRQRTMLINAIRAHMAEFGVVAPVGVPRVKELLAVIADTDDARLPPVARTCLESLVRQFLSLHEEICATEKHIHVWHRSNEVSRRLETIPGIGPIIASALAASITDPEVFKNGRELAAWIGLTPRQNSTGGKQRLGKISKQGDQYLRWLLVAGAMSVVLHAKRRGTTNLPWLADIIARKPTKVAAVALANKTARIVWALLRHGGTYQKPATVPAA

SEQ ID NO: 208706 - protein, 308 aa, unidentified
MIAQNYVGCDISKQWLDFFDETSGRLRRIDNQADAIAAYVAGLDPSRDFVVMEATGVHDRLLRHALAKAGVPFSRQNPAHTHHYSKSTRRRAKTDPLDARMLSDYGRRYQPEAEPAPREEVEQLQSLARYRDQLVEMRATAKKHLAEAFNEIVIADLEETIAYLDTRIKAIESQIAEVIRQAEDTARDYTLMVSVPGVSKVGAFSLLALLPELGQRSPKAIAALVGLAPFDNKSGKLNRRSQIQGGRSRVRRALYMAALTAIRTCERFKAFYTALAARSGSKKLAIIAVARKLLVVLNAIMRDKTAFA

SEQ ID NO: 208707 - protein, 342 aa, unidentified
MIKCNVIGLDLAKNVIQVCKISSDGELIYNKAVSPRKLRELLAKEKIAIISLEGCGSCHYWGRLAQQYGHDVRIISPKKVKAFLQGQKTDANDALAIAIASIQLGMVFSQLKSEEQQTVQTVEKSRKFLEKYVTSLSNHIRAFMYEYGITIPQGKKGLRETAAIVMDENDKRLPSSLQGILEILWDSYKNTLEQLKFSEQAREILVKKLEPCKRLLDLEGVGPVCAARLYASLGDGRNFKKGRDASVYIGLTPKQHSSGGKVYMRGINKNEGDKELRAALYQGAFSVIYKLPVQARTKKQAWLISLVARVGVKRASIALANKTVRTAWALLVSGDKYKVALI

SEQ ID NO: 208708 - protein, 345 aa, unidentified
MKITTTGIDLAKTVFQVHGVDKHGKVGLRKQLKRKDVVSFFANLEPCLIGMEACGSAHYWARKLSELGHTVRLMAPQFVKPYVKTNKSDRNDAEAICEAVARPNMRFVAVKTAEMQAVLALHRARQGFVKARTAQGNQIRGLLAEFGIVIAKGIGHIAKRLPEILEDGENGLPGMMRELLQRLGANLQDMDRQVGELERQIMRWHRENEASRKLEAIAGIGPITASALVATVGDAKSFKNARQVPAWLGMVPRHEGTGGDVKLGAISKRGDVYLRTLLIHGARAVIAHIERKPDHADEWLKKLIARRNKNIAAVALAAKNARIAWALLAHERSYQHDYVATRKVA

SEQ ID NO: 208709 - protein, 388 aa, unidentified
MIYVGIDIAKLNHFASAISSDGEELIKPFKFTNDNDGFQLLISKLAPLDKGSPIIGLESTAHYGDNLVRYLVAKNYKVCVLNPIKTSTIRKNNIRKTKTDKVDTYIICKTLMMQESLRFVTFYDLDLMDLKALGRFRQKTIKQRTRLKIQLTSYMDEIFPELQYFFKSGLHQKSVYALLKEAPTPEAIASMHMTHLAHLLKVNSHGRFDKEMAQQLRVLAQKSVGANDSSLSIQVTHTIQQIELLDSQLERVEAEMTEIMKFNDSVIMTILGIGYINGGMILGEIGDIHRFSSPNKLLAYAGLDPSVYQSGNFQAKKTRMSKRGSKVLRYALVNAAHNVVKNNATFKAYYDAKMVEGRTHYNALGHCAGKLVRIIWKMMTDNLKFNFD

SEQ ID NO: 208710 - protein, 436 aa, unidentified
MRGCRCSMIMGFTKPIEHFNLQRKKVITMNTLYVGIDVSSKSNVVYLMLPNGDKHSNFSVANSHEGSTLLVKKIYSALTSHSLDTVLIGLEATSVYGDNLVYFLREDATLAPFNRKIHVLNPKQVKKFHDTYNDLPKNDYVDSFVIADCLRFGRINKEVYMGDYRYKALQNLTRARFFAVQNLVKEKQRFMNVLFKKYSTMTQEKVFSDAFSTTALAVYDEFESAEALANMDLHELTDFIIEKGKNRFPDPDAVAKAIQKAARSSYRLPKTVNDSVNQVLSISITSMKALESQIKEFDKAIKALMELLPNVLISIPSIGPVYSAGIMAEIGDINRFDNQASLAKYAGLAWKQHQSGGFEAEVTRLIPSGNRFLKYYLCEAAFSLVRCDKKYSDFYHLKYKEVNRCQHKRALALTARKFVRLVFRLLKDNRLYCPAK

SEQ ID NO: 208711 - protein, 426 aa, unidentified
MYNKDDNRLASFRQFRKEIRGSPDHLIVGIDVAKERHHAFFGTATGKTLFSRLLFDNNLAGFEKLLDRTGAIQAKHNLSNAVFGLEPTASYHKPLGEFLIRRSKMVVLVSVASVKHNRSLLDGRWDKHDRKDAANIADLISQGKCQFYENPHEEIRNLRALLLLKRKLKKYEHSYGVRIRNQLIAQYFPELDRFSVYPETEAIVRWCLDPTRIVSLEADQFITMVAPGRRTAAKQQRLEAIRKLALESIGCSMGEGAGFDARVMVEGLRQIRAMISETAAQIEAVCRRFPEYGYLLTIPGFGPDVSSKVLGALGNPYRFRNHKQVLKTAGLDLNASRSGNTSNSAVPVISKKGKADLRYALYQAARIASTRNKDVMAYFNRQLEGREKERGIKTKLWVKVSAKFLIIAWTLMKNKEVFDSRYLNRT

SEQ ID NO: 208712 - protein, 307 aa, unidentified
MNGIGAGVDVSKAYLDVAVFQRNEVRRFDNGAAGWRALATWLKPYAPGQVVLEATGGYEQRALGALHDAGLPMRRINPRQARFFARATGQLAKTDRIDAKTLAHVASVIDLVPFQPLDADAAKLRQYKSRRDHLVQNIATEKQRRRQLIDPMLRADLDAHIAYMEKALHRIEQVIAELIKDTPQAKVGSTIKGVGPAMIATMICELPELGHLNRKAIAKLLGVAPLNRDSGLFVGQRTTWGGRSGARAALYMSALSAAHHDPQLKAFYAGLVARGKPKRLALVAVMRKLIVILNARMREAVARTATA

SEQ ID NO: 208713 - protein, 343 aa, unidentified
MGMDTMIGVDLAKSVFQVHGASMNGELRFQRKLSRQAFSTFMAKQPACLVVMEACGSAHYWARILCGFGHEVRLIAPRYVRPFVKRQKNDAADAEAIVVAAQRPEMRFVERKSEAQQSAAILYRSRQRLVRQRTEAVNALRAALYEFGHIVPQGIQHVVRMREVLETPNSDLPALMREECLAMLEQIAVLNEWIDKKTAKIKELASTTPVSQRLQTMPGIGPLVAMAVETFAPDMSTFRSGRDFAAWLGLVPRQYSSGGKERLGRISKAGQADIRQMLIIGAMSRLNWMGRKSVAENSWLARMIARKPRMLVAIALANKMARQIWAMLKKHEDYKDPVPVGAA

SEQ ID NO: 208714 - protein, 341 aa, unidentified
MEAKRFIGIDLHRDCFTACVRLENGREYLKRWKLEDMPKFAAKLRPADQVAVEMTGNTRLFHDQVQPLVDRIVAVNPTQFQVITHSVKKTDPNDARLLALYLAKDLLPEVRMKDKTQAQIASLTQTRDTMVKLRTALKNKVNNICSANGVNLNRESLASEKGLRAVGEMPFDPLVLLELKIIVDQIRSLNQSIAELEEIIGQEGQKLDGHKNLTSIKGIGKITSAILLSVIGDVNDFADEGHLASYFGIVPRVSNSNETEHSGRIHKRGTKLGRTALVQSALIAANYSPYLKRFYEQVKARRGAGKAIIALAKKFLGIIYRTLKNKWVFEDFPNFVLAEAS

SEQ ID NO: 208715 - protein, 376 aa, unidentified
MKSVTKYVGLDVSKEKIAVAVANEGREPAYFIGMFPHTEKAVRKFIQTLTQDGSSLEICYEAGPTGYALYRLLTQMGISCSVIAPSLIPSRPGDRVKTDRRDALKLAQLLRSGELQAVYVPTEADEALRDLVRAREDSKENLLRAKHRLTKFLLRHSIPGPEGVRRWSVKYWSWLKVLRLPNAVQQTVLQEYIHTIQEEMLRLGRLEKYMAQEAQSGPRASLITALQVLRGVALITAITLVAEVGSFLRFPKGSSFMSYTGLVPSEYSTGQTTRRGATTKAGNRHVRRAAVEAAWSYRYQPALKGKLLQRQQGQNAEVCAMAWHAQVRLHEKYRKLLSRGMNKNKVITAIARELSGFVWAIASQIETQQRVANQTT

SEQ ID NO: 208716 - protein, 413 aa, unidentified
MEVLYPRCAGLDVHKDTIVACVRLAVGSKVEQHVQTFGTTTSALLSLSEWLSGFEITHVAMEATGVYWKPVWHVLDGSFELVLANAAHIKNVPGRKTDVNDATWIADLLAHGLIRGSFVPPTPVQAMRELTRTRKQLVRERASHVQRIDKILQDANLKLGSVLSELDGQSSRAILRAIVGGETDPEKLVELVNYRVRTPRAQIVEALRGRVQPHHKVLLQVHLDQMQNIENAMATIDAEVGQTLTPFREAADLLTTIPGIRDVTAAVIVAEIGVDMSRFPSSGHLISWAGLCPRNDESAGKRRSTRLRKGAPWLKATLFQAAWAAIKTKGSYFRAQFLRIKARRGPKKAIAAVASSMLTAVYAILRTRQRYRDLGADYFERRDPKSAATRLLRRLRTLGFNVSVSPSQEAVSS

SEQ ID NO: 208717 - protein, 344 aa, unidentified
MNISMIGLDTAKSVFQVHAVDPSGKVAMKRKLQRGELIPFFEKHEACTVVLEACGAAHHWARVLTGLGHDVKLIAPEAVRPFVKKGRKNDAADAAAICEAASRPSVKFVSAKSLEQQSVLTLHSARCLLVKQQTMLANALRGLATEFGLTVPKGIGKLEELAALVNADEAFPETARHVLTGLFDHCRATAASIETVEAEIVVQARQDETARRLATIPGIGPITASLIAATVGDIGMFKSARHFAAWLGQVPRQYSTGGRNRLGRITKTGNREIRRLLVLGATSMVYRAPQWKSAAGLWTRAVLERRPVRLVTVALANKMARIAWALMTRKEVYHAKGRAAAAAA

SEQ ID NO: 208718 - protein, 454 aa, unidentified
MANYFLGGDASKGYSDFVIINDKKTTIEPVFQLDDTCNGHQQLKQILVKFFENHPDDILYAALESTGGYENNWIKFFQDMSKNFPIQVARINPRGINHDSKAALQKSTNDKISARNIAEYQINHPQKIVYNNESENKSLKRTLTALLAKIKSRAALLNQMETLLYSANPELFLYHKESTPQWLLKLLQSYPTADALANASVDELVLIPYLNATKANNIINAAKNSVASASDNLTAYAIKRLATDILYFNNQIKQEINFLKKNVHCPQIDLLETFKGIGTYSALFLVIEIGSIDRFPSPKHLASFLGLHPVYKESGDGSWNWRMSKQGRKKARAILYMVAFSAISNNSLIHDLYQNYRSRGKGHKAALGICMHKICRIIYGMLKNNVPFDENIDRNNQKKNFQQNKLNKANNTRRFQKEDPIAPISYRQTKKRKERERSQSDKVTMHEIQILTPS

SEQ ID NO: 208719 - protein, 409 aa, unidentified
MNPLYVGIDVSSRNNVIYLMKPDGSKIKTFSVPYSRDGSQKLVKEILSALTSFALTDVIIGLEATSVYGDNLVCFLREDGSLTPFNRKIHVLNPKQVNKFKESYNDLPKNDFVDSFVIADCLRFGRINKEVYLDDYRYKALQNLTRARFVTVQNLTREKQRFMNVLFKKYSSLAQEKVFSDTFSTTAMAVYEEFDSADTLAYMDLHELTIFLQEKGKNHFSDPEEVAKAIQKAARSSYRLPKTVNDSVNQVLSISITSIKALEAQIREFDKAIAAQMDLIPNTLISIKGIGPVYSAGIIAEIGDINRFPNQAKLAKYAGLAWRQHQSGDFEAQNTRLIRTGNRFLKYYLGEAALSLVRCDAEYSRFYRLKYKEVNKYQHKRALALTARKLVRLVYRLLKDNRLYIAPKV

SEQ ID NO: 208720 - protein, 343 aa, unidentified
MQIRSVGIDLGKTTFHLVALVDNGKVLLKKKFTQRQLITFTANLQSSLIGLEACSGAHFLGRALREQGHNVKLIPAQFVKPFVKSNKNDFLDAEAIAEAVDRQNMRFVPIKTDDQLDLQALHRVRDRLITRRTSVINQLRAFLLERGLVFAKSPAKLRERMPEILENAEEDLTPRMRNLLALLWNEWKDIEQQVVDLNLEVELIASSDAACLRLRQIPGIGPLVATAIVASIGNGAAFHKGREFAAWMGLVPKQYSTGGKAKLSGISKRGNRYLRKILIHGARAVVLRCKRERVSMGAWMTALEMRAPRNVLIVATANKLARIAWAVLASGQDYRAGQDPVPA

SEQ ID NO: 208721 - protein, 313 aa, unidentified
MSNDLSQTIGIDISKANLDCHAHPAGAERQFANTSKGHKALIAWLGQWQVERIAFEATATYHRALEAALADWPCVKLNPERARRFAQAIGTLAKTDRIDAMLLARMAATLQPPVRPAQSAEQAQLAELINARDGLVRDRTALKNREKNITIAILKRQCKQRLEQIARHIEALDAEIASLIAADAVLVRRHQILTSIAGVGTLTANQLIATMPELGCLDNKQAASLAGLAPVARQSGQWKGKSFIRGGRANVRQALYMPALVAARFNPDLKAKYQQLVSAGKPAKIAITAIMRKLIVTANALLKADRCWQQSIA

SEQ ID NO: 208722 - protein, 338 aa, unidentified
MTIKVLGIDLGKRNFHVHGVDEHGKQVVRNKYSRKGLLKFLSNLPVCTVGFEACGGAHYWARKAEEMGHTAKLMPAQFVKPYVKSNKNDYLDAEGICEAVQRPTMRFVTTRTPEQQALGAMVRLRDSLVRQRNAVINQVHGFMLEFGFEYPKGRTTVTRLPRMVSENEEHFPAMLVSTLLRLYDEFTFLTQQIQDAEKEMEGYVKQDDRGRRLLEMPGVGLITASCLLAWVGDAKQFKSGRELAAWIGLVPKQYSTGGKQTLLGIGKRGHKKLRTNLIHGARSALQWHIETPSRWNEWAKNMLPIKPKPVLIVALANKLARMIWVILARDESYVAIAA

SEQ ID NO: 208723 - protein, 370 aa, unidentified
MKPNFEPGKWFMQCVGIDIAKGTFTACLCMYEFDQGCSTAPVVFNNDKTGFNQFVKWSRKEALKGYPLRYVMEPTGVYYEQLASHLNKLSLNVCVVLPNKAREFAKYEGILTKTDDMDAYTLGMLGCLDKRLKPWTPPSPIYRELRQMTRFVADINKVKTELRNHLEALAHSETAEKSIVKHYNKLIDEIDKQLVSNQKAIREKIKQEPGLPERIDRITTINGVGFMTVVTVVAETNGFALITNRKQLTRYAGLDVPAHQSGPVDPKRHISKQGNVHIRTALYFPAIVSTQCNPQMKDFYGRLCARNTQSKMIGVTATMRKLLLLIYSLWKSGEKYDPTCDKPACNRQKKEAETTEGQPHGIDVGTLAEE

SEQ ID NO: 208724 - protein, 412 aa, unidentified
MEGETVIAGVDTHKDVHVLCLLDGLGRKIWSGSFGADPEGYDRLAEAIGDPGSCMVVGVEGTASYGAGLTRRLVELGYNVVEVLRPKRDKARPGEGKSDPLDAERAARKAASGRGCSVPKSQDGWVEAVRQLYVARRLAVATSTSCVACAKSMLTTAPSALRERFRGRERPKDLMPLLARGRKAGDALEESALASLRSVAAVWKEARSQVESLDERIRALLEANAPALLGVEGCGTTTAAALVVAAGDNPGRLKGEAAFSMMCGASPIPASSGKTDRHRLNRGGNRQANWALYEIAIKRMAYDERTRRYVARRASEGKSRREAVRCLKRYIAREVYRVLMDPNPDGAAPEGPELAKMRKAMRVTQKKAAAGLGLSAATLGHLERGKRRSTKLERRYYELLCELKGALPQTAY

SEQ ID NO: 208725 - protein, 346 aa, unidentified
MHYIGMDCHISTLDFAVVNEAGRLVKAESVATSVNGFIEFVKKVPSPRTIYMEEGTLAAWALETCVRFREKLVITDAKKNRWIGSSGQKDDSIDALKLAQLARGGYIKEIYHPVGQRRRFRELMIAYHDTVRSTTRIKNKIKARFRQNGIQCTGRTVYSETHRDDWKGKLPQETIVLLILDGLWRQLEQSEQTEKELLRAARAQAKHYPEIKHFEALPGIGFISAATISAMLETPYRFADKRKVWMYAGLGIMTRSSGGKTYSEKLSTDYNRLLKYTLKQAAEAAIKAKDNPFRRKYLDMTLFNGIVPHRAKLTIARGMLATMWAMWRKGEKYSPEIRRKAACKQG

SEQ ID NO: 208726 - protein, 352 aa, unidentified
MVWTVAIGVDTHKDAHVAVGLDVLGVELDHCVVEATLAGYKRLLCWALLLGEPAFAIEGCGSYGAGLARFLETSECLVWECERPRRGDRRRGKNDLIDAALAARRVLSGSGLSTPRGAGQREHLRVLLVERRGAIQARTAAINQLHALVVTAPDALRERLSGLSKPRLVKTAARLQSSADGVCEVLRRIAKRAQSLSQEIAEIDRSLLRLVADLAPQLLAECGVGAVCAAQLLVSSGDTTRMKSEASFAALAGTSPVDASSGKQQRHRLTRRRPPAQLGAARDRPTTRPPSRRDAGVLPTHAGRRQDYPRSQTLHQTRPRTPPLPPTPPTSPDALDNIEASGCWSCGTRIRT

SEQ ID NO: 208727 - protein, 370 aa, unidentified
MTKSSTIFVGLDVHKDSIAVAYVPEDRQADVIYLGPIGTRQCDIDKMIRRLQSKGHTLVFTYEAGPCGYSLYRYLKRKGLECIVVAPSLIPKKSGDRVKTDRKDAVHLARQMRSGDLTPVFVPEIEDEAIRDLCRAREGFMRDLKACKFRLKSFLLRHDIRYSGKANWGPAHLRWLSEITCHTQAQQIVFQEYIRAIEDHKQRLTRIETELKEQVATWRLSPFVEAFQALRGVQFTVAVTTVAEVGDLNRFHNPRQLTAYLGLSPSEHTSGDKRRQGGITKSGNTHARRVLVEGAWSYRYTAKVSRIIQVRQENLPQSIKDISWKAQVRLCKRYRRLVSRGKNPNVAVVAIARELASFMWAIAQEVKTAA

SEQ ID NO: 208728 - protein, 349 aa, unidentified
MTEQRRSYAGECVYVGVDVHKETYTVTCVCHKQIVKTATVQAEPAGLAVSLPRWFPGATLYSVYEAGFSAFVLHRVLTTAGISNIVVNPASIAVAANDKVKTDRRDSKKLAIDLADGRLRGIYVPTEAEELARLLPRTRAQIVEHRATIARQIKAKLHQFGLIAPSSRRMISHRYLREMATWSLPPELSVSLTLLAEQWRFATRQLIEMRRLLREQAQAQQEIEKVYRSVPGIGEVAARTLATERGDMTRFANERALFSYTGLTPSEYSSGASVRRGPISRQGSSRVRHVLVEIAWRAMPRDAVLKEIFDRIAATRGKKRAIVAIARRLTGRIRACFRQGTTYAVGTYA

SEQ ID NO: 208729 - protein, 435 aa, unidentified
MEEPTRFIGMDVHKDTIVVAVTAAGEVGKAMPYGTFPNTAATVEKLVRRLRQAGSGPLKFCYEAGPCGYGIHRALTKMNEDCMVAAPSMIPRKSGDRQKTDKRDAASLAVLHRGGLLTAVWVPDAAHEAMRDLIRARLAAVRAVRAARQQLSAFLLRHERIYPAGRTAWTKAHRGWLAEQSFAQPAQQIVLEESIETVRLGEQRRDRVDGYLRAQIPTWSLFPLVQNLSALRGLDTIASAGLAAAIGDPSRFVSAPDFMAYLGLVPSEHSTGPKRRIGAITKAGDVHARSLLIEAAHSYRFPARVARHKLTAVDAVPDAVREIAWKAQTRLCRRYRHMMAKGKLKQVVVTAIARELAGFVWSIACITTDPPTKNSAVTTPSEKICPTGSTTCSSVPRRQPIKETARRAERPGQIRTASADGKRPDRMIAHHHSSG

SEQ ID NO: 208730 - protein, 462 aa, unidentified
MEGKREDQRVPGGRRQLQGLPLMKANAAGVDIGSEKHWVCAPTPDGRGREIADFGATTSELLRMAEWLKARQVGSVAMESTGVYWIAPHEVLEAQGLQVLLVDTRQLAKVPGRDKKTDPTDCEWIQRLHSCGLLRGSFRPPEKICMLRTLVRDKAALVAESGDWVRRMQKSLDQMNVRVHRAVSDIDGQTGMAIIKAIVAGERDPGTLAQLRDPHCRKSKEEIAEQLTGHWREDHLFSLSQALRMYEAIAERIAAYEQEILRKLGEMEAEGQAGKTAPPLKNSNKARMIKNRGQEPKRQALYRMSGFDATQIDAIGVETVEVIISEYGPDLSRFPHEDEFISHATLAPHVPSSGGKPIKKKKHNSPSKRVATVLRTAAQSLQHSDTALGAYYRNVKRAKGPGIATFAAARKIGTLIYRLLRWGQPYIDEGSEAYEKRYQQQRIRGLESRAKQLGYQLAPLPA

SEQ ID NO: 208731 - protein, 320 aa, unidentified
MSDHLAVGIDADSKSLVVARHGTKGSTRIPNSASAIGKWLSTLPVGSRIGVEATNRYHELVVQAAQKAGHVVFVLNPRDIKHYAKGVACRGKTDSGDAQVIARYIAKEADNLHEHVARSPAQEQLHVLLQQRDSLVRSKAKLNLSLGAGASESAIFGRIFDGLKEAIALLDQQIQQLCRSGEQRDLYRRIMTIPGVGPTVAAFVTHHITRWPLTSSDAWIACTGLDPRPNESGARIGRRRLSKRGNASLRQILYMAAMGLTRSKNGKALYNAIRERGHSSTASFNILARKLARIAWGVFKSGRDFDPAMLKVGQACFQKA

SEQ ID NO: 208732 - protein, 408 aa, unidentified
MLKIVYPICCGVDVHKTFIVACIASTNDKGVTSYQTKRFSIYTKSLNEFSNWLAANNCKDVCMESTGKYWHPVWNVLERTCRPVLAHPKYLKAIRGKKTDKKDAKWIADVFKHDLVSGSFIPPEIIRQLRDLMRYRSKLTNYTTGEKNRAQNCLTTSNIQLDHVFADVFGKSATAILNHILENPGKTFDVAPFVHGRCKTPIEEIQLSIDGNISPEQAEKLKIIRSHMDSLELCKLNLESTILTLAESLLPQINLVSTVPGIKSFSAIGVIAEIGTDMSAFPSAKHLCSWAGLAPQCNESGGKKKSSRVSKAGAYIKPLLIQCSNAVVSSNKHPEIKNRFLAIKKRRGHKKAIVAISRMLLTAIFHILSKSEPYNPALYRNSDVAPVDSIERAVKLLEKRGFTVSHSA

SEQ ID NO: 208733 - protein, 358 aa, unidentified
MQKYNISFKGQKIFIGIDVHKKNWDVAIAPEVGIVKRHAQKASAKEFFDFLKKHYPDGDYLAVYESGFSGFATYYALKDVGINCIVIHAADVPTTQYEEVMKTDRVDSVKLVRSLKAGLLNGIYIREKENIDDRSVVRIRKIIQKQLCGYKARVKHMLHCNGVVIPKRFENPRTHWSQAFIKWLKDDVALLSSTRNSLNLLIRQVETVRMTLLEATRIMRKLSQLERYKSKFDLLMTVPGIGFTVSMCILTEVYDVKRFHNEKEFASYLGLVPTSHSSGEKVLHGEKTFRGNKQIGPMIIEAAWVAISRDAGLGSLYLRYKERMKPQEAIARIARKLSNILFSILKNETEYIPYHMGK

SEQ ID NO: 208734 - protein, 391 aa, unidentified
MTMYFVGIDISKYKHDYCIISAANQKVVSKFTFKNDKSGFEQLNLILNSLSTPEDIKIWFESTAHYALNLELFLENANHSFMEINPVLIKDFKKSQTLRRTKTDSIDCELIARWLMTVEYKPHSKGFYHAYSLKSLTRLRDRLVRQRSFYLVKITNVLDHTFPEFKPFFHERLSKTALYLLENYGSAEKIARMNSASYEKLRSISRGKFSPQQFIRLKELAANTVGVNNSIFDVELNSLLTLYKSLVDEIKTLESEINRLVDEVHPHYMSIPGIGPISAAIIYAEYGDISNFSSPNQMLAFAGIEPSVHESGTEAYNGKMVKHGSSQLRYVLINCCLPLIRFDVTFATYYARKRSENKPHRVAITHVAKKLVRVIYALESQDIDFDPKKLR

SEQ ID NO: 208735 - protein, 436 aa, unidentified
MPESIPYLSVGFDVGADFTWMSIMLPNGILIGKPFKIIHSDPQSRELAISKIKEAQEMYSLESRCFLESTGIYHIPLLCFLRDKGFDCAVINPIITKNSTNMNVRKLHNDKFDSKKAAKVGLDASLKASIVPDDAIIDLRNLVRDYYYFKDLQSAIVLKLHAELKVSFPAYLNVFSKVTTQTSLKLLEAYPLAADMLAAPKDELVEIIRSTARFGETYALARYDAICTAAKDAAVFGRALPSNALRIRLYIKMYREYQAHLDSILEELHQAVGKLEGTPDYDRISFIQTLHGVGFLSAVVLIAEMGSFDLFSSPKKLYAYFGLDPGVNDSGKFHGDRVHMSKRGSSLARRILHMVAINNLKVDKATKTPVNPVIYDYYTRKCASKKKSVAVGAVMHKICNIIFAMLRDNKPFELITPEEHRERYAAEHPESVNPAA

SEQ ID NO: 208736 - protein, 459 aa, unidentified
MGACELESGDVALATIPIRKMTIGIAQTLLLIIEWRIAMPKKRTAGDRPELKPVNVGAAAIDIGSTMHMAAVNPACTDVPVRSFGTFTRDLHELADWFKTCGVTSVAMESTGVYWIPVYEILEQRGFEVILVNARYAKNVPGRKTDVSDAAWLRQLHSYGLLRGSFRPDAEIATLRAYLRQRERLVEYAAAHIQHMQKALMEMNLQLHHVVSDITGATGMRIIRAIVAGERNPDVLATYRDVRCHSSIATIRAALVGNDRHEHVFALTQSLELYDVYQAKMLDCDRKLEVLIAALNNKGAKPIGKLSKPRIKTKQVNAPTFDVRTALYGVLGVDLTEIHGLGPSLALKLIGECGTDLRAWPSAKHFTSWLCLAPSNKISGGKVLSARTRRSSSRAPALLRLAATTVGRSDTALGAFYRRLSSRAGKSKAVTATARKIAVLFYNTLRHGMHYRDPRRGSL

SEQ ID NO: 208737 - protein, 355 aa, unidentified
MTSTKYIGMDVHKESISIAVMNAAGKIVMECVIETKASTILQFINGLRGDLRVTFEEGTWAAWLYDLLKPHVTEVVVCNPRKNALLKDGSKSDRIDARKLAEQLYMNKIKSVYHGEHGLRTLKELARSYLTITKDLTRVMNRLKALYRSWGIPCAGNEVYAPRHRSEWLSKITEAGVRRRAEHYYQQLDVLRLLRQEVRRDLLAESRKHKAWKLLRLIPGIGPIRAALLVALIQTPHRFRTKRQLWTYSGLGLETHDSAQYRVVDGQLNRSKKSVTLRGLNKDHNHDLKDIFKGAATRVSSSSGPRRDFYEALLAKGRKPTMARLTLARKIAAITLIVWKKEVRFDANYLKPQAA

SEQ ID NO: 208738 - protein, 359 aa, unidentified
MQIQSNKIDFNGQHIYAGIDVHLKDWKVTIMTEKLTHKTFVQPPKPEALYHYLRKTFPGGTYHTAYEAGFSGYWIHNKLLNFGINSIVVNPADIPTTGKEIVMKDDTRDSIKIARSLRNGDLNPIYVPTLPTLEDRGLVRTRATLVRDLTRYKNRIKSFLYFHGIEYPEAFSRPQTHWSNRFNKWLENVQMTEPSGKASLNILLAQSSHLRASILQMTKQIRELAKTGRYKTQHELLRSIPGIGLLTAMIILTEIETIDRFDTFDQLCGFIGLVPSTKSSGDHEVIGDITPRGHSVLRTAIIESAWMAARLDPALNKCYHDYCKRMEPNKAIIRIARKLVSRIRFVLKNNQPYVCSVVK

SEQ ID NO: 208739 - protein, 355 aa, unidentified
MKRAADDRGMQVFLGVDTHSEAHVGVALDQAGRRLGTLEIPNERAGYARLLEWVLGFGVLVAAGVEGTGSYGAGLSRFLRAQGVRVLEVNRTNRQHRRRYGKHDAGDAEAAARAVMAGTASGEPKGADGAAESLRALRIARRSAVKARTQAANQLHALLSTAPERLRESLRGLATKQLVERTSRLRCDAKPGDPTTATKFALRSVARRHRTLSEEIAKLDAQIERLVEEAAPELVALDGVGPDTAATLLTAAGDNPERLRSEAAFAHLCGAAPVPASSGKVVRYRLNPGGNRDANRALHVVALNRLRRDTRTRAYVARRTAEGKSKKEAMRCLKRYIARETYRAILASAARVPPA

SEQ ID NO: 208740 - protein, 357 aa, unidentified
MEIAYDGRQVVGVDLHRRRSVLVRMTEDGRRLGTARITNSPQELRAQIARAGKSPRVVLEATYGWYWAADTLAAAGAEVHLAHPLGVKAFTYRRVKNDERDAADLADLLRMGRLPEAWIAPQEVRELRELTRYRQKLVHLRTSCKDQVHGVLAKLGVPPACTDIFGVAGSAWLDQLGLPQPYAGKVTSLRQLTGELNSEITMVSGVIADLAAGDRGYQVIQQLPGIGPVLAAVIIAEIGDVTRFSNAAQLCSWAGLTPRHRESDTKVTRGHVTKQGSRMLRWALIEAIQRAGADTVTGAIKDAIIARRGKQARNIAKVAAARRLLTLVFYGIRDGQIRCLSTTPGGSPPPARAARAA

SEQ ID NO: 208741 - protein, 390 aa, unidentified
MIYVGIDIAKLNHFASAISSDGEILMEPFKFTNDGDGFSLLESNLASICDDKDNIIIGLESTAHYGDNLVRYLVASFYKVCVLNPIKTSTMRKNNIRKTKTDKVDTYIIAKTLMLQESLRFVTFYDLDLMDLKQLGRFRQKTIKQRTRLKIQLTSYIDQVFPELQYFFKSGLHQKSVYALLKEAPTPKAIASMHMTHLANLLKVNSHGHFTKEQAKELRVLAQKSVGASDSALSIQITHTISQIELLDSQLEQVEAEMTDIMKFNDSVIMTIPGIGYINGGMILGEIDHVHRFSNPNKLLAFAGLDPSVYQSGNFQARRTKMSKRGSRVLRYALINAAHNVVKNNATFKTYYDKKMAEGRSHYNALGHCAGKLVRIIWKMMTDNVEFNLD

SEQ ID NO: 208742 - protein, 367 aa, unidentified
MKKVSTVAAKPSKKISQQKLTVGLDLGDRNSWYCVLDECGQIQVEQRVRTNVKALEEVFAAMPHSRIAVEIGTHSPWISRLLRELGHEVIVANARKVRLIGESRKKDDRLDAQTLARLARIDPQLLYPVKHRSAQAQADLMMIRARAGLVRARTGLVNTARGLAKSYGERLRGCNVRNMNPEKAEGLSPELQSALEPLLNAIESLSERIVEYNERIEKLAQESYSQVALLKQIKGVGTLIALTYMLTLEDPHRFRKSRDVGCYLGLQPGRRNSGQSEPQLHISKEGDPYLRTLLVQGAQHILGPFGIDCDLRRWGLKLAERGGRNGKKRAIVATARKLAVLLHHLWVSGEVYKPLHNSSPTTVAAAA

SEQ ID NO: 208743 - protein, 391 aa, unidentified
MIYVGIDAAKDKHDSCILGGNGQTIREAFTFQNNHEGFELLRGEIQKSSEAEGSGQIRAGLESTGHYSGNLEAFLRSSGVELVVFNPLQVNLYRKSQTLRKTKTDKVDAKCIAQLLITAESNPVSVSYQIQELKTLTRHRFRLVSQRTKLKVSISRLMVILFPELPTVCISVTQAAIKALLFEFPSARQIAACRIDRLTNLLSSASKGRYGREKALEIKSLAHQSIGANSPATSLELQLTLQQLDFLLQQINKLDKAIRIAVAQTPSPIMSIPGIGAILAAIILAEIGDIHRFSSPDKLQAFAGLDPSTYQSGKFKADRTPMVKRGSTYLRWALMQAARLAAMHCATFGQYQAAKQAQGKHYYVALGHTAKKLIRVIFRILSANEVFVPQT

SEQ ID NO: 208744 - protein, 376 aa, unidentified
MSERDYSKQVARRQRIGSGTLVVGVDIGSAFNAVGFMNKEGKVLGSYPKMPNSREGFEQFVEVTEGLKAKHGLTDVLIGLEPTGHYWRKFAYFAKGKGYEVRFVRTTALKHHRELDESSSAKSDKRDALTLTNITREGKYIDTVIEDGRMRHLRILVKVREKVQTRNVSAKNSLHAALDDYFPELKGIFWSMHSRGLWVLLERCPFPEDVVTLKVSELKEMIGRASRRRAEASQKAMAVYQAAKESIGIQQIGSADRYRLKMCLEEVKRTGLIIKNIEGEIKRMLKDIPQTEYLLSIPGIGPLSAAIFLGELGNPSYFQSARQIIKYTGYDPQESDSGYRVSRKFISKKGRWLLRKHLFLMSMRVVVLSRYFQEYY

SEQ ID NO: 208745 - protein, 385 aa, unidentified
MQNTIVHYEGVASLEAAVTKVKPSGARIKIGLDVHARLYVAVAQYDHLLPKAAQRLSPVEFVPWVQALLARGHSVHVVYEACGFGFSLYRQLIAAGAHCYVIAPRKLDEEYSRVKTDPRDATTLCQRLSRYLEGNTRELAVIRVPSEEEEQARHMSRQRGQLVHHRQKLEAQGRSLLISHALPAPAHWWKEQTWRRLGRHLPAWITTRLQTARPALLSLQQQINALTSELEASAPSILPRGVGRLTSVVLTREICDWHRFNNRRAISSYTGLCPGERSSGSKRVPGSVTKRGNPRVRAALVECAWRMVRFQPQYPPVQKRLAILSKGSRALGAVRKKAIVAVARRLAVDLWRLHYRSLHCGTTRVHYLIKGVRGELFGTWRVSGA

SEQ ID NO: 208746 - protein, 340 aa, unidentified
MNIKTIGLDIAKTIFHLICLDQYGNQLFKKKLRRGQLLSYFANLEPCIIAIEGCASSYYWQRELTKLGHTVKLLPAQHVKAHLRGNKNDYNDALAIAEASRVPTMREVTPKTIDQQSMQALHRLRDKAIGERTALSNQLRGLLAEFGIIFPQGLSKIREGLYSVLEDAENDLTHTLRAALALKHSQFTQQDDLVAELSRLIKEAGNEQTQVDLLQSIPGYGEILSTAYYSVIGDGKAFAKGRDASASLGVVPKQHSSADKTKQLGISKRGDKYLRKMLINGARSVVNHAHKKDDALSVWVTRLIERRGKNKATVALANKLARIGWAVTVSGKPYQVNYGH

SEQ ID NO: 208747 - protein, 403 aa, unidentified
MNSVGIDISKGRSTVAVMRPFGEVVISPFEVRHTGSELSELARRLKSLDGETRVVMEATGNYHAPVAKLLHDAGLYVSVVNAKLVHGYGNNDLRRVKTDRKDAVKLANYGLDRWLSLPKYVPEEDTRLLLKNCYRQYRQYSKVQTLLKNNLISLLDTVFPNANRLFSSPIRGDGSEKWVDFVAEFWHCKCVCERSERAFINKYQRWCRKHGYNFSETKAQTIHAVASGHIGVMPKSETTKLLVEQAVAQLRATSAALAALKHEMQTLASQLPEYPVVMDMFGVGPTLGPQLIAEIGDVRRFYSKKALVAYAGLDAPPNDSGDMTGRHKSMSKIGASSLRRTLFLVMSVYLQNAPLAEPVYQFMDRKRAEGKPYRVYMMAFANKFLRIYYATVKAYLESLEHTV

SEQ ID NO: 208748 - protein, 422 aa, unidentified
MKSIRAKRSASRTVDCAGNRAEPHAEAPRGALSAKRRQTMHESITAYVGLDVHKDSIAVAVAGNDREVPHFVGTVRPDFKQVRKALSRYGSPNSLQVVYEAGPCGYTLARQLLADGFGCQVIAASRITRSPTERIKTDRRDALTLARLARSGDLIAVRIPDERDEAIRDLSRARQDAVRACLKARQQLKAFLLRHGRPLRGSKPWSPTGELYLSKISFVHPAQNIAFADYRQAVLDTRARVERLTEALRAQCENWRMQPLVSALACLRGVDFLTAVILVAEIGDFSRFAHPKELMGYLGLVPSEYSTGERHHRGDITKTGNAHARRVLVEAAWNYRFPARLSHPITRRQEGQSKPVRDIAWKAQLRLSHRYRRLQSRKLHQNKITIAIARELTGFLWDIARHVPLPHDIAIHQHAGVRIAEA

SEQ ID NO: 208749 - protein, 330 aa, unidentified
MKKWDYILGIDVSRNTLDVYSIEAKEHIQIENNAQGFKVFMKWCKTFKIRLEKAIVALEYTGGYEYKLVQFLENKSISYIRIPGLAIKNSQGISRGKTDMIDAQRIARYVDEKQKTLESSNPLNHSIIELKEMMSLRKRLVRELAGYKASLKERLHMYPNKKNDAVTKIYKTRIAQNEKTLADMEDELNQFITAHPDIEQNYQLLTTIRGIGKVNALMTIAYTENFESFVDARKYAVYIGVAPFEHSSGTSVKGRKRVSHIANKELKQELNQAARTAIKWDPELREYAQKKLQNKCYGIILNNVKFKLVLRMFAVVKRKEKYVDNYQKSA

SEQ ID NO: 208750 - protein, 322 aa, unidentified
MSLSVLGIDIAKQKFDAALLVNGKTKHKTCKNSAEGFEALNLWLQKQGIQKVHACMEATGNYGEDLAIYLYDADHIVSIVNPARIKGFAQSELVRTKTDKLDAALIARFCLAMKPGPWIPPAPEIRSLKALVRRVDSLVDMRTQEKNRINTAHESVILLIKEHIAYLDQEIEKIRRQIADLIKQHPDLKRKKELLDSIPALGKVTIPHILAELDDPGKFNHVREMVAFIGLAPKETLSGSSVKGKPRLCKIGHARLRKALYMPALVSIQCNPVMIAFYNRLKDKGKNGKVIVCAIMRKLVHVIFGVLKSGKKYDPNFLTISA

SEQ ID NO: 208751 - protein, 372 aa, unidentified
MKKDSKRKPRSPQGGASKRSQTGRTIGMDLGDKTSRYCVLNQVGEVVQEASVATTPTALVQLFGGAAASRVALEVGTHSPWVSRLLSRLGHEVIVANPRQLKLITESSRKNDKVDAKTLARLARIDPELLRPIRHRGEKAHMHLIQIRVRAGLVEVRTALVNTLRGLAKSMGDRVPQCDPDALDQTRLQELPPPLRTALEPLVEQIESLTERIQECEGKLEQIARSEYPETTLLKQVFGVGTLIALTFVLTVEDRERFSKSREVGCYVGLRPRRSQSGQSDPQLRITKEGDRYLRQMLVQGAHRILSPRAPDTDLKRWGRKLCERGGRNAKKRAVVAVARKLAILLHRLWATGEVYEPLRNANLVPPEKRAA

SEQ ID NO: 208752 - protein, 332 aa, unidentified
MYYVGIDLHKRDLVIAVEDERGPVGKPRRFACRDEAAIVAHLSALRPFRAVIEASASYRWLYDRLKPLGEVILAHPLRLRASIARPAKTDKLDAALLAHLLRMGQIPEAYAPPAAYQELRDLTRARARLSRSATEAKNHLHRLLAARNIHPPYRDPFGVRGRRWMRSLEMGVVGNLERDELIGRLEHYDAQRDRLDGALEESAASFPQIESLQDIRGIGTYTALLVVAEIGEPERFSEPGQVASYAGLATRVYQSGGHDYHGHITRQGSPWLRWVLVQAAMKAIGRDRRLANFYERVRKRSSRHIARVAVARKLAEICWIRLRRWHRERAAA

SEQ ID NO: 208753 - protein, 372 aa, unidentified
MGHHTEVFVGIDTSKSRNAIAIADGGRGGEVRYLGEFSATEAAIRKLVAKLAAKCCHLTFCYEAGPTGYGLYRLLKSLGHDCLVVAPSLVPKKAGDRVKTNRRDAVSLAKLLRAGELTAVWVPDERHEAMRDLSRARQAVKKDLQGKRQQISSLTLRLGRIYPGKTTWGPAHMRWLMSQKLEHREQRIAFEELLEGIRQESERMERLEDAIREVVPEWSLAEVVAALQAMRGIDLIAAVGVLAEIGDLSRFQNPRELMGYLGLVPTENSTGDKVKRGGITKAGNGRARRILVEAAWSYRYPPRVSRDKQPKVEAAPRGAREIAWKAQTRLCGRFRSLERKGKRRTVIVTAIARELSAFIWAINRELMPPRQA

SEQ ID NO: 208754 - protein, 350 aa, unidentified
MLIVGCDYHPGFQQIAFVDTETGEFEERRLQHRGEAEKFYRDIATRGVQVRVGMEASGHARWFERLLAELQLELWIGDAAEIRAKRVRKQKTDRQDAQHILTLLVENRFPRIWVADWENRDLRQLLWHRHRMVQTRTRIMNQLQAVALNEGLRCKKRLWGEKGRQQLEGLRLAPWATRRRRDLLELLDRLNPVIAELTQAIEQEVEKQPEAQRLMTHPGVGALTALAFVLVIGTAERFQCGKQIASYLGLVPAEDSSGERRRLGHISKQGSAILRFFLVEAAQVTVRSVPEWRSKFFHLAMRRGRKIAKVAMARRLAVHLFWMWRKRWDYQQLKEFGPYAGKPGTGVGVH

SEQ ID NO: 208755 - protein, 411 aa, unidentified
MVYVGDDWAEDHHDVELVDDDGRRLARARLPEGLEGITRLHSLIAAHMPASWAQLDPADAAARVRIGIETDRGTWVQALLATGYQVYAINPMSVARYRQRHSTSGAKSDAGDAHVLAEIVRLDHAHHRQVAGDSPTAEAVKLVARAHQSLVWDRTRQVLRLRSALREFFPAALHAFDDLAAPEALELLDRAPDPDRAAKLSRSPIVAMLRRANRRDIDAKAAAIQDTLRAPQLRQPHAVQAAYAAIVSSQVQLINILSIEIEHLGEVVAAHFGRHRDAERYLSLPGLGEVLGARILGEFGDDPHRYTDAKARRNYAGTSPITRASGSKRVVLARYARNRRLADAVQQWAFCAMRGSPGARAYYQALRQRGTGHQAALRQLGNRLVGILHGCLKSGTRYNEATAWTHPQPAS

SEQ ID NO: 208756 - protein, 351 aa, unidentified
MSINHYIGFDVHKKSISYCVKAADGKIIEEGKLRATRQVLREWAQKRTEAWHGAMEATLFSGWIYDALKPFAGELQMGNPSMMKAIGAAKKKNDRLDARKIADMVRCNLLPVCYVAPPEMRELRRLLRYRNLVVGQAVQMKNRMSGLLMEVGAEYNKQRLHGAKYFSELLDQLEEVPESVKDLLRLSRGALGTFAATQGQLLDRLENAPLLAKRVKLLRSIGGVGQVTALTWAVEVCDPRRFPSIGDAVSYCGLTSALQASADKQQRGPISKQRNPHLQTVLIEAAKLAPRWNRQLAELHERELKRGNRNRATLAVARKLVAYLMAVDKSGKPFVVGNQPAPKMGEETKVA

SEQ ID NO: 208757 - protein, 350 aa, unidentified
MPIVGGLDIHRKQITFDYLDTVTGELRRGQIAPADREHLAAWLAGRFTGQDAHFAVEGCTGWRYVAEELAAAGTVAHVAEPADTAALRGRKRHAKTDKTDSRHLRVLLADGRLPECWVPPPHVLECRALLETYHDLRTEHTAWVQRIHAVLFHQGARQLGEQRLRTSQGLAILRSLAAAQLSPAGQLQVAVALDMAQVLEGHLDALRRRLIAAARQLAGARELRARLYGVGPITALALCCWLGGAGRFSSARKAVRFTGLDVTVYSSAGKRSPGHLSRQGPEVLRWCVYEAGKTHARRGAPDHAYYAAVKDRIDGKRAAISEARKIIRQAVHILAELGDDALGMDPRPSR

SEQ ID NO: 208758 - protein, 324 aa, unidentified
MAKRITVCAGIDTGKRKLDVAIDGSCEQVQVDNTAEGHQLLLEWLQRHKVKRIGIEASGGYEQPVVAALRRKRFVVVVFQPAQVRAYAKFHLQRAKNDKIDAALIAACTAAVKQIYPAPDPRLSPFAEHLTMIDQIGEDIMKLKNRIETCRNERIRAIWKEDIARLAKRQRTELKALVAAIRQYPDLAERLELIHSVGGAGLPTAVAILVRMPEIGRLTREQAAALAGLAPYDDDSGEQVGARHIDGGRERLRRALYLAALPAAMRWNPQLIALYQRLRAAGKEHKRALIACARKLLIFVNTVVARGTPWQDQPLPTAVIAATG

SEQ ID NO: 208759 - protein, 343 aa, unidentified
MQHVAIDLGSRESQVCIRTSDGTIVEEKKHPTRSLGDWMKQWPASRVILETSSEAFRVADAARAAGHEVRVVRSTLAKQLGIGDRGIKTDIRDARTLSLLSCRTDVESVHIPTEQTRQLRSTVTSRELLVQTRTQLINHAKAWLRTQLWRLRSGSPDTLPDRLRAKATEQNQVLPPHIERIVLSLEAINLQVTAATTEMKKLAKESSTCRLLMTIPGIGPITAVTFVAAIGDISRFEHGHRLESYVGLTPGECSSSERERRTSITKAGPSSVRRTLIQAAWAVWRGYPNDPMARWAMNIAERRGRPIAIVALARKLAGLMYAIWKTETPYQASKAARPQELAV

SEQ ID NO: 208760 - protein, 344 aa, unidentified
MNKISVVGLGLAKQVFQVHGVDASGKVVIRKALRRKEVLTFFAQLKPCLIGMEACGGMHHWARTLGKLGHEVKAMAPAFVKPYLKSNKNDRNDAEAICEAVQRPSMRFVAIKSPEQQAVLHLHHARQLLVQQRVAIRNHIHGLLQEYGLSLRTGPKGLSQLWALLEDADNDLPDMIRVLLQTLKAQHDALIQECKVIEAQLQTWHKDNETSQRLETIPGVGLLTATALAAHLDQGQGFTNGRQLAAYLGLVPRQASSGGKNRLLSISKRGDGYLRTLLVHGARSLLRHVRKRLQAGQAGRNPWLEQLLQRCHPNEAAVALANKMARIAWVLVSRKETWRAPVLA

SEQ ID NO: 208761 - protein, 339 aa, unidentified
MQVSTIGIDLAKNLFVLHGVDHNGKTVLRKKLSRSQFVPFIIQLPACLIGMEACSSSHHFARLFSNAGHRVKLIPPQYVKPYVKTNKTDAADAEAICEAVTRPNMRFVQIKTAEQQGVLALHTERSFLVRERNGCANSLRAMLAEFGCVMATGFSALYKEVPEILEDKENELPHFVRVSVQRQLEHLKALEARIRQTEHELSDWARTQPACQRVEKVPGVGLMTATYLVASVGNGRQFDTAKQFASWLGLTPREHSSGGKQKFGGISKRGDSYFRCLLVHGARAVLRHISKNEKTMPWLAALVRRKHRNVAAVAQACKTARILWSMLFHETEYRPLTGA

SEQ ID NO: 208762 - protein, 371 aa, unidentified
MKKNITFVGLDVHKETIDVALAETGRTGDVRFYGTIGGDLESLHKVVRKLQSKGSELRFAYEAGPCGYDIYRSLTKHGLDCTVVAPSMIPRKSGDRIKNDRRDALNLARLHRSGELTAVYVPTAEDEAMRDLTRGREDAVKALRVARQVLLAFLLRHGHRYGGKTHWTRAHKNWIADIKMPHRAQQIALQEYVHAAQEQLERVDRLTRQIQELLPQWSQAPLVTALQALRGASLIVAVTTVAELGDLTRFKSAKQLMAYLGLVPSEHSSGGTIRRGGITKTGNSHVRRALTEAAHAYCHPARESRILLERLDGLPPEVRQIAWKAQVRLCGRFRKMLDHGKNKKTVVIATARELSAFMWAIANAVTPMRAE

SEQ ID NO: 208763 - protein, 403 aa, unidentified
MRSVLSIDVANGKSDVLLITEYGEVLIEPHEVKHCLNEFNQLKERIDEFKLDDLTIFMESTSTYHLPIQRFFTNNNFKVQVINPILGKNNTRNLRKTKTDIEDCYNLADLFFKNTVKIHTKDMNDIYSSMIELSRQEKHLTESLVRSKNRFKQIIANAFPEYIKCFTASDIFGKTSLNFIKEFPHADIIKEKRIDALANNLYKSCKNGCSYARCLNKARKIKELANNSYPGIGVHSCEVNNLINIVEIISYSDTKLTEVKKDIIKFAKQTPYFNIINSIYGIGETSTAQIIAELGDINRFENIKQLNAFCGLDPTIVQSGKSINYHGPISKRGNRNARKILFITCCSIIRFSVLHNKENGILLYYRKKQAENKHFKECIIACSTKLLRTIFAMCKNNSLYVQK

SEQ ID NO: 208764 - protein, 364 aa, unidentified
MDPALPAESNVGRELQRGRIIMQVVRIGLDLAKYVFEVHGVDGGGNVVMRKTLRRGSVSTFFANLPHCLIGMEASNGAHYWARVLTDLGHEARLISPQFVAPYVKSNKNDRNDAEAICEAVGRPTMRFVPPKSPEQLAIQALHRIRQRLVRSRTRLVNQIRGILAEHGIVIARDIWRLRRALAEITGNASDGLDALVRMLIVEVQVELLELDRRIASCDRRIQELYRTSELCQKLGEIEGIGPVTATALVAAVGDRSCFKNGRQFAAWLGLVPKQRSSGGRNRLFGISKRGDRYLRTLMIHGARAALGKAGGKQDPRSRWLASLRQRRHPNVAAVALANKNARIAWAVLAGNVSYEPALSVQAA

SEQ ID NO: 208765 - protein, 337 aa, unidentified
MIVIGVDVHKQSLTAIAVDEAGRALAESTAPTACELLAWASSLPGERSWAVEDCRQLTRALERALLEAGESLVRVPPKLMAPQRRAGRARGKSDPIDALAVARAALREPRLDHPRPGEQRLRELKLLVDHRDDLIDERRRAQQRLRWHLHELELEPAVPLGALDRGVWLDRLGRRLAGLEQSAQVRIARELVGRCRGLTRTILALDRELQTAAAQTAPALLALPGCGAVSAAKLLGEIGPIERFETDAQLARHAGVAPLEASSGKHRRHRLDRGGNRQLNCALHRIAITQARVHAPARAYLERKQGEGKSRREALRCLKRLLARTVYTTLKSEALLT

SEQ ID NO: 208766 - protein, 338 aa, unidentified
MAIVYVGIDLAKNVFAVHGVNQAGKVELVRPSVPRAKLHELIASLPPCVIGMEACSGAHHWARLFGDLGHTVRLMAPKFVAPYRLSGKRGKNDAADAAAICEAVQRPNMRFVPIKSVDQQARLTLHRTRQGFVEQRTATMNRIRGLLSEFGVVLPLKAATVRREAAASLEALPGWARLAIGDLLDEVRRLDERVVEYDRHLARLAREDERARRLMRLSGVGETTATALLATIGNGHDFRCGRQFAAWLGLVPSQYSSGGKTRLGRITKTGDPYLRTLLILGARAVLALAKTKTDAISRWAAALEQRRGYWKAVVAIAAKNARLAWAVLSKGETFKMPV

SEQ ID NO: 208767 - protein, 338 aa, unidentified
MKTHVGVDLHQRFCYLTAVDASGKLLRQGQVANQAVALQGWLGGLERPRQVVVEASGFWPAFHRAVHRHAERIVMVHPQRVKAIASAKLKNDRVDSSTLAHLSRCDLLPEAWMADEATQQLRLRVRLRINLGRQRARAKNQLQAVLHQEGFIKPVTDLFGKRGRAWLQQIELSAAARMVVETWLREVDRLDAEIAVQRRELERLAAGDARARWLQTVPGIGAYSAMVMLAEMGDVARFSNKQALASYAGLVPMVRESAGRKKRGGITHQGSNTLRWIMLQVAQVACRYSPAVRAWYTQLRQRKPAQVARIAVARKLLCVAWALLRHGVCFDEQVFARS

SEQ ID NO: 208768 - protein, 370 aa, unidentified
MGNRSMFVGLDVHKETIDVSIAEGQRGGDVRHYGVIASDLEPLDKVVRALRAPDRQLHFVYEAGPCGFGIYRHLTKRGEHCVVVSPSMVPKRSGDRVKTDRRDSLALARLHRAGELRPIDVPDDADEAMRDLVRAREDAVVGGTQATYRLKAFLLRQGRRYPGREGWTLPDRRWLTDLSFPTAPHHITLQEYRDTIDETARRIERVTEQLRQLAPTWRWAPLVAALQALRGVSFITAVALVAELGDLTRFGHPRELMAYLGLVPSEYSSGPSVRRGAITKAGNPHARRLLAEAAWAYQGMPRIGRQHAYRQEALPKVVCDIAWKAQLRLTTRFRRLVARGKAKPKVATAIARELTGFIWAIAREVSPTPQ

SEQ ID NO: 208769 - protein, 385 aa, unidentified
MSQPNDLSRSLTSLEQDSTIIAVIEMSQSSWLVAGIVPGIERHPLKKIEPSEEELICLLMRWRAETTKHGRTITRIAVAFEAGRDGFWLARWLRARDIEIYVIHPTSVAVSREHRRAKTDRLDTGFLKRVFIGWLRGEPDHCHMAAIPTLAEEDAKRPNRERERLVGERTRIVNRMKSCLVRFGVRNFKPTLRKAPERLETLQTPEGVPLPPNTLLELRRDMARLRFVMDQIKQVEEARAQRLEQAPQEKSHAMVRLLARVIGVGIETADMLVHEVLARNLRDRRAVARYAGLTGAPDESGSKRREKGLAEAGNARVRRGMIQLAWRFLIFQKDSALAQWYQTRTASVGKKRKTMIVALARKLLIALWRLVTTGEVPAGVVLRAA

SEQ ID NO: 208770 - protein, 312 aa, unidentified
MFTLGFDVAKSHHDVALTNKSGVVKQRWQIPNELLMVTTLLREIKAQHPKLQAGCEATGSYHYTVLQACLQLSIPCRLLNPLTTKQYTRNTIRGRKTDKDDALSIARLVARSEGIVVTSALLNPARDYVRLATKMQQHIHALKLEARYLSERGLPIEPTFMTVTADLEALCKSLRQQALGYVDLNTYELLLSLTGIGPAIAVSLAAEINDIHRFKSAKQLVAYAGLDPRVRQSGTVLHRNTKLTKRGSAELRHSLFMAANIARQHDSQLKAYYQKKRLEGRTYTEATVATARKVCDRVFAVLTRGTPYVKSA

SEQ ID NO: 208771 - protein, 331 aa, unidentified
MVYAGIDVHRKRSQVSLVDGDGKELLNRNVDNGSDAMLEILEDLEPGTPVAFEAAYGWGWLADLLEESELEAHLVHPSACKAIASARLKNDKVDARMLAHLLRTDLLPEAWIAPKEVRDLRVLLRHRASLVRVRTSLKNRIHAVLADEGLKVEGEKLWSDEGQQWLAAARVRDMHRLVVDDCCGMLDALAIPIKRLEADIHRLAKADPRVEALCDLPGVGVLTAMTLVSEIGDIKRFPTARKLCAWAGLTPSVRNSDTKVRHGHITKAGPASVRWVLTEASYHARRFPPFAATFEAMTKRRGKHIAGVAVCRKLLARAFHILKSLEAAQVQ

SEQ ID NO: 208772 - protein, 389 aa, unidentified
MKAIKLYLGLDVHKDSITIAIAPAGRTNEIRLYGTIANDLHALEKALARIRQAHPGARLNVAYEAGPCGFGLARRLQQLDIPCLVAAPSLIPKAPGAPFKTDKRDARSLARLLRAGELTAVYVPEPTDEAIRDLCRARSDAIDDLRRCRLRLKSFLLRHGYRYQGKANWSQAHMRYLRELVLPHPAMKAILEEYLQGIDAAHERVGRLEQSMQTLLPGWRLAPAVAALMAFRGFQQVAAMILVSELGDIHRFAHPRQLMTYLGLVSVEDSSGPRQRLGRISRCGNGHARWLVTECAEHYALAPKVSQELARRQEGQPPPVRALSWKAQNRLHLRFHRLLARRLPRNKAKVAVARELCGFVWALLRTQDCYRQPAGGAARQSSPTGAASV

SEQ ID NO: 208773 - protein, 446 aa, unidentified
MLQETQDRQEIIERVAALDTGKAELVCCVRVPQEGRPGRRLQEVETYRTMTRSLLAMADRLAGLGVTRVVMEATSDYWKPVFYVLEAHGFETWLVNARDVKHLPGRPKTDKLDAVWLCKVAERQMLRPSFVPPPEIRRLRDVTRYRADLVVARTAEKQRAEKLLEDACIKLSVVAADIFGVSGRAMMAALIAGERDPEVLAQLARARMRAKITALEEAFTGHFTDHHAFLLGKMLARVDQIGADIAELDARIEELAAPFISAVQRLDEIHGIGPVGAAAIIAEIGLDMSRFPTAGHLASWAKFAPGVKESAGKKKGRGSTGHGDPCLARILGEAAVGASKTDSFLGERYRRIARRRGKKKAIVAVGRSILVIISLASAVGPRGPFRRPRPGILRQPGQQQPQAAQPRQPARSPRLQSHPRTRRLTADSSAPGQLPRATTVHFRICL

SEQ ID NO: 208774 - protein, 316 aa, unidentified
MNDSTPLVIGIDVAKDTLEVASSASDCWQVSNDPAGQEALRDRLRGERVGLIVLEATGGYEVAAVAVLAQAGLPVVVVNPRQVRQFARSLGRLAKTDAIDAGVLVQFGVHVAPEVRPLPDEQTQLLEALLTRRRQLLGMIQAERNRLLLAVGPVRTDLKQHIAFLVRRLKDIDRELEGRLRDSAVWREREKLLQAVPGVGRQLLLTVCAALPELGRVPSRQLAALVGVAPYNCDSGTLRGRRHCWGGRADVRGVLYMATLAATRCNPVIRAHYQRLLAAGKPKKVALVACMRKLLVIMNAMVRDGEPWNPQLALAR

SEQ ID NO: 208775 - protein, 346 aa, unidentified
MTQRLPQVWAGIDVGKGHHWITVVDADGDPLWNRKVINSEPDILTVFGEVMDTADHVTWALDLVDGPAALLLETLANHGQSPRYVTGSKFAAFKKSFSGQGKSDLKDSYVIAEFARCLRRQTVPVPVPPRITKELTLILAHRNGLSAERTRTINRMRALLTSIFPELERSFDFARSDGPLVLLSGYQTPAAIRRMGESRLTAWLAKRGVRKAATIAEKAVTAAKAQDSATSGEDLAAELVAELAQKITQMNVRLKELEIKIKGIFSQHPQAPIVLSMPGFGELLAAELLAAIGDISRFPSAGRLAVASGMAPVSRDSGSNTGTASVLPSTAGPCNGLSSCPVSPHA

SEQ ID NO: 208776 - protein, 342 aa, unidentified
MDYFAGLDVSVKDTSVCIVDDAGKIVREVKVTSEPHALLAVLNNPAYHFKRIGLEAGPLSQWLFSSLAEAGLPVICVETRQMRAVLKAQINKTDRNDARGIAQMMRAGLYRPVHVKTLRSQKLRMLLVHRKLLQSKSIAIENDLRGTLRNFGLKVGVAGAAKFEARVKELVENLPDLAALVEPLLVVRRVLREQIAVLHRRLLAIVRNDEVCRRLMTTPGVGPVVALTYRATIDVPARFRNSRAVGAVMGLTPCKYQSGQSDRTGAISKCGDEMLRVMLYEAAQILLMRSTKWSWLKAWAMQIARRRGMKKAIVALARRLAVIMHRIWVDGTEFRWTKAAAA

SEQ ID NO: 208777 - protein, 483 aa, unidentified
MSTQPKQRKGAAKKKASAGKGKRRRKGMTLEDRPLLEPNAAGIDIGAREIFVAVPADRDENPVRVFPTFTEDLEEMARWLVSCGVTTVAMESTGVYWIPLYDILEQHGVRPCLVNARNMKNVPGRRTDWHECQWLQFLHSVGLLRAAFRPDGEVSAVRSLMRHRTDLVQTAAQHIQHMQKSLTQMNLQIHHVISEITGVTGLAIVDAILAGERDPAVLAKLRDHRIHASGEIVQKSLVGNWKHEHLFTLKQSRQIYQQYQDSITACDEEIEKLVVAFEPRVDTEEHPLPPDRKGKQRKRKKRGVIPGTNPKTGFDMRTEAYKLFGVDVTQIPGLMMTPLRLFSEVGRDMSKWPTADHFASWLGLCPDNDISGGRVLWKGMRGTRNQAGQLFRMAAFGLHHELSPMGDHLRRMKSKIGPAAAQTATAHKIAIIFYTMVKKQVEYDASIWAQKDAEREKRFEAKLKRQAQARGYKLVKIEETIAA

SEQ ID NO: 208778 - protein, 443 aa, unidentified
MSPFKNTFELTHPNAAGIDIGASSHFVAVPPDRDEQPVREFPSFTEDLGALADWLTVCGIDTVAMESTGVYWMPLFELLESRGFTVYLVNARHVKNVSGRKSDVQDCQWLQQLMSFGLLSGAFRPPSDICALRAVARLREMLLRDQARHIQHIQKALLLMNLLLTEVISDVMGETGQKIIRAILAGERDGQVLAKHRNNHIKASEEDIVKALQGSWREEHLFALKQAVALYDAYAVQLLECDQQLEKMLKDLARNDRKADKPKRRGGKSKNAPNFDARTLLLQMCGVDLTRIDGIDVTTAFKVLAEIGADLSKFKNAKHFASWLGLCPGTKISGGKIISAATRPNTNRAAQALKMAAVNLRNSQSALGAYYRRLCGRMDKGKAITACAHKLARLIYALLTKGEDYVDQGQEHYEEKYRHRVIKNLTKRAEQLGFQLIPVPEGV

SEQ ID NO: 208779 - protein, 414 aa, unidentified
MELVYTHCAGLDVHKRTVVATLIVPAPTSGWHKETQTFGTMTADLLTLSDWLQSHAVTHVAMESTGEYWRPVFNLLEANFEVLLVNAQHMHQVPGRKTDVKDSEWLADLLRHGLVRGSFIPPAPQRDLRDLTRHRSNFVRERTNLVNRVHKTLEGANIKLGSVATDIMGVSGRAMLEALIAGHSDPGTMSELAKGRLRTKREELTKALEGRVKPHHRFILTELLCQIDGLDETIEHFEEQIAEHCHPFEAVVVHLDTISGIGRDLAQALLAEIGTDMSRFGNARRLSAWAGVAPGNNESGGKRRSSKTRKGNRVVKSLLVQAAWAATRTKGTYLSALYHRLAGRRGKKKAIVAVAHAILVIVFHIIERKEPYRELGGDYFDKQDPETTAKRLAKRIAKLGYQVTLQPQSTPIPA

SEQ ID NO: 208780 - protein, 391 aa, unidentified
MINIGIDVGKFKHCATVLDDSTGEVLIKPFFLTNNRKGFDLLYSKTKQFIHRKHSVGMEDTGHYMINLTNYLLDKKFTVKYINPRATCLRRKGLGISAKNDRKDALLIAEMLSEKRFWRSISVRSIENSKFRDITRLYHQLQEQQNQDMNRLQRALDIVFPEVNSLSWTRYSKAYMKFLSTYPSASSIALEDIRILRKALKTEGKGRQSKVTAEEIRELAKNSVGEDNISIDLEVTSIIAIINTREEQIRMLEKKIEEFSHKLNSPIISIPGISHISGMTILAEIGDINQFQNTGNLISFAGMDPLVYQSGKYDAAHMPISKHGSRYMRKALYQAVFTVCKYSPTFHDYYTKKRNQGKSHRCAQGHCARKLLRVIYKLLSTNSLYDQNHIQ

SEQ ID NO: 208781 - protein, 342 aa, unidentified
MQTITTIGLDIAKSVFQVHGVDAEGNVILRRQLKRRYVVAFFQKLRPCLGIEACASSHHWSRELQAHGHTVRLMPPAYVKPYVKRHKNDATDAEAICEAVTRPNMRFVPTKTPEQQSCLTLHRTRHLFIRQQTSVINAIRAHLAEFGIVAPVGRNGVEQLLGVVADGSDRRLPEIARACVAVLGTQLQSLKAQILKFDRMIMAWHRSSEVSRRLDDIPGVGPALATALVASIADPNAFRSGRDFSAWIGLVPKQNSSGGKDKLGSISKRGDRYLRSLFTTGALAVIRYAKIHGTKHRPWLTALLARRPTKVAAIALANKIARMAWAIMAKGERYKEPAALAA

SEQ ID NO: 208782 - protein, 397 aa, unidentified
MALVWAGVDCGKAHHHCVVIDGDGGRLLSRRVANDEPELLALIRDVTALAGPVTWAVDLPDGGAALLIGLLVSHDQAVLYLPGRAVNQAAGTYRGEGKTDARDAAVIADQARMRRDLAPLRPGDEITVELKLLTARRADLVADRTRAINRLRGLLTSIFPALDRALTELTATGPLVLLTGYQTPAAIRAVGPAGLEAWLRERKVRNAGKLTALATGAAARQQAVLPGEQLTASIIATLAGEVMTLNQQIKDTEQLIEGRFHQHPLAAVITSMPGIGTLLGADFLTATGGDLDFFGTPDRLAAFAGLAPAPWDSGRIRGNLHRPKRYHRGLNRALYYSAMISITCCPESRRFYDRKRAEGKKHTQAVLALARRRVNVLWALIRDNRTYQATPPLLAAA

SEQ ID NO: 208783 - protein, 424 aa, unidentified
MNCTQNERINQVSEQTLVIGVDIASELNYARAFNWRGIEKGKVFKFFNNLEGFQAFNEWAHQVISANKLTNLIVAAEPTGHYWFGLADYLKDEKLKLVLVNPFHVNRAKELDDNHPSKTDAKDPKTIAKLVIEGRYMEPYIPEGVYADLRIMYNCRQKVTKAMISLENQLKRWFRIYFPEYLSVFGNLSGQGSMAVLEKAVLPEDIISLGVDGINKLWRERKLRAVGMKRAESLYEAAVKSIGRREGSVGGRAEFRMLWEDYCHKMEQMEKLNIELESLLHKVPQAEEVLKMKGIGVVSVAGFFAEVGDLRRFESPKQIQKLAGLAIRENSSGKHKGQTTISKRGRARLRAVLFNAAIALVGRNGAFKSIHEYYIGRKANPLKKKQSIVAVSCKLIRIIYAICRHKEAYDEAKMLRDIRREQLA

SEQ ID NO: 208784 - protein, 342 aa, unidentified
MLIVGCDYHPSVQQIAMVDTETGDYSEHRLKHSDGEAEKFYRDLKLRAVKVRVGLEATGHRRWFERLLMELEFEVWIGDAAQIAAMRVRKQKTDRQDVQFLLKLMMEDRFPRVWMSSLEDRDLQQLLWHRHRVVQMRTRVLNQLQAIAMNEGIQRKGGLRSAQGRKRLEQLPLGPWATRRRGDLLVLLDQLNKSVDELTAAVQQEAEKRPEVRLLMTHPGVGPVTALAFVLIVGYPERFQCGKQIGSYVGLIPAESSSGVHRRLGHISKQGNTLLRFLLVEAAQAAARFDPEWRSKFLRLAMRRERRIAKVAMARKLAVSLYWMWRQQRSFQPALEVGSYAG

SEQ ID NO: 208785 - protein, 454 aa, unidentified
MSKLRKPILPRQPKDQPIQPQPPKLDALAQINHHAAGLDIGDAEIYAAVPESAADPAVRVFRTFTTDLQGLADWLATCHVDTVAMESTGVYWIPIYELLEERGFQVYLVNARQLKNVSGKKTDILDCQWIQQLHTYGLLQPSFRPPEDICALRALIRHRGNLLQSCTAEIQHVQKALQQMNLKLTNVLSDITGLTGLAIIRDIVAGERDPHKLATHRDPHCRKSEAEIAASLTGNYKREHLFALKQALAAHDFYQEQLAACDAETESLYHTLDAQVDAMAHPLPPPRRPHSRRGNEPRFDLRTELYQLAGVDLTTVDGLDVLTVQAVLTETGVDMSRWRTSKHFASWLCLCPENAKTGGKIIKRGTKRSANRAALALRLAARSLHHSDSALGAFYRRMCSKLGKPQAVTATAHKLARIIYAMLQSKTPYKDPGADHLEAQVQERKVKQLQRQAK

SEQ ID NO: 208786 - protein, 438 aa, unidentified
MSNKVIFNLDDLFISVGIDVGADFSWMSIALPNQQFVGKPYKILHNSIDSLTTAVSKIKEAEELYSLESRIFLESTGIYHYPLFCYLRDKGFNCSVINPIITKNSTNINIRKVHNDRFDSKKAALVGLKPDLKVSLIPSDLALNCRNLCREYYDLMDNRSAYVNKLQGELRMAFPQYLGIFSKVTINTSLTLLETYTSPSAFLEADKQEIIDIIKSTARFGLTYAQNKYNALIQAATDANQFGYIIDSNIKRIRLYISFIRKYDEEINIILESLHELVDANEAADFVKQIHLIETFKGAGFLSAVSIMGEIGDFSAFSKPKQLFAYFGLDPAVKQSGKFEGTKVRMSKRGSAIARRVIHTLTLQSISISRNGEAKNPVLREYYLKKCDSKPKLVAMGAVSHKVCNMIFAILRDNKPFEIITPQEHIKQYNASKCDMAA

SEQ ID NO: 208787 - protein, 392 aa, unidentified
MFYIGIDIAKRSHQAAVTDVSGNIIVKPFNFKNTAAGFTQFLSVLETNSVSKDNCVIDLESTGHYWYPLYFFLVEQKFSVKVFNPIQTAAFREITIRKVKNDNLDSIMIADFTRFGRYSETYIPSENMLALKNLSRFRLSVCDICGSLKKRTIVLLDLVFPEYSTIFCDIFGTTSKQLLEKYSTPDEFSEISTTKLANFILKASRGRNGREKAELIKTAAQNSIGISYAIDTFSFEIKQLIEQIEFMENQLSEIDAEMAKLLAESEYSVITTISGVGPTLGSIIVSEIGDIERFETSSKLVAYAGLDASVKQSGEFNSSRNKISKRGSPYLRRALWMAAFMSLQCDPALYDYYSRLRARGKSHRLATTAVARKLCIIVWAIMKSKQPYSPHI

SEQ ID NO: 208788 - protein, 262 aa, unidentified
MTVVTVGIDLAKNVFAVHGVNAAGKAVLVKPLVRRAKLLELIATLPACLIGIEACTGAHFWAREFQKMGHTVRIMAPQLVSPYRMGGRHGKNDAADAAAICEAVTRPNMRFVPIKSVEQQGQLFVHRAHQGYVSERTALINRIRGLLSELGIVLPQAFKAFLSGVAQVLEDLPGYCNQVIGDLLNELYHIEEKIKNSEKLIQQLARDNSAAQLLMQFRGIGPMTATAIVASIGNGHDFKNGRQFSAWLGLTPRQQSSGGKHG

SEQ ID NO: 208789 - protein, 311 aa, unidentified
MDNTIGIDVSKDTLDVHRLADGQYKQFRNGKSGHAQLIKWLGMQPDPLVIFEATGAYHRQLERALGTHFVPFVKVNPKQARRFAQASGKLAKTDRVDCEMLAKMGAALQLVPKPLTAENLYDLRELLSARRALIKDRTAAKARKATVVNALVKQLLAKRLRQIEGDIEKIDALMLDVAHQDHRMSERLDILFSIPGIGMVTALMILVDMPEIGALNNKQVASLAGLAPMSQSSGKWQGKARIQGGRPNLRNAIFMPALVAIRYNVDLKAKYEQLVAAGKEKKVAITAVMRKLLVLANALLRDHRKWTVKAA

SEQ ID NO: 208790 - protein, 347 aa, unidentified
MRFYTNQHKYYCGINPHTRKMYICILDEKGEIREHRNMKTDRDAFLKAIAPFREDIVVAVECIFTWYWVADLCHKEGIPFVLGHALYIKAIHGGKAKNDKIDSQKIAVLLRGGMMPMVYVYPAKMRATRDLMRRRNHLMRKRSELYAHIQNTNSQYNLPDSFGPISRHQNRNGIAGQFEHPSVQKSIAVDIEMIRTYDGILSQLEKSIIKLANNHDPVSYALLQTIHGVGKIIALIILYEIENIRRFASVQDFVSYSRLVKCAKESNGKKCGSGGSKIGNAHLKWAFSEAAIFFLKGNDPAKKYLDRLTRKHGKSKALSILAHKLGRAVYFMLKNKEAFDQNKLLNL

SEQ ID NO: 208791 - protein, 422 aa, unidentified
MNESKQFKATIGLDWADQKHDLWIRPANGSKSEHLRLEQSPEALHEWAAKLRKRFDTGQVAIGVETSRGPVISALMSYDFIVLFPINPKALKDYRAAFSVSGAKNDRTDAQLIEEFIRLHSEKLKPLQPDTELTRKLSGFVQDRRHLVDERTRIVNQTHAKLKTYYPLAETLVGSEMNSLMAAEFLSRWPDLESLLAAQAPTLRAFFYKHNSRSAKKMEQRLEAIKTAKALTTDPGIIEPARELVLALAGMLKCLHKSVARLEKTIELAMDQHPDAPIFRSLPGAGPALAPRLLVAFGTQRDRFQSAQEVAQFYGVAPVVIQSGNSEVVRLRRRCPKFGRQTFHENASCVSKTEPWGRTYYEQQRKKHDDKHHQACRALAYKLIRIYFSCWKTRTEYKSNTYLNALQKHGSPLHNKLKRIGE

SEQ ID NO: 208792 - protein, 347 aa, unidentified
MRFYNNSHPYYCGIDLHARLLYVCIIDSKGEVVVHKKIGASKDDLLLILEPYIGNVIVGVECMHCWYWVSDWCAELGIDFVLGHALYMKAIHGGKTKNDKVDSFKIASLLRGGNFPIAYDYPSEMRAARDLLRRRMKIVRHGAMLKGHVVNTNSQYNLPATELNLKNISARQKLREQYQDPIVQRNIDLDMALLDCYAKELAQVEWFIEKQAKNHNPVYLELLKTVPGIGKILSLTILYEIGDISRFESVQKFASYSRLVKCKAESAGKTYGTNGNKIGNAHLKWAFSEAAVLYLRGNDKARNYLNRLQKRMSKAKDLSALAHKLGRGVYFMLKNKTVFDELRFLKG

SEQ ID NO: 208793 - protein, 356 aa, unidentified
MSYDVKYIGMDVHKEAIVIAVLNESGKLVMESVIETKASSILQFLHGLRGELHVTWEEGTWAAWLYDLLQPQVQHIVVCNPGRNALLKEGSKSDKVDARKLAELLRTGMLRPVYHGEHGLRTLRELGRSYQTISKDLTRVMNRLKALYRGWGIPCAGTQVYAARSREEWLSKIPQAGVRRRAELLYQQLDGLQILRRNVRPEFLAESRKHKAAKLLRQIPCIGPIRAARLIALMQTPHRFRSKRQLWTYSGLGIETHDSAQFRFVSGQLQRSKKPQQLRGLNRNHNHEMKEIFKSAATRASCGRGPFHDFYAGLLAKGMKPEMARLTLARKIAAITLTLWKKEERFDAEQLKTQAA

SEQ ID NO: 208794 - protein, 392 aa, unidentified
MYIVGIDIGKNHHEASIVSPEGKQIGRSLRFATTHKGADSLMRFIFKNIGNSPCVFGMEATGHYWYPIYSFLKAKGYTIYVINPIQSDSLRKMYIRQTKNDSIDSFLIAEVIRFGQFGTTSMADENILAMRQLCRYRDSVISSRTEIKLRIGTIMEQIFPEYKKQFSSLWVSTSMGILEKYLTPENIENTPIDELFEIIKDKSHNRLTKAKAISIKEAAADTFGIKIAQDAFSFQLKQLIDRMNFLDKQIEALDIEIMKYYEQFDCYLHTIPGIGIIGAATILAEIGDISRFKNSSALVAFAGIDPTVRQSGEFNSTHNHMSKRGSPYLRHAIFLAATTCSFHNSPLNAYYKKKRDQGKHHLTATGAVARKLTTIIYAVLRDSKPYEPKKFC

SEQ ID NO: 208795 - protein, 326 aa, unidentified
MTNSSEAIFVGIDVSKATLEVALDDSSKTQCLGNDEEGVRALLAKLNAVADRVALVLLEATGGLEQRAAVALCTAGFAVMVVNPRQAHDFAKALGYLSKTDSTDARALSHFARTLHSSERRERLLYKLPTPEQEVLLALVTRRTQLIGMRVAEGNRLETAHASQRKSIQALMKVLDRQVEQIDDDVGRRLKDHFKDKLALLKGLKGVGVGTQAVLMSALPELGCLTQREISKLVGVAPLNCDSGKFKGKRTTWGGRANVRSALYMATLSASRYDPVIKTFYLRLVAAGKPKKVALTACMHKLLTIINAVIKSGKPWQAGYPQSAHA

SEQ ID NO: 208796 - protein, 377 aa, unidentified
MHSENIAAYIGLDVHKETLAVAIAAPERLGEVRYYGTINNEAQAVRRLFQKLQGLYGNILSCYEAGPCGFGLYHQLTAMNIKCQVIAPSRIPKSPTDRIKNDHRDAISLARLLRAGELTPVWIPDLTHEAMRDLIRARAAAKRDSRVARQRILSMLLRTDKRYAGKHWTGKHRTWLANQSFSQPSQQIAFQHYCQSLEQIEDRILQLDQEISRLLPEWSLCNLVCQLQALKGVGQLIAITLVAEQGDFSRFSNPKQLMAFLGLVPGEYSSGNSIRPRGITKVGNSELRRLLYEAAWSYRTPAKVGAWLIYYRPDSVTQYSKDIAWKAQQRLCSRYRTLTAKGKKSQVAITAVARELTGFMWDIALAAQSSFSQQKQN

SEQ ID NO: 208797 - protein, 380 aa, unidentified
MRNVRFIGLDVHAETIAVAVAEPGGEVRSLGTIPNRPEPVARLIRKLGKPEQLRVCYEAGPTGYVLYWQLTELGVKCEVIAPTLVPVKAGDRVKTDRRDAEKLARCYRAGDLTPVRVPDAAHEALRDLVRARLAARRDQLRARNRLGKFLLRHGRRAPEGATAWSTKHLAWVKRQTFEQAAQQATVVDYLHEVEHAADRIVRLERSIDAAIETLPQSLHAVIDALQSLRGIAKISAVSIMAEVGELSRFESARQLMGYSGAVSREHSSGERIRRGSISKTGNAHLRRIVIEAAWAYRHRPGLGAALKARQRDQSEDIKAIAWKAQHRLHGRYAKLLAKGKPKQQVITAVGRELLGFIWAIGVAAERSHADAPRRALKRAA

SEQ ID NO: 208798 - protein, 330 aa, unidentified
MKFRHFLGIDVSKKVLDVVCRTNGQHLQIANTSEGFEQLSTWLQQNNLLSRQCLFVFEHTGLYSKPFEQFCSQHGWYYCAVPGLAIKRSLGIARGKSDRVDASRIAQYGYEKKEQLAPTPPADQQLEKLKTLVNYRDRLVSQKAGFVATLKEQQCFLQLDQDDILLASQRAMVVCLQQQIAQIQQAIMQIISSDQALSRNYDLLTSITAIGFVNAVYALVYTDNFTRFANARKFASYCGTAPFEDTSGSSRKGKTRVSHLANRKLKSLLDQAAKCAINYDKELNAYYQRRILMGKSKMSTINIVRNKLIYRMFAVIKRQDPFKKNYLAAA

SEQ ID NO: 208799 - protein, 371 aa, unidentified
MDESSKTLYVGLDVHKDSIAVAYAPEDRGAEVLSLGAIGTRQCDIDKLIRKLQAKGATLVFVYEAGPCGYGLYRYLTGKGLACHVVAPSLIPRKPGDRVKTDRRDAITLARLMRSGDLSSIYVPGIEDEALRDLSRGRDDAMQDLKRSKRRLKSFLLRQDIRYEGRASWNAAHLRWLSAVVCPTPPQQIVFQEYVRAVTEQQERLQRLERELHEAVKGWRLYPVVEAIQALRGVELTGAVILMTELGDLTRFDTPRQLMSYLGLTPSEYSSGARRRQGGITKAGNSHARRALVEGAWAYRYPAKVSRHLQLRLEKLPAEVQAIGWKAQVRLCKRYRQLTARGKHVNQVVVAIAREMAAFAWAIARLVPLAS
